United States Patent Application Publication US 2020/0163878 A1 - sequence listing, part 52

SEQ ID NO: 196636 - RNA, 1701 nt, Artificial Sequence
  derived and/or modified CDS sequence (opt5) from hemagglutinin__InfluenzaA__ADF27479
augaaggccauccuggugguccuccuguacaccuucgcuacagccaacgcggacacgcuuugcauuggcuaucacgcuaauaacagcaccgauacaguugacaccgugcuggagaaaaaugugacagucacccauuccgugaaccuccuggaagauaagcacaaugggaaacuuuguaagcugagaggaguugcuccccuccaucugggcaaaugcaacaucgccggguggauucugggaaauccugagugugaaucucucagcacagccuccucuuggagcuacaucguggagaccuccucuagcgacaacggcacgugcuauccgggggauuuuauugacuacgaagaacugcgggagcagcuuuccagcgucucuuccuucgaacgcuuugagaucuuccccaagaccagcucuuggccuaaucacgauuccaacaagggagugacagccgcuuguccccaugccggcgcgaaaucuuuuuauaagaaucugaucuggcucguuaaaaagggcaacagcuacccuaaacuguccaagagcuauauuaaugacaaggggaaagaagugcuuguccuguggggaauccaccaccccuccaccucugccgaucaacagagccucuaccagaacgcugacgccuacguguucgugggcacauccagauauagcaagaaauuuaagccugagauugcuauccggccgaaaguccgcgaucaggaggggagaaugaauuacuauuggacccugguugaacccggagacaagauuacguucgaggccacaggcaaccugguggugccucgguacgcguuugccauggaacgcaacgcugggucuggaaucauuaucuccgauacccccguccaugacugcaauacaaccugucaaaccccuaaaggcgccaucaacacaagccuccccuuccagaauauucacccgaucacgauuggcaagugcccuaaguaugugaaaucuaccaagcugagacuugcuacagggcugcggaacguucccagcauccauucccgcggacucuuuggcgccauugccggguucaucgagggaggcuggaccgggaugguggacggaugguacggcuaucaccaccagaaugaacagggcucuggguacgcugcggaucugaaaagcacacaaaacgccaucgacaagauuaccaauaaagucaacuccgugaucgagaagaugaauacgcaguuuacagcuguuggaaaggaguucaaccaucuugagaaaagaauugagaaucugaacaagaaaguggaugacggcuuccucgauaucuggaccuacaaugccgaacugcugguccuccuggagaacgaacggacccuugacuaucacgauagcaaugugaagaaccuguacgagaaaguccgcucucagcucaagaacaaugccaaggagauugggaacggauguuuugaguucuaucauaaaugcgacaauacauguauggaauccgugaagaacggcaccuacgauuauccuaaauacagcgaagaggcuaagcugaauagagaagagaucgacgggguuaaacuugagucuacacggaucuaucagauucuggccaucuacuccacgguggcgagcucccucguccuggugguuucucugggcgcuauuagcuuuuggaugugcuccaacggaucucuccaaugccgcaucuguauuuga

SEQ ID NO: 196637 - RNA, 1701 nt, Artificial Sequence
  derived and/or modified CDS sequence (opt5) from hemagglutinin__InfluenzaA__ADF27489
augaaggccauccuggugguccuccuguacaccuucgcuacagccaacgcggacacgcuuugcauuggcuaucacgcuaauaacagcaccgauacaguugacaccgugcuggagaaaaaugugacagucacccauuccgugaaccuccuggaauacaagcacaaugggaaacuuuguaagcugagaggaguugcuccccuccaucugggcaaaugcaacaucgccggguggauucugggaaauccugagugugaaucucucagcacagccuccucuuggagcuauaucguggagaccuccucuagcgauaacggcacgugcuacccgggggacuuuauugauuaugaagaacugcgggagcagcuuuccagcgucucuuccuucgaacgcuuugagaucuuccccaagaccagcucuuggccuaaucacgacuccaacaagggagugacagccgcuuguccccaugccggcgcgaaaucuuuuuacaagaaucugaucuggcucguuaaaaagggcaacagcuauccuaaacuguccaagagcuacauuaaugauaaggggaaagaagugcuuguccuguggggaauccaccaccccuccaccucugccgaccaacagagccucuaccagaacgcugaugccuauguguucgugggcacauccagauacagcaagaaauuuaagccugagauugcuauccggccgaaaguccgcgaccaggaggggagaaugaauuauuacuggacccugguugaacccggagauaagauuacguucgaggccacaggcaaccugguggugccucgguaugcguuugccauggaacgcaacgcugggucuggaaucauuaucuccgacacccccguccaugauugcaauacaaccugucaaaccccuaaaggcgccaucaacacaagccuccccuuccagaauauucacccgaucacgauuggcgagugcccuaaguacgugaagucuaccaaacugagacuugcuacagggcugcggaacguucccagcauccagucccgcggacucuuuggcgccauugccggguucaucgaaggaggcuggaccgggaugguggacggaugguauggcuaccaucaccagaaugagcaaggcucuggguacgcugcggaccuuaagagcacacagaacgccaucgaugagauuaccaauaaagucaacuccgugaucgaaaagaugaauacgcaguuuacagcuguuggaaaagaguucaaccaccuggaaaagagaauugagaaucugaacaagaaaguggacgauggcuuccucgacaucuggaccuauaaugccgaacugcugguccuccuggagaacgagcggacccuugauuaccaugacagcaaugugaagaaccuguaugaaaaaguccgcucucagcucaagaacaaugccaaagagauugggaacggauguuuugaguucuaccacaagugcgauaauacauguauggaguccgugaagaacggcaccuaugacuacccuaaauauagcgaagaggcuaagcugaauagagaggaaaucgaugggguuaaacuugagucuacacggaucuaccaaauucuggccaucuacuccacgguggcgagcucccucguccuggugguuucucugggcgcuauuagcuuuuggaugugcuccaacggaucucuccagugccgcaucuguauuuga

SEQ ID NO: 196638 - RNA, 1701 nt, Artificial Sequence; identical to SEQ ID NO: 195905
  derived and/or modified CDS sequence (opt5) from hemagglutinin__InfluenzaA__ADF27499

SEQ ID NO: 196639 - RNA, 1701 nt, Artificial Sequence; identical to SEQ ID NO: 194741
  derived and/or modified CDS sequence (opt5) from hemagglutinin__InfluenzaA__ADF27509

SEQ ID NO: 196640 - RNA, 1701 nt, Artificial Sequence; identical to SEQ ID NO: 196338
  derived and/or modified CDS sequence (opt5) from hemagglutinin__InfluenzaA__ADF27529

SEQ ID NO: 196641 - RNA, 1701 nt, Artificial Sequence; identical to SEQ ID NO: 195913
  derived and/or modified CDS sequence (opt5) from hemagglutinin__InfluenzaA__ADF27539

SEQ ID NO: 196642 - RNA, 1701 nt, Artificial Sequence; identical to SEQ ID NO: 195913
  derived and/or modified CDS sequence (opt5) from hemagglutinin__InfluenzaA__ADF27549

SEQ ID NO: 196643 - RNA, 1701 nt, Artificial Sequence; identical to SEQ ID NO: 194741
  derived and/or modified CDS sequence (opt5) from hemagglutinin__InfluenzaA__ADF27559

SEQ ID NO: 196644 - RNA, 1701 nt, Artificial Sequence
  derived and/or modified CDS sequence (opt5) from hemagglutinin__InfluenzaA__ADF27569
augaaggccauccuggugguccuccuguacaccuucgcuacagccaacgcggacacgcuuugcauuggcuaucacgcuaauaacagcaccgauacaguugacaccgugcuggagaaaaaugugacagucacccauuccgugaaccuccuggaagauaagcacaaugggaaacuuuguaagcugagaggaguugcuccccuccaucugggcaaaugcaacaucgccggguggauucugggaaauccugagugugaaucucucagcacagccuccucuuggagcuacaucguggagaccuccucuagcgacaacggcacgugcuauccgggggauuuuauugacuacgaagaacugcgggagcagcuuuccagcgucucuuccuucgaacgcuuugagaucuuccccaagaccagcucuuggccuaaucacgauuccaacaagggagugacagccgcuuguccccaugccggcgcgaaaucuuuuuauaagaaucugaucuggcucguuaaaaagggcaacagcuacccuaaacuguccaagagcuauauuaaugacaaggggaaagaagugcuuguccuguggggaauccaccaccccuccaccucugccgaucaacagagccucuaccagaacgcugacgccuacguguucgugggcacauccagauauagcaagaaauuuaagccugagauugcuauccggccgaaaguccgcgaucaggaggggagaguuaauuacuauuggacccugguggaacccggagacaagauuacguucgaggccacaggcaaccugguggucccucgguacgcguuugccauggaacgcaacgcugggucuggaaucauuaucuccgauacccccgugcaugacugcaauacaaccugucaaaccccuaaaggcgccaucaacacaagccuccccuuccagaauauucacccgaucacgauuggcaagugcccuaaguauguuaaaucuaccaagcugagacuugcuacagggcugcggaacgugcccagcauccagucccgcggacucuuuggcgccauugccggguucaucgagggaggcuggaccgggauggucgacggaugguacggcuaucaucaccagaaugaacaaggcucuggguacgcugcggaucugaaaagcacacagaacgccaucgacaagauuaccaauaaagugaacuccguuaucgagaagaugaauacgcaguuuacagcugugggaaaggaguucaaccaccuugagaaaagaauugagaaucugaacaagaaagucgaugacggcuuccucgauaucuggaccuacaaugccgaacugcuggugcuccuggagaacgaacggacccuugacuaucaugauagcaaugucaagaaccuguacgagaaagugcgcucucagcucaagaacaaugccaaggagauugggaacggauguuuugaguucuaucacaaaugcgacaauacauguauggaauccguuaagaacggcaccuacgauuauccuaaauacagcgaagaggcuaagcugaauagagaagagaucgacggggugaaacuugagucuacacggaucuaucaaauucuggccaucuacuccacggucgcgagcucccucgugcugguugugucucugggcgcuauuagcuuuuggaugugcuccaacggaucucuccagugccgcaucuguauuuga

SEQ ID NO: 196645 - RNA, 1701 nt, Artificial Sequence; identical to SEQ ID NO: 195913
  derived and/or modified CDS sequence (opt5) from hemagglutinin__InfluenzaA__ADF27579

SEQ ID NO: 196646 - RNA, 1701 nt, Artificial Sequence
  derived and/or modified CDS sequence (opt5) from hemagglutinin__InfluenzaA__ADF27589
augaaggccauccuggugguccuccuguacaccuucgcuacagccaacgcggacacgcuuugcauuggcuaucacgcuaauaacagcaccgauacaguugacaccgugcuggagaagaaugugacagucacccauuccgugaaccuccuggaagauaagcacaaugggaaacuuuguaagcugagaggaguugcuccccuccaucugggcaaaugcaacaucgccggguggauucugggaaauccugagugugaaucucucagcacagccuccucuuggagcuacaucguggagaccuccucuagcgacaacggcacgugcuauccgggggauuuuauugacuacgaagaacugcgggagcagcuuuccagcgucucuuccuucgaacgcuuugagaucuuccccaagaccagcucuuggccuaaucacgauuccaacaagggagugacagccgcuuguccccaugccggcgcgaaaucuuuuuauaagaaucugaucuggcucguuaaaaagggcaacagcuacccuaaacuguccaagagcuauauuaaugacaaggggaaagaagugcuuguccuguggggaauccaccaccccuccaccucugccgaucaacagagccucuaccagaacgcugacgccuacguguucgugggcacauccagauauagcaagaaauuuaagccugagauugcuauccggccgaaaguccgcgaucaggaggggagaaugaauuacuauuggacccugguugaacccggagacaagauuacguucgaggccacaggcaaccugguggugccucgguacgcguuugccauggaacgcaacgcugggucuggaaucauuaucuccgauaccagcguccaugacugcaauacaaccugucaaacccccaaaggcgccaucaacacaucucucccuuuccagaauauucaccccaucacgauuggcaagugcccgaaguaugugaaaagcaccaagcugagacuugcuacagggcugcggaacguuccuuccauccagucucgcggacucuuuggcgccauugccggguucaucgagggaggcuggaccgggaugguggacggaugguacggcuaucaucaccagaaugaacaaggcagcggguacgcugcggaucugaaauccacacagaacgccaucgacgagauuaccaauaaggucaacagcgugaucgagaaaaugaauacgcaguuuacagcuguuggaaaggaguucaaccaccuugagaagagaauugaaaaucugaacaaaaagguggaugacggcuuccucgauaucuggaccuacaaugccgagcugcugguccuccuggaaaacgagcggacccuugacuaucaugauucuaaugugaaaaaccuguacgagaagguccgcucccagcucaaaaacaaugccaaggaaauugggaacggauguuuugaguucuaucacaagugcgacaauacauguauggaaagcgugaaaaacggcaccuacgauuaucccaaguacucugaggaagcuaaacugaauagagaggagaucgacgggguuaaacuugaauccacacggaucuaucaaauucuggccaucuacagcacgguggcguccucucucguccuggugguuagccugggcgcuauuuccuuuuggaugugcucuaacggaagccuccagugccgcaucuguauuuga

SEQ ID NO: 196647 - RNA, 1701 nt, Artificial Sequence
  derived and/or modified CDS sequence (opt5) from hemagglutinin__InfluenzaA__ADF27599
augaaggccauccuggugguccuccuguacaccuucgcuacagccaacgcggacacgcuuugcauuggcuaucacgcuaauaacagcaccgauacaguugacaccgugcuggagaagaaugugacagucacccauuccgugaaccuccuggaagauaagcacaaugggaaacuuuguaagcugagaggaguugcuccccuccaucugggcaaaugcaacaucgccggguggauucugggaaauccugagugugaaucucucagcacagccuccucuuggagcuacaucguggagaccuccucuagcgacaacggcacgugcuauccgggggauuuuauugacuacgaagaacugcgggagcagcuuuccagcgucucuuccuucgaacgcuuugagaucuuccccaagaccagcucuuggccuaaucacgauuccaacaagggagugacagccgcuuguccccaugccggcgcgaaaucuuuuuauaagaaucugaucuggcucguuaaaaagggcaacagcuacccuaaacuguccaagagcuauauuaaugacaaggggaaagaagugcuuguccuguggggaauccaccaccccuccaccucugccgaucaacagagccucuaccagaacgcugacgccuacguguucgugggcacauccagauauagcaagaaauuuaagccugagauugcuauccggccgaaaguccgcgaucaggaggggagaaugaauuacuauuggacccugguugaacccggagacaagauuacguucgaggccacaggcaaccugguggugccucgguacgcguuuaccauggaacgcaacgccgggucuggaaucauuaucuccgauacacccguccaugacugcaauaccaccugucaaacaccuaaaggcgcuaucaacacgagccuccccuuccagaauauucacccgaucaccauuggcaagugcccuaaguaugugaaaucuacaaagcugagacuugccaccgggcugcggaacguucccagcauccagucccgcggacucuuuggcgcuauugccggguucaucgagggaggcuggacagggaugguggacggaugguacggcuaucaucaccagaaugaacaaggcucuggguacgccgcugaucugaaaagcacccagaacgcgaucgacgagauuacgaauaaggucaacuccgugaucgagaaaaugaauacacaguuuaccgccguuggaaaggaguucaaccaccuugagaagagaauugaaaaucugaacaaaaagguggaugacggcuuccucgauaucuggaccuacaaugcugagcugcugguccuccuggaaaacgagcggacacuugacuaucaugauagcaaugugaaaaaccuguacgagaagguccgcucucagcucaaauccaacgccaaggaaauugggaauggauguuuugaguucuaucacaagugcgacaacaccuguauggaaagcgugaaaaauggcacauacgauuauccuaaguacucugaggaagccaaacugaacagagaggagaucgacgggguuaaacuugaauccacgcggaucuaucaaauucuggcuaucuacagcaccguggccuccucucucguccuggugguuagccugggcgcgauuuccuuuuggaugugcucuaauggaagccuccagugccgcaucuguauuuga

SEQ ID NO: 196648 - RNA, 1701 nt, Artificial Sequence
  derived and/or modified CDS sequence (opt5) from hemagglutinin__InfluenzaA__ADF27609
augaaggccauccuggugguccuccuguacaccuucgcuacagccaacgcggacacgcuuugcauuggcuaucacgcuaauaacagcaccgauacaguugacaccgugcuggagaagaaugugacagucacccauuccgugaaccuccuggaagauaagcacaaugggaaacuuuguaagcugagaggaguugcuccccuccaucugggcaaaugcaacaucgccggguggauucugggaaauccugagugugaaucucucagcacagccuccucuuggagcuacaucguggagaccuccucuagcgacaacggcacgugcuauccgggggauuuuauugacuacgaagaacugcgggagcagcuuuccagcgucucuuccuucgaacgcuuugagaucuuccccaagaccagcucuuggccuaaucacgauuccaacaagggagugacagccgcuuguccccaagccggcgcgaaaucuuuuuauaagaaucugaucuggcucguuaaaaagggcaacagcuacccuaaacuguccaagagcuauauuaaugacaaggggaaagaagugcuuguccuguggggaauccaucaccccuccaccucugccgaucagcagagccucuaccagaacgcugacgccuacguguucgugggcacauccagauauagcaagaaauuuaagccugagauugcuauccggccgaaaguccgcgaucaagaggggagaaugaauuacuauuggacccugguugaacccggagacaagauuacguucgaggccacaggcaaccugguggugccucgguacgcguuugccauggaacgcaacgcugggucuggaaucauuaucuccgauacccccguccacgacugcaauacaaccugucagaccccuaaaggcgccaucaacacaagccuccccuuccagaauauucauccgaucacgauuggcaagugcccuaaguaugugaaaucuaccaagcugagacuugcuacagggcugcggaacguucccagcauccagucccgcggacucuuuggcgccauugccggguucaucgagggaggcuggaccgggaugguggacggaugguacggcuaucaccaucaaaaugaacagggcucuggguacgcugcggaucugaaaagcacacagaacgccaucgacgagauuaccaauaaggucaacuccgugaucgagaaaaugaauacgcaguuuacagcuguuggaaaggaguucaaccaccuugagaagagaauugaaaaucugaacaaaaagguggaugacggcuuccucgauaucuggaccuacaaugccgagcugcugguccuccuggaaaacgagcggacccuugacuaucacgauagcaaugugaaaaaccuguacgagaagguccgcucucaacucaaaaacaaugccaaggaaauugggaacggauguuuugaguucuaucauaagugcgacaauacauguauggaauccgugaaaaacggcaccuacgauuauccuaaguacagcgaggaagcuaaacugaauagagaggagaucgacgggguuaaacuugaaucuacacggaucuaucagauucuggccaucuacuccacgguggcgagcucccucguccuggugguuucucugggcgcuauuagcuuuuggaugugcuccaacggaucucuccagugccgcaucuguauuuga

SEQ ID NO: 196649 - RNA, 1701 nt, Artificial Sequence
  derived and/or modified CDS sequence (opt5) from hemagglutinin__InfluenzaA__ADF27619
augaaggccauccuggugguccuccuguacaccuucgcuacagccaacgcggacacgcuuugcauuggcuaucacgcuaauaacagcaccgauacaguugacaccgugcuggagaaaaaugugacagucacccauuccgugaaccuccuggaagauaagcacaaugggaaacuuuguaagcugagaggaguugugccccuccaucugggcaaaugcaacaucgccggguggauucugggaaauccugagugugaaucucucagcacagccuccucuuggagcuacaucgucgagaccuccucuagcgacaacggcacgugcuauccgggggauuuuauugacuacgaagaacugcgggagcagcuuuccagcgugucuuccuucgaacgcuuugagaucuuccccaagaccagcucuuggccuaaucacgauuccaacaagggaguuacagcugccuguccccaugcuggcgccaagagcuuuuauaaaaaucugaucuggcucgugaaaaagggcaacucuuacccuaaacuguccaagagcuauauuaaugacaaggggaaagaaguccuugugcuguggggaauccaccaccccuccaccucugcggaucaacagagccucuaccagaacgccgacgcuuacguguucgucggcacauccagauauagcaagaaauuuaagccugagauugccauccggccgaaaguucgcgaucaggaggggagaaugaauuacuauuggacccugguggaacccggagacaagauuacguucgaggcuacaggcaaccugguggucccucgguacgccuuugcgauggaacgcaacgccgggucuggaaucauuaucuccgauacccccgugcaugacugcaauacaaccugucaaaccccuaaaggcgcuaucaacacaagccuccccuuccagaauauucacccgaucacgauuggcaagugcccuaaguauguuaaaucuaccaagcugagacuugccacagggcugcggaacgugcccagcauccagucccgcggacucuuuggcgcuauugccggguucaucgagggaggcuggaccgggauggucgacggaugguacggcuaucaucaccagaaugaacaaggcucuggguacgccgcugaucugaaaagcacacagaacgcgaucgacaagauuaccaauaaagugaacuccguuaucgagaagaugaauacgcaguuuacagccgugggaaaggaguucaaccaccuugagaaaagaauugagaaucugaacaagaaagucgaugacggcuuccucgauaucuggaccuacaaugcugaacugcuggugcuccuggagaacgaacggacccuugacuaucaugauagcaaugucaagaaccuguacgagaaagugcgcucucagcucaagaacaaugccaaggagauugggaacggauguuuugaguucuaucacaaaugcgacaauacauguauggaauccguuaagaacggcaccuacgauuauccuaaauacagcgaagaggccaagcugaauagagaagagaucgacggggugaaacuugagucuacacggaucuaucaaauucuggcuaucuacuccacggucgccagcucccucgugcugguugugucucugggcgcgauuagcuuuuggaugugcuccaacggaucucuccagugccgcaucuguauuuga

SEQ ID NO: 196650 - RNA, 1701 nt, Artificial Sequence; identical to SEQ ID NO: 195913
  derived and/or modified CDS sequence (opt5) from hemagglutinin__InfluenzaA__ADF27629

SEQ ID NO: 196651 - RNA, 1701 nt, Artificial Sequence
  derived and/or modified CDS sequence (opt5) from hemagglutinin__InfluenzaA__ADF27649
augaaggccauccuggugguccuccuguacaccuucgcuacagccaacgcggacacgcuuugcauuggcuaucacgcuaauaacagcaccgauacaguugacaccgugcuggagaaaaaugugacagucacccauuccgugaaccuccuggaagauaagcacaaugggaaacuuuguaagcugagaggaguugcuccccuccaucugggcaaaugcaacaucgccggguggauucugggaaauccugagugugaaucucucagcacagccuccucuuggagcuacaucguggagaccuccucuagcgacaacggcacgugcuauccgggggauuuuauugacuacgaagaacugcgggagcagcuuuccagcgucucuuccuucgaacgcuuugagaucuuccccaagaccagcucuuggccuaaucacgauuccaacaagggagugacagccgcuuguccccaugccggcgcgaaaucuuuuuauaagaaucugaucuggcucguuaaaaagggcaacagcuacccuaaacuguccaagagcuauauuaaugacaaggggaaagaagugcuuguccuguggggaauccaccaccccuccaccucugccgaucaacagagccucuaccagaacgcugacgccuacguguucgugggcacauccagauauagcaagaaauuuaagccugagauugcuauccggccgaaaguccgcgaucaggaggggagaaugaauuacuauuggacccugguugaacccggagacaagauuacguucgaggccacaggcaaccugguggugccucgguacgcguuugccauggaacgcaacgcugggucuggaaucauuaucuccgauacccccguccaugacugcaauacaaccugucaaaccccuaaaggcgccaucaacacaagccuccccuuccagaauauucacccgaucacgauuggcaagugcccuaaguaugugaaaucuaccaagcugagacuugcuacagggcugcggaacguucccagcauccagccucgcggacucuuuggcgccauugccggguucaucgagggaggcuggaccgggaugguggacggaugguacggcuaucaucaccagaaugaacaaggcuccggguacgcugcggaucugaaaucuacacagaacgccaucgacaagauuaccaauaaagucaacagcgugaucgagaagaugaauacgcaguuuacagcuguuggaaaggaguucaaccaccuugagaaaagaauugagaaucugaacaagaaaguggaugacggcuuccucgauaucuggaccuacaaugccgaacugcugguccuccuggagaacgaacggacccuugacuaucaugauuccaaugugaagaaccuguacgagaaaguccgcagccagcucaagaacaaugccaaggagauugggaacggauguuuugaguucuaucacaaaugcgacaauacauguauggaaucugugaagaacggcaccuacgauuaucccaaauacuccgaagaggcuaagcugaauagagaagagaucgacgggguuaaacuugagagcacacggaucuaucaaauucuggccaucuacucuacgguggcguccagccucguccuggugguuucccugggcgcuauuucuuuuuggaugugcagcaacggaucccuccagugccgcaucuguauuuga

SEQ ID NO: 196652 - RNA, 1701 nt, Artificial Sequence; identical to SEQ ID NO: 195913
  derived and/or modified CDS sequence (opt5) from hemagglutinin__InfluenzaA__ADF27659

SEQ ID NO: 196653 - RNA, 1701 nt, Artificial Sequence; identical to SEQ ID NO: 196390
  derived and/or modified CDS sequence (opt5) from hemagglutinin__InfluenzaA__ADF27669

SEQ ID NO: 196654 - RNA, 1701 nt, Artificial Sequence; identical to SEQ ID NO: 195842
  derived and/or modified CDS sequence (opt5) from hemagglutinin__InfluenzaA__ADF27679

SEQ ID NO: 196655 - RNA, 1701 nt, Artificial Sequence; identical to SEQ ID NO: 196451
  derived and/or modified CDS sequence (opt5) from hemagglutinin__InfluenzaA__ADF27689

SEQ ID NO: 196656 - RNA, 1701 nt, Artificial Sequence
  derived and/or modified CDS sequence (opt5) from hemagglutinin__InfluenzaA__ADF27699
augaaggccauccuggugguccuccuguacaccuucgcuacagccaacgcggacacgcuuugcauuggcuaucacgcuaauaacagcaccgauacaguugacaccgugcuggagaagaaugugacagucacccauuccgugaaccuccuggaagauaagcacaaugggaaacuuuguaagcugagaggaguugcuccccuccaucugggcaaaugcaacaucgccggguggauucugggaaauccugagugugaaucucucagcacagccuccucuuggagcuacaucguggagaccuccucuagcgacaacggcacgugcuauccgggggauuuuauugacuacgaagaacugcgggagcagcuuuccagcgucucuuccuucgaacgcuuugagauguuccccaagaccagcucuuggccuaaucacgauuccaacaagggagugacagccgcuuguccccaugccggcgcgaaaucuuuuuauaagaaucugaucuggcucguuaaaaagggcaacagcuacccuaaacuguccaagagcuauaucaaugacaaggggaaagaagugcuuguccuguggggcauucaccaccccuccaccucugccgaucaacagagccucuaccagaacgcugacgccuacguguucgugggaacauccagauauagcaagaaauuuaagccugagaucgcuauucggccgaaaguccgcgaucaggaggggagaaugaauuacuauuggacccugguugaacccggagacaagaucacguucgaggccacaggcaaccugguggugccucgguacgcguuugccauggaacgcaacgcugggucuggaauuaucauuuccgauacccccguccauaauugcaacacaaccugucaaaccccuaaaggcgccaucaauacaagccuccccuuccagaacauccacccgauuacgaucggcaagugcccuaaguaugugaaaucuaccaagcugagacuugcuacagggcugcggaauguucccagcauucagucccgcggacucuuuggcgccaucgccggguucauugagggaggcuggaccgggaugguggacggaugguacggcuaucaucaccagaacgaacaaggcucuggguacgcugcggaccugaaaagcacacagaaugccaucgaugagaucaccaacaaggucaauuccgugauugagaaaaugaacacgcaguuuacagcuguuggaaaggaguucaaucaccuugagaagagaaucgaaaaccugaauaaaaagguggacgauggcuuccucgacauuuggaccuacaacgccgagcugcugguccuccuggaaaaugagcggacccuugauuaucaugacagcaacgugaaaaaccuguacgagaagguccgcucucagcucaaaaauaacgccaaggaaguggggaauggauguuuugaguucuaucacaagugcgauaacacauguauggaauccguuaaaaauggcaccuacgacuauccuaaguacagcgaggaagcuaaacugaacagagaggagaucgauggggugaaacuugaaucuacacggauuuaucaaauccuggccaucuacuccacggucgcgagcucccucgugcugguugugucucugggcgcuauuagcuuuuggaugugcuccaauggaucucuccagugccgcaucuguauuuga

SEQ ID NO: 196657 - RNA, 1701 nt, Artificial Sequence
  derived and/or modified CDS sequence (opt5) from hemagglutinin__InfluenzaA__ADF27709
augaaggccauccuggugguccuccuguacaccuucgcuacagccaacgcggacacgcuuugcauuggcuaucacgcuaauaacagcaccgauacaguugacaccgugcuggagaaaaaugugacagucacccauuccgugaaccuccuggaagauaagcacaaugggaaacuuuguaagcugagaggaguugcuccccuccaucugggcaaaugcaacaucgccggguggauucugggaaauccugagugugaaucucucagcacagccuccucuuggagcuacaucguggagauuuccucuagcgacaacggaaccugcuauccgggggauuuuaucaauuacgaagaacugcgggagcagcuuuccagcgucucuuccuucgaacgcuuugagaucuuccccaagacgagcucuuggccuaaccacgacuccaauaagggagugaccgccgcuuguccccaugccggcgcgaaaucuuuuuauaagaaccugauuuggcucguuaaaaagggcaauagcuacccuaaacuguccaagagcuauaucaacgauaaggggaaagaagugcuuguccuguggggcauucaccaccccuccacaucugccgaccaacagagccucuaccagaaugcugaugccuacguguucgugggcaccuccagauauagcaagaaauuuaagccugagaucgcuauucggccgaaaguccgcgaccaggaggggagaaugaacuacuauuggacacugguugaacccggagauaagaucaccuucgaggccacgggcaaccugguggugccucgguacgcguuugccauggaacgcaaugcugggucuggaauuaucaucuccgacacacccguccaugauugcaacaccacaugucaaaccccuaaaggcgccauuaauaccagccuccccuuccagaacauccacccgauuacaaucggcaagugcccuaaguaugugaaaucuacgaagcugagacuugcuaccgggcugcggaauguucccagcauucagucccgcggacucuuuggcgccaucgccggguucaucgagggaggcuggacagggaugguggacggaugguacggcuaucaucaccagaacgaacaaggcucuggguacgcugcggaccugaaaagcacccagaaugccauugauaagaucacaaacaaagucaauuccgugauugagaagaugaacacccaguuuacggcuguuggaaaggaguucaaucaccuugagaaaagaaucgagaaccugaauaagaaaguggacgauggcuuccucgacauuuggacauacaacgccgaacugcugguccuccuggagaaugaacggacccuugauuaucaugacagcaacgugaagaaccuguacgagaaaguccgcucucagcucaagaauaacgccaaggagaucgggaauggauguuuugaguucuaucacaaaugcgauaacaccuguauggaauccgugaagaauggcacauacgacuauccuaaauacagcgaagaggcuaagcugaacagagaagagaucgaugggguuaaacuugagucuacccggauuuaucaaauccuggccauuuacuccacaguggcgagcucccucguccuggugguuucucugggcgcuaucagcuuuuggaugugcuccaauggaucucuccagugccgcauuuguaucuga

SEQ ID NO: 196658 - RNA, 1701 nt, Artificial Sequence; identical to SEQ ID NO: 195905
  derived and/or modified CDS sequence (opt5) from hemagglutinin__InfluenzaA__ADF27785

SEQ ID NO: 196659 - RNA, 1701 nt, Artificial Sequence
  derived and/or modified CDS sequence (opt5) from hemagglutinin__InfluenzaA__ADF27795
augaaggccauccuggugguccuccuguacaccuucgcuacagccaacgcggacacgcuuugcauuggcuaucacgcuaauaacagcaccgauacaguugacaccgugcuggagaaaaaugugacagucacccauuccgugaaccuccuggaagauaagcacaaugggaaacuuuguaagcugagaggaguugcuccccuccaucugggcaaaugcaacaucgccggguggauucugggaaauccugagugugaaucucucagcacagccuccucuuggagcuacaucguggagaccuccucuagcgacaacggcacgugcuauccgggggauuuuauugacuacgaagaacugcgggagcagcuuuccagcgucucuuccuucgaacgcuuugagaucuuccccaagaccagcucuuggccuaaucacgauuccaacaagggagugacagccgcuuguccccaugccggcgcgaaaucuuuuuauaagaaucugaucuggcucguuaaaaagggcaacagcuacccuaaacuguccaagagcuauauuaaugacaaggggaaagaagugcuuguccuguggggaauccaccaccccuccaccucugccgaucaacagagccucuaccagaacgcugacgccuacguguucgugggcacauccagauauagcaagaaauuuaagccugagauugcuauccggccgaaaguccgcgaucaggaggggagaaugaauuacuauuggacccugguuaagcccggagacaaaauuacguucgaagccacaggcaaccugguggugccucgguacgcguuugccauggagcgcaacgcugggucuggaaucauuaucuccgauacccccguccaugacugcaauacaaccugucaaaccccuaagggcgccaucaacacaagccuccccuuccagaauauucacccgaucacgauuggcaagugcccuaaauaugugaagucuaccaaacugagacuugcuacagggcugcggaacguucccagcauccagucccgcggacucuuuggcgccauugccggguucaucgaaggaggcuggaccgggaugguggacggaugguacggcuaucaucaccagaaugagcaaggcucuggguacgcugcggaucugaaaagcacacagaacgccaucgacgaaauuaccaauaaagucaacuccgugaucgagaagaugaauacgcaguuuacagcuguuggaaaggaguucaaccaccuugaaaagagaauugagaaucugaacaagaaaguggaugacggcuuccucgauaucuggaccuacaaugccgaacugcugguccuccuggagaacgaacggacccuugacuaucaugauagcaaugugaagaaccuguacgagaaaguccgcucucagcucaagaacaaugccaaggagauugggaacggauguuuugaguucuaucacaaaugcgacaauacauguauggaguccgugaagaacggcaccuacgauuauccuaaauacagcgaagaggcuaagcugaauagagaagagaucgacgggguuaaacuugagucuacacggaucuaucaaauucuggccaucuacuccacgguggcgagcucccucguccuggugguuucucugggcgcuauuagcuuuuggaugugcuccaacggaucucuccagugccgcaucuguauuuga

SEQ ID NO: 196660 - RNA, 1701 nt, Artificial Sequence; identical to SEQ ID NO: 195913
  derived and/or modified CDS sequence (opt5) from hemagglutinin__InfluenzaA__ADF27805

SEQ ID NO: 196661 - RNA, 1701 nt, Artificial Sequence
  derived and/or modified CDS sequence (opt5) from hemagglutinin__InfluenzaA__ADF27815
augaaggccauccuggugguccuccuguacaccuucgcuacagccaacgcggacacgcuuugcauuggcuaucacgcuaauaacagcaccgauacaguugacaccgugcuggagaaaaaugugacagucacccauuccgugaaccuccuggaagauaagcacaaugggaaacuuuguaagcugagaggaguugcuccccuccaucugggcaaaugcaacaucgccggguggauucugggaaauccugagugugaaucucucagcacagccuccucuuggagcuacaucguggagaccuccucuagcgacaacggcacgugcuauccgggggauuuuauugacuacgaagaacugcgggagcagcuuuccagcgucucuuccuucgaacgcuuugagaucuuccccaagaccagcucuuggccuaaucacgauuccaacaagggagugacagccgcuuguccccaugacggcgccaagagcuuuuauaaaaaucugaucuggcucguuaaaaagggcaacucuuacccuaaacuguccaagagcuauauuaaugauaaggggaaagaagugcuuguccuguggggaauccaccaccccuccaccucugcggaccaacagagccucuaccagaacgccgaugcuuacguguucgugggcacauccagauauagcaagaaauuuaagccugagauugccauccggccgaaaguccgcgaccaggaggggagaaugaauuacuauuggacccugguugaacccggagauaagauuacguucgaggcuacaggcaaccugguggugccucgguacgccuuugcgauggaacgcaacgccgggucuggaaucauuaucuccgacacccccguccaugacugcaauacaaccugucaaaccccuaaaggcgcuaucaacacaagccuccccuuccagaauauucacccgaucacgauuggcaagugcccuaaguaugugaaaucuaccaagcugagacuugccacagggcugcggaacguucccagcauccagucccgcggacucuuuggcgcuauugccggguucaucgagggaggcuggaccgggaugguggauggaugguacggcuaucaucaccagaaugaacaaggcucuggguacgccgcugaccugaaaagcacacagaacgcgaucgauaagauuaccaauaaagucaacuccgugaucgagaagaugaauacgcaguuuacagccguuggaaaggaguucaaccaccuugagaaaagaauugagaaucugaacaagaaaguggacgauggcuuccucgacaucuggaccuacaaugcugaacugcugguccuccuggagaacgaacggacccuugauuaucaugacagcaaugugaagaaccuguacgagaaaguccgcucucagcucaagaacaaugccaaggagauugggaacggauguuuugaguucuaucacaaaugcgauaauacauguauggaauccgugaagaacggcaccuacgacuauccuaaauacagcgaagaggccaagcugaauagagaagagaucgaugggguuaaacuugagucuacacggaucuaucaaauucuggcuaucuacuccacgguggccagcucccucguccuggugguuucucugggcgcgauuagcuuuuggaugugcuccaacggaucucuccagugccgcaucuguauuuga

SEQ ID NO: 196662 - RNA, 1701 nt, Artificial Sequence
  derived and/or modified CDS sequence (opt5) from hemagglutinin__InfluenzaA__ADF27825
augaaggccauccuggugguccuccuguacaccuucgcuacagccaacgcggacacgcuuugcauuggcuaucacgcuaauaacagcaccgauacaguugacaccgugcuggagagaaaugugacagucacccauuccgugaaccuccuggaagauaaacacaaugggaaacuuuguaagcugcggggaguugcuccccuccaucugggcaagugcaacaucgccggguggauucugggaaauccugagugugaaucucucagcacagccuccucuuggagcuacaucguggagaccuccucuagcgacaacggcacgugcuauccgggggauuuuauugacuccgaagaacugcgcgagcagcuuagcucugucuccagcuucgaaagauuugagaucuuccccaaaaccucuuccuggccuaaucacgauagcaacaagggagugacagccgcuuguccccaugccggcgcgaagucuuuuuacaaaaaucugaucuggcucguuaagaaaggcaacuccuauccuaagcugagcaaauccuacauuaaugacaaggggaaggaagugcuuguccuguggggaauccaccaccccucuaccagcgccgaucaacagucccucuaucagaacgcugacgccuacguguucgugggcacaagccgguacucuaaaaaguuuaaaccugagauugcuauccgcccgaaggucagagaucaggaggggcggaugaauuauuacuggacccugguugaacccggagacaaaauuacguucgaggccacaggcaaccugguggugccucgcuaugcguuugccauggaaagaaacgcuggguccggaaucauuaucagcgauacccccguccaugacugcaauacaaccugucaaaccccuaagggcgccaucaacacaucucuccccuuccagaauauucacccgaucacgauuggcaaaugcccuaaguacguuaagagcaccaaacugcggcuugcuacagggcugcgcaacgugcccuccauccagucuagaggacucuuuggcgccauugccggguucaucgagggaggcuggaccgggaugguggacggaugguauggcuaccaucaccagaaugaacaaggcagcggguaugcugcggaucugaaguccacacagaacgccaucgacgagauuaccaauaaagucaacagcgugaucgagaagaugaauacgcaguuuacagcuguuggaaaagaguucaaccaccuugagaagcggauugaaaaucugaacaagaaaguggaugacggcuuccucgauaucuggaccuacaaugccgagcugcugguccuccuggaaaacgagcgcacccuugacuaccaugauucuaaugugaagaaccuguaugagaaagucagaucccagcucaagaacaaugccaaagaaauugggaacggauguuuugaguucuaccacaagugcgacaauacauguauggaaagcgugaagaacggcaccuaugauuacccuaaauauucugaggaagcuaagcugaaucgggaggagaucgacgggguuaaacuugaauccacacgcaucuaccaaauucuggccaucuauagcacgguggcguccucucucguccuggugguuagccugggcgcuauuuccuuuuggaugugcucuaacggaagccuccagugcagaaucuguauuuga

SEQ ID NO: 196663 - RNA, 1701 nt, Artificial Sequence
  derived and/or modified CDS sequence (opt5) from hemagglutinin__InfluenzaA__ADF27845
augaaggccauccuggugguccuccuguacaccuucgcuacagccaacgcggacacgcuuugcauuggcuaucacgcuaauaacagcaccgauacaguugacaccgugcuggagaaaaaugugacagucacccauuccgccaaccuccuggaagauaagcacaaugggaaacuuuguaagcugagaggaguggcuccccuccaucugggcaaaugcaacaucgccggguggauucugggaaauccugagugugaaucucucagcacagccuccucuuggagcuacaucguugagaccuccucuagcgacaacggcacgugcuauccgggggauuuuauugacuacgaagaacugcgggagcagcuuuccagcgugucuuccuucgaacgcuuugagaucuuccccaagaccagcucuuggccuaaucacgauuccaacaagggagucacagcugccuguccccaugcgggcgccaagagcuuuuauaagaaucugaucuggcucgugaaaaagggcaacucuuacccuaaacuguccaagagcuauauuaaugacaaggggaaagaaguucuugugcuguggggaauccaccaccccuccaccaacgcugaucaacagucucucuaccagaaugccgacgcuuacgucuucgugggcacaagcagauauuccaagaaauuuaagccugagauugccauccggccgaaagugcgcgaucaggaggggagaaugaacuacuauuggacccuggucgaacccggagacaagauuacguucgaggcgacaggcaaccugguugugccucgguacgccuuugcuauggaacgcaaugccgggagcggaaucauuaucucugauacccccgugcaugacugcaacacaaccugucaaaccccuaaaggcgcuaucaauacaucccuccccuuccagaacauucacccgaucacgauuggcaagugcccuaaguaugucaaaagcaccaagcugagacuugccacagggcugcggaaugugcccucuauccagagccgcggacucuuuggcgccauugcuggguucaucgagggaggcuggaccgggaugguugacggaugguacggcuaucaucaccagaacgaacaaggcuccggguacgcggccgaucugaaaucuacacagaaugcuaucgacgagauuaccaacaaggugaauagcgucaucgagaaaaugaacacgcaguuuacagccgugggaaaggaguucaaucaccuugagaagagaauugaaaaccugaauaaaaagguugaugacggcuuccucgauaucuggaccuacaacgccgagcugcuggugcuccuggaaaaugagcggacccuugacuaucaugauuccaacgucaaaaaccuguacgagaaggugcgcagccagcucaaaaauaacgcuaaggaaauugggaauggauguuuugaguucuaucacaagugcgacaacacauguauggaaucugucaaaaauggcaccuacgauuauccuaaguacuccgaggaagccaaacugaacagagaggagaucgacggggugaaacuugaaagcacacggaucuaucaaauucuggcgaucuacucuacgguugcuuccagccucgugcuggucgugucccugggcgccauuucuuuuuggaugugcagcaauggaucccuccagugccgcaucuguauuuga

SEQ ID NO: 196664 - RNA, 1701 nt, Artificial Sequence; identical to SEQ ID NO: 195905
  derived and/or modified CDS sequence (opt5) from hemagglutinin__InfluenzaA__ADF27855

SEQ ID NO: 196665 - RNA, 1701 nt, Artificial Sequence; identical to SEQ ID NO: 195905
  derived and/or modified CDS sequence (opt5) from hemagglutinin__InfluenzaA__ADF27865

SEQ ID NO: 196666 - RNA, 1701 nt, Artificial Sequence; identical to SEQ ID NO: 195905
  derived and/or modified CDS sequence (opt5) from hemagglutinin__InfluenzaA__ADF27875

SEQ ID NO: 196667 - RNA, 1701 nt, Artificial Sequence; identical to SEQ ID NO: 195905
  derived and/or modified CDS sequence (opt5) from hemagglutinin__InfluenzaA__ADF27885

SEQ ID NO: 196668 - RNA, 1701 nt, Artificial Sequence; identical to SEQ ID NO: 194741
  derived and/or modified CDS sequence (opt5) from hemagglutinin__InfluenzaA__ADF27895

SEQ ID NO: 196669 - RNA, 1701 nt, Artificial Sequence
  derived and/or modified CDS sequence (opt5) from hemagglutinin__InfluenzaA__ADF27915
augaaggccauccuggugguccuccuguacaccuucgcuacagccaacgcggacacgcuuugcauuggcuaucacgcuaauaacagcaccgauacaguugacaccgugcuggagaaaaaugugacagucacccauuccgugaaccuccuggaagauaagcacaaugggaaacuuuguaagcugagaggaguugcuccccuccaucugggcaaaugcaacaucgccggguggauucugggaaauccugagugugaaucucucagcacagccuccucuuggagcuacaucguggagaccuccucuagcgacaacggcacgugcuauccgggggauuuuauugacuacgaagaacugcgggagcagcuuuccagcgucucuuccuucgaacgcuuugagaucuuccccaagaccagcucuuggccuaaucacgauuccaacaagggagugacagccgcuuguccccaugccggcgcgaaaucuuuuuauaagaaucugaucuggcucguuaaaaagggcaacagcuacccuaaacuguccaagagcuauauuaaugacaaggggaaagaagugcuuguccuguggggaauccaccaccccuccgccucugcugaucaacagagccucuaccagaacgccgacgcuuacguguucgugggcaccuccagauauagcaagaaauuuaagccugagauugccauccggccgaaaguccgcgaucaggaggggagaaugaauuacuauuggacacugguugaacccggagacaagauuaccuucgaggcgacgggcaaccugguggugccucgguacgccuuugcuauggaacgcaacgccgggucuggaaucauuaucuccgauacacccguccaugacugcaauaccacaugucaaaccccuaaaggcgcuaucaacaccagccuccccuuccagaauauucacccgaucacaauuggcaagugcccuaaguaugugaaaucuacgaagcugagacuugccaccgggcugcggaacguucccagcauccagucccgcggacucuuuggcgccauugcuggguucaucgagggaggcuggacagggaugguggacggaugguacggcuaucaucaccagaaugaacaaggcucuggguacgcggccgaucugaaaagcacccagaacgcuaucgacaagauuacaaauaaagucaacuccgugaucgagaagaugaauacccaguuuacggccguuggaaaggaguucaaccaccuugagaaaagaauugagaaucugaacaagaaaguggaugacggcuuccucgauaucuggacauacaaugccgaacugcugguccuccuggagaacgaacggacccuugacuaucaugauagcaaugugaagaaccuguacgagaaaguccgcucucagcucaagaacaaugcuaaggagauugggaacggauguuuugaguucuaucacaaaugcgacaauaccuguauggaauccgugaagaacggcacauacgauuauccuaaauacagcgaagaggccaagcugaauagagaagagaucgacgggguuaaacuugagucuacccggaucuaucaaauucuggcgaucuacuccacaguggcuagcucccucguccuggugguuucucugggcgccauuagcuuuuggaugugcuccaacggaucucuccagugccgcaucuguauuuga

SEQ ID NO: 196670 - RNA, 1701 nt, Artificial Sequence
  derived and/or modified CDS sequence (opt5) from hemagglutinin__InfluenzaA__ADF27925
augaaggccauccuggugguccuccuguacaccuucgcuacagccaacgcggacacgcuuugcauuggcuaucacgcuaauaacagcaccgauacaguugacaccgugcuggagaaaaaugugacagucacccauuccgugaaccuccuggaagauaagcacaaugggaaacuuuguaagcugagaggaguugcuccccuccaucugggcaaaugcaacaucgccggguggauucugggaaauccugagugugaaucucucagcacagccuccucuuggagcuacaucguggagaccuccucuagcgacaacggcacgugcuauccgggggauuuuauugacuacgaagaacugcgggagcagcuuuccagcgucucuuccuucgaacgcuuugagaucuuccccaagaccagcucuuggccuaaucacgauuccaacaagggagugacagccgcuuguccccaugccggcgcgaaauccuuuuauaagaaucugaucuggcucguuaaaaagggcaacucuuacccuaaacuguccaauagcuauauuaacgacaaggggaaggaagugcuuguccuguggggaauccaccaccccuccaccucugccgaucaacagagccucuaccagaaugcugacgccuacguguucgugggcacauccagauauagcaaaaaguuuaaaccugagauugcuauccggccgaagguccgcgaucaggaggggagaaugaacuacuauuggacccugguugaacccggagacaaaauuacguucgaggccacaggcaaccugguggugccucgguacgcguuugccauggaacgcaaugcugggucuggaaucauuaucuccgauacccccgcccaugacugcaacacaaccugucaaaccccuaagggcgcuaucaauacaagccuccccuuccagaacauucacccgaucacgauuggcaaaugcccuaaguaugucaagucuaccaaacugagaauggccacagggcuucggaaugugcccagcauccagucccgcggacuguuuggcgccauugcuggguucaucgagggaggcuggaccgggaugguugacggaugguacggcuaucaucaccagaacgaacaaggcucuggguacgcggccgaucucaagagcacacagaaugcuaucgacgagauuaccaacaaagugaauagcgucaucgagaagaugaacacgcaguuuacagccgugggaaaagaguucaaucaccuggagaagagaauugaaaaccuuaauaagaaaguugaugacggcuuccuggauaucuggaccuacaacgccgagcuccuggugcugcucgaaaaugagcggacccuggacuaucaugauagcaacgucaagaaccuuuacgagaaagugcgcucucagcugaagaauaacgcuaaagaaauugggaauggauguuuugaguucuaucacaagugcgacaacacauguauggaauccgucaagaauggcaccuacgauuauccuaaauacagcgaggaagccaagcucaacagagaggagaucgacggggugaaacuggaaucuacacggaucuaucaaauucuugcgaucuacuccacgguugcuagcucccuggugcucgucgugucucugggcgccauuagcuuuuggaugugcuccaauggaucucugcagugccgcaucuguauuuga

SEQ ID NO: 196671 - RNA, 1701 nt, Artificial Sequence
  derived and/or modified CDS sequence (opt5) from hemagglutinin__InfluenzaA__ADF27935
augaaggccauccuggugguccuccuguacaccuucgcuacagccaacgcggacacgcuuugcauuggcuaucacgcuaauaacagcaccgauacaguugacaccgugcuggagaaaaaugugacagucacccauuccgugaaccuccuggaagauaagcacaaugggaaacuuuguaagcugagaggaguugcuccccuccaucugggcaaaugcaacaucgccggguggauucugggaaauccuaagugugagucucucagcacagaauccucuuggagcuacaucguggagaccuccucuagcgacaacggcacgugcuauccgggggauuuuauuaauuacgaagaacugcgggagcagcuuuccagcgucucuuccuucgaacgcuuugagaucuuccccaagaccagcucuuggccuaaccacgacuccaauaaaggagugacagccgccuguccccaugcuggcgccaagagcuuuuauaaaaaccugaucuggcucguuaagaaaggcaauucuuacccuaagcuguccaagagcuauauuaacgauaaagggaaggaagugcuuguccuguggggaauccaccaccccuccaccucugcggaccaacagagccucuaccagaaugccgaugcuuacguguucgugggcacauccagauauagcaaaaaguuuaaaccugagauugccauccggccgaagguccgcgaccaggaggggagaaugaacuacuauuggacccugguugaacccggagauaaaauuacguucgaggcuacaggcaaccugguggugccucgguacgccuuugcgauggaacgcaaugccgggucuggaaucauuaucuccgacacccccguccaugauugcaacacaaccugucaaaccccuaagggcgcuaucaauacaagccuccccuuccagaacauucacccgaucacgauuggcaagugcccuaaauaugugaagucuaccaaacugagacuugccacagggcugcggaauguucccagcauccagucccgcggacucuuuggcgcuauugccggguucaucgagggaggcuggaccgggaugguggacggaugguacggcuaucaucaccagaacgaacaaggcucuggguacgccgcugaccuuaagagcacacagaaugcgaucgauaaaauuaccaacaaggucaauuccgugaucgagaagaugaacacgcaguuuacagccguuggaaaagaguucaaucaccuugaaaagagaauugagaaccugaauaaaaagguggacgauggcuuccucgacaucuggaccuacaacgcugaacugcugguccuccuggagaaugaacggacccuugauuaucaugacagcaacgugaaaaaccuguacgagaagguccgcucucagcucaagaauaacgccaaagagauugggaauggauguuuugaguucuaucacaagugcgauaacacauguauggaguccgugaaaaauggcaccuacgacuauccuaaguacagcgaagaggccaaacugaacagagaagagaucgaugggguuaagcuggagucuacacggaucuaucaaauucuggcuaucuacuccacgguggccagcucccucguccuggugguuucucugggcgcgauuagcuuuuggaugugcuccaauggaucucuccagugccgcaucuguauuuga

SEQ ID NO: 196672 - RNA, 1701 nt, Artificial Sequence
  derived and/or modified CDS sequence (opt5) from hemagglutinin__InfluenzaA__ADF27955
augaaggccauccuggugguccuccuguacaccuucgcuacagccaacgcggacacgcuuugcauuggcuaucacgcuaauaacagcaccgauacaguugacaccgugcuggagaaaaaugugacagucacccauuccgugaaccuccuggaagauaagcacaaugggaaacuuuguaagcugagaggaguugcuccccuccaucugggcaaaugcaacaucgccggguggauucugggaaauccugagugugaaucucucagcacagccuccucuuggagcuacaucguggagaccuccucuagcgacaacggcacgugcuauccgggggauuuuauugacuacgaagaacugcgggagcagcuuuccagcgucucuuccuucgaacgcuuugagaucuuccccaagaccagcucuuggccuaaucacgauuccaacaagggagugacagccgcuuguccccaugccggcgcgaaaucuuuuuauaagaaucugaucuggcucguuaaaaagggcaacagcuacccuaaacuguccaauagcuauauuaacgacaaggggaaggaagugcuuguccuguggggaauccaccaccccuccaccucugccgaucaacagagccucuaccagaaugcugacgccuacguguucgugggcacauccagauauagcaaaaaguuuaaaccugagauugcuauccggccgaagguccgcgaucaggaggggagaaugaacuacuauuggacccugguugaacccggagacaaaauuacguucgaggccacaggcaaccugguggugccucgguacgcguuugccauggaacgcaaugcugggucuggaaucauuaucuccgauacccccguccaugacugcaacacaaccugucaaaccccuaagggcgccaucaauacaagccuccccuuccagaacauucacccgaucacgauuggcaaaugcccuaaguaugugaagucuaccaaacugagacuugcuacagggcugcggaauguucccagcauccagucccgcggacucuuuggcgccauugccggguucaucgagggaggcuggaccgggaugguggacggaugguacggcuaucaucaccagaacgaacaaggcucuggguacgcugcggaucuuaagagcacacagaaugccaucgacaaaauuaccaacaaggucaauuccgugaucgagaaaaugaacacgcaguuuacagcuguuggaaaggaguucaaucaccuugaaaagagaauugagaaccugaauaaaaagguggaugacggcuuccucgauaucuggaccuacaacgccgaacugcugguccuccuggagaaugaacggacccuugacuaucaugauagcaacgugaaaaaccuguacgagaagguccgcucucagcucaaaaauaacgccaaggagauugggaauggauguuuugaguucuaucacaagugcgacaacacauguauggaguccgugaaaaauggcaccuacgauuauccuaaguacagcgaagaggcuaaacugaacagagaagagaucgacgggguuaagcuggagucuacacggaucuaucaaauucuggccaucuacuccacgguggcgagcucccucguccuggugguuucucugggcgcuauuagcuuuuggaugugcuccaauggaucucuccagugccgcaucuguauuuga

SEQ ID NO: 196673 - RNA, 1701 nt, Artificial Sequence
  derived and/or modified CDS sequence (opt5) from hemagglutinin__InfluenzaA__ADF27965
augaaggccauccuggugguccuccuguacaccuucgcuacagccaacgcggacacgcuuugcauuggcuaucacgcuaauaacagcaccgauacaguugacaccgugcuggagaaaaaugugacagucacccauuccgugaaccuccuggaagauaagcacaaugggaaacuuuguaagcugagaggaguugcuccccuccaucugggcaaaugcaacaucgccggguggauucugggaaauccugagugugaaucucucagcacagccuccucuuggagcuacaucguggagaccuccucuagcgacaacggcacgugcuauccgggggauuuuauugacuacgaggaacugcgggagcagcuuuccagcgucucuuccuucgaacgcuuugagaucuuccccaagaccagcucuuggccuaaucacgauuccaacaagggagugacagccgcuuguccccaugccggcgcgaaaucuuuuuauaagaaucugaucuggcucguuaaaaagggcaacagcuacccuaaacuguccaagagcuauauuaaugacaaggggaaaaaggugcuuguccuguggggaauccaccaccccuccaccucugccgaucaacagagccucuaccagaacgcugacgccuacguguucgugggcacauccagauauagcaaaaaguuuaaaccugaaauugcuauccggccgaagguccgcgaucaggaggggagaaugaauuacuauuggacccugguugagcccggagacaaaauuacguucgaagccacaggcaaccugguggugccucgguacgcguuugccauggagcgcaacgcugggucuggaaucauuaucuccgauacccccgucaaugacugcaacacaaccugucaaaccccuaagggcgccaucaauacaagccuccccuuccagaacauucauccgaucacgauuggcaagugcccuaaauaugugaagucuaccaaacugagacuugcuacagggcugcggaauguucccagcauccagucccgcggacucuuuggcgccauugccggguucaucgaaggaggcuggaccgggaugguggacggaugguacggcuaucaccaucagaacgagcaaggcucuggguacgcugcggaucuuaagagcacacagaaugccaucgacaaaauuaccaacaaggucaauuccgugaucgaaaagaugaacacgcaguuuacagcuguuggaaaagaguucaaucaccuugagaagagaauugaaaaccugaauaaaaagguggaugacggcuuccucgauaucuggaccuacaacgccgagcugcugguccuccuggaaaaugagcggacccuugacuaucacgauagcaacgugaaaaaccuguacgaaaagguccgcucucagcucaagaauaacgccaaagagauugggaauggauguuuugaguucuaucauaagugcgacaacacauguauggaauccgugaaaaauggcaccuacgauuauccuaaguacagcgaggaagcuaaacugaacagagaggaaaucgacgggguuaagcuggagucuacacggaucuaucaaauucuggccaucuacuccacgguggcgagcucccucguccuggugguuucucugggcgcuauuagcuuuuggaugugcuccaauggaucucuccagugccgcaucuguauuuga

SEQ ID NO: 196674 - RNA, 1701 nt, Artificial Sequence; identical to SEQ ID NO: 195905
  derived and/or modified CDS sequence (opt5) from hemagglutinin__InfluenzaA__ADF27975

SEQ ID NO: 196675 - RNA, 1701 nt, Artificial Sequence; identical to SEQ ID NO: 195913
  derived and/or modified CDS sequence (opt5) from hemagglutinin__InfluenzaA__ADF27985

SEQ ID NO: 196676 - RNA, 1701 nt, Artificial Sequence
  derived and/or modified CDS sequence (opt5) from hemagglutinin__InfluenzaA__ADF27995
augaaggccauccuggugguccuccuguacaccuucgcuacagccaacgcggacacgcuuugcauuggcuaucacgcuaauaacagcaccgauacaguugacaccgugcuggagaaaaaugugacagucacccauuccgccaaccuccuggaagauaagcacaaugggaaacuuuguaagcugagaggaguggcuccccuccaucugggcaaaugcaacaucgccggguggauucugggaaauccugagugugaaucucucagcacagccuccucuuggagcuacaucguugagaccuccucuagcgacaacggcacgugcuauccgggggauuuuauugacuacgaagaacugcgggagcagcuuuccagcgugucuuccuucgaacgcuuugagaucuuccccaagaccagcucuuggccuaaucacgauuccaacaagggagucacagcugccuguccccaugcgggcgccaagagcuuuuauaagaaucugaucuggcucgugaaaaagggcaacucuuacccuaaacuguccaagagcuauauuaaugacaaggggaaagaaguucuugugcuguggggaauccaccaccccuccaccaacgcugaucaacagucucucuaccagaaugccgacgcuuacgucuucgugggcacaagcagauauuccaagaaauuuaagccugagauugccauccggccgaaagugcgcgaucaggaggggagaaugaacuacuauuggacccuggucgaacccggagacaagauuacguucgaggcgacaggcaaccugguugugccucgguacgccuuugcuauggaacgcaaugccgggagcggaaucauuaucucugauacccccgcucaugacugcaacacaaccugucaaaccccuaaaggcgccaucaauacaucccuccccuuccagaacauucacccgaucacgauuggcaagugcccuaaguaugugaaaagcaccaagcugagacuugccacagggcugcggaauauccccucuauucagagccgcggacucuuuggcgcuaucgcgggguucaucgagggaggcuggaccgggauggucgacggaugguacggcuaucaucaccagaacgaacaaggcuccggguacgccgcugaucugaaaucuacacagaaugccauugacgagaucaccaacaaggugaauagcguuauugagaaaaugaacacgcaguuuacagccgugggaaaggaguucaaucaccuugagaagagaaucgaaaaccugaauaaaaaggucgaugacggcuuccucgauauuuggaccuacaacgcugagcugcuggugcuccuggaaaaugagcggacccuugacuaucaugauuccaacguuaaaaaccuguacgagaaggugcgcagccagcucaaaaauaacgccaaggaaaucgggaauggauguuuugaguucuaucacaagugcgacaacacauguauggaaucugucaaaaauggcaccuacgauuauccuaaguacuccgaggaagcgaaacugaacagagaggagaucgacggggugaaacuugaaagcacacggauuuaucaaauccuggcuauuuacucuacggucgccuccagccucgugcugguugugucccugggcgccaucucuuuuuggaugugcagcaauggaucccuccagugccgcauuuguaucuga

SEQ ID NO: 196677 - RNA, 1701 nt, Artificial Sequence; identical to SEQ ID NO: 196293
  derived and/or modified CDS sequence (opt5) from hemagglutinin__InfluenzaA__ADF28005

SEQ ID NO: 196678 - RNA, 1701 nt, Artificial Sequence; identical to SEQ ID NO: 196293
  derived and/or modified CDS sequence (opt5) from hemagglutinin__InfluenzaA__ADF28015

SEQ ID NO: 196679 - RNA, 1701 nt, Artificial Sequence; identical to SEQ ID NO: 195905
  derived and/or modified CDS sequence (opt5) from hemagglutinin__InfluenzaA__ADF28025

SEQ ID NO: 196680 - RNA, 1701 nt, Artificial Sequence; identical to SEQ ID NO: 195905
  derived and/or modified CDS sequence (opt5) from hemagglutinin__InfluenzaA__ADF28045

SEQ ID NO: 196681 - RNA, 1701 nt, Artificial Sequence
  derived and/or modified CDS sequence (opt5) from hemagglutinin__InfluenzaA__ADF28055
augaaggccauccuggugguccuccuguacaccuucgcuacagccaacgcggacacgcuuugcauuggcuaucacgcuaauaacagcaccgauacaguugacaccgugcuggagaaaaaugugacagucacccauuccgugaaccuccuggaagauaagcacaaugggaaacuuuguaagcugagaggaguugcuccccuccaucugggcaaaugcaacaucgccggguggauucugggaaauccugagugugaaucucucagcacagccuccucuuggagcuacaucguggagaccuccucuagcgacaacggcacgugcuauccgggggauuuuauugacuacgaagaacugcgggagcagcuuuccagcgucucuuccuucgaacgcuuugagaucuuccccaagaccagcucuuggccuaauuaugauuccaacaagggagugacagccgcuuguccccacgccggcgcgaaaucuuuuuacaagaaucugaucuggcucguuaaaaagggcaacagcuauccuaaacuguccaagagcuacauuaaugacaaggggaaagaagugcuuguccuguggggaauccaucaccccuccaccucugccgaucaacagagccucuaccagaacgcugacgccuauguguucgugggcacauccagauacagcaagaaauuuaagccugagauugcuauccggccgaaaguccgcgaucaggaggggagaaugaauuauuacuggacccugguugaacccggagacaagauuacguucgaggccacaggcaaccugguggugccucgguaugcguuugccauggaacgcaacgcugggucuggaaucauuaucuccgauacccccguccacgacugcaauacaaccugucaaaccccuaaaggcgccaucaacacaagccuccccuuccagaauauucauccgaucacgauuggcaagugcccuaaguacgugaaaucuaccaagcugagacuugcuacagggcugcggaacguucccagcauccagucccgcggacucuuuggcgccauugccggguucaucgagggaggcuggaccgggaugguggacggaugguauggcuaccaccaucagaaugaacaaggcucuggguacgcugcggaucugaaaagcacacagaacgccaucgacaagauuaccaauaaagucaacuccgugaucgagaagaugaauacgcaguuuacagcuguuggaaaggaguucaaccaccuugagaaaagaauugagaaucugaacaagaaaguggaugacggcuuccucgauaucuggaccuauaaugccgaacugcugguccuccuggagaacgaacggacccuugacuaccacgauagcaaugugaagaaccuguaugagaaaguccgcucucagcucaagaacaaugccaaggagauugggaacggauguuuugaguucuaccauaaaugcgacaauacauguauggaauccgugaagaacggcaccuaugauuacccuaaauauagcgaagaggcuaagcugaauagagaagagaucgacgggguuaaacuugagucuacacggaucuaccaaauucuggccaucuacuccacgguggcgagcucccucguccuggugguuucucugggcgcuauuagcuuuuggaugugcuccaacggaucucuccagugccgcaucuguauuuga

SEQ ID NO: 196682 - RNA, 1701 nt, Artificial Sequence; identical to SEQ ID NO: 195905
  derived and/or modified CDS sequence (opt5) from hemagglutinin__InfluenzaA__ADF28065

SEQ ID NO: 196683 - RNA, 1701 nt, Artificial Sequence; identical to SEQ ID NO: 194923
  derived and/or modified CDS sequence (opt5) from hemagglutinin__InfluenzaA__ADF28075

SEQ ID NO: 196684 - RNA, 1701 nt, Artificial Sequence; identical to SEQ ID NO: 195842
  derived and/or modified CDS sequence (opt5) from hemagglutinin__InfluenzaA__ADF28085

SEQ ID NO: 196685 - RNA, 1701 nt, Artificial Sequence; identical to SEQ ID NO: 194921
  derived and/or modified CDS sequence (opt5) from hemagglutinin__InfluenzaA__ADF28107

SEQ ID NO: 196686 - RNA, 1701 nt, Artificial Sequence; identical to SEQ ID NO: 196293
  derived and/or modified CDS sequence (opt5) from hemagglutinin__InfluenzaA__ADF28117

SEQ ID NO: 196687 - RNA, 1701 nt, Artificial Sequence
  derived and/or modified CDS sequence (opt5) from hemagglutinin__InfluenzaA__ADF29918
augaaggccauccuggugguccuccuguacaccuucgcuacagccaacgcggacacgcuuugcauuggcuaucacgcuaauaacagcaccgauacaguugacaccgugcuggagaaaaaugugacagucacccauuccgugaaccuccuggaagauaagcacaaugggaaacuuuguaagcugagaggaguugcuccccuccaucugggcaaaugcaacaucgccggguggauucugggaaauccugagugugaaucucucagcacagccuccucuuggagcuacaucguggagaccuccucuagcgacaacggcacgugcuauccgggggauuuuauugacuacgaagaacugcgggagcagcuuuccagcgucucuuccuucgaacgcuuugagaucuuccccaagaccagcucuuggccuaaucacgauuccaacaagggagugacagccgcuuguccccaugccggcgcgaaaucuuuuuauaagaaucugaucuggcucguuaaaaagggcaacagcuacccuaaacuguccagaagcuauauuaaugacaaggggaaggaagugcuuguccuguggggaauccaccaccccuccaccucugccgaucaacagagccucuaccagaacgcugacgccuacguguucgugggcacaucccgguauagcaaaaaguuuaaaccugagauugcuauccgcccgaaggucagaaaucaggaggggcggaugaacuacuauuggacccugguugaacccggagauaaaauuacguucgaggccacaggcaaccugguggugccucgcuacgcguuugccauggaaagaaaugcugggucuggaaucauuaucuccgacacccccguccaugauugcaacacaaccugucaaaccccuaagggcgccaucaauacaagccuccccuuccagaacauucacccgaucacgauuggcaaaugcccuaaguaugugaagucuaccaaacugcggcuugcuacagggcugcgcaauguucccagcauccaguccagaggacucuuuggcgccauugccggguucaucgagggaggcuggaccgggaugguggacggaugguacggcuaucaucaccagaacgaacaaggcucuggguacgcugcggaccuuaagagcacacagaaugccaucgaugagauuaccaacaaagucaauuccgugaucgagaagaugaacacgcaguuuacagcuguuggaaaagaguucaaucaccuggagaagcggauugaaaaccugaauaagaaaguggacgauggcuuccucgacaucuggaccuacaacgccgagcugcugguccuccuggaaaaugagcgcacccuugauuaucaugacagcaacgugaagaaccuguacgagaaagucagaucucagcucaagaauaacgccaaagaaauugggaauggauguuuugaguucuaucacaagugcgauaacacauguauggaauccgugaagaauggcaccuacgacuauccuaaauacagcgaggaagcuaagcugaaccgggaggagaucgaugggguuaaacuugaaucuacacgcaucuaucaaauucuggccaucuacuccacgguggcgagcucccucguccuggugguuucucugggcgcuauuagcuuuuggaugugcuccaauggaucucuccagugcagaaucuguauuuga

SEQ ID NO: 196688 - RNA, 1701 nt, Artificial Sequence
  derived and/or modified CDS sequence (opt5) from hemagglutinin__InfluenzaA__ADF42689
augaaggccauccuggugguccuccuguacaccuucgcuacagccaacgcggacacgcuuugcauuggcuaucacgcuaauaacagcaccgauacaguugacaccgugcuggagaagaaugugacagucacccauuccgugaaccuccuggaagauaagcacaaugggaaacuuuguaagcugagaggaguugcuccccuccaucugggcaaaugcaacaucgccggguggauucugggaaauccugagugugaaucucucagcacagccuccucuuggagcuacaucguggagaccuccucuagcgacaacggcacgugcuauccgggggauuuuauugacuacgaagaacugcgggagcagcuuuccagcgucucuuccuucgaacgcuuugagaucuuccccaagaccagcucuuggccuaaucacgauuccaacaagggagugacagccgcuuguccccaugccggcgcgaaaucuuuuuauaagaaucugaucuggcucguuaaaaagggcaacagcuacccuaaacuguccaagagcuauauuaaugacaaggggaaagaagugcuuguccuguggggaauccaccaccccuccaccucugccgaucaacagagccucuaccagaacgcugacgccuacguguucgugggcacauccagauauagcaagaaauuuaagccugagauugcuauccggccgaaaguccgcgaucaggaggggagaaugaauuacuauuggacccugguugaacccggagacaagauuacguucgaggccacaggcaaccugguggugccucgguacgcguuugccauggaacgcaacgcugggucuggaaucauuaucuccgauacccccguccaugacugcaauacaaccugucaaaccccuaaaggcgccaucaacacaagccuccccuuccagaauauucacccgaucacgauuggcaagugcccuaaguaugugaaaucuaccaagcugagacuugcuacagggcugcggaacguucccagcauccagucccgcggacucuuuggcgccauugccggguucaucgagggaggcuggaccgggaugguggacggaugguacggcuaucaucaccagaaugaacaaggcucuggguacgcugcggaucugaaaagcacacagaacgccaucgacgagauuaccaauaaggucaacuccgugaucgagaaaaugaauacgcaguuuacagcuguuggaaaggaguucaaccaccuugagaagagaauugaaaaucugaacaaaaagguggaugacggcuuccucgauaucuggaccuacaaugccgagcugcugguccuccuggaaaacgagcggacccuugacuaucaugauagcaaugugaaaaaccuguacgagaagguccgcucucagcucaaaaacaaugccaaggaaauugggaacggauguuuugaguucuaucacaagugcgacaauacauguauggaauccgugaaaaacggcaccuacgauuauccuaaguacagcgaggaagcuaaacugaauagagaggagaucgacgggguuaaacuugaaucuacacggaucuaucaaauucuggccaucuacuccacgguggcgagcucccucguccuggcugugucucugggcgccauuggauuuuggaugugcagcaacggcucccuccagugccgcaucuguauuuga

SEQ ID NO: 196689 - RNA, 1701 nt, Artificial Sequence
  derived and/or modified CDS sequence (opt5) from hemagglutinin__InfluenzaA__ADF42699
augaaggccauccuggugguccuccuguacaccuucgcuacagccaacgcggacacgcuuugcauuggcuaucacgcuaauaacagcaccgauacaguugacaccgugcuggagaaaaaugugacagucacccauuccgugaaccuccuggaagauaagcacaaugggacacuuuguaaacugagaggaguugcgccccuccaucugggcaagugcaacaucgccggguggauucugggaaauccugagugugaaucucucagcaccgcuuccucuuggagcuacaucguggagacguccucuagcgacaacggaaccugcuauccgggggauuuuauugacuacgaagaacugcgggagcagcuuuccagcgucucuuccuucgaacgcuuugagauguuccccaaaacaagcucuuggccuaaucacgauuccaacaagggagugaccgccgcuuguccccaugccggcgccaagagcuuuuauaaaaaucugaucuggcucguuaagaaaggcaacucuuacccuaagcuguccaaaagcuauaucaaugacaaggggaaggaagugcuuguccuguggggcauucaccaccccuccacaucugccgaucaacagagccucuaccagaacgcugacgccuacguguucgugggcaccuccagauauagcaaaaaguuuaaaccugagaucgcuauucggccgaagguccgcgaucaggaggggagaaugaauuacuauuggacgcugguugaacccggagacaaaaucacauucgaggccaccggcaaccugguggugccucgguacgcguuugccauggaacgcaacgcugggucuggaauuaucauuuccgauacacccguccaugacugcaauaccaccugucaaacaccuaagggcgccaucaacacgagccuccccuuccagaauauccacccgauuaccaucggcaaaugcccuaaguaugugaagucuacaaaacugagacuugcuaccgggcugcggaacguucccagcauucagucccgcggacucuuuggcgccaucgccggguucauugagggaggcuggacagggaugguggacggaugguacggcuaucaucaccagaaugaacaaggcucuggguacgcugcggaucuuaagagcacccagaacgccaucgacgagaucacgaauaaagucaacuccgugauugagaagaugaauacacaguuuaccgcuguuggaaaagaguucaaccaccuggagaagagaaucgaaaaucugaacaagaaaguggaugacggcuuccucgauauuuggaccuacaaugccgagcugcugguccuccuggaaaacgagcggacacuugacuaucaugauagcaaugugaagaaccuguacgagaaaguccgcucucagcucaagaacaaugccaaagaaaucgggaacggauguuuugaguucuaucacaagugcgacaauaccuguauggaauccgugaagaacggcacauacgauuauccuaaauacagcgaggaagcuaagcugaauagagaggagauugacgggguuaaacuugaaucuacgcggaucuaucaaauccuggccauuuacuccaccguggcgagcucccucguccuggugguuucucugggcgcuaucagcuuuuggaugugcuccaacggaucucuccagugccgcauuuguaucuga

SEQ ID NO: 196690 - RNA, 1701 nt, Artificial Sequence; identical to SEQ ID NO: 195905
  derived and/or modified CDS sequence (opt5) from hemagglutinin__InfluenzaA__ADF42709

SEQ ID NO: 196691 - RNA, 1701 nt, Artificial Sequence; identical to SEQ ID NO: 195905
  derived and/or modified CDS sequence (opt5) from hemagglutinin__InfluenzaA__ADF42719

SEQ ID NO: 196692 - RNA, 1701 nt, Artificial Sequence; identical to SEQ ID NO: 195905
  derived and/or modified CDS sequence (opt5) from hemagglutinin__InfluenzaA__ADF42729

SEQ ID NO: 196693 - RNA, 1701 nt, Artificial Sequence; identical to SEQ ID NO: 195905
  derived and/or modified CDS sequence (opt5) from hemagglutinin__InfluenzaA__ADF42739

SEQ ID NO: 196694 - RNA, 1701 nt, Artificial Sequence
  derived and/or modified CDS sequence (opt5) from hemagglutinin__InfluenzaA__ADF58349
augaaggccauccuggugguccuccuguacaccuucgcuacagccaacgcggacacgcuuugcauuggcuaucacgcuaauaacagcaccgauacaguugacaccgugcuggagaaaaaugugacagucacccauuccgugaaccuccuggaagauaagcacaaugggaaacuuuguaagcugagaggaguugcuccccuccaucugggcaaaugcaacaucgccggguggauucugggaaauccugagugugaaucucucagcacagccuccucuuggagcuacaucguggagaccuccucuagcgacaacggcacgugcuauccgggggauuuuauugacuacgaagaacugcgggagcagcuuuccagcgucucuuccuucgaacgcuuugagaucuuccccaagaccagcucuuggccugaucacgacuccaauaagggagugacagccgcuuguccccaugccggcgcgaaaucuuuuuauaagaaccugaucuggcucguuaaaaagggcaauagcuacccuaaacuguccaagagcuauauuaacgauaaggggaaagaagugcuuguccuguggggaauccaccaccccuccaccucugccgaccaacagagccucuaccagaaugcugaugccuacguguucgugggcacauccagauauagcaagaaauuuaagccugagauugcuauccggccgaaaguccgcgagagagaagggcggaugaacuacuauuggacccugguugagcccggagacaagauuacguucgaagccacaggcaaucugguggugccucgcuacgcguuugccauggagagaaacgcugggucuggaaucauuaucuccgauacccccguccaugacugcaacacaaccugucagaccccuaaaggcgccaucaauacaagccuccccuuccaaaacauucacccgaucacgauuggcaagugcccuaaguaugugaaaucuaccaagcugcggcuugcuacagggcugcgcaauguucccagcauccaguccagaggacucuuuggcgccauugccggguucaucgaaggaggcuggaccgggaugguggacggaugguacggcuaucaucaccagaacgagcagggcucuggguacgcugcggaucugaaaagcacacaaaaugccaucgacgagauuaccaacaaggucaauuccgugaucgaaaagaugaacacgcaguuuacagcuguuggaaaggaguucaaucaccuugaaaagcggauugagaaccugaauaaaaagguggaugacggcuuccucgauaucuggaccuacaacgccgaacugcugguccuccuggagaaugagcgcacccuugacuaucaugauagcaacgugaaaaaucuguacgaaaaggucagaucucagcucaaaaacaacgccaaggagauugggaauggauguuuugaguucuaucacaagugcgacaacacauguauggaguccgugaaaaauggcaccuacgauuauccuaaguacagcgaagaggcuaaacugaaccgggaggaaaucgacgggguuaaacuugagucuacacgcaucuaucagauucuggccaucuacuccacgguggcgagcucccucguccuggugguuucucugggcgcuauuagcuuuuggaugugcuccaauggaucucuccaaugcagaaucuguauuuga

SEQ ID NO: 196695 - RNA, 1701 nt, Artificial Sequence; identical to SEQ ID NO: 196338
  derived and/or modified CDS sequence (opt5) from hemagglutinin__InfluenzaA__ADF58351

SEQ ID NO: 196696 - RNA, 1701 nt, Artificial Sequence
  derived and/or modified CDS sequence (opt5) from hemagglutinin__InfluenzaA__ADF80454
augaaggccauccuggugguccuccuguacaccuucgcuacagccaacgcggacacgcuuugcauuggcuaucacgcuaauaacagcaccgauacaguugacaccgugcuggagaaaaaugugacagucacccauuccgugaaccuccuggaagauaagcacaaugggaaacuuuguaagcugagaggaguugcuccccuccaucugggcaaaugcaacaucgccggguggauucugggaaauccugagugugaaucucucagcacagccuccucuuggagcuacaucguggagaccuccucuagcgacaacggcacgugcuauccgggggauuuuauugacuacgaagaacugcgggagcagcuuuccagcgucucuuccuucgaacgcuuugagaucuuccccaagaccagcucuuggccuaaucacgauuccaacaagggagugacagccgcuuguccccaugccggcgcgaaaucuuuuuauaagaaucugaucuggcucguuaaaaagggcaacagcuacccuaaacuguccaagagcuauauuaaugacaaggggaaagaagugcuuguccuguggggaauccaccaccccuccaccucugccgaucaacagagccucuaccagaacgcugacgccuacguguucgugggcacauccagauauagcaagaaauuuaagccugagauugcuauccggccgaaaguccgcgaucaggaggggagaaugaauuacuauuggacccugguugaacccggagacaagauuacguucgaggccacaggcaaccugguggugccucgguacgcguuugccauggaacgcaacgcugggucuggaaucauuaucuccgauacccccguccaugacugcaauacaaccugucaaaccccugagggcgccaucaacacaagccuccccuuccagaauauucacccgaucacgauuggcaaaugcccuaaguaugugaagucuaccaaacugagacuugcuacagggcugcggaacguucccagcauccagucccgcggacucuuuggcgccauugccggguucaucgaaggaggcuggaccgggaugguggacggaugguacggcuaucaucaccagaaugagcaaggcucuggguacgcugcggaucuuaagagcacacagaacgccaucgacgagauuaccaauaaagucaacuccaucauugaaaagaugaauacgcaguuuacagcugugggaaaagaguucaaccaccuggaaaagagaaucgagaaucugaacaagaaaguugaugacggcuuccucgauauuuggaccuacaaugccgaacugcuggugcuccuggagaacgagcggacccuugacuaucaugauagcaaugucaagaaccuguacgaaaaagugcgcucucagcucaagaacaaugccaaagagaucgggaacggauguuuugaguucuaucacaagugcgacgauacauguauggaguccgucaagaauggcaccuacgacuauccuaaauacagcgaagaggcuaagcugaacagagaggaaaucgauggggugaaacuugagucuacacggauuuaucaaauccuggccauuuacuccacgguugcgagcucccucgugcuggucgugucucugggcgcuaucagcuuuuggaugugcuccaauggaucucuccagugccgcauuuguaucuga

SEQ ID NO: 196697 - RNA, 1701 nt, Artificial Sequence
  derived and/or modified CDS sequence (opt5) from hemagglutinin__InfluenzaA__ADF80462
augaaggccauccuggugguccuccuguacaccuucgcuacagccaacgcggacacgcuuugcauuggcuaucacgcuaauaacagcaccgauacaguugacaccgugcuggagaagaaugugacagucacccauuccgugaaccuccuggaagauaagcacaaugggaaacuuuguaagcugagaggaguugcuccccuccaucugggcaaaugcaacaucgccggguggauucugggaaauccugagugugaaucucucagcacagccuccucuuggagcuacaucguggagaccuccaacucugacaauggcacgugcuauccgggggauuuuauugacuacgaagaacugcgggagcagcuuagcuccgucagcucuuucgaacgcuuugagaucuuccccaagaucuccagcuggccuaaccacgauucuaauaagggagugaccgccgcuuguccccaugccggcgcgaaauccuuuuauaagaaccugauuuggcucguuaaaaagggcaauagcuacccuaaacugucuaaguccuauaucaacgacaaggggaaagaagugcuuguccuguggggcauucaccaccccagcacauccgccgaucaacagucucucuaccagaaugcugacgccuacguguucgugggaaccagcagauauuccaagaaauuuaagccugagaucgcuauucggccgaaaguccgcgaucaggaggggagaaugaacuacuauuggacacugguugaacccggagacaagaucaccuucgaggccacgggcaaccugguggugccucgguacgcguuugccauggaacgcaaugcugggagcggaauuaucaucucugauacacccguccaugacugcaacaccacaugucaaaccccuaaaggcgccauuaauaccucccuccccuuccagaacauccacccgauuacaaucggcaagugcccuaaguaugugaaaagcacgaagcugagacuugcuaccgggcugcggaauguucccucuauucagagccgcggacucuuuggcgccaucgccggguucaucgagggaggcuggacagggaugguggacggaugguacggcuaucaucaccagaacgaacaaggcuccggguacgcugcggaucugaaaucuacccagaaugccauugacgagaucacaaacaaggucaauagcgugauugagaaaaugaacacccaguuuacggcuguuggaaaggaguucaaucaccuugagaagagaaucgaaaaccugaauaaaaagguggaugacggcuuccucgauauuuggacauacaacgccgagcugcugguccuccuggaaaaugagcggacccuugacuaucaugauuccaacgugaaaaaccuguacgagaagguccgcagccagcucaaaaauaacgccaaggaaaucgggaauggauguuuugaguucuaucacaagugcgacaacaccuguauggaaucugugaaaaauggcacauacgauuauccuaaguacuccgaggaagcuaaacugaacagagaggagaucgacgggguuaaacuugaaagcacccggauuuaucaaauccuggccauuuacucuacaguggcguccagccucguccuggugguuucccugggcgcuaucucuuuuuggaugugcagcaauggaucccuccagugccgcauuuguaucuga

SEQ ID NO: 196698 - RNA, 1701 nt, Artificial Sequence; identical to SEQ ID NO: 194741
  derived and/or modified CDS sequence (opt5) from hemagglutinin__InfluenzaA__ADF80470

SEQ ID NO: 196699 - RNA, 1701 nt, Artificial Sequence
  derived and/or modified CDS sequence (opt5) from hemagglutinin__InfluenzaA__ADF80478
augaaggccauccuggugguccuccuguacaccuucgcuacagccaacgcggacacgcuuugcauuggcuaucacgcuaauaacagcaccgauacaguugacaccgugcuggagaagaaugugacagucacccauuccgugaaccuccuggaagauaagcacaaugggaaacuuuguaagcugagaggaguugcuccccuccaucugggcaaaugcaacaucgccggguggauucugggaaauccugagugugaaucucucagcacagccuccucuuggagcuacaucguggagaccuccucuagcgacaacggcacgugcuauccgggggauuuuauugacuacgaagaacugcgggagcagcuuuccagcgucucuuccuucgaacgcuuugagaucuuccccaagaccagcucuuggccuaaucacgaucccaacaagggagugacagccgcuuguccucaugccggcgcgaaauccuuuuauaagaaucugaucuggcucguuaaaaagggcaacagcuaccccaaacugucuaaguccuauauuaaugacaaggggaaagaagugcuuguccuguggggaauccaccacccuagcaccuccgccgaucaacagucucucuaccagaacgcugacgccuacguguucgugggcacaagcagauauuccaagaaauuuaagccggagauugcuauccggcccaaaguccgcgaucaggaggggagaaugaauuacuauuggacccugguugaaccuggagacaagauuacguucgaggccacaggcaaccugauggugccccgguacgcguuugccauggaacgcaacgcugggagcggaaucauuaucucugauaccccugugcaugacugcaauacaaccugucaaacccccaaaggcgccaucaacacaucccucccguuccagaauauucacccuaucacgauuggcaagugccccaaguaugucaaaagcaccaagcugagacuugcuacagggcugcggaacgugccuucuauccagagccgcggacucuuuggcgccauugccggguucaucgagggaggcuggaccgggaugguugacggaugguacggcuaucaucaccagaaugaacaaggcuccggguacgcugcggaucugaaaucuacacagaacgccaucgacgagauuaccaauaaggugaacagcgucaucgagaaaaugaauacgcaguuuacagcugugggaaaggaguucaaccaccuugagaagagaauugaaaaucugaacaaaaagguugaugacggcuuccucgauaucuggaccuacaaugccgagcugcuggugcuccuggaaaacgagcggacccuugacuaucaugauuccaaugucaaaaaccuguacgagaaggugcgcagccagcucaaaaacaaugccaaggaaauugggaacggauguuuugaguucuaucacaagugcgacaauacauguauggaaucugucaaaaacggcaccuacgauuaucccaaguacuccgaggaagcuaaacugaauagagaggagaucgacggggugaaacuugaaagcacacggaucuaucaaauucuggccaucuacucuacgguugcguccagccucgugcuggucgugucccugggcgcuauuucuuuuuggaugugcagcaacggaucccuccagugccgcaucuguauuuga

SEQ ID NO: 196700 - RNA, 1701 nt, Artificial Sequence
  derived and/or modified CDS sequence (opt5) from hemagglutinin__InfluenzaA__ADF80494
augaaggccauccuggugguccuccuguacaccuucgcuacagccaacgcggacacgcuuugcauuggcuaucacgcuaauaacagcaccgauacaguugacaccgugcuggagaaaaaugugacagucacccauuccgugaaccuccuggaagauaagcacaaugggaaacuuuguaagcugagaggaguugcuccccuccaucugggcaaaugcaacaucgccggguggauucugggaaauccugagugugaaucucucagcacagccuccucuuggagcuacaucguggagaccuccucuagcgacaacggcacgugcuauccgggggauuuuauugacuacgaagaacugcgggagcagcuuuccagcgucucuuccuucgaacgcuuugagaucuuccccaagaccagcucuuggccuaaucacgauuccaacaagggagugacagccgcuuguccccaugccggcgcgaaaucuuuuuauaagaaucugaucuggcucguuaaaaagggcaacagcuacccuaaacuguccaagagcuauauuaaugacaaggggaaagaagugcuuguccuguggggaauccaccaccccuccaccucugccgaucaacagagccucuaccagaacgcugacgccuacguguucgugggcacauccagauauagcaagaaauuuaagccugagauugcuauccggccgaaaguccgcgaucaggaggggagaaugaauuacuauuggacccugguugaacccggagacaagauuacguucgaggccacaggcaaccugcucgugccucgguacgcguuugccauggaacgcaacgcugggucuggaaucauuaucuccgauacccccgugcaugacugcaauacaaccugucaaaccccuaaaggcgccaucaacacaagccugcccuuccagaauauucacccgaucacgauuggcaagugcccuaaguaugucaaaucuaccaaacuuagacuggcuacagggcuccggaacgugcccagcauccagucccgcggacuguuuggcgccauugccggguucaucgagggaggcuggaccgggaugguugacggaugguacggcuaucaucaccagaaugaacaaggcucuggguacgcugcggaucuuaagagcacacagaacgccaucgacgagauuaccaauaaggugaacuccgucaucgagaaaaugaauacgcaguuuacagcugugggaaaggaguucaaccaccuggagaagagaauugaaaaucucaacaaaaagguugaugacggcuuccuggauaucuggaccuacaaugccgagcugcucgugcugcuugaaaacgagcggacccuggacuaucaugauagcaaugucaaaaaccucuacgagaaggugcgcucucagcugaaaacaaacgccaaggaaauugggaauggauguuuugaguucuaucacaagugcgacaacaccuguauggaauccgucaaaaauggcacauacgauuauccuaaguacagcgaggaagcuaaacuuaacagagaggagaucgacggggugaagcuggaaucuacgcggaucuaucaaauucucgccaucuacuccaccguugcgagcucccuggugcuggucgugucucucggcgcuauuagcuuuuggaugugcuccaauggaucucugcagugccgcaucuguauuuga

SEQ ID NO: 196701 - RNA, 1701 nt, Artificial Sequence; identical to SEQ ID NO: 196700
  derived and/or modified CDS sequence (opt5) from hemagglutinin__InfluenzaA__ADF80498

SEQ ID NO: 196702 - RNA, 1701 nt, Artificial Sequence; identical to SEQ ID NO: 195365
  derived and/or modified CDS sequence (opt5) from hemagglutinin__InfluenzaA__ADF80502

SEQ ID NO: 196703 - RNA, 1701 nt, Artificial Sequence
  derived and/or modified CDS sequence (opt5) from hemagglutinin__InfluenzaA__ADF80506
augaaggccauccuggugguccuccuguacaccuucgcuacagccaacgcggacacgcuuugcauuggcuaucacgcuaauaacagcaccgauacaguugacaccgugcuggagagaaaugugacagucacccauuccgugaaccuccuggaagauaaacacaaugggaagcuguguaaacugcggggaguugcgccccuccaucugggcaagugcucuaucgccggguggauucugggaaacccugagugugaaagccucuccacagcuucuagcugguccuacaucguggagaccucuagcuccgacaauggcacgugcuauccgggggauuuuauugacuacgaagaacugcgcgagcagcuuagcucugucuccagcuucgaaagauuugagaucuuccccaaaaccucuuccuggccuaaccacgaucccaauaagggagugacagccgcuuguccucaugccggcgccaagagcuuuuauaaaaaccugaucuggcucguuaagaaagaaaauucuuaccccaagcuguccaaaagcuauauuaacgacaagggcaaggaggugcuuguccugugggggauccaccacccuuccaccucugccgaucaacagagccucuaccagaaugcugacgccuacguguucgugggaacaucccgguauagcaaaaaguuuaaaccggagauugcuauccgccccaaggucagagaucaggaaggccggaugaacuacuauuggacccugguugagccuggggacaaaauuacguucgaagccacaggaaaucugguggugccccgcuacgcguuugccauggagagaaacgcuggcucugggaucauuaucuccgauaccccuguccaugacugcaacacaaccugucaaacccccaagggagccaucaauacaagccucccguuccagaacauucacccuaucacgauuggcaaaugccccaaguaugugaagucuaccaaacugcggcuugcuacaggccugcgcaauguuccuagcauccaguccagagggcucuuuggagccauugccggcuucaucgaagggggauggaccggcaugguggacgggugguacggauaucaucaccagaacgagcaaggcucuggcuacgcugcggaucuuaagagcacacagaaugccaucgacgagauuaccaacaaagucaauuccgugaucgaaaagaugaacacgcaguuuacagcuguugggaaagaguucaaucaccuugaaaagcggauugagaaccugaauaagaaaguggaugacggauuccucgauaucuggaccuacaacgccgaacugcugguccuccuggagaaugagcgcacccuugacuaucaugauagcaacgugaagaaucuguacgaaaaagucagaucucagcucaagaacaacgccaaagagauuggcaauggguguuuugaguucuaucacaagugcgacaacacauguauggaguccgugaagaauggaaccuacgauuaucccaaauacagcgaagaggcuaagcugaaccgggaggaaaucgacggcguuaaacuugagucuacacgcaucuaucaaauucuggccaucuacuccacgguggcgagcucccucguccuggugguuucucugggggcuauuagcuuuuggaugugcuccaauggcucucuccagugcagaaucuguauuuga

SEQ ID NO: 196704 - RNA, 1701 nt, Artificial Sequence
  derived and/or modified CDS sequence (opt5) from hemagglutinin__InfluenzaA__ADF83741
augaagaccaucauugcccugagcuacauccucugccugguguucgcucagaaacuucccggcaacgacaauuccacagccacgcugugucucgggcaccaugcggucccuaacggaaccauuguuaagacaaucaccaaugaucaaauugaggugacaaacgcuaccgaacuggugcagucuagcuccacaggcgagaucugcgacucuccgcaccagauccuugaugggaaaaauuguacccugauugacgcccuccugggagauccccagugcgacggcuuucaaaacaagaaaugggaucuguucgucgaaagaagcaaggccuauuccaauuguuacccuuaugacgugcccgauuacgcuucucuccggagccugguugccuccagcgggacgcuugaguuuaacaaugaaucuuucaacuggaccggagugacacagaauggcaccuccagcgcuugcauccgcagaucuaagaacuccuuuuucagccggcugaauuggcucacacaucugaacuuuaaauauccugcccuuaaugucaccaugcccaacaacgagcaguucgacaagcuguacauuuggggcgugcaccauccugggacggauaaagaccagaucuuucucuaugcgcaagccucuggacgcauuacaguuuccaccaagagaagccagcagacagcuaucccgaauauuggcucccggccccgcgugagaaacaucccuucucggaucagcauuuacuggaccaucgucaaacccggggauauucugcugaucaauuccaccggaaaccucauugccccucgcggcuacuucaagaucagaagcgggaagucuuccgugaugcggagcgacgcucccaucggaaaauguaauucugacugcauuacaccgaacggcagcaucccuaaugauaagcccuuucagaacgugaaucgcauuacguauggcgccuguccuagauacgucaaacaaaacacccugaaacuugcgacagggaugcggaauguucccgagaagcagacccgcggaaucuucggcgccauugcuggguuuaucgaaaacggaugggagggcaugguggacgggugguauggauucagacaccaaaauuccgaaggccggggccaggccgcugaucugaagucuacacaggccgccaucgaccagauuaacgggaaacucaauagacugaucggaaagaccaacgagaaguuccaccagauugagaaagaauuuagcgagguggaaggccgcauccaagaucuugagaaguacgucgaagacacgaaaauugaucugugguccuauaacgcugagcuccugguggcgcuggagaaucagcauacaaucgaccucaccgauagcgaaaugaacaagcuguucgagaaaaccaagaagcagcuucgggaaaaugccgaggacauggggaacggaugcuuuaaaauuuaccacaagugugauaaugcuugcaucggcucuaucagaaacgggacauaugaccaugacguuuaccgcgaugaagcccugaauaaccgguuccagauuaaaggcguggagcucaaguccggauacaaagacuggauccuguggauuagcuuugccaucucuugcuuccuucugugugucgcucuccugggcuuuauuaugugggccugccaaaaggggaauaucagauguaacaucugcauuuga

SEQ ID NO: 196705 - RNA, 1701 nt, Artificial Sequence; identical to SEQ ID NO: 195483
  derived and/or modified CDS sequence (opt5) from hemagglutinin__InfluenzaA__ADF83752

SEQ ID NO: 196706 - RNA, 1701 nt, Artificial Sequence; identical to SEQ ID NO: 196293
  derived and/or modified CDS sequence (opt5) from hemagglutinin__InfluenzaA__ADF83763

SEQ ID NO: 196707 - RNA, 1701 nt, Artificial Sequence; identical to SEQ ID NO: 196293
  derived and/or modified CDS sequence (opt5) from hemagglutinin__InfluenzaA__ADF83773

SEQ ID NO: 196708 - RNA, 1701 nt, Artificial Sequence
  derived and/or modified CDS sequence (opt5) from hemagglutinin__InfluenzaA__ADF83783
augaaggccauccuggugguccuccuguacaccuucgcuacagccaacgcggacacgcuuugcauuggcuaucacgcuaauaacagcaccgauacaguugacaccgugcuggagaagaaugugacagucacccauuccgugaaccuccuggaagauaagcacaaugggaaacuuuguaagcugagaggaguugcuccccuccaucugggcaaaugcaacaucgccggguggauucugggaaauccugagugugaaucucucagcacagccuccucuuggagcuacaucguggagaccuccucuagcgacaacggcacgugcuauccgggggauuuuauugacuacgaagaacugcgggagcagcuuuccagcgucucuuccuucgaacgcuuugagaucuuccccaagaccagcucuuggccuaaucacgauuccaacaagggagugacagccgcuuguccccaugccggcgcgaaaucuuuuuauaagaaucugaucuggcucguuaaaaagggcaacagcuacccuaaacuguccaagagcuauauuaaugacaaggggaaagaagugcuuguccuguggggaauccaccaccccuccaccucugccgaucaacagagccucuaccagaacgcugacgccuacguguucgugggcacauccagauauagcaagaaauuuaagccugagauugcuauccggccgaaaguccgcgaucaggaggggagaaugaauuacuauuggacccugguugaacccggagacaagauuacguucgaggccacaggcaaccugguggugccucgguacgcguuugccauggaacgcaacgcugggucuggaaucauuaucuccgauacccccguccaugacugcaauacaaccugucaaaccccuaaaggcgccaucaacacaagccuccccuuccagaauauucacccgacgaccaucggcaagugcccuaaguaugugaaaucuacaaagcugagacuugcuaccgggcugcggaacguucccagcauucagucccgcggacucuuuggcgccaucgccggguucauugagggaggcuggacagggaugguggacggaugguacggcuaucaucaccagaaugaacaaggcucuggguacgcugcggaucugaaaagcacccagaacgccaucgacgagaucacgaauaaggucaacuccgugauugagaaaaugaauacacaguuuaccgcuguuggaaaggaguucaaccaccuugagaagagaaucgaaaaucugaacaaaaagguggaugacggcuuccucgauauuuggaccuacaaugccgagcugcugguccuccuggaaaacgagcggacacuugacuaucaugauagcaaugugaaaaaccuguacgagaagguccgcucucagcucaaaaacaaugccaaggaaaucgggaacggauguuuugaguucuaucacaagugcgacaauaccuguauggaauccgugaaaaacggcacauacgauuauccuaaguacagcgaggaagcuaaacugaauagagaggagauugacgggguuaaacuugaaucuacgcggaucuaucaaauccuggccauuuacuccaccguggcgagcucccucguccuggugguuucucugggcgcuaucagcuuuuggaugugcuccaacggaucucuccagugccgcauuuguaucuga

SEQ ID NO: 196709 - RNA, 1701 nt, Artificial Sequence; identical to SEQ ID NO: 196368
  derived and/or modified CDS sequence (opt5) from hemagglutinin__InfluenzaA__ADF83793

SEQ ID NO: 196710 - RNA, 1701 nt, Artificial Sequence
  derived and/or modified CDS sequence (opt5) from hemagglutinin__InfluenzaA__ADF83803
augaaggccauccuggugguccuccuguacaccuucgcuacagccaacgcggacacgcuuugcauuggcuaucacgcuaauaacagcaccgauacaguugacaccgugcuggagaagaaugugacagucacccauuccgugaaccuccuggaagauaagcacaaugggaaacuuuguaagcugagaggaguugcuccccuccaucugggcaaaugcaacaucgccggguggauucugggaaauccugagugugaaacacucucuaccgccagcuccuggucuuacaucguggagacgagcuccucugacaacgggaccugcuauccgggcgauuuuauugacuacgaagaacugcgggagcagcuuagcuccgucagcucuuucgaacgcuuugagaucuuccccaagacauccagcuggccuaaucacgauucuaacaagggagugaccgccgcuuguccccaugccggcgcgaaauccuuuuauaagaaucugaucuggcucguuaaaaagggcaacagcuacccuaaacugucuaaguccuauauuaaugacaaggggaaagaagugcuuguccuguggggaauccaccaccccagcacauccgccgaucaacagucucucuaccagaacgcugacgccuacguguucgugggcaccagcagauauuccaagaaauuuaagccugagauugcuauccggccgaaaguccgcgaucaggaggggagaaugaauuacuauuggacgcugguugaacccggagacaagauuacauucgaggccaccggcaaccugguggugccucgguacgcguuugccauggaacgcaacgcugggagcggaaucauuaucucugauacacccguccaugacugcaauaccaccugucaaacaccuaaaggcgccaucaacacgucccuccccuuccagaaugugcacccgauuaccaucggcaagugcccuaaguauguuaaaagcacaaagcugagacuugcuaccgggcugcggaacgugcccucuauucagagccgcggacucuuuggcgccaucgccggguucauugagggaggcuggacagggauggucgacggaugguacggcuaucaucaccagaaugaacaaggcuccggguacgcugcggaucugaaaucuacccagaacgccaucgacgagaucacgaauaaggugaacagcguuauugagaaaaugaauacacaguuuaccgcugugggaaaggaguucaaccaccuugagaagagaaucgaaaaucugaacaaaaaggucgaugacggcuuccucgauauuuggaccuacaaugccgagcugcuggugcuccuggaaaacgagcggacacuugacuaucaugauuccaaugucaaaaaccuguacgagaaggugcgcagccagcucaaaaacaaugccaaggaaaccgggaacggauguuuugaguucuaucacaagugcgacaauacauguauggaaucuguuaaaaacggcacguacgauuauccuaaguacuccgaggaagcuaaacugaauagagaggagaucgacggggugaaacuugaaagcacccggauuuaucaaauccuggccaucuacucuacagucgcguccagccucgugcugguugugucccugggcgcuauuucuuuuuggaugugcagcaacggaucccuccagugccgcaucuguauuuga

SEQ ID NO: 196711 - RNA, 1701 nt, Artificial Sequence
  derived and/or modified CDS sequence (opt5) from hemagglutinin__InfluenzaA__ADF83813
augaaggccauccuggugguccuccuguacaccuucgcuacagccaacgcggacacgcuuugcauuggcuaucacgcuaauaacagcaccgauacaguugacaccgugcuggagaagaaugugacagucacccauuccgugaaccuccuggaagauaagcacaaugggaaacuuuguaagcugagaggaguugcuccccuccaucugggcaaaugcaacaucgccggguggauucugggaaauccugagugugaaucucucagcacagccuccucuuggagcuacaucguggagaccuccucuagcgacaacggcacgugcuauccgggggauuuuauugacuacgaagaacugcgggagcagcuuuccagcgucucuuccuucgaacgcuuugagaucuuccccaagaccagcucuuggccuaaucacgauuccaacaagggagugacagccgcuuguccccaugccggcgcgaaaucuuuuuauaagaaucugaucuggcucguuaaaaagggcaacagcuacccuaaacuguccaagagcuauauuaaugacaaggggaaagaagugcuuguccuguggggaauccaccaccccuccaccucuacagaucaacagagccucuaccagaacgccgacgcuuacguguucgugggcaccuccagauauagcaagaaauuuaagccugagauugccauccggccgaaaguccgcgaucaggaggggagaaugaauuacuauuggacgcugguugaacccggagacaagauuacauucgaggcuaccggcaaccugguggugccucgguacgccuuugcgauggaacgcaacgccgggucuggaaucauuaucuccgauacacccguccaugacugcaauaccaccugucaaacaccuaaaggcgcuaucaacacgagccuccccuuccagaauauucacccgaucaccauuggcaagugcccuaaguaugugaaaucuacaaagcugagacuugccaccgggcugcggaacguucccagcauccagucccgcggacucuuuggcgcuauugccggguucaucgagggaggcuggacagggaugguggacggaugguacggcuaucaucaccagaaugaacaaggcucuggguacgccgcugaucugaaaagcacccagaacgcgaucgacgagauuacgaauaaggucaacuccgugaucgagaaaaugaauacacaguuuaccgccguuggaaaggaguucaaccaccuugagaagagaauugaaaaucugaacaaaaagguggaugacggcuuccucgauaucuggaccuacaaugcugagcugcugguccuccuggaaaacgagcggacacuugacuaucaugauagcaaugugaaaaaccuguacgagaagguccgcucucagcucaaaaacaaugccaaggaaauugggaacggauguuuugaguucuaucacaagugcgacaauaccuguauggaauccgugaaaaacggcacauacgauuauccuaaguacagcgaggaagccaaacugaauagagaggagaucgacgggguuaaacuugaaucuacgcggaucuaucaaauucuggcuaucuacuccaccguggccagcucccucguccuggugguuucucugggcgcgauuagcuuuuggaugugcuccaacggaucucuccagugccgcaucuguauuuga

SEQ ID NO: 196712 - RNA, 1701 nt, Artificial Sequence
  derived and/or modified CDS sequence (opt5) from hemagglutinin__InfluenzaA__ADF83823
augaaggccauccuggugguccuccuguacaccuucgcuacagccaacgcggacacgcuuugcauuggcuaucacgcuaauaacagcaccgauacaguugacaccgugcuggagaagaaugugacagucacccauuccgugaaccuccuggaagauaagcacaaugggaaacuuuguaagcugagaggaguugcuccccuccaucugggcaaaugcaacaucgccggguggauucugggaaauccugagugugaaucucucagcacagccuccucuuggagcuacaucguggagaccuccucuagcgacaacggcacgugcuauccgggggauuuuauugacuacgaagaacugcgggagcagcuuuccagcgucucuuccuucgaacgcuuugagaucuuccccaagaccagcucuuggccuaaucacgauuccaacaagggagugacagccgcuuguccccaugccggcgcgaaaucuuuuuauaagaaucugaucuggcucguuaaaaagggcaacagcuacccuaaacuguccaagagcuauauuaaugacaaggggaaagaagugcuuguccuguggggaauccaccaccccuccaccucugccgaucaacagagccucuaccagaacgcugacuccuacguguucgugggcacaagcagauauucuaagaaauuuaagccugagauugccauccggccgaaaguccgcgaucaggaggggagaaugaauuacuauuggacccugguugaacccggagacaagauuacguucgaggcuacaggcaaccugguggugccucgguacgccuuugcgauggaacgcaacgccggguccggaaucauuaucagcgauacccccguccaugacugcaauacaaccugucaaaccccuaaaggcgcuaucaacacaucucuccccuuccagaauauucacccgaucacgauuggcaagugcccuaaguaugugaaaagcaccaagcugagacuugccacagggcugcggaacauccccuccauucagucucgcggacucuuuggcgcuaucgccggguucaucgagggaggcuggaccgggaugguugacggaugguacggcuaucaucaccagaaugaacaaggcagcggguacgccgcugaucugaaauccacacagaacgcgauugacgagaucaccaauaaggugaacagcgucauugagaaaaugaauacgcaguuuacagccgugggaaaggaguucaaccaccuugagaagagaaucgaaaaucugaacaaaaagguugaugacggcuuccucgauauuuggaccuacaaugcugagcugcuggugcuccuggaaaacgagcggacccuugacuaucaugauucuaaugucaaaaaccuguacgagaaggugcgcucccagcucaaaaacaaugccaaggaaaucgggaacggauguuuugaguucuaucacaagugcgacaauacauguauggaaagcgucaaaaacggcaccuacgauuauccuaaguacucugaggaagccaaacugaauagagaggagaucgacggggugaaacuugaauccacacggauuuaucaaauccuggcuauuuacagcacgguugccuccucucucgugcuggucgugagccugggcgcgaucuccuuuuggaugugcucuaacggaagccuccagugccgcauuuguaucuga

SEQ ID NO: 196713 - RNA, 1701 nt, Artificial Sequence; identical to SEQ ID NO: 196293
  derived and/or modified CDS sequence (opt5) from hemagglutinin__InfluenzaA__ADF83833

SEQ ID NO: 196714 - RNA, 1701 nt, Artificial Sequence; identical to SEQ ID NO: 196293
  derived and/or modified CDS sequence (opt5) from hemagglutinin__InfluenzaA__ADF83843

SEQ ID NO: 196715 - RNA, 1701 nt, Artificial Sequence; identical to SEQ ID NO: 196293
  derived and/or modified CDS sequence (opt5) from hemagglutinin__InfluenzaA__ADF83853

SEQ ID NO: 196716 - RNA, 1701 nt, Artificial Sequence
  derived and/or modified CDS sequence (opt5) from hemagglutinin__InfluenzaA__ADF83873
augaaggccauccuggugguccuccuguacaccuucgcuacagccaacgcggacacgcuuugcauuggcuaucacgcuaauaacagcaccgauacaguugacaccgugcuggagaaaaaugugacagucacccauuccgugaaccuccuggaagauaagcacaaugggaaacuuuguaagcugagaggaguugcuccccuccaucugggcaaaugcaacaucgccggguggauucugggaaauccugagugugaaucucucagcacagccaacuccuggucuuacaucguggagaccagcuccucugacaauggcacgugcuauccgggggauuuuauugacuacgaagaacugcgggagcagcuuagcuccgucagcucuuucgaacgcuuugagaucuuccccaagaccuccagcuggccuaaccacgauucuaauaagggagugacagccgcuuguccccaugccggcgcgaaauccuuuuauaagaaccugaucuggcucguuaaaaagggcaauagcuacccuaaacugucuaaguccuauauuaacgacaaggggaaagaagugcuuguccuguggggaauccaccaccccagcaccuccacagaucaacagucucucuaccagaaugccgacgcuuacguguucgugggcaccagcagauauuccaagaaauuuaagccugagauugccauccggccgaaaguccgcgaucaggaggggagaaugaacuacuauuggacgcugguugaacccggagacaagauuacauucgaggcuaccggcaaccugguggugccucgguacgccuuugcgauggaacgcaaugccgggagcggaaucauuaucucugauacacccguccaugacugcaacaccaccugucaaacaccuaaaggcgcuaucaauacgucccuccccuuccagaacauucacccgaucaccauuggcaagugcccuaaguaugugaaaagcacaaagcugagacuugccaccgggcugcggaauguucccucuauccagagccgcggacucuuuggcgcuauugccggguucaucgagggaggcuggacagggaugguggacggaugguacggcuaucaucaccagaacgaacaaggcuccggguacgccgcugaucugaaaucuacccagaaugcgaucgacaagauuacgaacaaagucaauagcgugaucgagaagaugaacacacaguuuaccgccguuggaaaggaguucaaucaccuugagaaaagaauugagaaccugaauaagaaaguggaugacggcuuccucgauaucuggaccuacaacgcugaacugcugguccuccuggagaaugaacggacacuugacuaucaugauuccaacgugaagaaccuguacgagaaaguccgcagccagcucaagaauaacgccaaggagauugggaauggauguuuugaguucuaucacaaaugcgacaacaccuguauggaaucugugaagaauggcacauacgauuauccuaaauacuccgaagaggccaagcugaacagagaagagaucgacgggguuaaacuugagagcacgcggaucuaucaaauucuggcuaucuacucuaccguggccuccagccucguccuggugguuucccugggcgcgauuucuuuuuggaugugcagcaauggaucccuccagugccgcaucuguauuuga

SEQ ID NO: 196717 - RNA, 1701 nt, Artificial Sequence; identical to SEQ ID NO: 195905
  derived and/or modified CDS sequence (opt5) from hemagglutinin__InfluenzaA__ADF83885

SEQ ID NO: 196718 - RNA, 1701 nt, Artificial Sequence
  derived and/or modified CDS sequence (opt5) from hemagglutinin__InfluenzaA__ADF83895
augaaggccauccuggugguccuccuguacaccuucgcuacaguuaacgccgacacgcuuugcauuggcuaucacgcgaauaacagcaccgauacaguggacaccgugcuggagaaaaaugucacagugacccauuccguuaaccuccuggaagauaagcacaaugggaaacuuuguaagcugagaggaguggcuccccuccaucugggcaaaugcaacaucgccggguggauucugggaaauccugagugugaaucucucagcacagccuccucuuggagcuacaucgucgagaccuccucuagcgacaacggcacgugcuauccgggggauuuuauugacuacgaagaacugcgggagcagcuuuccagcgugucuuccuucgaacgcuuugagaucuuccccaagaccagcucuuggccuaaucacgauuccaacaagggaguuacagcugccuguccccaugcuggcgccaagagcuuuuauaaaaaucugaucuggcucgugaaaaagggcaacucuuacccuaaacuguccaagagcuauauuaaugacaaggggaaagaaguccuugugcuguggggaauccaccaccccuccaccucugcggaucaacagagccucuaccagaacgccgacgcuuacguguucgucggcacauccagauauagcaagaaauuuaagccugagauugccauccggccgaaaguucgcgaucaggaggggagaaugaauuacuauuggacccugguggaacccggagacaagauuacguucgaggcuacaggcaaccugguggucccucgguacgccuuugcgauggaacgcaacgccgggucuggaaucauuaucuccgauacccccgugcaugacugcaauacaaccugucaaaccccuaaaggcgcuaucaacacaagccuccccuuccagaauauucacccgaucacgauuggcaagugcccuaaguauguuaaaucuaccaagcugagacuugccacagggcugcggaacgugcccagcauccagucccgcggacucuuuggcgcuauugccggguucaucgagggaggcuggaccgggauggucgacggaugguacggcuaucaucaccagaaugaacaaggcucuggguacgccgcugaucugaaaagcacacagaacgcgaucgacaagauuaccaauaaagugaacuccguuaucgagaagaugaauacgcaguuuacagccgugggaaaggaguucaaccaccuugagaaaagaauugagaaucugaacaagaaagucgaugacggcuuccucgauaucuggaccuacaaugcugaacugcuggugcuccuggagaacgaacggacccuugacuaucaugauagcaaugucaagaaccuguacgagaaaauucgcucucagcucaagaacaaugccaaggagaucgggaacggauguuuugaguucuaucacaaaugcgacaauacauguauggaauccgugaagaacggcaccuacgauuauccuaaauacagcgaagaggccaagcugaauagagaagagaucgacgggguuaaacuugagucuacacggauuuaucaaauccuggcuauuuacuccacgguggccagcucccucguccuggugguuucucugggcgcgaucagcuuuuggaugugcuccaacggaucucuccagugccgcauuuguaucuga

SEQ ID NO: 196719 - RNA, 1701 nt, Artificial Sequence; identical to SEQ ID NO: 196293
  derived and/or modified CDS sequence (opt5) from hemagglutinin__InfluenzaA__ADF83915

SEQ ID NO: 196720 - RNA, 1701 nt, Artificial Sequence
  derived and/or modified CDS sequence (opt5) from hemagglutinin__InfluenzaA__ADF84441
augaaggccauccuggugguccuccuguacaccuucgcuacagccaacgcggacacgcuuugcauuggcuaucacgcuaauaacagcaccgauacaguugacaccgugcuggagaaaaaugugacagucacccauuccgugaaccuccuggaagauaagcacaaugggaaacuuuguaagcugagaggaguugcuccccuccaucugggcaaaugcaacaucgccggguggauucugggaaauccugagugugaaucucucagcacagccuccucuuggagcuacaucguggagaccuccucuagcgacaacggcacgugcuauccgggggauuuuauuaauuacgaagaacugcgggagcagcuuuccagcgucucuuccuucgaacgcuuugagaucuuccccaagaccagcucuuggccuucccacgacagcaacaagggagugacagccgcuuguccccaugccggcgcgaaaucuuuuuauaagaaucugaucuggcucguuaaaaagggcaacuccuacccuaaacugagcaaguccuauauuaaugauaaggggaaagaagugcuuguccuguggggaauccaccaccccucuaccagcgccgaccaacagucccucuaccagaacgcugaugccuacguguucgugggcacaagcagauauucuaagaaauuuaagccugagauugcuauccggccgaaaguccgcgaccaggaggggagaaugaauuacuauuggacccugguugaacccggagauaagauuacguucgaggccacaggcaaccugguggugccucgguacgcguuugccauggaacgcaacgcuggguccggaaucauuaucagcgacacccccguccaugauugcaauacaaccugucaaaccccuaaaggcgccaucaacacaucucuccccuuccagaauauucacccgaucacgauuggcaagugcccuaaguaugugaaaagcaccaagcugagacuugcuacagggcugcggaacguucccuccauccagucucgcggacucuuuggcgccauugccggguucaucgagggaggcuggaccgggaugguggacggaugguacggcuaucaucaccagaaugaacaaggcagcggguacgcugcggaccugaaauccacacagaacgccaucgauaagauuaccaauaaagucaacagcgugaucgagaagaugaauauucaguuuacggcuguuggaaaggaguucaaccaccuugagaaaagaaucgagaaucugaacaagaaaguggacgauggcuuccucgacauuuggacauacaaugccgaacugcugguccuccuggagaacgaacggacccuugauuaucaugacucuaaugugaagaaccuguacgagaaaguccgcucccagcucaagaacaaugccaaggagaucgggaacggauguuuugaguucuaucacaaaugcgauaauaccuguauggaaagcgugaagaacggcacauacgacuauccuaaauacucugaagaggcuaagcugaauagagaagagaucgaugggguuaaacuugaguccacccggauuuaucaaauccuggccauuuacagcacaguggcguccucucucguccuggugguuagccugggcgcuaucuccuuuuggaugugcucuaacggaagccuccagugccgcauuuguaucuga

SEQ ID NO: 196721 - RNA, 1701 nt, Artificial Sequence; identical to SEQ ID NO: 195905
  derived and/or modified CDS sequence (opt5) from hemagglutinin__InfluenzaA__ADF84459

SEQ ID NO: 196722 - RNA, 1701 nt, Artificial Sequence; identical to SEQ ID NO: 196293
  derived and/or modified CDS sequence (opt5) from hemagglutinin__InfluenzaA__ADF84469

SEQ ID NO: 196723 - RNA, 1701 nt, Artificial Sequence; identical to SEQ ID NO: 196354
  derived and/or modified CDS sequence (opt5) from hemagglutinin__InfluenzaA__ADF84479

SEQ ID NO: 196724 - RNA, 1701 nt, Artificial Sequence; identical to SEQ ID NO: 196293
  derived and/or modified CDS sequence (opt5) from hemagglutinin__InfluenzaA__ADF84489

SEQ ID NO: 196725 - RNA, 1701 nt, Artificial Sequence; identical to SEQ ID NO: 196293
  derived and/or modified CDS sequence (opt5) from hemagglutinin__InfluenzaA__ADF85017

SEQ ID NO: 196726 - RNA, 1701 nt, Artificial Sequence; identical to SEQ ID NO: 196293
  derived and/or modified CDS sequence (opt5) from hemagglutinin__InfluenzaA__ADF87152

SEQ ID NO: 196727 - RNA, 1701 nt, Artificial Sequence
  derived and/or modified CDS sequence (opt5) from hemagglutinin__InfluenzaA__ADF87162
augaaggccauccuggugguccuccuguacaccuucgcuacagccaacgcggacacgcuuugcauuggcuaucacgcuaauaacagcaccgauacaguugacaccgugcuggagaaaaaugugacagucacccauuccgugaaccuccuggaagauaagcacaaugggaaacuuuguaagcugagaggaguugcuccccuccaucugggcaaaugcaacaucgccggguggauucugggaaauccugagugugaaucucucagcacagccuccucuuggagcuacaucguggagaccuccucuagcgacaacggcacgugcuauccgggggauuuuauugacuacgaagaacugcgggagcagcuuuccagcgucucuuccuucgaacgcuuugagaucuuccccaagaccagcucuuggccuaaucacgauuccaacaagggagugacagccgcuuguccccaugccggcgcgaaaucuuuuuauaagaaucugaucuggcucguuaaaaagggcaacagcuacccuaaacuguccaagagcuauauuaaugacaaggggaaagaagugcuuguccuguggggaauccaccaccccuccaccucugccgaucaacagagccucuaccagaacgcugacuccuacguguucgugggcacaagcaaguauucuaaaaaguuuaaaccugagauugccaucagaccgaagguccgggaucaggaggggcgcaugaauuacuauuggacccugguugaacccggagacaaaauuacguucgaggcuacaggcaaccugguggugccuagauacgccuuugcgauggaacggaacgccggguccggaaucauuaucagcgauacccccguccaugacugcaauacaaccugucaaaccccugagggcgcuaucaacacaucucuccccuuccagaauauucacccgaucacgauuggcaagugcccuaaguaugugaaaagcaccaagcugcgccuugccacagggcugagaaacguucccuccauccagucucggggacucuuuggcgcuauugccggguucaucgaaggaggcuggaccgggaugguggacggaugguacggcuaucaucaccagaaugagcaaggcagcggguacgccgcugaucugaaauccacacagaacgcgaucgacgagauuaccaauaaggucaacagcgugaucgaaaagaugaauacgcaguuuacagccguuggaaaggaguucaaccaccuugaaaagcgcauugagaaucugaacaaaaagguggaugacggcuuccucgauaucuggaccuacaaugcugaacugcugguccuccuggagaacgagagaacccuugacuaucaugauucuaaugugaaaaaccuguacgaaaagguccggucccagcucaaaaacaaugccaaggagauugggaacggauguuuugaguucuaucacaagugcgacaauacauguauggagagcgugaaaaacggcaccuacgauuauccuaaguacucugaagaggccaaacugaaucgcgaggaaaucgacgggguuaaacuugaguccacaagaaucuaucaaauucuggcuaucuacagcacgguggccuccucucucguccuggugguuagccugggcgcgauuuccuuuuggaugugcucuaacggaagccuccagugccggaucuguauuuga

SEQ ID NO: 196728 - RNA, 1701 nt, Artificial Sequence; identical to SEQ ID NO: 196293
  derived and/or modified CDS sequence (opt5) from hemagglutinin__InfluenzaA__ADF87172

SEQ ID NO: 196729 - RNA, 1701 nt, Artificial Sequence
  derived and/or modified CDS sequence (opt5) from hemagglutinin__InfluenzaA__ADF87182
augaacgccauccuggugguccuccuguacaccuucgcuacagccaaugcggacacgcuuugcauuggcuaucacgcuaacaauagcaccgauacaguugacacccugcucgagaagaacgugacagugacccauuccgucaaucugcuugaagauaaacacaacgggaagcuguguaaacucagaggaguggcgccccugcaucugggcaagugcaauaucgccggguggauucucggaaacccugagugugaaucucugagcacagcuuccucuuggagcuacaucguugagaccuccucuagcgacaauggcacgugcuauccgggggauuuuauugacuacgaagaacuucgggagcagcuguccagcgugucuuccuucgaacgcuuugagaucuuccccaaaaccagcucuuggccuaaccacgauuccaauaagggagucacagccgcuuguccccaugccggcgccaagagcuuuuauaaaaaccucaucuggcuggugaagaaaggcaauucuuacccuaaacuuuccaagagcuauauuaacgacaaggggaaggaaguucuggugcucuggggaauccaccaccccuccaccucugccgaucaacagagccuguaccagaaugcugacgccuacgucuucgugggcacauccagauauagcaaaaaguuuaaaccugagauugcuauccggccgaaggugcgcgaucaggaggggagaaugaacuaccauuggacccuggucgaacccggagacaaaauuacguucgaggccacaggcaaccucguugugccucgguaugcguuugccauggaacgcaaugcugggucuggaaucauuaucuccgaugcccccgugcacgacugcaacaccacaugucaaaccccuaagggcgcuaucaauaccagccugcccuuccagaacauucauccgaucacaauuggcaaaugcccuaaguacgucaagucuacgaaacuuagacuggccaccgggcuccggaaugugcccagcauccagucccgcggacuguuuggcgccauugcuggguucaucgagggaggcuggacagggaugguugacggaugguauggcuaccaccaccagaacgaacaaggcucuggguaugcggccgaucuuaagagcacccagaaugcuaucgacgagauuacaaacaaaaucaauuccgugauugagaagaugaacacccaguuuacggccgucggaaaagaguucaaucaucuggagaagagaaucgaaaaccucaauaagaaaguggaugacggcuuccuggauauuuggacauacaacgccgagcugcucguucugcuugaaaaugagcggacccuggacuaccacgauagcaacgugaagaaccucuaugagaaaguccgcucucagcugaagaauaacgcuaaagaaaucgggaauggauguuuugaguucuaccauaagugcgacaacaccuguauggaauccgugaagaauggcacauaugauuacccuaaauauagcgaggaagccaaacuuaacagagaggagaucgacggggucaagcuggaaucuacccggauuuaccaaauccucgcgauuuauuccacaguggcuagcucccugguucugguggucucucucggcgccaucagcuuuuggaugugcuccaauggaucucugcagugccgcauuuguaucuga

SEQ ID NO: 196730 - RNA, 1701 nt, Artificial Sequence; identical to SEQ ID NO: 196293
  derived and/or modified CDS sequence (opt5) from hemagglutinin__InfluenzaA__ADF87192

SEQ ID NO: 196731 - RNA, 1701 nt, Artificial Sequence
  derived and/or modified CDS sequence (opt5) from hemagglutinin__InfluenzaA__ADF87202
augaaggccauccuggugguccuccuguacaccuucgcuacagccaacgcggacacgcuuugcauuggcuaucacgcuaauaacagcaccgauacaguugacaccgugcuggagaaaaaugugacagucacccauuccgugaaccuccuggaagauaagcacaaugggaaacuuuguaagcugagaggaguugcuccccuccaucugggcaaaugcaacaucgccggguggauucugggaaauccugagugugaaucucucagcacagccuccucuuggagcuacaucguggagaccuccucuagcgacaacggcacgugcuauccgggggauuuuauugacuacgaagaacugcgggagcagcuuuccagcgucucuuccuucgaacgcuuugagaucuuccccaagaccagcucuuggccuaaucacgauuccaacaagggagugacagccgcuuguccccaugccggcgcgaaaucuuuuuauaagaaucugaucuggcucguuaaaaagggcaacagcuacccuaaacuguccaagagcuauauuaaugacaaggggaaagaagugcuuguccuguggggaauccaccaccccuccaccucugccgaucaacagagccucuaccagaacgcugacgccuacguguucgugggcacauccagauauagcaagaaauuuaagccugagauugcuauccggccgaaaguccgcgaucaggaggggagaaugaauuacuauuggacccugguugaacccggagacaagauuacguucgaggccacaggcaaccugguggugccucgguacgcguuugccauggaacgcaacgcugggucuggaaucauuaucuccgauacccccguccaugacugcaauacaaccugucaaaccccuaaaggcgccaucaacacaagccuccccuuccagaauauucacccgaucacgauuggcaagugcccuaaguaugugaaaucuaccaagcugagacuugcuacagggcugcggaacguucccagcauccagucccgcggacucuuuggcgccauugccggguucaucgagggaggcuggaccgggaugguggacggaugguacggcuaucaucaccagaaugaacaaggcucuggguuugcugcggaucugaaaagcacacagaacgccaucgacaagauuaccaauaaagucaacuccgugaucgagaagaugaauacgcaguucacagcuguuggaaaggaguucaaccaccuugagaaaagaauugagaaucugaacaagaaaguggaugacggcuuucucgauaucuggaccuacaaugccgaacugcugguccuccuggagaacgaacggacccuugacuaccaugauagcaaugugaagaaccuguaugagaaaguccgcucucagcucaagaacaaugccaaggagauugggaacggauguuucgaauuuuaccacaaaugcgacaauacauguauggaguccgugaagaacggcaccuaugauuacccuaaauauagcgaagaggcuaagcugaauagagaagagaucgacgggguuaaacuugagucuacacggaucuaccaaauucuggccaucuauuccacgguggcgagcucccucguccuggugguuucucugggcgcuauuagcuucuggaugugcuccaacggaucucuccagugccgcaucuguauuuga

SEQ ID NO: 196732 - RNA, 1701 nt, Artificial Sequence; identical to SEQ ID NO: 196293
  derived and/or modified CDS sequence (opt5) from hemagglutinin__InfluenzaA__ADF87212

SEQ ID NO: 196733 - RNA, 1701 nt, Artificial Sequence; identical to SEQ ID NO: 196456
  derived and/or modified CDS sequence (opt5) from hemagglutinin__InfluenzaA__ADF87232

SEQ ID NO: 196734 - RNA, 1701 nt, Artificial Sequence; identical to SEQ ID NO: 196293
  derived and/or modified CDS sequence (opt5) from hemagglutinin__InfluenzaA__ADF87242

SEQ ID NO: 196735 - RNA, 1701 nt, Artificial Sequence
  derived and/or modified CDS sequence (opt5) from hemagglutinin__InfluenzaA__ADF87252
augaaggccauccuggugguccuccuguacaccuucgcuacagccaacgcggacacgcuuugcauuggcuaucacgcuaauaacagcaccgauacaguugacaccgugcuggagaaaaaugugacagucacccauuccgugaaccuccuggaagauaagcacaaugggaaacuuuguaagcugagaggaguugcuccccuccaucugggcaaaugcaacaucgccggguggauucugggaaauccugagugugaaucucucagcacagccuccucuuggagcuacaucguggagaccuccucuagcgacaacggcacgugcuauccgggggauuuuauuaauuacgaagaacugcgggagcagcuuuccagcgucucuuccuucgaacgcuuugagaucuuccccaagaccagcucuuggccuaaccacgacuccaauaagggagugacagccgcuuguccccaugccggcgcgaaaucuuuuuauaagaaccugaucuggcucguuaaaaagggcaaaagcuacccuaagcuguccaagagcuauauuaaugauaaagggaaggaagugcuuguccuguggggaauccaccaccccuccaccucugccgaccaacagagccucuaccagaacgcugaugccuacguguucgugggcacauccagauauagcaaaaaguuuaaaccugagauugcuauccggccgaagguccgcgaccaggaggggagaaugaauuacuauuggacccugguugaacccggagauaaaauuacguucgaggccacaggcaaccugguggugccucgguacgcguuugccauggaacgcaacgcugggucuggaaucauuaucuccgacacccccguccaugauugcaauacaaccugucaaaccccuaagggcgccaucaacacaagccuccccuuccagaauauucacccgaucacgauuggcaagugcccuaaauaugugaagucuaccaaacugagacuugcuacagggcugcggaacguucccagcauccagucccgcggacucuuuggcgccauugccggguucaucgagggaggcuggaccgggaugguggacggaugguacggcuaucaucaccagaaugaacaaggcucuggguacgcugcggaccuuaagagcacacagaacgccaucgauaaaauuaccaauaaggucaacuccgugaucgagaagaugaauacgcaguuuacagcuguuggaaaagaguucaaccaccuugaaaagagaauugagaaucugaacaaaaagguggacgauggcuuccucgacaucuggaccuacaaugccgaacugcugguccuccuggagaacgaacggacccuugauuaucaugacagcaaugugaaaaaccuguacgagaagguccgcucucagcucaagaacaaugccaaagagauugggaacggauguuuugaguucuaucacaagugcgauaauacauguauggaguccgugaaaaacggcaccuacgacuauccuaaguacagcgaagaggcuaaacugaauagagaagagaucgaugggguuaagcuggagucuacacggaucuaucaaauucuggccaucuacuccacgguggcgagcucccucguccuggugguuucucugggcgcuauuagcuuuuggaugugcuccaacggaucucuccagugccgcaucuguauuuga

SEQ ID NO: 196736 - RNA, 1701 nt, Artificial Sequence; identical to SEQ ID NO: 196293
  derived and/or modified CDS sequence (opt5) from hemagglutinin__InfluenzaA__ADF87262

SEQ ID NO: 196737 - RNA, 1701 nt, Artificial Sequence; identical to SEQ ID NO: 195905
  derived and/or modified CDS sequence (opt5) from hemagglutinin__InfluenzaA__ADF87272

SEQ ID NO: 196738 - RNA, 1701 nt, Artificial Sequence; identical to SEQ ID NO: 195905
  derived and/or modified CDS sequence (opt5) from hemagglutinin__InfluenzaA__ADF87282

SEQ ID NO: 196739 - RNA, 1701 nt, Artificial Sequence
  derived and/or modified CDS sequence (opt5) from hemagglutinin__InfluenzaA__ADF87292
augaaggccauccuggugguccuccuguacaccuucgcuacagccaacgcggacacgcuuugcauuggcuaucacgcuaauaacagcaccgauacaguugacaccgugcugaaaaagaaugugacagucacccauuccgugaaccuccuggaggauaaacacaaugggaaacuuuguaaacugagaggaguugcuccccuccaucugggcaagugcaacaucgccggguggauucugggaaauccugaaugugagucucucagcacagccggcuccuggucuuacaucguggaaaccagcuccucugacaacgggacgugcuauccgggagauuuuauugacuacgaggaacugcgggagcagcuuagcuccgucagcucuuucgagcgcuuugaaaucuuccccaagaccuccagcuggccuaaucacgauucuaacaaaggcgugacagccgcuuguccccaugccggcgcgaaguccuuuuauaaaaaucugaucuggcucguuaagaaagggaacagcuacccuaagcugucuaaguccuauauuaaugacaaaggaaaggaggugcuuguccuguggggcauccaccaccccagcaccuccgccgaucaacagucucucuaccagaacgcugacgccuacguguucguggggacaagcagauauuccaaaaaguuuaaaccugaaauugcuauccggccgaagguccgcgaucaggagggaagaaugaauuacuauuggacccugguugagcccggcgacaaaauuacguucgaagccacagggaaccugguggugccucgguacgcguuugccauggagcgcaacgcuggaagcggcaucauuaucucugauacccccguccaugacugcaauacaaccugucaaaccccuaagggcgccaucaacacaucccuccccuuccagaauauucacccgaucacgauugggaagugcccuaaauauguuaagagcaccaaacugagacuugcuacaggacugcggaacgugcccucuauccagagccgcggccucuuuggggccauugccggauucaucgaaggcggguggaccggaaugguggacggcugguacggcuaucaucaccagaaugagcaaggguccggauacgcugcggaucugaagucuacacagaacgccaucgacgaaauuaccaauaaagucaacagcgugaucgagaagaugaauacgcaguuuacagcuguuggcaaggaguucaaccaccuugaaaagagaauugagaaucugaacaagaaaguggaugacggguuccucgauaucuggaccuacaaugccgaacugcugguccuccuggagaacgaacggacccuugacuaucaugauuccaaugugaagaaccuguacgagaaaguccgcagccagcucaagaacaaugccaaggagauuggaaacggcuguuuugaguucuaucacaaaugcgacaauauguguauggaaucugugaagaacgggacauacgauuauccuaaauacuccgaagaggcuaagcugaauagagaagagaucgacggcguuaaacuugagagcacccggaucuaucaaauucuggccaucuacucuacaguggcguccagccucguccuggugguuucccugggagcuauuucuuuuuggaugugcagcaacggcucccuccagugccgcaucuguauuuga

SEQ ID NO: 196740 - RNA, 1701 nt, Artificial Sequence; identical to SEQ ID NO: 195905
  derived and/or modified CDS sequence (opt5) from hemagglutinin__InfluenzaA__ADF87302

SEQ ID NO: 196741 - RNA, 1701 nt, Artificial Sequence
  derived and/or modified CDS sequence (opt5) from hemagglutinin__InfluenzaA__ADF87331
augaaggccauccuggugguccuccuguacaccuucgcuacagccaacgcggacacgcuuugcauuggcuaucacgcuaauaacagcaccgauacaguugacaccgugcuggagaaaaaugugacagucacccauuccgugaaccuccuggaagauaagcacaaugggaaacuuuguaagcugagaggaguugcuccccuccaucugggcaaaugcaacaucgccggguggauucugggaaauccugagugugaaucucucagcacagccuccucuuggagcuacaucguggagaccuccaacucugacaauggcacgugcuauccgggggauuuuauuaacuacgaagaacugcgggagcagcuuagcuccgucagcucuuucgaacgcuuugagaucuuccccaagaccuccagcuggccuaaucacgacucuaacaagggaaucacagccgcuuguccccaugccggcgcgaaauccuuuuauaagaaucugauuuggcucgugaaaaagggcaacagcuacccuaaacugucuaaguccuauaucaaugauaaggggaaagaaguucuugugcuguggggcauucaccaccccagcaccuccgccgaccaacagucucucuaccagaacgcugaugccuacgucuucgugggaagcuccagauauagcaagaaauuuaagccugagaucgcuauucggccgaaagugcgcgaccaggaggggagaaugaacuacuauuggacacuggucgaacccggagauaagaucaccuucgaggccacgggcaaucugguugugccucgguacgcguuugccauggaacgcaacgcugggucuggaauuaucaucuccgacacacccgugcaugauugcaauaccacaugucaaaccccuaaaggcgccauuaacaccagccuccccuuccagaauauccacccgauuacaaucggcaagugcccuaaguaugucaaaucuacgaagcugagacuugcuaccgggcugcggaacgugcccagcauucagucccgcggacucuuuggcgccaucgccggguucaucgagggaggcuggacagggaugguugacggaugguacggcuaucaucaccagaaugaacaaggcucuggguacgcugcggaccugaaaagcacccagaacgccauugauaagaucacaaauaaagugaacuccgucauugagaagaugaauacccaguuuacggcugugggaaaggaguucaaccaccuugagaaaagaaucgagaaucugaacaagaaaguugacgauggcuuccucgacauuuggacauacaaugccgaacugcuggugcuccuggagaacgaacggacccuugauuaucaugacagcaacgucaagaaucuguacgagaaagugcgcucucagcucaagaacaaugccaaggagaucgggaacggauguuuugaguucuaucacaaaugcgauaauaccuguauggaauccgucaagaacggcacauacgacuauccuaaauacagcgaagaggcuaagcugaauagagaagagaucgauggggugaaacuugagucuacccggauuuaucaaauccuggccauuuacuccacaguugcgagcucccucgugcuggucgugucucugggcgcuaucagcuuuuggaugugcuccaacggaucucuccagugccgcauuuguaucuga

SEQ ID NO: 196742 - RNA, 1701 nt, Artificial Sequence; identical to SEQ ID NO: 194741
  derived and/or modified CDS sequence (opt5) from hemagglutinin__InfluenzaA__ADF87341

SEQ ID NO: 196743 - RNA, 1701 nt, Artificial Sequence
  derived and/or modified CDS sequence (opt5) from hemagglutinin__InfluenzaA__ADF87351
augaaggccauccuggugguccuccuguacaccuucgcuacagccaacgcggacacgcuuugcauuggcuaucacgcuaauaacagcaccgauacaguugacaccgugcuggagaagaaugugacagucacccauuccgugaaccuccuggaagauaagcacaaugggaaacuuuguaagcugagaggaguugcuccccuccaucugggcaaaugcaacaucgccggguggauucugggaaauccugagugugacucucucagcacagccuccucuuggagcuacaucguggaaaccuccucuagcgauaacggcacgugcuauccgggggacuuuauugauuacgaggaacugcgggagcagcuuuccagcgucucuuccuucgagcgcuuugaaauguuccccaagaccagcucuuggccuaaucacgacuccaacaagggagugacagccgcuuguccccaugccggcgcgaaaucuuuuuauaagaaucugaucuggcucguuaaaaagggcaacagcuacccuaaacuguccaagagcuauaucaaugauaaggggaaagaggugcuuguccuguggggcauucaccaccccuccaccucugccgaccaacagagccucuaccagaacgcugaugccuacguguucgugggaacauccagauauagcaagaaauuuaagccugaaaucgcuauucggccgaaaguccgcgaccaggaggggagaaugaauuacuauuggacccugguugagcccggagauaagaucacguucgaagccacaggcaaccugguggugccucgguacgcguuugccauggagcgcaacgcugggucuggaauuaucauuuccgacacccccguccaugacugcaauacaaccugucaaaccccuaaaggcgccaucaacacaagccuccccuuccagaauauccacccgauuacgaucggcaagugcccuaaguaugugaaaucuaccaagcugagacuugcuacagggcugcggaacguucccagcauucagucccgcggacucuuuggcgccaucgccggguucauugaaggaggcuggaccgggaugguggauggaugguacggcuaucaucaccagaaugagcaaggcucuggguacgcugcggaccugaaaagcacacagaacgccaucgaugaaaucaccaauaaggucaacuccgugauugagaaaaugaauacgcaguuuacagcuguuggaaaggaguucaaccaccuugaaaagagaaucgagaaucugaacaaaaagguggacgauggcuuccucgacauuuggaccuacaaugccgaacugcugguccuccuggagaacgaacggacccuugauuaucaugacagcaaugugaaaaaccuguacgagaagguccgcucucagcucaaaaacaaugccaaggagaucgggaacggauguuuugaguucuaucacaagugcgauaauacauguauggaauccgugaaaaacggcaccuacgacuauccuaaguacagcgaagaggcuaaacugaauagagaagagauugaugggguuaaacuugagucuacacggaucuaucaaauccuggccauuuacuccacgguggcgagcucccucguccuggugguuucucugggcgcuaucagcuuuuggaugugcuccaacggaucucuccagugccgcauuuguaucuga

SEQ ID NO: 196744 - RNA, 1701 nt, Artificial Sequence; identical to SEQ ID NO: 196368
  derived and/or modified CDS sequence (opt5) from hemagglutinin__InfluenzaA__ADF87361

SEQ ID NO: 196745 - RNA, 1701 nt, Artificial Sequence; identical to SEQ ID NO: 195905
  derived and/or modified CDS sequence (opt5) from hemagglutinin__InfluenzaA__ADF87371

SEQ ID NO: 196746 - RNA, 1701 nt, Artificial Sequence
  derived and/or modified CDS sequence (opt5) from hemagglutinin__InfluenzaA__ADG08115
augaaggccauccuggugguccuccuguacaccuucgcuacagccaacgcggacacgcuuugcauuggcuaucacgcuaauaacagcaccgauacaguugacaccgugcuggagaagaaugugacagucacccauuccgugaaccuccuggaagauaagcacaaugggaaacuuuguaagcugagaggaguugcuccccuccaucugggcaaaugcaacaucgccggguggauucugggaaauccugagugugaaucucucagcacagccuccucuuggagcuacaucguggagaccuccucuagcggcaacgggacgugcuauccgggagacuuuauugauuacgaggagcugcgggagcagcuuuccagcgucucuuccuucgaacgcuuugagaucuuccccaagaccagcucuuggccuaaucacgacuccaacaagggcgugacagccgcuuguccccaugccggcgcgaaaucuuuuuauaagaaucugaucuggcucguuaaaaaggggaacagcuacccuaaacuguccaagagcuauauuaaugauaagggaaaagaagugcuuguccuguggggcauccaccaccccuccaccucugccgaccaacagagccucuaccagaacgcugaugccuacguguucguggggacauccagauauagcaagaaauuuaagccugagauugcuauccggccgaaaguccgcggacaggagggcagaaugaauuacuauuggacccugguugaacccggggacaagauuacguucgaggccacaggaaaccugguggugccucgguacgcguuugccauggaacgcaacgcuggcucuggcaucauuaucuccgauacccccguccaugacugcaauacaaccugucaaaccccuaaaggggccaucaacacaagccuccccuuccagaauauucacccgaucacgauuggaaagugcccuaaguaugugaaaucuaccaagcugagacuugcuacaggccugcggaacguucccagcauccagucccgcgggcucuuuggagccauugccggcuucaucgaagggggauggaccggcaugguggauggcugguacggguaucaucaccagaaugaacaaggaucuggcuacgcugcggaccugaaaagcacacagaacgccaucgacgagauuaccaauaaggucaacuccgugaucgagaaaaugaauacgcaguuuacagcuguugggaaggaguucaaccaccuugaaaagagaauugaaaaucugaacaaaaagguggaugacggauuccucgauaucuggaccuacaaugccgagcugcugguccuccuggaaaacgagcggacccuugacuaucaugauagcaaugugaaaaaccuguacgagaagguccgcucucagcucaaaaacaaugccaaggaaauuggcaacggguguuuugaguucuaucacaagugcgacaauacauguauggaauccgugaaaaacggcaccuacgauuauccuaaguacagcgaggaagcuaaacugaauagagaggagaucgacggaguuaaacuugaaucuacacggaucuaucaaauucuggccaucuacuccacgguggcgagcucccucguccuggugguuucucugggcgcuauuagcuuuuggaugugcuccaacgggucucuccagugccgcaucuguauuuga

SEQ ID NO: 196747 - RNA, 1701 nt, Artificial Sequence; identical to SEQ ID NO: 195483
  derived and/or modified CDS sequence (opt5) from hemagglutinin__InfluenzaA__ADG21004

SEQ ID NO: 196748 - RNA, 1701 nt, Artificial Sequence; identical to SEQ ID NO: 195483
  derived and/or modified CDS sequence (opt5) from hemagglutinin__InfluenzaA__ADG21006

SEQ ID NO: 196749 - RNA, 1701 nt, Artificial Sequence
  derived and/or modified CDS sequence (opt5) from hemagglutinin__InfluenzaA__ADG21008
augaagaccaucauugcccugagcuacauccucugccugguguucgcucagaaaauucccggcaacgacaauuccacagccacgcuuugucuggggcaccaugcggucccuaacggaaccaucguuaagacaauuaccaaugaucaaaucgaggugacaaacgcuaccgaacucgugcagucuagcuccacaggcgagaucugcgacucuccgcaccagauucuggauggggaaaauuguacccuuaucgacgcccugcucggagauccccagugcgacggcuuucaaaacaaaaagugggaucuguucgucgagagaagcaaauccuauucuaauuguuacccuuaugacgugcccgauuacgccagccugcggucccucguugcuagcucugggacgcuggaauuuaacaaugaguccuucaacuggaccggagugacacagaauggcaccagcucugccugcauucgcaaguccaacaauagcuuuuucucuagacuuaacuggcugacacaucucaaguuuaaauauccugcucugaaugucaccaugcccaacaacgagcaguucgacaaacuuuacaucuggggcgugcaccauccugggacggauaaugaccagauuuuucuguaugcccaagcguccggacggaucacaguuagcaccaagcgcucccagcagacagugauuccgaacaucggcucuagaccccggguccgcaauaucccuagcagaauuuccaucuacuggaccauugugaagcccggggauauccuccugauuaacagcaccggaaaucugaucgccccucggggcuacuucaaaauccgcucugggaaguccagcauuaugagaucugacgcucccaucggaaaguguaacagcgaaugcauuacaccgaauggcuccaucccuaacgacaaacccuuucagaaugugaaccggauuacguauggcgccuguccucgcuacgucaagcaaaauacccucaaacuggcuacagggaugagaaacguucccgagaagcagacccggggaaucuucggcgccaucgcgggguuuauugaaaauggaugggagggcaugguggaugggugguauggauuccgccaccagaacucugagggcagaggccaagccgcugaccuuaaaagcacacaggccgcuaucgaucagauuaaugggaagcugaaccggcucaucggaaaaaccaacgaaaaguuccaccagauugagaaggaauuuuccgagguggaaggcagaauccaagaccuggagaaauacgucgaggauacgaagauugaccuuuggagcuauaaugccgaacugcucguggcccuggagaaccagcauacaaucgaucugaccgacucugaaaugaauaaacucuucgagaagaccaaaaagcagcugcgcgaaaacgcugaggauauggggaauggaugcuuuaagaucuaccacaaaugugacaacgcgugcauuggcuccauccggaaugggacauaugaucaugacguuuacagagacgaggcccuuaacaaucgcuuccagauuaagggcguggaacugaaaagcggauacaaggauuggauccucuggauuucuuuugcuaucuccugcuuccugcuuugugucgcccugcucggcuuuaucaugugggccugccaaaaagggaacauucgguguaauaucugcauuuga

SEQ ID NO: 196750 - RNA, 1701 nt, Artificial Sequence
  derived and/or modified CDS sequence (opt5) from hemagglutinin__InfluenzaA__ADG21009
augaagaccaucauugcccugagcuacauccucugccugguguucgcucagaaacuucccggcaacgacaauuccacagccacgcugugucucgggcaccaugcggucccuaacggaaccauuguuaagacaaucaccaaugaucaaauugaggugacaaacgcuaccgaacuggugcagucuagcuccacaggcgagaucugcaauucuccgcaccagauccuugacggggaaaacuguacccugauugaugcccuccugggagacccccagugcgauggcuuucaaaauaaaaagugggaccuguucgucgagagaagcaaagccuauuccaacuguuacccuuaugaugugcccgacuacgcuucucuccggagccugguugccuccagcgggacgcuugaauuuaauaacgagucuuucaauuggaccggagugacacagaacggcaccuccagcgcuugcauccgcagaucuaauaacuccuuuuucagccggcugaauuggcucacacaucugcgcuuuaaguauccugcccuuaacgucaccaugcccaacaaugagcaguucgauaagcuguacauuuggggcgugcaccauccugggacggacaacgaucagaucuuucucuaugcgcaagccucuggaagaauuacaguuuccaccaaacggagccagcagacagugaucccgaauauuggcucccgccccagaguccggaacaucccuucucgcaucagcauuuacuggaccaucgugaagcccggggacauucugcugaucaauuccaccggaaaccucauugcuccuagaggcuacuucaaaauccggagcgggaagucuuccaucaugcgcagcgaugcccccauuggaaaauguaauucugaaugcaucacaccgaacggcagcauuccuaaugacaagcccuuucagaacgugaauagaaucacguauggcgcuuguccucgguacgucaagcaaaacacccugaaacuugccacagggaugcgcaauguucccgagaagcagaccagaggaauuuucggcgcgaucgccggguuuaucgaaaacggaugggagggcaugguggacgggugguauggauuccggcaccaaaauuccgagggcagaggccaggcugccgaucugaaaucuacacaggcugccauugaccagaucaacgggaagcucaaccgccugauuggaaaaaccaaugaaaaguuccaccagaucgagaaagaauuuagcgagguggaaggccggauucaagaucuugagaaguacgucgaggacacgaagaucgaucugugguccuauaacgccgaacuccugguggcucuggagaaucagcauacaauugaccucaccgauagcgaaaugaacaaacuguucgagaagaccaaaaagcagcuuagagaaaaugcggaggacauggggaacggaugcuuuaaaaucuaccacaagugugauaaugccugcaucggcucuauucgcaacgggacauaugaccaugauguuuaccgggacgaggcucugaauaacagauuccagaucaagggcguggaacucaaauccggauacaaggacuggauucuguggaucagcuuugccauuucuugcuuccuucugugugucgcccuccugggcuuuaucaugugggcuugccaaaaagggaauauccgcuguaacauuugcaucuga

SEQ ID NO: 196751 - RNA, 1701 nt, Artificial Sequence; identical to SEQ ID NO: 195483
  derived and/or modified CDS sequence (opt5) from hemagglutinin__InfluenzaA__ADG21010

SEQ ID NO: 196752 - RNA, 1701 nt, Artificial Sequence
  derived and/or modified CDS sequence (opt5) from hemagglutinin__InfluenzaA__ADG21011
augaagaccaucauugcccugagcuacauccucugccugguguucgcucagaaacuucccggcaacgacaauuccacagccacgcugugucucgggcaccaugcggucccuaacggaaccauuguuaagacaaucaccaaugaucaaauugaggugacaaacgcuaccgaacuggugcagucuagcuccacaggcgagaucugcgacucuccgcaccagauccuugauggggaaaauuguacccugauugacgcccuccugggagauccccagugcgacggcuuucaaaacaaaaagugggaucuguucgucgagagaagcaaagccuauuccaauuguuacccuuaugacgugcccgauuacgcuucucuccggagccugguugccuccagcgggacgcuugaauuuaacaaugagucuuucaacuggaccggagugacacagaauggcaccuccagcgcuugcauccgcagaucuaacaauuccuuuuucagccggcugaacuggcucacacaucugaauuuuaaguauccugcccuuaacgucaccaugcccaacaaugagcaguucgacaagcuguacauuuggggcgugcaccauccugggacggauaaagaccagaucuuucucuaugcgcaagccucuggacgcauuacaguuuccaccaagagaagccagcaggcugugaucccgaacauuggcucccggccccgcgucagagauaucccuucucggaucagcauuuacuggacaaucgugaaacccggggacauucugcugaucaauuccaccggaaaccucauugccccucgcggcuacuucaagaucagaagcgggaaaucuuccaucaugcggagcgacgcucccauuggaaaguguaauucugaaugcaucaccccgaacggcagcauuccuaaugauaagcccuuucagaacgugaaucgcaucacauauggcgccuguccuagauacgucaaacaaaacacgcugaaacuugcgaccgggaugcggaauguucccgagaagcagacacgcggaauuuucggcgccaucgcuggguuuaucgaaaacggaugggagggcaugguggacgggugguauggauucagacaccaaaauuccgagggccggggccaggccgcugaucugaagucuacccaggccgccauugaccagaucaacgggaaacucaauagacugauuggaaagacaaacgaaaaauuccaccagaucgagaaggaauuuagcgagguggaaggccgcauucaagaucuugagaaguacgucgaggacaccaaaaucgaucugugguccuauaacgcugaacuccugguggcgcuggagaaucagcauacgauugaccucacagauagcgaaaugaacaagcuguucgagaaaaccaagaaacagcuucgggaaaaugccgaggacauggggaacggaugcuuuaagaucuaccacaagugugauaaugcuugcaucggcucuauuagaaacgggaccuaugaccaugacguuuaccgcgaugaggcccugaauaaccgguuccagaucaaaggcguggaacucaaguccggauacaaagacuggauucuguggaucagcuuugccauuucuugcuuccuucugugugucgcucuccugggcuuuaucaugugggccugccaaaaggggaauaucagauguaacauuugcaucuga

SEQ ID NO: 196753 - RNA, 1701 nt, Artificial Sequence; identical to SEQ ID NO: 195483
  derived and/or modified CDS sequence (opt5) from hemagglutinin__InfluenzaA__ADG21012

SEQ ID NO: 196754 - RNA, 1701 nt, Artificial Sequence; identical to SEQ ID NO: 195483
  derived and/or modified CDS sequence (opt5) from hemagglutinin__InfluenzaA__ADG21013

SEQ ID NO: 196755 - RNA, 1701 nt, Artificial Sequence
  derived and/or modified CDS sequence (opt5) from hemagglutinin__InfluenzaA__ADG21014
augaagaccaucauugcccugagcuacauccucugccugguguucgcucagaaaauucccggcaacgacaauuccacagccacgcuuugucuggggcaccaugcggucccuaacggaaccaucguuaagacaauuaccaaugaucaaaucgaggugacaaacgcuaccgaacucgugcagucuagcuccacaggcgagaucugcgacucuccgcaccagauucuggauggggaaaauuguacccuuaucgacgcccugcucggagauccccagugcgacggcuuucaaaacaaaaagugggaucuguucgucgagagaagcaaagccuauuccaauuguuacccuuaugacgugcccgauuacgcuucucugcggagccucguugccuccagcgggacgcuggaauuuaacaaugagucuuucaacuggaccggagugacacagaauggcaccuccagcgcuugcauucgcagaucuaacaauuccuuuuucagccggcuuaacuggcugacacaucucaauuuuaaguauccugcccugaacgucaccaugcccaacaaugagcaguucgacaaacuuuacaucuggggcgugcaccauccugggacggauaaggaccagauuuuucuguaugcgcaagccucuggacgcaucacaguuuccaccaagagaagccagcaggcugugauuccgaacaucggcucccggccccgcgucagaaauaucccuucucggauuagcaucuacuggacaauugugaaacccggggauauccuccugauuaacuccaccggaaaucugaucgccccucgcggcuacuucaagaucagaagcgggaaaucuuccauuaugcggagcgacgcucccaucggaaaguguaacucugaaugcauuaccccgaauggcagcaucccuaacgacaagcccuuucagaaugugaaccgcauuacauauggcgccuguccuagauacgucaaacaaaauacgcucaagcuggcgaccgggaugcggaacguucccgagaaacagacacgcggaaucuucggcgccaucgcuggguuuauugaaaauggaugggagggcaugguggaugggugguauggauucagacaccagaacuccgagggccggggccaagccgcugaccuuaagucuacccaggccgccaucgaucagauuaaugggaaacugaacagacucaucggaaagacaaacgaaaaauuccaccagauugagaaggaauuuagcgagguggaaggccgcauccaagaccuggagaaguacgucgaggauaccaaaauugaccuuugguccuauaaugcugaacugcucguggcgcuggagaaccagcauacgaucgaucugacagacagcgaaaugaauaaacucuucgagaagaccaagaaacagcugcgggaaaacgccgaggauauggggaauggaugcuuuaagaucuaccacaagugugacaacgcuugcauuggcucuaucagaaaugggaccuaugaucaugacguuuaccgcgacgaggcccuuaacaaucgguuccagauuaaaggcguggaacugaaguccggauacaaagauuggauccucuggauuagcuuugccaucucuugcuuccugcuuugugucgcucugcucggcuuuaucaugugggccugccaaaaggggaacauuagauguaauaucugcauuuga

SEQ ID NO: 196756 - RNA, 1701 nt, Artificial Sequence
  derived and/or modified CDS sequence (opt5) from hemagglutinin__InfluenzaA__ADG21017
augaagaccaucauugcccugagcuacauccucuaucugguguucgcucagaaacuucccggcaacgacaauuccacagccacgcugugccucgggcaccaugcggucccuaacggaaccauuguuaagacaaucaccaaugaucaaauugaggugacaaacgcuaccgaacuggugcagucuagcuccacaggcgagaucugugacucuccgcaccagauccuugauggggaaaauugcacccugauugacgcccuccugggagauccccagugugacggcuuucaaaacaaaaagugggaucuguucaucgagagaagcaaagccuacuccaauugcuauccuuacgacguccccgauuaugcuucucuccggagccugguggccuccagcgggacgcuugaauuuaacaaugagucuuucaacuggaccggaguuacacagaauggcaccuccagcgcuuguauucgcagaucuaacaauuccuuuuucagccggcugaacuggcucacacaucugaauuuuaaguacccugcccuuaacgugaccaugcccaacaaugagcaguucgacaagcuguauaucuggggcguccaccauccugggacggauaaagaccagauuuuucucuacgcgcaagccucuggacgcaucacaguguccaccaagagaagccagcaggcuguuauuccgaacaucggcucccggccccgcgugagaaauaucccuucucggauuagcaucuacuggacaauugucaaacccggggauauccugcugauuaacuccaccggaaaucucaucgccccucgcggcuauuucaagaucagaagcgggaaaucuuccauuaugcggagcgacgcucccaucggaaagugcaacucugaauguauuaccccgaauggcagcaucccuaacgacaagcccuuucagaaugugaaccgcauuacauacggcgccugcccuagauaugugaaacaaaauacgcugaaacuugcgaccgggaugcggaacguccccgagaagcagacacgcggaaucuucggcgccaucgcuggguuuauugaaaauggaugggagggcaugguugaugggugguacggauucagacaccagaacuccgagggccggggccaagccgcugaccugaagucuacccaggccgccaucgaucagauuaaugggaaacucaacagacugaucggaaagacaaacgaaaaauuccaccagauugagaaggaauuuagcgagguggaaggccgcauccaagaccuugagaaguauguggaggauaccaaaauugaccugugguccuacaaugcugaacuccuggucgcgcuggagaaccagcauacgaucgaucucacagacagcgaaaugaauaagcuguucgagaaaaccaagaaacagcuucgggaaaacgccgaggauauggggaauggauguuuuaagaucuaucacaagugcgacaacgcuuguauuggcucuaucagaaaugggaccuacgaucaugacguguaccgcgacgaggcccugaacaaucgguuccagauuaaaggcguugaacucaaguccggauauaaagauuggauccuguggauuagcuuugccaucucuugcuuccuucugugcguggcucuccugggcuuuaucaugugggccugucaaaaggggaacauuagaugcaauaucuguauuuga

SEQ ID NO: 196757 - RNA, 1701 nt, Artificial Sequence
  derived and/or modified CDS sequence (opt5) from hemagglutinin__InfluenzaA__ADG21018
augaagaccaucauugcccugagcuacauccucugccugguguucgcucagaaacuucccggcaacgacaauuccacagccacgcugugucucgggcaccaugcggucccuaacggaaccauuguuaagacaaucaccaaugaucaaauugaggugacaaacgcuaccgaacuggugcagucuagcuccacaggcgagaucugcgacucuccgcaccagauccuugauggggaaaauuguacccugauugacgcccuccugggagauccccagugcgacggcuuucaaaacaaaaagugggaucuguucgucgagagaagcaaagccuauuccaauuguuacccuuaugacgugcccgauuacgcuucucuccggagccugguugccuccagcgggacgcuugaauuuaacaaugagucuuucaacuggaccggagugacacagaauggcaccuccagcgcuugcauccgcagaucuaacaauuccuuuuucagccggcugaacuggcucacacauucuaauuuuaaguauccugcccugaacgucaccaugcccaacaaugagcaguucgacaagcuguacauuuggggcgugcaccauccugggacggauaaagaccagaucuuucuguaugcgcaagccuccggacgcauuacaguuagcaccaagagaucccagcaggcugugaucccgaacauuggcucucggcaccgcgucagaaauauccccagccggaucuccauuuacuggacaaucgugaaaccuggggauauucuccugaucaacagcaccggaaaucugauugcuccccgcggcuacuucaagaucagaucugggaaauccagcaucaugcggucugacgccccuauuggaaaguguaacagcgaaugcaucacccccaauggcuccauuccgaacgacaagccuuuucagaaugugaaccgcaucacauauggcgccugucccagauacgucaaacaaaauacgcucaagcuggcgaccgggaugcggaacguuccugagaaacagacacgcggaauuuucggcgccaucgcuggguuuaucgaaaauggaugggagggcaugguggaugggugguauggauucagacaccagaacucugagggccggggccaagccgcugaccuuaagagcacccaggccgccauugaucagaucaaugggaaacugaacagacucauuggaaagacaaacgaaaaauuccaucagaucgagaaggaauuuuccgagguggaaggccgcauucaagaccuggagaaguacgucgaggauaccaaaaucgaccuuuggagcuauaaugcugaacugcucguggcgcuggagaaccagcacacgauugaucugacagacucugaaaugaauaaacucuucgagaagaccaagaaacagcugcgggaaaacgccgaggauauggggaauggaugcuuuaagaucuaccauaagugugacaacgcuugcaucggcuccauuagaaaugggaccuaugaucacgacguuuaccgcgacgaggcccuuaacaaucgguuccagaucaaaggcguggaacuuaagagcggauacaaagauuggauucucuggaucucuuuugccauuuccugcuuccugcuuugugucgcucugcucggcuuuaucaugugggccugccaaaaggggaacaucagauguaauauuugcaucuga

SEQ ID NO: 196758 - RNA, 1701 nt, Artificial Sequence
  derived and/or modified CDS sequence (opt5) from hemagglutinin__InfluenzaA__ADG21019
augaagaccaucauugcccugagcuacauccucugccugguguucgcucagaaacuucccggcaacgacaauuccacagccacgcugugucucgggcaccaugcggucccuaacggaaccauuguuaagacaaucaccaaugaucaaauugaggugacaaacgcuaccgaacuggugcagucuagcuccacaggcgagaucugcgacucuccgcaccagauccuugaugggaaaaauuguacccugauugacacgcuccugggagauccccagugcgacggcuuucaaaacaagaaaugggaucuguucgucgaaagaagcaaggccuauuccaauuguuacccuuaugacgugcccgauuacgccucucuccggagccugguugcuuccagcgggacccuugaguuuaacaaugaaucuuucaacuggacaggagugacccagaauggcacauccagcgccugcauccgcagaucuaagaacuccuuuuucagccggcugaauuggcucacccaucugaacuuuaaauauccugcucuuaaugucacgaugcccaacaacgagcaguucgacaagcuguacauuuggggcgugcaccauccugggacagauaaagaccagaucuuucucuaugcccaagcgucuggaaagauuaucguuuccaccaaacgcagccagcagacagugauuccgaauaucggcuccagaccccggguccgcaacaucccuucuauuaucagcauuuacuggaccaucgugaagcccggggauauucugcugaucaauuccaccggaaaccucaucgccccuagaggcuacuucaagauucggagcgggaaaucuuccaucaugcgcagcgacgcucccauuggaaaguguaauucugagugcaucacaccgaacggcagcauuccuaaugacaaacccuuucagaacgugaauagaaucacguauggcgccuguccucgguacgucaagcaaaacacccugaaacuugcuacagggaugcgcaauguucccgaaaagcagaccagaggaaucuucggcgccauugcgggguuuaucgagaacggaugggaaggcaugguggaugggugguauggauuccggcaccaaaauuccgagggccgcggccaggccgcugaccugaaaucuacacaggccgcuauugaucagaucaacgggaagcucaauagacugauuggaaagaccaacgagaaauuccaccagaucgaaaaggaguuuagcgaaguggagggccggauucaagaccuugaaaaauacgucgaggauacgaagaucgaccugugguccuauaacgccgagcuccugguggcccuggaaaaucagcauacaaucgaucucaccgacagcgagaugaacaaacuguucgaaaagaccaagaaacagcuuagagagaaugcugaagauauugggaacggaugcuuuaagaucuaccacaaaugugacaaugcgugcauuggcucuauccgcaacgggacauaugaucaugacguuuaccgggacgaggcccugaauaacagauuccagauuaagggcguggagcucaaauccggauacaaggauuggauccuguggaucagcuuugcuauuucuugcuuccuucugugugucgcccuccugggcuuuaucaugugggccugccaaaaggggaauauucgcuguaacaucugcauuuga

SEQ ID NO: 196759 - RNA, 1701 nt, Artificial Sequence
  derived and/or modified CDS sequence (opt5) from hemagglutinin__InfluenzaA__ADG21020
augaagaccaucauugcccugagcuacauccucugccugguguucgcucagaaacuucccggcaacgacaauuccacagccacgcugugucucgggcaccaugcggucccuaacggaaccauuguuaagacaaucaccaaugaucaaauugaggugacaaacgcuaccgaacuggugcagucuagcuccacaggcgagaucugcgacucuccgcaccagauccuugaugggaaaaauuguacccugauugacgcccuccugggagauccccagugcgacggcuuucaaaacaagaaaugggaucuguucgucgaaagaagcaaggccuauuccaauuguuacccuuaugacgugcccgauuacgcuucucuccggagccugguugccuccagcgggacgcuugaguuuaacaaugaaucuuucaacuggaccggagugacacaguccggcaccagcucugcuugcauccgcagauccaagaauagcuuuuucucucggcugaacuggcucacacaucugaauuuuaaauauccugcccuuaacgucaccaugcccaauaacgagcaguucgacaagcuguacauuuggggcgugcaccauccugggacggauaaagaccagaucuuucucuaugcgcaagccuccggacgcauuaucguuagcacaaagagaucccagcagaccgugacaccgaacauuggcucucggccccgcgucagaaauaucccuagccggaucuccauuuacuggaccaucgugaaacccggggauauucugcugaucaacagcaccggaaaucucauugcuccucgcggcuacuucaagaucagaucugggaaguccagcaucaugcggucugacgcccccauuggaaaauguaacagcgagugcaucacaccgaauggcuccauuccuaacgacaagcccuuucagaaugugaaccgcaucacguauggcgcuuguccuagauacgucaaacaaaauacccugaaacuugccacagggaugcggaacguucccgaaaaacagacccgcggaauuuucggcgcgaucgccggguuuaucgagaauggaugggaaggcaugguggaugggugguauggauucagacaccagaacucugagggccggggccaagcugccgaccucaagagcacacaggcugccauugaucagaucaaugggaaacugaacagacugauuggaaagaccaaugagaaguuccaccagaucgaaaaagaguuuuccgaaguggagggccgcauucaagaccuugaaaaguacgucgaggauacgaaaaucgaccuguggagcuauaacgccgagcuccugguggcucuggaaaaccagcauacaauugaucucaccgacucugagaugaauaagcuguucgaaaagaccaagaagcagcuucgggagaacgcggaagauauggggaauggaugcuuuaaaaucuaccacaagugugacaacgccugcaucggcuccauuagaaaugggacauaugaucaugacguuuaccgcgacgaggcucugaacaaucgguuccagaucaaaggcguggagcucaagagcggauacaaagauuggauucuguggaucucuuuugccauuuccugcuuccuucugugugucgcccuccugggcuuuaucaugugggcuugccaaaaggggaacaucagauguaauauuugcaucuga

SEQ ID NO: 196760 - RNA, 1701 nt, Artificial Sequence; identical to SEQ ID NO: 194506
  derived and/or modified CDS sequence (opt5) from hemagglutinin__InfluenzaA__ADG21022

SEQ ID NO: 196761 - RNA, 1701 nt, Artificial Sequence; identical to SEQ ID NO: 194506
  derived and/or modified CDS sequence (opt5) from hemagglutinin__InfluenzaA__ADG21023

SEQ ID NO: 196762 - RNA, 1701 nt, Artificial Sequence
  derived and/or modified CDS sequence (opt5) from hemagglutinin__InfluenzaA__ADG21024
augaagaccaucauugcccugagcuacauccucugccugguguucacacagaaacuucccggcaacgacaauuccacggcuacccugugucucgggcaccaugccgucccuaacggaacaauuguuaagaccaucacaaaugaucaaauugaggugaccaacgcgacagaacuggugcagucuagcuccaccggcgagaucugcgacucuccgcaccagauccuugauggggaaaauuguacgcugauugacgcucuccugggagauccccagugcgacggcuuucaaaacaaaaagugggaucuguucgucgagagaagcaaagccuauuccaauuguuacccuuaugacgugcccgauuacgccucucuccggagccugguugcuuccagcggggcccuugaauuuaacaaugagucuuucaacuggaccggagugacacagaauggcaccuccagcgcuugcauccgcagaucuaacaauuccuuuuucagccggcugaacuggcucacacaucugaauuuuaaguauccugcccuuaacgucaccaugcccaacaaugagcaguucgacaagcuguacauuuggggcgugcaccauccugggacggauaaagaccagaucuuucucuaugcgcaagccucuggacgcauuacaguuuccaccaagagaagccagcaggcugugaucccgaacauuggcucccggccccgcgucagaaauaucccuucucggaucagcauuuacuggacaaucgugaaacccggggauauucugcugaucaacuccaccggaaaucucauugccccucgcggcuacuucaagauccagagcgggaaaucuuccaucaugagaagcgacgcucccauuggaaaguguaacucugaaugcaucaccccgaauggcagcauuccuaacgacaagcccuuucaaaaugugaaccggaucacauauggcgccuguccucgcuacgucaaacaguccacgcugaagcuggcgaccgggaugagaaauguucccgagaaacagacacggggaauuuucggcgccaucgcuggguuuaucgaaaacggaugggagggcaugguggaugggugguauggauuccgccaccaaaauucugagggcagaggccaggccgcugaccuuaagagcacccaggccgccauugaucagaucaacgggaaacucaaucggcugauuggaaagacaaacgaaaaauuccaccaaaucgagaaggaauuuuccgagguggaaggccgcauucaggaccuugagaaguacgucgaggauaccaaaaucgaccuguggagcuauaacgcugaacuccugguggcgcuggagaaucagcauacgauugaucucacagacucugaaaugaacaagcuguucgagaaaaccaagaaacagcuuagagaaaaugccgaggauauggggaacggaugcuuuaagaucuaccacaagugugacaaugcuugcaucggcuccauucggaacgggaccuaugaucaugacguuuacagagacgaggcccugaauaaccgcuuccaaaucaaaggcguggaacucaagagcggauacaaagauuggauucuguggaucucuuuugccauuuccugcuuccuucugugugucgcucuccugggcuuuaucaugugggccugccagaaggggaauauccgguguaacauuugcaucuga

SEQ ID NO: 196763 - RNA, 1701 nt, Artificial Sequence
  derived and/or modified CDS sequence (opt5) from hemagglutinin__InfluenzaA__ADG21026
augaagaccaucauugcccugagcuacauccucugccugguguucgcucagaaacuucccggcaacgacaauuccacagccacgcugugucucgggcaccaugcggucccuaacggaaccauuguuaagacaaucaccaaugaucaaauugaggugacaaacgcuaccgaacuggugcagucuagcuccacaggcgagaucugcgacucuccgcaccagauccuugauggggaaaauuguacccugauugacgcccuccugggagauccccagugcgacggcuuucaaaacaaaaagugggaucuguucgucgagagaagcaaagccuauuccaauuguuacccuuaugacgugcccgauuacgcuucucuccggagccugguugccuccagcgggacgcuugaauuuaacaaugagucuuucaacuggaccggagugacacagaauggcaccuccagcgcuugcauccgcagaucuaacaauuccuuuuucagccggcugaacuggcucacacaucugaauuuuaaguauccugcccuuaacgucaccaugcccaacaaugagcaguucgacaagcuguacauuuggggcgugcaccauccugggacggauaaagaccagaucuuucucuaugcgcaagccucuggacgcauuacaguuuccaccaagagaagccagcaggcugugaucccgaacauuggcucccggcugcgcgucagaaauauccccucucggaucagcauuuacuggacaaucgugaaaccuggggauauucugcucaucaacuccaccggaaaucugauugcuccccgcggcuacuucaagaucagaagcgggaaaucuuccaucaugcggagcgacgccccuauuggaaaguguaacucugaaugcaucacccccaauggcagcauuccgaacgacaagccuuuucagaaugugaaccgcaucacauauggcgccugucccagauacgucaaacaauccacgcuuaagcuggcgaccgggaugcggaauguuccugagaaacagacacgcggaauuuucggcgccaucgcuggguuuaucgaaaacggaugggagggcaugguggaugggugguauggauucagacaccaaaauucugagggccggggccaggccgcugaccucaagagcacccaggccgccauugaucagaucaacgggaaacugaauagacuuauuggaaagacaaacgaaaaauuccaccagaucgagaaggaauuuuccgagguggaaggccgcauucaagaccuggagaaguacgucgaggauaccaaaaucgaccucuggagcuauaacgcugaacugcugguggcgcucgagaaucagcauacgauugaucugacagacucugaaaugaacaaacuuuucgagaagaccaagaaacagcugcgggaaaaugccgaggauauggggaacggaugcuuuaccaucuaccacaagugugacaaugcuugcaucggcuccauuagaaacgggacauaugaucauaauguuuaccgcgacgaggcccucaacaaucgguuccagaucaagggcguggaacugaaaagcggauacaaggacuggauucuuuggaucucuuuugccauuuccugcuuccugcucugugucgcucugcugggcuuuaucaugugggccugccaaaaagggaacaucagauguaauauuugcaucuga

SEQ ID NO: 196764 - RNA, 1701 nt, Artificial Sequence; identical to SEQ ID NO: 194741
  derived and/or modified CDS sequence (opt5) from hemagglutinin__InfluenzaA__ADG21037

SEQ ID NO: 196765 - RNA, 1701 nt, Artificial Sequence
  derived and/or modified CDS sequence (opt5) from hemagglutinin__InfluenzaA__ADG21038
augaaggccauccuggugguccuccuguacaccuucgcuacagccgacgcggauacgcuuugcauuggcuaucacgcuaacaauagcaccgacacaguugauaccgugcuggagaagaacgugacagucacccauuccgugaaucuccuggaagacaagcacaacgggaaacuuuguaagcugagaggaguugcuccccuccaucugggcaaaugcaauaucgccggguggauucugggaaacccugagugugaaucucucagcacagccuccucuuggagcuacaucguggagaccuccucuagcgauaauggcacgugcuauccgggggacuuuauugauuacgaagaacugcgggagcagcuuuccagcgucucuuccuucgaacgcuuugagaucuuccccaagaccagcucuuggccuaaccacgacuccaauaagggagugacagccgcuuguccccaugccggcgcgaaaucuuuuuauaagaaccugaucuggcucguuaaaaagggcaauagcuacccuaaacuguccaagagcuauauuaacgauaaggggaaagaagugcuuguccuguggggaauccaccaccccuccaccucugccgaccaacagagccucuaccagaaugcugaugccuacguguucgugggcacauccagauauagcaagaaauuuaagccugagauugcuauccggccgaaaguccgcgaccaggaggggagaaugaacuacuauuggacccugguugaacccggagauaagauuacguucgaggccacaggcaaucugguggugccucgguacgcguuugccauggaacgcaacgcugggucuggaaucauuaucuccgacacccccguccaugacugcaacacaaccugucaaaccccuaaaggcgccaucaauacaagccuccccuuccagaacauucacccgaucacgauuggcaagugcccuaaguaugugaaaucuaccaagcugagacuugcuacagggcugcggaauguucccagcauccagucccgcggacucuuuggcgccauugccggguucaucgagggaggcuggaccgggaugguggauggaugguacggcuaucaucaccagaacgaacaaggcucuggguacgcugcggaccugaaaagcacacagaaugccaucgaugagauuaccaacaaggucaauuccgugaucgagaaaaugaacacgcaguuuacagcuguuggaaaggaguucaaucaccuugagaagagaauugaaaaccugaauaaaaagguggacgauggcuuccucgacaucuggaccuacaacgccgagcugcugguccuccuggaaaaugagcggacccuugauuaucaugacagcaacgugaaaaaucuguacgagaagguccgcucucagcucaaaaacaacgccaaggaaauugggaauggauguuuugaguucuaucacaagugcgauaacacauguauggaauccgugaaaaauggcaccuacgacuauccuaaguacagcgaggaagcuaaacugaacagagaggagaucgaugggguuaaacuugaaucuacacggaucuaucaaauucuggccaucuacuccacgguggcgagcucccucguccuggugguuucucugggcgcuauuagcuuuuggaugugcuccaauggaucucuccagugccgcaucuguauuuga

SEQ ID NO: 196766 - RNA, 1701 nt, Artificial Sequence
  derived and/or modified CDS sequence (opt5) from hemagglutinin__InfluenzaA__ADG21040
augaaggccauccuggugguccuccuguacaccuucgcuacagccaacgcggacacgcuuugcauuggcuaucacgcuaauaacagcaccgauacaguugacaccgugcuggagaagaaugugacagucacccauuccgugaaccuccuggaagauaagcacaaugggaaacuuuguaagcugagaggaguugcuccccuccaucugggcaaaugcaacaucgccggguggauucugggaaauccugagugugaaucucucagcacagccuccucuuggagcuacaucguggagaccuccucuagcgacaacggcacgugcuauccgggggauuuuauugacuacgaagaacugcgggagcagcuuuccagcgucucuuccuucgaacgcuuugagaucuuccccaagaccagcucuuggccuaaucacgauuccaacaagggagugacagccgcuuguccccaugccggcgcgaaaucuuuuuauaagaaucugaucuggcucguuaaaaagggcaacagcuacccuaaacuguccaagagcuauauuaaugacaaggggaaagaagugcuuguccuguggggaauccaccaccccuccaccucugccgaucaacagagccucuaccagaacgcugacgccuacguguucgugggcacauccagauauagcaagaaauuuaagccugagauugcuauccggccgaaaguccgcgaucaggaggggagaaugaauuacuauuggacccugguugaacccggagacaagauuacguucgaggccacaggcaaccugguggugccucgguacgcguuugccauggaacgcaacgcugggucuggaaucauuaucuccgauacccccguccaugacugcaauacaaccugucaaaccccuaaaggcgccaucaacacaagccuccccuuccagaaugugcacccgauuacgaucggcaagugcccuaaguauguuaaaucuaccaagcugagacuugcuacagggcugcggaacgugcccagcauucagucccgcggacucuuuggcgccaucgccggguucauugagggaggcuggaccgggauggucgacggaugguacggcuaucaucaccagaaugaacaaggcucuggguacgcugcggaucugaaaagcacacagaacgccaucgacgagaucaccaauaaggugaacuccguuauugagaaaaugaauacgcaguuuacagcugugggaaaggaguucaaccaccuugagaagagaaucgaaaaucugaacaaaaaggucgaugacggcuuccucgauauuuggaccuacaaugccgagcugcuggugcuccuggaaaacgagcggacccuugacuaucaugauagcaaugucaaaaaccuguacgagaaggugcgcucucagcucaaaaacaaugccaaggaaaucgggaacggauguuuugaguucuaucacaagugcgacaauacauguauggaauccguuaaaaacggcaccuacgauuauccuaaguacagcgaggaagcuaaacugaauagagaggagauugacggggugaaacuugaaucuacacgggucuaucaaauccuggccaucuacuccacgguggcgagcucccucguucugguggucucucugggcgcuauuagcuuuuggaugugcuccaacggaucucuccagugccgcaucuguauuuga

SEQ ID NO: 196767 - RNA, 1701 nt, Artificial Sequence
  derived and/or modified CDS sequence (opt5) from hemagglutinin__InfluenzaA__ADG21041
augaaggccauccuggugguccuccuguacaccuucacaacggcuaacgccgacacccuuugcauuggcuaucacgcgaauaacagcacagauaccguugacacagugcuggagaaaaaugugaccgucacacauuccgugaaccuccuggaagauaagcacaaugggaaacuuuguaagcugagaggaguugcuccccuccaucugggcaaaugcaacaucgccggguggauucugggaaauccugagugugaaucucucagcaccgccuccucuuggagcuacaucguggagacguccucuagcgacaacgggaccugcuauccgggcgauuuuauugacuacgaagaacugcgggagcagcuuuccagcgucucuuccuucgaacgcuuugagaucuuccccaagacaagcucuuggccuaaucacgauuccaacaagggagugaccgcugccuguccccaugcuggcgccaagagcuuuuauaagaaucugaucuggcucguuaaaaagggcaacucuuacccuaaacuguccaagagcuauauuaaugacaaggggaaagaagugcuuguccuguggggaauccaccaccccuccacaucugcggaucaacagagccucuaccagaacgccgacgcuuacguguucgugggcaccuccagauauagcaagaaauuuaagccugagauugccauccggccgaaaguccgcgagcaggaagggagaaugaauuacuauuggacgcugguugagcccggagauaagauuacauucgaagcuaccggcaaccugguggugccucgguacgccuuugcgauggagcgcaacgccgggucuggaaucauuaucuccgacacacccguccaugauugcaauaccaccugucaaacaccuaaaggcgcuaucaacacgagccuccccuuccagaauauucacucuaucaccauuggcaagugcccgaaguaugugaaaagcacaaagcugagacuugccaccgggcugcggaacguuccuuccauccagucucgcggacucuuuggcgcuauugccggguucaucgaaggaggcuggacagggaugguggacggaugguacggcuaucaucaccagaaugagcaaggcagcggguacgccgcugaccugaaauccacccagaacgcgaucgaugagauuacgaauaaggucaacagcgugaucgagaaaaugaauacacaguuuaccgccguuggaaaggaguucaaccaccuugaaaagagaauugagaaucugaacaaaaagguggacgauggcuuccucgacaucuggaccuacaaugcugaacugcugguccuccuggagaacgagcggacacuugauuaucaugacucuaaugugaaaaaccuguacgaaaagguccgcucccagcucaaaaacaaugccaaggagauugggaacggauguuuugaguucuaucacaagugcgauaauaccuguauggaaagcgugaaaaacggcacauacgacuaucccaaguacucugaagaggccaaacugaauagagaggaaaucgaugggguuaaacuugaguccacgcggaucuaucaaauucuggcuaucuacagcaccguggccuccucucucguccuggugguuagccugggcgcgguguccuuuuggaugugcucuaacggaagccuccagugccgcauuuguaucuga

SEQ ID NO: 196768 - RNA, 1701 nt, Artificial Sequence; identical to SEQ ID NO: 195842
  derived and/or modified CDS sequence (opt5) from hemagglutinin__InfluenzaA__ADG21042

SEQ ID NO: 196769 - RNA, 1701 nt, Artificial Sequence
  derived and/or modified CDS sequence (opt5) from hemagglutinin__InfluenzaA__ADG21043
augaaggccauccuggugguccuccuguacaccuucacaacggcuaacgccgacacccuuugcguuggcuaucacgcgaauaacagcacagauaccguggacacagugcuggagaaaaaugucaccgugacacauuccguuaaccuccuggaagauaagcacaaugggaaacuuuguaagcugagaggaguggcuccccuccaucugggcaaaugcaacauugccggguggauccugggaaauccugagugugaaucucucagcaccgccuccucuuggagcuacauugucgagacguccucuagcgacaacggaaccugcuauccgggggauuuuaucgacuacgaagaacugcgggagcagcuuuccagcgugucuuccuucgaacgcuuugagauuuuccccaagacaagcucuuggccuaaucacgauuccaacaagggaguuaccgcugccuguccccaugcuggcgccaagagcuuuuauaagaaucugaucuggcucgugaaaaagggcaacucuuacccuaaacuguccaagagcuauaucaaugacaaggggaaagaaguccuugugcuguggggcauucaccaccccuccacaucugcggaucaacagagccucuaccagaacgccgacgcuuacguguucgucggcaccuccagauauagcaagaaauuuaagccugagaucgccauucggccgaaaguucgcgagcaggaagggagaaugaauuacuauuggacgcugguggagcccggagauaagaucacauucgaagcuaccggcaaccugguggucccucgguacgccuuugcgauggagcgcaacgccgggucuggaauuaucauuuccgacacacccgugcaugauugcaauaccaccugucaaacaccuaaaggcgcuaucaacacgagccuccccuuccagaauauccacucuauuaccaucggcaagugcccgaaguauguuaaaagcacaaagcugagacuugccaccgggcugcggaacgugccuuccauucagucucgcggacucuuuggcgcuaucgccggguucauugaaggaggcuggacagggauggucgacggaugguacggcuaucaucaccagaaugagcaaggcagcggguacgccgcugaccugaaauccacccagaacgcgaucgaugagaucacgaauaaggugaacagcguuauugagaaaaugaauacacaguuuaccgccgugggaaaggaguucaaccaccuugaaaagagaaucgagaaucugaacaaaaaggucgacgauggcuuccucgacauuuggaccuacaaugcugaacugcuggugcuccuggagaacgagcggacacuugauuaucaugacucuaaugucaaaaaccuguacgaaaaggugcgcucccagcucaaaaacaaugccaaggagaucgggaacggauguuuugaguucuaucacaagugcgauaauaccuguauggaaagcguuaaaaacggcacauacgacuaucccaaguacucugaagaggccaaacugaauagagaggaaauugauggggugaaacuugaguccacgcggaucuaucaaauccuggcuauuuacagcaccgucgccuccucucucgugcugguugugagccugggcgcgaucuccuuuuggaugugcucuaacggaagccuccagugccgcauuuguaucuga

SEQ ID NO: 196770 - RNA, 1701 nt, Artificial Sequence
  derived and/or modified CDS sequence (opt5) from hemagglutinin__InfluenzaA__ADG21045
augaaggccauccuggugguccuccuguacaccuucacaacggcuaacgccgacacccuuugcauuggcuaucacgcgaauaacagcacagauaccguugacacagugcuggagaaaaaugugaccgucacacauuccgugaaccuccuggaagauaagcacaaugggaaacuuuguaagcugagaggaguugcuccccuccaucugggcaaaugcaacaucgccggguggauucugggaaauccugagugugaaucucucagcaccgccuccucuuggagcuacaucguggagacguccucuagcgacaacgggaccugcuauccgggcgauuuuauugacuacgaagaacugcgggagcagcuuuccagcgucucuuccuucgaacgcuuugagaucuuccccaagacaagcucuuggccuaaucacgauuccaacaagggagugaccgcugccuguccccaugcuggcgccaagagcuuuuauaagaaucugaucuggcucguuaaaaagggcaacucuuacccuaaacuguccaagagcuauauuaaugacaaggggaaagaagugcuuguccuguggggaauccaccaccccuccacaucugcggaucaacagagccucuaccagaacgccgacgcuuacguguucgugggcaccuccagauauagcaagaaauuuaagccugagauugccauccggccgaaaguccgcgagcaggaagggagaaugaauuacuauuggacgcugguugagcccggagauaagauuacauucgaagcuaccggcaaccugguggugccucgguacgccuuugcgauggagcgcaacgccgggucuggaaucauuaucuccgacacacccguccaugauugcaauaccaccugucaaacaccuaaaggcgcuaucaacacgagccuccccuuccagaauauucacucuaucaccauuggcaagugcccgaaguaugugaaaagcacaaagcugagacuugccaccgggcugcggaacguuccuuccauccagucucgcggacucuuuggcgcuauugccggguucaucgaaggaggcuggacagggaugguggacggaugguacggcuaucaucaccagaaugagcaaggcagcggguacgccgcugaccugaaauccacccagaacgcgaucgaugagauuacgaauaaggucaacagcgugaucgagaaaaugaauacacaguuuaccgccguuggaaaggaguucaaccaccuugaaaagagaauugagaaucugaacaaaaagguggacgauggcuuccucgacaucuggaccuacaaugcugaacugcugguccuccuggagaacgagcggacacuugauuaucaugacucuaaugugaaaaaccuguacgaaaagguccgcucccagcucaaaaacaaugccaaggagauugggaacggauguuuugaguucuaucacaagugcgauaauaccuguauggaaagcgugaaaaacggcacauacgacuaucccaaguacucugaagaggccaaacugaauagagaggaaaucgaugggguuaaacuugaguccacgcggaucuaucaaauucuggcuaucuacagcaccguggccuccucucucguccuggugguuagccugggcgcgauuuccuuuuggaugugcucuaacggaagccuccagugccgcaucuguauuuga

SEQ ID NO: 196771 - RNA, 1701 nt, Artificial Sequence; identical to SEQ ID NO: 196770
  derived and/or modified CDS sequence (opt5) from hemagglutinin__InfluenzaA__ADG21046

SEQ ID NO: 196772 - RNA, 1701 nt, Artificial Sequence; identical to SEQ ID NO: 195905
  derived and/or modified CDS sequence (opt5) from hemagglutinin__InfluenzaA__ADG21048

SEQ ID NO: 196773 - RNA, 1701 nt, Artificial Sequence
  derived and/or modified CDS sequence (opt5) from hemagglutinin__InfluenzaA__ADG21049
augaaggccauccuggugguccuccuguacaccuucgcuacagccaacgcggacacgcuuugcauuggcuaucacgcuaauaacagcaccgauacaguugacaccgugcuggagaagaaugugacagucacccauuccgugaaccuccuggaagauaagcacaaugggaaacuuuguaagcugagaggaguugcuccccuccaucugggcaaaugcaacaucgccggguggauucugggaaauccugagugugaaucucucagcacagccuccucuuggagcuacaucguggagaccuccucuagcgacaacggcacgugcuauccgggggauuuuauugacuacgaagaacugcgggagcagcuuuccagcgucucuuccuucgaacgcuuugagaucuuccccaagaccagcucuuggccuaaucacgauuccaacaagggagugacagccgcuuguccccaugccggcgcgaaaucuuuuuauaagaaucugaucuggcucguuaaaaagggcaacagcuacccuaaacuguccaagagcuauauuaaugacaaggggaaagaagugcuuguccuguggggaauccaccaccccuccaccucugccgaucaacagagccucuaccagaacgcugacgccuacguguucgugggcacauccagauauagcaagaaauuuaagccugagauugcuauccggccgaaaguccgcaaucaggaggggagaaugaacuacuauuggacccugguugaacccggagauaagauuacguucgaggccacaggcaaccugguggugccucgguacgcguuugccauggaacgcaaugcugggucuggaaucauuaucuccgacacccccguccaugauugcaacacaaccugucaaaccagcaaaggcgccaucaauacaucucucccuuuccagaacauucaccccaucacgauuggcaagugcccgaaguaugugaaaagcaccaagcugagacuugcuacagggcugcggaauaucccuuccauucagucucgcggacucuuuggcgccaucgccggguucaucgagggaggcuggaccgggaugguugacggaugguacggcuaucaucaccagaacgaacaaggcagcggguacgcugcggaccugaaauccacacagaaugccauugaugagaucaccaacaaggugaauagcgucauugagaaaaugaacacgcaguuuacagcugugggaaaggaguucaaucaccuugagaagagaaucgaaaaccugaauaaaaagguugacgauggcuuccucgacauuuggaccuacaacgccgagcugcuggugcuccuggaaaaugagcggacccuugauuaucaugacucuaacgucaaaaaccuguacgagaaggugcgcucccagcucaaaaauaacgccaaggaaaucgggaauggauguuuugaguucuaucacaagugcgauaacacauguauggaaagcgucaaaaauggcaccuacgacuaucccaaguacucugaggaagcuaaacugaacagagaggagaucgauggggugaaacuugaauccacacggauuuaucaaauccuggccauuuacagcacgguugcguccucucucgugcuggucgugagccugggcgcuaucuccuuuuggaugugcucuaauggaagccuccagugccgcauuuguaucuga

SEQ ID NO: 196774 - RNA, 1701 nt, Artificial Sequence; identical to SEQ ID NO: 195094
  derived and/or modified CDS sequence (opt5) from hemagglutinin__InfluenzaA__ADG21122

SEQ ID NO: 196775 - RNA, 1701 nt, Artificial Sequence; identical to SEQ ID NO: 195905
  derived and/or modified CDS sequence (opt5) from hemagglutinin__InfluenzaA__ADG21123

SEQ ID NO: 196776 - RNA, 1701 nt, Artificial Sequence; identical to SEQ ID NO: 194741
  derived and/or modified CDS sequence (opt5) from hemagglutinin__InfluenzaA__ADG21124

SEQ ID NO: 196777 - RNA, 1701 nt, Artificial Sequence
  derived and/or modified CDS sequence (opt5) from hemagglutinin__InfluenzaA__ADG21125
augaaggccauccuggugguccuccuguacaccuucgcuacagccaacgcggacacgcuuugcauuggcuaucacgcuaauaacagcaccgauacaguugacaccgugcuggagaaaaaugugacagucacccauuccgugaaccuccuggaagauaagcacaaugggaaacuuuguaagcugagaggaguugcgccccuccaucugggcaaaugcaacaucgccggguggauucugggaaauccugagugugaaucucucagcacagcuuccucuuggagcuacaucguggagaccuccucuagcgacaacggcacgugcuauccgggggauuuuauugacuacgaagaacugcgggagcagcuuuccagcgucucuuccuucaagcgcuuugaaaucuuccccaagaccagcucuuggccuaaucacgauuccaacaaaggagugacagccgcuuguccccaugccggcgccaagagcuuuuauaaaaaucugaucuggcucguuaagaaaggcaacucuuacccuaagcuguccaagagcuauauuaaugacaaagggaaggaggugcuuguccuguggggaauccaccaccccuccaccucugccgaucaacagagccucuaccagaacgcugacgccuacguguucgugggcacauccagauauagcaaaaaguuuaaaccugaaauugcuauccggccgaagguccgcgaucaggaggggagaaugaauuacuauuggacccugguugagcccggagacaaaauuacguucgaagccacaggcaaccugguggugccucgguacgcguuugccauggagcgcaacgcugggucuggaaucauuaucuccgauacccccguccaugacugcaauacaaccugucaaaccccuaagggcgccaucaacacaagccuccccuuccagaauauucacccgaucacgauuggcaagugcccuaaauaugugaagucuaccaaacugagacuugcuacagggcugcggaacguucccagcauccagucccgcggacucuuuggcgccauugccggguucaucgaaggaggcuggaccgggaugguggacggaugguacggcuaucaucaccagaaugagcaaggcucuggguacgcugcggaucugaaaagcacacagaacgccaucgacgaaauuaccaauaaagucaacuccgugaucgagaagaugaauacgcaguuuacagcuguuggaaaggaguucaaccaccuugaaaagagaauugagaaucugaacaagaaaguggaugacggcuuccucgauaucuggaccuacaaugccgaacugcugguccuccuggagaacgaacggacccuugacuaucaugauagcaaugugaagaaccuguacgagaaaguccgcucucagcucaagaacaaugccaaggagauugggaacggauguuuugaguucuaucacaaaugcgacaauacauguauggaguccgugaagaacggcaccuacgauuauccuaaauacagcgaagaggcuaagcugaauagagaagagaucgacgggguuaaacuugagucuacacggaucuaucaaauucuggccaucuacuccacgguggcgagcucccucguccuggugguuucucugggcgcuauuagcuuuuggaugugcuccaacggaucucuccagugccgcaucuguauuuga

SEQ ID NO: 196778 - RNA, 1701 nt, Artificial Sequence; identical to SEQ ID NO: 194728
  derived and/or modified CDS sequence (opt5) from hemagglutinin__InfluenzaA__ADG21126

SEQ ID NO: 196779 - RNA, 1701 nt, Artificial Sequence; identical to SEQ ID NO: 194728
  derived and/or modified CDS sequence (opt5) from hemagglutinin__InfluenzaA__ADG21127

SEQ ID NO: 196780 - RNA, 1701 nt, Artificial Sequence; identical to SEQ ID NO: 194728
  derived and/or modified CDS sequence (opt5) from hemagglutinin__InfluenzaA__ADG21128

SEQ ID NO: 196781 - RNA, 1701 nt, Artificial Sequence; identical to SEQ ID NO: 194728
  derived and/or modified CDS sequence (opt5) from hemagglutinin__InfluenzaA__ADG21129

SEQ ID NO: 196782 - RNA, 1701 nt, Artificial Sequence; identical to SEQ ID NO: 194741
  derived and/or modified CDS sequence (opt5) from hemagglutinin__InfluenzaA__ADG21130

SEQ ID NO: 196783 - RNA, 1701 nt, Artificial Sequence; identical to SEQ ID NO: 194728
  derived and/or modified CDS sequence (opt5) from hemagglutinin__InfluenzaA__ADG21131

SEQ ID NO: 196784 - RNA, 1701 nt, Artificial Sequence; identical to SEQ ID NO: 194728
  derived and/or modified CDS sequence (opt5) from hemagglutinin__InfluenzaA__ADG21132

SEQ ID NO: 196785 - RNA, 1701 nt, Artificial Sequence; identical to SEQ ID NO: 194728
  derived and/or modified CDS sequence (opt5) from hemagglutinin__InfluenzaA__ADG21133

SEQ ID NO: 196786 - RNA, 1701 nt, Artificial Sequence; identical to SEQ ID NO: 194728
  derived and/or modified CDS sequence (opt5) from hemagglutinin__InfluenzaA__ADG21134

SEQ ID NO: 196787 - RNA, 1701 nt, Artificial Sequence; identical to SEQ ID NO: 194728
  derived and/or modified CDS sequence (opt5) from hemagglutinin__InfluenzaA__ADG21135

SEQ ID NO: 196788 - RNA, 1701 nt, Artificial Sequence; identical to SEQ ID NO: 194728
  derived and/or modified CDS sequence (opt5) from hemagglutinin__InfluenzaA__ADG21136

SEQ ID NO: 196789 - RNA, 1701 nt, Artificial Sequence; identical to SEQ ID NO: 194728
  derived and/or modified CDS sequence (opt5) from hemagglutinin__InfluenzaA__ADG21137

SEQ ID NO: 196790 - RNA, 1701 nt, Artificial Sequence; identical to SEQ ID NO: 194728
  derived and/or modified CDS sequence (opt5) from hemagglutinin__InfluenzaA__ADG21138

SEQ ID NO: 196791 - RNA, 1701 nt, Artificial Sequence; identical to SEQ ID NO: 194728
  derived and/or modified CDS sequence (opt5) from hemagglutinin__InfluenzaA__ADG21139

SEQ ID NO: 196792 - RNA, 1701 nt, Artificial Sequence
  derived and/or modified CDS sequence (opt5) from hemagglutinin__InfluenzaA__ADG21140
augaaggccauccuggugguccuccuguacaccuucgcuacagccaacgcggacacgcuuugcauuggcuaucacgcuaauaacagcaccgauacaguugacaccgugcuggagaagaaugugacagucacccauuccgugaaccuccuggaagauaagcacaaugggaaacuuuguaagcugagaggaguugcuccccuccaucugggcaaaugcaacaucgccggguggauucugggaaauccugagugugaaucucucagcacagccuccucuuggagcuacaucguggagaccuccucuagcgacaacggcacgugcuauccgggggauuuuauugacuacgaagaacugcgggagcagcuuuccagcgucucuuccuucgaacgcuuugagaucuuccccaagaccagcucuuggccuaaucacgauuccaacaagggagugacagccgcuuguccccaugccggcgcgaaaucuuuuuauaagaaucugaucuggcucguuaaaaagggcaacagcuacccuaaacuguccaagagcuauauuaaugacaaggggaaagaagugcuuaugcuguggggaauccaccaccccuccaccucugccgaucaacagagccucuaccagaacgcugacgccuacgucuucgugggcuccagcagauauucuaagaaauuuaagccugagauugcuauccggccgaaagugcgcgaucaggaggggagaaugaauuacuauuggacacuggucgaacccggagacaagauuaccuucgaggccacgggcaaccugguugugccucgguacgcguuugccauggaacgcaacgcuggguccggaaucauuaucagcgauacacccgugcaugacugcaauaccacaugucaaaccccuaaaggcgccaucaacaccucucuccccuuccagaauauucacccgaucacaauuggcaagugcccuaaguaugucaaaagcacgaagcugagacuugcuaccgggcugcggaacgugcccuccauccagucucgcggacucuuuggcgccauugccggguucaucgagggaggcuggacagggaugguugacggaugguacggcuaucaucaccagaaugaacaaggcagcggguacgcugcggaucugaaauccacccagaacgccaucgacgagauuacaaauaaggugaacagcgucaucgagaaaaugaauacccaguuuacggcugugggaaaggaguucaaccaccuugagaagagaauugaaaaucugaacaaaaagguugaugacggcuuccucgauaucuggacauacaaugccgagcugcuggugcuccuggaaaacgagcggacccuugacuaucaugauucuaaugucaaaaaccuguacgagaaggugcgcucccagcucaaaaacaaugccaaggaaauugggaacggauguuuugaguucuaucacaagugcgacaauaccuguauggaaagcgucaaaaacggcacauacgauuauccuaaguacucugaggaagcuaaacugaauagagaggagaucgacggggugaaacuugaauccacccggaucuaucaaauucuggccaucuacagcacaguugcguccucucucgugcuggucgugagccugggcgcuauuuccuuuuggaugugcucuaacggaagccuccagugccgcaucuguauuuga

SEQ ID NO: 196793 - RNA, 1701 nt, Artificial Sequence; identical to SEQ ID NO: 194728
  derived and/or modified CDS sequence (opt5) from hemagglutinin__InfluenzaA__ADG21141

SEQ ID NO: 196794 - RNA, 1701 nt, Artificial Sequence
  derived and/or modified CDS sequence (opt5) from hemagglutinin__InfluenzaA__ADG21142
augaaggccauccuggugguccuccuguacaccuucgcuacagccaacgcggacacgcuuugcauuggcuaucacgcuaauaacagcaccgauacaguugacaccgugcuggagaaaaaugugacagucacccauuccgugaaccuccuggaagauaagcacaaugggaaacuuuguaagcugagaggaguugcuccccuccaucugggcaaaugcaacaucgccggguggauucugggaaauccugagugugaaucucucagcacagccuccucuuggagcuacaucguggagaccuccucuagcgacaacggcacgugcuauccgggggauuuuauugacuacgaagaacugcgggagcagcuuuccagcgucucuuccuucgaacgcuuugagaucuuccccaagaccagcucuuggccuaaucacgauuccaacaagggagugacagccgcuuguccccaugccggcgaaaagagcuuuuauaagaaucugaucuggcucguuaaaaagggcaacucuuacccuaaacuguccaagagcuauauuaaugacaaggggaaagaggugcuuguccuguggggaauccaccaccccuccaccucugcggaucaacagagccucuaccagaacgccgacgcuuacguguucgugggcuccagcagauauucuaagaaauuuaagccugagauugccauccggccgaaaguccgcgaucaggaagggagaaugaauuacuauuggacacugguugagcccggagacaagauuaccuucgaagcuacgggcaaccugguggugccucgguacgccuuugcgauggagcgcaacgccggguccggaaucauuaucagcgauacacccguccaugacugcaauaccacaugucaaaccccuaaaggcgcuaucaacaccucucuccccuuccagaauauucacccgaucacaauuggcaagugcccuaaguaugugaaaagcacgaagcugagacuugccaccgggcugcggaacguucccuccauccagucucgcggacucuuuggcgcuauugccggguucaucgaaggaggcuggacagggaugguggacggaugguacggcuaucaucaccagaaugagcaaggcagcggguacgccgcugaucugaaauccacccagaacgcgaucgacgagauuacaaauaaggucaacagcgugaucgagaaaaugaauacccaguuuacggccguuggaaaggaguucaaccaccuugaaaagagaauugagaaucugaacaaaaagguggaugacggcuuccucgauaucuggacauacaaugcugaacugcugguccuccuggagaacgagcggacccuugacuaucaugauucuaaugugaaaaaccuguacgaaaagguccgcucccagcucaaaaacaaugccaaggagauugggaacggauguuuugaguucuaucacaagugcgacaauaccuguauggaaagcgugaaaaacggcacauacgauuauccuaaguacucugaagaggccaaacugaauagagaggaaaucgacgggguuaaacuugaguccacccggaucuaucaaauucuggcuaucuacagcacaguggccuccucucucguccuggugguuagccugggcgcgauuuccuuuuggaugugcucuaacggaagccuccagugccgcaucuguauuuga

SEQ ID NO: 196795 - RNA, 1701 nt, Artificial Sequence; identical to SEQ ID NO: 194728
  derived and/or modified CDS sequence (opt5) from hemagglutinin__InfluenzaA__ADG21143

SEQ ID NO: 196796 - RNA, 1701 nt, Artificial Sequence; identical to SEQ ID NO: 194728
  derived and/or modified CDS sequence (opt5) from hemagglutinin__InfluenzaA__ADG21144

SEQ ID NO: 196797 - RNA, 1701 nt, Artificial Sequence
  derived and/or modified CDS sequence (opt5) from hemagglutinin__InfluenzaA__ADG21145
augaaggccauccuggugguccuccuguacaccuucgcuacagccaacgcggacacgcuuugcauuggcuaucacgcuaauaacagcaccgauacaguugacaccgugcuggagaaaaaugugacagucacccauuccgugaaccuccuggaagauaagcacaaugggaaacuuuguaagcugagaggaguugcuccccuccaucugggcaaaugcaacaucgccggguggauucugggaaauccugagugugaaucucucagcacagccuccucuuggagcuacaucguggagaccuccucuagcgacaacggcacgugcuauccgggggauuuuauugacuacgaagaacugcgggagcagcuuuccagcgucucuuccuucgaacgcuuugagaucuuccccaagaccagcucuuggccuaaucacgauuccaacaagggagugacagccgcuuguccccaugccggcgcgaaaucuuuuuauaagaaucugaucuggcucguuaaaaagggcaacagcuacccuaaacuguccauuagcuauaucaaugacaaggggaaggaagugcuuguccuguggggcauucaccaccccuccaccucugccgaucaacagagccucuaccagaacgcugacgccuacguguucgugggauccagcagauauucuaaaaaguuuaaaccugagaucgcuauucggccgaagguccgcgaucaggaggggagaaugaauuacuauuggacacugguugaacccggagacaaaaucaccuucgaggccacgggcaaccugguggugccucgguacgcguuugccauggaacgcaacgcuggguccggaauuaucaucagcgauacacccguccaugacugcaauaccacaugucaaaccccuaagggcgccauuaacaccucucuccccuuccagaauauccacccgauuacaaucggcaaaugcccuaaguauguuaagagcacgaaacugagacuugcuaccgggcugcggaacgugcccuccauucagucucgcggacucuuuggcgccaucgccggguucaucgagggaggcuggacagggaugguggacggaugguacggcuaucaucaccagaaugaacaaggcagcggguacgcugcggaucugaaguccacccagaacgccauugacgagaucacaaauaaagucaacagcgugauugagaagaugaauacccaguuuacggcuguuggaaaagaguucaaccaccuugagaagagaaucgaaaaucugaacaagaaaguggaugacggcuuccucgauauuuggacauacaaugccgagcugcugguccuccuggaaaacgagcggacccuugacuaucaugauucuaaugugaagaaccuguacgagaaaguccgcucccagcucaagaacaaugccaaagaaaucgggaacggauguuuugaguucuaucacaagugcgacaauaccuguauggaaagcgugaagaacggcacauacgauuauccuaaauacucugaggaagcuaagcugaauagagaggagaucgacgggguuaaacuugaauccacccggauuuaucaaauccuggccauuuacagcacaguggcguccucucucguccuggugguuagccugggcgcuaucuccuuuuggaugugcucuaacggaagccuccagugccgcauuuguaucuga

SEQ ID NO: 196798 - RNA, 1701 nt, Artificial Sequence; identical to SEQ ID NO: 194728
  derived and/or modified CDS sequence (opt5) from hemagglutinin__InfluenzaA__ADG21146

SEQ ID NO: 196799 - RNA, 1701 nt, Artificial Sequence; identical to SEQ ID NO: 194728
  derived and/or modified CDS sequence (opt5) from hemagglutinin__InfluenzaA__ADG21147

SEQ ID NO: 196800 - RNA, 1701 nt, Artificial Sequence; identical to SEQ ID NO: 194741
  derived and/or modified CDS sequence (opt5) from hemagglutinin__InfluenzaA__ADG21148

SEQ ID NO: 196801 - RNA, 1701 nt, Artificial Sequence; identical to SEQ ID NO: 195842
  derived and/or modified CDS sequence (opt5) from hemagglutinin__InfluenzaA__ADG21149

SEQ ID NO: 196802 - RNA, 1701 nt, Artificial Sequence; identical to SEQ ID NO: 195905
  derived and/or modified CDS sequence (opt5) from hemagglutinin__InfluenzaA__ADG21150

SEQ ID NO: 196803 - RNA, 1701 nt, Artificial Sequence; identical to SEQ ID NO: 194728
  derived and/or modified CDS sequence (opt5) from hemagglutinin__InfluenzaA__ADG21151

SEQ ID NO: 196804 - RNA, 1701 nt, Artificial Sequence; identical to SEQ ID NO: 194728
  derived and/or modified CDS sequence (opt5) from hemagglutinin__InfluenzaA__ADG21152

SEQ ID NO: 196805 - RNA, 1701 nt, Artificial Sequence; identical to SEQ ID NO: 194741
  derived and/or modified CDS sequence (opt5) from hemagglutinin__InfluenzaA__ADG21153

SEQ ID NO: 196806 - RNA, 1701 nt, Artificial Sequence; identical to SEQ ID NO: 194728
  derived and/or modified CDS sequence (opt5) from hemagglutinin__InfluenzaA__ADG21154

SEQ ID NO: 196807 - RNA, 1701 nt, Artificial Sequence; identical to SEQ ID NO: 194728
  derived and/or modified CDS sequence (opt5) from hemagglutinin__InfluenzaA__ADG21155

SEQ ID NO: 196808 - RNA, 1701 nt, Artificial Sequence; identical to SEQ ID NO: 195905
  derived and/or modified CDS sequence (opt5) from hemagglutinin__InfluenzaA__ADG21156

SEQ ID NO: 196809 - RNA, 1701 nt, Artificial Sequence; identical to SEQ ID NO: 195913
  derived and/or modified CDS sequence (opt5) from hemagglutinin__InfluenzaA__ADG21158

SEQ ID NO: 196810 - RNA, 1701 nt, Artificial Sequence
  derived and/or modified CDS sequence (opt5) from hemagglutinin__InfluenzaA__ADG21159
augaaggccauccuggugguccuccuguacaccuucgcuacagccaacgcggacacgcuuugcauuggcuaucacgcuaauaacagcaccgauacaguugacaccgugcuggagaagaaugugacagucacccauuccgugaaccuccuggaagauaagcacaaugggaaacuuuguaagcugagaggaguugcuccccuccaucugggcaaaugcaacaucgccggguggauucugggaaauccugagugugaaucucucagcacagccuccucuuggagcuacaucguggagaccuccucuagcgacaacggcacgugcuauccgggggauuuuauugacuacgaagaacugcgggagcagcuuuccagcgucucuuccuucgaacgcuuugagaucuuccccaagaccagcucuuggccuaaucacgauuccaacaagggagugacagccgcuuguccccaugccggcgcgaaaucuuuuuauaagaaucugaucuggcucguuaaaaagggcaacagcuacccuaaacuguccaagagcuauauuaaugacaaggggaaagaagugcuuguccuguggggaauccaccaccccuccaccucugccgaucaacagagccucuaccagaacgcugacgccuacguguucgugggcacauccagauauagcaagaaauuuaagccugagauugcuauccggccgaaaguccgcgaucaggaggggagaaugaauuacuauuggacccugguugaacccggagacaagauuacguucgaggccacaggcaaccugguggugccucgguacgcguuugccauggaacgcaacgcugggucuggaaucauuaucuccgauacccccguccaugacugcaauacaaccugucaaaccccuaaaggcgccaucaacacaagccuccccuuccagaauauucacccgaucacgauuggcaagugcccuaaguaugugaaaucuaccaagcugagacuugcuacagggcugcggaacguucccagcauccagucccgcggacucuuuggcgccauugccggguucaucgagggaggcuggaccgggaugguggacggaugguacggcuaucaucaccagaaugaacaaggcucuggguacgcugcggaucugaaaagcacacagaacgccaucgacgagauuaccaauaaggucaacuccgugaucgagaaaaugaauacgcaguuuacagcuguuggaaaggaguucaaccaccuugagaagagaauugaaaaucugaacaaaaagguggaugacggcuuccucgauaucuggaccuacaaugccgagcugcugguccuccuggaaaacgagcggacccuugacuaucaugauagcaaugugaaaaaccuguacgagaagguccgcucucagcucaaaaacaaugccaaggaaauugggaacggauguuuugaguucuaucacaagugcgacaauacauguauggaauccgugaaaaacggcaccuacgauuauccuaaguacagcgaggaagcuaaacugaauagagaggagaucgacgggguuaaacuugaaucuacacggaucuaucaaauucuggccaucuacuccacgguggcgagcucccucguccugcuggugucucucggcgcuauuagcuuuuggaugugcuccaacggaucucugcagugccgcaucuguauuuga

SEQ ID NO: 196811 - RNA, 1701 nt, Artificial Sequence; identical to SEQ ID NO: 195913
  derived and/or modified CDS sequence (opt5) from hemagglutinin__InfluenzaA__ADG21160

SEQ ID NO: 196812 - RNA, 1701 nt, Artificial Sequence
  derived and/or modified CDS sequence (opt5) from hemagglutinin__InfluenzaA__ADG21161
augaaggccauccuggugguccuccuguacaccuucgcuacagccaacgcggacacgcuuugcauuggcuaucacgcuaauaacagcaccgauacaguugacaccgugcuggagaaaaaugugacagucacccauuccgugaaccuccuggaagauaagcacaaugggaaacuuuguaagcugagaggaguugcuccccuccaucugggcaaaugcaacaucgccggguggauucugggaaauccugagugugaaucucucagcacagccuccucuuggagcuacaucguggagaccuccucuagcgacaacggcacgugcuauccgggggauuuuauugacuacgaagaacugcgggagcagcuuuccagcgucucuuccuucgaacgcuuugagaucuuccccaagaccagcucuuggccuaaucacgauuccaacaagggagugacagccgcuuguccccaugccggcgcgaaaucuuuuuauaagaaucugaucuggcucguuaaaaaggaaaacagcuacccuaaacuguccaagagcuauauuaaugacaagggcaaagaggugcuuguccugugggggauccaccaccccuccaccucugccgaucaacagagccucuaccagaacgcugacgccuacguguucgugggaacauccagauauagcaagaaauuuaagccugagauugcuauccggccgaaaguccgcgaucaggaaggcagaaugaauuacuauuggacccugguugagcccggggacaagauuacguucgaagccacaggaaaccugguggugccucgguacgcguuugccauggagcgcaacgcuggcucugggaucauuaucuccgauacccccguccaugacugcaauacaaccugucaaaccccuaaaggagccaucaacacaagccuccccuuccagaauauucacccgaucacgauuggcaagugcccuaaguaugugaaaucuaccaagcugagacuugcuacaggccugcggaacguucccagcauccagucccgcgggcucuuuggagccauugccggcuucaucgaagggggauggaccggcaugguggacgggugguacggauaucaucaccagaaugagcaaggcucuggcuacgcugcggaucugaaaagcacacagaacgccaucgacgagauuaccaauaaggucaacuccgugaucgaaaagaugaauacgcaguuuacagcuguugggaaggaguucaaccaccuugaaaagagaauugagaaucugaacaaaaagguggaugacggauuccucgauaucuggaccuacaaugccgaacugcugguccuccuggagaacgagcggacccuugacuaucauaauagcaacgugaaaaaccuguacgaaaagguccgcucucagcucaaaaauaacgccaaggagauuggcaauggguguuuugaguucuaucacaagugcgauaacacauguauggaguccgugaaaaauggaaccuacgacuauccuaaguacagcgaagaggcuaaacugaacagagaggaaaucgauggcguuaaacuugagucuacacggaucuaucaaauucuggccaucuacuccacgguggcgagcucccucguccuggugguuucucugggggcuauuagcuuuuggaugugcuccaauggcucucuccagugccgcaucuguauuuga

SEQ ID NO: 196813 - RNA, 1701 nt, Artificial Sequence
  derived and/or modified CDS sequence (opt5) from hemagglutinin__InfluenzaA__ADG21163
augaaggccauccuggugguccuccuguacaccuucgcuacagccaacgcggacacgcuuugcauuggcuaucacgcuaauaacagcaccgauacaguugacaccgugcuggagaagaaugugacagucacccauuccgugaaccuccuggaagauaagcacaaugggaaacuuuguaagcugagaggaguugcuccccuccaucugggcaaaugcaacaucgccggguggauucugggaaauccugagugugaaucucucagcacagccuccucuuggagcuacaucguggagaccuccucuagcgacaacggcacgugcuauccgggggauuuuauugacuacgaagaacugcgggagcagcuuuccagcgucucuuccuucgaacgcuuugagaucuuccccaagaccagcucuuggccuaaucacgauuccaacaagggagugacagccgcuuguccccaugccggcgcgaaaucuuuuuauaagaaucugaucuggcucguuaaaaagggcaacagcuacccuaaacuguccaagagcuauauuaaugacaaggggaaagaagugcuuguccuguggggaauccaccaccccuccaccucugccgaucaacagagccucuaccagaacgcugacgccuacguguucgugggcacauccagauauagcaagaaauuuaagccugagauugcuauccggccgaaaguccgcgaucaggaggggagaaugaauuacuauuggacccugguugaacccggagacaagauuacguucgaggccacaggcaaccugguggugccucgguacgcguuugccauggaacgcaacgcugggucuggaaucauuaucuccgauacccccguccaugacugcaauacaaccugucaaaccccuaaaggcgccaucaacacaagccuccccuuccagaaugugcacccgauuacgaucggcaagugcccuaaguauguuaaaucuaccaagcugagacuugcuacagggcugcggaacgugcccagcauucagucccgcggacucuuuggcgccaucgccggguucauugagggaggcuggaccgggauggucgacggaugguacggcuaucaucaccagaaugaacaaggcucuggguacgcugcggaucugaaaagcacacagaacgccaucgacgagaucaccaauaaggugaacuccguuauugagaaaaugaauacgcaguuuacagcugugggaaaggaguucaaccaccuugagaagagaaucgaaaaucugaacaaaaaggucgaugacggcuuccucgauguguggaccuacaaugccgagcugcugguccuccuggaaaacgagcggacccuugacuaucaugauagcaaugugaaaaaccuguacgagaagguucgcucucagcucaaaaacaaugccaaggaaauugggaacggauguuuugaguucuaucacaagugcgacaauacauguauggaauccgugaaaaacggcaccuacgauuauccuaaguacagcgaggaagcuaaacugaauagagaggagaucgacggggucaaacuugaaucuacacggauuuaucaaauccuggccaucuacuccacgguggcgagcucccucguucugguggucucucugggcgcuauuagcuuuuggaugugcuccaacggaucucuccagugccgcaucuguauuuga

SEQ ID NO: 196814 - RNA, 1701 nt, Artificial Sequence
  derived and/or modified CDS sequence (opt5) from hemagglutinin__InfluenzaA__ADG21165
augaaggccauccuggugguccuccuguacaccuucgcuacagccaacgcggacacgcuuugcauuggcuaucacgcuaauaacagcaccgauacaguugacaccgugcuggagaagaaugugacagucacccauuccgugaaccuccuggaagauaagcacaaugggaaacuuuguaagcugagaggaaucgcuccccuccaucugggcaaaugcaacauugccggguggauccugggaaauccugagugugaaucucucagcacagccuccucuuggagcuacauuguugagaccuccucuagcgacaacggcacgugcuauccgggggauuuuaucgacuacgaggaacugcgggagcagcuuuccagcgugucuuccuucaagcgcuuugaaaucuuccccaagaccaauagcuggccuaaccacgauucuaauaaaggagucacagccgcuuguccccaugccggcgcgaaguccuuuuauaaaaaccugauuuggcucgugaagaaaggcaauagcuacccuaagcugucuaaguccuauaucaacgacaaagggaaggagguucuugugcuguggggcauucaccaccccagcaccuccgccgaucaacagucucucuaccagaaugcugacgccuacgucuucgugggaacaagcaaauauuccaagaaauuuaagccugaaaucgcuauuagaccgaaagugcgggaucaggaggggcgcaugaacuacuauuggacccuggucgagcccggagacaagaucacguucgaagccacaggcaaccugguugugccuagauacgcguuugccauggagcggaaugcugggagcggaauuaucaucucugauacccccgugcaugacugcaacacaaccugucaaaccccuaagggcgccauuaauacaucccuccccuuccagaacauccacccgauuacgaucggcaaaugcccuaaguaugucaaaagcaccaagcugcgccuugcuacagggcugagaaaugugcccucuauucagagccggggacucuuuggcgccaucgccggguucaucgaaggaggcuggaccgggaugguugacggaugguacggcuaucaucaccagaacgagcaaggcuccggguacgcugcggaucugaaaucuacacagaaugccauugacggaaucaccaacaaggugaauagcgucauugaaaagaugaacacgcaguuuacagcugugggcaaagaguucaaucaccuugagaagcgcaucgaaaaccugaauaaaaagguugaugacggguuccucgauauuuggaccuacaacgccgagcugcuggugcuccuggaaaaugagagaacccuugacuaucaugauuccaacgucaaaaaccuguacgaaaaggugcggagccagcucaagaauaacgccaaagagaucggaaauggcuguuuugaguucuaucacaagugcgacaacacauguauggaaucugucaaaaaugggaccuacgauuauccuaaguacuccgaggaagcuaaacugaaccgcgaggaaaucgacggcgugaaacuugagagcacaagaauuuaucaaauccuggccauuuacucuacgguugcguccagccucgugcuggucgugucccugggagcuaucucuuuuuggaugugcagcaauggcucccuccagugccggauuuguaucuga

SEQ ID NO: 196815 - RNA, 1701 nt, Artificial Sequence; identical to SEQ ID NO: 194728
  derived and/or modified CDS sequence (opt5) from hemagglutinin__InfluenzaA__ADG21166

SEQ ID NO: 196816 - RNA, 1701 nt, Artificial Sequence
  derived and/or modified CDS sequence (opt5) from hemagglutinin__InfluenzaA__ADG21168
augaaggccauccuggugguccuccuguacaccuucgcuacagccaacgcggacacgcuuugcauuggcuaucacgcuaauaacagcaccgauacaguugacaccgugcuggagaagaaugugacagucacccauuccgugaaccuccuggaagauaagcacaaugggaaacuuuguaagcugagaggaguugcuccccuccaucugggcaaaugcaacaucgccggguggauucugggaaauccugagugugaaucucucagcacagccuccucuuggagcuacaucguggagaccuccucuagcgacaacggcacgugcuauccgggggauuuuauugacuacgaagaacugcgggagcagcuuuccagcgucucuuccuucgaacgcuuugagaucuuccccaagaccagcucuuggccuaaucacgauuccaacaagggagugacagccgcuuguccccaugccggcgcgaaaucuuuuuauaagaaucugaucuggcucguuaaaaagggcaacagcuacccuaaacuguccaaguucuauauuaaugacaaggggaaagaagugcuuguccuguggggaauccaccaccccagcaccuccgccgaucaacagucucucuaccagaacgcugacgccuacguguuugugggcagcuccagauauagcaagaaauucaagccugagauugcuauccggccgaaaguccgcgaucaggaggggagaaugaauuacuauuggacacugguugaacccggagacaagauuaccuuugaggccacgggcaaccugguggugccucgguacgcguucgccauggaacgcaacgcugggucuggaaucauuaucuccgauacacccguccaugacugcaauaccacaugucaaaccccuaaaggcgccaucaacaccagccuccccuuucagaauauucacccgaucacaauuggcaagugcccuaaguaugugaaaucuacgaagcugagacuugcuaccgggcugcggaacguucccagcauccagucccgcggacucuucggcgccauugccggguuuaucgagggaggcuggacagggaugguggacggaugguacggcuaucaucaccagaaugaacaaggcucuggguacgcugcggaucugaaaagcacccagaacgccaucgacgagauuacaaauaaggucaacuccgugaucgagaaaaugaauacccaguucacggcuguuggaaaggaguucaaccaccuugagaagagaauugaaaaucugaacaaaaagguggaugacggcuuucucgauaucuggacauacaaugccgagcugcugguccuccuggaaaacgagcggacccuugacuaucaugauagcaaugugaaaaaccuguacgagaagguccgcucucagcucaaaaacaaugccaaggaaauugggaacggauguuucgaguuuuaucacaagugcgacaauaccuguauggaauccgugaaaaacggcacauacgauuauccuaaguacagcgaggaagcuaaacugaauagagaggagaucgacgggguuaaacuugaaucuacccggaucuaucaaauucuggccaucuacuccacaguggcgagcucccucguccuggugguuucucugggcgcuauuagcuucuggaugugcuccaacggaucucuccagugccgcaucuguauuuga

SEQ ID NO: 196817 - RNA, 1701 nt, Artificial Sequence; identical to SEQ ID NO: 196770
  derived and/or modified CDS sequence (opt5) from hemagglutinin__InfluenzaA__ADG21169

SEQ ID NO: 196818 - RNA, 1701 nt, Artificial Sequence; identical to SEQ ID NO: 194728
  derived and/or modified CDS sequence (opt5) from hemagglutinin__InfluenzaA__ADG21170

SEQ ID NO: 196819 - RNA, 1701 nt, Artificial Sequence; identical to SEQ ID NO: 194728
  derived and/or modified CDS sequence (opt5) from hemagglutinin__InfluenzaA__ADG21173

SEQ ID NO: 196820 - RNA, 1701 nt, Artificial Sequence; identical to SEQ ID NO: 194741
  derived and/or modified CDS sequence (opt5) from hemagglutinin__InfluenzaA__ADG21174

SEQ ID NO: 196821 - RNA, 1701 nt, Artificial Sequence; identical to SEQ ID NO: 194741
  derived and/or modified CDS sequence (opt5) from hemagglutinin__InfluenzaA__ADG21175

SEQ ID NO: 196822 - RNA, 1701 nt, Artificial Sequence; identical to SEQ ID NO: 194728
  derived and/or modified CDS sequence (opt5) from hemagglutinin__InfluenzaA__ADG21176

SEQ ID NO: 196823 - RNA, 1701 nt, Artificial Sequence; identical to SEQ ID NO: 194728
  derived and/or modified CDS sequence (opt5) from hemagglutinin__InfluenzaA__ADG21177

SEQ ID NO: 196824 - RNA, 1701 nt, Artificial Sequence; identical to SEQ ID NO: 194728
  derived and/or modified CDS sequence (opt5) from hemagglutinin__InfluenzaA__ADG21178

SEQ ID NO: 196825 - RNA, 1701 nt, Artificial Sequence; identical to SEQ ID NO: 195094
  derived and/or modified CDS sequence (opt5) from hemagglutinin__InfluenzaA__ADG21179

SEQ ID NO: 196826 - RNA, 1701 nt, Artificial Sequence; identical to SEQ ID NO: 194728
  derived and/or modified CDS sequence (opt5) from hemagglutinin__InfluenzaA__ADG21180

SEQ ID NO: 196827 - RNA, 1701 nt, Artificial Sequence; identical to SEQ ID NO: 194728
  derived and/or modified CDS sequence (opt5) from hemagglutinin__InfluenzaA__ADG21181

SEQ ID NO: 196828 - RNA, 1701 nt, Artificial Sequence; identical to SEQ ID NO: 194728
  derived and/or modified CDS sequence (opt5) from hemagglutinin__InfluenzaA__ADG21182

SEQ ID NO: 196829 - RNA, 1701 nt, Artificial Sequence; identical to SEQ ID NO: 194728
  derived and/or modified CDS sequence (opt5) from hemagglutinin__InfluenzaA__ADG21183

SEQ ID NO: 196830 - RNA, 1701 nt, Artificial Sequence; identical to SEQ ID NO: 195905
  derived and/or modified CDS sequence (opt5) from hemagglutinin__InfluenzaA__ADG21184

SEQ ID NO: 196831 - RNA, 1701 nt, Artificial Sequence
  derived and/or modified CDS sequence (opt5) from hemagglutinin__InfluenzaA__ADG21185
augaaggccauccuggugguccuccuguacaccuucgcuacagccaacgcggacacgcuuugcauuggcuaucacgcuaauaacagcaccgauacaguugacaccgugcuggagaagaaugugacagucacccauuccgugaaccuccuggaagauaagcacaaugggaaacuuuguaagcugagaggaguugcuccccuccaucugggcaaaugcaacaucgccggguggauucugggaaauccugagugugaaucucucagcacagccuccucuuggagcuacaucguggagaccuccucuagcgacaacggcacgugcuauccgggggauuuuauugacuacgaagaacugcgggagcagcuuuccagcgucucuuccuucgaacgcuuugagaucuuccccaagaccagcucuuggccuaaucacgauuccaacaagggagugacagccgcuuguccccaugccggcgcgaaaucuuuuuauaagaaucugaucuggcucguuaaaaagggcaacagcuacccuaaacuguccaagagcuauauuaaugacaaggggaaagaagugcuuguccuguggggaauccaccaccccuccaccucugccgaucaacagagccucuaccagaacgcugacgccuacguguucgugggcacauccagauauagcaagaaauuuaagccugagauugcuauccggccgaaaguccgcgaucaggaggggagaaugaauuacuauuggacccugguuaagcccggagacaaaauuacguucgaagccacaggcaaccugguggugccucgguacgcguuugccauggagcgcaacgcugggucuggaaucauuaucuccgauacccccguccaugacugcaauacaaccugucaaaccccuaagggcgccaucaacacaagccuccccuuccagaauauucacccgaucacgauuggcagaugcccuaaguaugugaaaucuaccaagcugcggcuugcuacagggcugcgcaacguucccagcauccaguccagaggacucuuuggcgccauugccggguucaucgaaggaggcuggaccgggaugguggacggaugguacggcuaucaucaccagaaugagcaaggcucuggguacgcugcggaucugaaaagcacacagaacgccaucgacgaaauuaccaauaaggucaacuccgugaucgagaaaaugaauacgcaguuuacagcuguuggaaaggaguucaaccaccuugaaaagcggauugagaaucugaacaaaaagguggaugacggcuuccucgauaucuggaccuacaaugccgaacugcugguccuccuggagaacgaacgcacccuugacuaucaugauagcaaugugaaaaaccuguacgagaaggucagaucucagcucaaaaacaaugccaaggagauugggaacggauguuuugaguucuaucacaagugcgacaauacauguauggaguccgugaaaaacggcaccuacgauuauccuaaguacagcgaagaggcuaaacugaaucgggaagagaucgacgggguuaaacuugagucuacacgcaucuaucaaauucuggccaucuacuccacgguggcgagcucccucguccuggugguuucucugggcgcuauuagcuuuuggaugugcuccaacggaucucuccagugcagaaucuguauuuga

SEQ ID NO: 196832 - RNA, 1701 nt, Artificial Sequence; identical to SEQ ID NO: 196087
  derived and/or modified CDS sequence (opt5) from hemagglutinin__InfluenzaA__ADG21188

SEQ ID NO: 196833 - RNA, 1707 nt, Artificial Sequence
  derived and/or modified CDS sequence (opt5) from hemagglutinin__InfluenzaA__ADG21402
auggagaagaucgugcugcuccuggccauugucagccuuguuaaauccgaccagaucugcauuggcuaccacgcuaacaauucuaccgaacaaguggauacaaucauggagaagaacgugacggucacccaugcccaggacauucuggaaaagacacacaaugggaaacucugugaucuggacggagugaaaccccuuauccugagagauugcagcguugcgggcuggcuccuggggaacccuaugugugacgaguuccugaaugugccggaaugguccuauaucgucgagaagauuaaccccgcuaaugaucucugcuacccuggaaacuuuaaugacuaugaggaacugaagcaucuucugucucggaucaaccacuucgagaaaauucagaucauucccaagagcuccuggucugaucaugaagccagcuccggcgugagcucugccuguccuuaccaggggcgcuccagcuuuuucagaaauguuguguggcucaucaaaaaggacaacgcuuaucccaccauuaaacggucuuacaauaacacaaaucaagaggaucugcuuguccuguggggaauccaccacccuaacgacgccgcugagcagacccgccucuaucagaacccgacaaccuacaucuccgugggcacgagcacccugaaucagagacuggugcccaagauugccacacggucuaaggucaacggccaauccgggcgcauggaauuuuucuggaccauccucaaaagcaaugaugcgauuaacuuugaguccaauggaaacuucaucgccccugaaaaugcuuacaagauuguuaaaaagggcgacucuacaaucaugaaaagcgagcuggaauaugggaacugcaauaccaagugucagacgcccaucggagccauuaacuccagcaugccuuuucauaauauccacccccuuacaauuggcgagugcccgaaauacgugaagucuaacagacugauccucgcuaccgggcugcgcaauuccccucagggagagcggagacggaagaaacgcggccuuuucggcgccauugcgggguuuaucgaaggaggcuggcaggggaugguggacggaugguauggcuaccaucacagcaacgagcaagggucuggauaugccgcugauaaggaaagcacacagaaagccaucgacggcgucaccaauaaggugaacuccauuaucgauaaaaugaacacccaguucgaggcuguuggcagagaauuuaauaaccuggagcggcgcauugagaaucucaacaagaagauggaagacggguuccuggauguguggacauacaaugccgagcugcucguccugauggaaaacgagagaacgcuugacuuccacgauucuaaugugaaaaaccuguaugacaagguucggcuccaacugagagauaaugccaaagaacuuggaaacggcuguuuugaguucuaccaucgcugcgacaaugaguguauggaaagcgugcggaacgggaccuacgauuauccccaguacuccgaggaagcuagacugaagcgcgaggagaucagcggagucaaacucgaaucuauuggcacauaucagauccuguccauuuacagcaccguggcgucuucccuggcccucgcuaucauggucgccgggcuguuucuuuggaugugcagcaauggcucccugcagugccggaucuguauuuga

SEQ ID NO: 196834 - RNA, 1704 nt, Artificial Sequence
  derived and/or modified CDS sequence (opt5) from hemagglutinin__InfluenzaA__ADG21414
auggagaagaucgugcugcuccuggccauugucagcaucguuaaauccgaccagauuugcaucggcuaccacgcuaacaauucuaccgaacauguggauacaauuauggagaagaacgugacggucacccacgcccaagacauccuugaaaagacacauaaugggaaacuguguaaccucgauggagugaaaccccugauccuuagagacugcagcguugcgggcuggcugcucgggaauccuaugugugaugaguuccugaacgugccggaaugguccuauauugucgagaagaucaaucccgcuaacgaccugugcuacccuggaaauuuuaacgauuaugaggaacucaagcaucugcuuucucggauuaaucacuucgagaaaauccagauuauccccaagaacagcugguccgaccacgaagccucuggcgugagcuccgccuguccuuaccaggggcgcagcuccuuuuucagaaauguuguguggcugaccaaaaagaacaaugcuuaucccacaauuaaaaagucuuacaacaacaccaaucaggaggaucuccugguccuuuggggaauccaccauccuaacgacggcgccgagcaaacacggcuguaucagaauccgaccacguacaucagcgugggcaccucuacacucaaccagcgccuggugcccaagauugcuaccagauccaaagucaaugggcagagcggacggauggaauuuuucuggacaauccugaagucuaacgaugccauuaauuuugaguccaacggcaauuucaucgcgccugaaaacgccuacaaaauuguuaagaaaggggacagcaccaucaugaaguccgagcucgaauauggaaauugcaacacgaaaugucaaacacccaucggcgcuauuaauucuagcaugccuuuucacaacauccauccccugaccauuggggagugcccgaaguacgugaaguccaaucgccuugugcuggccacaggacucagaaacagcccucagggcgagcggcgccggaaaaagagaggccuguucggggcuaucgccggauuuauugaaggcggguggcagggaauggucgauggcugguauggguaccaccacucuaacgagcagggauccggcuaugcggccgacaaagaaagcacccaaaaggcuaucgacggcgugaccaauaaaguuaacucuaucauugauaagaugaauacacaguucgaggccguggggcgcgaauuuaacaaucuugagagacggaucgagaaccugaauaagaaaauggaagacggauuccucgaugucuggacguacaacgcugagcugcuggugcucauggaaaaugagcgcacccuggacuuccaugauagcaacguuaagaaucuuuaugacaaagugagacugcagcuccgggauaacgccaaggaacugggcaauggguguuuugaguucuaccacagaugcgacaacgaguguauggaauccguccgcaauggaacauacgauuauccccaauacucugaggaagcccggcuuaaaagagaggagauuagcggcgugaagcuggaauccaucgggaccuaucagauucucagcaucuacucuacagucgcuuccagccuggcgcuggccauuaugguggcuggccucuuucuguggaugugcucuaacggaucccuucagugccgcaucuguaucuga

SEQ ID NO: 196835 - RNA, 1704 nt, Artificial Sequence
  derived and/or modified CDS sequence (opt5) from hemagglutinin__InfluenzaA__ADG21416
auggagaagaucgugcugcuccuggccauugucagcaucguuaaauccgaccagauuugcaucggcuaccacgcuaacaauucuaccgaacaaguggauacaauuauggagaagaacgugacggucacccaugcccaggacauccuugaaaagacacacaaugggaaacuguguaaccucgauggagugaaaccccugauccuuagagacugcagcguugcgggcuggcugcucgggaauccuaugugugaugaguuccugaacgugccggaaugguccuauauugucgagaagaucaaucccgcuaacgaccugugcuacccuggaaauuuuaacgauuaugaggaacucaagcaucugcuuucucggauuaaucacuucgagaaaauccagauuauccccaagaacagcugguccgaccaugaagccucuggcgugagcuccgccuguccuuaccaggggcgcagcuccuuuuucagaaauguuguguggcugaccaaaaagaacaaugcuuaucccacaauuaaaaagucuuacaacaacaccaaucaagaggaucuccugguccuuuggggaauccaccacccuaacgacgccgcugagcagacaggccuguaucagaauccgaccacguacaucagcgugggcaccucuacacucaaccagcggcuggugcccaagauugccacccgcuccaaagucaaugggcaaagcggaagaauggaauuuuucuggacaauccugaagucuaacgauguuauuaauuuugaguccaacggcaauuucaucgcgccugaaaacgccuacaaaauugugaagaaaggggacagcaccaucaugaaguccgagcucgaauauggaaauugcaacacgaaaugucagacacccaucggcgcuauuaauucuagcaugccuuuucauaacauccacccccugaccauuggggagugcccgaaguacgugaaguccaaucggcuuguccuggccacaggacuccgcaacagcccucagggcgagagacggcgcaaaaagagaggccuguucggggcuaucgccggauuuauugaaggcggguggcagggaaugguggauggcugguauggguaccaucacucuaacgagcaaggauccggcuaugcggccgacaaagaaagcacccagaaggcuaucgacggcguuaccaauaaagugaacucuaucauugauaagaugaauacacaguucgaggccgucgggcgggaauuuaacaaucuugagcgcagaaucgagaaccugaauaagaaaauggaagacggauuccucgauguguggacguacaacgcugagcugcugguucucauggaaaaugagcggacccuggacuuccacgauagcaacgugaagaaucuuuaugacaaaguccgccugcaacucagagauaacgccaaggaacugggcaauggguguuuugaguucuaccaucggugcgacaacgaguguauggaauccgugagaaauggaacauacgauuauccccaguacucugaggaagcccgccuuaaacgggaggagauuagcggcgucaagcuggaauccaucgggaccuaucagauucucagcaucuacucuacaguggcuuccagccuggcgcuggccauuaugguugcuggccucuuucuguggaugugcucuaacggaucccuucagugcagaaucuguaucuga

SEQ ID NO: 196836 - RNA, 1704 nt, Artificial Sequence
  derived and/or modified CDS sequence (opt5) from hemagglutinin__InfluenzaA__ADG21420
auggagaagaucgugcugcuccuggccauugucagcaucguuaaauccgaccagauuugcaucggcuaccacgcuaacaauucuaccgaacaaguggauacaauuauggagaagaacgugacggucacccaugcccaggacauccuugaaaagacacacaaugggaaacuguguaaccucgauggagugaaaccccugauccuuagagacugcagcguugcgggcuggcugcucgggaauccuaugugugaugaguuccugaacgugccggaaugguccuauauugucgagaagaucaaucccgcuaacgaccugugcuacccuggaaauuuuaacgauuaugaggaacucaagcaucugcuuucucggauuaaucacuucgagaaaauccagauuauccccaagaacagcugguccgaccaugaagccucuggcgugagcuccgccuguccuuaccaggggcgcagcuccuuuuucagaaauguuguguggcugaccaaaaagaacaaugcuuaucccacaauuaaaaagucuuacaacaacaccaaucaagaggaucuccugguccuuuggggaauccaccacccuaacgacgccgcugagcagacacggcuguaucagaauccgaccacguacaucagcgugggcaccucuacacucaaccagcgccuggugcccaagauugccaccagauccaaagucaauggccaaagcgggcggauggaauuuuucuggacaauccugaagucuaacgaugcgauuaauuuugaguccaacggaaauuucaucgccccugaaaacgcuuacaaaauuguuaagaaaggcgacagcaccaucaugaaguccgagcucgaauaugggaauugcaacacgaaaugucagacacccaucggagccauuaauucuagcaugccuuuucauaacauccacccccugaccauuggcgagugcccgaaguacgugaaguccaaucgccuugugcuggcuacagggcucagaaacagcccucagggagagcggcgccggaaaaagagaggccuguucggcgccaucgcgggguuuauugaaggaggcuggcaggggauggucgauggaugguauggcuaccaucacucuaacgagcaaggguccggauaugccgcugacaaagaaagcacccagaaggccaucgacggcgugaccaauaaaguuaacucuaucauugauaagaugaauacacaguucgaggcugugggccgcgaauuuaacaaucuugagagacggaucgagaaccugaauaagaaaauggaagacggguuccucgaugucuggacguacaacgccgagcugcuggugcucauggaaaaugagcgcacccuggacuuccacgauagcaacguuaagaaucuuuaugacaaagugagacugcaacuccgggauaacgccaaggaacugggaaauggcuguuuugaguucuaccauagaugcgacaacgaguguauggaauccguccgcaaugggacauacgauuauccccaguacucugaggaagcucggcuuaaaagagaggagauuagcggagugaagcuggaauccaucggcaccuaucagauucucagcaucuacucuacagucgcguccagccuggcccuggcuauuaugguggccgggcucuuucuguggaugugcucuaacggcucccuucagugccgcaucuguaucuga

SEQ ID NO: 196837 - RNA, 1704 nt, Artificial Sequence
  derived and/or modified CDS sequence (opt5) from hemagglutinin__InfluenzaA__ADG21422
auggagaagaucgugcugcuccuggccauugucagccuuguuaaauccgaccagaucugcauuggcuaccacgcuaacaauucuaccgaacaaguggauacaaucauggagaagaacgugacggucacccaugcccaggacauucuggaaaagacacacaaugggaaacucuguaaccuggauggagugaaaccccuuauccugagagacugcagcguugcgggcuggcuccuggggaauccuaugugugaugaguuccugaacgugccggaaugguccuauaucgucgagaagauuaaucccaccaacgaccucugcuacccuggaaauuuuaacgauuaugaggaacugaagcaucuucugucucggaucaaucacuucgagaaaauucagaucauucccaagaacagcugguccgaccaugaggcuucuggcgugagcuccgccuguccuuaccaggggcgcagcuccuuuuucagaaauguuguguggcucaccaaaaagaacaaugccuaucccacaaucaaacggucuuacaacaacacaaaucaagaagaucugcuuguccuguggggcauucaccacccuaacgacgcugccgagcagacccgccucuaucagaauccgacgaccuacaucagcgugggaacaucuacccugaaccagagacuggugcccaagaucgcuacacgguccaaggucaauggccaaagcgggcgcauggaauuuuucuggaccauucucaaaucuaacgaugccaucaauuuugaguccaacggaaauuucauugcgccugaaaacgccuacaagaucguuaaaaagggcgacagcacgauuaugaaauccgagcuggaauaugggaauugcaacacaaagugucagacccccaucggagcuaucaauucuagcaugccuuuucauaacauucacccccuuacaaucggcgagugcccgaaauacgugaaguccaauagacuggugcucgccaccgggcugcggaacagcccucagggagagcgcagacggaagaaacgcggccuuuucggcgcuauugccggguuuaucgaaggaggcuggcaggggauggucgauggaugguauggcuaccaucacucuaacgagcaaggguccggauaugcggccgacaaggaaagcacccagaaagcuauugacggcgugacaaauaagguuaacucuaucaucgauaaaaugaauacgcaguucgaggccgugggcagagaauuuaacaaucuggagcggcgcauugagaaccucaauaagaagauggaagacggguuccuggaugucuggaccuacaacgcugagcugcucgugcugauggaaaaugagagaacacuugacuuccacgauagcaacguuaaaaaucuguaugacaaggugcggcuccaacugagagauaacgccaaagaacuuggaaauggcuguuuugaguucuaccaucgcugcgacaacgaguguauggaauccguccggaaugggaccuacgauuauccccaguacucugaggaagccagaagcaagcgcgaggagaucuccggagugaaacuggaaagcauuggcacauaucagauccucucuauuuacuccaccgucgcuagcucucuggcgcuggccaucaugguggcugggcucuuucuguggaugugcuccaacggcagccuucagugccggauuuguaucuga

SEQ ID NO: 196838 - RNA, 1704 nt, Artificial Sequence
  derived and/or modified CDS sequence (opt5) from hemagglutinin__InfluenzaA__ADG21425
auggagaagaucgugcugcuccuggccauugucagccuuguuaaauccgaccagaucugcauuggcuaccacgcuaacaauucuaccgaacaaguggauacaaucauggagaagaacgugacggucacccaugcccaggacauucuggaaaagacacacaaugggaaacucuguaaccuggauggagugaaaccccuuauccugagagacugcagcguugcgggcuggcuccuggggaauccuaugugugaugaguuccugaacgugccggaaugguccuauaucgucgagaagauuaaucccgcuaacgaccucugcuacccuggaaauuuuaacgauuaugaggaacugaagcaucuucugucucggaucaaucacuucgagaaaauucagaucauucccaagaacagcugguccgaccauggcgccucuggggugagcuccgccuguccuuaccagggacgcagcuccuuuuucagaaauguuguguggcucaccaaaaagaacaaugcuuaucccacaaucaaaaagucuuacaacaacaccaaucaagaagaucugcuuguccuguggggcauucaccacccuaacgacgccgaggagcagacacggcucuaucagaauccgaccacguacaucagcgugggcaccucuacacugaaccagcgccuggugcccaagaucgcuaccagauccaaagucaaugggcaaagcggacggauggaauuuuucuggacaauucucaagucuaacgaugccaucaauuuugaguccaacggcaauuucauugcgccugaaaacgccuacaaaaucguuaagaaaggggacagcaccauuaugaaguccgagcuggaauaugauaauugcaacacgaaaugucagacacccaucggagcuaucaauucuagcaugccuuuucauaacauucacccccuuaccaucggcgagugcccgaaguacgugaaguccaauaaacuggugcucgccacagggcugcgcaacagcccucagggagagaagagacggaaaaagcgcggccuuuucggcgcuauugccggguuuaucgaaggaggcuggcaggggauggucgacggaugguauggcuaccaucacucuaacgagcaaggguccggauaugcggccgacaaagaaagcacccagaaggcuauugauggcgugaccaauaagguuaacucuaucaucgacaaaaugaauacacaguucgaggccgugggcagagaauuuaacgcucuggagcggcgcauugagaaucucaacaagaaaauggaagauggguuccuggacgucuggacguacaaugccgagcugcucgugcugauggaaaacgagagaacccuugauuuccacgacagcaauguuaagaaccuguaugauaaagugcggcuccaacugcgcgacaaugccaaggaacuuggaaacggcuguuuugaguucuaccauagaugcgauaaugaguguauggaauccguccggaacgggacauacgacuauccccaguacucugaggaagcuagacugaagcgcgaggagaucagcggagugaaacucgaauccauuggcaccuaucagauccugagcauuuacucuacagucgcguccagccuggcccucgcuaucaugguggccgggcugucucuuuggaugugcuccaauggcagccugcagugccggauuuguaucuga

SEQ ID NO: 196839 - RNA, 1704 nt, Artificial Sequence
  derived and/or modified CDS sequence (opt5) from hemagglutinin__InfluenzaA__ADG21429
auggagaagaucgugcugcuccuggccauugucagcaucguuaaauccgaccagauuugcaucggcuaccacgcuaacaauucuaccgaacaaguggauacaauuauggagaagaacgugacggucacccaugcccaggacauccuugagaaaacacacaaugggaagcuguguaaccucgauggaguggagccccugauccuuagagacugcagcguugcgggcuggcugcucgggaauccuaugugugaugaauuucugaacgugccggagugguccuauauugucgagaaaaucaaucccgcuaacgaccugugcuacccuggaaauuuuaacgauuaugaagaacucaagcaucugcuuucucggauuaaucacuucgaaaagauccagauuauccccaaaaacagcugguccgaccaugaggccucuggcgugagcuccgccuguccuuaccaggggcgcagcucuuucuucagaaauguuguguggcugaccaagaaaaacaaugcuuaucccacaauuaagaaauccuacaacaacaccaaucaagaggaucuccugguccuuuggggaauccaccacccuaacgacgccgcugaacagacacggcuguaucagaauccgaccacguacaucagcgugggcaccucuacacucaaccagcgccuggugcccaagauugccaccagauccaaggucaauggccaaagcgggcggauggaguuuuucuggacaauccugaaaucuaacgauguuauuaauuuugaauccaacggaaauuucaucgcgccugagaacgccuacaagauugugaaaaagggcgacagcaccaucaugaaauccgaacucgaguaugggaauugcaacacgaagugucagacacccaucggagcuauuaauucuagcaugccuuuucauaacauccacccccugaccauuggcgagugcccgaaauacgugaaguccgaucgccuuguccuggccacagggcucagaaauagcccucagggagaacggcgcagaaagaaacggggccuguucggcgcuaucgccggguuuauugagggaggcuggcaggggaugguggacggaugguauggcuaccaucacucuaacgaacaaggguccggauaugcggccgacaaggagagcacccagaaagcuaucgauggcguuaccaacaaggucaauucuaucauugacaaaaugaacacacaguucgaagccgugggccgcgaguuuaauaaccuugagagacggaucgaaaaucugaacaagaagauggaggauggguuccucgacguguggacguacaaugcugaacugcugguucucauggagaacgaacgcacccuggauuuccacgacagcaaugugaaaaaccuuuaugauaaggucagacugcaacuccgggacaaugccaaagagcugggaaacggcuguuuugaguucuaccauagaugcgauaaugaauguauggaguccgugcgcaacgggacauacgacuauccccaguacucugaagaggcccggcuuaagagagaggaaauuagcggagucaaacuggaguccaucggcaccuaucagauucucagcaucuacucuacaguggcuuccagccuggcgcuggccauuaugguugcugggcuccugcuuuggaugugcucuaauggcucccugcagugccgcaucuguaucuga

SEQ ID NO: 196840 - RNA, 1704 nt, Artificial Sequence
  derived and/or modified CDS sequence (opt5) from hemagglutinin__InfluenzaA__ADG21437
auggagaagaucgugcugcuccuggccauugucagcaucguuaaauccgaccagauuugcaucggcuaccacgcuaacaauucuaccgaacaaguggauacaauuauggagaagaacgugacggucacccaugcccaggacauccuugaaaagacacacaaugggaaacuguguaaccucgauggagugaaaccccugauccuuagagacugcagcguugcgggcuggcugcucgggaauccuaugugugaugaguuccugaacgugccggaaugguccuauauugucgagaagaucaaucccgcuaacgaccugugcuacccuggaaauuuuaacgauuaugaggaacucaagcaucugcuuucucggauuaaucacuucgagaaaauccagauuauccccaagaacagcugguccgaccaugaagccucuggcgugagcuccgccuguccuuaccaggggcgcagcuccuuuuucagaaauguuguguggcugacccagaaaaacaaugcuuaucccacaauuaagaaaucuuacaacaacaccaaucaagaggaucuccugguccuuuggggaauccaccacccuaacgacgccgcugagcagacacggcuguaucagaauccgaccacguacaucagcgugggcaccucuacacucaaccaacgccuggugcccaagauugccaccagauccaaggucaauggccagagcgggcggauggaauuuuucuggacaauccugaaaucuaacgauguuauuaauuuugaguccaacggaaauuucaucgcgccugaaaacgccuacaagauugugaaaaagggcgacagcaccaucaugaaauccgagcucgaauaugggaauugcaacacgaagugucagacacccaucggagcuauuaauucuagcaugccuuuucauaacauccacccccugaccauuggcgagugcccgaaauacgugaaguccaaucgccuuguccuggccacagggcucagaaacagcccucagggagagcggcgcagaaagaaacggggccuguucggcgcuaucgccggguuuauugaaggaggcuggcaagggaugguggauggaugguauggcuaccaucacucuaacgagcagggguccggauaugcggccgacaaggaaagcacccagaaagcuaucgacggcguuaccaauaaggugaacucuaucauugauaaaaugaauacacaauucgaggccgucggccgcgaauuuaacaaucuugagagacggaucgagaaccugaauaagaagauggaagacggguuccucgauguguggacguacaacgcugagcugcugguucucauggaaaaugagcgcacccuggacuuccacgauagcaacgugaaaaaucuuuaugacaaggucagacugcagcuccgggauaacgccaaagaacugggaaauggcuguuuugaguucuaccauagaugcgacaacgaguguauggaauccgugcgcaaugggacauacgauuauccccaguacucugaggaagcccggcuuaagagagaggagauuagcggagucaaacuggaauccaucggcaccuaucagauucucagcaucuacucuacaguggcuuccagccuggcgcuggccauuaugguugcugggcucuuucuguggaugugcucuaacggcucccuucaaugccgcaucuguaucuga

SEQ ID NO: 196841 - RNA, 1704 nt, Artificial Sequence
  derived and/or modified CDS sequence (opt5) from hemagglutinin__InfluenzaA__ADG21439
auggagaagaucgugcugcuccuggccauugucagcaucguuaaauccgaccagauuugcaucggcuaccacgcuaacaauucuaccgaacaaguggauacaauuauggagaagaacgugacggucacccaugcccaggacauccuugaaaagacacacaaugggaaacuguguaaccucgauggagugaaaccccugauccuuagagacugcagcguugcgggcuggcugcucgggaauccuaugugugaugaguuccugaacgugccggaaugguccuauauugucgagaagaucaaucccgcuaacgaccugugcuacccuggaaauuuuaacgauuaugaggaacucaagcaucugcuuucucggauuaaucacuucgagaaaauccagauuauccccaagggcagcugguccgaccaugaagccucuggggugagcuccgccuguccuuaccagggacgcagcuccuuuuucagaaacguuguguggcugaccaaaaagaauaacgcuuaucccacaauuaaaaagucuuacaauaacaccaaccaagaggaucuccugguccuuuggggcauccaccacccuaaugacgccgcugagcagacacggcuguaucagaacccgaccacguacaucagcgugggcaccucuacacucaaucagcgccuggugccccaaauugccaccagauccaaggucaacgggcagagcggacggauggaauuuuucuggacaauccugaaaucuaaugaugcgauuaacuuugaguccaauggcaacuucaucgccccugaaaaugcuuacaagauuguuaaaaagggggacagcaccaucaugaaauccgagcucgaauauggaaacugcaauacgaagugucagacacccaucggcgccauuaacucuagcaugccuuuucauaauauccacccccugaccauuggggagugcccgaaauacgugaaguccaaccgccuugugcuggcuacaggacucagaaauagcccucagggcgagcggcgcagaaagaaacggggccuguucggggccaucgcgggauuuauugaaggcggguggcaaggaauggucgauggcugguauggguaccaucacucuaacgagcagggauccggcuaugccgcugacaaggaaagcacccagaaagccaucgacggcgugaccaacaagguuaauucuaucauugauaaaaugaacacacaauucgaggcuguggggcgcgaauuuaauaaccuugagagacggaucgagaaucugaacaagaagauggaagacggauuccucgaugucuggacguacaaugccgagcugcuggugcucauggaaaacgagcgcacccuggacuuccacgauagcaauguuaaaaaccuuuaugacaaggugagacugcagcuccgggauaaugccaaagaacugggcaacggguguuuugaguucuaccauagaugcgacaaugaguguauggaauccguccgcaacggaacauacgauuauccccaguacucugaggaagcucggcuuaagagagaggagauuagcggcgugaaacuggaauccaucgggaccuaucagauucucagcaucuacucuacagucgcguccagccuggcccuggcuauuaugguggccggccucuuucuguggaugugcucuaauggaucccuucaaugccgcaucuguaucuga

SEQ ID NO: 196842 - RNA, 1704 nt, Artificial Sequence
  derived and/or modified CDS sequence (opt5) from hemagglutinin__InfluenzaA__ADG21441
auggagaagaucgugcugcuccuggccauugucagcaucguuaaauccgaccagauuugcaucggcuaccacgcuaacaauucuaccgaacaaguggauacaauuauggagaagaacgugacggucacccaugcccaggacauccuugaaaagacacacaaugggaagcuguguaaccucgauggagugaaaccccugauccuuagagacugcagcguugcgggcuggcugcucgggaauccuaugugugaugaguuccugaacgugccggaaugguccuauauugucgagaagaucaaucccucuaacgaccugugcuacccuggaaauuuuaacgauuaugaggaacucaagcaucugcuuagccggauuaaucacuucgagaaaauccagauuauccccaagaacuccuggucugaccaugaagcuagcggcguguccagcgccuguccuuaccaggggcgcagcuccuuuuucagaaauguuguguggcugaccaaaaagaacaaugccuaucccacaauuaaaaagagcuacaacaacaccaaucaagaggaucuccugguccuuuggggaauccaccacccuaacgacgaggcugaacagacaucucuguaucagaauccgaccacguacaucuccgugggcaccagcacacucaaccagcggcuggugcccaagauugccacccgcucuaaagucaauggccaauccgggagaauggaguuuuucuggacaauccugaagucuaacgaugcuauuaauuuugaauccaacggaaauuucaucgccccugagaacgcguacaaaauuguuaagaaaggcgacucuaccaucaugaaaagcgaacucgaguaugggaauugcaacacgaaaugucagacacccaucggagccauuaauuccagcaugccuuuucauaacauccacccccugaccauuggcgagugcccgaaguacgugaagucuaaucggcuugugcuggcuacagggcuccgcaacuccccucagggagaaagacggcgcaaaaagagaggccuguucggcgccaucgcuggguuuauugagggaggcuggcaggggauggucgauggaugguauggcuaccaucacagcaacgaacaagggucuggauaugccgcggacaaagagagcacccagaaggccaucgacggcgugaccaauaaaguuaacuccaucauugauaagaugaauacacaguucgaagcugugggccgggaguuuaacaaucuugagcgcagaaucgaaaaccugaauaagaaaauggaggacggguuccucgaugucuggacguacaacgccgaacugcuggugcucauggagaaugaacggacccuggacuuccacgauucuaacguuaagaaucuuuaugacaaagugcgccugcaacucagagauaacgcuaaggagcugggaaauggcuguuuugaguucuaccaucggugcgacaacgaauguauggagagcgucagaaaugggacauacgauuauccccaguacuccgaagaggcccgccuuaaacgggaggaaauuagcggagugaagcuggagucuaucggcaccuaucagauucucuccaucuacagcacagucgccucuucccuggcucuggcgauuaugguggccgggcucuuucuguggaugugcagcaacggcucccuucagugcagaaucuguaucuga

SEQ ID NO: 196843 - RNA, 1704 nt, Artificial Sequence
  derived and/or modified CDS sequence (opt5) from hemagglutinin__InfluenzaA__ADG21443
auggagaagaucgugcugcuccuggccauugucagcaucguuaaauccgaccagauuugcaucggcuaccacgcuaacaauucuaccgaacaaguggauacaauuauggagaagaacgugacggucacccaugcccaggacauccuugaaaagacacacaaugggaaacuguguaaccucgauggagugaaaccccugauccuuagagacugcagcguugcgggcuggcugcucgggaauccuaugugugaugaguuccugaacgugccggaaugguccuauauugucgagaagaucaaucccaccaacgaccugugcuacccuggaaauuuuaacgauuaugaggaacucaagcaucugcuuucucggauuaaucacuucgagaaaauccagauuauccccaagaacagcugguccgaccaugaggcuucuggcgugagcuccgccuguccuuaccaggggcgcagcuccuuuuucagaaauguuguguggcugaccaaaaagaacaaugccuaucccacaauuaaaaagucuuacaacaacacaaaucaagaagaucuccugguccuuuggggaauccaccacccuaacgacgcugccgagcagacccggcuguaucagaauccgacgaccuacaucagcgugggcacaucuacccucaaccagcgccuggugcccaagauugcuacaagauccaaagucaauggccaaagcgggcggauggaauuuuucuggaccauccugaagucuaacgaugccauuaauuuugaguccaacggaaauuucaucgcgccugaaaacgccuacaaaauuguuaagaaaggcgacagcacgaucaugaaguccgagcucgaauaugggaauugcaacacaaaaugucagacccccaucggagcuauuaauucuagcaugccuuuucauaacauccacccccugacaauuggcgagugcccgaaguacgugaaguccaaucgccuugugcuggccaccgggcucagaaacagcccucagggagagcggcgccggaaaaagagaggccuguucggcgcuaucgccggguuuauugaaggaggcuggcaggggauggucgauggaugguauggcuaccaucacucuaacgagcaaggguccggauaugcggccgacaaagaaagcacccagaaggcuaucgacggcgugacaaauaaaguuaacucuaucauugauaagaugaauacgcaguucgaggccgugggccgcgaauuuaacaaucuugagagacggaucgagaaccugaauaagaaaauggaagacggguuccucgaugucuggaccuacaacgcugagcugcuggugcucauggaaaaugagcgcacacuggacuuccacgauagcaacguuaagaaucuuuaugacaaagugagacugcaacuccgggauaacgccaaggaacugggaaauggcuguuuugaguucuaccauagaugcgacaacgaguguauggaauccguccgcaaugggaccuacgauuauccccaguacucugaggaagcccggcuuaaaagagaggagauuagcggagugaagcuggaauccaucggcacauaucagauucucagcaucuacucuaccgucgcuuccagccuggcgcuggccauuaugguggcugggcucuuucuguggaugugcucuaacggcucccuucagugccgcaucuguaucuga

SEQ ID NO: 196844 - RNA, 1704 nt, Artificial Sequence
  derived and/or modified CDS sequence (opt5) from hemagglutinin__InfluenzaA__ADG21445
auggagaagaucgugcugcuccuggccauugucagcaucguuaaauccgaccagauuugcaucggcuaccacgcuaacaauucuaccgaacaaguggauacaauuauggagaagaacgugacggucacccaugcccaggacauccuugaaaagacacacaaugggaagcuguguaaccucgauggagugaaaccccugauccuuagagacugcagcguugcgggcuggcugcucgggaauccuaugugugaugaguuccugaacgugccggaaugguccuauauugucgagaagaucaaucccucuaacgaccugugcuacccuggaaauuuuaacgauuaugaggaacucaagcaucugcuuagccggauuaaucacuucgagaaaauccagauuauccccaagaacuccuggucugaccaugaagcuagcggcguguccagcgccuguccuuaccaggggagaucuuccuuuuucagaaauguuguguggcugaccaaaaagaacaaugccuaucccacaauuaaaaagagcuacaacaacaccaaucaagaggaucuccugguccuuuggggaauccaccacccuaacgacgaggcugaacagacacggcuguaucagaauccgaccacguacaucucugugggcaccuccacacucaaccagcgccuggugcccaagauugccaccagaagcaaagucaauggccaaucugggcggauggaguuuuucuggacaauccugaaguccaacgaugcuauuaauuuugaaagcaacggaaauuucaucgccccugagaacgcguacaaaauuguuaagaaaggcgacuccaccaucaugaagucugaacucgaguaugggaauugcaacacgaaaugucagacacccaucggagccauuaauagcuccaugccuuuucauaacauccacccccugaccauuggcgagugcccgaaguacgugaaaagcaaucgccuugugcuggcuacagggcucagaaacucuccucagggagaacggcgccgcaaaaagcggggccuguucggcgccaucgcuggguuuauugagggaggcuggcaggggauggucgauggaugguauggcuaccaucacuccaacgaacaagggagcggauaugccgcggacaaagagucuacccagaaggccaucgacggcgugaccaauaaaguuaacagcaucauugauaagaugaauacacaguucgaagcugugggccgcgaguuuaacaaucuugagagacggaucgaaaaccugaauaagaaaauggaggacggguuccucgaugucuggacguacaacgccgaacugcuggugcucauggagaaugaacgcacccuggacuuccacgauuccaacguuaagaaucuuuaugacaaagugagacugcaacuccgggauaacgcuaaggagcugggaaauggcuguuuugaguucuaccauagaugcgacaacgaauguauggagucuguccgcaaugggacauacgauuauccccaguacagcgaagaggcccggcuuaaaagagaggaaauuuccggagugaagcuggagagcaucggcaccuaucagauucucucuaucuacuccacagucgccagcucucuggcucuggcgauuaugguggccgggcucuuucuguggaugugcuccaacggcagccuucagugccgcaucuguaucuga

SEQ ID NO: 196845 - RNA, 1701 nt, Artificial Sequence; identical to SEQ ID NO: 194983
  derived and/or modified CDS sequence (opt5) from hemagglutinin__InfluenzaA__ADG21912

SEQ ID NO: 196846 - RNA, 1701 nt, Artificial Sequence; identical to SEQ ID NO: 194741
  derived and/or modified CDS sequence (opt5) from hemagglutinin__InfluenzaA__ADG21913

SEQ ID NO: 196847 - RNA, 1701 nt, Artificial Sequence
  derived and/or modified CDS sequence (opt5) from hemagglutinin__InfluenzaA__ADG21914
augaaggccaucauugugguccugcucuacaccuucgcuacagccaacgcggacacgcugugcaucggcuaucacgcuaauaacagcaccgauacaguugacaccgugcuugagaaaaaugugacagucacccauuccgugaaccugcucgaagauaagcacaaugggaaacuguguaaacuuagaggaguugcuccccugcaucucggcaagugcaacauugccggguggauccugggaaauccugagugugaaucucugagcacagccuccucuuggagcuacauuguggagaccuccucuagcgacaacggcacgugcuauccgggggauuuuaucgacuacgaagaacuccgggagcagcuguccagcgucucuuccuucgaacgcuuugagaucuuccccaagaccagcucuuggccuaaucacgauuccaacaagggagugacagccgcuuguccccaugccggcgcgaaaucuuuuuauaagaaucuuauuuggcugguuaaaaagggcaacagcuacccuaaacucuccaagagcuauaucaaugacaaggggaaagaagugcugguccuuuggggcauucaccaccccuccaccucugccgaucaacagagccuguaccagaacgcugacgccuacguguucgugggaacauccagauauagcaagaaauuuaagccugagaucgcuauucggccgaaaguccgcgaucaggaggggagaaugaauuacuauuggacccucguugaacccggagacaagaucacguucgaggccacaggcaaccugguggugccucgguacgcguuugccauggaacgcaacgcugggucuggaauuaucaucuccgauacccccguccaugacugcaauacaaccugucaaaccccuaaaggcgccauuaacacaagccugcccuuccagaauauccacccgauuacgaucggcaagugcccuaaguaugugaaaucuaccaagcucagacuggcuacagggcuucggaacguucccagcauucagucccgcggacuguuuggcgccaucgccggguucaucgagggaggcuggaccgggaugguggacggaugguacggcuaucaucaccagaaugaacaaggcucuggguacgcugcggaucucaaaagcacacagaacgccauugacgagaucaccaauaaggucaacuccgugauugagaaaaugaauacgcaguuuacagcuguuggaaaggaguucaaccaccuggagaagagaaucgaaaaucuuaacaaaaagguggaugacggcuuccuggauauuuggaccuacaaugccgagcuccugguccugcucgaaaacgagcggacccuggacuaucaugauagcaaugugaaaaaccuuuacgagaagguccgcucucagcugaaaaacaaugccaaggaaaucgggaacggauguuuugaguucuaucacaagugcgacaauacauguauggaauccgugaaaaacggcaccuacgauuauccuaaguacagcgaggaagcuaaacucaauagagaggagaucgacgggguuaagcuggaaucuacacggauuuaucaaauccuugccauuuacuccacgguggcgagcucccugguccucgugguuucucugggcgcuaucagcuuuuggaugugcuccaacggaucucugcagugccgcauuuguaucuga

SEQ ID NO: 196848 - RNA, 1701 nt, Artificial Sequence
  derived and/or modified CDS sequence (opt5) from hemagglutinin__InfluenzaA__ADG21915
auggaggccauccuggugguccuccuguacaccuucgcuacagccaacgcggacacgcuuugcauuggcuaucacgcuaauaacagcaccgauacaguugacaccgugcuggaaaagaaugugacagucacccauuccgugaacauccucgaggauaaacacaaugggaagcuguguaaacuuagaggaguugcgccccugcaucucggcaagugcaacauugccggguggauccugggaaauccugaaugugagucucugagcacagcuuccucuuggagcuacauuguggaaaccuccucuagcgacaacggcacgugcuauccgggggauuuuaucgacuacgaggagcuccgggaacagcuguccagcgucucuuccuucgagcgcuuugaaaucuuccccaaaaccagcucuuggccuaaucacgauuccaacaagggagugacagccgcuuguccccaugccggcgccaagagcuuuuauaaaaaucuuauuuggcugguuaagaaaggcaacucuuacccuaagcucuccaaaagcuauaucaaugacaaggggaaggaggugcugguccuuuggggcauucaccaccccuccaccucugccgaucaacagagccuguaccagaacgcugacgccuacguguucgugggauccagcagauauucuaaaaaguuuaaaccugagaucgcuauucggccgaagguccgcgaucaggaagggagaaugaauuacuauuggacacucguugagcccggagacaaaaucaccuucgaagccacgggcaaccugguggugccucgguacgcguuugccauugagcgcaacgcuggguccggaaucaucauuagcgauacacccguccaugacugcaauaccacaugucaaaccccuaagggcgccaucaacaccucucugcccuuccacaauauucauccgaucacaauuggcaaaugcccuaaguauguuaagagcacgaaacucagacuggcuaccgggcuucggaacgugcccuccauccagucucgcggacuguuuggcgccaucgccggguucauugaaggaggcuggacagggaugguggacggaugguacggcuaucaccaccagaaugagcagggcagcggguacgcugcggaucucaaguccacccaaaacgccaucgacgagauuacaaauaaagucaacagcgugaucgaaaagaugaauacccaguuuacggcuguuggaaaagaguucaaccaucuggaaaagagaauugagaaucuuaacaagaaaguggaugacggcuuccuggauaucuggacauacaaugccgaacuccugguccugcucgagaacgagcggacccuggacuaucacgauucuaaugugaagaaccuuuacgaaaaaguccgcucccagcugaagaacaaugccaaagagaucgggaacggauguuuugaguucuaucauaagugcgacaauaccuguauggaaagcgugaagaacggcacauacgauuauccuaaauacucugaagaggcuaagcucaauagagaggaaauugacgggguuaaacuggaguccacccggaucuaucagauucuugccaucuacagcacaguggcguccucucugguccucgugguuagccugggcgcuauuuccuuuuggaugugcucuaacggaagccugcaaugccgcaucuguauuuga

SEQ ID NO: 196849 - RNA, 1701 nt, Artificial Sequence; identical to SEQ ID NO: 194983
  derived and/or modified CDS sequence (opt5) from hemagglutinin__InfluenzaA__ADG21916

SEQ ID NO: 196850 - RNA, 1701 nt, Artificial Sequence; identical to SEQ ID NO: 194741
  derived and/or modified CDS sequence (opt5) from hemagglutinin__InfluenzaA__ADG21917

SEQ ID NO: 196851 - RNA, 1701 nt, Artificial Sequence; identical to SEQ ID NO: 196241
  derived and/or modified CDS sequence (opt5) from hemagglutinin__InfluenzaA__ADG21918

SEQ ID NO: 196852 - RNA, 1701 nt, Artificial Sequence
  derived and/or modified CDS sequence (opt5) from hemagglutinin__InfluenzaA__ADG21919
augaaggccauccuggugguccuccuguacaccuucgcuacagccaacgcggacacgcuuugcauuggcuaucacgcuaauaacagcaccgauacaguugacaccgugcuggagaaaaaugugacagucacccauuccgugaaccuccuggaagauaagcacaaugggaaacuuuguaagcugagaggaguuacaccccuccaucugggcaaaugcaacaucgccggguggauucugggaaauccugagugugaaucucucagcaccgccuccucuuggagcuacaucguggagacguccucuagcgacaacgggaccugcuauccgggcgauuuuauugacuacgaagaacugcgggagcagcuuuccagcgucucuuccuucgaacgcuuugagaucuuccccaagacaagcucuuggccuaaucacgauuccaacaagggagugaccgcugccuguccccaugcuggcgccaagagcuuuuauaagaaucugaucuggcucguuaaaaagggcaacucuuacccuaaacuguccaagagcuauauuaaugacaaggggaaagaagugcuuguccuguggggaauccaccaccccuccacaucugcggaucaacagagccucuaccagaacgccgacgcuuacguguucgugggcaccuccagauauagcaagaaauuuaagccugagauugccauccggccgaaaguccgcgaucaggaggggagaaugaauuacuauuggacgcugguugaacccggagacaagauuacauucgaggcuaccggcaaccugguggugccucgguacgccuuugcgauggaacgcaacgccgggucuggaaucauuaucuccgauacacccguccaugacugcaauaccaccugucaaacaccuaaaggcgcuaucaacacgagccuccccuuccagaauauucacccgaucaccauuggcaagugcccuaaguaugugaaaucuacaaagcugagacuugccaccgggcugcggaacguucccagcauccagucccgcggacucuuuggcgcuauugccggguucaucgagggaggcuggacagggaugguggacggaugguacggcuaucaucaccagaaugaacaaggcucuggguacgccgcugaucugaaaagcacccagaacgcgaucgacgagauuacgaauaaggucaacuccgugaucgagaaaaugaauacacaguuuaccgccguuggaaaggaguucaaccaccuugagaagagaauugaaaaucugaacaaaaagaucgaugacggcuuccucgauauuuggaccuacaaugcugagcugcuggugcuccuggaaaacgagcggacacuugacuaucaugauagcaaugucaaaaaccuguacgagaaggugcgcucucagcucaaaaacaaugccaaggaaaucgggaacggauguuuugaguucuaucacaagugcgacaauaccuguauggaauccgucaaaaacggcacauacgauuauccuaaguacagcgaggaagccaaacugaauagagaggagaucgacggggugaaacuugaaucuacgcggauuuaucaaauccuggcuauuuacuccaccguugccagcucccucgugcuggucgugucucugggcgcgaucagcuuuuggaugugcuccaacggaucucuccagugccgcauuuguaucuga

SEQ ID NO: 196853 - RNA, 1701 nt, Artificial Sequence; identical to SEQ ID NO: 194983
  derived and/or modified CDS sequence (opt5) from hemagglutinin__InfluenzaA__ADG21921

SEQ ID NO: 196854 - RNA, 1701 nt, Artificial Sequence; identical to SEQ ID NO: 194741
  derived and/or modified CDS sequence (opt5) from hemagglutinin__InfluenzaA__ADG21922

SEQ ID NO: 196855 - RNA, 1701 nt, Artificial Sequence
  derived and/or modified CDS sequence (opt5) from hemagglutinin__InfluenzaA__ADG21923
augaaggccauccuggugguccuccuguacaccuucgcuacagccaacgcggacacgcuuugcauuggcuaucacgcuaauaacagcaccgauacaguugacaccgugcuggagaaaaaugugacagucacccauuccgccaaccuccuggaagauaagcacaaugggaaacuuuguaagcugagaggaguggcuccccuccaucugggcaaaugcaacaucgccggguggauucugggaaauccugagugugaaucucucagcacagccuccucuuggagcuacaucguugagaccuccucuagcgacaacggcacgugcuauccgggggauuuuauugacuacgaagaacugcgggagcagcuuuccagcgugucuuccuucgaacgcuuugagaucuuccccaagaccagcucuuggccuaaucacgauuccaacaagggagucacagcugccuguccccaugcgggcgccaagagcuuuuauaaaaaucugaucuggcucgugaaaaagggcaacucuuacccuaaacuguccaagagcuauauuaaugacaaggggaaagaaguucuugugcuguggggaauccaccaccccuccaccucugcugaucaacagagccucuaccagaacgccgacgcuuacgucuucgugggcuccagcaaguauucuaaaaaguuuaaaccugagauugccaucagaccgaaggugcgggaucaggaggggcgcaugaauuacuauuggacacuggucgaacccggagacaaaauuaccuucgaggcgacgggcaaccugguugugccuagauacgccuuugcuauggaacggaacgccggguccggaaucauuaucagcgauacacccgugcaugacugcaauaccacaugucaaaccccuaagggcgcuaucaacaccucucuccccuuccacaauauucauccgaucacaauuggcaagugcccuaaauaugucaagagcacgaaacugcgccuugccaccgggcugagaaacgugcccuccauccagucucggggacucuuuggcgccauugcuggguucaucgagggaggcuggacagggaugguugacggaugguacggcuaucaccaccagaaugaacagggcagcggguacgcggccgaucugaaguccacccaaaacgcuaucgacgagauuacaaauaaagugaacagcgucaucgagaagaugaauacccaguuuacggccgugggaaaggaguucaaccaucuugagaaacgcauugaaaaucugaacaagaaaguugaugacggcuuccucgauaucuggacauacaaugccgagcugcuggugcuccuggaaaacgagagaacccuugacuaucacgauucuaaugucaagaaccuguacgagaaagugcggucccagcucaagaacaaugcuaaggaaauugggaacggauguuuugaguucuaucauaaaugcgacaauaccuguauggaaagcgucaagaacggcacauacgauuauccuaaauacucugaggaagccaagcugaaucgcgaggagaucgacggggugaaacuugaauccaccagaaucuaucagauucuggcgaucuacagcacaguugcuuccucucucgugcuggucgugagccugggcgccauuuccuuuuggaugugcucuaacggaagccuccaaugccggaucuguauuuga

SEQ ID NO: 196856 - RNA, 1701 nt, Artificial Sequence
  derived and/or modified CDS sequence (opt5) from hemagglutinin__InfluenzaA__ADG21924
auggaggccauccuggugguccuccuguacaccuucgcuacagccaacgcggacacgcuuugcauuggcuaucacgcuaauaacagcaccgauacaguugacaccgugcuggaaaagaaugugacagucacccauuccgugaaccuccuggagaauaaacacaacgggaaacuuuguaagcugagaggaguugcgccccuccaucugggcaagugcaauaucgccggguggauucugggaaacccugaaugugagucucucagcacagcuuccucuuggagcuacaucguggaaaccuccucuagcgauaauggcacgugcuauccgggggacuuuauugauuacgaggagcugcgggaacagcuuuccagcgucucuuccuucgagcgcuuugaaaucuuccccaaaaccagcucuuggccuaaccacgacuccaauaagggagugacagccgcuuguccccaugccggcgccaagagcuuuuauaaaaaccugaucuggcucguuaagaaaggcaauucuuacccuaagcuguccaaaagcuauauuaacgauaaggggaaggaggugcuuguccuguggggaauccaccaccccuccaccucugccgaccaacagagccucuaccagaaugcugaugccuacguguucgugggcuccagcagauauucuaaaaaguuuaaaccugagauugcuauccggccgaagguccgcgaccaggaagggagaaugaacuacuauuggacacugguugagcccggagauaaaauuaccuucgaagccacgggcaaccugguggugccucgguacgcguuugccauggagcgcaaugcuggguccggaaucauuaucagcgacacacccguccaugauugcaacaccacaugucaaaccccuaagggcgccaucaauaccucucuccccuuccacaacauucauccgaucacaauuggcaaaugcccuaaguauguuaagagcacgaaacugagacuugcuaccgggcugcggaaugugcccuccauccagucucgcggacucuuuggcgccauugccggguucaucgaaggaggcuggacagggaugguggacggaugguacggcuaucaccaccagaacgagcagggcagcggguacgcugcggaccugaaguccacccaaaaugccaucgaugagauuacaaacaaagucaauagcgugaucgaaaagaugaacacccaguuuacggcuguuggaaaagaguucaaucaucuugaaaagagaauugagaaccugaauaagaaaguggacgauggcuuccucgacaucuggacauacaacgccgaacugcugguccuccuggagaaugagcggacccuugauuaucacgacucuaacgugaagaaccuguacgaaaaaguccgcucccagcucaagaauaacgccaaagagauugggaauggauguuuugaguucuaucauaagugcgauaacaccuguauggaaagcgugaagaauggcacauacgacuauccuaaauacucugaagaggcuaagcugaacagagaggaaaucgaugggguuaaacuugaguccacccggaucuaucagauucuggccaucuacagcacaguggcguccucucucguccuggugguuagccugggcgcuauuuccuuuuggaugugcucuaauggaagccuccaaugccgcaucuguauuuga

SEQ ID NO: 196857 - RNA, 1701 nt, Artificial Sequence
  derived and/or modified CDS sequence (opt5) from hemagglutinin__InfluenzaA__ADG21925
augaaggccauccuggugguccuccuguacaccuucgcuacagccaacgcggacacgcuuugcauuggcuaucacgcuaauaacagcaccgauacaguugacaccgugcuggagaagaaugugacagucacccauuccgugaaccuccuggaagauaagcacaaugggaaacuuuguaagcugagaggaguugcuccccuccaucugggcaaaugcaacaucgccggguggauucugggaaauccugagugugaaucucucagcacagccuccucuuggagcuacaucguggagaccuccucuagcgacaacggcacgugcuauccgggggauuuuauugacuacgaagaacugcgggagcagcuuuccagcgucucuuccuucgaacgcuuugagaucuuccccaagaccagcucuuggccuaaucacgauuccaacaagggagugacagccgcuuguccccaugccggcgcgaaaucuuuuuauaagaaucugaucuggcucguuaaaaagggcaacagcuacccuaaacuguccaagagcuauauuaaugacaaggggaaagaagugcuuguccuguggggaauccaccaccccuccaccucugccgaucaacagagccucuaccagaacgcugacgccuacguguucgugggcacauccagauauagcaagaaauuuaagccugagauugcuauccggccgaaaguccgcgaucaggaggggagaaugaauuacuauuggacccugguugaacccggagacaagauuacguucgaggccacaggcaaccugguggugccucgguacgcguuugccauggaacgcgaugcugggucuggaaucauuaucuccgacacccccguccaugacugcaacacaaccugucaaaccccuaaaggcgccaucaauacaagccuccccuuccagaacauucacccgaucacgauuggcaagugcccuaaguaugugaaaucuaccaagcugagacuugcuacagggcugcggaauguucccagcauccagucccgcggacucuuuggcgccauugccggguucaucgagggaggcuggaccgggaugguggauggaugguacggcuaucaucaccagaacgaacaaggcucuggguacgcugcggaccugaaaagcacacagaaugccaucgaugagauuaccaacaaggucaauuccgugaucgagaaaaugaacacgcaguuuacagcuguuggaaaggaguucaaucaccuugagaagagaauugaaaaccugaauaaaaagaucgacgauggcuuccucgacauuuggaccuacaacgccgagcugcuggugcuccuggaaaaugagcggacccuugauuaucaugacagcaacgucaaaaaucuguacgagaaggugcgcucucagcucaaaaacaacgccaaggaaaucgggaauggauguuuugaguucuaucacaagugcgauaacacauguauggaauccgucaaaaauggcaccuacgacuauccuaaguacagcgaggaagcuaaacugaacagagaggagaucgauggggugaaacuugaaucuacacggauuuaucaaauccuggccauuuacuccacgguugcgagcucccucgugcuggucgugucucugggcgcuaucagcuuuuggaugugcuccaauggaucucuccagugccgcauuuguaucuga

SEQ ID NO: 196858 - RNA, 1701 nt, Artificial Sequence
  derived and/or modified CDS sequence (opt5) from hemagglutinin__InfluenzaA__ADG21926
augaaggccauccuggugguccuccuguacaccuucgcuacagccaacgcggacacgcuuugcauuggcuaucacgcuaauaacagcaccgauacaguugacaccauccuggagaagaaugugacagugacccauuccgucaaccuccuggaagauaagcacaaugggaaacuuuguaagcugagaggaguggcuccccuccaucugggcaaaugcaacauugccggguggauccugggaaauccugagugugaaucucucagcacagccuccucuuggagcuacauuguugagaccuccucuagcgacaacggcacgugcuauccgggggauuuuaucgacuacgaagaacugcgggagcagcuuuccagcgugucuuccuucgaacgcuuugagaucuuccccaagaccagcucuuggccuaaucacgauuccaacaagggagucacagccgcuuguccccaugccggcgcgaaaucuuuuuauaagaaucugauuuggcucgugaaaaagggcaacagcuacccuaaacuguccaagagcuauaucaaugacaaggggaaagaaguucuugugcuguggggcauucaccaccccuccaccucugccgaucaacagagccucuaccagaacgcugacgccuacgucuucgugggaacauccagauauagcaagaaauuuaagccugagaucgcuauucggccgaaagugcgcgaucaggaggggagaaugaauuacuauuggacccuggucgaacccggagacaagaucacguucgaggccacaggcaaccugguugugccucgguacgcguuugccauggaacgcaacgcugggucuggaauuaucaucuccgauacccccgugcaugacugcaauacaaccugucaaaccccuaaaggcgccauuaacacaagccuccccuuccagaauauccacccgauuacgaucggcaagugcccuaaguaugucaaaucuaccaagcugagacuugcuacagggcugcggaacgugcccagcauucagucccgcggacucuuuggcgccaucgccggguucaucgagggaggcuggaccgggaugguugacggaugguacggcuaucaucaccagaaugaacaaggcucuggguacgcugcggaucugaaaagcacacagaacgccauugacgagaucaccaauaaggugaacuccgucauugagaaaaugaauacgcaguuuacagcugugggaaaggaguucaaccaccuugagaagagaaucgaaaaucugaacaaaaagguugaugacggcuuccucgauauuuggaccuacaaugccgagcugcuggugcuccuggaaaacgagcggaaucuugacuaucaugauagcaacgucaaaaaccuguacgagaaggugcgcucucagcucaaaaauaacgccaaggaaaucgggaauggauguuuugaguucuaucacaagugcgacaacaccuguauggaauccgucaaaaauggcacauacgauuauccuaaguacagcgaggaagcuaaacugaacagagaggagaucgacggggugaaacuugaaucuacccggauuuaucaaauccuggccauuuacuccacaguugcgagcucccucgugcuggucgugucucugggcgcuaucagcuuuuggaugugcuccaauggaucucuccagugccgcauuuguaucuga

SEQ ID NO: 196859 - RNA, 1701 nt, Artificial Sequence; identical to SEQ ID NO: 194983
  derived and/or modified CDS sequence (opt5) from hemagglutinin__InfluenzaA__ADG21927

SEQ ID NO: 196860 - RNA, 1701 nt, Artificial Sequence
  derived and/or modified CDS sequence (opt5) from hemagglutinin__InfluenzaA__ADG21928
augaaggccacccuggugguccuccuguacacauucgcuacggccaacgcggacacccuuugcaucggcuaucacgcuaauaacagcacagauaccguugacacagugcuggagaaaaaugugaccgucacacauuccgugaaccuccuggaagauaagcacaaugggaaacuuuguaagcugagaggaguugcuccccuccaucugggcaaaugcaacauugccggguggauccugggaaauccugagugugaaucucucagcaccgccuccucuuggagcuacauuguggagacguccucuagcgacaacggaaccugcuauccgggggauuuuaucgacuacgaagaacugcgggagcagcuuuccagcgucucuuccuucgaacgcuuugagauuuuccccaagacaagcucuuggccuaaucacgauuccaacaagggagugaccgccgcuuguccccaugccggcgcgaaaucuuuuuauaagaaucugaucuggcucguuaaaaagggcaacagcuacccuaaacuguccaagagcuauaucaaugacaaggggaaagaagugcuuguccuguggggcauucaccaccccuccacaucugccgaucaacagagccucuaccagaacgcugacgccuacguguucgugggcaccuccagauauagcaagaaauuuaagccugagaucgcuauucggccgcgcgucagagaucaggaggggcggaugaauuacuauuggacgcugguugaacccggagacaaaaucacauucgaggccaccggcaaccugguggugccucgcuacgcguuugccauggaaagagaugcugggucuggaauuaucauuuccgacacacccguccaugacugcaacaccaccugucaaacaccuaagggcgccaucaauacgagccuccccuuccagaacauccacccgauuaccaucggcaaaugcccuaaguaugugaagucuacaaaacugcggcuugcuaccgggcugcgcaauguucccagcauucaguccagaggacucuuuggcgccaucgccggguucauugagggaggcuggacagggaugguggauggaugguacggcuaucaucaccagaacgaacaaggcucuggguacgcugcggaccuuaagagcacccagaaugccaucgaugagaucacgaacaaagucaauuccgugauugagaagaugaacacacaguuuaccgcuguuggaaaagaguucaaucaccuggagaagcggaucgaaaaccugaauaagaaaauugacgauggcuuccucgacaucuggaccuacaacgccgagcugcuggugcuccuggaaaaugagcgcacacuugauuaucaugacagcaacgucaagaaucuguacgagaaagugagaucucagcucaagaacaacgccaaagaaauugggaauggauguuuugaguucuaucacaagugcgauaacaccuguauggaauccgucaagaauggcacauacgacuauccuaaauacagcgaggaagcuaagcugaaccgggaggagaucgauggggugaaacuugaaucuacgcgcaucuaucaaauucuggccaucuacuccaccguugcgagcucccucgugcuggucgugucucugggcgcuauuagcuuuuggaugugcuccaauggaucucuccagugcagaaucuguauuuga

SEQ ID NO: 196861 - RNA, 1701 nt, Artificial Sequence; identical to SEQ ID NO: 196857
  derived and/or modified CDS sequence (opt5) from hemagglutinin__InfluenzaA__ADG21930

SEQ ID NO: 196862 - RNA, 1701 nt, Artificial Sequence; identical to SEQ ID NO: 194983
  derived and/or modified CDS sequence (opt5) from hemagglutinin__InfluenzaA__ADG21931

SEQ ID NO: 196863 - RNA, 1701 nt, Artificial Sequence; identical to SEQ ID NO: 194983
  derived and/or modified CDS sequence (opt5) from hemagglutinin__InfluenzaA__ADG21932

SEQ ID NO: 196864 - RNA, 1701 nt, Artificial Sequence; identical to SEQ ID NO: 194983
  derived and/or modified CDS sequence (opt5) from hemagglutinin__InfluenzaA__ADG21933

SEQ ID NO: 196865 - RNA, 1701 nt, Artificial Sequence; identical to SEQ ID NO: 196857
  derived and/or modified CDS sequence (opt5) from hemagglutinin__InfluenzaA__ADG21934

SEQ ID NO: 196866 - RNA, 1701 nt, Artificial Sequence
  derived and/or modified CDS sequence (opt5) from hemagglutinin__InfluenzaA__ADG21935
auggaggccauccuggugguccuccuguacaccuucgcuacagccaacgcggacacgcuuugcauuggcuaucacgcuaauaacagcaccgauacaguugacaccgugcuggaaaagaaugugacagucacccauuccgugaaccuccuggaggauaaacacaaugggaaacuuuguaaacugagaggaguugcgccccuccaucugggcaagugcaacaucgccggguggauucugggaaauccugaaugugagucucucagcacagcuuccucuuggagcuacaucguggaaaccuccucuagcgacaacggcacgugcuauccgggggauuuuauugacuacgaggagcugcgggaacagcuuuccagcgucucuuccuucgagcgcuuugaaaucuuccccaaaaccagcucuuggccuaaucacgauuccaacaagggagugacagccgcuuguccccaugccggcgccaagagcuuuuauaaaaaucugaucuggcucguuaagaaaggcaacucuuacccuaagcuguccaaaagcuauauuaaugacaaggggaaggaggugcuuguccuguggggaauccaccaccccuccaccucugccgaucaacagagccucuaccagaacgcugacgccuacguguucgugggcuccagcagauauucuaaaaaguuuaaaccugagauugcuauccggccgaagguccgcgaucaggaagggagaaugaauuacuauuggacacugguugagcccggagacaaaauuaccuucgaagccacgggcaaccugguggugccucgguacgcguuugccauggagcgcaacgcuggguccggaaucauuaucagcgauacacccguccaugacugcaauaccaacugucaaacaccuaauggcgccaucaacaccucucuccccuuccacaauauucauccgaucaccauuggcaagugcccuaaauauguuaagagcacaaagcugagacuugcuacggggcugcggaacgugcccuccauccagucucgcggacucuuuggcgccauugccggguucaucgaaggaggcuggaccgggaugguggacggaugguacggcuaucaccaccagaaugagcagggcagcggguacgcugcggaucugaaauccacacaaaacgccaucgacgagauuaccaauaaggucaacagcgugaucgaaaagaugaauacacaguuuaccgcuguuggaaaggaguucaaccaucuugaaaagagaauugagaaucugaacaagaagguggaugacggcuuccucgauaucuggacguacaaugccgaacugcugguccuccuggagaacgagcggacacuugacuaucacgauucuaacgugaaaaaucuguacgaaaagguccgcucccagcucaaaaacaaugccaaggagauugggaacggauguuuugaguucuaucauaaaugcgacaauaccuguauggaaagcgugaagaacggcaccuacgauuauccuaaguacucugaagaggcuaaacugaauagagaggaaaucgacgggguuaaacuugaguccacacggaucuaucagauucuggccaucuacagcaccguggcguccucucucguccuggugguuagccugggcgcuauuuccuuuuggaugugcucuaacggaagccuccaaugccgcaucuguauuuga

SEQ ID NO: 196867 - RNA, 1701 nt, Artificial Sequence; identical to SEQ ID NO: 194983
  derived and/or modified CDS sequence (opt5) from hemagglutinin__InfluenzaA__ADG21936

SEQ ID NO: 196868 - RNA, 1701 nt, Artificial Sequence; identical to SEQ ID NO: 194983
  derived and/or modified CDS sequence (opt5) from hemagglutinin__InfluenzaA__ADG21937

SEQ ID NO: 196869 - RNA, 1701 nt, Artificial Sequence
  derived and/or modified CDS sequence (opt5) from hemagglutinin__InfluenzaA__ADG21938
auggaggccauccuggugguccuccuguacaccuucgcuacagccaacgcggacacgcuuugcauuggcuaucacgcuaauaacagcaccgauacaguugacaccgugcuggaaaagaaugugacagucacccauuccgugaaccuccuggaggauaaacacaaugggaaacuuuguaagcugagaggaguugcgccccuccaucugggcaagugcaacaucgccggguggauucugggaaauccugaaugugagucucucagcacagcuuccucuuggagcuacaucguggaaaccuccucuagcgacaacggcacgugcuauccgggggauuuuauugacuacgaggagcugcgggaacagcuuuccagcgucucuuccuucgagcgcuuugaaaucuuccccaaaaccagcucuuggccuaaucacgauuccaacaagggagugacagccgcuuguccccaugccggcgccaagagcuuuuauaaaaaucugaucuggcucguuaagaaaggcaacucuuacccuaagcuguccaaaagcuauauuaaugacaaggggaaggaggugcuuguccuguggggaauccaccaccccuccaccucugccgaucaacagagccucuaccagaacgcugacgccuacguguucgugggcuccagcagauauucuaaaaaguuuaaaccugagauugcuauccggccgaagguccgcgaucaggaagggagaaugaauuacuauuggacacugguugagcccggagacaaaauuaccuucgaagccacgggcaaccugguggugccucgguacgcguuugccauggagcgcaacgcuggguccggaaucauuaucagcgauacacccguccaugacugcaauaccacaugucaaaccccuaagggcgccaucaacaccucucuccccuuccacaauauucauccgaucacaauuggcaaaugcccuaaguauguuaagagcacgaaacugagacuugcuaccgggcugcggaacgugcccuccauccagucucgcggacucuuuggcgccauugccggguucaucgaaggaggcuggacagggaugguggacggaugguacggcuaucaccaccagaaugagcagggcagcggguacgcugcggaucugaaguccacccaaaacgccaucgacgagauuacaaauaaagucaacagcgugaucgaaaagaugaauacccaguuuacggcuguuggaaaagaguucaaccaucuugaaaagagaauugagaaucugaacaagaaaguggaugacggcuuccucgauaucuggacauacaaugccgaacugcugguccuccuggagaacgagcggaaucuugacuaucacgauucuaacgugaagaaccuguacgaaaaaguccgcucccagcucaagaauaacgccaaagagauugggaauggauguuuugaguucuaucauaagugcgacaacaccuguauggaaagcgugaagaauggcaccuacgauuauccuaaauacucugaagaggcuaagcugaacagagaggaaaucgacgggguuaaacuugaguccacacggaucuaucagauucuggccaucuacagcaccguggcguccucucucguccuggugguuagccugggcgcuauuuccuuuuggaugugcucuaauggaagccuccaaugccgcaucuguauuuga

SEQ ID NO: 196870 - RNA, 1701 nt, Artificial Sequence; identical to SEQ ID NO: 194983
  derived and/or modified CDS sequence (opt5) from hemagglutinin__InfluenzaA__ADG21939

SEQ ID NO: 196871 - RNA, 1701 nt, Artificial Sequence; identical to SEQ ID NO: 194983
  derived and/or modified CDS sequence (opt5) from hemagglutinin__InfluenzaA__ADG21940

SEQ ID NO: 196872 - RNA, 1701 nt, Artificial Sequence
  derived and/or modified CDS sequence (opt5) from hemagglutinin__InfluenzaA__ADG21941
auggaggccauccuggugguccuccuguacaccuucgcuacagccaacgcggacacgcuuugcauuggcuaucacgcuaauaacagcaccgauacaguugacaccgugcuggaaaagaaugugacagucacccauuccgugaaccuccuggaggauaaacacaaugggaaacuuuguaagcugagaggaguugcgccccuccaucugggcaagugcaacaucgccggguggauucugggaaauccugaaugugagucucucagcacagcuuccucuuggagcuacaucguggaaaccuccucuagcgacaacggcacgugcuauccgggggauuuuauugacuacgaggagcugcgggaacagcuuuccagcgucucuuccuucgagcgcuuugaaaucuuccccaaaaccagcucuuggccuaaucacgauuccaacaagggagugacagccgcuuguccccaugccggcgccaagagcuuuuauaaaaaucugaucuggcucguuaagaaaggcaacucuuacccuaagcuguccaaaagcuauauuaaugacaaggggaaggaggugcuuguccuguggggaauccaccaccccuccaccucugccgaucaacagagccucuaccagaacgcugacgccuacguguucgugggcuccagcagauauucuaaaaaguuuaaaccugagauugcuauccggccgaagguccgcgaucaggaagggagaaugaauuacuauuggacacugguugagcccggagacaaaauuaccuucgaagccacgggcaaccugguggugccucgguacgcguuugccauggagcgcaacgcuggguccggaaucauuaucagcgauacacccguccaugacugcaauaccacaugucaaaccccuaagggcgccaucaacaccucucuccccuuccacaauauucauccgaucacaauuggcaaaugcccuaaguauguuaagagcacgaaacugagacuugcuaccgggcugcggaacgugcccuccauccagucucgcggacucuuuggcgccauugccggguucaucgaaggaggcuggacagggaugguggacggaugguacggcuaucaccaccagaaugagcagggcagcggguacgcugcggaucugaaguccacccaaaacgccaucgacgagauuacaaauaaagucaacagcgugaucgaaaagaugaauacccaguuuacggcuguuggaaaagaguucaaccaucuugaaaagagaauugagaaucugaacaagaaaaucgaugacggcuuccucgauauuuggacauacaaugccgaacugcuggugcuccuggagaacgagcggacccuugacuaucacgauucuaaugucaagaaccuguacgaaaaagugcgcucccagcucaagaacaaugccaaagagaucgggaacggauguuuugaguucuaucauaagugcgacaauaccuguauggaaagcgucaagaacggcacauacgauuauccuaaauacucugaagaggcuaagcugaauagagaggaaaucgacggggugaaacuugaguccacccggauuuaucagauccuggccauuuacagcacaguugcguccucucucgugcuggucgugagccugggcgcuaucuccuuuuggaugugcucuaacggaagccuccaaugccgcauuuguaucuga

SEQ ID NO: 196873 - RNA, 1701 nt, Artificial Sequence
  derived and/or modified CDS sequence (opt5) from hemagglutinin__InfluenzaA__ADG21943
augaaggccauccuggugguccuccuguacaccuucgcuacagccaacgcggacacgcuuugcauuggcuaucacgcuaauaacagcaccgauacaguugacaccgugcuggagaagaaugugacagucacccauuccgugaaccuccuggaagauaagcacaaugggaaacuuuguaagcugagaggaguugcuccccuccaucugggcaaaugcaacaucgccggguggauucugggaaauccugagugugaaucucucagcacagccaacuccuggucuuacaucguggagaccagcuccucugacaauggcacgugcuauccgggggauuuuauugacuacgaagaacugcgggagcagcuuagcuccgucagcucuuucgaacgcuuugagaucuuccccaagaccuccagcuggccuaaccacgauucuaauaagggagugacagccgcuuguccccaugccggcgcgaaauccuuuuauaagaaccugaucuggcucguuaaaaagggcaauagcuacccuaaacugucuaaguccuauauuaacgacaaggggaaagaagugcuuguccuguggggaauccaccaccccagcaccuccgccgaucaacagucucucuaccagaaugcugacgccuacguguucgugggcacaagcagauauuccaagaaauuuaagccugagauugcuauccggccgaaaguccgcgaucaggaggggagaaugaacuacuauuggacccugguugaacccggagacaagauuacguucgaggccacaggcaaccugguggugccucgguacgcguuugccauggaacgcgaugcugggagcggaaucauuaucucugacacccccguccaugacugcaauacaaccugucaaaccccuaaaggcgccaucaacacaucccuccccuuccagaauauucacccgaucacgauuggcaagugcccuaaguaugugaaaagcaccaagcugagacuugcuacagggcugcggaacguucccucuauccagagccgcggacucuuuggcgccauugccggguucaucgagggaggcuggaccgggaugguggauggaugguacggcuaucaucaccagaaugaacaaggcuccggguacgcugcggaccugaaaucuacacagaacgccaucgaugagauuaccaauaaggucaacagcgugaucgagaaaaugaauacgcaguuuacagcuguuggaaaggaguucaaccaccuugagaagagaauugaaaaucugaacaaaaagaucgacgauggcuuccucgacauuuggaccuacaaugccgagcugcuggugcuccuggaaaacgagcggacccuugauuaucaugacuccaaugucaaaaaccuguacgagaaggugcgcagccagcucaaaaacaaugccaaggaaaucgggaacggauguuuugaguucuaucacaagugcgauaauacauguauggaaucugucaaaaacggcaccuacgacuauccuaaguacuccgaggaagcuaaacugaauagagaggagaucgauggggugaaacuugaaagcacacggauuuaucaaauccuggccauuuacucuacgguugcguccagccucgugcuggucgugucccugggcgcuaucucuuuuuggaugugcagcaacggaucccuccagugccgcauuuguaucuga

SEQ ID NO: 196874 - RNA, 1701 nt, Artificial Sequence
  derived and/or modified CDS sequence (opt5) from hemagglutinin__InfluenzaA__ADG21944
auggaggccauccugauugugcuccuguacaccuucgcuacagccaacgcggacacgcuuugcaucggcuaucacgcuaauaacagcaccgauacagucgacaccguucuggaaaagaaugugacagugacccauuccgucaaccuccuggaggauaaacacaaugggaaacuuuguaagcugagaggaguggcgccccuccaucugggcaagugcaacauugccggguggauccugggaaauccugaaugugagucucucagcacagcuuccucuuggagcuacauuguugaaaccuccucuagcgacaacggcacgugcuauccgggggauuuuaucgacuacgaggagcugcgggaacagcuuuccagcgugucuuccuucgagcgcuuugaaaucuuccccaaaaccagcucuuggccuaaucacgauuccaacaagggagucacagccgcuuguccccaugccggcgccaagagcuuuuauaaaaaucugauuuggcucgugaagaaaggcaacucuuacccuaagcuguccaaaagcuauaucaaugacaaggggaaggagguucuugugcuguggggcauucaccaccccuccaccucugccgaucaacagagccucuaccagaacgcugacgccuacgucuucgugggauccagcagauauucuaaaaaguuuaaaccugagaucgcuauucggccgaaggugcgcgaucaggaagggagaaugaauuacuauuggacacuggucgagcccggagacaaaaucaccuucgaagccacgggcaaccugguugugccucgguacgcguuugccauggagcgcaacgcuggguccggaauuaucaucagcgauacacccgugcaugacugcaauaccacaugucaaaccccuaagggcgccauuaacaccucucuccccuuccacaauauccauccgauuacaaucggcaaaugcccuaaguaugucaagagcacgaaacugagacuugcuaccgggcugcggaacgugcccuccauucagucucgcggacucuuuggcgccaucgccggguucaucgaaggaggcuggacagggaugguugacggaugguacggcuaucaccaccagaaugagcagggcagcggguacgcugcggaucugaaguccacccaaaacgccauugacgagaucacaaauaaagugaacagcgucauugaaaagaugaauacccaguuuacggcugugggaaaagaguucaaccaucuugaaaagagaaucgagaaucugaacaagaaaguugaugacggcuuccucgauauuuggacauacaaugccgaacugcuggugcuccuggagaacgagcggacccuugacuaucacgauucuaaugucaagaaccuguacgaaaaagugcgcucccagcucaagaacaaugccaaagagaucgggaacggauguuuugaguucuaucauaagugcgacaauaccuguauggaaagcgucaagaacggcacauacgauuauccuaaauacucugaagaggcuaagcugaauagagaggaaaucgacggggugaaacuugaguccacccggauuuaucagauccuggccauuuacagcacaguugcguccucucucgugcuggucgugagccugggcgcuaucuccuuuuggaugugcucuaacggaagccuccaaugccgcauuuguaucuga

SEQ ID NO: 196875 - RNA, 1701 nt, Artificial Sequence; identical to SEQ ID NO: 194983
  derived and/or modified CDS sequence (opt5) from hemagglutinin__InfluenzaA__ADG21945

SEQ ID NO: 196876 - RNA, 1701 nt, Artificial Sequence; identical to SEQ ID NO: 194983
  derived and/or modified CDS sequence (opt5) from hemagglutinin__InfluenzaA__ADG21946

SEQ ID NO: 196877 - RNA, 1701 nt, Artificial Sequence; identical to SEQ ID NO: 194983
  derived and/or modified CDS sequence (opt5) from hemagglutinin__InfluenzaA__ADG21947

SEQ ID NO: 196878 - RNA, 1701 nt, Artificial Sequence
  derived and/or modified CDS sequence (opt5) from hemagglutinin__InfluenzaA__ADG21948
auggaggccauccuggugguccuccuguacaccuucgcuacagccaacgcggacacgcuuugcauuggcuaucacgcuaauaacagcaccgauacaguugacaccgugcuggaaaagaaugugacagucacccauuccgugaaccuccuggaggauaaacacaaugggaaacuuuguaagcugagaggaguugcgccccuccaucugggcaagugcaacaucgccggguggauucugggaaauccugaaugugagucucucagcacagcuuccucuuggagcuacaucguggaaaccuccucuagcgacaacggcacgugcuauccgggggauuuuauugacuacgaggagcugcgggaacagcuuuccagcgucucuuccuucgagcgcuuugaaaucuuccccaaaaccagcucuuggccuaaucacgauuccaacaagggagugacagccgcuuguccccaugccggcgccaagagcuuuuauaaaaaucugaucuggcucguuaagaaaggcaacucuuacccuaagcuguccaaaagcuauauuaaugacaaggggaaggaggugcuuguccuguggggaauccaccaccccuccaccucugccgaucaacagagccucuaccagaacgcugacgccuacguguucgugggcuccagcagauauucuaaaaaguuuaaaccugagauugcuauccggccgaagguccgcgaucaggaagggagaaugaauuacuauuggacacugguugagcccggagacaaaauuaccuucgaagccacgggcaaccugguggugccucgguacgcguuugccauggagcgcaacgcuggguccggaaucauuaucagcgauacacccguccaugacugcaauaccacaugucaaaccccuaagggcgccaucaacaccucucuccccuuccacaauauucauccgaucacaauuggcaaaugcccuaaguauguuaagagcacgaaacugagacuugcuaccgggcugcggaacgugcccuccauccagucucgcggacucuuuggcgccauugccggguucaucgaaggaggcuggacagggaugguggacggaugguacggcuaucaccaccagaaugagcagggcagcggguacgcugcggaucugaaguccacccaaaacgccaucgacgagauuacaaauaaagucaacagcgugaucgaaaagaugaauacccaguuuacggcuguuggaaaagaguucaaccaucuugaaaagagaauugagaaucugaacaagaaaguggaugacggcuuccucgauaucuggacauacaaugccgaacugcugguccuccuggagaacgagcggacccuugaccaccaugauucuaaugugaagaaccuguaugaaaaaguccgcucccagcucaagaacaaugccaaagagauugggaacggauguuuugaguucuaccacaagugcgacaauaccuguauggaaagcgugaagaacggcacauaugauuacccuaaauauucugaagaggcuaagcugaauagagaggaaaucgacgggguuaaacuugaguccacccggaucuaccagauucuggccaucuauagcacaguggcguccucucucguccuggugguuagccugggcgcuauuuccuuuuggaugugcucuaacggaagccuccaaugccgcaucuguauuuga

SEQ ID NO: 196879 - RNA, 1701 nt, Artificial Sequence
  derived and/or modified CDS sequence (opt5) from hemagglutinin__InfluenzaA__ADG27794
augaaggccauccuggugguccuccuguacaccuucgcuacagccaacgcggacacgcuuugcauuggcuaucacgcuaauaacagcaccgauacaguugacaccgugcuggagaagaaugugacagucacccauuccgugaaccuccuggaagauaagcacaaugggaaacuuuguaagcugagaggaguugcuccccuccaucugggcaaaugcaacaucgccggguggauucugggaaauccugagugugaaucucucagcacagccuccucuuggagcuacaucguggagaccuccucuagcgacaacggcacgugcuauccgggggauuuuauugacuacgaagaacugcgggagcagcuuuccagcgucucuuccuucgaacgcuuugagaucuuccccaagaccagcucuuggccuaaucacgauuccaacaagggagugacagccgcuuguccccaugccggcgcgaaaucuuuuuauaagaaucugaucuggcucguuaaaaagggcaacagcuacccuaaacuguccaagagcuauauuaaugacaaggggaaagaagugcuuguccuguggggaauccaccaccccuccaccucugccgaucaacagagccucuaccagaacgcugacgccuacguguucgugggcacauccagauauagcaagaaauuuaagccugagauugcuauccggccgaaaguccgcgaucaggaggggagaaugaauuacuauuggacccugguugaacccggagacaagauuacguucgaggccacaggcaaccugguggugccucgguacgcguuugccauggaacgcaacgcugggucuggaaucauuaucuccgauacccccguccaugacugcaauacaaccugucaaaccccuaaaggcgccaucaacacaagccuccccuuccagaauauucacccgaucacgauuggcaagugcccuaaguaugugaaaucuaccaagcugagacuugcuacagggcugcggaacguucccagcauccagucccgcggacucuuuggcgccauugccggguucaucgagggaggcuggaccgggaugguggacggaugguacggcuaucaucaccagaaugaacaaggcucuggguacgcugcggaucugaaaagcacacagaacgccaucgacgagauuaccaauaaggucaacuccgugaucgagaaaaugaauacgcaguuuacagcuguuggaaaggaguucaaccaccuugagaagagaauugaaaaucugaacaaaaagguggaugacggcuuccucgauaucuggaccuacaaugccgagcugcugguccuccuggaaaacgagcggacccuugacuaucaugauagcaaugugaaaaaccuguacgagaagguccgcucucagcucaaaaacaaugccaaggaaauugggaacggauguuuugaguucuaucacaagugcgacaauacauguauggaauccgugaaaaacggcaccuacgauuauccuaaguacagcgaggaagcuaaacugaauagagaggagaucgacgggguuaaacuugaaucuacacggacguaucaaauccuggccauuuacuccaccguggcgagcucccucguccuggugguuucucugggcgcuaucagcuuuuggaugugcuccaacggaucucuccagugccgcauuuguaucuga

SEQ ID NO: 196880 - RNA, 1701 nt, Artificial Sequence; identical to SEQ ID NO: 194728
  derived and/or modified CDS sequence (opt5) from hemagglutinin__InfluenzaA__ADG27948

SEQ ID NO: 196881 - RNA, 1701 nt, Artificial Sequence; identical to SEQ ID NO: 194728
  derived and/or modified CDS sequence (opt5) from hemagglutinin__InfluenzaA__ADG27966

SEQ ID NO: 196882 - RNA, 1701 nt, Artificial Sequence
  derived and/or modified CDS sequence (opt5) from hemagglutinin__InfluenzaA__ADG27974
augaaggccauccuggugguccuccuguacaccuucgcuacagccaacgcggacacgcuuugcauuggcuaucacgcuaauaacagcaccgauacaguugacaccgugcuggagaagaaugugacagucacccauuccgugaaccuccuggaagauaagcacaaugggaaacuuuguaagcugagaggaguugcuccccuccaucugggcaaaugcaacaucgccggguggauucugggaaauccugagugugaaucucucagcacagccuccucuuggagcuacaucguggagaccuccucuagcgacaacggcacgugcuauccgggggauuuuauugacuacgaagaacugcgggagcagcuuuccagcgucucuuccuucgaacgcuuugagaucuuccccaagaccagcucuuggccuaaucacgauuccaacaagggagugacagccgcuuguccccaugccggcgcgaaaucuuuuuauaagaaucugaucuggcucguuaaaaagggcaacagcuacccuaaacuguccaagagcuauauuaaugacaaggggaaagaagugcuuguccuguggggaauccaccaccccuccaccucugccgaucaacagagccucuaccagaacgcugacgccuacguguucgugggcuccagcagauauucuaagaaauuuaagccugagauugcuauccggccgaaaguccgcgaucaggaggggagaaugaauuacuauuggacacugguugaacccggagacaagauuaccuucgaggccacgggcaaccugguggugccucgguacgcguuugccauggaacgcaacgcuggguccggaaucauuaucagcgauacacccguccaugacugcaauaccacaugucaaaccccuaaaggcgccaucaacaccucucuccccuuccagaauauucacccgaucacaauuggcaagugcccuaaguaugugaaaagcacgaagcugagacuugcuaccgggcugcggaacguucccuccauccagucucgcggacucuuuggcgccauugccggguucaucgagggaggcuggacagggaugguggacggaugguacggcuaucaucaccagaaugaacaaggcagcggguacgcugcggaucugaaauccacccagaacgccaucgacgagauuacaaauaaggucaacagcgugaucgagaaaaugaauacccaguuuacggcuguuggaaaggaguucaaccaccuugagaagagaauugaaaaucugaacaaaaagguggaugacggcuuccucgauaucuggacauacaaugccgagcugcugguccuccuggaaaacgagcggacccuugacuaucaugauucuaaugugaaaaaccuguacgagaagguccgcucccagcucaaaaacaaugccaaggaaauugggaacggauguuuugaguucuaucacaagugcgacaauaccuguauggaaagcgugaaaaacggcacauacgauuauccuaaguacucugaggaagcuaaacugaauagagaggagaucgacgggguuaaacuugaauccacccggaucuaucaaauucuggccaucuacagcacaguggcguccucucucauucuggucgugagccugggcgcuaucuccuuuuggaugugcucuaacggaagccuccagugccgcauuuguaucuga

SEQ ID NO: 196883 - RNA, 1701 nt, Artificial Sequence
  derived and/or modified CDS sequence (opt5) from hemagglutinin__InfluenzaA__ADG27982
augaaggccauccuggugguccuccuguacaccuucgcuacagccaacgcggacacgcuuugcauuggcuaucacgcuaauaacagcaccgauacaguugacaccgugcuggagaaaaaugugacagucacccauuccgugaaccuccuggaagauaagcacaaugggaaacuuuguaagcugagaggaguugcuccccuccaucugggcaaaugcaacaucgccggguggauucugggaaauccugagugugaaucucucagcacagccuccucuuggagcuacaucguggagaccuccucuagcgacaacggcacgugcuauccgggggauuuuauugacuacgaagaacugcgggagcagcuuuccagcgucucuuccuucgaacgcuuugagaucuuccccaagaccagcucuuggccuaaucacgauuccaacaagggagugacagccgcuuguccccaugccggcgcgaaaucuuuuuauaagaaucugaucuggcucguuaaaaagggcaacagcuacccuaaacuguccaagagcuauauuaaugacaaggggaaagaagugcuuguccuguggggaauccaccaccccuccaccucugccgaucaacagagccucuaccagaacgcugacgccuacguguucgugggcuccagcagauauucuaagaaauuuaagccugagauugcuauccggccgaaaguccgcgaucaggaggggagaaugaauuacuauuggacacugguugaacccggagacaagauuaccuucgaggccacgggcaaccugguggugccucgguacgcguuugccauggaacgcaacgcuggguccggaaucauuaucagcgauacacccguccaugacugcaauaccacaugucaaaccccuaaaggcgccaucaacaccucucuccccuuccagaauauucacccgaucacaauuggcaagugcccuaaguaugugaaaagcacgaagcugagacuugcuaccgggcugcggaacguucccuccauccagucucgcggacucuuuggcgccauugccggguucaucgagggaggcuggacagggaugguggacggaugguacggcuaucaucaccagaaugaacaaggcagcggguacgcugcggaucugaaauccacccagaacgccaucgacgagauuacaaauaaggucaacagcgugaucgagaaaaugaauacccaguuuacggcuguuggaaaggaguucaaccaccuugagaagagaauugaaaaucugaacaaaaagguggaugacggcuuccucgauaucuggacauacaaugccgagcugcugguccuccuggaaaacgagcggacccuugacuaucaugauucuaaugugaaaaagcuguacgagaaaguccgcucccagcucaagaacaacgccaaggaaauugggaauggauguuuugaguucuaucacaaaugcgacaacaccuguauggaaagcgugaagaauggcacauacgauuauccuaaauacucugaggaagcuaagcugaacagagaggagaucgacgggguuaaacuugaauccacccggaucuaucaaauucuggccaucuacagcacaguggcguccucucucguccuggugguuagccugggcgcuauuuccuuuuggaugugcucuaauggaagccuccagugccgcaucuguauuuga

SEQ ID NO: 196884 - RNA, 1701 nt, Artificial Sequence; identical to SEQ ID NO: 194728
  derived and/or modified CDS sequence (opt5) from hemagglutinin__InfluenzaA__ADG27988

SEQ ID NO: 196885 - RNA, 1701 nt, Artificial Sequence; identical to SEQ ID NO: 194728
  derived and/or modified CDS sequence (opt5) from hemagglutinin__InfluenzaA__ADG27997

SEQ ID NO: 196886 - RNA, 1701 nt, Artificial Sequence; identical to SEQ ID NO: 194728
  derived and/or modified CDS sequence (opt5) from hemagglutinin__InfluenzaA__ADG28011

SEQ ID NO: 196887 - RNA, 1701 nt, Artificial Sequence; identical to SEQ ID NO: 196293
  derived and/or modified CDS sequence (opt5) from hemagglutinin__InfluenzaA__ADG42093

SEQ ID NO: 196888 - RNA, 1701 nt, Artificial Sequence; identical to SEQ ID NO: 195905
  derived and/or modified CDS sequence (opt5) from hemagglutinin__InfluenzaA__ADG42103

SEQ ID NO: 196889 - RNA, 1701 nt, Artificial Sequence; identical to SEQ ID NO: 195094
  derived and/or modified CDS sequence (opt5) from hemagglutinin__InfluenzaA__ADG42113

SEQ ID NO: 196890 - RNA, 1701 nt, Artificial Sequence; identical to SEQ ID NO: 196293
  derived and/or modified CDS sequence (opt5) from hemagglutinin__InfluenzaA__ADG42123

SEQ ID NO: 196891 - RNA, 1701 nt, Artificial Sequence
  derived and/or modified CDS sequence (opt5) from hemagglutinin__InfluenzaA__ADG42133
augaaggccauccuggugguccuccuguacaccuucgcuacagccaacgcggacacgcuuugcauuggcuaucacgcuaauaacagcaccgauacaguugacaccgugcuggagaagaaugugacagucacccauuccgugaaccuccuggaagauaagcacaaugggaaacuuuguaagcugagaggaguugcuccccuccaucugggcaaaugcaacaucgccggguggauucugggaaauccugagugugaaucucucagcacagccuccucuuggagcuacaucguggagaccuccucuagcgacaacggcacgugcuauccgggggauuuuauugacuacgaagaacugcgggagcagcuuuccagcgucucuuccuucgaacgcuuugagaucuuccccaagaccagcucuuggccuaaucacgauuccaacaagggagugacagccgcuugucccuaugccggcgcgaaauccuuuuacaagaaucugaucuggcucguuaaaaagggcaacucuuauccuaaacuguccaagagcuacauuaaugacaaggggaaagaagugcuuguccuguggggaauccaucaccccuccaccucugccgaucaacagagccucuaccagaacgcugacgccuauguguucgugggcacauccagauacagcaagaaauuuaagccugagauugcuauccggccgaaaguccgcgaucaggaggggagaaugaauuauuacuggacccugguugaacccggagacaagauuacguucgaggccacaggcaaccugguggugccucgguaugcguuugccauggaacgcaacgcugggucuggaaucauuaucuccgauacccccguccacgacugcaauacaaccugucaaaccccuaaaggcgccaucaacacaagccuccccuuccagaauauucauccgaucacgauuggcaagugcccuaaguacgugaaaucuaccaagcugagacuuguuacagggcugcggaacgugcccagcauccagucccgcggacucuuuggcgcuauugccggguucaucgagggaggcuggaccgggauggucgacggaugguauggcuaccaccaucagaaugaacaaggcucuggguacgccgcugaucugaaaagcacacagcacgcgaucgacgagauuaccaacaaggugaauagcguuaucgagaaaaugaacacgcaguuuacagccgugggaaaggaguucaaucaccuugagaagagaauugaaaaccugaauaaaaaggucgaugacggcuuccucgauaucuggaccuauaacgcugagcugcuggugcuccuggaaaaugagcggacccuugacuaccaugauagcaacgucaaaaaucuguaugagaaggugcgcucucagcucaaaaacaacgccaaggaaauugggaauggauguuuugaguucuaccacaagugcgacaacacauguauggaauccguuaaaaauggcaccuaugauuacccuaaguauagcgaggaagccaaacugaacagagaggagaucgacggggugaaacuugaaucuacacggaucuaccaaauucuggcuaucuacuccacggucgccagcucccucgugcugguugugucucugggcgcgauuagcuuuuggaugugcuccaauggaucucuccagugccgcaucuguauuuga

SEQ ID NO: 196892 - RNA, 1701 nt, Artificial Sequence
  derived and/or modified CDS sequence (opt5) from hemagglutinin__InfluenzaA__ADG42143
augaaggccauccuggugguccuccuguacaccuucgcuacagccaacgcggacacgcuuugcauuggcuaucacgcuaauaacagcaccgauacaguugacaccgugcuggagaaaaaugugacagucacccauuccgugaacauccucgaagauaagcacaaugggaaacuguguaaacuuagaggaguugcuccccugcaucucggcaaaugcaacauugccggguggauccugggaaauccugagugugaaucucugagcacagccuccucuuggagcuacauuguggagaccuccucuagcgacaacggcacgugcuauccgggggauuuuaucgacuacgaagaacuccgggagcagcuguccagcgucucuuccuucgaacgcuuugagaucuuccccaagaccagcucuuggccuaaucacgauuccaacaagggagugacagccgcuuguccccaugccggcgcgaaaucuuuuuauaagaaucuuauuuggcugguuaaaaagggcaacagcuacccuaaacucuccaagagcuauaucaaugacaaggggaaagaagugcugguccuuuggggcauucaccaccccuccaccucugccgaucaacagagccuguaccagaacgcugacgccuacguguucgugggauccagcagauauucuaagaaauuuaagccugagaucgcuauucggccgaaaguccgcgaucaggaggggagaaugaauuacuauuggacacucguugaacccggagacaagaucaccuucgaggccacgggcaaccugguggugccucgguacgcguuugccauggaaaagaacgcuggguccggaauuaucaucagcgauacacccguccaugacugcaauaccacaugucaaaccccuaagggcgccauuaacaccucucugcccuuccagaauauccacccgauuacaaucggcaagugcccuaaauauguuaagagcacgaaacuccgccuggcuaccgggcuuagaaacgugcccuccauucagucucggggacuguuuggcgccaucgccggguucaucgagggaggcuggacagggaugguggacggaugguacggcuaucaucaccagaaugaacaaggcagcggguacgcugcggaucucaaguccacccagaacgccauugacgagaucacaaauaaagucaacagcgugauugagaagaugaauacccaguuuacggcuguuggaaaggaguucaaccaccuggagaaacgcaucgaaaaucuuaacaagaaaguggaugacggcuuccuggauauuuggacauacaaugccgagcuccugguccugcucgaaaacgagagaacccuggacuaucaugauucuaaugugaagaaccuuuacgagaaaguccggucccagcugaagaacaaugccaaggaaguggggaacggauguuuugaguucuaucacaaaugcgacaauaccuguauggaaagcguuaagaacggcacauacgauuauccuaaauacucugaggaagcuaagcucaaucgcgaggagaucgacggggugaaacuggaauccaccagaaucuaucaaauucuugccaucuacagcacagcggcuuccucucugguccucgugguuagccugggcgccauuuccuuuuggaugugcucuaacggaagccugcagugccggaucuguauuuga

SEQ ID NO: 196893 - RNA, 1701 nt, Artificial Sequence
  derived and/or modified CDS sequence (opt5) from hemagglutinin__InfluenzaA__ADG42153
augaaggccauccuggugguccuccuguacaccuucgcuacagccaacgcggacacgcuuugcauuggcuaucacgcuaauaacagcaccgauacaguugacaccgugcuggagaaaaaugugacagucacccauuccgugaaccuccuggaagauaagcacaaugggaaacuuuguaagcugagaggaguugcuccccuccaucugggcaaaugcaacaucgccggguggauucugggaaauccugagugugaaucucucagcacagccuccucuuggagcuacaucguggagaccuccucuagcgacaacggcacgugcuauccgggggauuuuauugacuacgaagaacugcgggagcagcuuuccagcgucucuuccuucgaacgcuuugagaucuuccccaagaccagcucuuggccuaaucacgauuccaacaagggaaucacagccgcuuguccccaugccggcgcgaaaucuuuuuauaagaaucugauuuggcucgugaaaaagggcaacagcuacccuaaacuguccaagagcuauaucaaugacaaggggaaagaaguucuugugcuguggggcauucaccaccccuccaccucugccgaucaacagagccucuaccagaacgcugacgccuacgucuucgugggaacauccagauauagcaagaaauuuaagccugagaucgcuauucggccgaaagugcgcgaucaggaggggagaaugaauuacuauuggacccuggucgaacccggagacaagaucacguucgaggccacaggcaaccugguugugccucgguacgcguuugccauggaacgcaacgcugggucuggaauuaucaucuccgauacccccgugcucgacugcaauacaaccugucaaaccccuaaaggcgccauuaacacaagccugcccuuccagaauauccauccgauuacgaucggcaagugcccuaaguaugucaaaucuaccaaacuuagacuggcuacagggcuccggaacgugcccagcauucagucccgcggacuguuuggcgccaucgccggguucaucgagggaggcuggaccgggaugguugacggaugguacggcuaucaccaucagaaugaacaaggcucuggguacgcugcggaucuuaagagcacacagaacgccauugacgagaucaccaauaaggugaacuccgucauugagaaaaugaauacgcaguuuacagcugugggaaaggaguucaaccaccuggagaagagaaucgaaaaucucaacaaaaagguugaugacggcuuccuggauauuuggaccuacaaugccgagcugcucgugcugcuugaaaacgagcggacccuggacuaucacgauagcaaugucaaaaaccucuacgagaaggugcgcucucagcugaaaaacaaugccaaggaaaucgggaacggauguuuugaguucuaucauaagugcgacaauacauguauggaauccgucaaaaacggcaccuacgauuauccuaaguacagcgaggaagcuaaacuuaauagagaggagaucgacggggugaagcuggaaucuacacggauuuaucaaauccucgccauuuacuccacgguugcgagcucccuggugcuggucgugucucucggcgcuaucagcuuuuggaugugcuccaacggaucucugcagugccgcauuuguaucuga

SEQ ID NO: 196894 - RNA, 1701 nt, Artificial Sequence; identical to SEQ ID NO: 194741
  derived and/or modified CDS sequence (opt5) from hemagglutinin__InfluenzaA__ADG42193

SEQ ID NO: 196895 - RNA, 1701 nt, Artificial Sequence; identical to SEQ ID NO: 194741
  derived and/or modified CDS sequence (opt5) from hemagglutinin__InfluenzaA__ADG42213

SEQ ID NO: 196896 - RNA, 1701 nt, Artificial Sequence; identical to SEQ ID NO: 194741
  derived and/or modified CDS sequence (opt5) from hemagglutinin__InfluenzaA__ADG42233

SEQ ID NO: 196897 - RNA, 1701 nt, Artificial Sequence
  derived and/or modified CDS sequence (opt5) from hemagglutinin__InfluenzaA__ADG42243
augaaggccauccuggugguccuccuguacaccuucgcuacagccaacgcggacacgcuuugcauuggcuaucacgcuaauaacagcaccgauacaguugacaccgugcuggagaaaaaugugacagucacccauuccgugaaccuccuggaagauaagcacaaugggaaacuuuguaagcugagaggaguugcuccccuccaucugggcaaaugcaacaucgccggguggauucugggaaauccugagugugaaucucucagcacagccuccucuuggagcuacaucguggagaccuccucuagcgacaacggcacgugcuauccgggggauuuuauugacuacgaagaacugcgggagcagcuuuccagcgucucuuccuucgaacgcuuugagaucuuccccaagaccagcucuuggccuaaucacgauuccaacaagggagugacagccgcuuguccccaugccggcgcgaaaucuuuuuauaagaaucugaucuggcucguuaaaaagggcaacagcuacccuaaacuguccaagagcuauauuaaugacaaggggaaagaagugcuuguccuguggggaauccaccaccccuccaccucugccgaucaacagagccucuaccagaacgcugacgccuacguguucgugggcacauccagauauagcaagaaauuuaagccugagauugcuauccggccgaaaguccgcgaucaggaggggagaaugaauuacuauuggacccugguugaacccggagacaagauuacguucgaggccacaggcaaccugguggugccucgguacgcguuugccauggaacgcaacgcugggucuggaaucauuaucuccgauacccccguccucgacugcaauacaaccugucaaaccccuaaaggcgccaucaacacaagccugcccuuccagaauauucauccgaucacgauuggcaagugcccuaaguaugugaaaucuaccaaacuuagacuggcuacagggcuccggaacguucccagcauccagucccgcggacuguuuggcgccauugccggguucaucgagggaggcuggaccgggaugguggacggaugguacggcuaucaccaucagaaugaacaaggcucuggguacgcugcggaucuuaagagcacacagcacgccaucgacgagauuaccaacaaggucaauuccgugaucgagaaaaugaacacgcaguuuacagcuguuggaaaggaguucaaucaccuggagaagagaauugaaaaccucaauaaaaagguggaugacggcuuccuggauaucuggaccuacaacgccgagcugcucguccugcuugaaaaugagcggacccuggacuaucaugauagcaacgugaaaaaucucuacgagaagguccgcucucagcugaaaaacaacgccaaggaaauugggaauggauguuuugaguucuaucacaagugcgacaacacauguauggaauccgugaaaaauggcaccuacgauuauccuaaguacagcgaggaagcuaaacuuaacagagaggagaucgacgggguuaagcuggaaucuacacggaucuaucaaauucucgccaucuacuccacgguggcgagcucccugguccuggugguuucucucggcgcuauuagcuuuuggaugugcuccaauggaucucugcagugccgcaucuguauuuga

SEQ ID NO: 196898 - RNA, 1701 nt, Artificial Sequence; identical to SEQ ID NO: 196161
  derived and/or modified CDS sequence (opt5) from hemagglutinin__InfluenzaA__ADG42253

SEQ ID NO: 196899 - RNA, 1701 nt, Artificial Sequence; identical to SEQ ID NO: 194741
  derived and/or modified CDS sequence (opt5) from hemagglutinin__InfluenzaA__ADG42263

SEQ ID NO: 196900 - RNA, 1701 nt, Artificial Sequence; identical to SEQ ID NO: 195842
  derived and/or modified CDS sequence (opt5) from hemagglutinin__InfluenzaA__ADG42273

SEQ ID NO: 196901 - RNA, 1701 nt, Artificial Sequence; identical to SEQ ID NO: 195842
  derived and/or modified CDS sequence (opt5) from hemagglutinin__InfluenzaA__ADG42283

SEQ ID NO: 196902 - RNA, 1701 nt, Artificial Sequence; identical to SEQ ID NO: 196424
  derived and/or modified CDS sequence (opt5) from hemagglutinin__InfluenzaA__ADG42293

SEQ ID NO: 196903 - RNA, 1701 nt, Artificial Sequence
  derived and/or modified CDS sequence (opt5) from hemagglutinin__InfluenzaA__ADG42303
augaaggccauccuggugguccuccuguacaccuucgcuacagccaacgcggacacgcuuugcauuggcuaucacgcuaauaacagcaccgauacaguugacaccgugcuggagaaaaaugugacagucacccauuccgugaaccuccuggaagauaagcacaaugggaaacuuuguaagcugaaaggaguugcgccccuccaucugggcaagugcaacaucgccggguggauucugggaaauccugagugugaaucucucagcacagcuuccucuuggagcuacaucguggagaccuccucuagcgacaacggcacgugcuauccgggggauuuuauugacuacgaagaacugagagagcagcuuuccagcgucucuuccuucgaacgguuugagaucuuccccaagaccagcucuuggccuaaucacgauuccaacaaaggagugacagccgcuuguccccaugccggcgccaagagcuuuuauaaaaaucugaucuggcucguuaagaaaggcaacucuuacccuaagcuguccaagagcuauauuaaugacaaagggaaggaagugcuuguccuguggggaauccaccaccccuccaccucugccgaucaacagagccucuaccagaacgcugacgccuacguguucgugggcacaucccgcuauagcaaaaaguuuaaaccugagauugcuaucagaccgaagguccgggaucaggaggggcgcaugaauuacuauuggacccugguugaacccggagacaaaauuacguucgaggccacaggcaaccugguggugccuagauacgcguuugccauggaacggaacgcugggucuggaaucgucauuuccgauacccccgugcaugacugcaauacaaccugucaaaccccuaagggcgccaucaacacaagccuccccuuccagaauauccacccgauuacgaucggcaagugcccuaaauauguuaagucuaccaaacugcgccuugcuacagggcugagaaacgugcccagcauucagucccggggacucuuuggcgccaucgccggguucauugagggaggcuggaccgggauggucgacggaugguacggcuaucaucaccagaaugaacaaggcucuggguacgcugcggaucuuaagagcacacagaacgccaucgacgagaucaccaauaaagugaacuccguuauugagaagaugaauacgcaguuuacagcugugggaaaggaguucaaccaccuggagaaacgcaucgaaaaucugaacaagaaagucgaugacggcuuccucgauauuuggaccuacaaugccgagcugcuggugcuccuggaaaacgagagaacccuugacuaucaugauagcaaugucaagaaccuguacgagaaagugcggucucagcucaagaacaaugccaaggaaaucgggaacggauguuuugaguucuaucacaaaugcgacaauacauguauggaauccguuaagaacggcaccuacgauuauccuaaauacagcgaggaagcuaagcugaaucgcgaggagauugacggggugaaacuugaaucuacaagaaucuaucaaauccuggccauuuacuccacggucgcgagcucccucgugcugguugugucucugggcgcuaucagcuuuuggaugugcuccaacggaucucuccagugccggauuuguaucuga

SEQ ID NO: 196904 - RNA, 1701 nt, Artificial Sequence; identical to SEQ ID NO: 196451
  derived and/or modified CDS sequence (opt5) from hemagglutinin__InfluenzaA__ADG42313

SEQ ID NO: 196905 - RNA, 1701 nt, Artificial Sequence
  derived and/or modified CDS sequence (opt5) from hemagglutinin__InfluenzaA__ADG42323
augaaggccauccuggugguccuccuguacaccuucgcuacagccaacgcggacacgcuuugcauuggcuaucacgcuaauaacagcaccgauacaguugacaccgugcuggagaagaaugugacagucacccauuccgugaaccuccuggaagauaagcacaaugggaaacuuuguaagcugagaggaguugcuccccuccaucugggcaaaugcaacaucgccggguggauucugggaaauccugagugugaaucucucagcacagccuccucuuggagcuacaucguggagaccuccucuagcgacaacggcacgugcuauccgggggauuuuauugacuacgaagaacugcgggagcagcuuuccagcgucucuuccuucgaacgcuuugagauguuccccaagaccagcucuuggccuaaucacgauuccaacaagggagugacagccgcuuguccccaugccggcgcgaaaucuuuuuauaagaaucugaucuggcucguuaaaaagggcaacagcuacccuaaacuguccaagagcuauaucaaugacaaggggaaagaagugcuuguccuguggggcauucaccaccccuccaccucugccgaucaacagagccucuaccagaacgcugacgccuacguguucgugggaacauccagauauagcaagaaauuuaagccugagaucgcuauucggccgaaaguccgcgaucaggaggggagaaugaauuacuauuggacccugguugaacccggagacaagaucacguucgaggccacaggcaaccugguggugccucgguacgcguuugccauggaacgcaacgcugggucuggaauuaucauuuccgauacccccguccaugacugcaauacaaccugucaaaccccuaaaggcgccaucaacacaagccuccccuuccagaauauccacccgauuacgaucggcaagugcccuaaguaugugaaaucuaccaagcugagacuugcuacagggcugcggaacguucccagcauucagucccgcggacucuuuggcgccaucgccggguucauugagggaggcuggaccgggaugguggacggaugguacggcuaucaucaccagaaugaacaaggcucuggguacgcugcggaucugaaaagcacacagaacgccaucgacgagaucaccaauaaggucaacuccgugauugagaaaaugaauacgcaguuuacagcuguuggaaaggaguucaaccaccuugagaagagaaucgaaaaucugaacaaaaagguggaugacggcuuccucgauauuuggaccuacaaugccgagcugcugguccuccuggaaaacgagcggacccuugacuaucaugauagcaaugugaaaaaccuguacgagaagguccgcucucagcucaaaaacaaugccaaggaaguggggaacggauguuuugaguucuaucacaagugcgacaauacauguauggaauccguuaaaaacggcaccuacgauuauccuaaguacagcgaggaagcuaaacugaauagagaggagaucgacggggugaaacuugaaucuacacggauuuaucaaauccuggccaucuacuccacggucgcgagcucccucgugcugguugugucucugggcgcuauuagcuuuuggaugugcuccaacggaucucuccagugccgcaucuguauuuga

SEQ ID NO: 196906 - RNA, 1701 nt, Artificial Sequence
  derived and/or modified CDS sequence (opt5) from hemagglutinin__InfluenzaA__ADG42333
augaaggccauccuggugguccuccuguacacccuugcuacagccaacgcggacacgcugugcauuggcuaucacgcuaauaacagcaccgauacaguugacaccgugcucgagaaaaaugugacagucacccauuccgugaaccugcuugaagauaagcacaaugggaaacuguguaagcucagaggaaucgcuccccugcaucugggcaaaugcaacauugccggguggauccucggaaauccugagugugaaucucugagcacagccuccucuuggagcuacauuguugagaccuccucuagcgacaacggcacgugcuauccgggggauuucaucgacuacgaggaacuucgggagcagcuguccagcgugucuuccuuugaacgcuucgagaucuuucccaagaccagcucuuggccuaaucacgauuccaacaagggagucacagccgcuuguccccaugccggcgcgaaaucuuucuauaagaaucucauuuggcuggugaaaaagggcaacagcuacccuaaacuuuccaagagcuauaucaaugacaaggggaaagaaguucuggugcucuggggcauucaccaccccuccaccucugccgaucaacagagccuguaccagaacgcugacgccuacgucuuugugggaacauccagauauagcaagaaauucaagccugagaucgcuauucggccgaaagugcgcgaucaggaggggagaaugaauuacuauuggacccuggucgaacccggagacaagaucacguuugaggccacaggcaaccucguugugccucgguacgcguucgccauggaacgcaacgcugggucuggaauuaucaucuccgaugcccccgugcaugacugcaauaccacaugucaaaccccuaaaggcgcuauuaacaccagccugcccuuucagaauauccacccgauuacaaucggcaagugcccuaaguaugucaaaucuacgaaacuuagacuggccaccgggcuccggaacgugcccagcauucagucccgcggacuguucggcgccaucgcuggguuuaucgagggaggcuggacagggaugguugacggaugguacggcuaucaucaccagaaugaacaaggcucuggguacgcggccgaucuuaagagcacccagaacgcuauugacgagaucacaaauaaggugaacuccgucauugagaaaaugaauacccaguucacggccgugggaaaggaauuuaaccaccuggagaagagaaucgaaaaucucaacaaaaagguugaugacggcuuccuggauauuuggacauacaaugccgagcugcucgugcugcuugaaaacgagcggacccuggacuaucaugauagcaaugucaaaaaccucuacgagaaggugcgcucucagcugaaaaacaaugcuaaggaaaucgggaacggauguuucgaguuuuaucacaagugcgacaauaccuguauggaauccgucaaaaacggcacauacgauuauccuaaguacagcgaggaagccaaacuuaauagagaggagaucgacggggugaagcuggaaucuacccggauuuaucaaauccucgcgauuuacuccacaguugcuagcucccuggugcuggucgugucucucggcgccaucagcuucuggaugugcuccaacggaucucugcagugccgcauuuguaucuga

SEQ ID NO: 196907 - RNA, 1701 nt, Artificial Sequence
  derived and/or modified CDS sequence (opt5) from hemagglutinin__InfluenzaA__ADG42343
augaaggccauccuggugguccuccuguacaccuucgcuacagccaacgcggacacgcuuugcauuggcuaucacgcuaauaacagcaccgauacaguugacaccgugcuggagaagaaugugacagucacccauuccgugaaccuccuggaagauaagcacaaugggaaacuuuguaagcugagaggaguugcuccccuccaucugggcaaaugcaacaucgccggguggauucugggaaauccugagugugaaucucucagcacagccuccucuuggagcuacaucguggagaccuccucuagcgacaacggcacgugcuauccgggggauuuuauugacuacgaagaacugcgggagcagcuuuccagcgucucuuccuucgaacgcuuugagaucuuccccaagaccagcucuuggccuaaucacgauuccaacaagggagugacagccgcuuguccccaugccggcgcgaaaucuuuuuauaagaaucugaucuggcucguuaaaaagggcaacagcuacccuaaacuguccaagagcuauauuaaugacaaggggaaagaagugcuuguccuguggggaauccaccaccccuccaccucugccgaucaacagagccucuaccagaacgcugacgccuacguguucgugggcacauccagauauagcaagaaauuuaagccugagauugcuauccggccgaaaguccgcgaucaggaggggagaaugaauuacuauuggacccugguugaacccggagacaagauuacguucgaggccacaggcaaccugguggugccucgguacgcguuugccauggaaucuaacgcuggguccggaaucauuaucagcgauacccccguccaugacugcaauacaaccugucaaaccccuaaaggcgccaucaacacaucucuccccuuccagaauauucacccgaucacgauuggcaagugcccuaaguaugugaaaagcaccaagcugcgccuugcuacagggcugagaaacguucccuccauccagucucggggacucuuuggcgccauugccggguucaucgagggaggcuggaccgggaugguggacggaugguacggcuaucaucaccagaaugaacaaggcagcggguacgcugcggaucugaaauccacacagcacgccaucgacgagauuaccaacaaggucaauagcgugaucgagaaaaugaacacgcaguuuacagcuguuggaaaggaguucaaucaucuugagaagcgcauugaaaaccugaauaaaaagguggaugacggcuuccucgauaucuggaccuacaacgccgagcugcugguccuccuggaaaaugagagaacccuugacuaucacgauucuaacgugaaaaaucuguacgagaagguccggucccagcucaaaaacaacgccaaggaaauugggaauggauguuuugaguucuaucauaagugcgacaacacauguauggaaagcgugaaaaauggcaccuacgauuauccuaaguacucugaggaagcuaaacugaaccgcgaggagaucgacgggguuaaacuugaauccacaagaaucuaucaaauucuggccaucuacagcacgguggcguccucucucguccuggugguuagccugggcgcuauuuccuuuuggaugugcucuaauggaagccuccagugccggaucuguauuuga

SEQ ID NO: 196908 - RNA, 1701 nt, Artificial Sequence
  derived and/or modified CDS sequence (opt5) from hemagglutinin__InfluenzaA__ADG42363
augaaggccauccuggugguccuccuguacaccuucgcuacagccaacgcggacacgcuuugcauuggcuaucacgcuaauaacagcaccgauacaguugacaccgugcuggagaagaaugugacagucacccauuccgugaaccuccuggaagauaagcacaaugggaaacuuuguaagcugagaggaaucgcuccccuccaucugggcaaaugcaacauugccggguggauccugggaaauccugagugugaaucucucagcacagccuccucuuggagcuacauuguugagaccuccucuagcgacaacggcacgugcuauccgggggauuuuaucgacuacgaagaacugcgggagcagcuuuccagcgugucuuccuucgaacgcuuugagaucuuccccaagaccagcucuuggccuaaucacgauuccaacaagggagucacagccgcuuguccccaugccggcgcgaaaucuuuuuauaagaaucugauuuggcucgugaaaaagggcaacagcuacccuaaacuguccaagagcuauaucaaugacaaggggaaagaaguucuugugcuguggggcauucaccaccccuccaccucugccgaucaacagagccucuaccagaacgcugacgccuacgucuucgugggaacauccagauauagcaagaaauuuaagccugagaucgcuauucggccgaaagugcgcgaucaggaggggagaaugaauuacuauuggacccuggucgaacccggagacaagaucacguucgaggccacaggcaaccugguugugccucgguacgcguuugccauggaacgcaacgcugggucuggaauuaucaucuccgauacccccgugcaugacugcaauacaaccugucaaaccccuaaaggcgccauuaacacaagccuccccuuccagaauauccacccgauuacgaucggcaagugcccuaaguaugucaaaucuaccaagcugagacuugcuacagggcugcggaacgugcccagcauucagucccgcggacucuuuggcgccaucgccggguucaucgagggaggcuggaccgggaugguugacggaugguacggcuaucaucaccagaaugaacaaggcucuggguacgcugcggaucugaaaagcacacagaacgccauugacgagaucaccaauaaggugaacuccgucauugagaaaaugaauacgcaguuuacagcugugggaaaggaguucaaccaccuugagaagagaaucgaaaaucugaacaaaaagguugaugacggcuuccucgauauuuggaccuacaaugccgagcugcuggugcuccuggaaaacgagcggacccuugacuaucaugauagcaaugucaaaaaccuguacgagaaggugcgcucucagcucaaaaacaaugccaaggaaaucgggaacggauguuuugaguucuaucacaagugcgacaauacauguauggaauccgucaaaaacggcaccuacgauuauccuaaguacagcgaggaagcuaaacugaauagagaggagaucgacggggugaaacuugaaucuacacggauuuaucaaauccuggccauuuacuccacgguugcgagcucccucgugcuggucgugucucugggcgcuaucagcuuuuggaugugcuccaacggaucucuccagugccgcauuuguaucuga

SEQ ID NO: 196909 - RNA, 1701 nt, Artificial Sequence
  derived and/or modified CDS sequence (opt5) from hemagglutinin__InfluenzaA__ADG42373
augaaggccauccuggugguccuccuguacaccuucgcuacagccaacgcggacacgcuuugcauuggcuaucacgcuaauaacagcaccgauacaguugacaccgugcuggagaagaaugugacagucacccauuccgugaaccuccuggaagauaagcacaaugggaaacuuuguaagcugagaggaguugcuccccuccaucugggcaaaugcaacaucgccggguggauucugggaaauccugagugugaaucucucagcacagccuccucuuggagcuacaucguggagaccuccucuagcgacaacggcacgugcuauccgggggauuuuauugacuacgaagaacugcgggagcagcuuuccagcgucucuuccuucgaacgcuuugagaucuuccccaagaccagcucuuggccuaaucacgauuccaacaagggagugacagccgcuuguccccaugccggcgcgaaaucuuuuuauaagaaucugaucuggcucguuaaaaagggcaacagcuacccuaaacuguccaagagcuauauuaaugacaaggggaaagaagugcuuguccuguggggaauccaccaccccuccaccucugccgaucaacagagccucuaccagaacgcugacgccuacguguucgugggcacauccagauauagcaagaaauuuaagccugagauugcuauccggccgaaaguccgcgaucaggaggggagaaugaauuacuauuggacccugguugaacccggagacaagauuacguucgaggccacaggcaaccugguggugccucgguacgcguuugccauggaacgcaacgcugggucuggaaucauuaucuccgauacccccguccaugacugcaauacaaccugucaaaccccuaaaggcgccaucaacacaagccuccccuuccagaauauucacccgaucacgauuggcaagugcccuaaguaugugaaaucuaccaagcugagacuugcuacagggcugcggaacguucccagcauccagucccgcggacucuuuggcgccauugccggguucaucgagggaggcuggaccgggaugguggacggaugguacggcuaucaucaccagaaugaacaaggcucuggguacgcugcggaucugaaaagcacacagaacgccaucgacgagauuaccaauaaggucaacuccgugaucgagaaaaugaauacgcaguuuacagcuguuggaaaggaguucaaccaccuugagaagagaauugaaaaucugaacaaaaagguggaugacggcuuccucgauaucuggaccuacaaugccgagcugcugguccuccuggaaaacgagcggacccuugacuaucaugauagcaaugugaaaaaccuguacgagaagguccgcaaccagcucaaaaauaacgccaaggaaauugggaauggauguuuugaguucuaucacaagugcgacaacacauguauggaaucugugaaaaauggcaccuacgauuauccuaaguacuccgaggaagcuaaacugaacagagaggagaucgacgggguuaaacuugaaagcacacggaucuaucaaauucuggccaucuacucuacgguggcguccagccucguccuggugguuucccugggcgcuauuucuuuuuggaugugcagcaauggaucccuccagugccgcaucuguauuuga

SEQ ID NO: 196910 - RNA, 1701 nt, Artificial Sequence
  derived and/or modified CDS sequence (opt5) from hemagglutinin__InfluenzaA__ADG42393
augaaggccauccuggugguccuccuguacaccuucgcuacagccaacgcggacacgcuuugcauuggcuaucacgcuaauaacagcaccgauacaguugacaccgugcuggagaagaaugugacagucacccauuccgugaaccuccuggaagauaagcacaaugagaaacuuuguaagcugagagggguugcuccccuccaucugggaaaaugcaacaucgccggcuggauucuggggaauccugaaugugagucucucagcacagccuccucuuggagcuacaucguggaaaccuccucuagcgacaacggaacgugcuauccgggcgauuuuauugacuacgaggagcugcgggaacagcuuuccagcgucucuuccuucgagcgcuuugaaaucuuccccaagaccagcucuuggccuaaucacgauuccaacaagggggugacagccgcuuguccccaugccggagcgaaaucuuuuuauaagaaucugaucuggcucguuaaaaagggcaacagcuacccuaaacuguccaagagcuauauuaaugacaagggcaaagaggugcuuguccugugggggauccaccaccccuccaccucugccgaucaacagagccucuaccagaacgcugacgccuacguguucgugggaacauccagauauagcaagaaauuuaagccugagauugcuauccggccgaaaguccgcgaacaggagggcagaaugaauuacuauuggacccugguugaacccggggauaagauuacguucgaggccacaggaaaccugguggugccucgguacgcguuugccauggaacgcaacgcuggcucugggaucauuaucuccgacacccccguccaugauugcaauacaaccugucaaaccccuaaaggagccaucaacacaagccuccccuuccagaauauucacccgaucacgauuggcaagugcccuaaguaugugaaaucuaccaagcugagacuugcuacaggccugcggaacguucccagcauccagucccgcgggcucuuuggagccauugccggcuucaucgaagggggauggaccggcaugguggacgggugguacggauaucaucaccagaaugagcaaggcucuggcuacgcugcggaccugaaaagcacacagaacgccaucgaugaaauuaccaauaaggucaacuccgugaucgagaaaaugaauacgcaguuuacagcuguugggaaggaguucaaccaccuugagaagagaauugaaaaucugaacaaaaagguggacgauggauuccucgacaucuggaccuacaaugccgagcugcugguccuccuggagaacgaacggacccuugauuaucaugacagcaaugugaaaaaccuguacgagaagguccgcucucagcucaaaaacaaugccaaggaaauuggcaacggguguuuugaguucuaucacaagugcgauaauacauguauggaauccgugaaaaacggaaccuacgacuauccuaaguacagcgaggaggcuaaacugaauagagaagagaucgauggcguuaaacuugaaucuacacggaucuaucaaauucuggccaucuacuccacgguggcgagcucccucguccugcuggugucucucggggcuauuagcuuuuggaugugcuccaacggcucucugcagugccgcaucuguauuuga

SEQ ID NO: 196911 - RNA, 1701 nt, Artificial Sequence; identical to SEQ ID NO: 195905
  derived and/or modified CDS sequence (opt5) from hemagglutinin__InfluenzaA__ADG42403

SEQ ID NO: 196912 - RNA, 1701 nt, Artificial Sequence; identical to SEQ ID NO: 196161
  derived and/or modified CDS sequence (opt5) from hemagglutinin__InfluenzaA__ADG42413

SEQ ID NO: 196913 - RNA, 1701 nt, Artificial Sequence; identical to SEQ ID NO: 196908
  derived and/or modified CDS sequence (opt5) from hemagglutinin__InfluenzaA__ADG42423

SEQ ID NO: 196914 - RNA, 1701 nt, Artificial Sequence; identical to SEQ ID NO: 196161
  derived and/or modified CDS sequence (opt5) from hemagglutinin__InfluenzaA__ADG42443

SEQ ID NO: 196915 - RNA, 1701 nt, Artificial Sequence
  derived and/or modified CDS sequence (opt5) from hemagglutinin__InfluenzaA__ADG42453
augaaggccauccuggugguccuccuguacaccuucgcuacagccaacgcggacacgcuuugcauuggcuaucacgcuaauaacagcaccgauacaguugacaccgugcuggagaaaaaugugacagucacccauuccgugaacauccucgaagauaagcacaaugggaaacuguguaaacuuagaggaguugcuccccugcaucucggcaagugcaacauugccggguggauccugggaaauccugagugugaaucucugagcacagccuccucuuggagcuacauuguggagaccuccucuagcgacaacggcacgugcuauccgggggauuuuaucgacuacgaagaacuccgggagcagcuguccagcgucucuuccuucgaacgcuuugagaucuuccccaagaccagcucuuggccuaaucacgauuccaacaagggagugacagccgcuuguccccaugccggcgcgaaaucuuuuuauaagaaucuuauuuggcugguuaaaaagggcaacagcuacccuaaacucuccaagagcuauaucaaugacaaggggaaagaagugcugguccuuuggggcauucaccaccccuccaccucugccgaucaacagagccuguaccagaacgcugacgccuacguguucgugggaacauccagauauagcaagaaauuuaagccugagaucgcuauucggccgaaaguccgcgaucaggaggggagaaugaauuacuauuggacccucguugaacccggagacaagaucacguucgaggccacaggcaaccugguggugccucgguacgcguuugccauggaacgcaacgcugggucuggaauuaucaucuccgauacccccguccaugacugcaauacaaccugucaaaccccuaaaggcgccauuaacacaagccugcccuuccagaauauccacccgauuacgaucggcaagugcccuaaguaugugaaaucuaccaagcucagacuggcuacagggcuucggaacguucccagcauucagucccgcggacuguuuggcgccaucgccggguucaucgagggaggcuggaccgggaugguggacggaugguacggcuaucaucaccagaaugaacaaggcucuggguacgcugcggaucucaaaagcacacagaacgccauugacgagaucaccaauaaggucaacuccgugauugagaaaaugaauacgcaguuuacagcuguuggaaaggaguucaaccaccuggagaagagaguggaaaaucuuaacaaaaaggucgaugacggcuuccuggauaucuggaccuacaaugccgagcuccuggugcugcucgaaaacgagcggacccuggacuaucaugauagcaaugucaaaaaccuuuacgagaaggugcgcucucagcugaaaaacaaugccaaggaaauugggaacggauguuuugaguucuaucacaagugcgacaauacauguauggaauccguuaaaaacggcaccuacgauuauccuaaguacagcgaggaagcuaaacucaauagagaggagaucgacggggugaagcuggaaucuacacggaucuaucaaauucuugccaucuacuccacggucgcgagcucccuggugcucguugugucucugggcgcuauuagcuuuuggaugugcuccaacggaucucugcagugccgcaucuguauuuga

SEQ ID NO: 196916 - RNA, 1701 nt, Artificial Sequence; identical to SEQ ID NO: 195094
  derived and/or modified CDS sequence (opt5) from hemagglutinin__InfluenzaA__ADG42463

SEQ ID NO: 196917 - RNA, 1701 nt, Artificial Sequence; identical to SEQ ID NO: 194741
  derived and/or modified CDS sequence (opt5) from hemagglutinin__InfluenzaA__ADG42473

SEQ ID NO: 196918 - RNA, 1701 nt, Artificial Sequence; identical to SEQ ID NO: 196161
  derived and/or modified CDS sequence (opt5) from hemagglutinin__InfluenzaA__ADG42483

SEQ ID NO: 196919 - RNA, 1701 nt, Artificial Sequence; identical to SEQ ID NO: 196293
  derived and/or modified CDS sequence (opt5) from hemagglutinin__InfluenzaA__ADG42493

SEQ ID NO: 196920 - RNA, 1701 nt, Artificial Sequence; identical to SEQ ID NO: 196354
  derived and/or modified CDS sequence (opt5) from hemagglutinin__InfluenzaA__ADG42503

SEQ ID NO: 196921 - RNA, 1701 nt, Artificial Sequence; identical to SEQ ID NO: 195842
  derived and/or modified CDS sequence (opt5) from hemagglutinin__InfluenzaA__ADG42513

SEQ ID NO: 196922 - RNA, 1701 nt, Artificial Sequence
  derived and/or modified CDS sequence (opt5) from hemagglutinin__InfluenzaA__ADG42533
augaaggccauccuggugguccuccuguacaccuucgcuacagccaaagcggacacgcuuugcauuggcuaucacgcuaacaauagcaccgauacaguugacaccgugcuggagaagaacgugacagucacccauuccgugaaucuccuggaagauaaacacaacgggaagcuguguaaacugagaggaguugcgccccuccaucugggcaagugcaauaucgccggguggauucugggaaacccugagugugaaucucucagcacagcuuccucuuggagcuacaucguggagaccuccucuagcgacaauggcacgugcuauccgggggauuuuauugacuacgaagaacugcgggagcagcuuuccagcgucucuuccuucgaacgcuuugagaucuuccccaagaccagcucuuggccuaaccacgauuccaauaaaggagugacagccgcuuguccccaugccggcgccaagagcuuuuauaaaaaccugaucuggcucguuaagaaaggcaauucuuacccuaagcuguccaagagcuauauuaacgacaaagggaaggaagugcuuguccuguggggaauccaccaccccuccaccucugccgaucaacagagccucuaccagaaugcugacgccuacguguucgugggcacauccagauauagcaaaaaguuuaaaccugagauugcuauccggccgaagguccgcgaucaggaggggagaaugaacuacuauuggacccugguugaacccggagacaaaauuacguucgaggccacaggcaaucugguggugccucgguacgcguuugccauggaacgcaacgcugggucuggaaucauuaucuccgauacccccguccaugacugcaacacaaccugucaaaccccuaagggcgccaucaauacaagccuccccuuccagaacauucacccgaucacgauuggcaagugcccuaaauaugugaagucuaccaaacugagacuugcuacagggcugcggaauauccccagcauucagucccgcggacucuuuggcgccaucgccggguucaucgagggaggcuggaccgggaugguugacggaugguacggcuaucaucaccagaacgaacaaggcucuggguacgcugcggaucuuaagagcacacagaaugccauugacgagaucaccaacaaagucaauuccgugauugagaagaugaacacgcaguuuacagcugugggaaaggaguucaaucaccuugagaaaagaaucgaaaaccugaauaagaaaguugaugacggcuuccucgauauuuggaccuacaacgccgagcugcuggugcuccuggaaaaugagcggacccuugacuaucaugauagcaacgucaagaaucuguacgagaaagugcgcucucagcucaagaacaacgccaaggaaaucgggaauggauguuuugaguucuaucacaaaugcgacaacacauguauggaauccgucaagaauggcaccuacgauuauccuaaauacagcgaggaagcuaagcugaacagagaggagaucgacggggugaaacuugaaucuacacggauuuaucaaauccuggccauuuacuccacgguugcgagcucccucgugcuggucgugucucugggcgcuaucagcuuuuggaugugcuccaauggaucucuccagugccgcauuuguaucuga

SEQ ID NO: 196923 - RNA, 1701 nt, Artificial Sequence
  derived and/or modified CDS sequence (opt5) from hemagglutinin__InfluenzaA__ADG42553
augaaggccauccuggugguccuccuguacaccuucgcuacagccaacgcggacacgcuuugcauuggcuaucacgcuaauaacagcaccgauacaguugacaccgugcuggagaaaaaugugacagucacccauuccgugaaccuccuggaagauaagcacaaugggaaacuuuguaagcugagaggaguugcuccccuccaucugggcaaaugcaacaucgccggguggauucugggaaauccugagugugaaucucucagcacagccuccucuuggagcuacaucguggagaccuccucuagcgacaacggcacgugcuauccgggggauuuuauugacuacgaagaacugcgggagcagcuuuccagcgucucuuccuucgaacgcuuugagaucuuccccaagaccagcucuuggccuaaucacgauuccaacaagggagugacagccgcuuguagccaugccggcgcgaaaucuuuuuauaagaaucugaucuggcucguuaaaaagggcaacuccuaccccaaacugaauaagagcuauauuaacgacaaggggaaagaagugcuuguccuguggggaauccaccacccuuccaccucugccgaucaacagagccucuaccagaaugcugacgccuacguguucgugggcacauccagauauagcaagaaauuuaagcccgagauugcuauccggccuaaaguccgcgagcaggaagggagaaugaacuacuauuggacccugguugagccgggagauaagauuacguucgaagccacaggcaaccugguggugccccgguacgcguuugccauggagcgcaaugcugggucuggaaucauuaucuccgacaccccuguccaugauugcaacacaaccugucaaacccccaaaggcgccaucaauacaagccucccuuuccagaacauucaccccaucacgauuggcaagugcccgaaguaugugaaaucuaccaagcugagacuugcuacagggcugcggaauguuccuagcauccagucccgcggacucuuuggcgccauugccggguucaucgaaggaggcuggaccgggaugguggacggaugguacggcuaucaucaccagaacgagcaaggcucuggguacgcugcggaccugaaaagcacacagaaugccaucgaugagauuaccaacaaggucaauuccgugaucgaaaagaugaacacgcaguuuacagcuguuggaaaggaguucaaucaccuugaaaagagaauugagaaccugaauaaaaagguggacgauggcuuccucgacaucuggaccuacaacgccgaacugcugguccuccuggagaaugagcggacccuugauuaucaugacagcaacgugaaaaaccuguacgaaaagguccgcucucagcucaaaaauaacgccaaggagauugggaauggauguuuugaguucuaucacaagugcgauaacacauguauggaguccgugaaaaauggcaccuacgacuaucccaaguacagcgaagaggcuaaacugaacagagaggaaaucgaugggguuaaacuugagucuacacggaucuaucaaauucuggccaucuacuccacgguggcgagcucccucguccuggugguuucucugggcgcuauuagcuuuuggaugugcuccaauggaucucuccagugccgcaucuguauuuga

SEQ ID NO: 196924 - RNA, 1701 nt, Artificial Sequence
  derived and/or modified CDS sequence (opt5) from hemagglutinin__InfluenzaA__ADG42573
augaaggccauccuggugguccuccuguacaccuucgcuacagccaacgcggacacgcuuugcauuggcuaucacgcuaauaacagcaccgauacaguugacaccgugcuggagaaaaaugugacagucacccauuccgugaaccuccuggaagauaagcacaaugggaaacuuuguaagcugagaggaguugcuccccuccaucugggcaaaugcaacaucgccggguggauucugggaaauccugagugugaaucucucagcacagccuccucuuggagcuacaucguggagaccuccucuagcgacaacggcacgugcuauccgggggauuuuauugacuacgaagaacugcgggagcagcuuuccagcgucucuuccuucgaacgcuuugagaucuuccccaagaccagcucuuggccuaaucacgauuccaacaagggagugacagccgcuuguccccaugccggcgcgaaaucuuuuuauaagaaucugaucuggcucguuaaaaagggcaacagcuacccuaaacuguccaagagcuauauuaaugacaaggggaaagaagugcuuguccuguggggaauccaccaccccuccaccucugccgaucaacagagccucuaccagaacgcugacgccuacguguucgugggcacauccagauauagcaagaaauuuaagccugagauugcuauccggccgaaaguccgcgaucaggaggggagaaugaauuacuauuggacccugauugaacccggagacaagaucacguucgaggccacaggcaaccugguugugccucgguacgcguuugccauggaacgcaacgcugggucuggaauuaucaucuccgauacccccgugcaugacugcaauacaaccugucaaaccccuaaaggcgccauuaacacaagccuccccuuccagaauauccacccgauuacgaucggcaagugcccuaaguaugucaaaucuaccaagcugagacuugcuacagggcugcggaacgugcccagcauucagucccgcggacucuuuggcgccaucgccggguucaucgagggaggcuggaccgggaugguugacggaugguacggcuaucaucaccagaaugaacaaggcucuggguacgcugcggaucugaaaagcacacagaacgccauugacgagaucaccaauaaggugaacuccgucauugagaaaaugaauacgcaguuuacagcugugggaaaggaguucaaccaccuugagaagagaaucgaaaaucugaacaaaaagguugaugacggcuuccucgauauuuggaccuacaaugccgagcugcuggugcuccuggaaaacgagcggacccuugacuaucaugauagcaaugucaaaaagcuguacgagaaagugcgcucucagcucaagaacaacgccaaggaaaucgggaauggauguuuugaguucuaucacaaaugcgacaacacauguauggaauccgucaagaauggcaccuacgauuauccuaaauacagcgaggaagcuaagcugaacagagaggagaucgacggggugaaacuugaaucuacacggauuuaucaaauccuggccauuuacuccacgguugcgagcucccucgugcuggucgugucucugggcgcuaucagcuuuuggaugugcuccaauggaucucuccagugccgcauuuguaucuga

SEQ ID NO: 196925 - RNA, 1701 nt, Artificial Sequence
  derived and/or modified CDS sequence (opt5) from hemagglutinin__InfluenzaA__ADG42583
augaaggccauccuggugguccuccuguacaccuucgcuacagccaacgcggacacgcuuugcauuggcuaucacgcuaauaacagcaccgauacaguugacaccgugcuggagaagaaugugacagucacccauuccgugaaccuccuggaagauaagcacaaugggaaacuuuguaagcugagaggaguugcuccccuccaucugggcaaaugcaacaucgccggguggauucugggaaauccugagugugaaucucucagcacagccuccucuuggagcuacaucguggagaccuccucuagcgacaacggcacgugcuauccgggggauuuuauugacuacgaagaacugcgggagcagcuuuccagcgucucuuccuucgaacgcuuugagaucuuccccaagaccagcucuuggccuaaucacgauuccaacaagggagugacagccgcuuguccccaugccggcgcgaaaucuuuuuauaagaaucugaucuggcucguuaaaaagggcaacagcuacccuaaacuguccaagagcuauauuaaugacaaggggaaagaagugcuuguccuguggggaauccaccaccccuccaccucugccgaucaacagagccucuaccagaacgcugacuccuacguguucgugggcacaagcagauauucuaagaaauuuaagccugagauugccauccggccgaaaguccgcgaucaggaggggagaaugaauuacuauuggacccugguugaacccggagacaagauuacguucgaggcuacaggcaaccugguggugccucgguacgccuuugcgauggaacgcaacgccggguccggaaucauuaucagcgauacccccguccaugacugcaauacaaccugucaaaccccuaaaggcgcuaucaacacaucucuccccuuccagaauauucacccgaucacgauuggcaagugcccuaaguaugugaaaagcaccaagcugagacuugccacagggcugcggaacguucccuccauccagucucgcggacucuuuggcgcuauugccggguucaucgagggaggcuggaccgggaugguggacggaugguacggcuaucaucaccagaaugaacaaggcagcggguacgccgcugaucugaaauccacacagcacgcgaucgacgagauuaccaacaaggucaauagcgugaucgagaaaaugaacacgcaguuuacagccguuggaaaggaguucaaucaucuugagaagagaauugaaaaccugaauaaaaagguggaugacggcuuccucgauaucuggaccuacaacgcugagcugcugguccuccuggaaaaugagcggacccuugacuaucacgauucuaacgugaaaaaucuguacgagaagguccgcucccagcucaaaaacaacgccaaggaaauugggaauggauguuuugaguucuaucauaagugcgacaacacauguauggaaagcgugaaaaauggcaccuacgauuauccuaaguacucugaggaagccaaacugaacagagaggagaucgacgggguuaaacuugaauccacacggaucuaucaaauucuggcuaucuacagcacgguggccuccucucucguccuggugguuagccugggcgcgauuuccuuuuggaugugcucuaauggaagccuccagugccgcaucuguauuuga

SEQ ID NO: 196926 - RNA, 1701 nt, Artificial Sequence; identical to SEQ ID NO: 196338
  derived and/or modified CDS sequence (opt5) from hemagglutinin__InfluenzaA__ADG42593

SEQ ID NO: 196927 - RNA, 1701 nt, Artificial Sequence
  derived and/or modified CDS sequence (opt5) from hemagglutinin__InfluenzaA__ADG42603
augaaggccauccuggugguccuccuguacaccuucgcuacagccaacgcggacacgcuuugcauuggcuaucacgcuaauaacagcaccgauacaguugacaccgugcuggagaagaaugugacagucacccauuccgugaaccuccuggaagauaagcacaaugggaaacuuuguaagcugagaggaguugcuccccuccaucugggcaaaugcaacaucgccggguggauucugggaaauccugagugugaaucucucagcacagccuccucuuggagcuacaucguggagaccuccucuagcgacaacggcacgugcuauccgggggauuuuauugacuacgaagaacugcgggagcagcuuuccagcgucucuuccuucgaacgcuuugagaucuuccccaagaccagcucuuggccuaaucacgauuccaacaagggagugacagccgcuuguccccaugccggcgcgaaaucuuuuuauaagaaucugaucuggcucguuaaaaagggcaacagcuacccuaaacugagaaaguccuauauuaaugacaaggggaaagaagugcuuguccuguggggaauccaccaccccagcaccuccgccgaucaacagucucucuaccagaacgcugacgccuacguguucgugggcacaagccgguauuccaagaaauuuaagccugagauugcuacccgcccgaaagucagagaucaggaggggcggaugaauuacuauuggacgcugguugaacccggagacaagaucacauucgaggccaccggcaaccugguggugccucgcuacgcguuugccauggaaagaaacgcugggagcggaauuaucauuucugauacacccguccaugacugcaauaccaccugucaaacaccuaaaggcuccaucaacacgagccuccccuuccagaauauccacccgauuaccaucggcaagugcccuaaguaugugaaaucuacaaagcugcggcuugccaccgggcugcgcaacguucccagcauucaguccagaggacucuuuggcgcuaucgccggguucauugagggaggcuggacagggaugguggacggaugguacggcuaucaucaccagaaugaacaaggcucuggguacgccgcugaucugaaaagcacccagcacgcgaucgacgagaucacgaacaaggucaauuccgugauugagaaaaugaacacacaguuuaccgccguuggaaaggaguucaaucaucuugagaagcggaucgaaaaccugaauaaaaagguggaugacggcuuccucgauauuuggaccuacaacgcugagcugcugguccuccuggaaaaugagcgcacacuugacuaucacgauagcaacgugaaaaaucuguacgagaaggucagaucucagcucaaaaacaacgccaaggaaaucgggaauggauguuuugaguucuaucauaagugcgacaacaccuguauggaauccgugaaaaauggcacauacgauuauccuaaguacagcgaggaagccaaacugaaccgggaggagauugacgggguuaaacuugaaucuacgcgcaucuaucaaauccuggcuauuuacuccaccguggccagcucccucguccuggugguuucucugggcgcgaucagcuuuuggaugugcuccaauggaucucuccagugcagaauuuguaucuga

SEQ ID NO: 196928 - RNA, 1701 nt, Artificial Sequence
  derived and/or modified CDS sequence (opt5) from hemagglutinin__InfluenzaA__ADG42613
augaaggccauccuggugguccuccuguacaccuucgcuacagccaacgcggacacgcuuugcauuggcuaucacgcuaauaacagcaccgauacaguugacaccgugcuggagaaaaaugugacagucacccauuccgugaacauccucgaagauaagcacaaugggaaacuguguaaacuuagaggaguugcuccccugcaucucggcaagugcaacauugccggguggauccugggaaauccugagugugaaucucugagcacagccuccucuuggagcuacauuguggagaccuccucuagcgacaacggcacgugcuauccgggggauuuuaucgacuacgaagaacuccgggagcagcuguccagcgucucuuccuucgaacgcuuugagaucuuccccaagaccagcucuuggccuaaucacgauuccaacaagggagugacagccgcuuguccccaugccggcgcgaaaucuuuuuauaagaaucuuauuuggcugguuaaaaagggcaacagcuacccuaaacucuccaagagcuauaucaaugacaaggggaaagaagugcugguccuuuggggcauucaccaccccuccaccucugccgaucaacagagccuguaccagaacgcugacgccuacguguucgugggaacauccagauauagcaagaaauuuaagccugagaucgcuauucggccgaaaguccgcgaucaggaggggagaaugaauuacuauuggacccucguugaacccggagacaagaucacguucgaggccacaggcaaccugguggugccucgguacgcguuugccauggaacgcaacgcugggucuggaauuaucaucuccgauacccccguccaugacugcaauacaaccugucaaaccccuaaaggcgccauuaacacaagccugcccuuccagaauauccacccgauuacgaucggcaagugcccuaaguaugugaaaucuaccaagcucagacuggcuacagggcuucggaacguucccagcauucagucccgcggacuguuuggcgccaucgccggguucaucgagggaggcuggaccgggaugguggacggaugguacggcuaucaucaccagaaugaacaaggcucuggguacgcugcggaucucaaaagcacacagaacgccauugacgagaucaccaauaaggucaacuccgugauugagaaaaugaauacgcaguuuacagcuguuggaaaggaguucaaccaccuggagaagagaaucgaaaaucuuaacaaaaagguggaugacggcuuccuggauauuuggaccuacaaugccgagcuccugguccugcucgaaaacgagcggacccuggacuaucaugauagcaaugugaaaaaccuuuacgagaagguccgcucucagcugaaaaacaaugccaaggaaaucgggaacggauguuuugaguucuaucacaagugcgacaauacauguauggaauccgugaaaaacggcaccuacgauuauccuaaguacagcgaggaagcuaaacucaauagagagaagaucgacgggguuaaacuggagucuacacggauuuaucaaauccuugccauuuacuccacgguggcgagcucccugguccucgugguuucucugggcgcuaucagcuuuuggaugugcuccaacggaucucugcagugccgcauuuguaucuga

SEQ ID NO: 196929 - RNA, 1701 nt, Artificial Sequence; identical to SEQ ID NO: 196368
  derived and/or modified CDS sequence (opt5) from hemagglutinin__InfluenzaA__ADG42623

SEQ ID NO: 196930 - RNA, 1701 nt, Artificial Sequence; identical to SEQ ID NO: 194741
  derived and/or modified CDS sequence (opt5) from hemagglutinin__InfluenzaA__ADG42633

SEQ ID NO: 196931 - RNA, 1701 nt, Artificial Sequence
  derived and/or modified CDS sequence (opt5) from hemagglutinin__InfluenzaA__ADG42643
augaaggccauccuggugguccuccuguacaccuucgcuacagccaacgcggacacgcuuugcauuggcuaucacgcuaauaacagcaccgauacaguugacaccgugcuggagaaaaaugugacagucacccauuccgccaaccuccuggaagauaagcacaaugggaaacuuuguaagcugagaggagccgcuccccuccaucugggcaaaugcaacaucgccggguggauucugggaaauccugagugugaaucucucagcacagcuuccucuuggagcuacaucguggagaccuccucuagcgacaacggcacgugcuauccgggggauuuuauugacuacgaagaacugcgggagcagcuuuccagcguuucuuccuucgaacgcuuugagauguuccccaagaccagcucuuggccuaaucacgauuccaacaagggagugacagccgcguguccccaugccggcgcuaagagcuuuuauaagaaucugaucuggcucgucaaaaagggcaacucuuacccuaaacuguccaagagcuaugugaaugacaaggggaaagaaguucuugugcuguggggaauccaccaccccuccaccucugccgaucaacagagccucuaccagaacgcugacgccuacgucuucgugggcacauccagauauagcaagaaauuuaagccugagauugcgauccggccgaaagugcgcgaucaggaggggagaaugaauuacuauuggacccuggucgaacccggagacaagauuacguucgaggccacaggcaaccugguugugccucgguacgcuuuugccauggaacgcaacgcugggucuggaaucauuaucuccgauacccccgugcaugacugcaauacaaccugucaaaccccuaaaggcgccauuaacacaagccuccccuuccagaauauccacccgaucacgauuggcaagugcccuaaguaugucaaaucuaccaagcugagacuugccacagggcugcggaacgugcccagcauccagucccgcggacucuuuggcgcuauugcgggguucaucgagggaggcuggaccgggaugguugacggaugguacggcuaucaucaccagaaugaacaaggcucuggguacgccgcugaucugaaaagcacacagaacgccauugacgagaucaccaauaaggugaacuccgucaucgagaaaaugaauacgcaguuuacagccgugggaaaggaguucaaccaccuugagaagagaauugaaaaucugaacaaaaagguugaugacggcuuccucgauaucuggaccuacaaugcugagcugcuggugcuccuggaaaacgagcggacccuugacuaucaugauagcaaugucaaaaaccuguacgagaaggugcgcucucagcucaaaaacaaugccaaggaaauugggaacggauguuuugaguucuaucacaagugcgacaauacauguauggaauccgucaaaaacggcaccuacgauuauccuaaguacagcgaggaagcgaaacugaauagagaggagaucgacggggugaaacuugaaucuacacggauuuaucaaauccuggcuaucuacuccacgguugccagcucccucgugcuggucgugucucugggcgccauuagcuuuuggaugugcuccaacggaucucuccagugccgcaucuguauuuga

SEQ ID NO: 196932 - RNA, 1701 nt, Artificial Sequence
  derived and/or modified CDS sequence (opt5) from hemagglutinin__InfluenzaA__ADG42653
augaaggccauccuggugguccuccuguacaccagcgcuacagccaacgcggacacgcuuugcauuggcuaucacgcuaauaacuccaccgauacaguugacaccgugcuggagaagaaugugacagucacccauucugugaaccuccuggaagauaagcacaaugggaaacuuuguaagcugagaggaguugcuccccuccaucugggcaaaugcaacaucgccggguggauucugggaaauccugagugugaaagccucuccacagccucuagcugguccuacaucguggagaccucuagcuccgacaacggcacgugcuauccgggggauuucauugacuacgaggaacugcgggagcagcuuagcucugucuccagcuuugaacgcuucgagauguuucccaagaccucuuccuggccuaaucacgauagcaacaagggagugacagccgcuuguccccaugccggcgcgaaaucuuucuauaagaaucugaucuggcucguuaaaaagggcaacuccuacccuaaacugagcaaguccuauaucaaugacaaggggaaagaagugcuuguccuguggggcauucaccaccccucuaccagcgccgaucaacagucccucuaccagaacgcugacgccuacguguuugugggaacaagcagauauucuaagaaauucaagccugagaucgcuauucggccgaaaguccgcgaucaggaggggagaaugaauuacuauuggacccugguugaacccggagacaagaucacguuugaggccacaggcaaccugguggugccucgguacgcguucgccauggaacgcaacgcuggguccggaauuaucauuagcgauacccccguccaugacugcaauacaaccugucaaaccccuaaaggcgccaucaacacaucucuccccuuucagaauauccacccgauuacgaucggcaagugcccuaaguaugugaaaagcaccaagcugagacuugcuacagggcugcggaacguucccuccauucagucucgcggacucuucggcgccaucgccggguuuauugagggaggcuggaccgggaugguggacggaugguacggcuaucaucaccagaaugaacaaggcagcggguacgcugcggaucugaaauccacacagaacgccaucgacgagaucaccaauaaggucaacagcgugauugagaaaaugaauacgcaguucacagcuguuggaaaggaauuuaaccaccuugagaagagaaucgaaaaucugaacaaaaagguggaugacggcuuccucgauauuuggaccuacaaugccgagcugcugguccuccuggaaaacgagcggacccuugacuaucaugauucuaaugugaaaaaccuguacgagaagguccgcucccagcucaaaaacaaugccaaggaaaucgggaacggauguuucgaguuuuaucacaagugcgacaauacauguauggaaagcgugaaaaacggcaccuacgauuauccuaaguacucugaggaagcuaaacugaauagagaggagauugacgggguuaaacuugaauccacacggaucuaucaaauccuggccauuuacagcacgguggcguccucucucguccuggugguuagccugggcgcuaucuccuucuggaugugcucuaacggaagccuccagugccgcauuuguaucuga

SEQ ID NO: 196933 - RNA, 1701 nt, Artificial Sequence; identical to SEQ ID NO: 195905
  derived and/or modified CDS sequence (opt5) from hemagglutinin__InfluenzaA__ADG42663

SEQ ID NO: 196934 - RNA, 1701 nt, Artificial Sequence
  derived and/or modified CDS sequence (opt5) from hemagglutinin__InfluenzaA__ADG42673
augaaggccauccuggugguccuccuguacaccuucgcuacagccaacgcggacacgcuuugcauuggcuaucacgcuaauaacagcaccgauacaguugacaccgugcuggagaaaaaugugacagucacccauuccgugaaccuccuggaagauaagcacaaugggaaacuuuguaagcugaaaggaguugcuccccuccaucugggcaagugcaacaucgccggguggauucugggaaauccugagugugaaucucucagcacagccggcuccuggucuuacaucguggagaccagcuccucugacaacgggacgugcuauccgggagauuuuauugacuacgaagaacugagagagcagcuuagcuccgucagcucuuucgaacgguuugagaucuuccccaagaccuccagcuggccuaaucacgauucuaacaaaggcgugacagccgcuuguccccaugccggcgcgaaguccuuuuauaaaaaucugaucuggcucguuaagaaagggaacagcuacccuaagcugucuaaguccuauauuaaugacaaaggaaaggaagugcuuguccuguggggcauccaccaccccagcaccuccgccgaucaacagucucucuaccagaacgcugacgccuacguguucguggggacaagccgcuauuccaaaaaguuuaaaccugagauugcuaucagaccgaagguccgggaucaggagggacgcaugaauuacuauuggacccugguugaacccggcgacaaaauuacguucgaggccacagggaaccugguggugccuagauacgcguuugccauggaacggaacgcuggaagcggcaucauuaucucugauacccccguccaugacugcaauacaaccugucaaaccccuaagggcgccaucaacacaucccuccccuuccagaauauucacccgaucacgauugggaagugcccuaaauauguuaagagcaccaaacugcgccuugcuacaggacugagaaacgugcccucuauccagagccggggccucuuuggggccauugccggauucaucgagggcggguggaccggaaugguggacggcugguacggcuaucaucaccagaaugaacaaggguccggauacgcugcggaucugaagucuacacagaacgccaucgacggcauuaccaauaaagucaacagcgugaucgagaagaugaauacgcaguuuacagcuguugggaaggaguucaaccaccuugaaaaacgcauugagaaucugaacaagaaaguggaugacggauuccucgauaucuggaccuacaaugccgaacugcugguccuccuggagaacgaaagaacccuugacuaucaugauuccaaugugaagaaccuguacgagaaaguccggagccagcucaagaacaaugccaaggagauuggcaacggguguuuugaguucuaucacaaaugcgacaauacauguauggagucugugaagaacggcaccuacgauuauccuaaauacuccgaagaggcuaagcugaaucgcgaagagaucgacggaguuaaacuugagagcacaagaaucuaucaaauucuggccaucuacucuacgguggcguccagccucguccuggugguuucccugggcgcuauuucuuuuuggaugugcagcaacgggucccuccagugccggaucuguauuuga

SEQ ID NO: 196935 - RNA, 1701 nt, Artificial Sequence
  derived and/or modified CDS sequence (opt5) from hemagglutinin__InfluenzaA__ADG42683
augaaggccauccuggugguccuccuguacaccuucgcuacagccaacgcggacacgcuuugcauuggcuaucacgcuaauaacagcaccgauacaguugacaccgugcuggagaaaaaugugacagucacccauuccgugaacauccucgaagauaagcacaaugggaaacuguguaaacuuagaggaguugcuccccugcaucucggcaagugcaacauugccggguggauccugggaaauccugagugugaaucucugagcacagccuccucuuggagcuacauuguggagaccuccucuagcgacaacggcacgugcuauccggggaauuuuaucgauuacgaagaacuccgggagcagcuguccagcgucucuuccuucgaacgcuuugagaucuuccccaagaccagcucuuggccuaaccacgacuccaauaagggagugacagccgcuuguccccaugccggcgcgaaaucuuuuuauaagaaccuuauuuggcugguuaaaaagggcaauagcuacccuaaacucuccaagagcuauaucaacgauaaggggaaagaagugcugguccuuuggggcauucaccaccccuccaccucugccgaccaacagagccuguaccagaaugcugaugccuacguguucgugggaacauccagauauagcaagaaauuuaagccugagaucgcuauucggccgaaaguccgcgaccaggaggggagaaugaacuacuauuggacccucguugaacccggagauaagaucacguucgaggccacaggcaaccugguggugccucgguacgcguuugccauggaacgcaaugcugggucuggaauuaucaucuccgacacccccguccaugauugcaacacaaccugucaaaccccuaaaggcgccauuaauacaagccugcccuuccagaacauccacccgauuacgaucggcaagugcccuaaguaugugaaaucuaccaagcucagacuggcuacagggcuucggaauguucccagcauucagucccgcggacuguuuggcgccaucgccggguucaucgagggaggcuggaccgggaugguggacggaugguacggcuaucaucaccagaacgaacaaggcucuggguacgcugcggaccucaaaagcacacagaaugccauugaugagaucaccaacaaggucaauuccgugauugagaaaaugaacacgcaguuuacagcuguuggaaaggaguucaaucaccuggagaagagaaucgaaaaccuuaauaaaaagguggacgauggcuuccuggacauuuggaccuacaacgccgagcuccugguccugcucgaaaaugagcggacccuggauuaucaugacagcaacgugaaaaaccuuuacgagaagguccgcucucagcugaaaaauaacgccaaggaaaucgggaauggauguuuugaguucuaucacaagugcgauaacacauguauggaauccgugaaaaauggcaccuacgacuauccuaaguacagcgaggaagcuaaacucaacagagaggagaucgaugggguuaagcuggaaucuacacggauuuaucaaauccuugccauuuacuccacgguggcgagcucccugguccucgugguuucucugggcgcuaucagcuuuuggaugugcuccaauggaucucugcagugccgcauuuguaucuga

SEQ ID NO: 196936 - RNA, 1701 nt, Artificial Sequence; identical to SEQ ID NO: 195905
  derived and/or modified CDS sequence (opt5) from hemagglutinin__InfluenzaA__ADG42693

SEQ ID NO: 196937 - RNA, 1701 nt, Artificial Sequence; identical to SEQ ID NO: 196613
  derived and/or modified CDS sequence (opt5) from hemagglutinin__InfluenzaA__ADG42703

SEQ ID NO: 196938 - RNA, 1701 nt, Artificial Sequence
  derived and/or modified CDS sequence (opt5) from hemagglutinin__InfluenzaA__ADG42723
augaaggccauccuggugguccuccuguacaccuucgcuacagccaacgcggacacgcuuugcauuggcuaucacgcuaauaacagcaccgauacaguugacaccgugcuggagaaaaaugugacagucacccauuccgugaaccuccuggaagauaagcacaaugggaaacuuuguaagcugagaggaguugcuccccuccaucugggcaaaugcaacaucgccggguggauucugggaaauccugagugugaaucucucagcacagccuccucuuggagcuacaucguggagaccuccucuagcgacaacggcacgugcuauccgggggauuuuauugacuacgaagaacugcgggagcagcuuuccagcgucucuuccuucgaacgcuuugagaucuuccccaagaccagcucuuggccuaaucacgauuccaacaagggagugacagccgcuuguccccaugccggcgcgaaaucuuuuuauaagaaucugaucuggcucguuaaaaagggcaacagcuacccuaaacuguccaagagcuauauuaaugacaaggggaaagaagugcuuguccuguggggaauccaccaccccuccaccucugccgaucaacagagccucuaccagaacgcugacgccuacguguucgugggcacauccagauauagcaagaaauuuaagccugagauggcuauucggccgaaaguccgcgaucaggaggggagaaugaauuacuauuggacccugguugaacccggagacaagaucacguucgaggccacaggcaaccugguggugccucgguacgcguuugccauggaacgcaacgcugggucuggaauuaucauuuccgauacccccguccaugacugcaauacaaccugucaaaccccuaaaggcgccaucaacacaagccuccccuuccagaauauccacccgauuacgaucggcaagugcccuaaguaugugaaaucuaccaagcugagacuugcuacagggcugcggaacguucccagcauucagucccgcggacucuuuggcgccaucgccggguucauugagggaggcuggaccgggaugguggacggaugguacggcuaucaucaccagaaugaacaaggcucuggguacgcugcggaucugaaaagcacacagaacgccaucgacaagaucaccaauaaagucaacuccgugauugagaagaugaauacgcaguuuacagcuguuggaaaggaguucaaccaccuugagaaaagaaucgagaaucugaacaagaaaguggaugacggcuuccucgauauuuggaccuacaaugccgaacugcugguccuccuggagaacgaacggacccuugacuaucaugauagcaaugugaagaaccuguacgagaaaguccgcucucagcucaagaacaaugccaaggagaucgggaacggauguuuugaguucuaucacaaaugcgacaauacauguauggaauccgugaagaacggcaccuacgauuauccuaaauacagcgaagaggcuaagcugaauagagaagagauugacgggguuaaacuugagucuacacggaucuaucaaauccuggccauuuacuccacgguggcgagcucccucguccuggugguuucucugggcgcuaucagcuuuuggaugugcuccaacggaucucuccagugccgcauuuguaucuga

SEQ ID NO: 196939 - RNA, 1701 nt, Artificial Sequence; identical to SEQ ID NO: 196368
  derived and/or modified CDS sequence (opt5) from hemagglutinin__InfluenzaA__ADG42743

SEQ ID NO: 196940 - RNA, 1701 nt, Artificial Sequence
  derived and/or modified CDS sequence (opt5) from hemagglutinin__InfluenzaA__ADG42753
augaaggccauccuggugguccuccuguacaccuucgcuacagccaacgcggacacgcuuugcauuggcuaucacgcuaauaacagcaccgauacaguugacaccgugcuggagaagaaugugacagucacccauuccgugaaccuccuggaagauaagcacaaugggaaacuuuguaagcugagaggaguugcuccccuccaucugggcaaaugcaacaucgccggguggauucugggaaauccugagugugaaucucucagcacagccuccucuuggagcuacaucguggagaccuccucuagcgacaacggcacgugcuauccgggggauuuuauugacuacgaagaacugcgggagcagcuuuccagcgucucuuccuucgaacgcuuugagaucuuccccaagaccagcucuuggccuaaucacgauuccaacaagggagugacagccgcuuguccccaugccggcgcgaaaucuuuuuauaagaaucugaucuggcucguuaaaaagggcaacagcuacccuaaacuguccaagagcuauauuaaugacaaggggaaagaagugcuuguccuguggggaauccaccaccccuccaccucuacagaucaacagagccucuaccagaacgccgacgcuuacguguucgugggcaccuccagauauagcaagaaauuuaagccugagauugccauccggccgaaaguccgcgaucaggaggggagaaugaauuacuauuggacgcugguugaacccggagacaagauuacauucgaggcuaccggcaaccugguggugccucgguacgccuuugcgauggaacgcaacucuggguccggaaucauuaucagcgauacacccguccaugacugcaauaccaccugucaaacaccuaaaggcgccaucaacacgucucuccccuuccagaauauucacccgaucaccauuggcaagugcccuaaguaugugaaaagcacaaagcugagacuugcuaccgggcugcggaacguucccuccauccagucucgcggacucuuuggcgccauugcuggguucaucgagggaggcuggacagggaugguggacggaugguacggcuaucaucaccagaaugaacaaggcagcggguacgccgccgaucugaaauccacccagaacgcuaucgacgagauuacgaauaaggucaacagcgugaucgagaaaaugaauacacaguuuaccgcgguuggaaaggaguucaaccaccuugagaagagaauugaaaaucugaacaaaaagguggaugacggcuuccucgauaucuggaccuacaaugccgagcugcugguccuccuggaaaacgagcggacacuugacuaucaugauucuaaugugaaaaaccuguacgagaagguccgcucccagcucaaaaacaaugcuaaggaaauugggaacggauguuuugaguucuaucacaagugcgacaauaccuguauggaaagcgugaaaaacggcacauacgauuauccuaaguacucugaggaagccaaacugaauagagaggagaucgacgggguuaaacuugaauccacgcggaucuaucaaauucuggccaucuacagcaccguggcuuccucucucguccuggugguuagccugggcgccauuuccuuuuggaugugcucuaacggaagccuccagugccgcaucuguauuuga

SEQ ID NO: 196941 - RNA, 1701 nt, Artificial Sequence; identical to SEQ ID NO: 195905
  derived and/or modified CDS sequence (opt5) from hemagglutinin__InfluenzaA__ADG42763

SEQ ID NO: 196942 - RNA, 1701 nt, Artificial Sequence; identical to SEQ ID NO: 195905
  derived and/or modified CDS sequence (opt5) from hemagglutinin__InfluenzaA__ADG42773

SEQ ID NO: 196943 - RNA, 1701 nt, Artificial Sequence
  derived and/or modified CDS sequence (opt5) from hemagglutinin__InfluenzaA__ADG42783
augaaggccauccuggugguccuccuguacaccuucgcuacagccaacgcggacacgcuuugcauuggcuaucacgcuaauaacagcaccgauacaguugacaccgugcuggagaaaaaugugacagucacccauuccgugaaccuccuggaagauaagcacaaugggaaacuuuguaagcugagaggaguugcuccccuccaucugggcaaaugcaacaucgccggguggauucugggaaauccugagugugaaucucucagcacagccuccucuuggagcuacaucguggagaccuccucuagcgacaacggcacgugcuauccgggggauuuuauugacuacgaagaacugcgggagcagcuuuccagcgucucuuccuucgaacgcuuugagauguuccccaagaccagcucuuggccuaaucacgauuccaacaagggagugacagccgcuuguccccaugccggcgcgaaaucuuuuuauaagaaucugaucuggcucguuaaaaagggcaacagcuacccuaaacuguccaagagcuauaucaaugacaaggggaaagaagugcuuguccuguggggcauucaccaccccuccaccucuacagaucaacagagccucuaccagaacgccgacgcuuacguguucgugggaaccuccagauauagcaagaaauuuaagccugagaucgccauucggccgaaaguccgcgaucaggaggggagaaugaauuacuauuggacgcugguugaacccggagacaagaucacauucgaggcuaccggcaaccugguggugccucgguacgccuuugcgauggaacgcaacgccgggucuggaauuaucauuuccgauacacccguccaugacugcaauaccaccugucaaacaccuaaaggcgcuaucaacacgagccuccccuuccagaauauccacccgauuaccaucggcaagugcccuaaguaugugaaaucuacaaagcugagacuugccaccgggcugcggaacguucccagcauucagucccgcggacucuuuggcgcuaucgccggguucauugagggaggcuggacagggaugguggacggaugguacggcuaucaucaccagaaugaacaaggcucuggguacgccgcugaucugaaaagcacccagaacgcgaucgacaagaucacgaauaaagucaacuccgugauugagaagaugaauacacaguuuaccgccguuggaaaggaguucaaccaccuugagaaaagaaucgagaaucugaacaagaaaguggaugacggcuuccucgauauuuggaccuacaaugcugaacugcugguccuccuggagaacgaacggacacuugacuaucaugauagcaaugugaagaaccuguacgagaaaguccgcucucagcucaagaacaaugccaaggagaucgggaacggauguuuugaguucuaucacaaaugcgacaauaccuguauggaauccgugaagaacggcacauacgauuauccuaaauacagcgaagaggccaagcugaauagagaagagauugacgggguuaaacuugagucuacgcggaucuaucaaauccuggcuauuuacuccaccguggccagcucccucguccuggugguuucucugggcgcgaucagcuuuuggaugugcuccaacggaucucuccagugccgcauuuguaucuga

SEQ ID NO: 196944 - RNA, 1701 nt, Artificial Sequence; identical to SEQ ID NO: 195905
  derived and/or modified CDS sequence (opt5) from hemagglutinin__InfluenzaA__ADG42793

SEQ ID NO: 196945 - RNA, 1701 nt, Artificial Sequence; identical to SEQ ID NO: 196943
  derived and/or modified CDS sequence (opt5) from hemagglutinin__InfluenzaA__ADG42803

SEQ ID NO: 196946 - RNA, 1701 nt, Artificial Sequence; identical to SEQ ID NO: 196293
  derived and/or modified CDS sequence (opt5) from hemagglutinin__InfluenzaA__ADG42813

SEQ ID NO: 196947 - RNA, 1701 nt, Artificial Sequence; identical to SEQ ID NO: 196436
  derived and/or modified CDS sequence (opt5) from hemagglutinin__InfluenzaA__ADG42823

SEQ ID NO: 196948 - RNA, 1701 nt, Artificial Sequence; identical to SEQ ID NO: 196338
  derived and/or modified CDS sequence (opt5) from hemagglutinin__InfluenzaA__ADG42833

SEQ ID NO: 196949 - RNA, 1701 nt, Artificial Sequence; identical to SEQ ID NO: 195905
  derived and/or modified CDS sequence (opt5) from hemagglutinin__InfluenzaA__ADG42843

SEQ ID NO: 196950 - RNA, 1701 nt, Artificial Sequence; identical to SEQ ID NO: 195905
  derived and/or modified CDS sequence (opt5) from hemagglutinin__InfluenzaA__ADG42853

SEQ ID NO: 196951 - RNA, 1701 nt, Artificial Sequence; identical to SEQ ID NO: 196459
  derived and/or modified CDS sequence (opt5) from hemagglutinin__InfluenzaA__ADG42863

SEQ ID NO: 196952 - RNA, 1701 nt, Artificial Sequence; identical to SEQ ID NO: 196479
  derived and/or modified CDS sequence (opt5) from hemagglutinin__InfluenzaA__ADG42883

SEQ ID NO: 196953 - RNA, 1701 nt, Artificial Sequence
  derived and/or modified CDS sequence (opt5) from hemagglutinin__InfluenzaA__ADG42893
augaaggccauccuggugguccuccuguacaccuucgcuacagccaacgcggacacgcuuugcauuggcuaucacgcuaauaacagcaccgauacaguugacaccgugcuggagaaaaaugugacagucacccauuccgugaaccuccuggaagauaagcacaaugggaaacuuuguaagcugagaggaguugcuccccuccaucugggcaaaugcaacaucgccggguggauucugggaaauccugagugugaaucucucagcacagccuccucuuggagcuacaucguggagaccuccucuagcgacaacggcacgugcuauccgggggauuuuauugacuacgaagaacugcgggagcagcuuuccagcgucucuuccuucgaacgcuuugagaucuuccccaagaccagcucuuggccuaaucacgauuccaacaagggagugacagccgcuuguccccaugccggcgcgaaaucuuuuuauaagaaucugaucuggcucguuaaaaagggcaacagcuacccuaaacuguccaagagcuauauuaaugacaaggggaaagaagugcuuguccuguggggaauccaccaccccuccaccucugccgaucaacagagccucuaccagaacgcugacgccuacguguucgugggcacauccagauauagcaagaaauuuaagccugagauugcuauccggccgaaaguccgcgaucaggaggggagaaugaauuacuauuggacccugguugaacccggagacaagauuacguucgaggccacaggcaaccugguggugccucgguacgcguuugccauggaacgcaacgcugggucuggaaucauuaucuccgauacccccguccaugacugcaauacaaccugucaaaccccuaaaggcgccaucaacacaagccuccccuuccagaauauucacccgaucacgauuggcaagugcccuaaguaugugaaaucuaccaaccugagacuugcuacagggcugcggaauguucccagcauccagucccgcggacucuuuggcgccauugccggguucaucgagggaggcuggaccgggaugguggacggaugguacggcuaucaucaccagaacgaacaaggcucuggguacgcugcggaucuuaagagcacacagaaugccaucgacgagauuaccaacaaagucaauuccgugaucgagaagaugaacacgcaguuuacagcuguuggaaaagaguucaaucaccuggagaagagaauugaaaaccugaauaagaaaguggaugacggcuuccucgauaucuggaccuacaacgccgagcugcugguccuccuggaaaaugagcggacccuugacuaucaugauagcaacgugaagaaccuguacgagaaaguccgcucucagcucaagaauaacgccaaagaaauugggaauggauguuuugaguucuaucacaagugcgacaacacauguauggaauccgugaagaauggcaccuacgauuauccuaaauacagcgaggaagcuaagcugaacagagaggagaucgacgggguuaaacuugaaucuacacggaucuaucaaauucuggccaucuacuccacgguggcgagcucccucguccuggugguuucucugggcgcuauuagcuuuuggaugugcuccaauggaucucuccagugccgcaucuguauuuga

SEQ ID NO: 196954 - RNA, 1701 nt, Artificial Sequence; identical to SEQ ID NO: 194741
  derived and/or modified CDS sequence (opt5) from hemagglutinin__InfluenzaA__ADG42903

SEQ ID NO: 196955 - RNA, 1701 nt, Artificial Sequence; identical to SEQ ID NO: 195905
  derived and/or modified CDS sequence (opt5) from hemagglutinin__InfluenzaA__ADG42913

SEQ ID NO: 196956 - RNA, 1701 nt, Artificial Sequence; identical to SEQ ID NO: 196469
  derived and/or modified CDS sequence (opt5) from hemagglutinin__InfluenzaA__ADG42923

SEQ ID NO: 196957 - RNA, 1701 nt, Artificial Sequence
  derived and/or modified CDS sequence (opt5) from hemagglutinin__InfluenzaA__ADG57087
augaaggccauccuggugguccuccuguacaccuucgcuacagccaacgcggacacgcuuugcauuggcuaucacgcuaauaacagcaccgauacaguugacaccgugcuggagaagaaugugacagucacccauuccgugaaccuccuggaagauaagcacaaugggaaacuuuguaagcugagaggaguugcuccccuccaucugggcaaaugcaacaucgccggguggauucugggaaauccugagugugaaucucucagcacagccuccucuuggagcuacaucguggagaccuccucuagcgacaacggcacgugcuauccgggggauuuuauugacuacgaagaacugcgggagcagcuuuccagcgucucuuccuucgaacgcuuugagaucuuccccaagaccagcucuuggccuaaucacgauuccaacaagggagugacagccgcuuguccccaugccggcgcgaaaucuuuuuauaagaaucugaucuggcucguuaaaaagggcaacagcuacccuaaacuguccaagagcuauauuaaugacaaggggaaagaagugcuuguccuguggggaauccaccaccccuccaccucugccgaucaacagagccucuaccagaacgcugacgccuacguguucgugggcacauccagauauagcaagaaauuuaagccugagauugcuauccggccgaaaguccgcgaucaggaggggagaaugaauuacuauuggacccugguugaacccggagacaagauuacguucgaggccacaggcaaccugguggugccucgguacgcguuugccauggaacgcaacgcugggucuggaaucauuaucuccgauacccccguccaugacugcaauacaaccugucaaaccccuaaaggcgccaucaacacaagccuccccuuccagaauauucacccgaucacgauuggcaagugcccuaaguaugugaaaucuaccaagcugagacuugcuacagggcugcggaacguucccagcauccagucccgcggacucuuuggcgccauugccggguucaucgagggaggcuggaccgggaugguggacggaugguacggcuaucaucaccagaaugaacaaggcucuggguacgcugcggaucugaaaagcacacagaacgccaucgacgagauuaccaauaaggucaacuccgugaucgagaaaaugaauacgcaguuuacagcuguuggaaaggaguucaaccaccuugagaagagaauugaaaaucugaacaaaaagguggaugacggcuuccucgauaucuggaccuacaaugccgagcugcugguccuccuggaaaacgagcggacccuugacuaucaugauagcaaugugaaaaaccuguacgagaagguccgcucucagcucaaaaacaaugccaaggaaauugggaacggauguuuugaguucuaucacaagugcgacaauacauguauggaauccgugaaaaacggcaccuacgauuauccuaaguacagcgaggaagcuaaacugaauagagaggagaucgacgggguuaaacuugaaucuacacggaucuaucaaauucuggccaucuacuccacgguggcgauuagccucguccuggugguuucccugggcgcuaucucuuuuuggaugugcagcaacggaucccuccgcugcagaauuuguaucuga

SEQ ID NO: 196958 - RNA, 1701 nt, Artificial Sequence; identical to SEQ ID NO: 194741
  derived and/or modified CDS sequence (opt5) from hemagglutinin__InfluenzaA__ADG57088

SEQ ID NO: 196959 - RNA, 1701 nt, Artificial Sequence
  derived and/or modified CDS sequence (opt5) from hemagglutinin__InfluenzaA__ADG57089
auggaggccauccuggugguccuccuguacaccuucgcuacagccaacgcggacacgcuuugcauuggcuaucacgcuaauaacagcaccgauacaguugacaccgugcuggaaaagaaugugacagucacccauuccgugaaccuccuggaggauaagcacaaugggaaacuuuguaagcugagaggaguugcgccccuccaucugggcaagugcaacaucgccggguggauucugggaaauccugaaugugagucucucagcacagcuuccucuuggagcuacaucguggaaaccuccucuagcgacaacggcacgugcuauccgggggauuuuauucaguacgaggagcugcgggaacaacuuuccagcgucucuuccuucgagcgcuuugaaaucuuccccaaaaccagcucuuggccuaaucacgacuccaacaagggagugacagccgcuuguccccaugccggcgccaagagcuuuuauaaaaaucugaucuggcucguuaagaaaggcaacucuuacccuaagcuguccaaaagcuauauuaaugauaaggggaaggaggugcuuguccuguggggaauccaccaccccuccaccucugccgaccagcagagccucuaccagaacgcugaugccuacguguucgugggcuccagcagauauucuaaaaaguuuaaaccugagauugcuauccggccgaagguccgcgaccaagaagggagaaugaauuacuauuggacacugguugagcccggagauaaaauuaccuucgaagccacgggcaaccugguggugccucgguacgcguuugccauggagcgcaacgcuggguccggaaucauuaucagcgacacacccguccaugauugcaauaccacaugucagaccccuaagggcgccaucaacaccucucuccccuuccacaauauucauccgaucacaauuggcaaaugcccuaaguauguuaagagcacgaaacugagacuugcuaccgggcugcggaacgugcccuccauccagucucgcggacucuuuggcgccauugccggguucaucgaaggaggcuggacagggaugguggacggaugguacggcuaucaccaccagaaugagcaaggcagcggguacgcugcggaccugaaguccacccagaacgccaucgaugagauuacaaauaaagucaacagcgugaucgaaaagaugaauacccaguuuacggcuguuggaaaagaguucaaccaucuugaaaagagaauugagaaucugaacaagaaaguggacgauggcuuccucgacaucuggacauacaaugccgaacugcugguccuccuggagaacgagcggacccuugauuaucacgacucuaaugugaagaaccuguacgaaaaaguccgcucccagcucaagaacaaugccgaggaaauugggaacggauguuuugaguucuaucauaaaugcgauaauaccuguauggaaagcgugaagaacggcacauacgacuauccuaaguacucugaggaggcuaaacugaauagagaagagaucgaugggguuaaacuugaauccacccggaucuaucaaauucuggccaucuacagcacaguggcguccucucucguccuggugguuagccugggcgcuauuuccuuuuggaugugcucuaacggaagccuccagugccgcaucuguauuuga

SEQ ID NO: 196960 - RNA, 1701 nt, Artificial Sequence
  derived and/or modified CDS sequence (opt5) from hemagglutinin__InfluenzaA__ADG57090
augaaggccauccuggugguccuccuguacaccuucgcuacagccaacgcggacacgcuuugcauuggcuaucacgcuaauaacagcaccgauacaguugacaccgugcuggagaaaaaugugacagucacccauuccgugaaccuccuggaagauaagcacaaugggaaacuuuguaagcugagaggaguugcuccccuccaucugggcaaaugcaacaucgccggguggauucugggaaauccugagugugaaucucucagcacagccuccucuuggagcuacaucguggagaccuccucuagcgacaacggcacgugcuauccgggggauuuuauugacuacgaagaacugcgggagcagcuuuccagcgucucuuccuucgaacgcuuugagaucuuccccaagaccagcucuuggccuaaucacgauuccaacaagggagugacagccgcuuguccccaugccggcgcgaaaucuuuuuauaagaaucugaucuggcucguuaaaaagggcaacagcuacccuaaacuguccaagagcuauauuaaugacaaggggaaagaagugcuuguccuguggggaauccaccaccccuccaccucugccgaucaacagagcauuuaccagaacgcugacgccuacguguucgugggcacauccagauauagcaagaaauuuaagccugagaucgcuauucggccgaaaguccgcgaucaggaggggagaaugaauuacuauuggacccucguugaacccggagacaagaucacguucgaggccacaggcaaccugguggugccucgguacgcguuugccauggaacgcaacgcugggucuggaauuaucaucuccgauacccccguccaugacugcaauacaaccugucaaaccccuaaaggcgccauuaacacaagccugcccuuccagaauauccacccgauuacgaucggcaagugcccuaaguaugugaaaucuaccaagcucagacuggcuacagggcuucggaacguucccagcauucagucccgcggacuguuuggcgccaucgccggguucaucgagggaggcuggaccgggaugguggacggaugguacggcuaucaucaccagaaugaacaaggcucuggguacgcugcggaucucaaaagcacacagaacgccauugacgagaucaccaauaaggucaacuccgugauugagaaaaugaauacgcaguuuacagcuguuggaaaggaguucaaccaccuggagaagagaaucgaaaaucuuaacaaaaagguggaugacggcuuccuggauauuuggaccuacaaugcccagcuccugguccugcucgagaacgaacggacccuggacuaucaugauagcaaugugaaaaaccuuuacgagaagguccgcucucaacugaaaaacaaugccaaggagaucgggaacggauguuuugaguucuaucacaagugcgacaauacauguauggaauccgugaaaaacggcaccuacgauuauccuaaguacagcgaagaggcuaaacucaauagagaagagaucgacgggguuaagcuggagucuacacggauuuaucagauccuugccauuuacuccacgguggcgagcucccugguccucgugguuucucugggcgcuaucagcuuuuggaugugcuccaacggaucucugcagugccgcauuuguaucuga

SEQ ID NO: 196961 - RNA, 1701 nt, Artificial Sequence
  derived and/or modified CDS sequence (opt5) from hemagglutinin__InfluenzaA__ADG57091
auggaggccauccuggugguccuccuguacaccuucgcuacagccaacgcggacacgcuuugcauuggcuaucacgcuaauaacagcaccgauacaguugacaccgugcuggaaaagaaugugacagucacccauuccgugaaccuccuggaggauaaacacaaugggaaacuuuguaagcugagaggaguugcgccccuccaucugggcaagugcaacaucgccggguggauucugggaaauccugaaugugagucucucagcacagcuuccucuuggagcuacaucguggaaaccuccucuagcgacaacggcacgugcuauccgggggauuuuauugacuacgaggagcugcgggaacagcuuuccagcgucucuuccuucgagcgcuuugaaaucuuccccaaaaccagcucuuggccuaaucacgauuccaacaagggagugacagccgcuuguccccaugccggcgccaagagcuuuuauaaaaaucugaucuggcucguuaagaaaggcaacucuuacccuaagcuguccaaaagcuauauuaaugacaaggggaaggaggugcuuguccuguggggaauccaccaccccuccaccucugccgaucaacagagccucuaccagaacgcugacgccuacguguucgugggcuccagcagauauucuaaaaaguuuaaaccugagauugcuauccggccgaagguccgcgaucaggaagggagaaugaauuacuauuggacacugguugagcccggagacaaaauuaccuucgaagccacgggcaaccugguggugccucgguacgcguuugccauggagcgcaacgcuggguccggaaucauuaucagcgauacacccguccaugacugcaauaccacaugucaaaccccuaagggcgccaucaacaccucucuccccuuccacaauauucauccgaucacaauuggcaaaugcccuaaguauguuaagagcacgaaacugagacuugcuaccgggcugcggaacgugcccuccauccagucucgcggacucuuuggcgccauugccggguucaucgaaagaggauggacaggcaugguggacgggugguacggauaucaccaccagaaugagcagggcagcggcuacgcugcggaucugaaguccacccaaaacgccaucgacgagauuacaaauaaagucaacagcgugaucgaaaagaugaauacccaguuuacggcuguugggaaagaguucaaccaucuugaaaagcggauugagaaucugaacaagaaaguggaugacggauuccucgauaucuggacauacaaugccgaacugcugguccuccuggagaacgagcgcacccuugacuaucacgauucuaaugugaagaaccuguacgaaaaagucagaucccagcucaagaacaaugccaaagagauuggcaacggguguuuugaguucuaucauaagugcgacaauaccuguauggaaagcgugaagaacggaacauacgauuauccuaaauacucugaagaggcuaagcugaaucgggaggaaaucgacggcguuaaacuugaguccacccgcaucuaucagauucuggccaucuacagcacaguggcguccucucucguccuggugguuagccugggggcuauuuccuuuuggaugugcucuaacggcagccuccaaugcagaaucuguauuuga

SEQ ID NO: 196962 - RNA, 1701 nt, Artificial Sequence
  derived and/or modified CDS sequence (opt5) from hemagglutinin__InfluenzaA__ADG57092
augaaggccauccuggugguccuccuguacaccuucgcuacagccaacgcggacacgcuuugcauuggcuaucacgcuaauaacagcaccgauacaguugacaccgugcuggagaagaaugugacagucacccauuccgugaaccuccuggaagauaagcacaaugggaaacuuuguaagcugagaggaguugcuccccuccaucugggcaaaugcaacaucgccggguggauucugggaaauccugagugugaaucucucagcacagccuccucuuggagcuacaucguggagaccuccucuagcgacaacggcacgugcuauccgggggauuuuauugacuacgaagaacugcgggagcagcuuuccagcgucucuuccuucgaacgcuuugagaucuuccccaagaccagcucuuggccuaaucacgauuccaacaagggagugacagccgcuuguccccaugccggcgcgaaaucuuuuuauaagaaucugaucuggcucguuaaaaagggcaacagcuacccuaaacugauuaaguccuauaucaaugacaaggggaaagaagugcuuguccuguggggcauucaccaccccagcaccuccgccgaucaacagucucucuaccagaacgcugacgccuacguguucgugggaacaagcagauauuccaagaaauuuaagccugagaucgcuauucggccgaaaguccgcgaucaggaggggagaaugaauuacuauuggacccugguugaacccggagacaagaucacguucgaggccacaggcaaccugguggugccucgguacgcguuugccauggaacgcaacgcugggagcggaauuaucaucucugauacccccguccaugacugcaauacaaccugucaaaccccuaaaggcgccauuaacacaucccuccccuuccagaauauccacccgauuacgaucggcaagugcccuaaguaugugaaaagcaccaagcugagacuugcuacagggcugcggaacguucccucuauucagagccgcggacucuuuggcgccaucgccggguucaucgagggaggcuggaccgggaugguggacggaugguacggcuaucaucaccagaaugaacaaggcuccggguacgcugcggaucugaaaucuacacagaacgccauugacgagaucaccaauaaggucaacagcgugauugagaaaaugaauacgcaguuuacagcuguuggaaaggaguucaaccaccuugagaagagaaucgaaaaucugaacaaaaagguggaugacggcuuccucgauauuuggaccuacaaugccgagcugcugguccuccuggaaaacgagcggacccuugacuaucaugauuccaaugugaaaaaccuguacgagaagguccgcagccagcucaaaaacaaugccaaggaaaucgggaacggauguuuugaguucuaucacaagugcgacaauacauguauggaaucugugaaaaacggcaccuacgauuauccuaaguacuccgaggaagcuaaacugaauagagaggagaucgacgggguuaaacuugaaagcacacggauuuaucaaauccuggccauuuacucuacgguggcguccagccucguccuggugguuucccugggcgcuaucucuuuuuggaugugcagcaacggaucccuccagugccgcauuuguaucuga

SEQ ID NO: 196963 - RNA, 1701 nt, Artificial Sequence
  derived and/or modified CDS sequence (opt5) from hemagglutinin__InfluenzaA__ADG57093
auggaggccauccuggugguccuccuguacaccuucgcuacagccaacgcggacacgcuuugcauuggcuaucacgcuaauaacagcaccgauacaguugacaccgugcuggaaaagaaugugacagucacccauuccgugaaccuccuggaggauaaacacaaugggaaacuuuguaagcugagaggaguugcgccccuccaucugggcaagugcaacaucgccggguggauucugggaaauccugaaugugagucucucagcacagcuuccucuuggagcuacaucguggaaaccuccucuagcgacaacggcacgugcuauccgggggauuuuauugacuacgaggagcugcgggaacagcuuuccagcgucucuuccuucgagcgcuuugaaaucuuccccaaaaccagcucuuggccuaaucacgauuccaacaagggagugacagccgcuuguccccaugccggcgccaagagcuuuuauaaaaaucugaucuggcucguuaagaaaggcaacucuuacccuaagcuguccaaaagcuauauuaaugacaaggggaaggagauccuugugcuguggggcauucaccaccccuccaccucugccgaucaacagagccucuaccagaacgcugacgccuacgucuucgugugguccagcagauauucuaaaaaguuuaaaccugagaucgcuauucggccgaaggugcgcgaucaggaaggaagaaugaauuacuauuggacacuggucgagcccggggacaaaaucaccuucgaagccacgggaaaccugcucguuccucgguacgcguuugccauggagcgcaacgcuggcuccgggauuaucaucagcgauacacccgugcaugacugcaauaccacaugucaaaccccuaagggagccauuaacaccucucugcccuuccacaauauccauccgauuacaaucggcaaaugcccuaaguaugucaagagcacgaaacuuagacuggcuaccggccuccggaacgugcccuccauucagucucgcgggcuguuuggagccaucgccggcuucaucgaagggggauggacaggcaugguggacgggugguacggauaucaccaccagaaugagcagggcagcggcuacgcugcggaucuuaaguccacccaaaacgccauugacgagaucacaaauaaaguuaacagcgugauugaaaagaugaauacccaguuuacggcugucgggaaagaguucaaccaucuggaaaagagaaucgagaaucucaacaagaaaguggaugacggauuccuggauauuuggacauacaaugccgaacugcucguucugcuugagaacgagcggacccuggacuaucacgauucuaaugugaagaaccucuacgaaaaaguccgcucccagcugaagaacaaugccaaagagaucggcaacggguguuuugaguucuaucauaagugcgacaauaccuguauggaaagcgugaagaacggaacauacgauuauccuaaauacucugaagaggcuaaacuuaauagagaggaaaucgacggcgucaagcuggaguccacccggauuuaucagauccucgccauuuacagcacaguggcguccucucugguucugguggucagccucggggcuaucuccuuuuggaugugcucuaacggcagccugcaaugccgcauuuguaucuga

SEQ ID NO: 196964 - RNA, 1701 nt, Artificial Sequence
  derived and/or modified CDS sequence (opt5) from hemagglutinin__InfluenzaA__ADG57094
augaaggccauccuggugguccuccuguacaccuucgcuacagccaacgcggacacgcuuugcguuggcuaucacgcuaauaacagcaccgauacaguggacaccgugcuggagaagaaugucacagugacccauuccguuaaccuccuggaagauaagcacaaugggaaacuuuguaagcugagaggaguggcuccccuccaucugggcaaaugcaacauugccggguggauccugggaaauccugagugugaaucucucagcacagccuccucuuggagcuacauugucgagaccuccucuagcgacaacggcacgugcuauccgggggauuuuaucgacuacgaagaacugcgggagcagcuuuccagcgugucuuccuucgaacgcuuugagauuuuccccaagaccagcucuuggccuaaucacgauuccaacaagggaguuacagccgcuuguccccaugccggcgcgaaaucuuuuuauaagaaucugaucuggcucgugaaaaagggcaacagcuacccuaaacuguccaagagcuauaucaaugacaaggggaaagaaguccuugugcuguggggcauucaccaccccuccaccucugccgaucaacagagccucuaccagaacgcugacgccuacguguucgucggaacauccagauauagcaagaaauuuaagccugagaucgcuauucggccgaaaguucgcgauagagaggggcggaugaauuacuauuggacccugguggaacccggagacaagaucacguucgaggccacaggcaaccugguggucccucgcuacgcguuugccauggaaagaaacgcugggucuggaauuaucauuuccgauacccccgugcaugacugcaauacaaccugucagaccccuaaaggcgccaucaacacaagccuccccuuccaaaauauccacccgauuacgaucggcaagugcccuaaguauguuaaaucuaccaagcugcggcuugcuacagggcugcgcaacgugcccagcauucaguccagaggacucuuuggcgccaucgccggguucauugagggaggcuggaccgggauggucgacggaugguacggcuaucaucaccagaaugaacagggcucuggguacgcugcggaucugaaaagcacacaaaacgccaucgacgagaucaccaauaaggugaacuccguuauugagaaaaugaauacgcaguuuacagcugugggaaaggaguucaaccaccuugagaagcggaucgaaaaucugaacaaaaaggucgaugacggcuuccucgauauuuggaccuacaaugccgagcugcuggugcuccuggaaaacgagcgcacccuugacuaucaugauagcaaugucaaaaaccuguacgagaaggugagaucucagcucaaaaacaaugccaaggaaaucgggaacggauguuuugaguucuaucacaagugcgacaauacauguauggaauccguuaaaaacggcaccuacgauuauccuaaguacagcgaggaagcuaaacugaaucgggaggagauugacggggugaaacuugaaucuacacgcaucuaucagauccuggccauuuacuccacggucgcgagcucccucgugcugguugugucucugggcgcuaucagcuuuuggaugugcuccaacggaucucuccaaugcagaauuuguaucuga

SEQ ID NO: 196965 - RNA, 1701 nt, Artificial Sequence; identical to SEQ ID NO: 194741
  derived and/or modified CDS sequence (opt5) from hemagglutinin__InfluenzaA__ADG57095

SEQ ID NO: 196966 - RNA, 1701 nt, Artificial Sequence
  derived and/or modified CDS sequence (opt5) from hemagglutinin__InfluenzaA__ADG57097
auggaggccauccuggugguccuccuguacaccuucgcuacagccaacgcggacacgcuuugcauuggcuaucacgcuaauaacagcaccgauacaguugacaccgugcuggaaaagaaugugacagucacccauuccgugaaccuccuggaggauaaacacaaugggaaacuuuguaagcugagaggaguugcgccccuccaucugggcaagugcaacaucgccggguggauucugggaaauccugaaugugagucucucagcacagcuuccucuuggagcuacaucguggaaaccuccucuagcgacaacggcacgugcuauccgggggauuuuauugacuacgaggagcugcgggaacagcuuuccagcgucucuuccuucgagcgcuuugaaaucuuccccaaaaccagcucuuggccuaaucacgauuccaacaagggagugacagccgcuuguccccaugccggcgccaagagcuuuuauaaaaaucugaucuggcucguuaagaaaggcaacucuuacccuaagcuguccaaaagcuauauuaaugacaaggggaaggaggugcuuguccuguggggaauccaccaccccuccaccucugccgaucaacagagccucuaccagaacgcugacgccuacguguucgugggcuccagcagauauucuaaaaaguuuaaaccugagauugcuauccggccgaagguccgcgggcaggaaggaagaaugaauuacuauuggacacugguugagcccggcgauaaaauuaccuucgaagccacggggaaccugguggugccucgguacgcguuugccauggagcgcaacgcuggauccggcaucauuaucagcgacacacccguccaugauugcaauaccacaugucaaaccccuaagggcgccaucaacaccucucuccccuuccacaauauucauccgaucacaauugggaaaugcccuaaguauguuaagagcacgaaacugagacuugcuaccggacugcggaacgugcccuccauccagucucgcggccucuuuggggccauugccggauucaucgaaggcggguggacaggaaugguggacggcugguacggcuaucaccaccagaaugagcaggggagcggauacgcugcggaccugaaguccacccaaaacgccaucgaugagauuacaaauaaagucaacagcgugaucgaaaagaugaauacccaguuuacggcuguuggcaaagaguucaaccaucuugaaaagagaauugagaaucugaacaagaaaguggacgauggguuccucgacaucuggacauacaaugccgaacugcugguccuccuggagaacgagcggacccuugauuaucacgacucuaaugugaagaaccuguacgaaaaaguccgcucccagcucaagaacaaugccaaagagauuggaaacggcuguuuugaguucuaucauaagugcgauaauaccuguauggaaagcgugaagaacgggacauacgacuauccuaaauacucugaagaggcuaagcugaauagagaggaaaucgauggcguuaaacuugaguccacccggaucuaucagauucuggccaucuacagcacaguggcguccucucucguccuggugguuagccugggagcuauuuccuuuuggaugugcucuaacggcagccuccaaugccgcaucuguauuuga

SEQ ID NO: 196967 - RNA, 1701 nt, Artificial Sequence; identical to SEQ ID NO: 195905
  derived and/or modified CDS sequence (opt5) from hemagglutinin__InfluenzaA__ADG57098

SEQ ID NO: 196968 - RNA, 1701 nt, Artificial Sequence
  derived and/or modified CDS sequence (opt5) from hemagglutinin__InfluenzaA__ADG57099
augaaggccauccuggugguccuccuguacaccuucgcuacagccaacgcggacacgcuuugcauuggcuaucacgcuaauaacagcaccgauacaguugacaccgugcuggagaaaaaugugacagucacccauuccgugaaccuccuggaagauaagcacaaugggaaacuuuguaagcugagaggaguugcuccccuccaucugggcaaaugcaacaucgccggguggauucugggaaauccugagugugaaucucucagcacagccuccucuuggagcuacaucguggagaccuccucuagcgacaacggcacgugcuauccgggggauuuuauugacuacgaagaacugcgggagcagcuuuccagcgucucuuccuucgaacgcuuugagaucuuccccaagaccagcucuuggccuaaucacgauuccaacaagggagugacagccgcuuguccccaugccggcgcgaaaucuuuuuauaagaaucugaucuggcucguuaaaaagggcaacagcuacccuaaacuguccaagagcuauauuaaugacaaggggaaagaagugcuuguccuguggggaauccaccaccccuccaccucugccgaucaacagagccucuaccagaacgcugacgccuacguguucgugggcacauccagauauagcaagaaauuuaagccugagauugcuauccggccgaaaguccgcgaucaggaggggagaaugaauuaccauuggacccugguugaacccggagacaagauuacguucgaggccacaggcaaccugguggugccucgguaugcguuugccauggaacgcaacgcugggucuggaaucauuaucaccgauacacccguccacgacugcaauaccaccugucaaacaccuaaaggcgccgugaacacgucccuccccuuccagaauauccauccgauuaccaucggcaagugcccuaaguacguuaaaagcacaaagcugagacuugcuaccgggcugcggaacgugcccucuauucagagccgcggacucuuuggcgccaucgccggguucauugagggaggcuggacagggauggucgacggaugguauggcuaccaccaccagaaugaacaaggcuccggguaugcugcggaucugaaaucuacccagaacgccaucgacaagaucacgaauaaagugaacagcguuauugagaagaugaauacacaguuuaccgcugugggaaaggaguucaaccaucuugagaaaagaaucgagaaucugaacaagaaagucgaugacggcuuccucgauauuuggaccuacaaugccgaacugcuggugcuccuggagaacgaacggacacuugacuaccacgauuccaaugucaagaaccuguaugagaaagugcgcagccagcucaagaacaaugccaaggagaucgggaacggauguuuugaguucuaccauaaaugcgacaauaccuguauggaaucuguuaagaacggcacauaugauuacccuaaauauuccgaagaggcuaagcugaauagagaagagauugacggggugaaacuugagagcacgcggaucuaccaaauccuggccauuuauucuaccgucgcguccagccucgugcugguugugucccugggcgcuaucucuuuuuggaugugcagcaacggaucccuccagugccgcauuuguaucuga

SEQ ID NO: 196969 - RNA, 1701 nt, Artificial Sequence
  derived and/or modified CDS sequence (opt5) from hemagglutinin__InfluenzaA__ADG57100
augaaggccauccuggugguccuccuguacaccuucgcuacagccaacgcggacacgcuuugcauuggcuaucacgcuaauaacagcaccgauacaguugacaccgugcuggagaaaaaugugacagucacccauuccgugaaccuccuggaagauaagcacaaugggaaacuuuguaagcugagaggaguugcuccccuccaucugggcaaaugcaacaucgccggguggauucugggaaauccugagugugaaucucucagcacagccuccucuuggagcuacaucguggagaccuccucuagcgacaacggcacgugcuauccgggggauuuuauugacuacgaagaacugcgggagcagcuuuccagcgucucuuccuucgaacgcuuugagaucuuccccaagaccagcucuuggccuaaucacgauuccaacaagggagugacagccgcuuguccccaugccggcgcgaaaucuuuuuauaagaaucugaucuggcucguuaaaaagggcaacagcuacccuaaacuguccaagagcuauauuaaugacaaggggaaagaagugcuuguccuguggggaauccaccaccccuccaccucugccgaucaacagagccucuaccagaacgcugacgccuacguguucgugggcacauccagauauagcaagaaauuuaagccugagauugcuauccggccgaaaguccgcgaucaggaggggagaaugaauuacuauuggacccugguugaacccggagacaagauuacguucgaggccacaggcaaccugguggugccucgguacgcguuugccauggaacgcaacgcugggucuggaaucauuaucuccgauacccccguccaugacugcaauacaaccugucaaaccccuaaaggcgccaucaacacaagccuccccuuccagaauauucacccgaucacgauuggcaagugcccuaaguaugugaaaucuaccaagcugagacuugcuacagggcugcggaacguucccagcauccagucccgcggacucuuuggcgccauugccggguucaucgagggaggcuggaccgggaugguggacggaugguacggcuaucaucaccagaaugaacaaggcucuggguacgcugcggaucugaaaagcacacagaacgccaucgacaagauuaccaauaaagucaacuccgugaucgagaagaugaauacgcaguuuacagcuggaggcaaggaguucaaccaccuugagaaaagaauugagaaucugaacaagaaaguugaugacggguuccucgauaucuggaccuacaaugccgaacugcuggugcuccuggagaacgaacggacccuugacuaucaugauagcaaugucaagaaccuguacgagaaagugcgcucucagcucaagaacaaugccaaggagauuggaaacggcuguuuugaguucuaucacaaaugcgacaauacauguauggaauccgucaagaacgggaccuacgauuauccuaaauacagcgaagaggcuaagcugaauagagaagagaucgacggcgugaaacuugagucuacacggaucuaucaaauucuggccaucuacuccacgguugcgagcucccucgugcuggucgugucucugggagcuauuagcuuuuggaugugcuccaacggcucucuccagugccgcaucuguauuuga

SEQ ID NO: 196970 - RNA, 1701 nt, Artificial Sequence; identical to SEQ ID NO: 194741
  derived and/or modified CDS sequence (opt5) from hemagglutinin__InfluenzaA__ADG58939

SEQ ID NO: 196971 - RNA, 1701 nt, Artificial Sequence; identical to SEQ ID NO: 194741
  derived and/or modified CDS sequence (opt5) from hemagglutinin__InfluenzaA__ADG58940

SEQ ID NO: 196972 - RNA, 1701 nt, Artificial Sequence
  derived and/or modified CDS sequence (opt5) from hemagglutinin__InfluenzaA__ADG58941
augaaggccauccuggugguccuccuguacaccuucgcuacagccaacgcggacacgcuuugcauuggcuaucacgcuaauaacagcaccgauacaguugacaccgugcuggagaaaaaugugacagucacccauuccgugaaccuccuggaagauaagcacaaugggaaacuuuguaagcugagaggaguugcuccccuccaucugggcaaaugcaacaucgccggguggauucugggaaauccugagugugaaucucucagcacagccuccucuuggagcuacaucguggagaccuccucuagcgacaacggcacgugcuauccgggggauuuuauugacuacgaagaacugcgggagcagcuuuccagcgucucuuccuucgaacgcuuugagaucuuccccaagaccagcucuuggccuaaucacgauuccaacaagggagugacagccgcuuguccccaugccggcgcgaaaucuuuuuauaagaaucugaucuggcucguuaaaaagggcaacagcuacccuaaacuguccaagagcuauauuaaugacaaggggaaagaagugcuuguccuguggggaauccaccaccccuccaccucugccgaucaacagagccucuaccagaacgcugacacauacguguucgugggcaccuccagauauagcaagaaauuuaagccugagauugccauccggccgaaaguccgcgaucaggaggggagaaugaauuacuauuggacgcugguugaacccggagacaagauuacauucgaggcuaccggcaaccugguggugccucgguacgccuuugcgauggaacgcaacgccgggucuggaaucauuaucuccgauacacccguccaugacugcaauaccaccugucaaacaccuaaaggcgcuaucaacacgagccuccccuuccagaauauucacccgaucaccauuggcaagugcccuaaguaugugaaaucuacaaagcugagacuugccaccgggcugcggaacguucccagcauccagucccgcggacucuuuggcgcuauugccggguucaucgagggaggcuggacagggaugguggacggaugguacggcuaucaucacgaaaaugagcagggcucuggguacgccgcugaucugaaaagcacccaaaacgcgaucgacgagauuacgaauaaggucaacuccgugaucgaaaagaugaauacacaguuuaccgccguuggaaaggaguucaaccaccuugaaaagagaauugagaaucugaacaaaaagaucgaugacggcuuccucgauauuuggaccuacaaugcugaacugcuggugcuccuggagaacgagcggacacuugacuaucaugauagcaaugucaaaaaccuguacgaaaaggugcgcucucagcucaaaaacaaugccaaggagaucgggaacggauguuuugaguucuaucacaagugcgacaauaccuguauggaguccgucaaaaacggcacauacgauuauccuaaguacagcgaagaggccaaacugaauagagaggaaaucgacggggugaaacuugagucuacgcggauuuaucagauccuggcuauuuacuccaccguugccagcucccucgugcuggucgugucucugggcgcgaucagcuuuuggaugugcuccaacggaucucuccaaugccgcauuuguaucuga

SEQ ID NO: 196973 - RNA, 1701 nt, Artificial Sequence
  derived and/or modified CDS sequence (opt5) from hemagglutinin__InfluenzaA__ADG58942
augaaggccauccuggugguccuccuguacaccuucgcuacagccaacgcggacacgcuuugcauuggcuaucacgcuaauaacagcaccgauacaguugacaccgugcuggagaaaaaugugacagucacccauuccgugaaccuccuggaagauaagcacaaugggaaacuuuguaagcugagaggaguugcuccccuccaucugggcaaaugcaacaucgccggguggauucugggaaauccugagugugaaucucucagcacagccuccucuuggagcuacaucguggagaccuccucuagcgacaacggcacgugcuauccgggggauuuuauugacuacgaagaacugcgggagcagcuuuccagcgucucuuccuucgaacgcuuugagaucuuccccaagaccagcucuuggccuaaucacgauuccaacaagggagugacagccgcuuguccccaugccggcgcgaaaucuuuuuauaagaaucugaucuggcucguuaaaaagggcaacagcuacccuaaacuguccaagagcuauauuaaugacaaggggaaagaagugcuuguccuguggggaauccaccaccccuccaccucugccgaucaacagagccucuaccagaacgcugacacauacguguucgugggcaccuccagauauagcaagaaauuuaagccugagauugccauccggccgaaaguccgcgaucaggaggggagaaugaauuacuauuggacgcugguugaacccggagacaagauuacauucgaggcuaccggcaaccugguggugccucgguacgccuuugcgauggaacgcaacgccgggucuggaaucauuaucuccgauacacccguccaugacugcaauaccaccugucaaacaccuaaaggcgcuaucaacacgagccuccccuuccagaauauucacccgaucaccauuggcaagugcccuaaguaugugaaaucuacaaagcugagacuugccaccgggcugcggaacguucccagcauccagucccgcggacucuuuggcgcuauugccggguucaucgagggaggcuggacagggaugguggacggaugguacggcuaucugcaucagaaugaacaaggcucuggguacgccgcugaucuuaaaagcacccagaacgcgaucgacgagauuacgaauaaggucaacuccgugaucgagaaaaugaauacacaguuuaccgccguuggaaaggaguucaaccaccuggagaagagaauugaaaaucucaacaaaaagaucgaugacggcuuccuggauauuuggaccuacaaugcugagcugcucgugcugcuugaaaacgagcggacacuggacuaucacgauagcaaugucaaaaaccucuacgagaaggugcgcucucagcugaaaaacaaugccaaggaaaucgggaacggauguuuugaguucuaucauaagugcgacaauaccuguauggaauccgucaaaaacggcacauacgauuauccuaaguacagcgaggaagccaaacuuaauagagaggagaucgacggggugaagcuggaaucuacgcggauuuaucaaauccucgcuauuuacuccaccguugccagcucccuggugcuggucgugucucucggcgcgaucagcuuuuggaugugcuccaacggaucucugcagugccgcauuuguaucuga

SEQ ID NO: 196974 - RNA, 1701 nt, Artificial Sequence; identical to SEQ ID NO: 194741
  derived and/or modified CDS sequence (opt5) from hemagglutinin__InfluenzaA__ADG58943

SEQ ID NO: 196975 - RNA, 1701 nt, Artificial Sequence
  derived and/or modified CDS sequence (opt5) from hemagglutinin__InfluenzaA__ADG58944
augaaggccauccuggugguccuccuguacaccuucgcuacagccaacgcggacacgcuuugcauuggcuaucacgcuaauaacagcaccgauacaguugacaccgugcuggagaaaaaugugacagucacccauuccgugaaccuccuggaagauaagcacaaugggaaacuuuguaagcugagaggaguugcuccccuccaucugggcaaaugcaacaucgccggguggauucugggaaauccugagugugaaucucucagcacagccuccucuuggagcuacaucguggagaccuccucuagcgacaacggcacgugcuauccgggggauuuuauugacuacgaagaacugcgggagcagcuuuccagcgucucuuccuucgaacgcuuugagaucuuccccaagaccagcucuuggccuaaucacgauuccaacaagggagugacagccgcuuguccccaugccggcgcgaaaucuuuuuauaagaaucugaucuggcucguuaaaaagggcaacagcuacccuaaacuguccaagagcuauauuaaugacaaggggaaagaagugcuuguccuguggggaauccaccaccccuccaccucugccgaucaacagagccucuaccagaacgcugacgccuacguguucgugggcacauccagauauagcaagaaauuuaagccugagauugcuauccggccgaaaguccgcgaucaggaggggagaaugaauuacuauuggacccugguugaacccggagacaagauuacguucgaggccacaggcaaccugcucgugccucgguacgcguuugccauggaacgcaacgcugggucuggaaucauuaucuccgauacccccgugcaugacugcaauacaaccugucaaaccccuaaaggcgccaucaacacaagccugcccuuccagaauauucacccgaucacgauuggcaagugcccuaaguaugucaaaucuaccaaacuuagacuggcuacagggcuccggaacgugcccagcauccagucccgcggacuguuuggcgccauugccggguucaucgagggaggcuggaccgggaugguugacggaugguacggcuaucaucaccagaaugaacaaggcucuggguacgcugcggaucuuaagagcacacagaacgccaucgacgagauuaccaauaaggugaacuccgucaucgagaaaaugaauacgcaguuuacagcugugggaaaggaguucaaccaccuggagaagagaauugaaaaucucaacaaaaagguugaugacggcuuccuggauaucuggaccuacaaugccgagcugcucgugcugcuugaaaacgagcggacccuggacuaucaugauagcaaugucaaaaaccucuacgagaaggugcgcucucagcugaaaaacaaugccaaggaaauugggaacggauguuuugaguucuaucacaagugcgacaauacauguauggaauccgucaaaaacggcaccuacgauuauccuaaguacagcgaggaagcuaaacuuaauagagaggagaucgacggggugaagcuggaaucuacacggaucuaucaaauucucgccaucuacuccacgguugcgagcucccuggugcuggucgugucucucggcgcuauuagcuuuuggaugugcuccaacggaucucugcagugccgcaucuguauuuga

SEQ ID NO: 196976 - RNA, 1701 nt, Artificial Sequence; identical to SEQ ID NO: 195539
  derived and/or modified CDS sequence (opt5) from hemagglutinin__InfluenzaA__ADG58946

SEQ ID NO: 196977 - RNA, 1701 nt, Artificial Sequence; identical to SEQ ID NO: 194741
  derived and/or modified CDS sequence (opt5) from hemagglutinin__InfluenzaA__ADG58947

SEQ ID NO: 196978 - RNA, 1701 nt, Artificial Sequence
  derived and/or modified CDS sequence (opt5) from hemagglutinin__InfluenzaA__ADG58948
augaaggccauccugauugugcuccuguacaccuucgcuacagccaacgcggacacgcuuugcaucggcuaucacgcuaauaacagcaccgauacagucgacaccguucuggagaagaaugugacagugacccauuccgucaaccuccuggaagauaagcacaaugggaaacuuuguaagcugagaggaguggcuccccuccaucugggcaaaugcaacauugccggguggauccugggaaauccugagugugaaucucucagcacagccuccucuuggagcuacauuguugagaccuccucuagcgacaacggcacgugcuauccgggggauuuuaucgacuacgaagaacugcgggagcagcuuuccagcgugucuuccuucgaacgcuuugagaucuuccccaagaccagcucuuggccuaaucacgauuccaacaagggagucacagccgcuuguccccaugccggcgcgaaaucuuuuuauaagaaucugauuuggcucgugaaaaagggcaacagcuacccuaaacuguccaagagcuauaucaaugacaaggggaaagaaguucuugugcuguggggcauucaccaccccuccaccucugccgaucaacagagccucuaccagaacgcugacacauacgucuucgugggaaccuccagauauagcaagaaauuuaagccugagaucgccauucggccgaaagugcgcgaucaggaggggagaaugaauuacuauuggacgcuggucgaacccggagacaagaucacauucgaggcuaccggcaaccugguugugccucgguacgccuuugcgauggaacgcaacgccgggucuggaauuaucaucuccgauacacccgugcaugacugcaauaccaccugucaaacaccuaaaggcgcuauuaacacgagccuccccuuccagaauauccacccgauuaccaucggcaagugcccuaaguaugucaaaucuacaaagcugagacuugccaccgggcugcggaacgugcccagcauucagucccgcggacucuuuggcgcuaucgccggguucaucgagggaggcuggacagggaugguugacggaugguacggcuaucaucaccagaaugaacaaggcucuggguacgccgcugaucugaaaagcacccagaacgcgauugacgagaucacgaauaaggugaacuccgucauugagaaaaugaauacacaguuuaccgccgugggaaaggaguucaaccaccuugagaagagaaucgaaaaucugaacaaaaagauugaugacggcuuccucgauaucuggaccuacaaugcugagcugcugguucuccuggaaaacgagcggacacuugacuaucaugauagcaaugugaaaaaccuguacgagaagguccgcucucagcucaaaaacaaugccaaggaaaucgggaacggauguuuugaguucuaucacaagugcgacaauaccuguauggaauccgugaaaaacggcacauacgauuauccuaaguacagcgaggaagccaaacugaauagagaggagauugacggggucaaacuugaaucuacgcggaucuaucaaauucuggcuaucuacuccaccguggccagcucccucguucugguggucucucugggcgcgauuagcuuuuggaugugcuccaacggaucucuccagugccgcaucuguauuuga

SEQ ID NO: 196979 - RNA, 1701 nt, Artificial Sequence
  derived and/or modified CDS sequence (opt5) from hemagglutinin__InfluenzaA__ADG58949
augaaggccauccuggugguccuccuguacaccuucgcuacagccaacgcggacacgcuuugcauuggcuaucacgcuaauaacagcaccgauacaguugacaccgugcuggagaagaaugugacagucacccauuccgugaaccuccuggaagauaagcacaaugggaaacuuuguaagcugagaggaguugcuccccuccaucugggcaaaugcaacaucgccggguggauucugggaaauccugagugugaaucucucagcacagccuccucuuggagcuacaucguggagaccuccucuagcgacaacggcacgugcuauccgggggauuuuauugacuacgaagaacugcgggagcagcuuuccagcgucucuuccuucgaacgcuuugagaucuuccccaagaccagcucuuggccuaaucacgauuccaacaagggagugacagccgcuuguccccaugccggcgcgaaaucuuuuuauaagaaucugaucuggcucguuaaaaagggcaacagcuacccuaaacuguccaagagcuauauuaaugacaaggggaaagaagugcuuguccuguggggaauccaccaccccuccaccucugccgaucaacagagccucuaccagaacgcugacacauacguguucgugggcaccuccagauauagcaagaaauuuaagccugagauugccauccggccgaaaguccgcgaucaggaggggagaaugaauuacuauuggacgcugguugaacccggagacaagauuacauucgaggcuaccggcaaccugguggugccucgguacgccuuugcgauggaacgcaacgccgggucuggaaucauuaucuccgauacaagcguccaugacugcaauaccaccugucaaacacccaaaggcgcuaucaacacgucucucccuuuccagaauauucaccccaucaccauuggcaagugcccgaaguaugugaaaagcacaaagcugagacuugccaccgggcugcggaacguuccuuccauccagucucgcggacucuuuggcgcuauugccggguucaucgagggaggcuggacagggaugguggacggaugguacggcuaucaucaccagaaugaacaaggcagcggguacgccgcugaucugaaauccacccagaacgcgaucgacgagauuacgaauaaggucaacagcgugaucgagaaaaugaauacacaguuuaccgccguuggaaaggaguucaaccaccuugagaagagaauugaaaaucugaacaaaaagaucgaugacggcuuccucgauauuuggaccuacaaugcugagcugcuggugcuccuggaaaacgagcggacacuugacuaucaugauucuaaugucaaaaaccuguacgagaaggugcgcucccagcucaaaaacaaugccaaggaaaucgggaacggauguuuugaguucuaucacaagugcgacaauaccuguauggaaagcgucaaaaacggcacauacgauuaucccaaguacucugaggaagccaaacugaauagagaggagaucgacggggugaaacuugaauccacgcggauuuaucaaauccuggcuauuuacagcaccguugccuccucucucgugcuggucgugagccugggcgcgaucuccuuuuggaugugcucuaacggaagccuccagugccgcauuuguaucuga

SEQ ID NO: 196980 - RNA, 1701 nt, Artificial Sequence
  derived and/or modified CDS sequence (opt5) from hemagglutinin__InfluenzaA__ADG58951
augaaggccauccuggugguccuccugcacaccuucgcuacagccaacgcggacacgcuuugcauuggcuaccaugcuaauaacagcaccgauacaguugacaccgugcuggagaaaaaugugacagucacccacuccgugaaccuccuggaagauaagcauaaugggaaacuuuguaagcugagaggaguugcuccccuccaccugggcaaaugcaacaucgccggguggauucugggaaauccugagugugaaucucucagcacagccuccucuuggagcuauaucguggagaccuccaacucuggcaaugggacgugcuacccgggagaauuuauugacuaugaggagcugcgggaacagcuuagcuccgucagcucuuucgagcgcuuugaaaucuuccccaagaccuccagcuggccuaaccaugauucuaauaagggcgugacagccgcuuguccccacgccggcgcgaaauccuuuuacaagaaccugaucuggcucguuaaaaaggggaauagcuauccuaaacugucuaaguccuacauuaacgacaagggaaaagaggugcuuguccuguggggcauccaccaucccagcaccuccgccgaucaacagucucucuaucagaaugcugacgccuacguguucguggggacaagcagauacuccaagaaauuuaagccugagauugcuauccggccgaaaguccgcgaucaggaaggaagaaugaacuauuacuggacccugguugagcccggcgacaagauuacguucgaagccacagggaaccugguggugccucgguaugcguuugccauggagcgcaaugcuggaagcggcaucauuaucucugauacccccguccacgacugcaacacaaccugucaaaccccuaaaggcgccaucaauacaucccuccccuuccagaacauucauccgaucacgauugggaagugcccuaaguacgugaaaagcaccaagcugagacuugcuacaggacugcggaauguucccucuauccagagccgcggccucuuuggggccauugccggauucaucgaaggcggguggaccggaaugguggauggcugguauggcuaccaccaccagaacgagcaaggguccggauaugcugcggaccugaaaucuacacagaaugccaucgacgagauuaccaacaaggucaauagcgugaucgaaaagaugaacacgcaguuuacagcuguuggcaaggaguucaaucaucuugaaaagagaauugagaaccugaauaaaaagguggaugacggguuccucgauaucuggaccuacaacgccgaacugcugguccuccuggagaaugagcggacccuugacuaccacgauuccaacgugaaaaaccuguaugaaaagguccgcagccagcucaaaaauaacgccaaggagauuggaaauggcuguuuugaguucuaccauaagugcgacaacacauguaucgaaucugugaaaaaugggaccuaugauuacccuaaguauuccgaagaggcuaaacugaacagagaggaaaucgacggcguuaaacuugagagcacacggauuuaccaaauccuggccauuuauucuacgguggcguccagccucguccuggugguuucccugggagcuaucucuuuuuggaugugcagcaauggcucccuccagugccgcauuuguaucuga

SEQ ID NO: 196981 - RNA, 1701 nt, Artificial Sequence; identical to SEQ ID NO: 196980
  derived and/or modified CDS sequence (opt5) from hemagglutinin__InfluenzaA__ADG58952

SEQ ID NO: 196982 - RNA, 1701 nt, Artificial Sequence; identical to SEQ ID NO: 196980
  derived and/or modified CDS sequence (opt5) from hemagglutinin__InfluenzaA__ADG58953

SEQ ID NO: 196983 - RNA, 1701 nt, Artificial Sequence; identical to SEQ ID NO: 196980
  derived and/or modified CDS sequence (opt5) from hemagglutinin__InfluenzaA__ADG58954

SEQ ID NO: 196984 - RNA, 1701 nt, Artificial Sequence; identical to SEQ ID NO: 196980
  derived and/or modified CDS sequence (opt5) from hemagglutinin__InfluenzaA__ADG58955

SEQ ID NO: 196985 - RNA, 1701 nt, Artificial Sequence; identical to SEQ ID NO: 196980
  derived and/or modified CDS sequence (opt5) from hemagglutinin__InfluenzaA__ADG58956

SEQ ID NO: 196986 - RNA, 1701 nt, Artificial Sequence
  derived and/or modified CDS sequence (opt5) from hemagglutinin__InfluenzaA__ADG58957
augaaggccauccuggugguccuccugcacaccuucgcuacagccaacgcggacacgcuuugcauuggcuaccaugcuaauaacagcaccgauacaguugacaccgugcuggagaaaaaugugacagucacccacuccgugaaccuccuggaagauaagcauaaugggaaacuuuguaagcugagaggaguugcuccccuccaccugggcaaaugcaacaucgccggguggauucugggaaauccugagugugaaucucucagcacagccuccucuuggagcuauaucguggagaccuccaacucuggcaaugggacgugcuacccgggagaauuuauugacuaugaggagcugcgggaacagcuuagcuccgucagcucuuucgagcgcuuugaaaucuuccccaagaccuccagcuggccuaaccaugauucuaauaagggcgugacagccgcuuguccccacgccggcgcgaaauccuuuuacaagaaccugaucuggcucguuaaaaaggggaauagcuauccuaaacugucuaaguccuacauuaacgacaagggaaaagaggugcuuguccuguggggcauccaccaucccagcaccuccgccgaucaacagucucucuaucagaaugcugacgccuacguguucguggggacaagcagauacuccaagaaauuuaagccugagauugcuauccggccgaaaguccgcgaucaggaaggaagaaugaacuauuacuggacccugguugagcccggcgacaagauuacguucgaagccacagggaaccugguggugccucgguaugcguuugccauggagcgcaaugcuggaagcggcaucauuaucucugauacccccguccacgacugcaacacaaccugucaaaccccuaaaggcgccaucaauacaucccuccccuuccagaacauucauccgaucacgauugggaagugcccuaaguacgugaaaagcaccaagcugagacuugcuacaggacugcggaauguucccucuauccagagccgcggccucuuuggggccauugccggauucaucgaaggcggguggaccggaaugguggauggcugguauggcuaccaccaccagaacgagcaaggguccggauaugcugcggaccugaaaucuacacagaaugccaucgacgagauuaccaacaaggucaauagcgugaucgaaaagaugaacacgcaguuuacagcuguuggcaaggaguucaaucaucuugaaaagagaauugagaaccugaauaaaaagguggaugacggguuccucgauaucuggaccuacaacgccgaacugcugguccuccuggagaaugagcggacccuugacuaccacgauuccaacgugaaaaaccuguaugaaaagguccgcagccagcucaaaaauaacgccaaggagauuggaaauggcuguuuugaguucuaccauaagugcgacaacacauguauggaaucugugaaaaaugggaccuaugauuacccuaaguauuccgaagaggcuaaacugaacagagaggaaaucgacggcguuaaacuugagagcacacggaucuaccaaauucuggccaucuauucuacgguggcguccagccucguccuggugguuucccugggagcuauuucuuuuuggaugugcagcaauggcucccuccagugccgcaucuguauuuga

SEQ ID NO: 196987 - RNA, 1701 nt, Artificial Sequence
  derived and/or modified CDS sequence (opt5) from hemagglutinin__InfluenzaA__ADG58959
augaaggccauccuggugguccuccuguacaccuucgcuacagccaacgcggacacgcuuugcauuggcuaucacgcuaauaacagcaccgauacaguugacaccgugcuggagaagaaugugacagucacccauuccgugaaccuccuggaagauaagcacaaugggaaacuuuguaagcugagaggaguugcuccccuccaucugggcaaaugcaacaucgccggguggauucugggaaauccugagugugaaucucucagcacagccaacuccuggucuuacaucguggagaccagcuccucugacaauggcacgugcuauccgggggauuuuauugacuacgaagaacugcgggagcagcuuagcuccgucagcucuuucgaacgcuuugagaucuuccccaagaccuccagcuggccuaaccacgauucuaauaagggagugacagccgcuuguccccaugccggcgcgaaauccuuuuauaagaaccugaucuggcucguuaaaaagggcaauagcuacccuaaacugucuaaguccuauauuaacgacaaggggaaagaagugcuuguccuguggggaauccaccaccccagcaccuccgccgaucaacagucucucuaccagaaugcugacgccuacguguucgugggcacaagcagauauuccaagaaauuuaagccugagauugcuauccggccgaaaguccgcgaucaggaggggagaaugaacuacuauuggacccugguugaacccggagacaagauuacguucgaggccacaggcaaccugguggugccucgguacgcguuugccauggaacgcaaugcugggagcggaaucauuaucucugauacccccguccaugacugcaacacaaccugucaaaccccuaaaggcgccaucaauacaucccuccccuuccagaacauucacccgaucacgauuggcaagugcccuaaguaugugaaaagcaccaagcugagacuugcuacagggcugcggaauguucccucuauccagagccgcggacucuuuggcgccauugccggguucaucgagggaggcuggaccgggaugguggacggaugguacggcuaucaucaccagaacgaacaaggcuccggguacgcugcggaucugaaaucuacacagaaugccaucgacgagauuaccaacaaggucaauagcgugaucgagaaaaugaacacgcaguuuacagcuguuggaaaggaguucaaucaccuugagaagagaauugaaaaccugaauaaaaagguggaugacggcuuccucgauaucuggaccuacaacgccgagcugcugguccuccuggaaaaugagcggacccuugacuaucaugauuccaacgugaaaaaccuguacgagaagguccgcagccagcucaaaaauaacgccaaggaaauugggaauggauguuuugaguucuaucacaagugcgacaacacauguauggaaucugugaaaaauggcaccuacgauuauccuaaguacuccgaggaagcuaaacugaacagagaggagaucgacgggguuaaacuugaaagcacacggaucuaucaaauucuggccaucuacucuacgguggcguccagccucguccuggugguuucccugggcgcuauuucuuuuuggaugugcagcaauggaucccuccagugccgcaucuguauuuga

SEQ ID NO: 196988 - RNA, 1701 nt, Artificial Sequence; identical to SEQ ID NO: 196905
  derived and/or modified CDS sequence (opt5) from hemagglutinin__InfluenzaA__ADG58960

SEQ ID NO: 196989 - RNA, 1701 nt, Artificial Sequence; identical to SEQ ID NO: 196905
  derived and/or modified CDS sequence (opt5) from hemagglutinin__InfluenzaA__ADG58961

SEQ ID NO: 196990 - RNA, 1701 nt, Artificial Sequence; identical to SEQ ID NO: 196905
  derived and/or modified CDS sequence (opt5) from hemagglutinin__InfluenzaA__ADG58962

SEQ ID NO: 196991 - RNA, 1701 nt, Artificial Sequence; identical to SEQ ID NO: 196905
  derived and/or modified CDS sequence (opt5) from hemagglutinin__InfluenzaA__ADG58963

SEQ ID NO: 196992 - RNA, 1701 nt, Artificial Sequence; identical to SEQ ID NO: 196905
  derived and/or modified CDS sequence (opt5) from hemagglutinin__InfluenzaA__ADG58964

SEQ ID NO: 196993 - RNA, 1701 nt, Artificial Sequence; identical to SEQ ID NO: 196905
  derived and/or modified CDS sequence (opt5) from hemagglutinin__InfluenzaA__ADG58965

SEQ ID NO: 196994 - RNA, 1701 nt, Artificial Sequence; identical to SEQ ID NO: 196905
  derived and/or modified CDS sequence (opt5) from hemagglutinin__InfluenzaA__ADG58966

SEQ ID NO: 196995 - RNA, 1701 nt, Artificial Sequence; identical to SEQ ID NO: 196905
  derived and/or modified CDS sequence (opt5) from hemagglutinin__InfluenzaA__ADG58967

SEQ ID NO: 196996 - RNA, 1701 nt, Artificial Sequence; identical to SEQ ID NO: 196905
  derived and/or modified CDS sequence (opt5) from hemagglutinin__InfluenzaA__ADG58968

SEQ ID NO: 196997 - RNA, 1701 nt, Artificial Sequence; identical to SEQ ID NO: 194741
  derived and/or modified CDS sequence (opt5) from hemagglutinin__InfluenzaA__ADG59628

SEQ ID NO: 196998 - RNA, 1701 nt, Artificial Sequence; identical to SEQ ID NO: 194741
  derived and/or modified CDS sequence (opt5) from hemagglutinin__InfluenzaA__ADG59629

SEQ ID NO: 196999 - RNA, 1701 nt, Artificial Sequence; identical to SEQ ID NO: 194741
  derived and/or modified CDS sequence (opt5) from hemagglutinin__InfluenzaA__ADG59630

SEQ ID NO: 197000 - RNA, 1701 nt, Artificial Sequence; identical to SEQ ID NO: 194741
  derived and/or modified CDS sequence (opt5) from hemagglutinin__InfluenzaA__ADG59631

SEQ ID NO: 197001 - RNA, 1701 nt, Artificial Sequence; identical to SEQ ID NO: 194741
  derived and/or modified CDS sequence (opt5) from hemagglutinin__InfluenzaA__ADG59632

SEQ ID NO: 197002 - RNA, 1701 nt, Artificial Sequence; identical to SEQ ID NO: 195842
  derived and/or modified CDS sequence (opt5) from hemagglutinin__InfluenzaA__ADG59633

SEQ ID NO: 197003 - RNA, 1701 nt, Artificial Sequence; identical to SEQ ID NO: 195842
  derived and/or modified CDS sequence (opt5) from hemagglutinin__InfluenzaA__ADG59634

SEQ ID NO: 197004 - RNA, 1701 nt, Artificial Sequence; identical to SEQ ID NO: 194741
  derived and/or modified CDS sequence (opt5) from hemagglutinin__InfluenzaA__ADG59635

SEQ ID NO: 197005 - RNA, 1701 nt, Artificial Sequence
  derived and/or modified CDS sequence (opt5) from hemagglutinin__InfluenzaA__ADG59636
augaaggccauccuggugguccuccuguacaccuucgcuacagccaacgcggacacgcuuugcauuggcuaucacgcuaauaacagcaccgauacaguugacaccgugcuggagaagaaugugacagucacccauuccgugaaccuccuggaagauaagcacaaugggaaacuuuguaagcugagaggaguugcuccccuccaucugggcaaaugcaacaucgccggguggauucugggaaauccugagugugaaucucucagcacagccuccucuuggagcuacaucguggagaccuccucuagcgacaacggcacgugcuauccgggggauuuuauugacuacgaagaacugcgggagcagcuuuccagcgucucuuccuucgaacgcuuugagaucuuccccaagaccagcucuuggccuaaucacgauuccaacaagggagugacagccgcuuguccccaugccggcgcgaaaucuuuuuauaagaaucugaucuggcucguuaaaaagggcaacagcuacccuaaacuguccaagagcuauauuaaugacaaggggaaagaagugcuuguccuguggggaauccaccaccccuccaccucugccgaucaacagagccucuaccagaacgcugacgccuacguguucgugggcacauccagauauagcaagaaauuuaagccugagauugcuauccggccgaaaguccgcgggcaggagggaagaaugaauuacuauuggacccugguugaacccggcgauaagauuacguucgaggccacagggaaccugguggugccucgguacgcguuugccauggaacgcaacgcuggaucuggcaucauuaucuccgacacccccguccaugauugcaauacaaccugucaaaccccuaaaggcgccaucaacacaagccuccccuuccagaauauucacccgaucacgauugggaagugcccuaaguaugugaaaucuaccaagcugagacuugcuacaggacugcggaacauccccagcauucagucccgcggccucuuuggggccaucgccggauucaucgagggcggguggaccggaaugguugacggcugguacggcuaucaucaccagaaugaacaagggucuggauacgcugcggaccugaaaagcacacagaacgccauugaugagaucaccaauaaggugaacuccgucauugagaaaaugaauacgcaguuuacagcugugggcaaggaguucaaccaccuugagaagagaaucgaaaaucugaacaaaaagguugacgauggguuccucgacauuuggaccuacaaugccgagcugcuggugcuccuggaaaacgagcggacccuugauuaucaugacagcaaugucaaaaaccuguacgagaaggugcgcucucagcucaaaaacaaugccaaggaaaucggaaacggcuguuuugaguucuaucacaagugcgauaauacauguauggaauccgucaaaaacgggaccuacgacuauccuaaguacagcgaggaagcuaaacugaauagagaggagaucgauggcgugaaacuugaaucuacacggauuuaucaaauccuggccauuuacuccacgguugcgagcucccucgugcuggucgugucucugggagcuaucagcuuuuggaugugcuccaacggcucucuccagugccgcauuuguaucuga

SEQ ID NO: 197006 - RNA, 1701 nt, Artificial Sequence; identical to SEQ ID NO: 195489
  derived and/or modified CDS sequence (opt5) from hemagglutinin__InfluenzaA__ADG59638

SEQ ID NO: 197007 - RNA, 1701 nt, Artificial Sequence; identical to SEQ ID NO: 195842
  derived and/or modified CDS sequence (opt5) from hemagglutinin__InfluenzaA__ADG59639

SEQ ID NO: 197008 - RNA, 1701 nt, Artificial Sequence; identical to SEQ ID NO: 195094
  derived and/or modified CDS sequence (opt5) from hemagglutinin__InfluenzaA__ADG59641

SEQ ID NO: 197009 - RNA, 1701 nt, Artificial Sequence; identical to SEQ ID NO: 195584
  derived and/or modified CDS sequence (opt5) from hemagglutinin__InfluenzaA__ADG59643

SEQ ID NO: 197010 - RNA, 1701 nt, Artificial Sequence; identical to SEQ ID NO: 194728
  derived and/or modified CDS sequence (opt5) from hemagglutinin__InfluenzaA__ADG59644

SEQ ID NO: 197011 - RNA, 1701 nt, Artificial Sequence; identical to SEQ ID NO: 194741
  derived and/or modified CDS sequence (opt5) from hemagglutinin__InfluenzaA__ADG59646

SEQ ID NO: 197012 - RNA, 1701 nt, Artificial Sequence; identical to SEQ ID NO: 195842
  derived and/or modified CDS sequence (opt5) from hemagglutinin__InfluenzaA__ADG59647

SEQ ID NO: 197013 - RNA, 1701 nt, Artificial Sequence; identical to SEQ ID NO: 195905
  derived and/or modified CDS sequence (opt5) from hemagglutinin__InfluenzaA__ADG59648

SEQ ID NO: 197014 - RNA, 1701 nt, Artificial Sequence; identical to SEQ ID NO: 195905
  derived and/or modified CDS sequence (opt5) from hemagglutinin__InfluenzaA__ADG59649

SEQ ID NO: 197015 - RNA, 1701 nt, Artificial Sequence; identical to SEQ ID NO: 195905
  derived and/or modified CDS sequence (opt5) from hemagglutinin__InfluenzaA__ADG59650

SEQ ID NO: 197016 - RNA, 1701 nt, Artificial Sequence; identical to SEQ ID NO: 195905
  derived and/or modified CDS sequence (opt5) from hemagglutinin__InfluenzaA__ADG59651

SEQ ID NO: 197017 - RNA, 1701 nt, Artificial Sequence; identical to SEQ ID NO: 194741
  derived and/or modified CDS sequence (opt5) from hemagglutinin__InfluenzaA__ADG59652

SEQ ID NO: 197018 - RNA, 1701 nt, Artificial Sequence; identical to SEQ ID NO: 194741
  derived and/or modified CDS sequence (opt5) from hemagglutinin__InfluenzaA__ADG59653

SEQ ID NO: 197019 - RNA, 1701 nt, Artificial Sequence; identical to SEQ ID NO: 197005
  derived and/or modified CDS sequence (opt5) from hemagglutinin__InfluenzaA__ADG59655

SEQ ID NO: 197020 - RNA, 1701 nt, Artificial Sequence; identical to SEQ ID NO: 195842
  derived and/or modified CDS sequence (opt5) from hemagglutinin__InfluenzaA__ADG59656

SEQ ID NO: 197021 - RNA, 1701 nt, Artificial Sequence
  derived and/or modified CDS sequence (opt5) from hemagglutinin__InfluenzaA__ADG59657
augaaggccauccuggugguccuccuguacaccuucgcuacagccaacgcggacacgcuuugcauuggcuaucacgcuaauaacagcaccgauacaguugacaccgugcuggagaaaaaugugacagucacccauuccgugaaccuccuggaagauaagcacaaugggaaacuuuguaagcugagaggaguugcuccccuccaucugggcaaaugcaacaucgccggguggauucugggaaauccugagugugaaucucucagcacagccuccucuuggagcuacaucguggagaccuccucuagcgacaacggcacgugcuauccgggggauuuuauugacuacgaagaacugcgggagcagcuuuccagcgucucuuccuucgaacgcuuugagaucuuccccaagaccagcucuuggccuaaucacgauuccaacaagggagugacagccgcuuguccccaugccggcgcgaaaucuuuuuauaagaaucugaucuggcucguuaaaaagggcaacagcuacccuaaacuguccaagagcuauauuaaugacaaggggaaagaagugcuuguccuguggggaauccaccaccccuccaccucugccgaucaacagagccucuaccagaacgcugacgccuacguguucgugggcuccagcaaguauucuaaaaaguuuaaaccugagauugcuaucagaccgaagguccgggaucaggaggggcgcaugaauuacuauuggacacugguugaacccggagacaaaauuaccuucgaggccacgggcaaccugguggugccuagauacgcguuugccauggaacggaacgcuggguccggaaucauuaucagcgauacacccguccaugacugcaauaccacaugucaaaccccuaagggcgccaucaacaccucucuccccuuccagaauauucacccgaucacaauuggcaagugcccuaaauauguuaagagcacgaaacugcgccuugcuaccgggcugagaaacgugcccuccacacagucucggggacucuuuggcgccaucgccggguucauugagggaggcuggaccgggaugguggacggaugguacggcuaucaucaccagaaugaacaaggcagcggguacgcugcggaucugaaguccacacagaacgccaucgacgagaucaccaauaaagucaacagcgugauugagaagaugaauacgcaguuuacagcuguuggaaaggaguucaaccaccuugagaaacgcaucgaaaaucugaacaagaaaguggaugacggcuuccucgauauuuggaccuacaaugccgagcugcugguccuccuggaaaacgagagaacccuugacuaucaugauucuaaugugaagaaccuguacgagaaaguccggucccagcucaagaacaaugccaaggaaaucgggaacggauguuuugaguucuaucacaaaugcgacaauacauguauggaaagcgugaagaacggcaccuacgauuauccuaaauacucugaggaagcuaagcugaaucgcgaggagauugacgggguuaaacuugaauccacaagaaucuaucaaauccuggccauuuacagcacgguggcguccucucucguccuggugguuagccugggcgcuaucuccuuuuggaugugcucuaacggaagccuccagugccggauuuguaucuga

SEQ ID NO: 197022 - RNA, 1701 nt, Artificial Sequence
  derived and/or modified CDS sequence (opt5) from hemagglutinin__InfluenzaA__ADG59658
augaaggccauccuggugguccuccuguacaccuucgcuacagccaacgcggacacgcuuugcauuggcuaucacgcuaauaacagcaccgauacaaucgacaccguucuggagaagaaugugacagugacccauuccgucaaccuccuggaagauaagcacaaugggaaacuuuguaagcugagaggaguggcuccccuccaucugggcaaaugcaacauugccggguggauccugggaaauccugagugugaaucucucagcacagccuccucuuggagcuacauuguugagaccuccucuagcgacaacggcacgugcuauccgggggauuuuaucgacuacgaagaacugcgggagcagcuuuccagcgugucuuccuucgaacgcuuugagaucuuccccaagaccagcucuuggccuaaucacgauuccaacaagggagucacagccgcuuguccccaugccggcgcgaaaucuuuuuauaagaaucugauuuggcucgugaaaaagggcaacagcuacccuaaacuguccaagagcuauaucaaugacaaggggaaagaaguucuugugcuguggggcauucaccaccccuccaccucugccgaucaacagagccucuaccagaacgcugacgccuacgucuucgugggaacauccagauauagcaagaaauuuaagccugagaucgcuauucggccgaaagugcgcaaucaggaggggagaaugaacuacuauuggacccuggucgaacccggagauaagaucacguucgaggccacaggcaaccugguugugccucgguacgcguuugccauggaacgcaaugcugggucuggaauuaucaucuccgacacccccgugcaugauugcaacacaaccugucaaaccccuaaaggcgccauuaauacaagccuccccuuccagaacauccacccgauuacgaucggcaagugcccuaaguaugucaaaucuaccaagcugagacuugcuacagggcugcggaauauucccagcauccagucccgcggacucuuuggcgccaucgccggguucauugagggaggcuggaccgggaugguggacggaugguacggcuaucaucaccagaacgaacaaggcucuggguacgcugcggaccugaaaagcacacagaaugccaucgaugagauuaccaacaagguuaauuccgugaucgagaaaaugaacacgcaguuuacagcugucggaaaggaguucaaucaccuugagaagagaauugaaaaccugaauaaaaagguggacgauggcuuccucgacaucuggaccuacaacgccgagcugcugguucuccuggaaaaugagcggacccuugauuaucaugacagcaacgugaaaaaccuguacgagaagguccgcucucagcucaaaaauaacgccaaggaaaucgggaauggauguuuugaguucuaucacaagugcgauaacacauguauggaauccgugaaaaauggcaccuacgacuauccuaaguacagcgaggaagcuaaacugaacagagaggagauugauggggucaaacuugaaucuacacggaucuaucaaauucuggccaucuacuccacgguggcgagcucccucguucugguggucucucugggcgcuauuagcuuuuggaugugcuccaauggaucucuccagugccgcaucuguauuuga

SEQ ID NO: 197023 - RNA, 1701 nt, Artificial Sequence; identical to SEQ ID NO: 195188
  derived and/or modified CDS sequence (opt5) from hemagglutinin__InfluenzaA__ADG59659

SEQ ID NO: 197024 - RNA, 1701 nt, Artificial Sequence; identical to SEQ ID NO: 195188
  derived and/or modified CDS sequence (opt5) from hemagglutinin__InfluenzaA__ADG59660

SEQ ID NO: 197025 - RNA, 1701 nt, Artificial Sequence; identical to SEQ ID NO: 195094
  derived and/or modified CDS sequence (opt5) from hemagglutinin__InfluenzaA__ADG59662

SEQ ID NO: 197026 - RNA, 1701 nt, Artificial Sequence
  derived and/or modified CDS sequence (opt5) from hemagglutinin__InfluenzaA__ADG59663
augaaggccauccuggugguccuccuguacaccuucgcuacagccaacgcggacacgcuuugcauuggcuaucacgcuaauaacagcaccgauacaguugacaccgugcuggagaagaaugugacagucacccauuccgugaaccuccuggaagauaagcacaaugggaaacuuuguaagcugagaggaguugcuccccuccaucugggcaaaugcaacaucgccggguggauucugggaaauccugagugugaaucucucagcacagccuccucuuggagcuacaucguggagaccuccucuagcgacaacggcacgugcuauccgggggauuuuauugacuacgaagaacugcgggagcagcuuuccagcgucucuuccuucgaacgcuuugagaucuuccccaagaccagcucuuggccuaaucacgauuccaacaagggagugacagccgcuuguccccaugccggcgcgaaaucuuuuuauaagaaucugaucuggcucguuaaaaagggcaacagcuacccuaaacuguccaagagcuauauuaaugacaaggggaaagaagugcuuguccuguggggaauccaccaccccuccaccucugccgaucaacagagccucuaccagaacgcugacgccuacguguucgugggcacauccagauauagcaagaaauuuaagccugagauugcuauccggccgaaaguccgcgaucaggaggggagaaugaauuacuauuggacccugguugaacccggagacaagauuacguucgaggccacaggcaaccugguggugccucgguacgcguuugccauggaacgcaacgcugggucuggaaucauuaucuccgauacccccuuccaugacugcaauacaaccugucaaaccccuaaaggcgccaucaacacaagccuccccuuucagaauauucacccgaucacgauuggcaagugcccuaaguaugucaaaucuaccaagcugagacuugcuacagggcugcggaacauccccagcauucagucccgcggacucuucggcgccaucgccggguuuaucgagggaggcuggaccgggaugguggacggaugguacggcuaucaucaccagaaugaacaaggcucuggguacgcugcggaucugaaaagcacacagaacgccauugacgagaucaccaauaagguuaacuccgugauugagaaaaugaauacgcaguucacagcugucggaaaggaguucaaccaccuugagaagagaaucgaaaaucugaacaaaaagguggaugacggcuuucucgauauuuggaccuacaaugccgagcugcugguucuccuggaaaacgagcggacccuugacuaucaugauagcaaugugaaaaaccuguacgagaagguccgcucucagcucaaaaacaaugccaaggaaaucgggaacggauguuucgaguuuuaucacaagugcgacaauacauguauggaauccgugaaaaacggcaccuacgauuauccuaaguacagcgaggaagcuaaacugaauagagaggagaucgacggggucaaacuugaaucuacacggauuuaucaaauccuggccauuuacuccacgguggcgagcucccucguucugguggucucucugggcgcuaucagcuucuggaugugcuccaacggaucucuccagugccgcauuuguaucuga

SEQ ID NO: 197027 - RNA, 1701 nt, Artificial Sequence; identical to SEQ ID NO: 195094
  derived and/or modified CDS sequence (opt5) from hemagglutinin__InfluenzaA__ADG59664

SEQ ID NO: 197028 - RNA, 1701 nt, Artificial Sequence
  derived and/or modified CDS sequence (opt5) from hemagglutinin__InfluenzaA__ADG59666
augaaggccauccuggugguccuccuguacaccuucgcuacagccaacgcggacacgcuuugcauuggcuaucacgcuaauaacagcaccgauacaguugacaccgugcuggagaagaaugugacagucacccauuccgugaaccuccuggaagauaagcacaaugggaaacuuuguaagcugagaggaguugcuccccuccaucugggcaaaugcaacaucgccggguggauucugggaaauccugagugugaaucucucagcacagccuccucuuggagcuacaucguggagaccuccucuagcgacaacggcacgugcuauccgggggauuuuauugacuacgaagaacugcgggagcagcuuuccagcgucucuuccuucgaacgcuuugagaucuuccccaagaccagcucuuggccuaaucacgauuccaacaagggagugacagccgcuuguccccaugccggcgcgaaaucuuuuuauaagaaucugaucuggcucguuaaaaagggcaacagcuacccuaaacuguccaagagcuauauuaaugacaaggggaaagaagugcuuguccuguggggaauccaccaccccuccaccucugccgaucaacagagccucuaccagaacgcugacgccuacguguucgugggcacauccagauauagcaagaaauuuaagccugagauugcuauccggccgaaaguccgcgaucaggaggggagaaugaauuacuauuggacccugguugaacccggagacaagauuacguucgaggccacaggcaaccugguggugccucgguacgcguuugccauggaacgcgaugcugggucuggaaucauuaucuccgacacccccguccaugacugcaacacaaccugucaaaccccuaaaggcgccaucaauacaagccuccccuuccagaacauucacccgaucacgauuggcaagugcccuaaguaugugaaaucuaccaagcugagacuugcuacagggcugcggaauguucccagcauccagucccgcggacucuuuggcgccauugccggguucaucgagggaggcuggaccgggaugguggauggaugguacggcuaucaucaccagaacgaacaaggcucuggguacgcugcggaccugaaaagcacacagaaugccaucgaugagauuaccaacaaggucaauuccgugaucgagaaaaugaacacgcaguuuacagcuguuggaaaggaguucaaucaccuugagaagagaauugaaaaccugaauaaaaagaucgacgauggcuuccucgacauuuggaccuacaacgccgagcugcuggugcuccuggaaaaugagcggacccuugauuaucaugacagcaacgucaaaaaucuguacgagaaggugcgcucucagcucaaaaacaacgccaaggaaaucgggaauggauguuuugaguucuaucacaagugcgauaacacauguauggaauccgucaaaaauggcaccuacgacuauccuaaguacagcgaggaagcuaaacugaacagagaggagaucgauggggugaaacuugaaucuacacggauuuaucaaauccuggccauuuacuccgcgguugcuagcucccucgugcuggucgugucucugggcgccaucagcuuuuggaugugcuccaauggaucucuccagugccgcauuuguaucuga

SEQ ID NO: 197029 - RNA, 1701 nt, Artificial Sequence; identical to SEQ ID NO: 195843
  derived and/or modified CDS sequence (opt5) from hemagglutinin__InfluenzaA__ADG59667

SEQ ID NO: 197030 - RNA, 1701 nt, Artificial Sequence
  derived and/or modified CDS sequence (opt5) from hemagglutinin__InfluenzaA__ADG59669
augaaggccauccuggugguccuccuguacaccuucgcuacagccaacgcggacacgcuuugcauuggcuaucacgcuaauaacagcaccgauacaguugacaccgugcuggagaagaaugugacagucacccauuccgugaaccuccuggaagauaagcacaaugggaaacuuuguaagcugagaggaguugcuccccuccaucugggcaaaugcaacaucgccggguggauucugggaaauccugagugugaaucucucagcacagccuccucuuggagcuacaucguggagaccuccucuagcgacaacggcacgugcuauccgggggauuuuauugacuacgaagaacugcgggagcagcuuuccagcgucucuuccuucgaacgcuuugagaucuuccccaagaccagcucuuggccuaaucacgauuccaacaagggagugacagccgcuuguccccaugccggcgcgaaaucuuuuuauaagaaucugaucuggcucguuaaaaagggcaacagcuacccuaaacuguccaagagcuauauuaaugacaaggggaaagaagugcuuguccuguggggaauccaccaccccuccaccucugccgaucaacagagccucuaccagaacgcugacgccuacguguucgugggcacauccagauauagcaagaaauuuaagccugagauugcuauccggccgaaaguccgcgagcaggaagggagaaugaauuacuauuggacccugguugaucccggagacaagauuacguucgaggccacaggcaaccugguggugccucgguacgcguuugccauggaacgcaacgcugggucuggaaucauuaucuccgauacccccguccaugacugcaauacaaccugucaaaccccuaaaggcgccaucaacacaagccuccccuuccagaauauucacucuaucacgauuggcaagugcccgaaguaugugaaaagcaccaagcugagacuugcuacagggcugcggaacguuccuuccauccagucucgcggacucuuuggcgccauugccggguucaucgagggaggcuggaccgggaugguggacggaugguacggcuaucaucaccagaaugaacaaggcagcggguacgcugcggaucugaaauccacacagaacgccaucgacgagauuaccaauaaggucaacagcgugaucgagaaaaugaauacgcaguuuacagcuguuggaaaggaguucaaccaccuugagaagagaauugaaaaucugaacaaaaagguggaugacggcuuccucgauaucuggaccuacaaugccgagcugcugguccuccuggaaaacgagcggacccuugacuaucaugauucuaaugugaaaaaccuguacgagaagguccgcucccagcucaaaaacaaugccaaggaaauugggaacggauguuuugaguucuaucacaagugcgacaauacauguauggaaagcgugaaaaacggcaccuacgauuaucccaaguacucugaggaagcuaaacugaauagagaggagaucgacgggguuaaacuugaauccacacggaucuaucaaauucuggccaucuacagcacgguggcguccucucucguccuggugguuagccugggcgcuauuuccuuuuggaugugcucuaacggaagccuccagugccgcaucuguauuuga

SEQ ID NO: 197031 - RNA, 1701 nt, Artificial Sequence; identical to SEQ ID NO: 197030
  derived and/or modified CDS sequence (opt5) from hemagglutinin__InfluenzaA__ADG59670

SEQ ID NO: 197032 - RNA, 1701 nt, Artificial Sequence; identical to SEQ ID NO: 197030
  derived and/or modified CDS sequence (opt5) from hemagglutinin__InfluenzaA__ADG59671

SEQ ID NO: 197033 - RNA, 1701 nt, Artificial Sequence; identical to SEQ ID NO: 197030
  derived and/or modified CDS sequence (opt5) from hemagglutinin__InfluenzaA__ADG59672

SEQ ID NO: 197034 - RNA, 1701 nt, Artificial Sequence
  derived and/or modified CDS sequence (opt5) from hemagglutinin__InfluenzaA__ADG59673
augaaggccauccuggugguccuccuguacaccuucgcuacagccaacgcggacacgcuuugcauuggcuaucacgcuaauaacagcaccgauacaguugacaccgugcuggagaaaaaugugacagucacccauuccguggaucuccuggaagacaagcacaacgggaaacuuuguaagcugagaggaguugcgccccuccaucugggcgagugcaauaucgccggguggauucugggaaacccugaaugugagucucucagcacagcuuccucuuggagcuacaucguggaaaccuccucuagcgauaauggcacgugcuauccgggggacuuuauugauuacgaggagcugcgggaacagcuuuccagcgucucuuccuucgagcgcuuugaaaucuuccccaaaaccagcucuuggccuaaccacgacuccaauaagggagugacagccgcuuguccccaugccggcgccaagagcuuuuauaaaaaccugaucuggcucguuaagaaaggcaauucuuacccuaagcuguccaaaagcuauauuaacgauaaggggaaggaggugcuuguccuguggggaauccaccaccccuccaccucugccgaccaacagagccucuaccagaaugcugaugccuacguguucgugggcacauccagauauagcaaaaaguuuaaaccugagauugcuauccggccgaagguccgcgaccaggaagggagaaugaacuacuauuggacccugguugagcccggagauaaaauuacguucgaagccacaggcaaucugguggugccucgguacgcguuugccauggagcgcaacgcugggucuggaaucauuaucuccgacacccccguccaugacugcaacacaaccugucaaaccccuaagggcgccaucaauacaagccuccccuuccagaacauucacccgaucacgauuggcaaaugcccuaaguaugugaagucuaccaaacugagacuugcuacagggcugcggaauguucccagcauccagucccgcggacucuuuggcgccauugccggguucaucgaaggaggcuggaccgggaugguggauggaugguacggcuaucaucaccagaacgagcaaggcucuggguacgcugcggaccuuaagagcacacagaaugccaucgaugagauuaccaacaaagucaauuccgugaucgaaaagaugaacacgcaguuuacagcuguuggaaaagaguucaaucaccuggaaaagagaauugagaaccugaauaagaaaguggacgauggcuuccucgacaucuggaccuacaacgccgaacugcugguccuccuggagaaugagcggacccuugauuaucaugacagcaacgugaagaaucuguacgaaaaaguccgcucucagcucaagaacaacgccaaagagauugggaauggauguuuugaguucuaucacaagugcgauaacacauguauggaauccgugaagaauggcaccuacgacuauccuaaauacagcgaagaggcuaagcugaacagagaggaaaucgaugggguuaaacuugagucuacacggaucuaucaaauucuggccaucuacuccacgguggcgagcucccucguccuggugguuucucugggcgcuauuagcuuuuggaugugcuccaauggaucucuccagugccgcaucuguauuuga

SEQ ID NO: 197035 - RNA, 1701 nt, Artificial Sequence
  derived and/or modified CDS sequence (opt5) from hemagglutinin__InfluenzaA__ADG59674
augaaggccauccuggugguccuccuguacaccuucgcuacagccaacgcggacacgcuuugcguuggcuaucacgcuaauaacagcaccgauacaguggacaccgugcuggagaaaaaugucacagugacccauuccguuaaccuccuggaagauaagcacaaugggaaacuuuguaagcugagaggaguggcuccccuccaucugggcaaaugcaacauugccggguggauccugggaaauccugagugugaaucucucagcacagccuccucuuggagcuacauugucgagaccuccucuagcgacaacggcacgugcuauccgggggauuuuaucgacuacgaagaacugcgggagcagcuuuccagcgugucuuccuucgaacgcuuugagauuuuccccaagaccagcucuuggccuaaucacgauuccaacaagggaguuacagccgcuuguccccaugccggcgcgaaaucuuuuuauaagaaucugaucuggcucgugaaaaagggcaacagcuacccuaaacuguccaagagcuauaucaaugacaaggggaaagaaguccuugugcuguggggcauucaccaccccuccaccucugccgaucaacagagccucuaccagaacgcugacgccuacguguucgucggaacauccagauauagcaagaaauuuaagccugagaucgcuauucggccgaaaguucgcgagcaggaagggagaaugaauuacuauuggacccugguggagcccggagauaagaucacguucgaagccacaggcaaccugguggucccucgguacgcguuugccauggagcgcaacgcugggucuggaauuaucauuuccgacacccccgugcaugauugcaauacaaccugucaaaccccuaaaggcgccaucaacacaagccuccccuuccagaauguucacccgaucacgauuggcaagugcccuaaguaugugaaaucuaccaagcugagacuugcuacagggcugcggaacguccccagcauccagucccgcggacucuuuggcgccauugccggguucaucgaaggaggcuggaccgggaugguggacggaugguacggcuaucaucaccagaaugagcaaggcucuggguacgcugcggaccugaaaagcacacagaacgccauugaugagaucaccaauaagguuaacuccgugaucgaaaagaugaauacgcaguuuacagcugucggaaaggaguucaaccaccuugaaaagagaauugagaaucugaacaaaaagguggacgauggcuuccucgacaucuggaccuacaaugccgaacugcugguccuccuggagaacgagcggacccuugauuaucaugacagcaaugugaaaaaccuguacgaaaagguucgcucucagcucaaaaacaaugccaaggagauugggaacggauguuuugaguucuaucacaagugcgauaauacauguauggaguccgugaaaaacggcaccuacgacuauccuaaguacagcgaagaggcuaaacugaauagagaggaaaucgauggggucaaacuugagucuacaaaaauuuaucaaauccuggccaucuacuccacgguggcgagcucccucguucugguggucucucugggcgcuauuagcuuuuggaugugcuccaacggaucucuccagugccggaucuguauuuga

SEQ ID NO: 197036 - RNA, 1701 nt, Artificial Sequence
  derived and/or modified CDS sequence (opt5) from hemagglutinin__InfluenzaA__ADG59675
augaaggccauccuggugguccuccuguacaccuucgcuacagccaacgcggacacgcuuugcauuggcuaucacgcuaauaacagcaccgauacaguugacaccgugcuggagaaaaaugugacagucacccauuccgugaaccuccuggaagauaagcacaaugggaaacuuuguaagcugagaggaguugcuccccuccaucugggcaaaugcaacaucgccggguggauucugggaaauccugagugugaaucucucagcacagccuccucuuggagcuacaucguggagaccuccucuagcgacaacggcacgugcuauccgggggauuuuauugacuacgaagaacugcgggagcagcuuuccagcgucucuuccuucgaacgcuuugagaucuuccccaagaccagcucuuggccuaaucacgauuccaacaagggagugacagccgcuuguccccaugccggcgcgaaaucuuuuuauaagaaucugaucuggcucguuaaaaagggcaacagcuacccuaaacuguccaagagcuauauuaaugacaaggggaaagaagugcuuguccuguggggaauccaccaccccuccaccucugccgaucaacagagccucuaccagaacgcugacgccuacguguucgugggcuccagcagauauucuaagaaauuuaagccugagauugcuauccggccgaaaguccgcgaucaggaggggagaaugaauuacuauuggacacugguugaacccggagacaagauuaccuucgaggccacgggcaaccugguggugccucgguacgcguuugccauggaacgcaacgcuggguccggaaucauuaucagcgauacacccguccaugacugcaauaccacaugucaaaccccuaacggcgccaucaauaccucucuccccuuccacaacauucauccgaucacaauuggcaaaugcccuaaguauguuaagagcacgaaacugagacuugcuaccgggcugcggaaugugcccuccauccagucucgcggacucuuuggcgccauugccggguucaucgagggaggcuggacagggaugguggacggaugguacggcuaucaccaccagaacgaacagggcagcggguacgcugcggaucugaaguccacccaaaaugccaucgacgagauuacaaacaaagucaauagcgugaucgagaagaugaacacccaguuuacggcuguuggaaaagaguucaaucaucuugagaagagaauugaaaaccugaauaagaaaguggaugacggcuuccucgauaucuggacauacaacgccgagcugcugguccuccuggaaaaugagcggacccuugacuaucacgauucuaacgugaagaaccuguacgagaaaguccgcucccagcucaagaauaacgccaaagaaauugggaauggauguuuugaguucuaucauaagugcgacaacaccuguauggaaagcgugaagaauggcacauacgauuauccuaaauacucugaggaagcuaagcugaacagagaggagaucgacgggguuaaacuugaauccacccggaucuaucagauucuggccaucuacagcacaguggcguccucucucguccuggugguuagccugggcgcuauuuccuuuuggaugugcucuaauggaagccuccaaugccgcaucuguauuuga

SEQ ID NO: 197037 - RNA, 1701 nt, Artificial Sequence
  derived and/or modified CDS sequence (opt5) from hemagglutinin__InfluenzaA__ADG59676
augaaggccauccuggugguccuccuguacaccuucgcuacagccaacgcggacacgcuuugcauuggcuaucacgcuaauaacagcaccgauacaguugacaccgugcuggagaagaaugugacagucacccauuccgugaaccuccuggaagauaagcacaaugggaaacuuuguaagcugagaggaguugcuccccuccaucugggcaaaugcaacaucgccggguggauucugggaaauccugagugugaaucucucagcacagccuccucuuggagcuacaucguggagaccuccucuagcgacaacggcacgugcuauccgggggauuuuauugacuacgaagaacugcgggagcagcuuuccagcgucucuuccuucgaacgcuuugagaucuuccccaagaccagcucuuggccuaaucacgauuccaacaagggagugacagccgcuuguccccaugccggcgcgaaaucuuuuuauaagaaucugaucuggcucguuaaaaagggcaacagcuacccuaaacuguccaagagcuauauuaaugacaaggggaaagaagugcuuguccuguggggaauccaccaccccuccaccucugccgaucaacagagccucuaccagaacgcugacgccuacguguucgugggcacauccagauauagcaagaaauuuaagccugagauugcuauccggccgaaaguccgcgaucaggaggggagaaugaauuacuauuggacccugguugaacccggagacaagauuacguucgaggccacaggcaaccugguggugccucgguacgcguuugccauggaacgcaacgcugggucuggaaucauuaucuccgauacccccguccaugacugcaaugccacaugucaaaccccuaaaggcgcuaucaacaccagccuccccuuccagaauauucacccgaucacaauuggcaagugcccuaaguaugugaaaucuacgaagcugagacuugccaccgggcugcggaacauccccagcauucagucccgcggacucuuuggcgccaucgcuggguucaucgagggaggcuggacagggaugguugacggaugguacggcuaucaucaccagaaugaacaaggcucuggguacgcggccgaucugaaaagcacccagaacgcuauugacgagaucacaaauaaggugaacuccgucauugagaaaaugaauacccaguuuacggccgugggaaaggaguucaaccaccuugagaagagaaucgaaaaucugaacaaaaagguugaugacggcuuccucgauauuuggacauacaaugccgagcugcuggugcuccuggaaaacgagcggacccuugacuaucaugauagcaaugucaaaaaccuguacgagaaggugcgcucucagcucaaaaacaaugcuaaggaaaucgggaacggauguuuugaguucuaucacaagugcgacaauaccuguauggaauccgucaaaaacggcacauacgauuauccuaaguacagcgaggaagccaaacugaauagagaggagaucgacggggugaaacuugaaucuacccggauuuaucaaauccuggcgauuuacuccacaguugcuagcucccucgugcuggucgugucucugggcgccaucagcuuuuggaugugcuccaacggaucucuccagugccgcauuuguaucuga

SEQ ID NO: 197038 - RNA, 1701 nt, Artificial Sequence; identical to SEQ ID NO: 195842
  derived and/or modified CDS sequence (opt5) from hemagglutinin__InfluenzaA__ADG59678

SEQ ID NO: 197039 - RNA, 1701 nt, Artificial Sequence; identical to SEQ ID NO: 197005
  derived and/or modified CDS sequence (opt5) from hemagglutinin__InfluenzaA__ADG59680

SEQ ID NO: 197040 - RNA, 1701 nt, Artificial Sequence; identical to SEQ ID NO: 197005
  derived and/or modified CDS sequence (opt5) from hemagglutinin__InfluenzaA__ADG59681

SEQ ID NO: 197041 - RNA, 1701 nt, Artificial Sequence
  derived and/or modified CDS sequence (opt5) from hemagglutinin__InfluenzaA__ADG59683
augaaggccauccuggugguccuccuguacaccuucgcuauugccaacgcggacacacuuugcaucggcuaucacgcuaauaacagcacggauaccguugacacagugcugaaaaagaaugugaccgucacacauuccgugaaccuccuggaggauaaacacaaugggaaacuuuguaaacugagaggaguugcgccccuccaucugggcaagugcaacauugccggguggauccugggaaauccugaaugugagucucucagcaccgcuuccucuuggagcuacauuguggaaacauccucuagcgacaacggaaccugcuauccgggggauuuuaucgacuacgaggaacugcgggagcagcuuuccagcgucucuuccuucgagcgcuuugaaaucuuccccaagacgagcucuuggccuaaucacgauuccaacaaaggagugaccgccgcuuguccccaugccggcgccaagagcuuuuauaaaaaucugauuuggcucguuaagaaaggcaacucuuacccuaagcuguccaagagcuauaucaaugacaaagggaaggaggugcuuguccuguggggcauucaccaccccuccacaucugccgaucaacagagccucuaccagaacgcugacgccuacguguucgugggcaccuccagauauagcaaaaaguuuaaaccugaaaucgcuauucggccgaagguccgcgaucaggaggggagaaugaauuacuauuggacacugguugagcccggagacaaaaucaccuucgaagccacgggcaaccugguggugccucgguacgcguuugccauggagcgcaacgcugggucuggaauugucaucuccgauacacccgugcaugacugcaauaccacaugucaaaccccuaagggcgccaucaacaccagccuccccuuccagaauauucacccgaucacaauuggcaagugcccuaaauauguuaagucuacgaaacugagacuugcuaccgggcugcggaacgugcccagcauccagucccgcggacucuuuggcgccauugccggguucaucgaaggaggcuggacagggauggucgacggaugguacggcuaucaucaccagaaugagcaaggcucuggguacgcugcggaucuuaagagcacccagaacgccaucgacgaaauuacaaauaaagugaacuccguuaucgagaagaugaauacccaguuuacggcugugggaaaggaguucaaccaccuggaaaagagaauugagaaucugaacaagaaagucgaugacggcuuccucgauaucuggacauacaaugccgaacugcuggugcuccuggagaacgaacggacccuugacuaucaugauagcaaugucaagaaccuguacgagaaagugcgcucucagcucaagaacaaugccaaggagauugggaacggauguuuugaguucuaucacaaaugcgacaauaccuguauggaauccguuaagaacggcacauacgauuauccuaaauacagcgaagaggcuaagcugaauagagaagagaucgacggggugaaacuugagucuacccggaucuaucaaauucuggccaucuacuccacagucgcgagcucccucgugcugguugugucucugggcgcuauuagcuuuuggaugugcuccaacggaucucuccagugccgcaucuguauuuga

SEQ ID NO: 197042 - RNA, 1701 nt, Artificial Sequence; identical to SEQ ID NO: 195842
  derived and/or modified CDS sequence (opt5) from hemagglutinin__InfluenzaA__ADG59684

SEQ ID NO: 197043 - RNA, 1701 nt, Artificial Sequence
  derived and/or modified CDS sequence (opt5) from hemagglutinin__InfluenzaA__ADG59685
augaaggccauccuggugguccuccuguacaccuucgcuacagccaacgcggacacgcuuugcauuggcuaucacgcuaauaacagcaccgauacaaucgacaccguucuggagaagaaugugacagugacccauuccgucaaccuccuggaagauaagcacaaugggaaacuuuguaagcugagaggaguggcuccccuccaucugggcaaaugcaacauugccggguggauccugggaaauccugagugugaaucucucagcacagccuccucuuggagcuacauuguugagaccuccucuagcgacaacggcacgugcuauccgggggauuuuaucgacuacgaagaacugcgggagcagcuuuccagcgugucuuccuucgaacgcuuugagaucuuccccaagaccagcucuuggccuaaucacgauuccaacaagggagucacagccgcuuguccccaugccggcgcgaaaucuuuuuauaagaaucugauuuggcucgugaaaaagggcaacagcuacccuaaacuguccaagagcuauaucaaugacaaggggaaagaaguucuugugcuguggggcauucaccaccccuccaccucugccgaucaacagagccucuaccagaacgcugacgccuacgucuucgugggaacauccagauauagcaagaaauuuaagccugagaucgcuauucggccgaaagugcgcgaucaggaggggagaaugaauuacuauuggacccuggucgaacccggagacaagaucacguucgaggccacaggcaaccugguugugccucgguacgcguuugccauggaacgcaacgcugggucuggaauuaucaucuccgauacccccgugcaugacugcaauacaaccugucaaaccccuaaaggcgccauuaacacaagccuccccuuccagaauauccacccgauuacgaucggcaagugcccuaaguaugucaaaucuaccaagcugagacuugcuacagggcugcggaacauucccagcauccagucccgcggacucuuuggcgccaucgccggguucauugagggaggcuggaccgggaugguggacggaugguacggcuaucaucaccagaaugaacaaggcucuggguacgcugcggaucugaaaagcacacagaacgccaucgacgagauuaccaauaagguuaacuccgugaucgagaaaaugaauacgcaguuuacagcugucggaaaggaguucaaccaccuugagaagagaauugaaaaucugaacaaaaagguggaugacggcuuccucgauaucuggaccuacaaugccgagcugcugguucuccuggaaaacgagcggacccuugacuaucaugauagcaaugugaaaaaccuguacgagaagguccgcucucagcucaaaaacaaugccaaggaaaucgggaacggauguuuugaguucuaucacaagugcgacaauacauguauggaauccgugaaaaacggcaccuacgauuauccuaaguacagcgaggaagcuaaacugaauagagaggagauugacggggucaaacuugaaucuacacggaucuaucaaauucuggccaucuacuccacgguggcgagcucccucguucugguggucucucugggcgcuauuagcuuuuggaugugcuccaacggaucucuccagugccgcaucuguauuuga

SEQ ID NO: 197044 - RNA, 1701 nt, Artificial Sequence; identical to SEQ ID NO: 195842
  derived and/or modified CDS sequence (opt5) from hemagglutinin__InfluenzaA__ADG59686

SEQ ID NO: 197045 - RNA, 1701 nt, Artificial Sequence; identical to SEQ ID NO: 197005
  derived and/or modified CDS sequence (opt5) from hemagglutinin__InfluenzaA__ADG59687

SEQ ID NO: 197046 - RNA, 1701 nt, Artificial Sequence
  derived and/or modified CDS sequence (opt5) from hemagglutinin__InfluenzaA__ADG59688
augaaggccauccuggugguccuccuguacaccauugcuacagccaacgcggacacgcuuugcaucggcuaucacgcuaauaacagcaccgauacaauugacaccguucuggagaagaaugugacagugacccauuccgucaaccuccuggaagauaagcacaaugggaaacuuuguaagcugagaggaguggcuccccuccaucugggcaaaugcaacaucgccggguggauucugggaaauccugagugugaaucucucagcacagccuccucuuggagcuacaucguugagaccuccucuagcgacaacggcacgugcuauccgggggauuucaucgacuacgaggaacugcgggagcagcuuuccagcgugucuuccuuugaacgcuucgagauuuuucccaagaccagcucuuggccuaaucacgauuccaacaagggagucacagccgcuuguccccaugccggcgcgaaaucuuucuauaagaaucugaucuggcucgugaaaaagggcaacagcuacccuaaacuguccaagagcuauauuaaugacaaggggaaagaaguucuugugcuguggggaauccaccaccccuccaccucugccgaucaacagagccucuaccagaacgcugacgccuacgucuuugugggcacauccagauauagcaagaaauucaagccugagauugcuauccggccgaaagugcgcgggcaggagggaagaaugaauuacuauuggacccuggucgaacccggcgauaagauuacguuugaggccacagggaaccugguugugccucgguacgcguucgccauggaacgcaacgcuggaucuggcaucaucauuuccgacacccccgugcaugauugcaauacaaccugucaaaccccuaaaggcgccaucaacacaagccuccccuuucagaauauucacccgaucacgauugggaagugcccuaaguaugucaaaucuaccaagcugagacuugcuacaggacugcggaacauccccagcauccagucccgcggccucuucggggccauugccggauuuaucgagggcggguggaccggaaugguggacggcugguacggcuaucaucaccagaaugaacaagggucuggauacgcugcggaccugaaaagcacacagaacgccauugaugagaucaccaauaagguuaacuccgugauugagaaaaugaauacgcaguucacagcugucggcaaggaauuuaaccaccuugagaagagaaucgaaaaucugaacaaaaagguggacgauggguuccucgacaucuggaccuacaaugccgagcugcugguucuccuggaaaacgagcggacccuugauuaucaugacagcaaugugaaaaaccuguacgagaagguccgcucucagcucaaaaacaaugccaaggaaauuggaaacggcuguuucgaguuuuaucacaagugcgauaauacauguauggaauccgugaaaaacgggaccuacgacuauccuaaguacagcgaggaagcuaaacugaauagagaggagaucgauggcgucaaacuugaaucuacacggauuuaucaaauccuggccauuuacuccacgguggcgagcucccucguucugguggucucucugggagcuaucagcuucuggaugugcuccaacggcucucuccagugccgcauuuguaucuga

SEQ ID NO: 197047 - RNA, 1701 nt, Artificial Sequence; identical to SEQ ID NO: 194741
  derived and/or modified CDS sequence (opt5) from hemagglutinin__InfluenzaA__ADG59689

SEQ ID NO: 197048 - RNA, 1701 nt, Artificial Sequence; identical to SEQ ID NO: 194741
  derived and/or modified CDS sequence (opt5) from hemagglutinin__InfluenzaA__ADG59691

SEQ ID NO: 197049 - RNA, 1701 nt, Artificial Sequence
  derived and/or modified CDS sequence (opt5) from hemagglutinin__InfluenzaA__ADG59693
augaaggccauccuggugguccuccuguacaccuucgcuacagccaacgcggacacgcuuugcauuggcuaucacgcuaauaacagcaccgauacaguugacaccgugcuggagaagaaugugacagucacccauuccgugaaccuccuggaagauaagcacaaugggaaacuuuguaagcugagaggaguugcuccccuccaucugggcaaaugcaacaucgccggguggauucugggaaauccugagugugaaucucucagcacagccuccucuuggagcuacaucguggagaccuccucuagcgacaacggcacgugcuauccgggggauuuuauugacuacgaagaacugcgggagcagcuuuccagcgucucuuccuucgaacgcuuugagaucuuccccaagaccagcucuuggccuaaucacgauuccaacaagggagugacagccgcuuguccccaugccggcgcgaaauccuuuuauaagaaucugaucuggcucguuaaaaagggcaacucuuacccuaaacuguccaagagcuauauuaaugacaaggggaaagaagugcuuguccuguggggaauccaccaccccuccaccucugccgaucaacagagccucuaccagaacgcugacgccuacguguucgugggcacauccagauauagcaagaaauuuaagccugagauugcuauccggccgaaaguccgcaaucaggaggggagaaugaacuacuauuggacccugguugaacccggagauaagauuacguucgaggccacaggcaaccugguggugccucgguacgcguuugccauggaacgcaaugcugggucuggaaucauuaucuccgacacccccguccaugauugcaacacaaccugucaaaccccuaaaggcgccaucaauacaagccuccccuuccagaacauucacccgaucacgauuggcaagugcccuaaguaugugaaaucuaccaagcugagacuugcuacagggcugcggaauauccccagcauucagucccgcggacucuuuggcgccaucgccggguucaucgagggaggcuggaccgggaugguugacggaugguacggcuaucaucaccagaacgaacaaggcucuggguacgcugcggaccugaaaagcacacagaaugccauugaugagaucaccaacaaggugaauagcgucauugagaaaaugaacacgcaguuuacagcugugggaaaggaguucaaucaccuugagaagagaaucgaaaaccugaauaaaaagguugacgauggcuuccucgacauuuggaccuacaacgccgagcugcuggugcuccuggaaaaugagcggacccuugauuaucaugacagcaacgucaaaaaccuguacgagaaggugcgcucucagcucaaaaauaacgccaaggaaaucgggaauggauguuuugaguucuaucacaagugcgauaacacauguauggaauccgucaaaaauggcaccuacgacuauccuaaguacagcgaggaagcuaaacugaacagagaggagaucgauggggugaaacuugaaucuacacggauuuaucaaauccuggccauuuacuccacgguugcgagcucccucgugcuggucgugucucugggcgcuaucagcuuuuggaugugcuccaauggaucucuccagugccgcauuuguaucuga

SEQ ID NO: 197050 - RNA, 1701 nt, Artificial Sequence
  derived and/or modified CDS sequence (opt5) from hemagglutinin__InfluenzaA__ADG59696
augaaggccauccuggugguccuccuguacaccuucgcuacagccaacgcggacacgcuuugcauuggcuaucacgcuaauaacagcaccgauacaguugacaccgugcuggagaaaaaugugacagucacccauuccgugaaccuccuggaagauaagcacaaugggaaacuuuguaagcugagaggaguugcuccccuccaucugggcaaaugcaacaucgccggguggauucugggaaauccugagugugaaucucucagcacagccuccucuuggagcuacaucguggagaccuccucuagcgacaacggcacgugcuauccgggggauuuuauugacuacgaagaacugcgggagcagcuuuccagcgucucuuccuucgaacgcuuugagaucuuccccaagaccagcucuuggccuaaucacgauuccaacaagggagugacagccgcuuguccccaugccggcgcgaaaucuuuuuauaagaaucugaucuggcucguuaaaaagggcaacagcuacccuaaacuguccaagagcuauauuaaugacaaggggaaagaagugcuuguccuguggggaauccaccaccccuccaccucugccgaucaacagagccucuaccagaacgcugacgccuacguguucgugggcacauccagauauagcaagaaauuuaagccugagauugcuauccggccgaaaguccgcgagcaggaagggagaaugaauuacuauuggacccugguugagcccggagauaagauuacguucgaagccacaggcaaccugguggugccucgguacgcguuugccauggagcgcgacgcugggucuggaaucauuaucuccgauacccccguccaugacugcaacacaaccugucaaaccccuaaaggcgccaucaauacaagccuccccuuccagaacauucacccgaucacgauuggcaagugcccuaaguaugugaaaucuaccaagcugagacuugcuacagggcugcggaauguucccagcauccagucccgcggacucuuuggcgccauugccggguucaucgaaggaggcuggaccgggaugguggacggaugguacggcuaucaucaccagaacgagcaaggcucuggguacgcugcggaucugaaaagcacacagaaugccaucgacgagauuaccaacaaggucaauuccgugaucgaaaagaugaacacgcaguuuacagcuguuggaaaggaguucaaucaccuugaaaagagaauugagaaccugaauaaaaagguggaugacggcuuccucgauaucuggaccuacaacgccgaacugcugguccuccuggagaaugagcggacccuugacuaucaugauagcaacgugaaaaaucuguacgaaaagguccgcucucagcucaaaaacaacgccaaggagauugggaauggauguuuugaguucuaucacaagugcgacaacacauguauggaguccgugaaaaauggcaccuacgauuauccuaaguacagcgaagaggcuaaacugaacagagaggaaaucgacgggguuaaacuugagucuacacggaucuaucaaauucuggccaucuacuccacgguggcgagcucccucguccuggugguuucucugggcgcuauuagcuuuuggaugugcuccaauggaucucuccagugccgcaucuguauuuga

SEQ ID NO: 197051 - RNA, 1701 nt, Artificial Sequence
  derived and/or modified CDS sequence (opt5) from hemagglutinin__InfluenzaA__ADG59697
augaaggccauccuggugguccuccuguacaccuucgcuacagccaacgcggacacgcuuugcauuggcuaucacgcuaauaacagcaccgauacaguugacaccgugcuggagaagaaugugacagucacccauuccgugaaccuccuggaagauaagcacaaugggaaacuuuguaagcugagaggaguugcuccccuccaucugggcaaaugcaacaucgccggguggauucugggaaauccugagugugaaucucucagcacagccuccucuuggagcuacaucguggagaccuccucuagcgacaacggcacgugcuauccgggggauuuuauugacuacgaagaacugcgggagcagcuuuccagcgucucuuccuucgaacgcuuugagaucuuccccaagaccagcucuuggccuaaucacgauuccaacaagggagugacagccgcuuguccccaugccggcgcgaaaaauuuuuauaagaaccugaucuggcucguuaaaaagggcaauagcuacccuaaacugucuaaguccuauauuaacgacaaggggaaagaagugcuuguccuguggggaauccaccaccccagcaccuccgccgaucaacagucucucuaccagaaugcugacgccuacguguucgugggcacaagcagauauuccaagaaauuuaagccugagauugcuauccggccgaaaguccgcgggcaggagggaagaaugaacuacuauuggacccugguugaacccggcgauaagauuacguucgaggccacagggaaccugguggugccucgguacgcguuugccauggaacgcaaugcuggaagcggcaucauuaucucugacacccccguccaugauugcaacacaaccugucaaaccccuaaaggcgccaucaauacaucccuccccuuccagaacauucacccgaucacgauugggaagugcccuaaguaugugaaaagcaccaagcugagacuugcuacaggacugcggaauguucccucuauccagagccgcggccucuuuggggccauugccggauucaucgagggcggguggaccggaaugguggacggcugguacggcuaucaucaccagaacgaacaaggguccggauacgcugcggaccugaaaucuacacagaaugccaucgaugagauuaccaacaaggucaauagcgugaucgagaaaaugaacacgcaguuuacagcuguuggcaaggaguucaaucaccuugagaagagaauugaaaaccugaauaaaaagguggacgauggguuccucgacaucuggaccuacaacgccgagcugcugguccuccuggaaaaugagcggacccuugauuaucaugacuccaacgugaaaaaccuguacgagaagguccgcagccagcucaaaaauaacgccaaggaaauuggaaauggcuguuuugaguucuaucacaagugcgauaacacauguauggaaucugugaaaaaugggaccuacgacuauccuaaguacuccgaggaagcuaaacugaacagagaggagaucgauggcguuaaacuugaaagcacacggaucuaucaaauucuggccaucuacucuacgguggcguccagccucguccuggugguuucccugggagcuauuucuuuuuggaugugcagcaauggcucccuccagugccgcaucuguauuuga

SEQ ID NO: 197052 - RNA, 1701 nt, Artificial Sequence
  derived and/or modified CDS sequence (opt5) from hemagglutinin__InfluenzaA__ADG59700
augaaggccauccuggugguccuccuguacaccuucgcuacagccaacgcggacacgcuuugcauuggcuaucacgcuaauaacagcaccgauacaguugacaccgugcuggagaaaaaugugacagucacccauuccgugaaccuccuggaagauaagcacaaugggaaacuuuguaagcugagaggaguugcuccccuccaucugggcaaaugcaacaucgccggguggauucugggaaauccugagugugaaucucucagcacagccuccucuuggagcuacaucguggagaccuccucuagcgacaacggcacgugcuauccgggggauuuuauugacuacgaagaacugcgggagcagcuuuccagcgucucuuccuucgaacgcuuugagaucuuccccaagaccagcucuuggccuaaucacgauuccaacaagggagugacagccgcuuguccccaugccggcgcgaaaucuuuuuauaagaaucugaucuggcucguuaaaaagggcaacagcuacccuaaacuguccaagagcuauauuaaugacaaggggaaagaagugcuuguccuguggggaauccaccaccccuccaccucugccgaucaacagagccucuaccagaacgcugacgccuacguguucgugggcacauccagauauagcaagaaauuuaagccugagauugcuauccggccgaaaguccgcgaucaggaggggagaaugaauuacuauuggacccugguugaacccggagacaagauuacguucgaggccacaggcaaccugguggugccucgguacgcguuugccauggaacgcaacgcugggucuggaaucauuaucuccgauacccccguccaugacugcaauacaaccugucaaacccucaaaggcgccaucaacacaagccugccuuuccagaauauucaccccaucacgauuggcaagugcccgaaguaugugaaaucuaccaaacuuagacuggcuacagggcuccggaacaucccuagcauucagucccgcggacuguuuggcgccaucgccggguucaucgagggaggcuggaccgggaugguugacggaugguacggcuaucaucaccagaaugaacaaggcucuggguacgcugcggaucuuaagagcacacagaacgccauugacgagaucaccaauaaggugaacuccgucauugagaaaaugaauacgcaguuuacagcugugggaaaggaguucaaccaccuggagaagagaaucgaaaaucucaacaaaaagguugaugacggcuuccuggauauuuggaccuacaaugccgagcugcucgugcugcuugaaaacgagcggacccuggacuaucaugauagcaaugucaaaaaccucuacgagaaggugcgcucucagcugaaaaacaaugccaaggaaaucgggaacggauguuuugaguucuaucacaagugcgacaauacauguauggaauccgucaaaaacggcaccuacgauuaucccaaguacagcgaggaagcuaaacuuaauagagaggagaucgacggggugaagcuggaaucuacacggauuuaucaaauccucgccauuuacuccacgguugcgagcucccuggugcuggucgugucucucggcgcuaucagcuuuuggaugugcuccaacggaucucugcagugccgcauuuguaucuga

SEQ ID NO: 197053 - RNA, 1701 nt, Artificial Sequence
  derived and/or modified CDS sequence (opt5) from hemagglutinin__InfluenzaA__ADG59701
augaaggccauccuggugguccuccuguacaccuucgcugccgcgaacgcugacacacuuugcauuggcuaucacgccaauaacagcacggauaccguugacacagugcuggagaaaaaugugaccgucacacauuccgugaaccuccuggaagauaagcacaaugggaaacuuuguaagcugagaggaguugcuccccuccaucugggcaaaugcaacaucgccggguggauucugggaaauccugagugugaaucucucagcaccgccuccucuuggagcuacaucguggagacauccucuagcgacaacgggaccugcuauccgggcgauuuuauugacuacgaagaacugcgggagcagcuuuccagcgucucuuccuucgaacgcuuugagaucuuccccaagacgagcucuuggccuaaucacgauuccaacaagggagugaccgcugccuguccccaugcgggcgccaagagcuuuuauaaaaaucugaucuggcucguuaaaaagggcaacucuuacccuaaacuguccaagagcuauauuaaugacaaggggaaagaagugcuuguccuguggggaauccaccaccccuccacaucugcugaucaacagagccucuaccagaacgccgacgcuuacguguucgugggcaccuccagauauagcaagaaauuuaagccugagauugccauccggccgaaaguccgcgaucaggaggggagaaugaauuacuauuggacacugguugaacccggagacaagauuaccuucgaggcgacgggcaaccugguggugccucgguacgccuuugcuauggaacgcaacgccgggucuggaaucauuaucuccgauacacccguccaugacugcaauaccacaugucaaaccccuaaaggcgcuaucaacaccagccuccccuuccagaauauucacccgaucacaauuggcaagugcccuaaguaugugaaaucuacgaagcugagacuugccaccgggcugcggaacguucccagcauccagucccgcggacucuuuggcgccauugcuggguucaucgagggaggcuggacagggaugguggacggaugguacggcuaucaucaccagaaugaacaaggcucuggguacgcggccgaucugaaaagcacccagaacgcuaucgacaagauuacaaauaaagucaacuccgugaucgagaagaugaauacccaguuuacggccguuggaaaggaguucaaccaccuugagaaaagaauugagaaucugaacaagaaaguggaugacggcuuccucgauaucuggacauacaaugccgaacugcugguccuccuggagaacgaacggacccuugacuaucaugauagcaaugugaagaaccuguacgagaaaguccgcucucagcucaagaacaaugcuaaggagauugggaacggauguuuugaguucuaucacaaaugcgacaauaccuguauggaauccgugaagaacggcacauacgauuauccuaaauacagcgaagaggccaagcugaauagagaagagaucgacgggguuaaacuugagucuacccggaucuaucaaauucuggcgaucuacuccacaguggcuagcucccucguccuggugguuucucugggcgccauuagcuuuuggaugugcuccaacggaucucuccagugccgcaucuguauuuga

SEQ ID NO: 197054 - RNA, 1701 nt, Artificial Sequence
  derived and/or modified CDS sequence (opt5) from hemagglutinin__InfluenzaA__ADG59702
augaaggccauccuggugguccuccuguacaccuucgcuacagccaacgcggacacgcuuugcauuggcuaucacgcuaauaacagcaccgauacaguugacaccgugcuggagaagaaugugacagucacccauuccgugaaccuccuggaagauaagcacaaugggaaacuuuguaagcugagaggaguugcuccccuccaucugggcaaaugcaacaucgccggguggauucugggaaauccugagugugaaucucucagcacagccuccucuuggagcuacaucguggagaccuccucuagcgacaacggcacgugcuauccgggggauuuuauugacuacgaagaacugcgggagcagcuuuccagcgucucuuccuucgaacgcuuugagaucuuccccaagaccagcucuuggccuaaucacgauuccaacaagggagugacagccgcuuguccccaugccggcgcgaaaucuuuuuauaagaaucugaucuggcucguuaaaaagggcaacagcuacccuaaacuguccaagagcuauauuaaugacaaggggaaagaagugcuuguccuguggggaauccaccaccccuccaccucugccgaucaacagagccucuaccagaacgcugacgccuacguguucgugggcacauccagauauagcaagaaauuuaagccugagauugcuauccggccgaaaguccgcgaucaggaggggagaaugaauuacuauuggacccugguugaacccggagacaagauuacguucgaggccacaggcaaccugguggugccucgguacgcguuugccauggaacgcaacgcugggucuggaaucauuaucuccgauacccccguccaugacugcaauacaaccugucaaaccccuaaaggcgccaucaacacaagccuccccuuccagaauauucacccgaucacgauuggcaagugcccuaaguaugugaaaucuaccaagcugagacuugcuacagggcugcggaacauccccagcauucagucccgcggacucuuuggcgccaucgccggguucaucgagggaggcuggaccgggaugguugacggaugguacggcuaucaucaccagaaugaacaaggcucuggguacgcugcggaucugaaaagcacacagaacgccauugacgagaucaccaauaaggugaacuccgucauugagaaaaugaauacgcaguuuacagcugugggaaaggaguucaaccaccuugagaagagaaucgaaaaucugaacaaaaagguugaugacggcuuccucgauauuuggaccuacaaugccgagcugcuggugcuccuggaaaacgagcggaaucuugacuaucaugauagcaacgucaaaaaccuguacgagaaggugcgcucucagcucaaaaauaacgccaaggaaaucgggaauggauguuuugaguucuaucacaagugcgacaacaccuguauggaauccgucaaaaauggcacauacgauuauccuaaguacagcgaggaagcuaaacugaacagagaggagaucgacggggugaaacuugaaucuacccggauuuaucaaauccuggccauuuacuccacaguugcgagcucccucgugcuggucgugucucugggcgcuaucagcuuuuggaugugcuccaauggaucucuccagugccgcauuuguaucuga

SEQ ID NO: 197055 - RNA, 1701 nt, Artificial Sequence
  derived and/or modified CDS sequence (opt5) from hemagglutinin__InfluenzaA__ADG59703
augaaggccauccuggugguccuccuguacaccuucgcuacagccaacgcggacacgcuuugcauuggcuaucacgcuaauaacagcaccgauacaguugacaccgugcuggagaagaaugugacagucacccauuccgugaaccuccuggaagauaagcacaaugggaaacuuuguaagcugagaggaguugcuccccuccaucugggcaaaugcaacaucgccggguggauucugggaaauccugagugugaaucucucagcacagccuccucuuggagcuacaucguggagaccuccucuagcgacaacggcacgugcuauccgggggauuuuauugacuacgaagaacugcgggagcagcuuuccagcgucucuuccuucgaacgcuuugagaucuuccccaagaccagcucuuggccuaaucacgaucccaacaagggagugacagccgcuuguccucaugccggcgcgaaauccuuuuauaagaaucugaucuggcucguuaaaaagggcaacagcuaccccaaacugucuaaguccuauauuaaugacaaggggaaagaagugcuuguccuguggggaauccaccacccuagcaccuccgccgaucaacagucucucuaccagaacgcugacgccuacguguucgugggcacaagcagauauuccaagaaauuuaagccggagauugcuauccggcccaaaguccgcgaucaggaggggagaaugaauuacuauuggacccugguugaaccuggagacaagauuacguucgaggccacaggcaaccugguggugccccgguacgcguuugccauggaacgcaacgcugggagcggaaucgucauuucugauaccccugugcaugacugcaauacaaccugucaaacccccaaaggcgccaucaacacaucccucccguuccagaauauccacccuauuacgaucggcaagugccccaaguauguuaaaagcaccaagcugagacuugcuacagggcugcggaacgugccuucuauucagagccgcggacucuuuggcgccaucgccggguucauugagggaggcuggaccgggauggucgacggaugguacggcuaucaucaccagaaugaacaaggcuccggguacgcugcggaucugaaaucuacacagaacgccaucgacgagaucaccaauaaggugaacagcguuauugagaaaaugaauacgcaguuuacagcugugggaaaggaguucaaccaccuugagaagagaaucgaaaaucugaacaaaaaggucgaugacggcuuccucgauauuuggaccuacaaugccgagcugcuggugcuccuggaaaacgagcggacccuugacuaucaugauuccaaugucaaaaaccuguacgagaaggugcgcagccagcucaaaaacaaugccaaggaaaucgggaacggauguuuugaguucuaucacaagugcgacaauacauguauggaaucuguuaaaaacggcaccuacgauuaucccaaguacuccgaggaagcuaaacugaauagagaggagauugacggggugaaacuugaaagcacacggaucuaucaaauccuggccauuuacucuacggucgcguccagccucgugcugguugugucccugggcgcuaucucuuuuuggaugugcagcaacggaucccuccagugccgcauuuguaucuga

SEQ ID NO: 197056 - RNA, 1701 nt, Artificial Sequence; identical to SEQ ID NO: 194756
  derived and/or modified CDS sequence (opt5) from hemagglutinin__InfluenzaA__ADG76646

SEQ ID NO: 197057 - RNA, 1701 nt, Artificial Sequence
  derived and/or modified CDS sequence (opt5) from hemagglutinin__InfluenzaA__ADG76652
augaaggccauccuggugguccuccuguacaccuucgcuacagccaacgcggacacgcuuugcauuggcuaucacgcuaauaacagcaccgauacaguugacaccgugcuggagaaaaaugugacagucacccauuccgugaaccuccuggaagauaagcacaaugggaaacuuuguaagcugagaggaguugcuccccuccaucugggcaaaugcaacaucgccggguggauucugggaaauccugagugugaaucuuuuagcacauccucuagcugguccuacaucguggagaccccgucuagcgacaacggcacgugcuaucccggggauuucauugacuacgaagaacuccgggagcagcuguccagcgucucuuccuuugaacgcuucgagaucuuuccuaagaccagcucuuggcccaaucacgauuccaacaagggagugacagccgccuguccucaugcuggcgccaagagcuucuauaaaaaucuuaucuggcugguuaaaaagggcaacucuuaccccaaacucuccaagagcuauauuaaugacaaggggaaagaagugcugguccuuuggggaauccaccacccuuccaccucugcggaucaacagagccuguaccagaacgccgacacauacguguuugugggcuccagcagauauucuaagaaauucaagccggagauugcuauccggcccaaaguccgcgaucaggaggggagaaugaauuacuauuggacccucguugaaccuggagacaagauuacguuugaggccacaggcaaccugguggugccccgguacgcuuucgccauggaacgcaacgcgggguccggaaucauuaucagcgauaccccuguccaugacugcaauacaaccugucaaacccccaaaggcgccaucaacacaucucugccguuucagaauauucacccuaucacgauuggcaagugccccaaguaugugaaaagcaccaagcucagacuggcuacagggcuucggaacaucccuuccauucagucucgcggacuguucggcgccaucgcuggguuuaucgagggaggcuggaccgggaugguugacggaugguacggcuaucaucaccagaaugaacaaggcagcggguacgccgccgaucucaaauccacacagaacgcuauugacgagaucaccaauaaggugaacagcgucauugagaaaaugaauacgcaguucacagcggugggaaaggaguucaaccaccuggagaagagaaucgaaaaucuuaacaaaaagguugaugacggcuuucuggauauuuggaccuacaaugccgagcuccuggugcugcucgaaaacgagcggacccuggacuaucaugauucuaaugucaaaaaccuuuacgagaaggugcgcucccagcugaaaaacaaugcuaaggaaaucgggaacggauguuucgaguuuuaucacaagugcgacaauacauguauggaaagcgucaaaaacggcaccuacgauuaucccaaguacucugaggaagccaaacucaauagagaggagaucgacggggugaagcuggaauccacacggauuuaucaaauccuugccauuuacagcacgguugcuuccucucuggugcucgucgugagccugggcgccaucuccuucuggaugugcucuaacggaagccugcagugccgcauuuguaucuga

SEQ ID NO: 197058 - RNA, 1701 nt, Artificial Sequence; identical to SEQ ID NO: 194983
  derived and/or modified CDS sequence (opt5) from hemagglutinin__InfluenzaA__ADH01808

SEQ ID NO: 197059 - RNA, 1701 nt, Artificial Sequence
  derived and/or modified CDS sequence (opt5) from hemagglutinin__InfluenzaA__ADH01818
augaaggccauccuggugguccuccuguacaccuucgcuacagccaacgcggacacgcuuugcauuggcuaucacgcuaauaacagcaccgauacaguugacaccgugcuggagaagaaugugacagucacccauuccgugaaccuccuggaagauaagcacaaugggaaacuuuguaagcugagaggaguugcuccccuccaucugggcaaaugcaacaucgccggguggauucugggaaauccugagugugaaucucucagcacagccuccucuuggagcuacaucguggagaccuccucuagcgacaacggcacgugcuauccgggggauuuuauugacuacgaagaacugcgggagcagcuuuccagcgucucuuccuucgaacgcuuugagaucuuccccaagaccagcucuuggccuaaucacgauuccaacaagggagugacagccgcuuguccccaugccggcgcgaaaucuuuuuauaagaaucugaucuggcucguuaaaaagggcaacagcuacccuaaacuguccaagagcuauauuaaugacaaggggaaagaagugcuuguccuguggggaauccaccaccccuccaccucugccgaucaacagagccucuaccagaacgcugacgccuacguguucgugggcacauccagauauagcaagaaauuuaagccugagauugcuauccggccgaaaguccgcgaucaggaggggagaaugaauuacuauuggacccugguugaacccggagacaagauuacguucgaggccacaggcaaccugguggugccucgguacgcguuugccauggaacgcaacgcugggucuggaaucauuaucuccgauacccccguccaugacugcaauacaaccugucaaaccccuaaaggcgccaucaacacaagccuccccuuccagaauauucacccgaucacgauuggcaagugcccuaaguaugugaaaucuaccaagcugagacuugcuacagggcugcggaacguucccagcauccagucccgcggacucuuuggcgccauugccggguucaucgagggaggcuggaccgggaugguggacggaugguacggcuaucaucaccagaaugaacaaggcucuggguacgcugcggaucugaaaagcacacagaacgccaucgacgagauuaccaauaaggucaacuccgugaucgagaaaaugaauacgcaguuuacagcuguuggaaaggaguucaaccaccuugagaagagaauugaaaaucugaacaaaaagguggaugacggcuuccucgauaucuggaccuacaaugccgagcugcugguccuccuggaaaacgagcggacccuugacuaucaugauagcaaugugaaaaaccuguacgagaagguccgcucucagcucaaaaacaaugccaaggaaauugggaacggauguuuugaguucuaucacaagugcgacaauacauguauggaauccgugaaaaacggcaccuacgauuauccuaaguacagcgaggaagcuaaacugaauagagaggagaucgacgggguuaaacuugaaucuacacggaucuaucaaauucuggccaucuacuccacgguggcgagcucccucguccugauugugucucugggcgcuaucagcuuuuggaugugcuccaacggaucucuccagugccgcauuuguaucuga

SEQ ID NO: 197060 - RNA, 1701 nt, Artificial Sequence; identical to SEQ ID NO: 194983
  derived and/or modified CDS sequence (opt5) from hemagglutinin__InfluenzaA__ADH01828

SEQ ID NO: 197061 - RNA, 1701 nt, Artificial Sequence; identical to SEQ ID NO: 194741
  derived and/or modified CDS sequence (opt5) from hemagglutinin__InfluenzaA__ADH01838

SEQ ID NO: 197062 - RNA, 1701 nt, Artificial Sequence; identical to SEQ ID NO: 194983
  derived and/or modified CDS sequence (opt5) from hemagglutinin__InfluenzaA__ADH01848

SEQ ID NO: 197063 - RNA, 1701 nt, Artificial Sequence; identical to SEQ ID NO: 194983
  derived and/or modified CDS sequence (opt5) from hemagglutinin__InfluenzaA__ADH01858

SEQ ID NO: 197064 - RNA, 1701 nt, Artificial Sequence; identical to SEQ ID NO: 194741
  derived and/or modified CDS sequence (opt5) from hemagglutinin__InfluenzaA__ADH01868

SEQ ID NO: 197065 - RNA, 1701 nt, Artificial Sequence; identical to SEQ ID NO: 194741
  derived and/or modified CDS sequence (opt5) from hemagglutinin__InfluenzaA__ADH01878

SEQ ID NO: 197066 - RNA, 1701 nt, Artificial Sequence; identical to SEQ ID NO: 194983
  derived and/or modified CDS sequence (opt5) from hemagglutinin__InfluenzaA__ADH01888

SEQ ID NO: 197067 - RNA, 1701 nt, Artificial Sequence; identical to SEQ ID NO: 194741
  derived and/or modified CDS sequence (opt5) from hemagglutinin__InfluenzaA__ADH01898

SEQ ID NO: 197068 - RNA, 1701 nt, Artificial Sequence; identical to SEQ ID NO: 194832
  derived and/or modified CDS sequence (opt5) from hemagglutinin__InfluenzaA__ADH01908

SEQ ID NO: 197069 - RNA, 1701 nt, Artificial Sequence
  derived and/or modified CDS sequence (opt5) from hemagglutinin__InfluenzaA__ADH01918
augaaggccauccuggugguccuccuguacaccuucgcuacagccaacgcggacacgcuuugcauuggcuaucacgcuaauaacagcaccgauacaguugacaccgugcuggagaaaaaugugacagucacccauuccgugaaccuccuggaagauaagcacaaugggaaacuuuguaagcugagaggaguugcuccccuccaucugggcaaaugcaacaucgccggguggauucugggaaauccugagugugaaucucucagcacagaguccucuuggagcuacaucguggaaaccuccucuagcgacaacggcacgugcuauccgggggauuuuauugacuacgaggagcugcgggaacagcuuuccagcgucucuuccuucgagcgcuuugaaaucuuccccaagaccagcucuuggccuaaucacgauuccaacaagggagugacagccgccuguccccaugcuggcgccaagagcuuuuauaaaaaucugaucuggcucguuaaaaagggcaacucuuacccuaaacuguccaagagcuauauuaaugacaaggagaaagaggugcuuguccugugggggauccaccaccccuccaccucugcggaucaacagagccucuaccagaacgccgacgcuuacguguucgugggaacauccagauauagcaagaaauuuaagccugaaauugccauccggccgaaaguccgcgaucaggagggcagaaugaauuacuauuggacccugguugaacccggggacaagauuacguucgaggcuacaggaaaccugguggugccucgguacgccuuugcgauggaacgcaacgccggcucugggaucauuaucuccgauacccccguccaugacugcaauacaaccugucaaaccccuaaaggagcuaucaacacaagccuccccuuccagaauauucacccgaucacgauuggcaagugcccuaaguaugugaaaucuaccaagcugagacuugccacaggccugcggaacguucccagcauccagucccgcgggcucuuuggagcuauugccggcuucaucgaagggggauggaccggcaugguggacgggugguacggauaucaucaccagaaugagcaaggcucuggcuacgccgcugaucugaaaagcacacagaacgcgaucgacaagauuaccaauaaagucaacuccgugaucgaaaagaugaauacgcaguuuacagccguugggaaggaguucaaccaccuugagaaaagaauugagaaucugaacaagaaaguggaugacggauuccucgauaucuggaccuacaaugcugaacugcugguccuccuggagaacgagcggacccuugacuaucaugauagcaaugugaagaaccuguacgaaaaaguccgcucucagcucaagaacaaugccaaggagauuggcaacggguguuuugaguucuaucacaaaugcgacaauacauguauggaauccgugaagaacggaaccuacgauuauccuaaauacagcgaagaggccaagcugaauagagaggaaaucgacggcguuaaacuugagucuacacggaucuaucaaauucuggcuaucuacuccacgguggccagcucccucguccuggugguuucucugggggcgauuagcuuuuggaugugcuccaacggcucucuccagugccgcaucuguauuuga

SEQ ID NO: 197070 - RNA, 1701 nt, Artificial Sequence
  derived and/or modified CDS sequence (opt5) from hemagglutinin__InfluenzaA__ADH01928
augaaggccauccuggugguccuccuguacaccuucgcuacagccaacgcggacacgcuuugcauuggcuaucacgcuaauaacagcaccgauacaguugacaccgugcuggagaaaaaugugacagucacccauuccgugaaccuccuggaagauaagcacaaugggaaacuuuguaagcugagaggaguugcuccccuccaucugggcaaaugcaacaucgccggguggauucugggaaauccugagugugaaucucucagcacagccuccucuuggagcuacaucguggagaccuccucuagcgacaacggcacgugcuauccgggggauuuuauugacuacgaagaacugcgggagcagcuuuccagcgccucuuccuucgaacgcuuugagaucuuccccaagaccagcucuuggccuaaucacgauuccaacaagggagucacagcugccuguccccaugcgggcgccaagagcuuuuauaagaaucugaucuggcucgugaaaaagggcaacucuuacccuaaacuguccaagagcuauauuaaugacaaggggaaagaaguucuugugcuguggggaauccaccaccccuccaccucugcugaucaacagagccucuaccagaacgccgacgcuuacgucuucgugggcacauccagauauagcaagaaauuuaagccugagauugccauccggccgaaagugcgcgaucaggaggggagaaugaauuacuauuggacccuggucgaacccggagacaagauuacguucgaggcgacaggcaaccugguugugccucgguacgccuuugcuauggaacgcaacgccgggucuggaaucauuaucuccgauacccccgugcaugacugcaauacaaccugucaaaccccuaaaggcgcuaucaacacaagccuccccuuccagaauauucacccgaucacgauuggcaagugcccuaaguaugucaaaucuaccaagcugagacuugccacagggcugcggaacauccccagcauucagucccgcggacucuuuggcgccaucgcuggguucaucgagggaggcuggaccgggaugguggacggaugguacggcuaucaucaccagaaugaacaaggcucuggguacgcggccgaucugaaaagcacacagaacgcuauugacgagaucaccaauaagguuaacuccgugauugagaaaaugaauacgcaguuuacagccgucggaaaggaguucaaccaccuugagaagagaaucgaaaaucugaacaaaaagguggaugacggcuuccucgauauuuggaccuacaaugccgagcugcugguucuccuggaaaacgagcggacccuugacuaucaugauagcaaugugaaaaaccuguacgagaagguccgcucucagcucaaaaacaaugcuaaggaaaucgggaacggauguuuugaguucuaucacaagugcgacaauacauguauggaauccgugaaaaacggcaccuacgauuauccuaaguacagcgaggaagccaaacugaauagagaggagaucgacggggucaaacuugaaucuacacggauuuaucaaauccuggcgauuuacuccacgguggcuagcucccucguucugguggucucucugggcgccaucagcuuuuggaugugcuccaacggaucucuccagugccgcauuuguaucuga

SEQ ID NO: 197071 - RNA, 1701 nt, Artificial Sequence
  derived and/or modified CDS sequence (opt5) from hemagglutinin__InfluenzaA__ADH01938
augaaggccauccuggugguccuccuguacaccuucgcuacagccaacgcggacacgcuuugcauuggcuaucacgcuaauaacagcaccgauacaguugacaccgugcuggagaaaaaugugacagucacccauuccgugaaccuccuggaagauaagcacaaugggaaacuuuguaagcugagaggaguugcuccccuccaucugggcaaaugcaacaucgccggguggauucugggaaauccugagugugaaucucucagcacagccuccucuuggagcuacaucguggagaccuccucuagcgacaacggcacgugcuauccgggggauuuuauugacuacgaagaacugcgggagcagcuuuccagcgucucuuccuucgaacgcuuugagaucuuccccaagaccagcucuuggccuaaucacgauuccaacaagggagugacagccgcuuguccccaugccggcgcgaaaucuuuuuauaagaaucugaucuggcucguuaaaaagggcaacagcuacccuaaacuguccaagagcuauauuaaugacaaggggaaagaagugcuuguccuguggggaauccaccaccccuccaccucugccgaucaacagagccucuaccagaacgcugacgccuacguguucgugggcacauccagauauagcaagaaauuuaagccugagauugcuauccggccgaaaguccgcgaucaggaggggagaaugaauuacuauuggacccugguugaacccggagacaagauuacguucgaggccacaggcaaccugguggugccucgguacgcguuugccauggaacgcaacgcugggucuggaaucauuaucuccgauacccccguccaugacugcaauacaaccugucaaaccccuaaaggcgccaucaacacaagccuccccuuccagaauauucacccgaucacgauuggcaagugcccuaaguaugugaaaucuaccaagcugagacuugcuacagggcugcggaacguucccagcauccagucccgcggacucuuuggcgccauugccggguucaucgagggaggcuggaccgggaugguggacggaugguacggcuaucaucaccagaaugaacaaggcucuggguacgcugcggaucugaaaagcacacagaacgccaucgacgagauuaccaauaaggucaacuccgugaucgagaaaaugaauacgcaguuuacagcuguuggaaaggaguucaaccaccuugagaagagaauugaaaaucugaacaaaaagguggaugacggcuuccucgauaucuggaccuacaaugccgagcugcugguccuccuggaaaacgagcggacccuugacuaucaugauagcaaugugaaaaaccuguacaagaaaguccgcucucagcucaagaacaaugccaaggagauugggaacggauguuuugaguucuaucacaaaugcgacaauacauguauggaauccgugaagaacggcaccuacgauuauccuaaauacagcgaagaggcuaagcugaauagagaagagaucgacgggguuaaacuugagucuacacggaucuaucaaauucuggccaucuacuccacgguggcgagcucccucguccuggugguuucucugggcgcuauuagcuuuuggaugugcuccaacggaucucuccagugccgcaucuguauuuga

SEQ ID NO: 197072 - RNA, 1701 nt, Artificial Sequence; identical to SEQ ID NO: 195905
  derived and/or modified CDS sequence (opt5) from hemagglutinin__InfluenzaA__ADH01948

SEQ ID NO: 197073 - RNA, 1701 nt, Artificial Sequence
  derived and/or modified CDS sequence (opt5) from hemagglutinin__InfluenzaA__ADH01958
augaaggccauccuggugguccuccuguacaccuucgcuacagccaacgcggacacgcuuugcauuggcuaucacgcuaauaacagcaccgauacaguugacaccgugcuggagaaaaaugugacagucacccauuccgugaaccuccuggaagauaagcacaaugggaaacuuuguaagcugagaggaguugcuccccuccaucugggcaaaugcaacaucgccggguggauucugggaaauccugagugugaaucucucagcacagccuccucuuggagcuacaucguggagaccuccucuagcgacaacggcacgugcuauccgggggauuuuauugacuacgaagaacugcgggagcagcuuuccagcgucucuuccuucgaacgcuuugagaucuuccccaagaccagcucuuggccuaaucacgauuccaacaagggagugacagccgcuuguccccaugccggcgcgaaaucuuuuuauaagaaucugaucuggcucguuaaaaagggcaacagcuacccuaaacuguccaagagcuauauuaaugacaaggggaaagaagugcuuguccuguggggaauccaccaccccuccaccucugccgaucaacagagccucuaccagaacgcugacgccuacguguucgugggcacauccagauauagcaagaaauuuaagccugagauugcuauccggccgaaaguccgcgaucaggaggggagaaugaauuacuauuggacccugguugaacccggagacaagauuacguucgaggccacaggcaaccugguggugccucgguacgcguuugccauggaacgcaacgcugggucuggaaucauuaucuccgauacccccguccaugacugcaauacaaccugucaaaccccuaaaggcgccaucaacacaagccuccccuuccagaauauucacccgaucacgauuggcaacugcccuaaguaugugaagucuaccaaacugagacuugcuacagggcugcggaauguucccagcauccagucccgcggacucuuuggcgccauugccggguucaucgagggaggcuggaccgggaugguggacggaugguacggcuaucaucaccagaacgaacaaggcucuggguacgcugcggaucuuaagagcacacagaaugccaucgacaaaauuaccaacaaggucaauuccgugaucgagaaaaugaacacgcaguuuacagcuguuggaaaggaguucaaucaccuugaaaagagaauugagaaccugaauaaaaagguggaugacggcuuccucgauaucuggaccuacaacgccgaacugcugguccuccuggagaaugaacggacccuugacuaucaugauagcaacgugaaaaaccuguacgagaagguccgcucucagcucaaaaauaacgccaaggagauugggaauggauguuuugaguucuaucacaagugcgacaacacauguauggaguccgugaaaaauggcaccuacgauuauccuaaguacagcgaagaggcuaaacugaacagagaagagaucgacgggguuaagcuggagucuacacggaucuaucaaauucuggccaucuacuccacgguggcgagcucccucguccugauugugucucugggcgcuaucagcuuuuggaugugcuccaauggaucucuccagugccgcauuuguaucuga

SEQ ID NO: 197074 - RNA, 1701 nt, Artificial Sequence
  derived and/or modified CDS sequence (opt5) from hemagglutinin__InfluenzaA__ADH01968
augaaggccauccuggugguccuccuguacaccuucgcuacagccaacgcggacacgcuuugcauuggcuaucacgcuaauaacagcaccgauacaguugacaccgugcuggagaaaaaugugacagucacccauuccgugaaccuccuggaagauaagcacaaugggaaacuuuguaagcugagaggaguugcuccccuccaucugggcaaaugcaacaucgccggguggauucugggaaauccugagugugaaucucucagcacagccuccucuuggagcuacaucguggagaccuccucuagcgacaacggcacgugcuauccgggggauuuuauugacuacgaagaacugcgggagcagcuuuccagcgucucuuccuucgaacgcuuugagaucuuccccaagaccagcucuuggccuaaucacgauuccaacaagggagugacagccgcuuguccccaugccggcgcgaaaucuuuuuauaagaaucugaucuggcucguuaaaaagggcaacagcuacccuaaacuguccaagagcuauauuaaugacaaggggaaagaagugcuuguccuguggggaauccaccaccccuccaccucugccgaucaacagagccucuaccagaacgcugacgccuacguguucgugggcacauccagauauagcaagaaauuuaagccugagauugcuauccggccgaaaguccgcgagcaggaagggagaaugaauuacuauuggacccugguugagcccggagauaagauuacguucgaagccacaggcaaccugguggugccucgguacgcguuugccauggagcgcaacgcugggucuggaaucauuaucuccgacacccccguccaugauugcaauacaaccugucaaaccccuaaaggcgccaucaacacaagccuccccuuccagaauauucacccgaucacgauuggcaagugcccuaaguaugugaaaucuaccaagcugagacuugcuacagggcugcggaacguucccagcauccagucccgcggacucuuuggcgccauugccggguucaucgaaggaggcuggaccgggaugguggacggaugguacggcuaucaucaccagaaugagcaaggcucuggguacgcugcggaccugaaaagcacacagaacgccaucgauaagauuaccaauaaagucaacuccgugaucgagaagaugaauacgcaguuuacagcuguuggaaaggaguucaaccaccuugagaaaagaauugaaaaucugaacaagaaaguggacgauggcuuccucgacaucuggaccuacaaugccgagcugcugguccuccuggaaaacgagcggacccuugauuaucaugacagcaaugugaagaaccuguacgagaaaguccgcaaccagcucaagaauaacgccaaggaaauugggaauggauguuuugaguucuaucacaaaugcgauaacacauguauggaaucugugaagaauggcaccuacgacuauccuaaauacuccgaggaagcuaagcugaacagagaggagaucgaugggguuaaacuugaaagcacacggaucuaucaaauucuggccaucuacucuacgguggcguccagccucguccuggugguuucccugggcgcuauuucuuuuuggaugugcagcaauggaucccuccagugccgcaucuguauuuga

SEQ ID NO: 197075 - RNA, 1701 nt, Artificial Sequence; identical to SEQ ID NO: 195905
  derived and/or modified CDS sequence (opt5) from hemagglutinin__InfluenzaA__ADH01978

SEQ ID NO: 197076 - RNA, 1701 nt, Artificial Sequence; identical to SEQ ID NO: 195905
  derived and/or modified CDS sequence (opt5) from hemagglutinin__InfluenzaA__ADH01988

SEQ ID NO: 197077 - RNA, 1701 nt, Artificial Sequence; identical to SEQ ID NO: 196908
  derived and/or modified CDS sequence (opt5) from hemagglutinin__InfluenzaA__ADH01998

SEQ ID NO: 197078 - RNA, 1701 nt, Artificial Sequence
  derived and/or modified CDS sequence (opt5) from hemagglutinin__InfluenzaA__ADH02008
augaaggccauccuggugguccuccuguacaccuucgcuacagccaacgcggacacgcuuugcauuggcuaucacgcuaauaacagcaccgauacaguugacaccgugcuggagaaaaaugugacagucacccauuccgugaaccuccuggaagggaagcacaauggaaaacuuuguaagcugagaggcguugcuccccuccaucuggggaaaugcaacaucgccggauggauucugggcaauccugagugugaaucucucagcacagccuccucuuggagcuacaucguggagaccuccucuagcgauaacgggacgugcuauccgggagacuuuauugauuacgaagaacugcgggagcagcuuuccagcgucucuuccuucgaacgcuuugagaucuuccccaagaccagcucuuggccuaaucacgacuccaacaagggcgugacagccgcuuguccccaugccggcgcgaaaucuuuuuauaagaaucugaucuggcucauuaaaaaggggaacagcuacccuaaacuguccaagagcuauaucaaugauaaggaaaaagagguucuugugcuguggggcauucaccaccccuccaccucugccgaccaacagagccucuaccagaacgcugaugccuacgucuucgugggaacauccagauauagcaagaaauuuaagccugagaucgcuauucggccgaaagugcgcgaccaggaagggagaaugaauuacuauuggacccuggucgagcccggagauaagaucacguucgaagccacaggcaaccugguugugccucgguacgcguuugccauggagcgcaacgcugggucuggaauuaucaucuccgacacccccgugcaugauugcaauacaaccugucaaaccccuaaaggcgccauuaacacaagccuccccuuccagaauauccacccgauuacgaucggcaagugcccuaaguaugucaaaucuaccaagcugagacuugcuacagggcugcggaacauucccagcauccagucccgcggacucuuuggcgccaucgccggguucauugaaggaggcuggaccgggaugguggacggaugguacggcuaucaucaccagaaugagcaaggcucuggguacgcugcggaccugaaaagcacacagaacgccaucgaugagauuaccaauaagguuaacuccgugaucgaaaagaugaauacgcaguuuacagcugucggaaaggaguucaaccaccuugaaaagagaauugagaaucugaacaaaaagguggacgauggcuuccucgacaucuggaccuacaaugccgaacugcugguucuccuggagaacgagcggacccuugauuaucaugacagcaaugugaaaaaccuguacgaaaagguccgcucucagcucaaaaacaaugccaaggagaucgggaacggauguuuugaguucuaucacaagugcgauaauacauguauggaguccgugaaaaacggcaccuacgacuauccuaaguacagcgaagaggcuaaacugaauagagaggaaauugauggggucaaacuugagucuacacggaucuaucaaauucuggccaucuacuccacgguggcgagcucccucguucugguggucucucugggcgcuauuagcuuuuggaugugcuccaacggaucucuccagugccgcaucuguauuuga

SEQ ID NO: 197079 - RNA, 1701 nt, Artificial Sequence; identical to SEQ ID NO: 195905
  derived and/or modified CDS sequence (opt5) from hemagglutinin__InfluenzaA__ADI24508

SEQ ID NO: 197080 - RNA, 1701 nt, Artificial Sequence
  derived and/or modified CDS sequence (opt5) from hemagglutinin__InfluenzaA__ADI24515
augaaggccauccuggugguccuccuguacaccuucgcuacagccaacgcggacacgcuuugcguuggcuaucacgcuaauaacagcaccgauacaguggacaccgugcuggagaaaaaugucacagugacccauuccguuaaccuccuggaagauaagcacaaugggaaacuuuguaagcugagaggaguggcuccccuccaucugggcaaaugcaacauugccggguggauccugggaaauccugagugugaaucucucccgacagccagcuccuggucuuacauugucgagaccagcuccucugacaacggcacgugcuaucccggggauuuuaucgacuacgaagaacugcgggagcagcuuagcuccgugagcucuuucgaacgcuuugagauuuucccuaagaccuccagcuggcccaaucacgauucuaacaagggaguuacagccgcuuguccucaugccggcgcgaaauccuuuuauaagaaucugaucuggcucgugaaaaagggcaacagcuaccccaaacugucuaaguccuauaucaaugacaaggggaaagaaguccuugugcuguggggcauucaccacccuagcaccuccgccgaucaacagucucucuaccagaacgcugacgccuacguguucgucggaacaagcagauauuccaagaaauuuaagccggagaucgcuauucggcccaaaguucgcgaucaggaggggagaaugaauuacuauuggacccugguggaaccuggagacaagaucacguucgaggccacaggcaaccugguggucccccgguacgcguuugccauggaacgcaacgcugggagcggaauuaucauuucugauaccccugugcaugacugcaauacaaccugucaaacccccaaaggcgccaucaacacaucccucccguuccagaauauccacccuauuacgaucggcaagugccccaaguauguuaaaagcaccaagcugagacuugcuacagggcugcggaacgugccuucuauucagagccgcggacucuuuggcgccaucgccggguucauugagggaggcuggaccgggauggucgacggaugguacggcuaucaucaccagaaugaacaaggcuccggguacgcugcggaucugaaaucuacacagaacgccaucgacaagagcaccaauaaagugaacuccguuaucgagaagaugaauacgcaguuuacagcugugggaaaggaguucaaccaccuugagaaaagaauugagaaucugaacaagaaagucgaugacggcuuccucgauaucuggaccuacaaugccgaacugcuggugcuccuggagaacgaacggacccuugacuaucaugauagcaaugucaagaaccuguacgagaaagugcgcucucagcucaagaacaaugccaaggagauugggaacggauguuuugaguucuaucacaaaugcgacaauacauguauggaauccguuaagaacggcaccuacgauuaucccaaauacagcgaagaggcuaagcugaauagagaagagaucgacggggugaaacuugagucuacacggauuuaucaaauccuggccaucuacuccacggucgcgagcucccucgugcugguugugucucugggcgcuauuagcuuuuggaugugcuccaacggaucucuccagugccgcaucuguauuuga

SEQ ID NO: 197081 - RNA, 1701 nt, Artificial Sequence; identical to SEQ ID NO: 195905
  derived and/or modified CDS sequence (opt5) from hemagglutinin__InfluenzaA__ADI24517

SEQ ID NO: 197082 - RNA, 1701 nt, Artificial Sequence; identical to SEQ ID NO: 195905
  derived and/or modified CDS sequence (opt5) from hemagglutinin__InfluenzaA__ADI24519

SEQ ID NO: 197083 - RNA, 1701 nt, Artificial Sequence; identical to SEQ ID NO: 195905
  derived and/or modified CDS sequence (opt5) from hemagglutinin__InfluenzaA__ADI24521

SEQ ID NO: 197084 - RNA, 1701 nt, Artificial Sequence; identical to SEQ ID NO: 196293
  derived and/or modified CDS sequence (opt5) from hemagglutinin__InfluenzaA__ADI24523

SEQ ID NO: 197085 - RNA, 1701 nt, Artificial Sequence
  derived and/or modified CDS sequence (opt5) from hemagglutinin__InfluenzaA__ADI24525
augaaggccauccuggugguccuccuguacaccuucgcuacagccaacgcggacacgcuuugcauuggcuaucacgcuaauaacagcaccgauacaguugacaccgugcuggagaaaaaugugacagucacccauuccgugaaccuccuggaagauaagcacaaugggaaacuuugugagcugagaggaguugcuccccuccaucugggcaagugcaacaucgccggguggauucugggaaauccugaaugugagucucucagcacagcccgguccuggucuuacaucguggaaaccagcuccucugacaacggcacgugcuauccgggggauuuuauugacuacgaggagcugcgcgaacagcuuagcuccgucagcucuuucgagagauuugaaaucuuccccaaaaccuccagcuggccuaaucacgauucuaacaagggagugacagccgcuuguccccaugccggcgcgaaguccuuuuauaaaaaucugaucuggcucguuaagaaaggcaacagcuacccuaagcugucuaaauccuauauuaaugacaaggggaaggaggugcuuguccuguggggaauccaccaccccagcaccuccgccgaucaacagucucucuaccagaacgcugacgccuacguguucgugggcacaagccgguauuccaaaaaguuuaaaccugagauugcuauccgcccgaaggucagagaucaggaagggcggaugaauuacuauuggacccugguugagcccggagacaaaauuacguucgaagccacaggcaaccugguggugccucgcuacgcguuugccauggagagaaacgcugggagcggaaucauuaucucugauacccccguccaugacugcaauacaaccugucaaaccccuaagggcgccaucaacacaucccuccccuuccagaauauucacccgaucacgauuggcaaaugcccuaaguauguuaagagcaccaaacugcggcuugcuacagggcugcgcaacgugcccucuauccagagcagaggacucuuuggcgccauugccggguucaucgaaggaggcuggaccgggaugguggacggaugguacggcuaucaucaccagaaugagcaaggcuccggguacgcugcggaucugaagucuacacagaacgccaucgacaaaauuaccaauaaggucaacagcgugaucgagaaaaugaauacgcaguuuacagcuguuggaaaggaguucaaccaccuugaaaagcggauugaaaaucugaacaaaaagguggaugacggcuuccucgauaucuggaccuacaaugccgagcugcugguccuccuggaaaacgagcgcacccuugacuaucaugauuccaaugugaaaaaccuguacgagaaggucaaaagccagcucaagaacaaugccaaggaaauugggaacggauguuuugaguucuaucacaaaugcgacaauacauguauggaaucugugaagaacggcaccuacgauuauccuaaauacuccgaggaagcuaagcugaauagagaggagaucgacgggguuaaacuugaaagcacacggaucuaucaaauucuggccaucuacucuacgguggcguccagccucguccuggugguuucccugggcgcuauuucuuuuuggaugugcagcaacggaucccuccagugccgcaucuguauuuga

SEQ ID NO: 197086 - RNA, 1701 nt, Artificial Sequence; identical to SEQ ID NO: 195905
  derived and/or modified CDS sequence (opt5) from hemagglutinin__InfluenzaA__ADI24527

SEQ ID NO: 197087 - RNA, 1701 nt, Artificial Sequence; identical to SEQ ID NO: 196293
  derived and/or modified CDS sequence (opt5) from hemagglutinin__InfluenzaA__ADI24529

SEQ ID NO: 197088 - RNA, 1701 nt, Artificial Sequence
  derived and/or modified CDS sequence (opt5) from hemagglutinin__InfluenzaA__ADI24531
augaaggccauccuggugguccuccuguacaccuucgcuacagccaacgcggacacgcuuugcauuggcuaucacgcuaauaacagcaccgauacaguugacaccgugcuggagaaaaaugugacagucacccauuccgugaaccuccuggaagauaagcacaaugggaaacuuuguaagcugagaggaguugcuccccuccaucugggcaaaugcaacaucgccggguggauucugggaaauccugagugugaaucucucagcacagccuccucuuggagcuacaucguggagaccuccucuagcgacaacggcacgugcuauccgggggauuuuauuaauuacgaggaacugcgggagcagcuuuccagcgucucuuccuucgaacgcuuugagaucuuccccaagaccagcucuuggccuaaccacgacuccaauaagggagugacagccgcuuguccccaugccggcgcgaaaucuuuuuauaagaaccugaucuggcucguuaaaaagggcaauagcuacccuaaacuguccaagagcuauauuaacgauaaggggaaagaagugcuuguccuguggggaauccaccaccccuccaccucugccgaccaacagagccucuaccagaaugcugaugccuacguguucgugggcacauccagauauagcaagaaauuuaagccugagauugcuauccggccgaaaguccgcgaccaggaggggagaaugaacuacuauuggacccugguugaacccggagauaagauuacguucgaggccacaggcaaccugguggugccucgguacgcguuugccauggaacgcaaugcugggucuggaaucauuaucuccgacacccccguccaugauugcaacacaaccugucaaaccccuaaaggcgccaucaauacaagccuccccuuccagaacauucacccgaucacgauuggcaagugcccuaaguaugugaaaucuaccaagcugagacuugcuacagggcugcggaauguucccagcauccagucccgcggacuccugggcgccauugccggguuuaucgagggaggcuggaccgggaugguggacggaugguacggcuaucaucaccagaacgaacaaggcucuggguacgcugcggaccuuaaaagcacacagaaugccaucgauaagauuaccaacaaagucaauuccgugaucgagaagaugaacacgcaguucacagcuguuggaaaggaguuuaaucaccuggaaaagagaauugagaaccucaauaagaaaguggacgauggcuuccuggacaucuggaccuacaacgccgaacugcucguccugcuugagaaugaacggacccuggauuaucaugacagcaacgugaagaaccucuacgagaaaguccgcucucagcugaagaauaacgccaaggagauugggaauggauguuucgaauuuuaucacaaaugcgauaacacauguauggaguccgugaagaauggcaccuacgacuauccuaaauacagcgaagaggcuaaacuuaacagagaagagaucgaugggguuaaacuggagucuacacggaucuaucaaauucucgccaucuacuccacgguggcgagcucccugguccuggugguuucucucggcgcuauuagcuucuggaugugcuccaauggaucucugcagugcaagaucuguauuuga

SEQ ID NO: 197089 - RNA, 1701 nt, Artificial Sequence
  derived and/or modified CDS sequence (opt5) from hemagglutinin__InfluenzaA__ADI24536
augaaggccauccuggugguccuccuguacaccuucgcuacagccaacgcggacacgcuuugcauuggcuaucacgcuaauaacagcaccgauacaguugacaccgugcuggagaaaaaugugacagucacccauuccgugaaccuccuggaagauaagcacaaugggaaacuuuguaagcugagaggaguugcuccccuccaucugggcaaaugcaacaucgccggguggauucugggaaauccugagugugaaucucucagcacagccuccucuuggagcuacaucguggagaccuccucuagcgacaacggcacgugcuauccgggggauuuuauugacuacgaagaacugcgggagcagcuuuccagcgucucuuccuucgaacgcuuugagaucuuccccaagaccagcucuuggccuaaucacgauuccaacaagggagugacagccgcuuguccccaugccggcgcgaaaucuuuuuauaagaaucugaucuggcucguuaaaaagggcaacagcuacccuaaacuguccaagagcuauauuaaugacaaggggaaagaagugcuuguccuguggggaauccaccaccccuccaccucugccgaucaacagagccucuaccagaacgcugacgccuacguguucgugggcacauccagauauagcaagaaauuuaagccugagauugcuauccggccgaaaguccgcgaucaggaggggagaaugaauuacuauuggacccugguugaacccggagacaagauuacguucgaggccacaggcaaccugguggugccucgguacgcguuugccauggaacgcgaugcugggucuggaaucauuaucuccgacacccccguccaugacugcaacacaaccugucaaaccccuaaaggcgccaucaauacaagccuccccuuccagaacauucacccgaucacgauuggcaagugcccuaaguaugugaaaucuaccaagcugagacuugcuacagggcugcggaauguucccagcauccagucccgcggacucuuuggcgccauugccggguucaucgagggaggcuggaccgggaugguggauggaugguacggcuaucaucaccagaacgaacaaggcucuggguacgcugcggaccugaaaagcacacagaaugccaucgauaagauuaccaacaaagucaauuccgugaucgagaagaugaacacgcaguuuacagcuguuggaaaggaguucaaucaccuugagaaaagaauugagaaccugaauaagaaaaucgacgauggcuuccucgacauuuggaccuacaacgccgaacugcuggugcuccuggagaaugaacggacccuugauuaucaugacagcaacgucaagaaucuguacgagaaagugcgcucucagcucaagaacaacgccaaggagaucgggaauggauguuuugaguucuaucacaaaugcgauaacacauguauggaauccgucaagaauggcaccuacgacuauccuaaauacagcgaagaggcuaagcugaacagagaagagaucgauggggugaaacuugagucuacacggauuuaucaaauccuggccauuuacuccacgguugcgagcucccucgugcuggucgugucucugggcgcuaucagcuuuuggaugugcuccaauggaucucuccagugccgcauuuguaucuga

SEQ ID NO: 197090 - RNA, 1701 nt, Artificial Sequence; identical to SEQ ID NO: 195905
  derived and/or modified CDS sequence (opt5) from hemagglutinin__InfluenzaA__ADI24546

SEQ ID NO: 197091 - RNA, 1701 nt, Artificial Sequence; identical to SEQ ID NO: 195905
  derived and/or modified CDS sequence (opt5) from hemagglutinin__InfluenzaA__ADI24553

SEQ ID NO: 197092 - RNA, 1701 nt, Artificial Sequence; identical to SEQ ID NO: 195905
  derived and/or modified CDS sequence (opt5) from hemagglutinin__InfluenzaA__ADI24555

SEQ ID NO: 197093 - RNA, 1701 nt, Artificial Sequence
  derived and/or modified CDS sequence (opt5) from hemagglutinin__InfluenzaA__ADI24557
augaaggccauccuggugguccuccuguacaccuucgcuacagccaacgcggacacgcuuugcauuggcuaucacgcuaauaacagcaccgauacaguugacaccgugcuggagaaaaaugugacagucacccauuccgugaaccuccuggaagauaagcacaaugggaaacuuuguaagcugagaggaguugcuccccuccaucugggcaaaugcaacaucgccggguggauucugggaaauccugagugugaaucucucagcacagccuccucuuggagcuacaucguggagaccuccucuagcgacaacggcacgugcuauccgggggauuuuauugacuacgaagaacugcgggagcagcuuuccagcgucucuuccuucgaacgcuuugagaucuuccccaagaccagcucuuggccuaaucacgauuccaacaagggagugacagccgcuuguccccaugccggcgcgaaaucuuuuuauaagaaucugaucuggcucguuaaaaagggcaacagcuacccuaaacuguccaagagcuauauuaaugacaaggggaaagaaauccuugugcuguggggcauucaccaccccuccaccucugccgaucaacagagccucuaccagaacgcugacgccuacgucuucgugggaacauccagauauagcaagaaauuuaagccugagaucgcuauucggccgaaagugcgcgaucaggaggggagaaugaauuacuauuggacccuggucgaacccggagacaagaucacguucgaggccacaggcaaccugguugugccucgguacgcguuugccauggaacgcaacgcugggucuggaauuaucaucuccgauacccccgugcaugacugcaauacaaccugucaaaccccuaaaggcgccauuaacacaagccuccccuuccagaauauccacccgauuacgaucggcaagugcccuaaguaugucaaaucuaccaagcugagacuugcuacagggcugcggaacgugcccagcauucagucccgcggacucuuuggcgccaucgccggguucaucgagggaggcuggaccgggaugguugacggaugguacggcuaucaucaccagaaugaacaaggcucuggguacgcugcggaucugaaaagcacacagaacgccauugacaagaucaccaauaaagugaacuccgucauugagaagaugaauacgcaguuuacagcugugggaaaggaguucaaccaccuugagaaaagaaucgagaaucugaacaagaaaguugaugacggcuuccucgauauuuggaccuacaaugccgaacugcuggugcuccuggagaacgaacggacccuugacuaucaugauagcaaugucaagaaccuguacgagaaagugcgcucucagcucaagaacaaugccaaggagaucgggaacggauguuuugaguucuaucacaaaugcgacaauacauguauggaauccgucaagaacggcaccuacgauuauccuaaauacagcgaagaggcuaagcugaauagagaagagaucgacggggugaaacuugagucuacacggauuuaucaaauccuggccauuuacuccacgguugcgagcucccucgugcuggucgugucucugggcgcuaucagcuuuuggaugugcuccaacggaucucuccagugccgcauuuguaucuga

SEQ ID NO: 197094 - RNA, 1701 nt, Artificial Sequence; identical to SEQ ID NO: 195905
  derived and/or modified CDS sequence (opt5) from hemagglutinin__InfluenzaA__ADI24559

SEQ ID NO: 197095 - RNA, 1701 nt, Artificial Sequence
  derived and/or modified CDS sequence (opt5) from hemagglutinin__InfluenzaA__ADI24561
augaaggccauccuggugauucuccuguacaccuucgcuacagccaacgcggacacgcuuugcaucggcuaucacgcuaauaacagcaccgauacagucgacaccguucuggagaaaaaugugacagugacccauuccgucaaccuccuggaagauaagcacgacgggaaacuuuguaagcugagaggaguggcuccccuccaucugggcaaaugcaauauugccggguggauccugggaaacccugagugugaaucucucagcacagccuccucuuggagcuacauuguugagaccuccucuagcgauaauggcacgugcuauccgggggacuuuaucgauuacgaagaacugcgggagcagcuuuccagcgugucuuccuucgaacgcuuugagaucuuccccaagaccagcucuuggccuaaccacgacuccaauaagggagucacagccgcuuguccccaugccggcgcgaaauccuuuuauaagaaccugauuuggcucgugaaaaagggcaauucuuacccuaaacuguccaagagcuauaucaacgauaaggggaaagaaguucuugugcuguggggcauucaccaccccuccaccucugccgaccaacagagccucuaccagaaugcugaugccuacgucuucgugggaacauccagauauagcaagaaauuuaagccugagaucgcuauucggccgaaagugcgcgaccaggaggggagaaugaacuacuauuggacccuggucgaacccggagauaagaucacguucgaggccacaggcaaucugguugugccucgguacgcguuugccauggaacgcaacgcugggucuggaauuaucaucuccgacacccccgugcaugacugcaacacaaccugucaaaccccuaaaggcgccauuaauacaagccuccccuuccagaacauccacccgauuacgaucggcaagugcccuaaguaugucaaaucuaccaagcugagacuugcuacagggcugcggaaugugcccagcauucagucccgcggacucuuuggcgccaucgccggguucaucgagggaggcuggaccgggaugguugauggaugguacggcuaucaucaccagaacgaacaaggcucuggguacgcugcggaccugaaaagcacacagaaugccauugauaagaucaccaacaaagugaauagcgucauugagaagaugaacacgcaguuuacagcugugggaaaggaguucaaucaccuugagaaaagaaucgagaaccugaauaagaaaguugacgauggcuuccucgacauuuggaccuacaacgccgaacugcuggugcuccuggagaaugaacggacccuugauuaucaugacagcaacgucaagaaucuguacgagaaagugcgcucucagcucaagaacaacgccaaggagaucgggaauggauguuuugaguucuaucacaaaugcgauaacacauguauggaauccgucaagaauggcaccuacgacuauccuaaauacagcgaagaggcuaagcugaacagagaagagaucgauggggugaaacuugagucuacacggauuuaucaaauccuggccauuuacuccacgguugcgagcucccucgugcuggucgugucucugggcgcuaucagcuuuuggaugugcuccaauggaucucuccagugccgcauuuguaucuga

SEQ ID NO: 197096 - RNA, 1701 nt, Artificial Sequence; identical to SEQ ID NO: 195905
  derived and/or modified CDS sequence (opt5) from hemagglutinin__InfluenzaA__ADI24563

SEQ ID NO: 197097 - RNA, 1701 nt, Artificial Sequence
  derived and/or modified CDS sequence (opt5) from hemagglutinin__InfluenzaA__ADI24565
augaaggccauccuggugguccuccuguacaccuucgcuacagccaacgcggacacgcuuugcauuggcuaucacgcuaauaacagcaccgauacaguugacaccgugcuggagaaaaaugugacagucacccauuccgugaaccuccuggaagauaagcacgacgggaaacuuuguaagcugagaggaguugcuccccuccaucugggcaaaugcaauaucgccggguggauucugggaaacccugagugugaaucucucagcacagccuccucuuggagcuacaucguggagaccuccucuagcgauaauggcacgugcuauccgggggacuuuauugauuacgaggaacugcgggagcagcuuuccagcgucucuuccuucgaacgcuuugagaucuuccccaagaccagcucuuggccuaaccacgacuccaauaagggagugacagccgcuuguccccaugccggcgcgaaaucuuuuuauaagaaccugaucuggcucguuaaaaagggcaauagcuacccuaaacuguccaagagcuauauuaacgauaaggggaaaaaggugcuuguccuguggggaauccaccaccccuccaccucugccgaccaacagagccucuaccagaaugcugaugccuacguguucgugggcacauccagauauagcaaaaaguuuaaaccugaaauugcuauccggccgaagguccgcgaccaggaggggagaaugaacuacuauuggacccugguugagcccggagauaaaauuacguucgaagccacaggcaaucugguggugccucgguacgcguuugccauggagcgcaacgcugggucuggaaucauuaucuccgacacccccguccaugacugcaacacaaccugucaaaccccuaagggcgccaucaauacaagccuccccuuccagaacauucacccgaucacgauuggcaagugcccuaaauaugugaagucuaccaaacugagacuugcuacagggcugcggaauguucccagcauccagucccgcggacucuuuggcgccauugccggguucaucgaaggaggcuggaccgggaugguggauggaugguacggcuaucaucaccagaacgagcaaggcucuggguacgcugcggaccuuaagagcacacagaaugccaucgauaaaauuaccaacaaggucaauuccgugaucgaaaagaugaacacgcaguuuacagcuguuggaaaagaguucaaucaccuugagaagagaauugaaaaccugaauaaaaagguggacgauggcuuccucgacaucuggaccuacaacgccgagcugcugguccuccuggaaaaugagcggacccuugauuaucaugacagcaacgugaaaaaucuguacgaaaagguccgcucucagcucaagaacaacgccaaagagauugggaauggauguuuugaguucuaucacaagugcgauaacacauguauggaauccgugaaaaauggcaccuacgacuauccuaaguacagcgaggaagcuaaacugaacagagaggaaaucgaugggguuaagcuggagucuacacggaucuaucaaauucuggccaucuacuccacgguggcgagcucccucguccuggugguuucucugggcgcuauuagcuuuuggaugugcuccaauggaucucuccagugccgcaucuguauuuga

SEQ ID NO: 197098 - RNA, 1701 nt, Artificial Sequence; identical to SEQ ID NO: 195905
  derived and/or modified CDS sequence (opt5) from hemagglutinin__InfluenzaA__ADI24567

SEQ ID NO: 197099 - RNA, 1701 nt, Artificial Sequence
  derived and/or modified CDS sequence (opt5) from hemagglutinin__InfluenzaA__ADI24569
augaaggccauccuggugguccuccuguacaccuucgcuacagccaacgcggacacgcuuugcauuggcuaucacgcuaauaacagcaccgauacaguugacaccgugcuggagaaaaaugugacagucacccauuccgugaaccuccuggaagauaagcacaaugggaaacuuuguaagcugagaggaguugcuccccuccaucugggcaaaugcaacaucgccggguggauucugggaaauccugagugugaaucucucagcacagccuccucuuggagcuacaucguggagaccuccucuagcgacaacggcacgugcuauccgggggauuuuauugacuacgaagaacugcgggagcagcuuuccagcgucucuuccuucgaacgcuuugagaucuuccccaagaccagcucuuggccuaaucacgauuccaacaagggagugacagccgcuuguccccaugccggcgcgaaaucuuuuuauaagaaucugaucuggcucguuaaaaagggcaacagcuacccuaaacuguccaagagcuauauuaaugacaaggggaaagaagugcuuguccuguggggaauccaccaccccuccaccucugccgaucaacagagccucuaccagaacgcugacgccuacguguucgugggcacauccagauauagcaagaaauuuaagccugagauugcuauccggccgaaaguccgcgaucaggaggggagaaugaauuacuauuggacccugguugaacccggagacaagauuacguucgaggccacaggcaaccugguggugccucgguacgcguuugccaucgaacgcaacgcugggucuggaauuaucaucuccgauacccccguccaugacugcaauacaaccugucaaaccccuaaaggcgccauuaacacaagccuccccuuccagaauauccacccgauuacgaucggcaagugcccuaaguaugugaaaucuaccaagcugagacuugcuacagggcugcggaacguucccagcauucagucccgcggacucuuuggcgccaucgccggguucaucgagggaggcuggaccgggaugguggacggaugguacggcuaucaucaccagaaugaacaaggcucuggguacgcugcggaucugaaaagcacacagaacgccauugacaagaucaccaauaaagucaacuccgugauugagaagaugaauacgcaguuuacagcuguuggaaaggaguucaaccaccuugagaaaagaaucgagaaucugaacaagaaaguggaugacggcuuccucgauauuuggaccuacaaugccgaacugcugguccuccuggagaacgaacggacccuugacuaucaugauagcaaugugaagaaccuguacgagaaaguccgcucucagcucaagaacaaugccaaggagaucgggaacggauguuuugaguucuaucacaaaugcgacaauacauguauggaauccgugaagaacggcaccuacgauuauccuaaauacagcgaagaggcuaagcugaauagagaagagaucgacgggguuaaacuugagucuacacggauuuaucaaauccuggccauuuacuccacgguggcgagcucccucguccuggugguuucucugggcgcuaucagcuuuuggaugugcuccaacggaucucuccagugccgcauuuguaucuga

SEQ ID NO: 197100 - RNA, 1701 nt, Artificial Sequence; identical to SEQ ID NO: 195905
  derived and/or modified CDS sequence (opt5) from hemagglutinin__InfluenzaA__ADI24571

SEQ ID NO: 197101 - RNA, 1701 nt, Artificial Sequence; identical to SEQ ID NO: 196293
  derived and/or modified CDS sequence (opt5) from hemagglutinin__InfluenzaA__ADI24573

SEQ ID NO: 197102 - RNA, 1701 nt, Artificial Sequence
  derived and/or modified CDS sequence (opt5) from hemagglutinin__InfluenzaA__ADI24575
augaaggccauccuggugguccuccuguacaccuucgcuacagccaacgcggacacgcuuugcauuggcuaucacgcuaauaacagcaccgauacaguugacaccgugcuggagaaaaaugugacagucacccauuccgugaaccuccuggaagauaagcacaaugggaaacuuuguaagcugagaggaguugcuccccuccaucugggcaaaugcaacaucgccggguggauucugggaaauccugagugugaaucucucagcacagccuccucuuggagcuacaucguggagaccuccucuagcgacaacggcacgugcuauccgggggauuuuauuaauuacgaggaacugcgggagcagcuuuccagcgucucuuccuucgaacgcuuugagaucuuccccaagaccagcucuuggccuaaccacgacuccaauaagggagugacagccgcuuguccccaugccggcgcgaaaucuuuuuauaagaaccugaucuggcucguuaaaaagggcaauagcuacccuaaacuguccaagagcuauauuaacgauaaggggaaagaagugcuuguccuguggggaauccaccaccccuccaccucugccgaccaacagagccucuaccagaaugcugaugccuacguguucgugggcacauccagauauagcaagaaauuuaagccugagauugcuauccggccgaaaguccgcgaccaggaggggagaaugaacuacuauuggacccugguugaacccggagauaagauuacguucgaggccacaggcaaccugguggugccucgguacgcguuugccauggaacgcaaugcugggucuggaaucauuaucuccgacacccccguccaugauugcaacacaaccugucaaaccccuaaaggcgccaucaauacaagccuccccuuccagaacauucacccgaucacgauuggcaagugcccuaaguaugugaaaucuaccaagcugagacuugcuacagggcugcggaauguucccagcauccagucccgcggacucuuuggcgccauugccggguucaucgagggaggcuggaccgggaugguggacggaugguacggcuaucaucaccagaacgaacaaggcucuggguacgcugcggaccugaaaagcacacagaaugccaucgauaagauuaccaacaaagucaauuccgugaucgagaagaugaacacgcaguuuacagcuguuggaaaggaguucaaucaccuugaaaagagaauugagaaccugaauaagaaaguggacgauggcuuccucgacaucuggaccuacaacgccgaacugcugguccuccuggagaaugaacggacccuugauuaucaugacagcaacguggagaaccuguacgagaagguccgcucucagcucaaaaauaacgccaaggaaauugggaauggauguuuugaguucuaucacaagugcgauaacacauguauggaauccgugaaaaauggcaccuacgacuauccuaaguacagcgaggaagcuaaacugaacagagaggagaucgaugggguuaaacuugaaucuacacggaucuaucaaauucuggccaucuacuccacgguggcgagcucccucguccuggugguuucucugggcgcuauuagcuuuuggaugugcuccaauggaucucuccagugccgcaucuguauuuga

SEQ ID NO: 197103 - RNA, 1701 nt, Artificial Sequence; identical to SEQ ID NO: 195905
  derived and/or modified CDS sequence (opt5) from hemagglutinin__InfluenzaA__ADI24577

SEQ ID NO: 197104 - RNA, 1701 nt, Artificial Sequence
  derived and/or modified CDS sequence (opt5) from hemagglutinin__InfluenzaA__ADI24581
augaaggccauccuggugguccuccuguacaccuucgcuacagccaacgcggacacgcuuugcauuggcuaucacgcuaauaacagcaccgauacaguugacaccgugcuggagaaaaaugugacagucacccauuccgugaaccuccuggaagauaagcacaaugggaaacuuuguaagcugagaggaguugcuccccuccaucugggcaaaugcaacaucgccgggugggugcugggaaauccugagugugaaucucucagcacagccuccucuuggagcuacauugucgagaccuccucuagcgacaacggcacgugcuauccgggggauuuuaucgacuacgaagaacugcgggagcagcuuuccagcgugucuuccuucgaacgcuuugagauuuuccccaagaccagcucuuggccuaaucacgauuccaacaagggaguuacagccgcuuguccccaugccggcgcgaaaucuuuuuauaagaaucugaucuggcucgugaaaaagggcaacagcuacccuaaacuguccaagagcuauaucaaugacaaggggaaagaaguccuugugcuguggggcauucaccaccccuccaccucugccgaucaacagagccucuaccagaacgcugacgccuacguguucgucggaacauccagauauagcaagaaauuuaagccugagaucgcuauucggccgaaaguucgcgaucaggaggggagaaugaauuacuauuggacccugguggaacccggagacaagaucacguucgaggccacaggcaaccugguggucccucgguacgcguuugccauggaacgcaacgcugggucuggaauuaucauuuccgauacccccgugcaugacugcaauacaaccugucaaaccccuaaaggcgccaucaacacaagccuccccuuccagaauauccacccgauuacgaucggcaagugcccuaaguauguuaaaucuaccaagcugagacuugcuacagggcugcggaacgugcccagcauucagucccgcggacucuuuggcgccaucgccggguucauugagggaggcuggaccgggauggucgacggaugguacggcuaucaucaccagaaugaacaaggcucuggguacgcugcggaucugaaaagcacacagaacgccaucgacaagaucaccaauaaagugaacuccguuauugagaagaugaauacgcaguuuacagcugugggaaaggaguucaaccaccuugagaaaagaaucgagaaucugaacaagaaagucgaugacggcuuccucgauauuuggaccuacaaugccgaacugcuggugcuccuggagaacgaacggacccuugacuaucaugauagcaaugucaagaaccuguacgagaaagugcgcucucagcucaagaacaaugccaaggagaucgggaacggauguuuugaguucuaucacaaaugcgacaauacauguauggaauccguuaagaacggcaccuacgauuauccuaaauacagcgaagaggcuaagcugaauagagaagagauugacggggugaaacuugagucuacacggaucuaucaaauccuggccauuuacuccacggucgcgagcucccucgugcugguugugucucugggcgcuaucagcuuuuggaugugcuccaacggaucucuccagugccgcauuuguaucuga

SEQ ID NO: 197105 - RNA, 1701 nt, Artificial Sequence
  derived and/or modified CDS sequence (opt5) from hemagglutinin__InfluenzaA__ADI24583
augaaggccauccuggugguccuccuguacaccuucgcuacagccaacgcggacacgcuuugcauuggcuaucacgcuaauaacagcaccgauacaguugacaccauccuggagaaaaaugugacagugacccauuccgucaaccuccuggaagauaagcacaaugggaaacuuuguaagcugagaggaguggcuccccuccaucugggcaaaugcaacauugccggguggauccugggaaauccugagugugaaucucucagcacagccuccucuuggagcuacauuguugagaccuccucuagcgacaacggcacgugcuauccgggggauuuuaucgacuacgaagaacugcgggagcagcuuuccagcgugucuuccuucgaacgcuuugagaucuuccccaagaccagcucuuggccuaaucacgauuccaacaagggagucacagccgcuuguccccaugccggcgcgaaaucuuuuuauaagaaucugauuuggcucgugaaaaagggcaacagcuacccuaaacuguccaagagcuauaucaaugacaaggggaaagaaguucuugugcuguggggcauucaccaccccuccaccucugccgaucaacagagccucuaccagaacgcugacgccuacgucuucgugggaacauccagauauagcaagaaauuuaagccugagaucgcuauucggccgaaagugcgcgaucaggaggggagaaugaauuacuauuggacccuggucgaacccggagacaagaucacguucgaggccacaggcaaccugguugugccucgguacgcguuugccauggaacgcaacgcugggucuggaauuaucaucuccgauacccccgugcaugacugcaauacaaccugucaaaccccuaaaggcgccauuaacacaagccuccccuuccagaauauccacccgauuacgaucggcaagugcccuaaguaugucaaaucuaccaagcugagacuugcuacagggcugcggaacgugcccagcauucagucccgcggacucuuuggcgccaucgccggguucaucgagggaggcuggaccgggaugguugacggaugguacggcuaucaucaccagaaugaacaaggcucuggguacgcugcggaucugaaaagcacacagaacgccauugacaagaucaccaauaaagugaacuccgucauugagaagaugaauacgcaguuuacagcugugggaaaggaguucaaccaccuugagaaaagaaucgagaaucugaacaagaaaguugaugacggcuuccucgauauuuggaccuacaaugccgaacugcuggugcuccuggagaacgaacggacccuugacuaucaugauagcaaugucaagaaccuguacgagaaagugcgcucucagcucaagaacaaugccaaggagaucgggaacggauguuuugaguucuaucacaaaugcgacaauacauguauggaauccgucaagaacggcaccuacgauuauccuaaauacagcgaagaggcuaagcugaauagagaagagaucgacggggugaaacuugagucuacacggauuuaucaaauccuggccauuuacuccacgguugcgagcucccucgugcuggucgugucucugggcgcuaucagcuuuuggaugugcuccaacggaucucuccagugccgcauuuguaucuga

SEQ ID NO: 197106 - RNA, 1701 nt, Artificial Sequence
  derived and/or modified CDS sequence (opt5) from hemagglutinin__InfluenzaA__ADI24590
augaaggccauccuggugguccuccuguacaccuucgcuacagccaacgcggacacgcuuugcauuggcuaucacgcuaauaacagcaccgauacaguugacaccgugcuggagaaaaaugugacagucacccauuccgccaaccuccuggaagauaagcacaaugggaaacuuuguaagcugagaggaguggcuccccuccaucugggcaaaugcaacaucgccggguggauucugggaaauccugagugugaaucucucagcacagccuccucuuggagcuacaucguugagaccuccucuagcgacaacggcacgugcuauccgggggauuuuauugacuacgaagaacugcgggagcagcuuuccagcgugucuuccuucgaacgcuuugagaucuuccccaagaccagcucuuggccuaaucacgauuccaacaagggagucacagcugccuguccccaugcgggcgccaagagcuuuuauaaaaaucugaucuggcucgugaaaaagggcaacucuuacccuaaacuguccaagagcuauauuaaugacaaggggaaagaaguucuugugcuguggggaauccaccaccccuccaccucugcugaucaacagagccucuaccagaacgccgacgcuuacgucuucgugggcacauccagauauagcaagaaauuuaagccugagauugccauccggccgaaagugcgcgaucaggaggggagaaugaauuacuauuggacccuggucgaacccggagacaagauuacguucgaggcgacaggcaaccugguugugccucgguacgccuuugcuauggaacgcaacgccgggucuggaaucauuaucuccgauacccccgugcaugacugcaauacaaccugucaaaccccuaaaggcgcuaucaacacaagccuccccuuccagaauauucacccgaucacgauuggcaagugcccuaaguaugucaaaucuaccaagcugagacuugccacagggcugcggaacgugcccagcauccagucccgcggacucuuuggcgccauugcuggguucaucgagggaggcuggaccgggaugguugacggaugguacggcuaucaucaccagaaugaacaaggcucuggguacgcggccgaucugaaaagcacacagaacgcuaucgacaagauuaccaauaaagugaacuccgucaucgagaagaugaauacgcaguuuacagccgugggaaaggaguucaaccaccuugagaaaagaauugagaaucugaacaagaaaguugaugacggcuuccucgauaucuggaccuacaaugccgaacugcuggugcuccuggagaacgaacggacccuugacuaucaugauagcaaugucaagaaccuguacgagaaagugcgcucucagcucaagaacaaugcuaaggagauugggaacggauguuuugaguucuaucacaaaugcgacaauacauguauggaauccgucaagaacggcaccuacgauuauccuaaauacagcgaagaggccaagcugaauagagaagagaucgacggggugaaacuugagucuacacggaucuaucaaauucuggcgaucuacuccacgguugcuagcucccucgugcuggucgugucucugggcgccauuagcuuuuggaugugcuccaacggaucucuccagugccgcaucuguauuuga

SEQ ID NO: 197107 - RNA, 1701 nt, Artificial Sequence
  derived and/or modified CDS sequence (opt5) from hemagglutinin__InfluenzaA__ADI24597
augaaggccauccuggugguccuccuguacaccuucgcuacagccaacgcggacacgcuuugcauuggcuaucacgcuaauaacagcaccgauacaguugacaccgugcuggagaaaaaugugacagucacccauuccgccaaccuccuggaagauaagcacaaugggaaacuuuguaagcugagaggaguggcuccccuccaucugggcaacugcaauaucgccggguggauucugggaaacccugagugugaaucucucagcacagccuccucuuggagcuacaucguugagaccuccucuagcgacaauggcacgugcuauccgggggauuuuauugacuacgaagaacugcgggagcagcuuuccagcgugucuuccuucgaacgcuuugagaucuuccccaaaaccagcucuuggccuaaccacgauuccaauaagggagucacagcugccuguccccaugcgggcgccaagagcuuuuauaaaaaccugaucuggcucgugaagaaaggcaauucuuacccuaagcuguccaaaagcuauauuaacgacaaggggaaggaaguucuugugcuguggggaauccaccaccccuccaccucugcugaucaacagagccucuaccagaaugccgacgcuuacgucuucgugggcacauccagauauagcaaaaaguuuaaaccugagauugccauccggccgaaggugcgcgaucaggaggggagaaugaacuacuauuggacccuggucgaacccggagacaaaauuacguucgaggcgacaggcaaccugguugugccucgguacgccuuugcuauggaacgcaaugccgggucuggaaucauuaucuccgauacccccgugcaugacugcaacacaaccugucaaaccccuaagggcgcuaucaauacaagccuccccuuccagaacauucacccgaucacgauuggcaaaugcccuaaguaugucaagucuaccaaacugagacuugccacagggcugcggaaugugcccagcauccagucccgcggacucuuuggcgccauugcuggguucaucgagggaggcuggaccgggaugguugacggaugguacggcuaucaucaccagaacgaacaaggcucuggguacgcggccgaucuuaagagcacacagaaugcuaucgacaaaauuaccaacaaggucaauuccgugaucgagaaaaugaacacgcaguuuacagccgugggaaaggaguucaaucaccuugaaaagagaauugagaaccugaauaaaaagguugaugacggcuuccucgauaucuggaccuacaacgccgaacugcuggugcuccuggagaaugaacggacccuugacuaucaugauagcaacgucaaaaaccuguacgagaaggugcgcucucagcucaaaaauaacgcuaaggagauugggaauggauguuuugaguucuaucacaagugcgacaacacauguauggaguccgucaaaaauggcaccuacgauuauccuaaguacagcgaagaggccaaacugaacagagaagagaucgacggggugaagcuggagucuacacggaucuaucaaauucuggcgaucuacuccacgguugcuagcucccucgugcuggucgugucucugggcgccauuagcuuuuggaugugcuccaauggaucucuccagugccgcaucuguauuuga

SEQ ID NO: 197108 - RNA, 1701 nt, Artificial Sequence; identical to SEQ ID NO: 197106
  derived and/or modified CDS sequence (opt5) from hemagglutinin__InfluenzaA__ADI24612

SEQ ID NO: 197109 - RNA, 1701 nt, Artificial Sequence
  derived and/or modified CDS sequence (opt5) from hemagglutinin__InfluenzaA__ADI24619
augaaggccauccuggugguccuccuguacaccuucgcuacagccaacgcggacacgcuuugcauuggcuaucacgcuaauaacagcaccgauacaguugacaccgugcuggagaaaaaugugacagucacccauuccgccaaccuccuggaagauaagcacaaugggaaacuuuguaagcugagaggaguggcuccccuccaucugggcaaaugcaacaucgccggguggauucugggaaauccugagugugaaucucucagcacagccuccucuuggagcuacaucguugagaccuccucuagcgacaacggcacgugcuauccgggggauuuuauugacuacgaagaacugcgggagcagcuuuccagcgugucuuccuucgaacgcuuugagaucuuccccaagaccagcucuuggccuaaucacgauuccaacaagggagucacagcugccuguccccaugcgggcgccaagagcuuuuauaaaaaucugaucuggcucgugaaaaagggcaacucuuacccuaaacuguccaagagcuauauuaaugacaaggggaaagaaguucuugugcuguggggaauccaccaccccuccaccucugucgaucaacagagccucuaccagaacgcugacgccuacguguucgugggcacauccagauauagcaagaaauuuaagccugagauugcuauccggccgaaaguccgcgaucaggaggggagaaugaauuacuauuggacccugguugaacccggagacaagauuacguucgaggccacaggcaaccugguggugccucgguacgcguuugccauggaacgcaacgcugggucuggaaucauuaucuccgauacccccguccaugacugcaauacaaccugucaaaccccuaaaggcgccaucaacacaagccuccccuuccagaauauucacccgaucacgauuggcaagugcccuaaguaugugaaaucuaccaagcugagacuugcuacagggcugcggaacguucccagcauccagucccgcggacucuuuggcgccauugccggguucaucgagggaggcuggaccgggaugguggacggaugguacggcuaucaucaccagaaugaacaaggcucuggguacgcugcggaucugaaaagcacacagaacgccaucgacaagauuaccaauaaagucaacuccgugaucgagaagaugaauacgcaguuuacagcuguuggaaaggaguucaaccaccuugagaaaagaauugagaaucugaacaagaaaguggaugacggcuuccucgauaucuggaccuacaaugccgaacugcugguccuccuggagaacgaacggacccuugacuaucaugauagcaaugugaagaaccuguacgagaaaguccgcucucagcucaagaacaaugccaaggagauugggaacggauguuuugaguucuaucacaaaugcgacaauacauguauggaauccgugaagaacggcaccuacgauuauccuaaauacagcgaagaggcuaagcugaauagagaagagaucgacgggguuaaacuugagucuacacggaucuaucaaauucuggccaucuacuccacgguggcgagcucccucguccuggugguuucucugggcgcuauuagcuuuuggaugugcuccaacggaucucuccagugccgcaucuguauuuga

SEQ ID NO: 197110 - RNA, 1701 nt, Artificial Sequence
  derived and/or modified CDS sequence (opt5) from hemagglutinin__InfluenzaA__ADI24621
augaaggccauccuggugguccuccuguacaccuucgcuacagccaacgcggacacgcuuugcauuggcuaucacgcuaauaacagcaccgauacaguugacaccgugcuggagaaaaaugugacagucacccauuccgugaaccuccuggaagauaagcacaaugggaaacuuuguaagcugagaggaguugcuccccuccaucugggcaaaugcaacaucgccggguggauucugggaaauccugagugugaaucucucagcacagccuccucuuggagcuacaucguggagaccuccucuagcgacaacggcacgugcuauccgggggauuuuauugacuacgaagaacugcgggagcagcuuuccagcgucucuuccuucgaacgcuuugagaucuuccccaagaccagcucuuggccuaaucacgauuccaacaagggagugacagccgcuuguccccaugccggcgcgaaaucuuuuuauaagaaucugaucuggcucguuaaaaagggcaacagcuacccuaaacuguccaagagcuauauuaaugacaaggggaaagaagugcuuguccuguggggaauccaccaccccuccaccucugccgaucaacagagccucuaccagaacgcugacgccuacguguucgugggcacauccagauauagcaagaaauuuaagccugagauugcuauccggccgaaaguccgcgaucaggaggggagaaugaauuacuauuggacccugguugaacccggagacaagauuacguucgaggccacaggcaaccugguggugccucgguacgcguuugccauggaacgcaacgcugggucuggaaucauuaucuccgauacccccguccaugacugcaauacaaccugucaaaccccuaaaggcacaaucaacacgagccuccccuuccagaauauucacccgaucaccauuggcaagugcccuaaguaugugaaaucuacaaagcugagacuugccaccgggcugcggaacguucccagcauccagucccgcggacucuuuggcgcuauugccggguucaucgagggaggcuggacagggaugguggacggaugguacggcuaucaucaccagaaugaacaaggcucuggguacgccgcugaucugaaaagcacccagaacgcgaucgacaagauuacgaauaaagucaacuccgugaucgagaagaugaauacacaguuuaccgccguuggaaaggaguucaaccaccuugagaaaagaauugagaaucugaacaagaaaguggaugacggcuuccucgauaucuggaccuacaaugcugaacugcugguccuccuggagaacgaacggacacuugacuaucaugauagcaaugugaagaaccuguacgagaaaguccgcucucagcucaagaacaaugccaaggagauugggaacggauguuuugaguucuaucacaaaugcgacaauaccuguauggaauccgugaagaacggcacauacgauuauccuaaauacagcgaagaggccaagcugaauagagaagagaucgacgggguuaaacuugagucuacgcggaucuaucaaauucuggcuaucuacuccaccguggccagcucccucguccugauugugucucugggcgcgaucagcuuuuggaugugcuccaacggaucucuccagugccgcauuuguaucuga

SEQ ID NO: 197111 - RNA, 1701 nt, Artificial Sequence
  derived and/or modified CDS sequence (opt5) from hemagglutinin__InfluenzaA__ADI48184
augaaggccauccuggugguccuccuguacaccuucgcuacagccaacgcggacacgcuuugcauuggcuaucacgcuaauaacagcaccgauacaguugacaccgugcuggagaagaaugugacagucacccauuccgugaaccuccuggaagauaagcacaaugggaaacuuuguaagcugagaggaguugcuccccuccaucugggcaaaugcaacaucgccggguggauucugggaaauccugagugugaaucucucagcacagccuccucuuggagcuacaucguggagaccuccucuagcgacaacggcacgugcuauccgggggauuuuauugacuacgaggaacugcgggagcagcuuuccagcgucucuuccuucgaacgcuuugagaucuuccccaagaccagcucuuggccuaaucacgauuccaacaagggagugacagccgcuuguccccaugccggcgcgaaaucuuuuuauaagaaucugaucuggcucguuaaaaagggcaacagcuacccuaaacuguccaagagcuauauuaaugacaaggggaaagaagugcuuguccuguggggaauccaccaccccuccaccucugccgaucaacagagccucuaccagaacgcugacgccuacguguucgugggcacauccagauauagcaagaaauuuaagccugagauugcuauccggccgaaaguccgcgaucaggaggggagaaugaauuacuauuggacccugguugaacccggagacaagauuacguucgaggccacaggcaaccugguggugccucgguacgcguuugccauggggcgcaacgcuggaucuggcaucauuaucuccgauacccccguccaugacugcaauacaaccugucaaaccccuaaaggcgccaucaacacaagccuccccuuccagaauauucacccgaucacgauugggaagugcccuaaguaugugaaaucuaccaagcugagacuugcuacaggacugcggaacguucccagcauccagucccgcggccucuuuggggccauugccggauucaucgaaggcggguggaccggaaugguggacggcugguacggcuaucaucaccagaaugagcaagggucuggauacgcugcggaucugaaaagcacacagaacgccaucgacaagauuaccaauaaagucaacuccgugaucgaaaagaugaauacgcaguuuacagcuguuggcaaggaguucaaccaccuugagaaaagaauugaaaaucugaacaagaaaguggaugacggguuccucgauaucuggaccuacaaugccgagcugcugguccuccuggaaaacgagcggacccuugacuaucaugauagcaaugugaagaaccuguacgaacgcgucagaucucagcucaaaaacaaugccaaggagauuggaaacggcuguuuugaguucuaucacaagugcgacaauacauguauggaauccgugaaaaacgggaccuacgauuauccuaaguacagcgaggaagcuaaacugaaucgggaggaaaucgacggcguuaaacuugagucuacacgcaucuaucaaauucuggccaucuacuccacgguggcgagcucccucguccuggugguuucucugggagcuauuagcuuuuggaugugcuccaacggcucucuccagugcagaaucuguauuuga

SEQ ID NO: 197112 - RNA, 1701 nt, Artificial Sequence; identical to SEQ ID NO: 195905
  derived and/or modified CDS sequence (opt5) from hemagglutinin__InfluenzaA__ADI48186

SEQ ID NO: 197113 - RNA, 1701 nt, Artificial Sequence
  derived and/or modified CDS sequence (opt5) from hemagglutinin__InfluenzaA__ADI48188
augaaggccauccuggugguccuccuguacaccuucgcuacagccaacgcggacacgcuuugcauuggcuaucacgcuaauaacagcaccgauacaguugacaccgugcuggagaaaaaugugacagucacccauuccgugaaccuccuggaagauaagcacaaugggaaacuuuguaagcugagaggaguugcuccccuccaucugggcaaaugcaacaucgccggguggauucugggaaauccugagugugaaucucucagcacagccuccucuuggagcuacaucguggagaccuccucuagcgacaacggcacgugcuauccgggggauuuuauugacuacgaagaacugcgggagcagcuuuccagcgucucuuccuucgaacgcuuugagaucuuccccaagaccagcucuuggccuaaucacgauuccaacaagggagugacagccgcuuguccccaugccggcgcgaaaucuuuuuauaagaaucugaucuggcucguuaaaaagggcaacagcuacccuaaacuguccaagagcuauauuaaugacaaggggaaagaagugcuuguccuguggggaauccaccaccccuccaccucugccgaucaacagagccucuaccagaacgcugacgccuacguguucgugggcacauccagauauagcaagaaauuuaagccugagauugcuauccggccgaaaguccgcgaucaggaggggagaaugaauuacuauuggacccugguugaacccggagacaagauuacguucgaggccacaggcaaccugguggugccucgguacgcguuugccauggaacgcaacgcugggucugauaucauuaucuccgacacccccguccaugacugcaauacaaccugucaaaccccuaaaggagccaucaacacaagccuccccuuccagaauauucacccgaucacgauuggcaagugcccuaaguaugugaaaucuaccaagcugagacuugcuacaggccugcggaacguucccagcauccagucccgcgggcucuuuggagccauugccggcuucaucgaagggggauggaccggcaugguggaugggugguacggauaucaucaccagaaugaacaaggcucuggcuacgcugcggaccugaaaagcacacagaacgccaucgauaagauuaccaauaaagucaacuccgugaucgagaagaugaauacgcaguuuacagcuguugggaaggaguucaaccaccuugagaaaagaauugagaaucugaacaagaaaguggacgauggauuccucgacaucuggaccuacaaugccgaacugcugguccuccuggagaacgaacggacccuugauuaucaugacagcaaugugaagaaccuguacgagaaaguccgcucucagcucaagaacaaugccaaggagauuggcaacggguguuuugaguucuaucacaaaugcgauaauacauguauggaguccgugaagaacggaaccuacgacuauccuaaauacagcgaagaggcuaagcugaauagagaagagaucgauggcguuaaacuugagucuacacggaucuaucaaauucuggccaucuacuccacgguggcgagcucccucguccuggugguuucucugggggcuauuagcuuuuggaugugcuccaacggcucucuccagugccgcaucuguauuuga

SEQ ID NO: 197114 - RNA, 1701 nt, Artificial Sequence
  derived and/or modified CDS sequence (opt5) from hemagglutinin__InfluenzaA__ADI48190
augaaggccauccuggugguccuccuguacaccuucgcuacagccaacgcggacacgcuuugcauuggcuaucacgcuaauaacagcaccgauacaguugacaccgugcuggagaaaaaugugacagucacccauuccgugaaccuccuggaagauaagcacaaugggaaacuuuguaagcugagaggaguugcuccccuccaucugggcaaaugcaacaucgccggguggauucugggaaauccugagugugaaucucucagcacagccuccucuuggagcuacaucguggagaccuccucuagcgacaacggcacgugcuauccgggggauuuuauugacuacgaagaacugcgggagcagcuuuccagcgucucuuccuucgaacgcuuugagaucuuccccaagaccagcucuuggccuaaucacgauuccaacaagggagugacagccgcuuguccccaugccggcgcgaaaucuuuuuauaagaaucugaucuggcucguuaaaaagggcaacagcuacccuaaacuguccaagagcuauauuaaugacaaggggaaagaagugcuuguccuguggggaauccaccaccccuccaccucugccgaucaacagagccucuaccagaacgcugacgccuacguguucgugggcacauccagauauagcaagaaauuuaagccugagauugcuauccggccgaaaguccgcgaucaggaggggagaaugaauuacuauuggacccugguugaacccggagacaagauuacguucgaggccacaggcaaccugguggugccucgguacgcguuugccauggaacgcaacgcugggucuggaaucauuaucuccgauacccccguccaugacugcaauacaaccugucaaaccccuaaaggcgccaucaacacaagccuccccuuccagaauauucacccgaucacgauuggcaagugcccuaaguaugugaaaucuaccaagcugagacuugcuacagggcugcggaacguucccagcauccagucccgcggacucuuuggcgccauugccggguucaucgagggaggcuggaccgggaugguggacggaugguacggcuaucaucaccagaaugaacaaggcucuggguacgcugcggaucugaaaagcacacagaacgccaucgacaagauuaccaauaaagucaacuccgugaucgagaagaugaauacgcaguuuacagcuguuggaaaggaguucaaccaccuugagaaaagaauugagaaucugaacaagaaaguggaugacggcuuccucgauaucuggaccuacaaugccgaacugcugguccuccuggagaacgaacggacccuugacuaucaugauagcaaugugaagaaccuguacgagaaaguccgcucucagcucaagaacaaugccaaggagauugggaacggauguuuugaguucuaucacaaaugcgacaauacauguauggaauccgugaagaacggcaccuacgauuauccuaaauacagcgaagaggcuaagcugaauagagaagagaucgacgggguuaaacuugagucuacaaagaucuaucaaauucuggccaucuacuccacgguggcgagcucccucguccuggugguuucucugggcgcuauuagcuuuuggaugugcuccaacggaucucuccagugccggaucuguauuuga

SEQ ID NO: 197115 - RNA, 1701 nt, Artificial Sequence
  derived and/or modified CDS sequence (opt5) from hemagglutinin__InfluenzaA__ADI48192
augaaggccauccuggugguccuccuguacaccuucgcuacagccaacgcggacacgcuuugcauuggcuaucacgcuaauaacagcaccgauacaguugacaccgugcuggagaaaaaugugacagucacccauuccgugaaccuccuggaagauaagcacaaugggaaacuuuguaagcugagaggaguugcuccccuccaucugggcaaaugcaacaucgccggguggauucugggaaauccugagugugaaucucucagcacagccuccucuuggagcuacaucguggagaccuccucuagcgacaacggcacgugcuauccgggggauuuuauugacuacgaagaacugcgggagcagcuuuccagcgucucuuccuucgaacgcuuugagaucuuccccaagaccagcucuuggccuaaucacgauuccaacaagggagugacagccgcuuguccccaugccggcgcgaaaucuuuuuauaagaaucugaucuggcucguuaaaaagggcaacagcuacccuaaacuguccaagagcuauauuaaugacaaggggaaagaagugcuuguccuguggggaauccaccaccccuccaccucugccgaucaacagagccucuaccagaacgcugacgccuacguguucgugggcacauccagauauagcaagaaauuuaagccugagauugcuauccggccgaaaguccgcgaucaggaggggagaaugaauuacuauuggacccugguugaacccggagacaagauuacguucgaggccacaggcaaccugguggugccucgguacgcguuugccauggaacgcaacgcugggucuggaaucauuaucuccgauacccccguccaugacugcaauacaaccugucaaaccccuaaaggcgccaucaacacaagccuccccuuccagaauauucacccgaucacgauuggcaagugcccuaaguaugugaaaucuaccaagcugagacuugcuacagggcugcggaacguucccagcauccagucccgcggacucuuuggcgccauugccggguucaucgagggaggcuggaccgggaugguggacggaugguacggcuaucaucaccagaaugaacaaggcucuggguacgcugcggaucugaaaagcacacagaacgccaucgacaagauuaccaauaaagucaacuccgugaucgagaagaugaauacgcaguuuacagcuguuggaaaggaguucaaccaccuugagaaaagaauugagaaucugaacaagaaaguggaugacggcuuccucgauaucuggaccuacaaugccgaacugcugguccuccuggagaacgaacggacccuugacuaucaugauagcaaugugaagaaccuguacgagaaaguccgcucucagcucaagaacaaugccaaggagauugggaacggauguuuugaguucuaucacaaaugcgacaauacauguauggaauccgugaagaacggcaccuacgauuauccuaaauacagcgaagaggcuaagcugaauagagaagagaucgacgggguuaaacuugagucuacacggaucuaucaaauucugacgaucuacuccaccguggccagcucccucguccuggugguuucucugggcgcgauuagcuuuuggaugugcuccaacggaucucuccagugccgcaucuguauuuga

SEQ ID NO: 197116 - RNA, 1701 nt, Artificial Sequence
  derived and/or modified CDS sequence (opt5) from hemagglutinin__InfluenzaA__ADI48194
augaaggccauccuggugguccuccuguacaccuucgcuacagccaacgcggacacgcuuugcauuggcuaucacgcuaauaacagcaccgauacaguugacaccgugcuggagaaaaaugugacagucacccauuccgugaaccuccuggaagauaagcacaaugggaaacuuuguaagcugagaggaguugcuccccuccaucugggcaaaugcaacaucgccggguggauucugggaaauccugagugugaaucucucagcacagccuccucuuggagcuacaucguggagaccuccucuagcgacaacggcacgugcuauccgggggauuuuauugacuacgaagaacugcgggagcagcuuucccuggucagcucuuucgaacgcuuugagaucuuccccaagaccaauuccuggccuaaccacgauagcaauaagggagugacagccgcuuguccccaugccggcgcgaaaucuuuuuauaagaaccucaucuggcugguuaaaaagggcaauuccuacccuaaacuuagcaagucuuauauuaacgacaaggggaaagaagugcugguccucuggggaauccaccaccccuccaccagcgccgaucaacagucccuguaccagaaugcugacgccuacguguucgugggcacaucuagauauagcaagaaauuuaagccugagauugcuauccggccgaaaguccgcgaucaggaggggagaaugaacuacuauuggacccugguugaacccggagacaagauuacguucgaggccacaggcaaccucguggugccucgguacgcguuugccauggaacgcaaugcuggguccggaaucauuaucagcgauacccccguccaugacugcaacacaaccugucaaaccccuaaaggcgccaucaauacaucucugcccuuccagaacauucacccgaucacgauuggcaagugcccuaaguaugugaaauccaccaaacuuagacuggcuacagggcuccggaauguucccagcauccagucucgcggacuguuuggcgccauugccggguucaucgagggaggcuggaccgggaugguggacggaugguacggcuaucaucaccagaacgaacaaggcagcggguacgcugcggaucuuaaauccacacagaaugccaucgacaagauuaccaacaaagucaauucugugaucgagaagaugaacacgcaguuuacagcuguuggaaaggaguucaaucaccuggaaaagagaauugagaaccucaauaagaaaguggaugacggcuuccuggauaucuggaccuacaacgccgaacugcucguccugcuugagaaugaacggacccuggacuaucaugauagcaacgugaagaaccucuacgagaaaguccgcucccagcugaagaauaacgccaaggagauugggaauggauguuuugaguucuaucacaaaugcgacaacacauguauggagagcgugaagaauggcaccuacgauuauccuaaauacucugaagaggcuaaacuuaacagagaagagaucgacgggguuaagcuggaguccacacggaucuaucaaauucucgccaucuacagcacgguggcgucuucccugguccuggugguuagccucggcgcuauuuccuuuuggaugugcucuaauggaagccugcagugccgcaucuguauuuga

SEQ ID NO: 197117 - RNA, 1701 nt, Artificial Sequence
  derived and/or modified CDS sequence (opt5) from hemagglutinin__InfluenzaA__ADI48196
augaaggccauccuggugguccuccuguacaccuucgcuacagccaacgcggacacgcuuugcauuggcuaucacgcuaauaacagcaccgauacaguugacaccgugcuggagaaaaaugugacagucacccauuccgugaaccuccuggaagauaagcacaaugggaaacuuuguaagcugagaggaguugcuccccuccaucugggcaaaugcaacaucgccggguggauucugggaaauccugagugugaaucucucagcacagccuccucuuggagcuacaucguggagaccuccucuagcgacaacggcacgugcuauccgggggauuuuauugacuacgaagaacugcgggagcagcuuuccagcgucucuuccuucgaacgcuuugagaucuuccccaagaccagcucuuggccuaaucacgauuccaacaagggagugacagccgcuuguccccaugccggcgcgaaaucuuuuuauaagaaucugaucuggcucguuaaaaagggcaacagcuacccuaaacuguccaagagcuauauuaaugacaaggggaaagaagugcuuguccuguggggaauccaccaccccuccaccucugccgaucaacagagccucuaccagaacgcugacgccuacguguucgugggcacauccagauauagcaagaaauuuaagccugagauugcuauccggccgaaaguccgcgaucaggaggggagaaugaauuacuauuggacccugguugaacccggagacaagauuacguucgaggccacaggcaaccugguggugccucgguacgcguuugccauggaacgcaacgcugggucuggaaucauuaucuccgauacccccguccaugacugcaauacaaccugucaaaccccuaaaggcgccaucaacacaagccuccccuuccagaauauucacccgaucacgauuggcaagugcccuaaguaugugaaaucuaccaagcugagacuugcuacagggcugcggaacguucccagcauccagucccgcggacucuuuggcgccauugccggguucaucgagggaggcuggaccgggaugguggacggaugguacggcuaucaucaccagaaugaacaaggcucuggguacgcugcggaucugaaaagcacacagaacgccaucgacaagauuaccaauaaagucaacuccgugaucgagaagaugaauacgcaguuuacagcuguuggaaaggaguucaaccaccuugagaaaagaauugagaaucugaacaagaaaguggaugacggcuuccucgauaucuggaccuacaaugccgaacugcugguccuccuggagaacgaacggacccuugacuaucaugauagcaaugugaagaaccuguacgagaaaguccgcucucagcucaagaacaaugccaaggagauugggaacggauguuuugaguucuaucacaaaugcgacaauacauguauggaauccgugaagaacggcaccuacgauuauccuaaauacagcgaagaggcuaagcugaauagagaagagaucgacgggguuaaacuugauucuacacggaucuaucaaauucuggccaucuacuccacgguggcgagcucccucguccuggugguuucucugggcgcuauuagcuuuuggaugugcuccaacggaucucuccagugccgcaucuguauuuga

SEQ ID NO: 197118 - RNA, 1701 nt, Artificial Sequence; identical to SEQ ID NO: 195905
  derived and/or modified CDS sequence (opt5) from hemagglutinin__InfluenzaA__ADI48198

SEQ ID NO: 197119 - RNA, 1701 nt, Artificial Sequence; identical to SEQ ID NO: 195905
  derived and/or modified CDS sequence (opt5) from hemagglutinin__InfluenzaA__ADI48200

SEQ ID NO: 197120 - RNA, 1701 nt, Artificial Sequence
  derived and/or modified CDS sequence (opt5) from hemagglutinin__InfluenzaA__ADI48202
augaaggccauccuggugguccuccuguacaccuucgcuacagccaacgcggacacgcuuugcauuggcuaucacgcuaauaacagcaccgauacaguugacaccgugcuggagaaaaaugugacagucacccauuccgugaaccuccuggaagauaagcacaaugggaaacuuuguaagcugagaggaguugcuccccuccaucugggcaaaugcaacaucgccggguggauucugggaaauccugagugugaaucucucagcacagccuccucuuggagcuacaucguggagaccuccucuagcgacaacggcacgugcuauccgggggauuuuauugacuacgaagaacugcgggagcagcuuuccagcgucucuuccuucgaacgcuuugagaucuuccccaagaucagcucuuggccuaaucacgauuccaacaagggagugaccgccgcuuguccccaugccggcgcgaaaucuuuuuauaagaaucugauuuggcucguuaaaaagggcaacagcuacccuaaacuguccaagagcuauaucaaugacaaggggaaagaagugcuuguccuguggggcauucaccaccccuccacaucugccgaucaacagagccucuaccagaacgcugacgccuacguguucgugggaaccuccagauauagcaagaaauuuaagccugagaucgcuauucggccgaaaguccgcgaucaggaggggagaaugaauuacuauuggacacugguugaacccggagacaagaucaccuucgaggccacgggcaaccugguggugccucgguacgcguuugccauggaacgcaacgcugggucuggaauuaucaucuccgauacacccguccaugacugcaauaccacaugucaaaccccuaaaggcgccauuaacaccagccuccccuuccagaauauccacccgauuacaaucggcaagugcccuaaguaugugaaaucuacgaagcugagacuugcuaccgggcugcggaacguucccagcauucagucccgcggacucuuuggcgccaucgccggguucaucgagggaggcuggacagggaugguggacggaugguacggcuaucaucaccagaaugaacaaggcucuggguacgcugcggaucugaaaagcacccagaacgccauugacaagaucacaaauaaagucaacuccgugauugagaagaugaauacccaguuuacggcuguuggaaaggaguucaaccaccuugagaaaagaaucgagaaucugaacaagaaaguggaugacggcuuccucgauauuuggacauacaaugccgaacugcugguccuccuggagaacgaacggacccuugacuaucaugauagcaaugugaagaaccuguacgagaaaguccgcucucagcucaagaacaaugccaaggagaucgggaacggauguuuugaguucuaucacaaaugcgacaauaccuguauggaauccgugaagaacggcacauacgauuauccuaaauacagcgaagaggcuaagcugaauagagaagagaucgacgggguuaaacuugagucuacccggauuuaucaaauccuggccauuuacuccacaguggcgagcucccucguccuggugguuucucugggcgcuaucagcuuuuggaugugcuccaacggaucucuccagugccgcauuuguaucuga

SEQ ID NO: 197121 - RNA, 1701 nt, Artificial Sequence
  derived and/or modified CDS sequence (opt5) from hemagglutinin__InfluenzaA__ADI48204
augaaggccauccuggugguccuccuguacaccuucgcuacagccaacgcggacacgcuuugcauuggcuaucacgcuaauaacagcaccgauacaguugacaccgugcuggagaagaaugugacagucacccauuccgugaaccuccuggaagauaagcacaaugggaaacuuuguaagcugagaggaguugcuccccuccaucugggcaaaugcaacaucgccggguggauucugggaaauccugagugugaaucucucagcacagccuccucuuggagcuacaucguggagaccuccucuagcgacaacggcacgugcuauccgggggauuuuauugacuacgaagaacugcgggagcagcuuuccagcgucucuuccuucgaacgcuuugagaucuuccccaagaccagcucuuggccuaaucacgauuccaacaagggagugacagccgcuuguccccaugccggcgcgaaauccuuuuauaagaaucugaucuggcucguuaaaaagggcaacucuuacccuaaacuguccaagagcuauauuaaugacaaggggaaagaagugcuuguccuguggggaauccaccaccccuccaccucugccgaucaacagagccucuaccagaacguggacgcuuacguguucgucggcacauccagauauagcaagaaauuuaagccugagauugccauccggccgaaaguucgcgaucaggaggggagaaugaauuacuauuggacccugguggaacccggagacaagauuacguucgaggcuacaggcaaccugguggucccucgguacgccuuugcgauggaacgcaacgccgggucuggaaucauuaucuccgauacccccgugcaugacugcaauacaaccugucaaaccccuaaaggcgcuaucaacacaagccuccccuuccagaauauucacccgaucacgauuggcaagugcccuaaguauguuaaaucuaccaagcugagacuugccacagggcugcggaacgugcccagcauccagucccgcggacucuuuggcgcuauugccggguucaucgagggaggcuggaccgggauggucgacggaugguacggcuaucaucaccagaaugaacaaggcucuggguacgccgcugaucugaaaagcacacagaacgcgaucgacaagauuaccaaaaaggugaauagcguuaucgagaagaugaacacgcaguuuacagccgugggaaaagaguucaaucaccuugaaaagagaauugagaaccugaauaaaaaggucgaugacggcuuccucgauaucuggaccuacaacgcugaacugcuggugcuccuggagaaugaacggacccuugacuaucaugauagcaacgucaaaaaucuguacgagaaggugcgcucucagcucaagaacaacgccaaagagauugggaauggauguuuugaguucuaucacaagugcgacaacacauguauggaguccguuaaaaauggcaccuacgauuauccuaaguacagcgaagaggccaaacugaacagagaagagaucgacggggugaaacuugagucuacacggaucuaucaaauucuggcuaucuacuccacggucgccagcucccucgugcugguugugucucugggcgcgauuagcuuuuggaugugcuccaauggaucucuccagugccgcaucuguauuuga

SEQ ID NO: 197122 - RNA, 1701 nt, Artificial Sequence; identical to SEQ ID NO: 195905
  derived and/or modified CDS sequence (opt5) from hemagglutinin__InfluenzaA__ADI48208

SEQ ID NO: 197123 - RNA, 1701 nt, Artificial Sequence; identical to SEQ ID NO: 195905
  derived and/or modified CDS sequence (opt5) from hemagglutinin__InfluenzaA__ADI48210

SEQ ID NO: 197124 - RNA, 1701 nt, Artificial Sequence
  derived and/or modified CDS sequence (opt5) from hemagglutinin__InfluenzaA__ADI48212
augaaggccauccuggugguccuccuguacaccuucgcuacagccaacgcggacacgcuuugcauuggcuaucacgcuaauaacagcaccgauacaguugacaccgugcuggagaaaaaugugacagucacccauuccgugaaccuccuggaagauaagcacaaugggaaacuuuguaagcugagaggaguugcuccccuccaucugggcaaaugcaacaucgccggguggauucugggaaauccugagugugaaucucucagcacagccuccucuuggagcuacaucguggagaccuccucuagcgacaacggcacgugcuauccgggggauuuuauugacuacgaagaacugcgggagcagcuuuccagcgucucuuccuucgaacgcuuugagaucuuccccaagaccagcucuuggccuaaucacgauuccaacaagggagugacagccgcuuguccccaugccggcgcgaaaucuuuuuauaagaaucugaucuggcucguuaaaaagggcaacagcuacccuaaacuguccaagagcuauauuaaugacaaggggaaagaagugcuuguccuguggggaauccaccaccccuccaccucugccgaucaacagagccucuaccagaacgcugacgccuacguguucgugggcacauccagauauagcaagaaauuuaagccugagauugcuauccggccgaaaguccgcgaucaggaggggagaaugaauuacuauuggacccugguugaacccggagacaagauuacguucgaggccacaggcaaccugguggugccucgguacgcguuugccauggaacgcaacgcugggucuggaaucauuaucuccgauacccccguccaugacugcaauacaaccugucaaaccccuaaaggcgccaucaacacaagccuccccuuccagaauauucacccgaucacgauuggcaagugcccuaaguaugugaaaucuaccaagcugagacuugcuacagggcugcggaacguucccagcauccagucccgcggacucuuuggcgccauugccggguucaucgagggaggcuggaccgggaugguggacggaugguacggcuaucaucaccagaaugaacaaggcucuggguacgcugcggaucugaaaagcacacagaacgccaucgacaagauuaccaauaaagucaacuccgugaucgagaagaugaauacgcaguuuacagcuguuggaaaggaguucaaccaccuugagaaaagaauugagaaucugaacaagaaaguggaugacggcuuccucgaugucuggaccuacaaugccgaacugcuggugcuccuggagaacgaacggacccuugacuaucaugauagcaaugucaagaaccuguacgagaaagugcgcucucagcucaagaacaaugccaaggagaucgggaacggauguuuugaguucuaucacaaaugcgacaauacauguauggaauccguuaagaacggcaccuacgauuauccuaaauacagcgaagaggcuaagcugaauagagaagagauugacggggugaaacuugagucuacacggaucuaucaaauccuggccauuuacuccacggucgcgagcucccucgugcugguugugucucugggcgcuaucagcuuuuggaugugcuccaacggaucucuccagugccgcauuuguaucuga

SEQ ID NO: 197125 - RNA, 1701 nt, Artificial Sequence
  derived and/or modified CDS sequence (opt5) from hemagglutinin__InfluenzaA__ADI48214
augaaggccauccuggugguccuccuguacaccuucgcuauugccaacgcggacacacuuugcaucggcuaucacgcuaauaacagcacggauaccguugacacagugcuggagaaaaaugugaccgucacacauuccgugaaccuccuggaagauaagcacaaugggaaacuuuguaagcugagaggaguugcuccccuccaucugggcaaaugcaacauugccggguggauccugggaaauccugagugugaaucucucagcaccgccuccucuuggagcuacauuguggagacauccucuagcgacaacggaaccugcuauccgggggauuuuaucgacuacgaagaacugcgggagcagcuuuccagcgucucuuccuucgaacgcuuugagaucuuccccaagacgagcucuuggccuaaucacgauuccaacaagggagugaccgccgcuuguccccaugccggcgcgaaaucuuuuuauaagaaucugauuuggcucguuaaaaagggcaacagcuacccuaaacuguccaagagcuauaucaaugacaaggggaaagaagugcuuguccuguggggcauucaccaccccuccacaucugccgaucaacagagccucuaccagaacgcugacgccuacguguucgugggcaccuccagauauagcaagaaauuuaagccugagaucgcuauucggccgaaaguccgcgaucaggaggggagaaugaauuacuauuggacacugguugaacccggagacaagaucaccuucgaggccacgggcaaccugguggugccucgguacgcguuugccauggaacgcaacgcugggucuggaauuaucaucuccgauacacccguccaugacugcaauaccacaugucaaaccccuaaaggcgccauuaacaccagccuccccuuccagaauauccacccgauuacaaucggcaagugcccuaaguaugugaaaucuacgaagcugagacuugcuaccgggcugcggaacguucccagcauucagucccgcggacucuuuggcgccaucgccggguucaucgagggaggcuggacagggaugguggacggaugguacggcuaucaucaccagaaugaacaaggcucuggguacgcugcggaucugaaaagcacccagaacgccauugacaagaucacaaauaaagucaacuccgugauugagaagaugaauacccaguuuacggcuguuggaaaggaguucaaccaccuugagaaaagaaucgagaaucugaacaagaaaguggaugacggcuuccucgauauuuggacauacaaugccgaacugcugguccuccuggagaacgaacggacccuugacuaucaugauagcaaugugaagaaccuguacgagaaaguccgcucucagcucaagaacaaugccaaggagaucgggaacggauguuuugaguucuaucacaaaugcgacaauaccuguauggaauccgugaagaacggcacauacgauuauccuaaauacagcgaagaggcuaagcugaauagagaagagaucgacgggguuaaacuugagucuacccggauuuaucaaauccuggccauuuacuccacaguggcgagcucccucguccuggcugugucucugggcgccaucagcuuuuggaugugcuccaacggaucucuccagugccgcauuuguaucuga

SEQ ID NO: 197126 - RNA, 1701 nt, Artificial Sequence; identical to SEQ ID NO: 197124
  derived and/or modified CDS sequence (opt5) from hemagglutinin__InfluenzaA__ADI48216

SEQ ID NO: 197127 - RNA, 1701 nt, Artificial Sequence
  derived and/or modified CDS sequence (opt5) from hemagglutinin__InfluenzaA__ADI48218
augaaggccauccuggugguccuccuguacaccuucgcuacagccaacgcggacacgcuuugcauuggcuaucacgcuaauaacagcaccgauacaguugacaccgugcuggagaaaaaugugacagucacccauuccgugaaccuccuggaagauaagcacaaugggaaacuuuguaagcugagaggaguugcuccccuccaucugggcaaaugcaacaucgccggguggauucugggaaauccugagugugaaucucucagcacagccuccucuuggagcuacaucguggagaccuccucuagcgacaacggcacgugcuauccgggggauuuuauugacuacgaagaacugcgggagcagcuuuccagcgucucuuccuucgaacgcuuugagaucuuccccaagaccagcucuuggccuaaucacgauuccaacaagggagugacagccgcuuguccccaugccggcgcgaaaucuuuuuauaagaaucugaucuggcucguuaaaaagggcaacagcuacccuaaacuguccaagagcuauauuaaugacaaggggaaagaagugcuuguccuguggggaauccaccaccccuccaccucugccgaucaacagagccucuaccagaacgcugacgccuacguguucgugggcacauccagauauagcaagaaauuuaagccugagauugcuauccggccgaaaguccgcgaucaggaggggagaaugaauuacuauuggacccugguugaacccggagacaagauuacguucgaggccacaggcaaccugguggugccucgguacgcguuugccauggaacgcaacgcugggucuggaaucauuaucuccgauacccccguccaugacugcaauacaaccugucaaaccccuaaaggcgccaucaacacaagccuccccuuccagaauauucacccgaucacgauuggcaagugcccuaaguaugugaaaucuaccaagcugagacuugcuacagggcugcggaacguucccagcauccagucccgcggacucuuuggcgccauugccggguucaucgagggaggcuggaccgggaugguggacggaugguacggcuaucaucaccagaaugaacaaggcucuggguacgcugcggaucugaaaagcacacagaacgccaucgacaagauuaccaauaaagucaacuccgugaucgagaagaugaauacgcaguuuacagcuguuggaaaggaguucaaccaccuugagaaaagaauugagaaucugaacaagaaaguggaugacggcuuccucgauaucuggaccuacaaugccgaacugcugguccuccuggagaacgaacggacccuugacuaucaggauagcaaugugaagaaccuguacgagaaaguccgcucucaacucaagaacaaugccaaggagauugggaacggauguuuugaguucuaucauaaaugcgacaauacauguauggaauccgugaagaacggcaccuacgauuauccuaaauacagcgaagaggcuaagcugaauagagaagagaucgacgggguuaaacuugagucuacacggaucuaucagauucuggccaucuacuccacgguggcgagcucccucguccuggugguuucucugggcgcuauuagcuuuuggaugugcuccaacggaucucuccagugccgcaucuguauuuga

SEQ ID NO: 197128 - RNA, 1701 nt, Artificial Sequence
  derived and/or modified CDS sequence (opt5) from hemagglutinin__InfluenzaA__ADI48220
augaaggccauccuggugguccuccuguacaccuucgcuacagccaacgcggacacgcuuugcauuggcuaucacgcuaauaacagcaccgauacaguugacaccgugcuggagaaaaaugugacagucacccauuccgugaaccuccuggaagauaagcacaaugggaaacuuuguaagcugagaggaguugcuccccuccaucugggcaaaugcaacaucgccggguggauucugggaaauccugagugugaaucucucagcacagccuccucuuggagcuacaucguggagaccuccucuagcgacaacggcacgugcuauccgggggauuuuauugacuacgaagaacugcgggagcagcuuuccagcgucucuuccuucgaacgcuuugagaucuuccccaagaccagcucuuggccuaaucacgauuccaacaagggagugacagccgcuuguccccaugccggcgcgaaaucuuuuuauaagaaucugaucuggcucguuaaaaagggcaacagcuacccuaaacuguccaagagcuauauuaaugacaaggggaaagaagugcuuguccuguggggaauccaccaccccuccaccucugccgaucaacagagccucuaccagaacgcugacgccuacguguucgugggcacauccagauauagcaagaaauuuaagccugagauugcuauccggccgaaaguccgcgaucaggaggggagaaugaauuacuauuggacccugguugaacccggagacaagauuacguucgagacaaccggcaaccugguggugccucgguacgccuuugcgauggaacgcaacgccgggucuggaaucauuaucuccgauacacccguccaugacugcaauaccaccugucaaacaccuaaaggcgcuaucaacacgagccuccccuuccagaauauucacccgaucaccauuggcaagugcccuaaguaugugaaaucuacaaagcugagacuugccaccgggcugcggaacguucccagcauccagucccgcggacucuuuggcgcuauugccggguucaucgagggaggcuggacagggaugguggacggaugguacggcuaucaucaccagaaugaacaaggcucuggguacgccgcugaucugaaaagcacccagaacgcgaucgacaagauuacgaauaaagucaacuccgugaucgagaagaugaauacacaguuuaccgccguuggaaaggaguucaaccaccuugagaaaagaauugagaaucugaacaagaaaguggaugacggcuuccucgauaucuggaccuacaaugcugaacugcugguccuccuggagaacgaacggacacuuggguaucaugacagcaaugugaagaaccuguacgagaaaguccgcucucagcucaagaacaaugccaaggagauuggaaacggcuguuuugaguucuaucacaaaugcgauaauaccuguauggaauccgugaagaacgggacauacgacuauccuaaauacagcgaagaggccaagcugaauagagaagagaucgauggcguuaaacuugagucuacgcggaucuaucaaauucuggcuaucuacuccaccguggccagcucccucguccuggugguuucucugggagcgauuagcuuuuggaugugcuccaacggcucucuccagugccgcaucuguauuuga

SEQ ID NO: 197129 - RNA, 1701 nt, Artificial Sequence
  derived and/or modified CDS sequence (opt5) from hemagglutinin__InfluenzaA__ADI48622
augaaggccauccugguguuccuccuguacaccuuugcuacagccaacgcggacacgcuuugcauuggcuaucacgcuaauaacagcaccgauacagucgacaccguucuggagaagaaugugacagugacccauuccgucaaccuccuggaagauaagcacaaugggaaacuuuguaagcugagaggaguggcuccccuccaucugggcaaaugcaacaucgccggguggauucugggaaauccugagugugaaucucucagcacagccuccucuuggagcuacaucguugagaccuccucuagcgacaacggcacgugcuauccgggggauuucauugacuacgaagaacugcgggagcagcuuuccagcgugucuuccuuugaacgcuucgagaucuuucccaagaccagcucuuggccuaaucacgauuccaacaagggagucacagccgcuuguccccaugccggcgcgaaaucuuucuauaagaaucugaucuggcucgugaaaaagggcaacagcuacccuaaacuguccaagagcuauauuaaugacaaggggaaagaaguucuugugcuguggggaauccaccaccccuccaccucugccgaucaacagagccucuaccagaacgcugacgccuacgucuuugugggcacauccagauauagcaagaaauucaagccugagauugcuauccggccgaaagugcgcgaucaggaggggagaaugaauuacuauuggacccuggucgaacccggagacaagauuacguuugaggccacaggcaaccugguugugccucgguacgcguucgccauggaacgcaacgcugggucuggaaucauuaucuccgauacccccgugcaugacugcaauacaaccugucaaaccccuaaaggcgccaucaacacaagccuccccuuucagaauauucacccgaucacgauuggcaagugcccuaaguaugucaaaucuaccaagcugagacuugcuacagggcugcggaacgugcccagcauccagucccgcggacucuucggcgccauugccggguuuaucgagggaggcuggaccgggaugguugacggaugguacggcuaucaucaccagaaugaacaaggcucuggguacgcugcggaucugaaaagcacacagaacgccaucgacgagauuaccaauaaggugaacuccgucaucgagaaaaugaauacgcaguucacagcugugggaaaggaguucaaccaccuugagaagagaauugaaaaucugaacaaaaagguugaugacggcuuucucgauaucuggaccuacaaugccgagcugcuggugcuccuggaaaacgagcggacccuugacuaucaugauagcaaugucaaaaaccuguacgagaaggugcgcucucagcucaaaaacaaugccaaggaaauugggaacggauguuucgaguuuuaucacaagugcgacaauacauguauggaauccgucaaaaacggcaccuacgauuauccuaaguacagcgaggaagcuaaacugaauagagaggagaucgacggggugaaacuugaaucuacacggaucuaucaaauucuggccaucuacuccacgguugcgagcucccucgugcuggucgugucucugggcgcuauuagcuucuggaugugcuccaacggaucucuccagugccgcaucuguauuuga

SEQ ID NO: 197130 - RNA, 1701 nt, Artificial Sequence
  derived and/or modified CDS sequence (opt5) from hemagglutinin__InfluenzaA__ADI48632
auggaggccauccuggugguccuccuguacaccuucgcuacagccaacgcggacacgcuuugcauuggcuaucacgcuaauaacagcaccgauacaguugacaccgugcuggaaaagaaugugacagucacccauuccgugaaccuccuggaggauaaacacaaugggaaacuuuguaagcugagaggaguugcgccccuccaucugggcaagugcaacaucgccggguggauucugggaaauccugaaugugagucucucagcacagcuuccucuuggagcuacaucguggaaaccuccucuagcgacaacggcacgugcuauccgggggauuuuauugacuacgaggagcugcgggaacagcuuuccagcgucucuuccuucgagcgcuuugaaaucuuccccaaaaccagcucuuggccuaaucacgauuccaacaagggagugacagccgcuuguccccaugccggcgccaagagcuuuuauaaaaaucugaucuggcucguuaagaaaggcaacucuuacccuaagcuguccaaaagcuauauuaaugacaaggggaaggaggugcuuguccuguggggagugcaccaccccuccaccucugccgaucaacagagccucuaccagaacgcugacgccuacguguucgucggcuccagcagauauucuaaaaaguuuaaaccugagaucgcuauucggccgaagguucgcgaucaggaagggagaaugaauuacuauuggacacugguggagcccggagacaaaaucaccuucgaagccacgggcaaccugguggucccucgguacgcguuugccauggagcgcaacgcuggguccggaauuaucauuagcgauacacccgugcaugacugcaauaccacaugucaaaccccuaagggcgccaucaacaccucucuccccuuccacaauauccauccgauuacaaucggcaaaugcccuaaguauguuaagagcacgaaacugagacuugcuaccgggcugcggaacgugcccuccauucagucucgcggacucuuuggcgccaucgccggguucauugaaggaggcuggacagggauggucgacggaugguacggcuaucaccaccagaaugagcagggcagcggguacgcugcggaucugaaguccacccaaaacgccaucgacgagaucacaaauaaagugaacagcguuauugaaaagaugaauacccaguuuacggcugugggaaaagaguucaaccaucuugaaaagagaaucgagaaucugaacaagaaagucgaugacggcuuccucgauauuuggacauacaaugccgaacugcuggugcuccuggagaacgagcggacccuugacuaucacgauucuaaugucaagaaccuguacgaaaaagugcgcucccagcucaagaacaaugccaaagagaucgggaacggauguuuugaguucuaucauaagugcgacaauaccuguauggaaagcguuaagaacggcacauacgauuauccuaaauacucugaagaggcuaagcugaauagagaggaaauugacggggugaaacuugaguccacccggaucuaucagauccuggccauuuacagcacagucgcguccucucucgugcugguugugagccugggcgcuaucuccuuuuggaugugcucuaacggaagccuccaaugccgcauuuguaucuga

SEQ ID NO: 197131 - RNA, 1701 nt, Artificial Sequence; identical to SEQ ID NO: 194983
  derived and/or modified CDS sequence (opt5) from hemagglutinin__InfluenzaA__ADI48642

SEQ ID NO: 197132 - RNA, 1701 nt, Artificial Sequence; identical to SEQ ID NO: 194983
  derived and/or modified CDS sequence (opt5) from hemagglutinin__InfluenzaA__ADI48652

SEQ ID NO: 197133 - RNA, 1701 nt, Artificial Sequence
  derived and/or modified CDS sequence (opt5) from hemagglutinin__InfluenzaA__ADI48672
auggaggccauccuggugguccuccuguacaccuucgcuacagccaacgcggacacgcuuugcauuggcuaucacgcuaauaacagcaccgauacaguugacaccgugcuggaaaagaaugugacagucacccauuccgugaaccuccuggaggauaaacacaaugggaaacuuuguaaacugagaggaguugcgccccuccaucugggcaagugcaacaucgccggguggauucugggaaauccugaaugugagucucucagcacagcuuccucuuggagcuacaucguggaaaccuccucuagcgacaacggcacgugcuauccgggggauuuuauugacuacgaggagcugcgggaacagcuuuccagcgucucuuccuucgagcgcuuugaaaucuuccccaaaaccagcucuuggccuaaucacgauuccaacaagggagugacagccgcuuguccccaugccggcgccaagagcuuuuauaauaaccugaucuggcucguuaaaaagggcaauucuuacccuaaacuguccaagagcuauauuaacgacaaagggaaggaggugcuuguccuguggggaauccaccaccccuccaccucugccgaucaacagagccucuaccagaaugcugacgccuacguguucgugggcuccagcagauauucuaagaaauuuaagccugagauugcuauccggccgaaaguccgcgaucaggaagggagaaugaacuacuauuggacacugguugagcccggagacaagauuaccuucgaagccacgggcaaccugguggugccucgguacgcguuugccauggagcgcaaugcuggguccggaaucauuaucagcgauacacccguccaugacugcaacaccacaugucaaaccccuaaaggcgccaucaauaccucucuccccuuccacaacauucauccgaucacaauuggcaagugcccuaaauauguuaagagcacgaagcugagacuugcuaccgggcugcggaaugugcccuccauccagucucgcggacucuuuggcgccauugccggguucaucgaaggaggcuggacagggaugguggacggaugguacggcuaucaccaccagaacgagcagggcagcggguacgcugcggaucugaaauccacccaaaaugccaucgacgagauuacaaacaaggucaauagcgugaucgaaaagaugaacacccaguuuacggcuguuggaaaggaguucaaucaucuugaaaagagaauugagaaccugaauaagaagguggaugacggcuuccucgauaucuggacauacaacgccgaacugcugguccuccuggagaaugagcggacccuugacuaucacgauucuaacgugaaaaaccuguacgaaaagguccgcucccagcucaaaaauaacgccaaggagauugggaauggauguuuugaguucuaucauaaaugcgacaacaccuguauggaaagcgugaagaauggcacauacgauuauccuaaguacucugaagaggcuaaacugaacagagaggaaaucgacgggguuaaacuugaguccacccggaucuaucagauucuggccaucuacagcacaguggcguccucucucguccuggugguuagccugggcgcuauuuccuuuuggaugugcucuaauggaagccuccaaugccgcaucuguauuuga

SEQ ID NO: 197134 - RNA, 1701 nt, Artificial Sequence; identical to SEQ ID NO: 194741
  derived and/or modified CDS sequence (opt5) from hemagglutinin__InfluenzaA__ADI48682

SEQ ID NO: 197135 - RNA, 1701 nt, Artificial Sequence; identical to SEQ ID NO: 194983
  derived and/or modified CDS sequence (opt5) from hemagglutinin__InfluenzaA__ADI48692

SEQ ID NO: 197136 - RNA, 1701 nt, Artificial Sequence; identical to SEQ ID NO: 194921
  derived and/or modified CDS sequence (opt5) from hemagglutinin__InfluenzaA__ADI48702

SEQ ID NO: 197137 - RNA, 1701 nt, Artificial Sequence; identical to SEQ ID NO: 194983
  derived and/or modified CDS sequence (opt5) from hemagglutinin__InfluenzaA__ADI48712

SEQ ID NO: 197138 - RNA, 1701 nt, Artificial Sequence; identical to SEQ ID NO: 194983
  derived and/or modified CDS sequence (opt5) from hemagglutinin__InfluenzaA__ADI48722

SEQ ID NO: 197139 - RNA, 1701 nt, Artificial Sequence; identical to SEQ ID NO: 194741
  derived and/or modified CDS sequence (opt5) from hemagglutinin__InfluenzaA__ADI48732

SEQ ID NO: 197140 - RNA, 1701 nt, Artificial Sequence; identical to SEQ ID NO: 194741
  derived and/or modified CDS sequence (opt5) from hemagglutinin__InfluenzaA__ADI48742

SEQ ID NO: 197141 - RNA, 1701 nt, Artificial Sequence
  derived and/or modified CDS sequence (opt5) from hemagglutinin__InfluenzaA__ADI48752
auggaggccauccugguguuccuccuguacaccuuugcuacagccaacgcggacacgcuuugcauuggcuaucacgcuaauaacagcaccgauacagucgacaccguucuggaaaagaaugugacagugacccauuccgucaaccuccuggaggauaaacacaaugggaaacuuuguaagcugagaggaguggcgccccuccaucugggcaagugcaacaucgccggguggauucugggaaauccugaaugugagucucucagcacagcuuccucuuggagcuacaucguugaaaccuccucuagcgacaacggcacgugcuauccgggggauuucauugacuacgaggagcugcgggaacagcuuuccagcgugucuuccuuugagcgcuucgaaaucuuucccaaaaccagcucuuggccuaaucacgauuccaacaagggaaucacagccgcuuguccccaugccggcgccaagagcuucuauaaaaaucugauuuggcucgucaagaaaggcaacucuuacccuaagcuguccaaaagcuauaucaaugacaaggggaaggaggugcuuguucuguggggcauucaccaccccuccaccucugccgaucaacagagccucuaccagaacgcugacgccuacguguuugucggauccagcagauauucuaaaaaguucaaaccugagaucgcuauucggccgaaggugcgcgaucaggaagggagaaugaauuacuauuggacacugguggagcccggagacaaaaucaccuuugaagccacgggcaaccuggucguuccucgguacgcguucgccauggagcgcaacgcuggguccggaauuaucaucagcgauacacccgugcaugacugcaauaccacaugucaaaccccuaagggcgccauuaacaccucucuccccuuucacaauauccauccgauuacaaucggcaaaugcccuaaguaugucaagagcacgaaacugagacuugcuaccgggcugcggaacgugcccuccauucagucucgcggacucuucggcgccaucgccggguuuaucgaaggaggcuggacagggaugguggacggaugguacggcuaucaccaccagaaugagcagggcagcggguacgcugcggaucugaaguccacccaaaacgccauugacgagaucacaaauaaaguuaacagcgugauugaaaagaugaauacccaguucacggcugucggaaaagaguucaaccaucuugaaaagagaaucgagaaucugaacaagaaaguggaugacggcuuucucgauauuuggacauacaaugccgaacugcugguucuccuggagaacgagcggacccuugacuaucacgauucuaaugugaagaaccuguacgaaaaaguccgcucccagcucaagaacaaugccaaagagaucgggaacggauguuucgaauuuuaucauaagugcgacaauaccuguauggagagcgugaagaacggcacauacgauuauccuaaauacucugaagaggcuaagcugaauagagaggaaaucgacggggucaaacuugaguccacccggauuuaucagauccuggccauuuacagcacaguggcguccucucucguucugguggucagccugggcgcuaucuccuucuggaugugcucuaacggaagccuccaaugccgcauuuguaucuga

SEQ ID NO: 197142 - RNA, 1701 nt, Artificial Sequence; identical to SEQ ID NO: 194983
  derived and/or modified CDS sequence (opt5) from hemagglutinin__InfluenzaA__ADI48762

SEQ ID NO: 197143 - RNA, 1701 nt, Artificial Sequence
  derived and/or modified CDS sequence (opt5) from hemagglutinin__InfluenzaA__ADI48772
auggaggccauccuggugguccuccuguacaccuucgcuacagccaacgcggacacgcuuugcauuggcuaucaggcuaauaacagcaccgauacaguugacaccgugcuggaaaagaaugugacagucacccacuccgugaaccuccuggaggauaaacauaaugggaaacuuuguaagcugagaggaguugcgccccuccaccugggcaagugcaacaucgccggguggauucugggaaauccugaaugugagucucucagcacagcuuccucuuggagcuacaucguggaaaccuccucuagcgacaacggcacgugcuauccgggggauuuuauugacuacgaggagcugcgggaacaacuuuccagcgucucuuccuucgagcgcuuugaaaucuuccccaaaaccagcucuuggccuaaucaugauuccaacaagggagugacagccgcuuguccccacgccggcgccaagagcuuuuauaaaaaucugaucuggcucguuaagaaaggcaacucuuacccuaagcuguccaaaagcuauauuaaugacaaggggaaggaggugcuuguccuguggggaauccaucaccccuccaccucugccgaucagcagagccucuaccagaacgcugacgccuacguguucgugggcuccagcagauauucuaaaaaguuuaaaccugagauugcuauccggccgaagguccgcgaucaagaagggagaaugaauuacuauuggacacugguugagcccggagacaaaauuaccuucgaagccacgggcaaccugguggugccucgguacgcguuugccauggagcgcaacgcuggguccggaaucauuaucagcgauacacccguccacgacugcaauaccacaugucagaccccuaagggcgccaucaacaccucucuccccuuccauaauauucacccgaucacaauuggcaaaugcccuaaguauguuaagagcacgaaacugagacuugcuaccgggcugcggaacgugcccuccauccagucucgcggacucuuuggcgccauugccggguucaucgaaggaggcuggacagggaugguggacggaugguacggcuaucaucaccagaaugagcaaggcagcggguacgcugcggaucugaaguccacccagaacgccaucgacgagauuacaaauaaagucaacagcgugaucgaaaagaugaauacccaguuuacggcuguuggaaaagaguucaaccaccuugaaaagagaauugagaaucugaacaagaaaguggaugacggcuuccucgauaucuggacauacaaugccgaacugcugguccuccuggagaacgagcggacccuugacuaucaugauucuaaugugaagaaccuguacgaaaaaguccgcucccagcucaagaacaaugccaaagagauugggaacggauguuuugaguucuaucacaagugcgacaauaccuguauggaaagcgugaagaacggcacauacgauuauccuaaauacucugaagaggcuaagcugaauagagaggaaaucgacgggguuaaacuugaguccacccggaucuaucaaauucuggccaucuacagcacaguggcguccucucucguccuggugguuagccugggcgcuauuuccuuuuggaugugcucuaacggaagccuccagugccgcaucuguauuuga

SEQ ID NO: 197144 - RNA, 1701 nt, Artificial Sequence
  derived and/or modified CDS sequence (opt5) from hemagglutinin__InfluenzaA__ADI48782
augaaggccauccuggugguccuccuguacaccuucgcuacagccaacgcggacacgcuuugcauuggcuaucacgcuaauaacagcaccgauacaguugacaccgugcuggagaagaaugugacagucacccauuccgugaaccuccuggaagauaagcacaaugggaaacuuuguaagcugagaggaguugcuccccuccaucugggcaaaugcaacaucgccggguggauucugggaaauccugagugugaaucucucagcacagccuccucuuggagcuacaucguggagaccuccucuagcgacaacggcacgugcuauccgggggauuuuauugacuacgaagaacugcgggagcagcuuuccagcgucucuuccuucgaacgcuuugagaucuuccccaagaccagcucuuggccuaaucacgauuccaacaagggagugacagccgcuuguccccaugccggcgcgaaaucuuuuuauaagaaucugaucuggcucguuaaaaagggcaacagcuacccuaaacuguccaagagcuauauuaaugacaaggggaaagaagugcuuguccuguggggaauccaccaccccuccaccucugccgaucaacagagccucuaccagaacgcugacgccuacguguucgugggcacauccagauauagcaagaaauuuaagccugagauugcuauccggccgaaaguccgcgaucaggaggggagaaugaauuacuauuggacccugguugaacccggagacaagauuacguucgaggccacaggcaaccugguggugccucgguacgcguuugccauggaacgcaacgcugggucuggaaucauuaucuccgauacccccguccaugacugcaauacaaccugucaaaccccuaaaggcgccaucaacacaagccuccccuuccagaauauucacccgaucacgauuggcaagugcccuaaguaugugaaaucuaccaagcugagacuugcuacagggcugcggaacguucccagcauccagucccgcggacucuuuggcgccauugccggguucaucgagggaggcuggaccgggaugguggacggaugguacggcuaucaucaccagaaugaacaaggcucuggguacgcugcggaucugaaaagcacacagaacgccaucgacgagauuaccaauaaggucaacuccgugaucgagaaaaugaauacgcaguuuacagcuguuggaaaggaguucaaccaccuugagaagagaauugaaaaucugaacaaaaagguggaugacggcuuccucgauaucuggaccuacaaugccgagcugcugguccuccuggaaaacgagcggacccuugacuaucaugauagcaaugugaaaaaccuguacgagaagguccgcucucagcucaaaaacaaugccaaggaaauugggaacggauguuuugaguucuaucacaagugcgacaauacauguauggaauccgugaaaaacggcaccuacgauuauccuaaguacagcgaggaaucuaaacugaauagagaggagaucgacgggguuaaacuugaauccacacggaucuaucaaauucuggcuaucuacagcacgguggccuccucucucguccuggugguuagccugggcgcgauuuccuuuuggaugugcucuaacggaagccuccagugccgcaucuguauuuga

SEQ ID NO: 197145 - RNA, 1701 nt, Artificial Sequence
  derived and/or modified CDS sequence (opt5) from hemagglutinin__InfluenzaA__ADI48792
auggaggccauccuggugguccuccuguacaccuucgcuacagccaacgcggacacgcuuugcauuggcuaucacgcuaauaacagcaccgauacaguugacaccgugcuggaaaagaaugugacagucacccauuccgugaaccuccuggaggauaaacacaaugggaaacuuuguaagcugagaggaguugcgccccuccaucugggcaagugcaacaucgccggguggauucugggaaauccugaaugugagucucucagcacagcuuccucuuggagcuacaucguggaaaccuccucuagcgacaacggcacgugcuauccgggggauuuuauugacuacgaggagcugcgggaacagcuuuccagcgucucuuccuucgagcgcuuugaaaucuuccccaaaaccagcucuuggccuaaucacgauuccaacaagggagugacagccgcuuguccccaugccggcgccaagagcuuuuauaaaaaucugaucuggcucguuaagaaaggcaacucuuacccuaagcuguccaaaagcuauauuaaugacaaggggaaggaggugcuuguccuguggggaauccaccaccccuccaccucugccgaucaacagagccucuaccagaacgcugacgccuacauuuucgugggcuccagcagauauucuaaaaaguuuaaaccugagaucgcuauucggccgaaggugcgcgaucaggaagggagaaugaauuacuauuggacacuggucgagcccggagacaaaaucaccuucgaagccacgggcaaccugguugugccucgguacgcguuugccauggagcgcaacgcuggguccggaauuaucaucagcgauacacccgugcaugacugcaauaccacaugucaaaccccuaagggcgccauuaacaccucucuccccuuccacaauauccauccgauuacaaucggcaaaugcccuaaguaugucaagagcacgaaacugagacuugcuaccgggcugcggaacgugcccuccauucagucucgcggacucuuuggcgccaucgccggguucaucgaaggaggcuggacagggaugguugacggaugguacggcuaucaccaccagaaugagcagggcagcggguacgcugcggaucugaaguccacccaaaacgccauugacgagaucacaaauaaagugaacagcgucauugaaaagaugaauacccaguuuacggcugugggaaaagaguucaaccaucuugaaaagagaaucgagaaucugaacaagaaaguugaugacggcuuccucgauauuuggacauacaaugccgaacugcuggugcuccuggagaacgagcggacccuugacuaucacgauucuaaugucaagaaccuguacgaaaaagugcgcucccagcucaagaacaaugccaaagagaucgggaacggauguuuugaguucuaucauaagugcgacaauaccuguauggaaagcgucaagaacggcacauacgauuauccuaaauacucugaagaggcuaagcugaauagagaggaaaucgacggggugaaacuugaguccacccggauuuaucagauccuggccauuuacagcacaguugcguccucucucgugcuggucgugagccugggcgcuaucuccuuuuggaugugcucuaacggaagccuccaaugccgcauuuguaucuga

SEQ ID NO: 197146 - RNA, 1701 nt, Artificial Sequence
  derived and/or modified CDS sequence (opt5) from hemagglutinin__InfluenzaA__ADI49029
auggaggccauccuggugguccuccuguacaccuucgcuacagccaacgcggacacgcuuugcauuggcuaucacgcuaauaacagcaccgauacaguugacaccgugcuggaaaagaaugugacagucacccauuccgugaaccuccuggaggauaagcacaaugggaaacuuuguaaacugagaggaguugcuccccuccaucugggcaagugcaacaucgccggguggauucugggaaauccugaaugugagucucucagcacagccuccucuuggagcuacaucguggaaaccuccauuucugacaacggcacgugcuauccgggggauuuuaucgacuacgaggagcugcgggaacagcuuagcuccgucagcucuuucgagcgcuuugaaaucuuccccaaaaccuccagcuggccuaaucacgauucuaacaagggagugacagccgcuuguccccaugccggcgcgaaguccuuuuauaaaaaucugauuuggcucguuaagaaaggcaacagcuacccuaagcugucuaaauccuauaucaaugacaaggggaaggaggugcuuguccuguggggcauucaccaccccagcaccuccgccgaucaacagucucucuaccagaacgcugacgccuacguguucgugggaagcuccagauauagcaaaaaguuuaaaccugagaucgcuauucggccgaagguccgcgaucaggaagggagaaugaauuacuauuggacacugguugagcccggagacaaaaucaccuucgaagccacgggcaaccugguggugccucgguacgcguuugccauggagcgcaacgcugggucuggaauuaucaucuccgauacacccguccaugacugcaauaccacaugucaaaccccuaagggcgccauuaacaccagccuccccuuccacaauauccauccgauuacaaucggcaaaugcccuaaguaugugaagucuacgaaacugagacuugcuaccgggcugaagaacguucccagcauucagucccggggacucuuuggcgccaucgccggguucaucgaaggaggcuggacagggaugguggacggaugguacggcuaucaccaccagaaugagcagggcucuggguacgcugcggaucugaaaagcacccaaaacgccauugacgagaucacaaauaaggucaacuccgugauugaaaagaugaauacccaguuuacggcuguuggaaaggaguucaaccaucuugaaaagcgcaucgagaaucugaacaaaaagguggaugacggcuuccucgauauuuggacauacaaugccgaacugcugguccuccuggagaacgagagaacccuugacuaucacgauagcaaugugaaaaaccuguacgaaaagguccggucucagcucaaaaacaaugccaaggagaucgggaacggauguuuugaguucuaucauaagugcgacaauaccuguauggaauccgugaaaaacggcacauacgauuauccuaaguacagcgaagaggcuaaacugaaucgcgaggaaaucgacgggguuaaacuugagucuaccagaauuuaucagauccuggccauuuacuccacaguggcgagcucccucguccuggugguuucucugggcgcuaucagcuuuuggaugugcuccaacggaucucuccaaugccggauuuguaucuga

SEQ ID NO: 197147 - RNA, 1701 nt, Artificial Sequence; identical to SEQ ID NO: 194983
  derived and/or modified CDS sequence (opt5) from hemagglutinin__InfluenzaA__ADI49240

SEQ ID NO: 197148 - RNA, 1701 nt, Artificial Sequence; identical to SEQ ID NO: 194983
  derived and/or modified CDS sequence (opt5) from hemagglutinin__InfluenzaA__ADI49260

SEQ ID NO: 197149 - RNA, 1701 nt, Artificial Sequence
  derived and/or modified CDS sequence (opt5) from hemagglutinin__InfluenzaA__ADI49270
augaaggccauccuggugguccuccuguacaccuucgcuacagccaacgcggacacgcuuugcauuggcuaucacgcuaauaacagcaccgauacaguugacaccgugcuggagaaaaaugugacagucacccauuccgugaaccuccuggaagauaagcacaaugggaaacuuuguaagcugagaggaguugcuccccuccaucugggcaaaugcaacaucgccggguggauucugggaaauccugagugugaaucucucagcacagccuccucuuggagcuacaucguggagaccuccucuagcgacaacggcacgugcuauccgggggauuuuauugacuacgaagaacugcgggagcagcuuuccagcgucucuuccuucgaacgcuuugagaucuuccccaagaccagcucuuggccuaaucacgauuccaacaagggagugacagccgcuuguccccaugccggcgcgaaaucuuuuuauaagaaucugaucuggcucguuaaaaagggcaacagcuacccuaaacuguccaagagcuauauuaaugacaaggggaaagaagugcuuguccuguggggaauccaccaccccuccaccucugccgaucaacagagccucuaccagaacgcugacgccuacguguucgugggcacauccagauauagcaagaaauuuaagccugagauugcuauccggccgaaaguccgcgaucaggaggggagaaugaauuacuauuggacccugguugaacccggagacaagauuacguucgaggccacaggcaaccugguggugccucgguacgcguuugccauggaacgcaacgcugggucuggaaucauuaucuccgauacccccguccaugacugcaauacaaccugucaaaccccuaaaggcgccaucaacacaagccuccccuuccagaauauucacccgaucacgauuggcaagugcccuaaguaugugaaaucuaccaagcugagacuugcuacagggcugcggaacguucccagcauccagucccgcggacucuuuggcgccauugccggguucaucgagggaggcuggaccgggaugguggacggaugguacggcuaucaucaccagaaugaacaaggcucuggguacgcugcggaucugaaaagcacacagaacgccaucgacgagauuaccaauaaggucaacuccgugaucgagaaaaugaauacgcaguuuacagcuguuggaaaggaguucaaccaccuugagaagagaauugaaaaucugaacaaaaagguggaugacggcuuccucgauaucuggaccuacaaugccgagcugcugguccuccuggaaaacgagcggacccuugacuaucaugauagcaaugugaaaaaccuguacgagaagguccgcucucagcucaaaaacaaugccagagaaauugggaacggauguuuugaguucuaucacaagugcgacaauacauguauggaauccgugaagaacggcaccuacgauuauccuaaauacagcgaggaagcuaagcugaaucgggaggagaucgacgggguuaaacuugaaucuacacgcaucuaucaaauucuggccaucuacuccacgguggcgagcucccucguccuggugguuucucugggcgcuauuagcuuuuggaugugcuccaacggaucucuccagugcagaaucuguauuuga

SEQ ID NO: 197150 - RNA, 1701 nt, Artificial Sequence; identical to SEQ ID NO: 194983
  derived and/or modified CDS sequence (opt5) from hemagglutinin__InfluenzaA__ADI49280

SEQ ID NO: 197151 - RNA, 1701 nt, Artificial Sequence; identical to SEQ ID NO: 194983
  derived and/or modified CDS sequence (opt5) from hemagglutinin__InfluenzaA__ADI49312

SEQ ID NO: 197152 - RNA, 1701 nt, Artificial Sequence; identical to SEQ ID NO: 194983
  derived and/or modified CDS sequence (opt5) from hemagglutinin__InfluenzaA__ADI49322

SEQ ID NO: 197153 - RNA, 1701 nt, Artificial Sequence; identical to SEQ ID NO: 194983
  derived and/or modified CDS sequence (opt5) from hemagglutinin__InfluenzaA__ADI49332

SEQ ID NO: 197154 - RNA, 1701 nt, Artificial Sequence; identical to SEQ ID NO: 195310
  derived and/or modified CDS sequence (opt5) from hemagglutinin__InfluenzaA__ADI49342

SEQ ID NO: 197155 - RNA, 1701 nt, Artificial Sequence; identical to SEQ ID NO: 194983
  derived and/or modified CDS sequence (opt5) from hemagglutinin__InfluenzaA__ADI49352

SEQ ID NO: 197156 - RNA, 1701 nt, Artificial Sequence; identical to SEQ ID NO: 194741
  derived and/or modified CDS sequence (opt5) from hemagglutinin__InfluenzaA__ADI49362

SEQ ID NO: 197157 - RNA, 1701 nt, Artificial Sequence; identical to SEQ ID NO: 196293
  derived and/or modified CDS sequence (opt5) from hemagglutinin__InfluenzaA__ADI49382

SEQ ID NO: 197158 - RNA, 1701 nt, Artificial Sequence; identical to SEQ ID NO: 195094
  derived and/or modified CDS sequence (opt5) from hemagglutinin__InfluenzaA__ADI49392

SEQ ID NO: 197159 - RNA, 1701 nt, Artificial Sequence; identical to SEQ ID NO: 194728
  derived and/or modified CDS sequence (opt5) from hemagglutinin__InfluenzaA__ADI49717

SEQ ID NO: 197160 - RNA, 1701 nt, Artificial Sequence
  derived and/or modified CDS sequence (opt5) from hemagglutinin__InfluenzaA__ADI49727
augaaggccauccuggugguccuccuguacaccuucgcuacagccaacgcggacacgcuuugcauuggcuaucacgcuaauaacagcaccgauacaguugacaccgugcuggagaagaaugugacagucacccauuccgugaaccuccuggaagauaagcacaaugggaaacuuuguaagcugagaggaguugcuccccuccaucugggcaaaugcaacaucgccggguggauucugggaaauccugagugugaaucucucagcacagccuccucuuggagcuacaucguggagaccuccucuagcgacaacggcacgugcuauccgggggauuuuauugacuacgaagaacugcgggagcagcuuuccagcgucucuuccuucgaacgcuuugagaucuuccccaagaccagcucuuggccuaaucacgauuccaacaagggagugacagccgcuuguccccaugccggcgcgaaaucuuuuuauaagaaucugaucuggcucguuaaaaagggcaacagcuacccuaaacuguccaagagcuauauuaaugacaaggggaaagaagugcuuguccuguggggaauccaccaccccuccaccucugccgaucaacagagccucuaccagaacgcugacgccuacguguucgugggcuccagcagauauucuaagaaauuuaagccugagauugcuauccggccgaaaguccgcgaucaggaggggagaaugaauuacuauuggacacugguugaacccggagacaagauuaccuucgaggccacgggcaaccugguggugccucgguacgcguuugccauggaacgcaacgcuggguccggaaucauuaucagcgauacacccguccaugacugcaauaccacaugucaaaccccuaaaggcgccaucaacaccucucuccccuuccagaauauucacccgaucacaauuggcaagugcccuaaguaugugaaaagcacgaagcugagacuugcuaccgggcugcggaacguucccuccauccagucucgcggacucuuuggcgccauugccggguucaucgagggaggcuggacagggaugguggacggaugguacggcuaucaucaccagaaugaacaaggcagcggguacgcugcggaucugaaauccacccagaacgccaucgacgagauuacaaauaaggucaacagcaucauugagaaaaugaauacccaguuuacggcugugggaaaggaguucaaccaccuugagaagagaaucgaaaaucugaacaaaaagguugaugacggcuuccucgauauuuggacauacaaugccgagcugcuggugcuccuggaaaacgagcggacccuugacuaucaugauucuaaugucaaaaaccuguacgagaaggugcgcucccagcucaaaaacaaugccaaggaaaucgggaacggauguuuugaguucuaucacaagugcgacaauaccuguauggaaagcgucaaaaacggcacauacgauuauccuaaguacucugaggaagcuaaacugaauagagaggagaucgacggggugaaacuugaauccacccggauuuaucaaauccuggccauuuacagcacaguugcguccucucucgugcuggucgugagccugggcgcuaucuccuuuuggaugugcucuaacggaagccuccagugccgcauuuguaucuga

SEQ ID NO: 197161 - RNA, 1701 nt, Artificial Sequence; identical to SEQ ID NO: 194728
  derived and/or modified CDS sequence (opt5) from hemagglutinin__InfluenzaA__ADI49737

SEQ ID NO: 197162 - RNA, 1701 nt, Artificial Sequence; identical to SEQ ID NO: 194728
  derived and/or modified CDS sequence (opt5) from hemagglutinin__InfluenzaA__ADI49747

SEQ ID NO: 197163 - RNA, 1701 nt, Artificial Sequence; identical to SEQ ID NO: 194728
  derived and/or modified CDS sequence (opt5) from hemagglutinin__InfluenzaA__ADI49757

SEQ ID NO: 197164 - RNA, 1701 nt, Artificial Sequence; identical to SEQ ID NO: 194728
  derived and/or modified CDS sequence (opt5) from hemagglutinin__InfluenzaA__ADI49767

SEQ ID NO: 197165 - RNA, 1701 nt, Artificial Sequence
  derived and/or modified CDS sequence (opt5) from hemagglutinin__InfluenzaA__ADI49777
augaaggccauccuggugguccuccuguacaccuucgcuacagccaacgcggacacgcuuugcauuggcuaucacgcuaauaacagcaccgauacaguugacaccgugcuggagaaaaaugugacagucacccauuccgugaacauccucgaagauaagcacaaugggaaacuguguaaacuuagaggaguugcuccccugcaucucggcaagugcaacauugccggguggauccugggaaauccugagugugaaucucugagcacagccuccucuuggagcuacauuguggagaccuccucuagcgacaacggcacgugcuauccgggggauuuuaucgacuacgaagaacuccgggagcagcuguccagcgucucuuccuucgaacgcuuugagaucuuccccaagaccagcucuuggccuaaucacgauuccaacaagggagugacagccgcuuguccccaugccggcgcgaaaucuuuuuauaagaaucuuauuuggcugguuaaaaagggcaacagcuacccuaaacucuccaagagcuauaucaaugacaaggggaaagaagugcugguccuuuggggcauucaccaccccuccaccucuacagaucaacagagccuguaccagaacgccgacgcuuacguguucgugggauccagcagauauucuaagaaauuuaagccugagaucgccauucggccgaaaguccgcgaucaggaggggagaaugaauuacuauuggacccucguugaacccggagacaagaucacguucgaggcuacaggcaaccugguggugccucgguacgccuuugcgauggaacgcaacgccggguccggaauuaucaucagcgauacccccguccaugacugcaauacaaccugucaaaccccuaaaggcgcuauuaacacaucucugcccuuccagaauauccacccgauuacgaucggcaagugcccuaaguaugugaaaagcaccaagcucagacuggccacagggcuucggaacguucccuccauucagucucgcggacuguuuggcgcuaucgccggguucaucgagggaggcuggaccgggaugguggacggaugguacggcuaucaucaccagaaugaacaaggcagcggguacgccgcugaucucaaauccacacagaacgcgauugacgagaucaccaauaaggucaacagcgugauugagaaaaugaauacgcaguuuacagccguuggaaaggaguucaaccaccuggagaagagaaucgaaaaucuuaacaaaaagguggaugacggcuuccuggauauuuggaccuacaaugcugagcuccugguccugcucgaaaacgagcggacccuggacuaucaugauucuaaugugaaaaaccuuuacgagaagguccgcucccagcugaaaaacaaugccaaggaaaucgggaacggauguuuugaguucuaucacaagugcgacaauacauguauggaaagcgugaaaaacggcaccuacgauuauccuaaguacucugaggaagccaaacucaauagagaggagaucgacgggguuaagcuggaauccacacggauuuaucaaauccuugcuauuuacagcacgguggccuccucucugguccucgugguuagccugggcgcgaucuccuuuuggaugugcucuaacggaagccugcagugccgcauuuguaucuga

SEQ ID NO: 197166 - RNA, 1701 nt, Artificial Sequence
  derived and/or modified CDS sequence (opt5) from hemagglutinin__InfluenzaA__ADI49787
augaaggccauccuggugguccuccuguacaccuucgcuacagccaacgcggacacgcuuugcauuggcuaucacgcuaauaacagcaccgauacaguugacaccgugcuggagaaaaaugugacagucacccauuccgugaaccuccuggaagauaagcacaaugggaaacuuuguaagcugagaggaguugcuccccuccaucugggcaaaugcaacaucgccggguggauucugggaaauccugagugugaaucuaucagcacagccuccucuuggagcuacauuguggagaccuccucuagcgacaacggcacgugcuauccgggggauuuuaucgacuacgaagaacuccgggagcagcuguccagcgucucuuccuucgaacgcuuugagaucuuccccaagaccagcucuuggccuaaucacgauuccaacaagggagugacagccgcuuguccccaugccggcgcgaaaucuuuuuauaagaaucuuauuuggcugguuaaaaagggcaacagcuacccuaaacucuccaagagcuauaucaaugacaaggggaaagaagugcugguccuuuggggcauucaccaccccuccaccucugccgaucaacagagccuguaccagaacgcugacgccuacguguucgugggauccagcagauauucuaagaaauuuaagccugagaucgcuauucggccgaaaguccgcgaucaggaggggagaaugaauuacuauuggacacucguugaacccggagacaagaucaccuucgaggccacgggcaaccugguggugccucgguacgcguuugccauggaacgcaacgcuggguccggaauuaucaucagcgauacacccguccaugacugcaauaccacaugucaaaccccuaaaggcgccauuaacaccucucugcccuuccagaauauccacccgauuacaaucggcaagugcccuaaguaugugaaaagcacgaagcucagacuggcuaccgggcuucggaacguucccuccauucagucucgcggacuguuuggcgccaucgccggguucaucgagggaggcuggacagggaugguggacggaugguacggcuaucaucaccagaaugaacaaggcagcggguacgcugcggaucucaaauccacccagaacgccauugacgagaucacaaauaaggucaacagcgugauugagaaaaugaauacccaguuuacggcuguuggaaaggaguucaaccaccuggagaagagaaucgaaaaucuuaacaaaaagguggaugacggcuuccuggauauuuggacauacaaugccgagcuccugguccugcucgaaaacgagcggacccuggacuaucaugauucuaaugugaaaaaccuuuacgagaagguccgcucccagcugaaaaacaaugccaaggaaaucgggaacggauguuuugaguucuaucacaagugcgacaauaccuguauggaaagcgugaaaaacggcacauacgauuauccuaaguacucugaggaagcuaaacucaauagagaggagaucgacgggguuaagcuggaauccacccggauuuaucaaauccuugccauuuacagcacaguggcguccucucugguccucgugguuagccugggcgcuaucuccuuuuggaugugcucuaacggaagccugcagugccgcauuuguaucuga

SEQ ID NO: 197167 - RNA, 1701 nt, Artificial Sequence; identical to SEQ ID NO: 196076
  derived and/or modified CDS sequence (opt5) from hemagglutinin__InfluenzaA__ADI49822

SEQ ID NO: 197168 - RNA, 1701 nt, Artificial Sequence
  derived and/or modified CDS sequence (opt5) from hemagglutinin__InfluenzaA__ADI50027
augaaggccauccuggugguccuccuguacaccuucgcuacagccaacgcggacacgcuuugcauuggcuaucacgcuaauaacagcaccgauacaguugacaccgugcuggagaaaaaugugacagucacccauuccgugaaccuccuggaagauaagcacaaugggaaacuuuguaagcugagaggaguugcuccccuccaucugggcaaaugcaacaucgccggguggauucugggaaauccugagugugaaucucucagcacagccuccucuuggagcuacaucguggagaccuccucuagcgacaacggcacgugcuauccgggggauuuuauugacuacgaagaacugcgggagcagcuuuccagcgucucuuccuucgaacgcuuugagaucuuccccaagaccagcucuuggccuaaucacgauuccaacaagggagugacagccgcuuguccccaugccggcgcgaaaucuuuuuauaagaaucugaucuggcucguuaaaaagggcaacagcuacccuaaacuguccaagagcuauauuaaugacaaggggaaagaagugcuuguccuguggggaauccaccaccccuccaccucugccgaucaacagagccucuaccagaacgcugacgccuacguguucgugggcuccagcagauauucuaagaaauuuaagccugagauugcuauccggccgaaaguccgcgaucaggaggggagaaugaaguacuauuggacacugguugaacccggagacaaaauuaccuucgaggccacgggcaaucugguggugccucgguacgcguuugccauggaacgcaacgcuggguccggaaucauuaucagcgauacacccguccaugacugcaacaccacaugucaaaccccuaagggcgccaucaauaccucucuccccuuccagaacauucacccgaucacaauuggcaagugcccuaaauauguuaagagcacgaaacugagacuugcuaccgggcugcggaaugugcccuccauccagucucgcggacucuuuggcgccauugccggguucaucgagggaggcuggacagggaugguggacggaugguacggccaucaccaccagaacgaacaaggcagcggguaugcugcggaucugaaguccacccagaaugccaucgacgagauuacaaacaaagucaauagcgugaucgagaagaugaacacccaguuuacggcuguuggaaaggaguucaaucaucuugagaaaagaauugaaaaccugaauaagaaaguggaugacggcuuccucgauaucuggacauacaacgccgagcugcugguccuccuggaaaaugagcggacccuugacuaccacgauucuaacgugaagaaucuguaugagaaaguccgcucccagcucaagaacaacgccaaggaaauugggaauggauguuuugaguucuaccauaaaugcgacaacaccuguauggaaagcgugaagaauggcacauaugauuacccuaaauauucugaggaagcuaagcugaacagagaggagaucgacgggaucaaacuugaauccacccggauuuaccaaauccuggccauuuauagcacaguugcguccucucucgugcuggucgugagccugggcgcuaucuccuuuuggaugugcucuaauggaagccuccagugccgcauuuguaucuga

SEQ ID NO: 197169 - RNA, 1701 nt, Artificial Sequence
  derived and/or modified CDS sequence (opt5) from hemagglutinin__InfluenzaA__ADI52834
augaaggccauccuggugguccuccuguacaccuucgcuacagccaacgcggacacgcuuugcauuggcuaucacgcuaauaacagcaccgauacaguugacaccgugcuggagaaaaaugugacagucacccauuccgugaacauccucgaagauaagcacaaugggaaacuguguaaacuuagaggaguugcuccccugcaucucggcaagugcaacauugccggguggauccugggaaauccugagugugaaucucugagcacagccuccucuuggagcuacauuguggagaccuccucuagcgacaacggcacgugcuauccgggggauuuuaucgacuacgaagaacuccgggagcagcuguccagcgucucuuccuucgaacgcuuugagaucuuccccaagaccagcucuuggccuaaucacgauuccaacaagggagugacagccgcuuguccccaugccggcgcgaaaucuuuuuauaagaaucuuauuuggcugguuaaaaagggcaacagcuacccuaaacucuccaagagcuauaucaaugacaaggggaaagaagugcugguccuuuggggcauucaccaucccccuaccuccgccgaucaacagucucuguaccagaacgcugacgccuacguguucgugggaagcuccagauauagcaagaaauuuaagccggagaucgcuauucggcccaaaguccgcgaucaggaggggagaaugaauuacuauuggacacucguugaaccuggagacaagaucaccuucgaggccacgggcaaccugguggugccccgguacgcguuugccauggaacgcaacgcugggucuggaauuaucaucuccgauacaccuguccacgacugcaauaccacaugucaaacccccaaaggcgccauuaacaccagccugccguuccagaauauccacccuauuacaaucggcaagugccccaaguaugugaaaucuacgaagcucagacuggcuaccgggcuucggaacguuccuagcauucagucccgcggacuguuuggcgccaucgccggguucaucgagggaggcuggacagggaugguggacggaugguacggcuaucaucaccagaaugaacaaggcucuggguacgcugcggaucucaaaagcacccagaacgccauugacgagaucacaaauaaggucaacuccgugauugagaaaaugaauacccaguuuacggcuguuggaaaggaguucaaccaccuggagaagagaaucgaaaaucuuaacaaaaagguggaugacggcuuccuggauauuuggacauacaaugccgagcuccugguccugcucgaaaacgagcggacccuggacuaucaugauagcaaugugaaaaaccuuuacgagaagguccgcucucagcugaaaaacaaugccaaggaaguggggaacggauguuuugaguucuaucacaagugcgacaauaccuguauggaauccguuaaaaacggcacauacgauuaucccaaguacagcgaggaagcuaaacucaauagagaggagaucgacggggugaagcuggaaucuacccggaucuaucaaauucuugccaucuacuccacagcggcuagcucccugguccucgugguuucucugggcgccauuagcuuuuggaugugcuccaacggaucucugcagugccgcaucuguauuuga

SEQ ID NO: 197170 - RNA, 1701 nt, Artificial Sequence
  derived and/or modified CDS sequence (opt5) from hemagglutinin__InfluenzaA__ADI52835
auggaggccauccuggugguccuccuguacaccuucgcuacagccaacgcggacacgcuuugcauuggcuaucacgcuaauaacagcaccgauacaguugacaccgugcuggaaaagaaugugacagucacccauuccgugaaccuccuggaggauaaacacaaugggaaacuuuguaaacugagaggaguugcgccccuccaucugggcaagugcaacaucgccggguggauucugggaaauccugaaugugagucucucagcacagcuuccucuuggagcuacaucguggaaaccuccucuagcgacaacggcacgugcuauccgggggauuuuauugacuacgaggagcugcgggaacagcuuuccagcgucucuuccuucgagcgcuuugaaaucuuccccaaaaccagcucuuggccuaaucacgauuccaacaagggagugacagccgcuuguccccaugccggcgccaagagcuuuuauaaaaaucugaucuggcucguuaagaaaggcaacucuuacccuaagcuguccaaaagcuauauuaaugacaaggggaaggaggugcuuguccuguggggaauccaccaucccccuaccuccgccgaucaacagucucucuaccagaacgcugacgccuacguguucgugggcagcuccaaauauagcaagaaauuuaagccggagauugcuaucagacccaaaguccgggaucaggaagggcgcaugaauuacuauuggacacugguugagccuggagacaagauuaccuucgaagccacgggcaaccugguggugcccagauacgcguuugccauggagcggaacgcugggucuggaaucauuaucuccgauacaccuguccacgacugcaauaccacaugucaaacccccaaaggcgccaucaacaccagccucccguuccacaauauucauccuaucacaauuggcaagugccccaaguaugugaaaucuacgaagcugcgccuugcuaccgggcugagaaacguuccuagcauccagucccggggacucuuuggcgccauugccggguucaucgaaggaggcuggacagggaugguggacggaugguacggcuaucaccaccagaaugagcagggcucuggguacgcugcggaucugaaaagcacccaaaacgccaucgacgagauuacaaauaaggucaacuccgugaucgaaaagaugaauacccaguuuacggcuguuggaaaggaguucaaccaucuugaaaagcgcauugagaaucugaacaaaaagguggaugacggcuuccucgauaucuggacauacaaugccgaacugcugguccuccuggagaacgagagaacccuugacuaucacgauagcaaugugaaaaaccuguacgaaaagguccggucucagcucaaaaacaaugccaaggagauugggaacggauguuuugaguucuaucauaagugcgacaauaccuguauggaauccgugaaaaacggcacauacgauuaucccaaguacagcgaagaggcuaaacugaaucgcgaggaaaucgacgggguuaaacuugagucuaccaagaucuaucagauucuggccaucuacuccacaguggcgagcucccucguccuggugguuucucugggcgcuauuagcuuuuggaugugcuccaacggaucucuccaaugcagaaucuguauuuga

SEQ ID NO: 197171 - RNA, 1701 nt, Artificial Sequence
  derived and/or modified CDS sequence (opt5) from hemagglutinin__InfluenzaA__ADI52836
auggaggccauccuggugguccuccuguacaccuucgcuacagccaacgcggacacgcuuugcauuggcuaucacgcuaauaacagcaccgauacaguugacaccgugcuggaaaagaaugugacagucacccauuccgugaaccuccuggaggauaaacacaaugggaaacuuuguaagcugagaggaguugcgccccuccaucugggcaagugcaacaucgccggguggauucugggaaauccugaaugugagucucucagcacagcuuccucuuggagcuacaucguggaaaccuccucuagcgacaacggcacgugcuauccgggggauuuuauugacuacgaggagcugcgggaacagcuuuccagcgucucuuccuucgagcgcuuugaaaucuuccccaaaaccagcucuuggccuaaucacgauuccaacaagggagugacagccgcuuguccccaugccggcgccaagagcuuuuauaaaaaucugaucuggcucguuaagaaagagaacucuuacccuaagcuguccaaaagcuauauuaaugacaagggcaaggaggugcuuguccugugggggauccaccaccccuccaccucugccgaucaacagagacucuaccagaacgcugacgccuacguguucgugggaagcuccaaauauagcaagaaauuuaagccugaaauugcuauccggccgaaaguccgcgaucaggagggcagaaugaauuacuauuggacacugguugaacccggggacaagauuaccuucgaggccacgggaaaccugguggugccucgguacgcguuugccauggaacgcaacgcuggcucugggaucauuaucuccgauacacccguccaugacugcaauaccacaugucaaaccccuaaaggagccaucaacaccagccuccccuuccacaauauucauccgaucacaauuggcaagugcccuaaguaugugaaaucuacgaagcugagacuugcuaccggccugcggaacguucccagcauccagucccgcgggcucuuuggagccauugccggcuucaucgaagggggauggacaggcaugguggacgggugguacggauaucaccaccagaaugagcagggcucuggcuacgcugcggaucugaaaagcacccaaaacgccaucgacgaaauuacaaauaaggucaacuccgugaucgagaaaaugaauacccaguuuacggcuguugggaaggaguucaaccaucuugagaagagaauugaaaaucugaacaaaaagguggaugacggauuccucgauaucuggacauacaaugccgagcugcugguccuccuggagaacgaacggacccuugacuaucacgauagcaaugugaaaaaccuguacgagaagguccgcucucagcucaaaaacaaugccaaggaaauuggcaacggguguuuugaguucuaucauaagugcgacaauaccuguauggaauccgugaaaaacggaacauacgauuauccuaaguacagcgaggaggcuaaacugaauagagaagagaucgacggcguuaaacuugaaucuaccaagaucuaucagauucuggccaucuacuccacaguggcgagcucccucguccuggugguuucucugggggcuauuagcuuuuggaugugcuccaacggcucucuccaaugccggaucuguauuuga

SEQ ID NO: 197172 - RNA, 1701 nt, Artificial Sequence
  derived and/or modified CDS sequence (opt5) from hemagglutinin__InfluenzaA__ADI52837
auggaggccauccuggugguccuccuguacaccuucgcuacagccaacgcggacacgcuuugcauuggcuaucacgcuaauaacagcaccgauacaguugacaccgugcuggaaaagaaugugacagucacccauuccgugaaccuccuggagguuaaacacaaugggaaacuuuguaaacugagaggaguggcgccccuccaucugggcaagugcaacaucgccggguggauucugggaaauccugaaugugagucucucagcacagcuuccucuuggagcuacaucgucgaaaccuccucuagcgauaacggcacgugcuauccgggggacuuuauugauuacgaggagcugcgggaacagcuuuccagcgugucuuccuucgagcgcuuugaaaucuuccccaaaaccagcucuuggccuaaucacgacuccaacaagggaguuacagccgcuuguccccaugccggcgccaagagcuuuuauaaaaaucugaucuggcucgugaagaaaggcaacucuuacccuaagcuguccaaaagcuauauuaaugauaaggggaaggagguccuugugcuguggggaauccaccaccccuccaccucugccgaccaacagagccucuaccagaacgcugaugccuacguguucgucggcuccagcaaauauucuaagaaauuuaagccugagauugcuaucagaccgaaaguucgggaccaggaagggcgcaugaauuacuauuggacacugguggagcccggagauaagauuaccuucgaagccaacggcaaccugguggucccuagauacgcguuugccauggagcggaaugcuggguccggaaucauuaucagcgacacgcccgugcaugauugcaacacaaccugucaaacaccuaaaggcgccaucaauaccucucuccccuuccacaacauucauccgaucaccauuggcaagugcccuaaguauguuaaaagcacaaagcugcgccuugcuacggggcugagaaaugugcccuccauccagucucggggacucuuuggcgccauugccggguucaucgaaggaggcuggaccgggauggucgacggaugguacggcuaucaccaccagaacgagcagggcagcggguacgcugcggaccugaaauccacacaaaaugccaucgaugagauuaccaacaaggugaauagcguuaucgaaaagaugaacacacaguuuaccgcugugggaaaggaguucaaucaucuugaaaagcgcauugagaaccugaauaaaaaggucgacgauggcuuccucgacaucuggacguacaacgccgaacugcuggugcuccuggagaaugagagaacacuugauuaucacgacucuaacgucaaaaaccuguacgaaaaggugcggucccagcucaaaaauaacgccaaggagauugggaauggauguuuugaguucuaucauaagugcgauaacaccuguauggaaagcguuaaaaauggcaccuacgacuauccuaaguacucugaagaggcuaaacugaaccgcgaggaaaucgauggggugaaacuugaguccacaaagaucuaucagauucuggccaucuacagcaccgucgcguccucucucgugcugguugugagccugggcgcuauuuccuuuuggaugugcucuaauggaagccuccaaugcagaaucuguauuuga

SEQ ID NO: 197173 - RNA, 1701 nt, Artificial Sequence; identical to SEQ ID NO: 195539
  derived and/or modified CDS sequence (opt5) from hemagglutinin__InfluenzaA__ADI72915

SEQ ID NO: 197174 - RNA, 1701 nt, Artificial Sequence; identical to SEQ ID NO: 195539
  derived and/or modified CDS sequence (opt5) from hemagglutinin__InfluenzaA__ADI72916

SEQ ID NO: 197175 - RNA, 1701 nt, Artificial Sequence; identical to SEQ ID NO: 195539
  derived and/or modified CDS sequence (opt5) from hemagglutinin__InfluenzaA__ADI72917

SEQ ID NO: 197176 - RNA, 1701 nt, Artificial Sequence
  derived and/or modified CDS sequence (opt5) from hemagglutinin__InfluenzaA__ADI72918
augaaggccauccuggugguccuccuguacaccuucgcuacagccaacgcggacacgcuuugcauuggcuaucacgcuaauaacagcaccgauacaguugacaccgugcuggagaagaaugugacagucacccauuccgugaaccuccuggaagauaagcacaaugggaaacuuuguaagcugagaggaguugcuccccuccaucugggcaaaugcaacaucgccggguggauucugggaaauccugagugugaaucucucagcacagccuccucuuggagcuacaucguggagaccuccucuagcgacaacggcacgugcuauccgggggauuuuauugacuacgaagaacugcgggagcagcuuuccagcgucucuuccuucgaacgcuuugagaucuuccccaagaccagcucuuggccuaaucacgaucccaacaagggagugacagccgcuuguccucaugccggcgcgaaauccuuuuauaagaaucugaucuggcucguuaaaaagggcaacagcuaccccaaacugucuaaguccuauauuaaugacagagggaaggaagugcuuguccuguggggaauccaccacccuagcaccuccgccgaucaacagucucucuaccagaacgcugacgccuacguguucgugggcacaagccgguauuccaaaaaguuuaaaccggagauugcuauccgccccaaggucagagaucaggaggggcggaugaauuacuauuggacccugguugaaccuggagacaaaauuacguucgaggccacaggcaaccugguggugccccgcuacgcguuugccauggaaagaaacgcugggagcggaaucauuaucucugauaccccuguccaugacugcaauacaaccugucaaacccccaagggcgccaucaacacaucccucccguuccagaauauucacccuaucacgauuggcaaaugccccaaguauguuaagagcaccaaacugcggcuugcuacagggcugcgcaacgugccuucuauccagagcagaggacucuuuggcgccauugccggguucaucgagggaggcuggaccgggaugguggacggaugguacggcuaucaucaccagaaugaacaaggcuccggguacgcugcggaucugaagucuacacagaacgccaucgacgagauuaccaauaaagucaacagcgugaucgagaagaugaauacgcaguuuacagcuguuggaaaagaguucaaccaccuugagaagcggauugaaaaucugaacaagaaaguggaugacggcuuccucgauaucuggaccuacaaugccgagcugcugguccuccuggaaaacgagcgcacccuugacuaucaugauuccaaugugaagaaacuguacgagaaggucagaagccagcucaaaaacaacgccaaggaaauugggaauggauguuuugaguucuaucacaagugcgacaacacauguauggaaucugugaaaaauggcaccuacgauuaucccaaguacuccgaggaagcuaaacugaaccgggaggagaucgacgggguuaaacuugaaagcacacgcaucuaucaaauucuggccaucuacucuacgguggcguccagccucguccuggugguuucccugggcgcuauuucuuuuuggaugugcagcaauggaucccuccagugcagaaucuguauuuga

SEQ ID NO: 197177 - RNA, 1701 nt, Artificial Sequence; identical to SEQ ID NO: 195539
  derived and/or modified CDS sequence (opt5) from hemagglutinin__InfluenzaA__ADI72919

SEQ ID NO: 197178 - RNA, 1701 nt, Artificial Sequence; identical to SEQ ID NO: 195539
  derived and/or modified CDS sequence (opt5) from hemagglutinin__InfluenzaA__ADI72920

SEQ ID NO: 197179 - RNA, 1701 nt, Artificial Sequence
  derived and/or modified CDS sequence (opt5) from hemagglutinin__InfluenzaA__ADI72921
augaaggccauccuggugguccuccuguacaccuucgcuacagccaacgcggacacgcuuugcauuggcuaucacgcuaauaacagcaccgauacaguugacaccgugcuggagaaaaaugugacagucacccauuccgugaaccuccuggaagauaagcacaaugggaaacuuuguaagcugagaggaguugcuccccuccaucugggcaaaugcaacaucgccggguggauucugggaaauccugagugugaaucucucagcacagccuccucuuggagcuacaucguggagaccuccucuagcgacaacggcacgugcuauccgggggauuuuauugacuacgaagaacugcgggagcagcuuuccagcgucucuuccuucgaacgcuuugagaucuuccccaagaccagcucuuggccuaaucacgaucccaacaagggagugacagccgcuuguccucaugccggcgcgaaauccuuuuauaagaaucugaucuggcucguuaaaaagggcaacagcuaccccaaacugucuaaguccuauauuaaugacaaggggaaagaagugcuuguccuguggggaauccaccacccuagcaccuccgccgaucaacagucucucuaccagaacgcugacgccuacguguucgugggcacaagcagauauuccaagaaauuuaagccggagauugcuauccggcccaaaguccgcgaucaggaggggagaaugaauuacuauuggacccugguugaaccuggagacaagauuacguucgaggccacaggcaaccugguggugccccgguacgcguuugccauggaacgcaacgcugggagcggaaucauuaucucugauaccccuguccaugacugcaauacaaccugucaaacccccaaaggcgccaucaacacaucccucccguuccagaauauucacccuaucacgauuggcaagugccccaaguaugugaaaagcaccaagcugagacuugcuacagggcugcggaacguuccuucuauccagagccgcggacucuuuggcgccauugccggguucaucgagggaggcuggaccgggaugguggacggaugguacggcuaucaucaccagaaugaacaaggcuccggguacgcugcggaucugaaaucuacacagaacgcccuugacgagaucaccaauaaggucaacagcgugauugagaaaaugaauacgcaguuuacagcuguuggaaaggaguucaaccaccuggagaagagaaucgaaaaucucaacaaaaagguggaugacggcuuccuggauauuuggaccuacaaugccgagcugcucguccugcuugaaaacgagcggacccuggacuaucaugauuccaaugugaaaaaccucuacgagaagguccgcagccagcugaaaaacaaugccaaggaaaucgggaacggauguuuugaguucuaucacaagugcgacaauacauguauggaaucugugaaaaacggcaccuacgauuaucccaaguacuccgaggaagcuaaacuuaauagagaggagauugacgggguuaagcuggaaagcacacggaucuaucaaauccucgccauuuacucuacgguggcguccagccugguccuggugguuucccucggcgcuaucucuuuuuggaugugcagcaacggaucccugcagugccgcauuuguaucuga

SEQ ID NO: 197180 - RNA, 1701 nt, Artificial Sequence; identical to SEQ ID NO: 194741
  derived and/or modified CDS sequence (opt5) from hemagglutinin__InfluenzaA__ADI72922

SEQ ID NO: 197181 - RNA, 1701 nt, Artificial Sequence
  derived and/or modified CDS sequence (opt5) from hemagglutinin__InfluenzaA__ADI72923
augaaggccauccuggugguccuccuguacaccuucgcuacaagcaacgccgacacgcuuugcauuggcuaucacgcgaauaacuccaccgauacaguugacaccgugcuggagaaaaaugugacagucacccauucugugaaccuccuggaagauaagcacaaugggaaacuuuguaagcugagaggaguugcuccccuccaucugggcaaaugcaacaucgccggguggauucugggaaauccugagugugaaagccucuccacagccucuagcugguccuacaucguggagaccucuagcuccgacaacggcacgugcuauccgggggauuuuauugacuacgaagaacugcgggagcagcuuagcucugucuccagcuucgaacgcuuugagaucuuccccaagaccucuuccuggccuaaucacgaucccaacaagggagugacagcugccuguccucaugcuggcgccaagagcuuuuauaagaaucugaucuggcucguuaaaaagggcaacucuuaccccaaacuguccaagagcuauauuaaugacaaggggaaagaagugcuuguccuguggggaauccaccacccuuccaccucugcggaucaacagagccucuaccagaacgccgacgcuuacguguucgugggcacauccagauauagcaagaaauuuaagccggagauugccauccggcccaaaguccgcgaucaggaggggagaaugaauuacuauuggacccugguugaaccuggagacaagauuacguucgaggcuacaggcaaccugguggugccccgguacgccuuugcgauggaacgcaacgccgggccuggaaucauuaucucugauacccccguccaugacugcaauacaaccugucaaaccccgaaaggcgcuaucaacacaucccucccuuuccagaauauucaccccaucacgauuggcaagugcccuaaguaugugaaaagcaccaagcugagacuugccacagggcugcggaacguucccucuauccagagccgcggacucuuuggcgcuauugccggguucaucgagggaggcuggaccgggaugguggacggaugguacggcuaucaucaccagaaugaacaaggcuccggguacgccgcugaucugaaaucuacacagaacgcgaucgacgagauuaccaauaaggucaacagcgugaucgagaaaaugaauacgcaguuuacagccguuggaaaggaguucaaccaccuugagaagagaauugaaaaucugaacaaaaagguggaugacggcuuccucgauaucuggaccuacaaugcugagcugcugguccuccuggaaaacgagcggacccuugacuaucaugauuccaaugugaaaaaccuguacgagaagguccgcagccagcucaaaaacaaugccaaggaaauugggaacggauguuuugaguucuaucacaagugcgacaauacauguauggaaucugugaaaaacggcaccuacgauuaucccaaguacuccgaggaagccaaacugaauagagaggagaucgacgggguuaaacuugaaagcacacggaucuaucaaauucuggcuaucuacucuacgguggccuccagccucguccuggugguuucccugggcgcgauuucuuuuuggaugugcagcaacggaucccuccagugccgcaucuguauuuga

SEQ ID NO: 197182 - RNA, 1701 nt, Artificial Sequence; identical to SEQ ID NO: 195539
  derived and/or modified CDS sequence (opt5) from hemagglutinin__InfluenzaA__ADI72924

SEQ ID NO: 197183 - RNA, 1701 nt, Artificial Sequence; identical to SEQ ID NO: 194741
  derived and/or modified CDS sequence (opt5) from hemagglutinin__InfluenzaA__ADI72925

SEQ ID NO: 197184 - RNA, 1701 nt, Artificial Sequence
  derived and/or modified CDS sequence (opt5) from hemagglutinin__InfluenzaA__ADI72926
augaaggccauccuggugguccuccuguacaccuucgcuacagccaacgcggacacgcuuugcauuggcuaucacgcuaauaacagcaccgauacaguugacaccgugcuggagaagaaugugacagucacccauuccgugaaccuccuggaagauaagcacaaugggaaacuuuguaagcugagaggaguugcuccccuccaucugggcaaaugcaacaucgccggguggauucugggaaauccugagugugaaucucucagcacagccuccucuuggagcuacaucguggagaccuccucuagcgacaacggcacgugcuauccgggggauuuuauugacuacgaagaacugcgggagcagcuuuccagcgucucuuccuucgaacgcuuugagaucuuccccaagaccagcucuuggccuaaucacgaucccaacaagggagugacagccgcuuguccucaugccggcgcgaaauccuuuuauaagaaucugaucuggcucguuaaaaagggcaacagcuaccccaaacugucuaaguccuauauuaaugacaaggggaaagaagugcuuguccuguggggaauccaccacccuagcaccuccgccgaucaacagucucucuaccagaacgcugacgccuacguguucgugggcacaagcggguauuccaagaaauuuaagccggagauugcuaucagacccaaaguccgggaucaggagggacgcaugaauuacuauuggacccugguugaaccuggcgacaagauuacguucgaggccacagggaaccugguggugcccagauacgcguuugccauggaacggaacgcuggaagcggcaucauuaucucugauaccccuguccaugacugcaauacaaccugucaaacccccaaaggcgccaucaacacaucccucccguuccagaauauucacccuaucacgauugggaagugccccaaguaugugaaaagcaccaagcugcgccuugcuacaggacugagaaacguuccuucuauccagagccggggccucuuuggggccauugccggauucaucgagggcggguggaccggaaugguggacggcugguacggcuaucaucaccagaaugaacaaggguccggauacgcugcggaucugaaaucuacacagaacgccaucgacgagauuaccaauaaggucaacagcgugaucgagaaaaugaauacgcaguuuacagcuguuggcaaggaguucaaccaccuugagaagcgcauugaaaaucugaacaaaaagguggaugacggguuccucgauaucuggaccuacaaugccgagcugcugguccuccuggaaaacgagagaacccuugacuaucaugauuccaaugugaaaaaccuguacgagaagguccggagccagcucaaaaacaaugccaaggaaauuggaaacggcuguuuugaguucuaucacaagugcgacaauacauguauggaaucugugaaaaacgggaccuacgauuaucccaaguacuccgaggaagcuaaacugaaucgcgaggagaucgacggcguuaaacuugaaagcacaagaaucuaucaaauucuggccaucuacucuacgguggcguccagccucguccuggugguuucccugggagcuauuucuuuuuggaugugcagcaacggcucccuccagugccggaucuguauuuga

SEQ ID NO: 197185 - RNA, 1701 nt, Artificial Sequence
  derived and/or modified CDS sequence (opt5) from hemagglutinin__InfluenzaA__ADI72927
augaaggccauccuggugguccuccuguacaccuucgcuacagccaacgcggacacgcuuugcauuggcuaucacgcuaauaacagcaccgauacaguugacaccgugcuggagaagaaugugacagucacccauuccgugaaccuccuggaagauaagcacaaugggaaacuuuguaagcugagaggaguugcuccccuccaucugggcaaaugcaacaucgccggguggauucugggaaauccugagugugaaucucucagcacagccuccucuuggagcuacaucguggagaccuccucuagcgacaacggcacgugcuauccgggggauuuuauugacuacgaagaacugcgggagcagcuuuccagcgucucuuccuucgaacgcuuugagaucuuccccaagaccagcucuuggccuaaucacgaucccaacaagggagugacagccgcuuguccucaugccggcgcgaaauccuuuuauaagaaucugaucuggcucguuaaaaagggcaacagcuaccccaaacugucuaaguccuauauuaaugacaaggggaaagaagugcuuguccuguggggaauccaccacccuagcaccuccgccgaucaacagucucucuaccagaacgcugacgccuacguguucgugggcacaagcagauauuccaagaaauuuaagccggagauugcuauccggcccaaaguccgcgaucaggaggggagaaugaauuacuauuggacccugguugaaccuggagacaagauuacguucgaggccacaggcaaccugguggugccccgguacgcguuugccauggaacgcaacgcugggagcggaaucauuaccucugauacaccuguccaugacugcaauaccaccugucaaacacccaaaggcgccaucaacacgucccucccguuccagaauauccacccuauuaccaucggcaagugccccaaguaugugaaaagcacaaagcugagacuugcuaccgggcugcggaacguuccuucuauucagagccgcggacucuuuggcgccaucgccggguucauugagggaggcuggacagggaugguggacggaugguacggcuaucaucaccagaaugaacaaggcuccggguacgcugcggaucugaaaucuacccagaacgccaucgacgagaucacgaauaaggucaacagcgugauugagaaaaugaauacacaguuuaccgcuguuggaaaggaguucaaccaccuugagaagagaaucgaaaaucugaacaaaaagguggaugacggcuuccucgauauuuggaccuacaaugccgagcugcugguccuccuggaaaacgagcggacacuugacuaucaugauuccaaugugaaaaaccuguacgagaagguccgcagccagcucaaaaacaaugccaaggaaaucgggaacggauguuuugaguucuaucacaagugcgacaauaccuguauggaaucugugaaaaacggcacauacgauuaucccaaguacuccgaggaagcuaaacugaauagagaggagauugacgggguuaaacuugaaagcacgcggaucuaucaaauccuggccauuuacucuaccguggcguccagccucguccuggugguuucccugggcgcuaucucuuuuuggaugugcagcaacggaucccuccagugccgcauuuguaucuga

SEQ ID NO: 197186 - RNA, 1701 nt, Artificial Sequence
  derived and/or modified CDS sequence (opt5) from hemagglutinin__InfluenzaA__ADI72928
augaaggccauccuggugguccuccuguacaccuucgcuacagccaacgcggacacgcuuugcauuggcuaucacgcuaauaacagcaccgauacaguugacaccauccuggagaaaaaugugacagugacccauuccgucaaccuccuggaagauaagcacaaugggaaacuuuguaagcugagaggaguggcuccccuccaucugggcaaaugcaacauugccggguggauccugggaaauccugagugugaaucucucagcacagccuccucuuggagcuacauuguugagaccuccucuagcgacaacggcacgugcuauccgggggauuuuaucgacuacgaagaacugcgggagcagcuuuccagcgugucuuccuucgaacgcuuugagaucuuccccaagaccagcucuuggccuaaucacgaucccaacaagggagucacagccgcuuguccucaugccggcgcgaaauccuuuuauaagaaucugauuuggcucgugaaaaagggcaacagcuaccccaaacugucuaaguccuauaucaaugacaaggggaaagaaguucuugugcuguggggcauucaccacccuagcaccuccgccgaucaacagucucucuaccagaacgcugacgccuacgucuucgugggaacaagcagauauuccaagaaauuuaagccggagaucgcuauucggcccaaagugcgcgaucaggaggggagaaugaauuacuauuggacccuggucgaaccuggagacaagaucacguucgaggccacaggcaaccugguugugccccgguacgcguuugccauggaacgcaacgcugggagcggaauuaucaucucugauaccccugugcaugacugcaauacaaccugucaaacccccaaaggcgccauuaacacaucccucccguuccagaauauccacccuauuacgaucggcaagugccccaaguaugucaaaagcaccaagcugagacuugcuacagggcugcggaacgugccuucuauucagagccgcggacucuuuggcgccaucgccggguucaucgagggaggcuggaccgggaugguugacggaugguacggcuaucaucaccagaaugaacaaggcuccggguacgcugcggaucugaaaucuacacagaacgccauugacgagaucaccaauaaggugaacagcgucauugagaaaaugaauacgcaguuuacagcugugggaaaggaguucaaccaccuugagaagagaaucgaaaaucugaacaaaaagguugaugacggcuuccucgauauuuggaccuacaaugccgagcugcuggugcuccuggaaaacgagcggacccuugacuaucaugauuccaaugucaaaaaccuguacgagaaggugcgcagccagcucaaaaacaaugccaaggaaaucgggaacggauguuuugaguucuaucacaagugcgacaauacauguauggaaucugucaaaaacggcaccuacgauuaucccaaguacuccgaggaagcuaaacugaauagaaaggagaucgacggggugaaacuugagagcacacggauuuaucaaauccuggccauuuacucuacgguugcguccagccucgugcuggucgugucccugggcgcuaucucuuuuuggaugugcagcaacggaucccuccagugccgcauuuguaucuga

SEQ ID NO: 197187 - RNA, 1701 nt, Artificial Sequence; identical to SEQ ID NO: 194741
  derived and/or modified CDS sequence (opt5) from hemagglutinin__InfluenzaA__ADI72929

SEQ ID NO: 197188 - RNA, 1701 nt, Artificial Sequence; identical to SEQ ID NO: 194741
  derived and/or modified CDS sequence (opt5) from hemagglutinin__InfluenzaA__ADI72930

SEQ ID NO: 197189 - RNA, 1701 nt, Artificial Sequence
  derived and/or modified CDS sequence (opt5) from hemagglutinin__InfluenzaA__ADI72931
augaaggccauccuggugguccuccuguacaccuucgcuacagccaacgcggacacgcuuugcauuggcuaucacgcuaauaacagcaccgauacaguugacaccgugcuggagaagaaugugacagucacccauuccgugaaccuccuggaagauaagcacaaugggaaacuuuguaagcugagaggaguugcuccccuccaucugggcaaaugcaacaucgccggguggauucugggaaauccugagugugaaucucucagcacagccuccucuuggagcuacaucguggagaccuccucuagcgacaacggcacgugcuauccgggggauuuuauugacuacgaagaacugcgggagcagcuuuccagcgucucuuccuucgaacgcuuugagaucuuccccaagaccagcucuuggccuaaucacgaucccaacaagggagugacagccgcuuguccucaugccggcgcgaaauccuuuuauaagaaucugaucuggcucguuaaaaagggcaacagcuaccccaaacugucuaaguccuauauuaaugacaaggggaaagaagugcuuguccuguggggaauccaccacccuagcaccuccgccgaucaacagucucucuaccagaacgcugacgccuacguguucgugggcacaagcagauauuccaagaaauuuaagccggagauugcuauccggcccaaaguccgcgaucaggaggggagaaugaauuacuauuggacccugguugaaccuggagacaagauuacguucgaggccacaggcaaccugguggugccccgguacgcguuugccauggaacgcaacgcugggagcggaaucauuaucucugauaccccuguccaugacugcaauacaaccugucaaacccccaaaggcgccaucaacacaucccucccguuccagaauauucacccuaucacgauuggcaagugccccaaguaugugaaaagcaccaagcugagacuugcuacagggcugcggaacguuccuucuauccagagccgcggacucuuuggcgccauugccggguucaucgagggaggcuggaccgggaugguggacggaugguacggcuaucaucaccagaaugaacaaggcuccggguacgcugcggaucugaaaucuacacagaacgccaucgacgagauuaccaauaaggucaacagcgugaucgagaaaaugaauacgcaguuuacagcuguuggaaaggaguucaaccaccuugagaagagaauugaaaaucugaacaaaaagguggaugacggcuuccucgauaucuggaccuacaaugccgagcugcugguccuccuggaaaacgagcggacccuugacuaucaugauuccaaugugaaaaaccuguacgagaagguccgcagccagcucaaaaacaaugccaaggaaauugggaacggauguuuugaguucuaucacaagugcgacaauacauguauggaaucugugaaaaacggcaccuacgauuaucccaaguacuccgaggaagcuaaacugaauagagaggagaucgacgggaucaaacuugaaagcacacggauuuaucaaauccuggccauuuacucuacgguugcguccagccucgugcuggucgugucccugggcgcuaucucuuuuuggaugugcagcaacggaucccuccagugccgcauuuguaucuga

SEQ ID NO: 197190 - RNA, 1701 nt, Artificial Sequence; identical to SEQ ID NO: 196397
  derived and/or modified CDS sequence (opt5) from hemagglutinin__InfluenzaA__ADI72932

SEQ ID NO: 197191 - RNA, 1698 nt, Artificial Sequence
  derived and/or modified CDS sequence (opt5) from hemagglutinin__InfluenzaA__ADI75818
augaaggugaaacugcucguccugcuuugcaccuucacagccacguacgcugacaccaucuguauuggcuaucacgccaacaauagcacagauaccguugacacagugcuggagaagaacgugaccgucacacauuccgugaaucuccuggaaaacucucacaaugggaaacuuugccugcucaagggaaucgcgccccugcagcugggcaacuguagcguugcuggguggauucucggaaauccugagugcgaacugcuuaucuccaaagagucuuggagcuacauuguggaaaagccgaaccccgagaauggcaccuguuauccugggcauuuugccgauuacgaggaacugagagagcaacucuccucugucagcuccuucgaacgguuugagaucuuccccaaggagagcucuuggccuaaccacacggugaccggaguuuccgccagcugcucucauaauggcgaauccagcuuuuauaaaaaccugcuuuggcugacagagaagaauggccucuaccccaaccugucuaaauccuaugcuaauaacaaggaaaaagaggugcugguccucuggggagugcaccacccuccgagcaucuccgaccagaagacccuguaccauacagaaaacgccuacgugucugucguuagcucccacuauagccgcaaguucacccccgagauugcuaaaagaccuaaggugcgggaucaggaggggcgcaucaauuacuauuggacgcuucuggaacccggcgacacaauuaucuuugaggccaacgggaaucucauugcgccuagauacgccuucgcucugucucggggauuuggcuccgggaucauuaacagcaaugcccccauggauaaaugugacgcuaagugccagaccccgcaaggagccaucaacucuagccuuccuuuccagaaugugcaucccgucacaaucggcgaauguccuaaauaugugcgcuccgcgaagcugagaaugguuaccggccuccggaacauucccucuauccagagccgcgggcuguuuggagccauugcuggcuucaucgaagggggauggaccggcaugguggaugggugguacggauaucaccaccagaaugagcaaggcuccggcuacgccgcugaccagaaaagcacacagaacgccauuaaugggaucacgaacaaggucaauucugugaucgagaagaugaacacccaguuuacagccguuggaaaagaguucaauaagcuggaaagacggauggagaaccucaacaaaaagguggaugacggcuucauugauaucuggaccuacaaugcugaacugcuuguccugcucgagaacgaacgcacacuggacuuucaugacuccaaugugaaaaaccuuuaugagaaggucaagaaucaacugaaaaacaaugcgaaggagauugggaacggaugcuucgaauuuuaccacaaauguaaugaugagugcauggaaagcgugaagaacggcaccuaugacuaccccaaauauucugaggaguccaagcucaauagagaaaagaucgaugggguuaaacuggagagcaugggcguguaccagauucuggccaucuauuccacggucgcuucuagccucgugcugcuuguuucccugggagccaucucuuucuggaugugcagcaacggcucccuccagugucggauuugcaucuga

SEQ ID NO: 197192 - RNA, 1698 nt, Artificial Sequence
  derived and/or modified CDS sequence (opt5) from hemagglutinin__InfluenzaA__ADI75851
augaaggugaaacugcucguccugcuuugcaccuucacagccacguacgcugacaccaucuguauuggcuaucacgccaacaauagcacagauaccguugacacagugcuggagaagaacgugaccgucacacauuccgugaaucuccuggaaaacucucacaaugggaaacuuugccugcucaagggaaucgcgccccugcagcugggcaacuguagcguugcuggguggauucucggaaauccugagugcggccugcuuaucuccaaagaaucuuggagcuacauuguggagaagccgaaccccgaaaaugggaccuguuauccuggacauuuugccgauuacgaggagcugagagaacaacucuccucugucagcuccuucgagcgguuugaaaucuuccccaaggagagcucuuggccuaaccacacggugaccggcguuuccgccagcugcucucauaauggcgaguccagcuuuuaucgcaaccugcuuuggcugacagggaaaaauggacucuaccccaaccugucuaaguccuaugcuaauaacaaagaaaaggaggugcugguccucuggggcgugcaccacccuccgaacaucguggaccagaaaacccuguacagaacagaaaaugccuacgucagcguuguguccucucauuauagccggaaguucacccccgagauugcuaagcgcccuaaagugagagaucaggaagggcggaucaacuacuauuggacgcuucuggagcccggagacacaauuaucuuugaggccaauggcaaccucauugcgccucgcuacgccuucgcucuguccagaggguuuggaagcggcaucauuaauucuaacgcccccaugggcaagugugaugcuaaaugccagaccccgcaaggggccaucaauuccagccuuccuuuccagaacguccaccccgugacaaucggagaauguccuaaguauguucggucugcgaaacugcgcauggugaccggccucagaaauauucccagcauccagucccgggggcuguuuggagccauugcuggcuucaucgaagggggauggaccggcauggucgacggcugguacggguaucaucaccagaacgaacaaggaucuggcuacgccgcugaucaaaagagcacacagaaugccauuaacgggaucacgaauaaagugaacuccguuaucgagaagaugaauacccaguuuacagccgugggaaaggaguucaacaaacuggagcgcagaauggagaaccucaauaagaaagucgacgauggcuucauugacaucuggaccuacaacgcugaacugcuugugcugcucgagaaugaacggacacuggauuuucacgacagcaacgucaagaaucuuuaugagaaagugaagucucagcugaagaacaaugcgaaagaaauugggaacggcugcuucgaguuuuaccauaaguguaaugacgagugcauggaauccguuaaaaacggaaccuaugauuaccccaaguauagcgaggaaucuaaacucaaucgcgagaagaucgacggcgugaagcuggaguccaugggggucuaccagauucuggccaucuauagcacgguggcuuccucucucguucugcuugugagccugggagccaucuccuucuggaugugcucuaacggcagccuccaguguagaauuugcaucuga

SEQ ID NO: 197193 - RNA, 1701 nt, Artificial Sequence; identical to SEQ ID NO: 194506
  derived and/or modified CDS sequence (opt5) from hemagglutinin__InfluenzaA__ADI75884

SEQ ID NO: 197194 - RNA, 1701 nt, Artificial Sequence; identical to SEQ ID NO: 194506
  derived and/or modified CDS sequence (opt5) from hemagglutinin__InfluenzaA__ADI75917

SEQ ID NO: 197195 - RNA, 1698 nt, Artificial Sequence
  derived and/or modified CDS sequence (opt5) from hemagglutinin__InfluenzaA__ADI77349
augaaggugaaacugcucguccugcuuugcaccuucacagccacguacgcugacaccaucuguauuggcuaucacgccaacaauagcacagauaccguugacacagugcuggagaagaacgugaccgucacacauuccgugaaucuccuggaaaacucucacaaugggaaacuuugccugcucaagggaaucgcgccccugcagcugggcaacuguagcguugcuggguggauucucggaaauccugagugcgaacugcuuaucuccaaagagucuuggagcuacauuguggaaaagccgaaccccgagaauggcaccuguuauccugggcauuuugccgauuacgaggaacugagagagcaacucuccucugucagcuccuucgaacgguuugagaucuuccccaaggagagcucuuggccuaaccacacggugaccggaguuuccgccagcugcucucauaauggcgaaaacuccuuuuaucgcaaucugcuuuggcugacaggcaaaaacgggcucuaccccaaucugagcaagucuuaugcuaacaacaaagagaaggaagugcugauccucuggggaguccaccacccuccgaauauggccgaccagaaaacccuguaccauacagagaacgcuuacguguccguggucagcucccacuauucuagaaaguucacccccgaaauugccaagcggccuaaaguucgcgaucaggagggcagaaucaauuacuauuggacgcuucuggagcccggggacacaauuaucuuugaagcgaacggaaaucucauugccccucgguacgcuuucgcccugagccgcggcuuuggguccggaaucauuaacagcaaugcucccauggauaagugugacaccaaaugccagacaccgcaaggcgccaucaacucuucccuuccuuuccagaaugugcaucccgugaccaucggcgaguguccuaaguaugucagaagcgcgaaacugcggauggugaccgggcuccgcaacauucccucuauccagagcagaggacuguuuggcgccauugcuggguucaucgaaggaggcuggacagggaugguugauggaugguacggcuaucaccaccagaaugagcaaggcuccggguacgccgcugaccagaagucuacgcagaacgccauuaauggaaucaccaacaaagugaauagcgucaucgaaaagaugaacacacaguuuaccgccgugggcaaggaguucaacaaacuggagcggcgcauggaaaaucucaacaagaaaguugaugacggguucauugauaucuggacauacaaugcugagcugcuugugcugcucgaaaacgagagaacccuggacuuucaugacuccaaugucaagaaccuuuaugaaaaagucaagagccaacugaagaauaacgcgaaagagauuggaaauggcugcuucgaguuuuaccacaaguguaacgaugaaugcauggagucugugaaaaaugggacguaugacuaccccaaguauuccgaagagagcaaacucaaccgggagaagaucgauggcgugaagcuggaaucuaugggaguuuaccagauucuggccaucuauuccacaguggcuagcucccucguccugcuugugucucugggcgccaucagcuucuggaugugcuccaaugggucucuccagugucgcauuugcaucuga

SEQ ID NO: 197196 - RNA, 1701 nt, Artificial Sequence; identical to SEQ ID NO: 194741
  derived and/or modified CDS sequence (opt5) from hemagglutinin__InfluenzaA__ADI77360

SEQ ID NO: 197197 - RNA, 1701 nt, Artificial Sequence
  derived and/or modified CDS sequence (opt5) from hemagglutinin__InfluenzaA__ADI99498
augaagaccauccuggugguccuccuguacacauucgccacggcuaacgccgacacccuuugcauuggcuaucacgcgaauaacagcacagauaccguugacacagugcuggagaaaaaugugaccgucacacauuccgugaaccuccuggaagauaagcacaaugggaaacuuuguaagcugagaggaguugcuccccuccaucugggcaaaugcaacaucgccggguggauucugggaaauccugagugugaaucucucagcaccgccuccucuuggagcuacaucguggagacguccucuagcgacaacgggaccugcuauccgggcgauuuuauugacuacgaagaacugcgggagcagcuuuccagcgucucuuccuucgaacgcuuugagaucuuccccaagacaagcucuuggccuaaucacgauuccaacaagggagugaccgcugccuguccccaugcuggcgccaagagcuuuuauaagaaucugaucuggcucguuaaaaagggcaacucuuacccuaaacugaauaaguccuauauuaacgacaaggggaaagaagugcuuguccuguggggaauccaccaccccagcacauccgcggaucaacagucucucuaccagaaugccgacgcuuacguguucgugggcaccagcagauauuccaagaaauuuaagccugagauugccauccggccgaaaguccgcgggcaggagggaagaaugaacuacuauuggacgcugguuaagcccggcgauaaaauuacauucgaagcuaccgggaaccugguggugccucgguacgccuuugcgauggagcgcaaugccggaagcggcaucauuaucucugacacacccguccaugauugcaacaccaccugucaaacaccuaagggcgcuaucaauacgucccuccccuuccagaacauucacccgaucaccauugggaagugcccuaaauaugugaaaagcacaaaacugagacuugccaccggacugcggaauguucccucuauccagagccgcggccucuuuggggcuauugccggauucaucgaaggcggguggacaggaaugguggacggcugguacggcuaucaucaccagaacgagcaaggguccggauacgccgcugaccugaagucuacccagaaugcgaucgaugaaauuacgaacaaagucaauagcgugaucgagaagaugaacacacaguuuaccgccguuggcaaggaguucaaucaccuugagaaaagaauugagaaccugaauaagaaaguggacgauggguuccucgacaucuggaccuacaacgcugaacugcugguccuccuggagaaugaacggacacuugauuaucaugacuccaacgugaagaaccuguacgagaaaguccgcagccagcucaagaauaacgccaaggagauuggaaauggcuguuuugaguucuaucacaaaugcgauaacaccuguauggaaucugugaagaaugggacauacgacuauccuaaauacuccgaagaggccaagcugaacagagaagagaucgauggcguuaaacuugagagcacgcggaucuaucaaauucuggcuaucuacucuaccguggccuccagccucguccuggugguuucccugggagcgauuucuuuuuggaugugcagcaauggcucccuccagugccgcaucuguauuuga

SEQ ID NO: 197198 - RNA, 1701 nt, Artificial Sequence
  derived and/or modified CDS sequence (opt5) from hemagglutinin__InfluenzaA__ADI99560
augaaggccauccuggugguccuccuguacaccuucgcuacagccaacgcggacacgcuuugcauuggcuaucacgcuaauaacagcaccgauacaguugacaccgugcuggagaaaaaugugacagucacccauuccgugaaccuccuggaagauaagcacaaugggaaacuuuguaagcugagaggaguugcuccccuccaucugggcaaaugcaacaucgccggguggauucugggaaauccugagugugaaucucucagcacagccuccucuuggagcuacaucguggagaccuccucuagcgacaacggcacgugcuauccgggggauuuuauuaauuacgaagaacugcgggagcagcuuuccagcgucucuuccuucgaacgcuuugagaucuuccccaagaccagcucuuggccuaaccacgacuccaauaagggagugacagccgcuuguccccaugccggcgcgaaaucuuuuuauaagaaccugaucuggcucguuaaaaagggcaauagcuacccuaaacuguccaagagcuauauuaacgauaaggggaaagaagugcuuguccuguggggaauccaccaccccuccaccucugccgaccaacagagccucuaccagaaugcugaugccuacguguucgugggcacauccagauauagcaagaaauuuaagccugagauugcuauccggccgaaaguccgcgaccaggaggggagaaugaacuacuauuggacccugguugaacccggagauaagauuacguucgaggccacaggcaaccugguggugccucgguacgcguuugccauggaacgcaaugcugggucuggaaucauuaucuccgacacccccguccaugauugcaacacaaccugucaaaccccuaaaggcgccaucaauacaagccuccccuuccagaacauucacccgaucacgauuggcaagugcccuaaguaugugaaaucuaccaagcugagacuugcuacagggcugcggaauguucccagcauccagucccgcggacucuuuggcgccauugccggguucaucgagggaggcuggaccgggaugguggacggaugguacggcuaucaucaccagaacgaacaaggcucuggguacgcugcggaccugaaaagcacacagaaugccaucgauaagauuaccaacaaagucaauuccgugaucgagaagaugaacacgcaguuuacagcuguuggaaaggaguucaaucaccuugagaaaagaauugagaaccugaauaagaaaguggacgauggcuuccucgacaucuggaccuacaacgccgaacugcugguccuccuggagaaugaacggacccuugauuaucaugacagcaacgugaagaaccuguacgagaaaguccgcucucagcucaagaauaacgccaaggagauugggaauggauguuuugaguucuaucacaaaugcaacaauacauguauggaauccgugaagaacggcaccuacgauuauccuaaauacagcgaagaggcuaagcugaauagagaagagaucgacgggguuaaacuugagucuacacggaucuaucaaauucuggccaucuacuccacgguggcgagcucccucguccuggugguuucucugggcgcuauuagcuuuuggaugugcuccaacggaucucuccagugccgcaucuguauuuga

SEQ ID NO: 197199 - RNA, 1701 nt, Artificial Sequence; identical to SEQ ID NO: 197198
  derived and/or modified CDS sequence (opt5) from hemagglutinin__InfluenzaA__ADI99570

SEQ ID NO: 197200 - RNA, 1701 nt, Artificial Sequence; identical to SEQ ID NO: 197198
  derived and/or modified CDS sequence (opt5) from hemagglutinin__InfluenzaA__ADI99580

SEQ ID NO: 197201 - RNA, 1701 nt, Artificial Sequence; identical to SEQ ID NO: 196354
  derived and/or modified CDS sequence (opt5) from hemagglutinin__InfluenzaA__ADI99590

SEQ ID NO: 197202 - RNA, 1701 nt, Artificial Sequence
  derived and/or modified CDS sequence (opt5) from hemagglutinin__InfluenzaA__ADI99610
augaaggccauccuggugguccuccuguacaccuucgcuacagccaacgcggacacgcuuugcauuggcuaucacgcuaauaacagcaccgauacaguugacaccgugcuggagaaaaaugugacagucacccauuccgugaaccuccuggaagauaagcacaaugggaaacuuuguaagcugagaggaguugcuccccuccaucugggcaaaugcaacaucgccggguggauucugggaaauccugagugugaaucucucagcacagccuccucuuggagcuacaucguggagaccuccucuagcgacaacggcacgugcuauccgggggauuuuauuaauuacgaagaacugcgggagcagcuuuccagcgucucuuccuucgaacgcuuugagaucuuccccaagaccagcucuuggccuaaccacgacuccaauaagggagugacagccgcuuguccccaugccggcgcgaaauccuuuuauaagaaccugaucuggcucguuaaaaagggcaauucuuacccuaaacuguccaagagcuauauuaacgauaaggggaaagaaauccuugugcuguggggcauucaccaccccuccaccucugccgaccaacagagccucuaccagaaugcugaugccuacgucuucgugggaacauccagauauagcaagaaauuuaagccugagaucgcuauucggccgaaagugcgcgaccaggaggggagaaugaacuacuauuggacccuggucgaacccggagauaagaucacguucgaggccacaggcaaccugguugugccucgguacgcguuugccauggaacgcaaugcugggucuggaauuaucaucuccgacacccccgugcaugauugcaacacaaccugucaaaccccuaaaggcgccauuaauacaagccuccccuuccagaacauccacccgauuacgaucggcaagugcccuaaguaugucaaaucuaccaagcugagacuugcuacagggcugcggaaugugcccagcauucagucccgcggacucuuuggcgccaucgccggguucaucgagggaggcuggaccgggaugguugacggaugguacggcuaucaucaccagaacgaacaaggcucuggguacgcugcggaccugaaaagcacacagaaugccauugauaagaucaccaacaaagugaauagcgucauugagaagaugaacacgcaguuuacagcugugggaaaggaguucaaucaccuugagaaaagaaucgagaaccugaauaagaaaguugacgauggcuuccucgacauuuggaccuacaacgccgaacugcuggugcuccuggagaaugaacggacccuugauuaucaugacagcaacgucaagaaccuguacgagaaagugcgcucucagcucaagaauaacgccaaggagaucgggaauggauguuuugaguucuaucacaaaugcgauaacacauguauggaauccgucaagaauggcaccuacgacuauccuaaauacagcgaagaggcuaagcugaacagagaagagaucgauggggugaaacuugagucuacacggauuuaucaaauccuggccauuuacuccacgguugcgagcucccucgugcuggucgugucucugggcgcuaucagcuuuuggaugugcuccaauggaucucuccagugccgcauuuguaucuga

SEQ ID NO: 197203 - RNA, 1701 nt, Artificial Sequence
  derived and/or modified CDS sequence (opt5) from hemagglutinin__InfluenzaA__ADI99620
augaaggccauccuggugguccuccuguacaccuucgcuacagccaacgcggacacgcuuugcauuggcuaucacgcuaauaacagcaccgauacaguugacaccgugcuggagaaaaaugugacagucacccauuccgugaaccuccuggaagauaagcacaaugggaaacuuuguaagcugagaggaguugcuccccuccaucugggcaaaugcaacaucgccggguggauucugggaaauccugagugugaaucucucagcacagccuccucuuggagcuacaucguggagaccuccucuagcgacaacggcacgugcuauccgggggauuuuauuaauuacgaagaacugcgggagcagcuuuccagcgucucuuccuucgaacgcuuugagaucuuccccaagaccagcucuuggccuaaccacgacuccaauaagggagugacagccgcuuguccccaugccggcgcgaaaucuuuuuauaagaaccugaucuggcucguuaaaaagggcaauagcuacccuaaacuguccaagagcuauauuaacgauaaggggaaagaagugcuuguccuguggggaauccaccaccccuccaccucugccgaccaacagagccucuaccagaaugcugaugccuacguguucgugggcacauccagauauagcaagaaauuuaagccugagauugcuauccggccgaaaguccgcgaccaggaggggagaaugaacuacuauuggacccugguugaacccggagauaagauuacguucgaggccacaggcaaccugguggugccucgguacgcguuugccauggaacgcaaugcugggucuggaaucauuaucaccgacacacccguccaugauugcaacaccaccugucaaacaccuaaaggcgccaucaauacgucccuccccuuccagaacauucacccgaucaccauuggcaagugcccuaaguaugugaaaagcacaaagcugagacuugcuaccgggcugcggaauguucccucuauccagagccgcggacucuuuggcgccauugccggguucaucgagggaggcuggacagggaugguggacggaugguacggcuaucaucaccagaacgaacaaggcuccggguacgcugcggaccugaaaucuacccagaaugccaucgauaagauuacgaacaaagucaauagcgugaucgagaagaugaacacacaguuuaccgcuguuggaaaggaguucaaucaccuugagaaaagaauugagaaccugaauaagaaaguggacgauggcuuccucgacaucuggaccuacaacgccgaacugcugguccuccuggagaaugaacggacacuugauuaucaugacuccaacgugaagaaccuguacgagaaaguccgcagccagcucaagaauaacgccaaggagauugggaauggauguuuugaguucuaucacaaaugcgauaacaccuguauggaaucugugaagaauggcacauacgacuauccuaaauacuccgaagaggcuaagcugaacagagaagagaucgaugggguuaaacuugagagcacgcggaucuaucaaauucuggccaucuacucuaccguggcguccagccucguccuggugguuucccugggcgcuauuucuuuuuggaugugcagcaauggaucccuccagugccgcaucuguauuuga

SEQ ID NO: 197204 - RNA, 1701 nt, Artificial Sequence
  derived and/or modified CDS sequence (opt5) from hemagglutinin__InfluenzaA__ADI99630
augaaggccauccuggugguccuccuguacaccuucgcuacagccaacgcggacacgcuuugcauuggcuaucacgcuaauaacagcaccgauacaguugacaccgugcuggagaaaaaugugacagucacccauuccgugaaccuccuggaagauaagaauaacgggaaacuuuguaagcugagaggaguugcuccccuccaccugggcaaaugcaauaucgccggguggauucugggaaacccugagugugaaucucucagcacagccuccucuuggagcuacaucguggagaccuccucuagcgacaauggcacgugcuauccggggaacuuuauugauuacgaagaacugcgggagcagcuuuccagcgucucuuccuucgaacgcuuugagaucuuccccaagaccagcucuuggccuaaucaugacuccaacaagggagugacagccgcuuguccccacgccggcgcgaaaucuuuuuauaagaaucugaucuggcucguuaaaaagggcaacagcuacccuaaacuguccaagagcuauauuaaugauaaggggaaagaagugcuuguccuguggggaauccaucaccccuccaccucugccgaccaacagagccucuaccagaacgcugaugccuacguguucgugggcacauccagauauagcaagaaauuuaagccugagauugcuauccggccgaaaguccgcgaccaggaggggagaaugaacuacuauuggacccugguugaacccggagauaagauuacguucgaggccacaggcaaucugguggugccucgguacgcguuugccauggaacgcaacgcugggucuggaaucauuaucuccgacacccccguccacgauugcaauacaaccugucaaaccccuaaaggcgccaucaacacaagccuccccuuccagaauauucauccgaucacgauuggcaagugcccuaaguaugugaaaucuaccaagcugagacuugcuacagggcugcggaacguucccagcauccagucccgcggacucuuuggcgccauugccggguucaucgagggaggcuggaccgggaugguggacggaugguacggcuaucaccaucagaaugaacaaggcucuggguacgcugcggaccugaaaagcacacagaacgccaucgauaagauuaccaauaaagucaacuccgugaucgagaagaugaauacgcaguuuacagcuguuggaaaggaguucaaccaccuugagaaaagaauugagaaucugaacaagaaaguggacgauggcuuccucgacaucuggaccuacaaugccgaacugcugguccuccuggagaacgaacggacccuugauuaucacgacagcaacgugaagaaucuguacgagaaaguccgcucucagcucaagaacaaugccaaggagauugggaacggauguuuugaguucuaucauaaaugcgauaauacauguauggaauccgugaagaacggcaccuacgacuauccuaaauacagcgaagaggcuaagcugaauagagaagagaucgaugggguuaaacuugagucuacacggaucuaucaaauucuggccaucuacuccacgguggcgagcucccucguccuggugguuucucugggcgcuauuagcuuuuggaugugcuccaacggaucucuccagugccgcaucuguauuuga

SEQ ID NO: 197205 - RNA, 1701 nt, Artificial Sequence
  derived and/or modified CDS sequence (opt5) from hemagglutinin__InfluenzaA__ADI99640
augaaggccauccuggugguccuccuguacaccuucgcuacagccaacgcggacacgcuuugcauuggcuaucacgcuaauaacagcaccgauacaguugacaccgugcuggagaaaaaugugacagucacccauuccgugaaccuccuggaagauaagcacaaugggaaacuuuguaagcugagaggaguugcuccccuccaucugggcaaaugcaacaucgccggguggauucugggaaauccugagugugaaucucucagcacagccuccucuuggagcuacaucguggagaccuccucuagcgacaacggcacgugcuauccgggggauuuuauugacuacgaagaacugcgggagcagcuuuccagcgucucuuccuucgaacgcuuugagaucuuccccaagaccagcucuuggccuaaucacgauuccaacaagggagugacagccgcuuguccccaugccggcgcgaaaucuuuuuauaagaaucugaucuggcucguuaaaaagggcaacagcuacccuaaacuguccaagagcuauauuaaugacaaggggaaagaagugcuuguccuguggggaauccaccaccccuccaccucuacagaucaacagagccucuaccagaacgccgacuccuacguguucgugggcaccagcagauauucuaagaaauuuaagccugagauugcuauccggccgaaaguccgcgaucaggaggggagaaugaauuacuauuggacgcugguugaacccggagacaagauuacauucgaggccaccggcaaccugguggugccucgguacgcuuuugccauggaacgcaacgcgggguccggaaucauuaucagcgauacacccauccaugacugcaauaccaccugucaaacaccugagggcgccauuaacacgucucuccccuuccagaauauccacccgauuaccaucggcaaaugcccuaaguaugucaagagcacaaaacugagacuugcuaccgggcugcggaacgugcccuccauucagucucgcggacucuuuggcgccaucgcuggguucaucgaaggaggcuggacagggaugguugacggaugguacggcuaucaucaccagaaugagcaaggcagcggguacgccgccgaucugaaguccacccagaacgcuauugacgagaucacgaauaaagugaacagcgucauugaaaagaugaauacacaguuuaccgcggugggaaaagaguucaaccaccuugaaaagagaaucgagaaucugaacaagaaaguugaugacggcuuccucgauauuuggaccuacaaugccgaacugcuggugcuccuggagaacgagcggacacuugacuaucaugauucuaaugucaagaaccuguacgaaaaagugcgcucccagcucaagaacaaugcuaaagagaucgggaacggauguuuugaguucuaucacaagugcgacaauaccuguauggagagcgucaagaacggcacauacgauuauccuaaauacucugaagaggccaagcugaauagagaggaaaucgacggggugaaacuugaguccacgcggauuuaucaaauccuggccauuuacagcaccguugcuuccucucucgugcuggucgugagccugggcgccaucuccuuuuggaugugcucuaacggaagccuccagugccgcauuuguaucuga

SEQ ID NO: 197206 - RNA, 1701 nt, Artificial Sequence; identical to SEQ ID NO: 196293
  derived and/or modified CDS sequence (opt5) from hemagglutinin__InfluenzaA__ADI99660

SEQ ID NO: 197207 - RNA, 1701 nt, Artificial Sequence
  derived and/or modified CDS sequence (opt5) from hemagglutinin__InfluenzaA__ADI99670
augaaggccauccuggugguccuccuguacaccuucgcuacagccaacgcggacacgcuuugcauuggcuaucacgcuaauaacagcaccgauacaguugacaccgugcuggagaaaaaugugacagucacccauuccgugaacauccucgaagauaagcacaaugggaaacuguguaaacuuagaggaguugcuccccugcaucucggcaagugcaacauugccggguggauccugggaaauccugagugugaaucucugagcacagccuccucuuggagcuacauuguggagaccuccucuagcgacaacggcacgugcuauccgggggauuuuaucgacuacgaagaacuccgggagcagcuguccagcgucucuuccuucgaacgcuuugagaucuuccccaagaccagcucuuggccuaaucacgauuccaacaagggagugacagccgcuuguccccaugccggcgcgaaaucuuuuuauaagaaucuuauuuggcugguuaaaaagggcaacagcuacccuaaacucuccaagagcuauaucaaugacaaggggaaagaagugcugguccuuuggggcauucaccaccccuccaccucugccgaucaacagagccuguaccagaacgcugacgccuacguguucgugggaacauccagauauagcaagaaauuuaagccugagaucgcuauucggccgaaaguccgcgaucaggaggggagaaugaauuacuauuggacccucguugaacccggagacaagaucacguucgaggccacaggcaaccugguggugccucgguacgcguuugccauggaacgcaacgcugggucuggaauuaucaucuccgauacccccguccaugacugcaauacaaccugucaaaccccuaaaggcgccauuaacacaagccugcccuuccagaauauccacccgauuacgaucggcaagugcccuaaguaugugaaaucuaccaagcucagacuggcuacagggcuucggaacguucccagcauucagucccgcggacuguuuggcgccaucgccggguucaucgagggaggcuggaccgggaugguggacggaugguacggcuaucaucaccagaaugaacaaggcucuggguacgcugcggaucucaaaagcacacagaacgccauugacgagaucaccaauaaggucaacuccgugauugagaaaaugaauacgcaguuuacagcuguuggaaaggaguucaaccaccuggagaagagaaucgaaaaucuuaacaaaaagguggaugacggcuuccuggauauuuggaccuacaaugccgagcuccugguccugcucgaaaacgagcggacccuggacuaucaugauagcaaugugaaaaaccuuuacgagaagguccgcucucagcugaaaaacaaugccaaggaaaucgggaacggauguuuugaguucuaucacaagugcgacaauacauguauggaauccgugaaaaacggcaccuacggguauccuaaguacagcgaggaagcuaaacucaauagagaggagaucgauggcguuaagcuggaaucuacacggauuuaucaaauccuugccauuuacuccacgguggcgagcucccugguccucgugguuucucugggagcuaucagcuuuuggaugugcuccaacggcucucugcagugccgcauuuguaucuga

SEQ ID NO: 197208 - RNA, 1701 nt, Artificial Sequence
  derived and/or modified CDS sequence (opt5) from hemagglutinin__InfluenzaA__ADI99680
augaaggccauccuggugguccuccuguacaccuucgcuacagccaacgcggacacgcuuugcauuggcuaucacgcuaauaacagcaccgauacaguugacaccgugcuggagaaaaaugugacagucacccauuccgugaacauccucgaagauaagcacaaugggaaacuguguaaacuuagaggaguugcuccccugcaucucggcaagugcaacauugccggguggauccugggaaauccugagugugaaucucugagcacagccuccucuuggagcuacauuguggagaccuccucuagcgacaacggcacgugcuauccgggggauuuuaucgacuacgaagaacuccgggagcagcuguccagcgucucuuccuucgaacgcuuugagaucuuccccaagaccagcucuuggccuaaucacgauuccaacaagggagugacagccgcuuguccccaugccggcgcgaaaucuuuuuauaagaaucuuauuuggcugguuaaaaagggcaacagcuacccuaaacucuccaagagcuauaucaaugacaaggggaaagaagugcugguccuuuggggcauucaccaccccuccaccucugccgaucaacagagccuguaccagaacgcugacgccuacguguucgugggaacauccagauauagcaagaaauuuaagccugagaucgcuauucggccgaaaguccgcgaucaggaggggagaaugaauuacuauuggaccaucguugaacccggagacaagauuacguucgaggccacaggcaaccucguggugccucgguacgcguuugccauggaacgcaacgcugggucuggaaucaucauuuccgauacccccguccaugacugcaauacaaccugucaaaccccuaaaggcgccaucaacacaagccugcccuuccagaauauucacccgaucacgauuggcaagugcccuaaguaugugaaaucuaccaagcugagacucgcuacagggcugcggaacguucccagcauccagucccgcggacuuuuuggcgccaucgccggguucauugagggaggcuggaccgggaugguggacggaugguacggcuaucaucaccagaaugaacaaggcucuggguacgcugcggaucugaaaagcacacagaacgccaucgacgagauuaccaauaaggucaacuccgugaucgagaaaaugaauacgcaguuuacagcuguuggaaaggaguucaaccaccucgagaagagaauugaaaaucugaacaaaaagguggaugacggcuuccuugauaucuggaccuacaaugccgagcugcucguccugcuggaaaacgagcggacccucgacuaucaugauagcaaugugaaaaaccuguacgagaagguccgcucucagcuuaaaaacaaugccaaggaaaucgggaacggauguuuugaguucuaucacaagugcgacaauacauguauggaauccgugaaaaacggcaccuacgauuauccuaaguacagcgaggaagcuaaacugaauagagaggagauugacgggguuaagcucgaaucuacacggaucuaucaaauucuggccaucuacuccacgguggcgagcucccuuguccuggugguuucucucggcgcuauuagcuuuuggaugugcuccaacggaucucugcagugccgcaucuguauuuga

SEQ ID NO: 197209 - RNA, 1701 nt, Artificial Sequence
  derived and/or modified CDS sequence (opt5) from hemagglutinin__InfluenzaA__ADI99690
augaaggccauccuggcugugcuccuguacaccuucgccauugcgaacgcugacacacuuugcaucggcuaucacgccaauaacagcacggauaccgucgacacaguucuggagaaaaaugugaccgugacacauuccgucaacauucucgaagauaagcacaaugggaaacuguguaaacuuagaggaguggcuccccugcaucucggcaaaugcaacaucgccggguggauucugggaaauccugagugugaaucucugagcaccgccuccucuuggagcuacaucguugagacauccucuagcgacaacgggaccugcuauccgggcgauuuuaucgacuacgaagaacuccgggagcagcuguccagcgugucuuccuucgaacgcuuugagauuuuccccaagacgagcucuuggccuaaucacgauuccaacaagggagucaccgcugccuguccccaugcgggcgccaagagcuuuuauaagaaucuuaucuggcuggugaaaaagggcaacucuuacccuaaacucuccaagagcuauauuaaugacaaggggaaaaagguucuggugcuuuggggaauccaccaccccuccacaucugcugaucaacagagccuguaccagaacgccgacgcuuacgucuucgugggcaccuccagauauagcaaaaaguuuaaaccugaaauugccauccggccgaaggugcgcgaucaggaggggagaaugaauuacuauuggacacucgucgagcccggagacaaaauuaccuucgaagcgacgggcaaccugguugugccucgguacgccuuugcuauggagcgcaacgccgggucuggaaucaucauuuccgauacacccgugcaugacugcaauaccacaugucaaaccccuaagggcgcuaucaacaccagccugcccuuccagaauauucacccgaucacaauuggcaagugcccuaaauaugucaagucuacgaaacucagacuggccaccgggcuucggaacgugcccagcauccagucccgcggacuguuuggcgccaucgcuggguucauugaaggaggcuggacagggaugguugacggaugguacggcuaucaucaccagaaugagcaaggcucuggguacgcggccgaucucaagagcacccagaacgcuaucgacgaaauuacaaauaaagugaacuccgucaucgagaagaugaauacccaguuuacggccgugggaaaggaguucaaccaccuggagaaaagaauugagaaucuuaacaagaaaguugaugacggcuuccuggauaucuggacauacaaugccgaacuccuggugcugcucgagaacgaacggacccuggacuaucaugauagcaaugucaagaaccuuuacgagaaagugcgcucucagcugaagaacaaugcuaaggagaucgggaacggauguuuugaguucuaucacaaaugcgacaauaccuguauggaauccgucaagaacggcacauacgauuauccuaaauacagcgaagaggccaagcucaauagagaagagauugacggggugaaacuggagucuacccggaucuaucaaauucuugcgaucuacuccacaguugcuagcucccuggugcucgucgugucucugggcgccauuagcuuuuggaugugcuccaacggaucucugcagugccgcaucuguauuuga

SEQ ID NO: 197210 - RNA, 1701 nt, Artificial Sequence
  derived and/or modified CDS sequence (opt5) from hemagglutinin__InfluenzaA__ADI99700
augaaggccauccuggugguccuccuguacaccuucgcuacagccaacgcggacacgcuuugcauuggcuaucacgcuaauaacagcaccgauacaguugacaccgugcuggagaagaaugugacagucacccauuccgugaaccuccuggaagauaagcacaaugggaaacuuuguaagcugagaggaguuucuccccuccaucugggcaaaugcaacaucgccggguggauucugggaaauccugagugugaaagccucuccacagccucuagcugguccuacaucguggagaccucuagcuccgacaacggcacgugcuauccgggggauuuuauugacuacgaagaacugcgggagcagcuuagcucugucuccagcuucgaacgcuuugagaucuuccccaagaccucuuccuggccuaaucacgauagcaacaagggagugacagcugccuguccccaugcuggcgccaaaucuuuuuauaagaaucugaucuggcucguuaaaaagggcaacuccuacccuaaacugagcaaguccuauauuaaugacaaggggaaagaagugcuuguccuguggggagugcaccaccccucuaccagcgcggaucaacagucccucuaccagaacgccgacgcuuacguguucgucggcacaagcagauauucuaagaaauuuaagccugagaucgccauucggccgaaaguucgcgaucaggaggggagaaugaauuacuauuggacccugguggaacccggagacaagaucacguucgaggcuacaggcaaccugguggccccucgguacgcguuugccauggaacgcaacgcuggguccggaauuaucauuagcgauacccccguccaugacugcaauacaaccugucaaaccccuaaaggcgccaucaacacaucucuccccuuccagaauauccacccgauuacgaucggcaagugcccuaaguaugugaaaagcaccaagcugagacuugcuacagggcugcggaacguucccuccauucagucucgcggacucuuuggcgccaucgccggguucauugagggaggcuggaccgggaugguggacggaugguacggcuaucaucaccagaaugaacaaggcagcggguacgcugcggaucugaaauccacacagaacgccaucgacgagaucaccaauaaggucaacagcgugauugagaaaaugaauacgcaguuuacagcuguuggaaaggaguucaaccaccuugagaagagaaucgaaaaucugaacaaaaagguggaugacggcuuccucgauauuuggaccuacaaugccgagcugcugguccuccuggaaaacgagcggacccuugacuaucaugauucuaaugugaaaaaccuguacgagaagguccgcucccagcucaaaaacaaugccaaggaaaucgggaacggauguuuugaguucuaucacaagugcgacaauacauguauggaaagcgugaaaaacggcaccuacgauuauccuaaguacucugaggaagcuaaacugaauagagaggagauugacgggguuaaacuugaauccacacggaucuaucaaauccuggccauuuacagcacgguggcguccucucucguccuggugguuagccugggcgcuaucuccuuuuggaugugcucuaacggaagccuccagugccgcauuuguaucuga

SEQ ID NO: 197211 - RNA, 1701 nt, Artificial Sequence; identical to SEQ ID NO: 196390
  derived and/or modified CDS sequence (opt5) from hemagglutinin__InfluenzaA__ADI99710

SEQ ID NO: 197212 - RNA, 1701 nt, Artificial Sequence
  derived and/or modified CDS sequence (opt5) from hemagglutinin__InfluenzaA__ADI99720
augaaggccauccuggugguccuccuguacaccuucgcuacagccaacgcggacacgcuuugcauuggcuaucacgcuaauaacagcaccgauacaguugacaccgugcuggagaagaaugugacagucacccauuccgugaaccuccuggaagauaagcacaaugggaaacuuuguaagcugagaggaguugcuccccuccaucugggcaaaugcaacaucgccggguggauucugggaaauccugagugugaaucucucagcacagccuccucuuggagcuacaucguggagaccuccucuagcgacaacggcacgugcuauccgggggauuuuauugacuacgaagaacugcgggagcagcuuuccagcgucucuuccuucgaacgcuuugagaucuuccccaagaccagcucuuggccugaucacgacuccaauaagggagugacagccgcuuguccccaugccggcgcgaaaucuuuuuauaagaaccugaucuggcucguuaaaaagggcaauagcuacccuaaacuguccaagagcuauauuaacgauaaggggaaagaagugcuuguccuguggggaauccaccaccccuccaccucugccgaccaacagagccucuaccagaaugcugaugccuacguguucgugggcacauccagauauagcaagaaauuuaagccugagauugcuauccggccgaaaguccgcgggcaggagggaagaaugaacuacuauuggacccugguugaacccggcgacaagauuacguucgaggccacagggaaucugguggugucucgguacgcguuugccauggaacgcaacgcuggauccggcaucauuaucagcgauaccccuguccaugacugcaacacaaccugucaaacccccaaaggcgccaucaauacaucucucccuuuccagaacauucaccccaucacgauugggaagugcccgaaguaugugaaaagcaccaagcugagacuugcuacaggacugcggaauguuccuuccauccagucucgcggccucuuuggggccauugccggauucaucgagggcggguggaccggaaugguggacggcugguacggcuaucaucaccagaacgaacaagggagcggauacgcugcggaucugaaauccacacagaaugccaucgacgagauuaccaacaaggucaauagcgugaucgagaaaaugaacacgcaguuuacagcuguuggcaaggaguucaaucaccuugagaagagaauugaaaaccugaauaaaaagguggaugacggguuccucgauaucuggaccuacaacgccgagcugcugguccuccuggaaaaugagcggacccuugacuaucaugauucuaacgugaaaaaucuguacgagaagguccgcucccagcucaaaaacaacgccaaggaaauuggaaauggcuguuuugaguucuaucacaagugcgacaacacauguauggaaagcgugaaaaaugggaccuacgauuaucccaaguacucugaggaagcuaaacugaacagagaggagaucgacggcguuaaacuugaauccacacggaucuaucaaauucuggccaucuacagcacgguggcguccucucucguccuggugguuagccugggagcuauuuccuuuuggaugugcucuaauggcagccuccagugccgcaucuguauuuga

SEQ ID NO: 197213 - RNA, 1701 nt, Artificial Sequence; identical to SEQ ID NO: 194741
  derived and/or modified CDS sequence (opt5) from hemagglutinin__InfluenzaA__ADI99730

SEQ ID NO: 197214 - RNA, 1701 nt, Artificial Sequence; identical to SEQ ID NO: 194741
  derived and/or modified CDS sequence (opt5) from hemagglutinin__InfluenzaA__ADJ00497

SEQ ID NO: 197215 - RNA, 1701 nt, Artificial Sequence; identical to SEQ ID NO: 194741
  derived and/or modified CDS sequence (opt5) from hemagglutinin__InfluenzaA__ADJ00498

SEQ ID NO: 197216 - RNA, 1701 nt, Artificial Sequence; identical to SEQ ID NO: 195935
  derived and/or modified CDS sequence (opt5) from hemagglutinin__InfluenzaA__ADJ00501

SEQ ID NO: 197217 - RNA, 1701 nt, Artificial Sequence; identical to SEQ ID NO: 195905
  derived and/or modified CDS sequence (opt5) from hemagglutinin__InfluenzaA__ADJ18163

SEQ ID NO: 197218 - RNA, 1701 nt, Artificial Sequence; identical to SEQ ID NO: 195905
  derived and/or modified CDS sequence (opt5) from hemagglutinin__InfluenzaA__ADJ18165

SEQ ID NO: 197219 - RNA, 1701 nt, Artificial Sequence
  derived and/or modified CDS sequence (opt5) from hemagglutinin__InfluenzaA__ADJ18167
augaaggccauccuggugguccuccuguacaccuucgcuacagccaacgcggacacgcuuugcauuggcuaucacgcuaauaacagcaccgauacaguugacaccgugcuggagaaaaaugugacagucacccauuccgugaaccuccuggaagauaagcacaaugggaaacuuuguaagcugagaggaguugcuccccuccaucugggcaaaugcaacaucgccggguggauucugggaaauccugagugugaaucucucagcacagccuccucuuggagcuacaucguggagaccuccucuagcgacaacggcacgugcuauccgggggauuuuauugacuacgaagaacugcgggagcagcuuuccagcgucucuuccuucgaacgcuuugagaucuuccccaagaccagcucuuggccuaaucacgauuccaacaagggagugacagccgcuugucccuaugccggcgcgaaaucuuuuuacaagaaucugaucuggcucguuaaaaagggcaacagcuauccuaaacuguccaagagcuacauuaaugacaaggggaaagaagugcuuguccuguggggaauccaucaccccuccaccucugccgaucaacagagccucuaccagaacgcugacgccuauguguucgugggcacauccagauacagcaagaaauuuaagccugagauugcuauccggccgaaaguccgcgauagagaggggcggaugaauuauuacuggacccugguugaacccggagacaagauuacguucgaggccacaggcaaccugguggugccucgcuaugcguuugccauggaaagaaacgcugggucuggaaucauuaucuccgauacccccguccacgacugcaauacaaccugucagaccccuaaaggcgccaucaacacaagccuccccuuccaaaauauucauccgaucacgauuggcaagugcccuaaguacgugaaaucuaccaagcugcggcuugcuacagggcugcgcaacauccccagcauucaguccagaggacucuuuggcgccaucgccggguucaucgagggaggcuggaccgggaugguugacggaugguauggcuaccaccaucagaaugaacagggcucuggguacgcugcggaucugaaaagcacacaaaacgccauugacaagaucaccaauaaagugaacuccgucauugagaagaugaauacgcaguuuacagcugugggaaaggaguucaaccaccuugaaaaacggaucgagaaucugaacaagaaaguugaugacggcuuccucgauauuuggaccuauaaugccgaacugcuggugcuccuggagaacgaacgcacccuugacuaccacgauagcaaugucaagaaccuguaugagaaagugagaucucagcucaagaacaaugccaaggagaucgggaacggauguuuugaguucuaccauaaaugcgacaauacauguauggaguccgucaagaacggcaccuaugauuacccuaaauauagcgaagaggcuaagcugaaucgggaagagaucgacggggugaaacuugagucuacacgcauuuaccagauccuggccauuuacuccacgguugcgagcucccucgugcuggucgugucucugggcgcuaucagcuuuuggaugugcuccaacggaucucuccaaugcagaauuuguaucuga

SEQ ID NO: 197220 - RNA, 1701 nt, Artificial Sequence
  derived and/or modified CDS sequence (opt5) from hemagglutinin__InfluenzaA__ADJ18169
augaaggccauccuggugguccuccuguacaccuucgcuacagccaacgcggacacgcuuugcauuggcuaucacgcuaauaacagcaccgauacaguugacaccgugcuggagaaaaaugugacagucacccauuccgugaaccuccuggaagauaagcacaaugggaaacuuuguaagcugagaggaguugcuccccuccaucugggcaaaugcaacaucgccggguggauucugggaaauccugagugugaaucucucagcacagccuccucuuggagcuacaucguggagaccuccucuagcgacaacggcacgugcuauccgggggauuuuauugacuacgaagaacugcgggagcagcuuuccagcgucucuuccuucgaacgcuuugagaucuuccccaagaccagcucuuggccuaaucacgauuccaacaagggagugacagccgcuuguccccaugccggcgcgaaaucuuuuuauaagaaucugaucuggcucguuaaaaagggcaacagcuacccuaaacuguccaagagcuauauuaaugacaaggggaaagaagugcuuguccuguggggaauccaccaccccuccaccucugccgaucaacagagccucuaccagaacgcugacgccuacguguucgugggcacauccagauauagcaagaaauuuaagccugagauugcuauccggccgaaaguccgcgauagagaggggcggaugaauuacuauuggacccugguugaacccggagacaagauuacguucgaggccacaggcaaccugguggugccucgcuacgcguuugccauggaaagaaacgcugggucuggaaucauuaucuccgauacccccguccaugacugcaauacaaccugucagaccccuaaaggcgccaucaacacaagccuccccuuccaaaauauucacccgaucacgauuggcaagugcccuaaguaugugaaaucuaccaagcugcggcuugcuacagggcugcgcaacguucccagcauccaguccagaggacucuuuggcgccauugccggguucaucgagggaggcuggaccgggaugguggacggaugguacggcuaucaucaccagaaugaacagggcucuggguacgcugcggaucugaaaagcacacaaaacgccaucgacaagauuaccaauaaagucaacuccgugaucgagaagaugaauacgcaguuuacagcuguuggaaaggaguucaaccaccuugaaaaacggauugagaaucugaacaagaaaguggaugacggcuuccucgauaucuggaccuacaaugccgaacugcugguccuccuggagaacgaacgcacccuugacuaucaugauagcaaugugaagaaccuguacgagaaagucagaucucagcucaagaacaaugccaaggagauugggaacggauguuuugaguucuaucacaaaugcgacaauacauguauggaguccgugaagaacggcaccuacgauuauccuaaauacagcgaagaggcuaagcugaaucgggaagagaucgacgggguuaaacuugagucuacacgcaucuaucagauucuggccaucuacuccacgguggcgagcucccucguccuggugguuucucugggcgcuauuagcuuuuggaugugcuccaacggaucucuccaaugcagaaucuguauuuga

SEQ ID NO: 197221 - RNA, 1701 nt, Artificial Sequence
  derived and/or modified CDS sequence (opt5) from hemagglutinin__InfluenzaA__ADJ18171
augaaggccauccuggugguccuccuguacaccuucgcuacagccaacgcggacacgcuuugcauuggcuaucacgcuaauaacagcaccgauacaguugacaccgugcuggagaaaaaugugacagucacccauuccgugaaccuccuggaagauaagcacaaugggaaacuuuguaagcugagaggaguugcuccccuccaucugggcaaaugcaacaucgccggguggauucugggaaauccugagugugaaucucucagcacagccuccucuuggccguacaucguggagaccagcuccucugacaacggcacgugcuaucccggggauuuuauugacuacgaggaacugcgggagcagcuuagcuccgucagcucuuucgaacgcuuugagaucuucccuaagaccuccagcuggcccaaucacgauucuaacaagggagugacagccgcuuguccucaugccggcgcgaaauccuuuuaucaaaaucugaucuggcucguuaagaaaggcaacagcuaccccaagcugucuaaauccuauauucacgacaaggggaaggaagugcuuguccuguggggaauccaccauccuagcaccuccgccgaucagcagucucucuaccagaaugcugacgccuacguguucgugggcacaagcagauauuccaaaaaguuuaaaccggagauugcuauccggcccaagguccgcgauagacaagggcggaugaacuacuauuggacccugguugagcugggagacaaaauuacguucgaagccacaggcaaucucguggugccucgcuacgcguuugccauggagagaaacgcugggagcggaaucauuaucucugauacccccguccacaacugcaauacaaccugucagaccacaacgggcgccaucaacaccucccugccuuuccagaauauucaucccaucacaauuggcaagugcccgaaauauguuaagagcaccaaacuucggcuggcuacagggcuccgcaacgugccuucuauccagagcagaggacuguuuggcgccauugccggguucaucgaaggaggcuggaccgggaugguggacggaugguacggcuaucaccaccaaaaugagcagggcuccggguacgcugcggaccuuaagucuacgcagaacgccaucgauaagauuacaaauaaagucaacagcgugaucgaaaagaugaauacccaguuuaccgcuguuggaaaagaguucaaccaucuggagaagcggauugaaaaucucaacaagaaaguggacgauggcuuccuggacaucuggacauacaaugccgagcugcucguccugcuugaaaacgagcgcacccuggauuaucacgacuccaaugugaagaaccucuacgaaaaagucagaagccaacugaagaacaaugccaaagagauugggaacggauguuuugaguucuaucauaagugcgauaauacauguauggaaucugugaagaacggcacguacgacuaucccaaauacuccgaggaagcuaaacuuaaucgggaggaaaucgaugggguuaagcuggagagcacccgcaucuaucagauucucgccaucuacucuacaguggcguccagccugguccuggugguuucccucggcgcuauuucuuuuuggaugugcagcaacggaucccugcagugcagaaucuguauuuga

SEQ ID NO: 197222 - RNA, 1701 nt, Artificial Sequence; identical to SEQ ID NO: 195905
  derived and/or modified CDS sequence (opt5) from hemagglutinin__InfluenzaA__ADJ18173

SEQ ID NO: 197223 - RNA, 1701 nt, Artificial Sequence; identical to SEQ ID NO: 195905
  derived and/or modified CDS sequence (opt5) from hemagglutinin__InfluenzaA__ADJ18175

SEQ ID NO: 197224 - RNA, 1701 nt, Artificial Sequence
  derived and/or modified CDS sequence (opt5) from hemagglutinin__InfluenzaA__ADJ18177
augaaggccauccuggugguccuccuguacaccuucgcuacagccaacgcggacacgcuuugcauuggcuaucacgcuaauaacagcaccgauacaguugacaccgugcuggagaaaaaugugacagucacccauuccgugaaccuccuggaagauaagcacaaugggaaacuuuguaagcugagaggaguugcuccccuccaucugggcaaaugcaacaucgccggguggauucugggaaauccugagugugaaucucucagcacagccuccucuuggagcuacaucguggagaccuccucuagcgacaacggcacgugcuauccgggggauuuuauugacuacgaagaacugcgggagcagcuuuccagcgucucuuccuucgaacgcuuugagaucuuccccaagaccagcucuuggccuaaucacgauuccaacaagggagugacagccgcuuguccccaugccggcgcgaaaucuuuuuauaagaaucugaucuggcucguuaaaaagggcaacagcuacccuaaacuguccaagagcuauauuaaugacaaggggaaagaagugcuuguccuguggggaauccaccaccccuccaccucugccgaucaacagagccucuaccagaacgcugacgccuacguguucgugggcacauccagauauagcaagaaauuuaagccugagauugcuauccggccgaaaguccgcgggcaggagggaagaaugaauuacuauuggacccugguugaacccggcgauaagauuacguucgaggccacagggaaccugguggugccucgguacgcguuugccauggaacgcaacgcuggaucuggcaucauuaucuccgacacccccguccaugauugcaauacaaccugucaaaccccuaaaggcgccaucaacacaagccuccccuuccagaauauucacccgaucacgauugggaagugcccuaaguaugugaaaucuaccaagcugagacuugcuacaggacugcggaacauccccagcguucagucccgcggccucuuuggggccauugccggauucaucgagggcggguggaccggaaugguggacggcugguacggcuaucaucaccagaaugaacaagggucuggauacgcugcggaccugaaaagcacacagaacgccaucgauaagauuaccaauaaagucaacuccgugaucgagaagaugaauacgcaguuuacagcuguuggcaaggaguucaaccaccuugagaaaagaauugagaaucugaacaagaaaguggacgauggguuccucgacaucuggaccuacaaugccgaacugcugguccuccuggagaacgaacggacccuugauuaucaugacagcaaugugaagaaccuguacgagaaaguccgcucucagcucaagaacaaugccaaggagauuggaaacggcuguuuugaguucuaucacaaaugcgauaauacauguauggaauccgugaagaacgggaccuacgacuauccuaaauacagcgaagaggcuaagcugaauagagaagagaucgauggcguuaaacuugagucuacacggaucuaucaaauucuggccaucuacuccacgguggcgagcucccucguccuggugguuucucugggagcuauuagcuuuuggaugugcuccaacggcucucuccagugccgcaucuguauuuga

SEQ ID NO: 197225 - RNA, 1701 nt, Artificial Sequence
  derived and/or modified CDS sequence (opt5) from hemagglutinin__InfluenzaA__ADJ40444
augaaggccauccuggugguccuccuguacaccuucgcuacagccaacgcggacacgcuuugcauuggcuaucacgcuaauaacagcaccgauacaguugacaccgugcugaaaaagaaugugacagucacccauuccgugaaccuccuggaggauaaacacaaugggaaacuuuguaaacugagaggaguugcgccccuccaucugggcaagugcaacaucgccggguggauucugggaaauccugaaugugagucucucagcacagcuuccucuuggagcuacaucguggaaaccuccucuagcgacaacggcacgugcuauccgggggauuuuauugacuacgaggaacugcgggagcagcuuuccagcgucucuuccuucgagcgcuuugaaaucuuccccaagaccagcucuuggccuaaucacgauuccaacaaaggagugacagccgcuuguccccaugccggcgccaagagcuuuuauaaaaaucugaucuggcucguuaagaaaggcaacucuuacccuaagcuguccaagagcuauauuaaugacaaagggaaggaggugcuuguccuguggggaauccaccaccccuccaccucugccgaucaacagagccucuaccagaacgcugacgccuacguguucgugggcacauccagauauagcaaaaaguuuaaaccugaaauugcuauccggccgaagguccgcgaucaggaggggagaaugaauuacuauuggacccugguugagcccggagacaaaauuacguucgaagccacaggcaaccugguggugccucgguacgcguuugccauggagcgcaacgcugggucuggaaucauuaucuccgauacccccguccaugacugcaauacaaccugucaaaccccuaagggcgccaucaacacaagccuccccuuccagaauauucacccgaucacgauuggcaagugcccuaaauaugugaagucuaccaaacugagacuugcuacagggcugcggaacguucccagcauccagucccgcggacucuuuggcgccauugccggguucaucgaaggaggcuggaccgggaugguggacggaugguacggcuaucaucaccagaaugagcaaggcucuggguacgcugcggaucuuaagagcacacagaacgccaucgacgaaauuaccaauaaagucaacuccgugaucgagaagaugaauacgcaguuuacagcuguuggaaaggaguucaaccaccuggaaaagagaauugagaaucugaacaagaaaguggaugacggcuuccucgauaucuggaccuacaaugccgaacugcugguccuccuggagaacgaacggacccuugacuaucaugauagcaaugugaagaaccuguacgagaaaguccgcucucagcucaagaacaaugccaaggagauugggaacggauguuuugaguucuaucacaaaugcgacaauacauguauggaauccgugaagaacggcaccuacgauuauccuaaauacagcgaagaggcuaagcugaauagagaagagaucgacgggguuaaacuugagucuacacggaucuaucaaauucuggccaucuacuccacgguggcgagcucccucguccuggugguuucucugggcgcuauuagcuuuuggaugugcuccaacggaucucuccagugccgcaucuguauuuga

SEQ ID NO: 197226 - RNA, 1701 nt, Artificial Sequence
  derived and/or modified CDS sequence (opt5) from hemagglutinin__InfluenzaA__ADJ40454
augaaggccauccuggugguccuccuguacaccuucgcuacagccaacgcggacacgcuuugcauuggcuaucacgcuaauaacagcaccgauacaguugacaccgugcuggagaaaaaugugacagucacccauuccgugaaccuccuggaagauaagcacaaugggaaacuuuguaagcugagaggaguugcuccccuccaucugggcaaaugcaacaucgccggguggauucugggaaauccugagugugaaucucucagcacagccuccucuuggagcuacaucguggagaccuccucuagcgacaacggcacgugcuauccgggggauuuuauugacuacgaagaacugcgggagcagcuuuccagcgucucuuccuucgaacgcuuugagaucuuccccaagaccagcucuuggccuaaucacgauuccaacaagggagugacagccgcuuguccccaugccggcgcgaaauccuuuuauaagaaucugaucuggcucguuaaaaagggcaacucuuacccuaaacuguccaagagcuauauuaaugacaaggggaaagaagugcuuguccuguggggaauccaccaccccuccaccucugccgaucaacagagccucuaccagaacgcugacgccuacguguucgugggcacauccagauauagcaagaaauuuaagccugagauugcuauccggccgaaaguccgcaaucaggaggggagaaugaacuacuauuggacccugguugaacccggagauaagauuacguucgaggccacaggcaaccugguggugccucgguacgcguuugccauggaacgcaaugcugggucuggaaucauuaucuccgacacccccguccaugauugcaacacaaccugucaaaccccuaaaggcgccaucaauacaagccuccccuuccagaacauucacccgaucacgauuggcaagugcccuaaguaugugaaaucuaccaagcugagacuugcuacagggcugcggaauauccccagcauucagucccgcggacucuuuggcgccaucgccggguucaucgagggaggcuggaccgggaugguugacggaugguacggcuaucaucaccagaacgaacaaggcucuggguacgcugcggaccugaaaagcacacagaaugccauugauaagaucaccaacaaagugaauagcgucauugagaagaugaacacgcaguuuacagcugugggaaaggaguucaaucaccuugagaaaagaaucgagaaccugaauaagaaaguugacgauggcuuccucgacauuuggaccuacaacgccgaacugcuggugcuccuggagaaugaacggacccuugauuaucaugacagcaacgucaagaaccuguacgagaaagugcgcucucagcucaagaauaacgccaaggagaucgggaauggauguuuugaguucuaucacaaaugcgauaacacauguauggaauccgucaagaauggcaccuacgacuauccuaaauacagcgaagaggcuaagcugaacagagaagagaucgaugggguggagcuugaaucuacacggauuuaucaaauccuggccauuuacuccacgguugcgagcucccucgugcuggucgugucucugggcgcuaucagcuuuuggaugugcuccaauggaucucuccagugccgcauuuguaucuga

SEQ ID NO: 197227 - RNA, 1701 nt, Artificial Sequence
  derived and/or modified CDS sequence (opt5) from hemagglutinin__InfluenzaA__ADJ40464
augaaggccauccuggugguccuccuguacaccuucgcuacagccaacacggacacccuuugcauuggcuaucacgcgaauaacagcacagauaccguugacacagugcuggagaaaaaugugaccgucacacauuccgugaaccuccuggaagauaagcacaaugggaaacuuuguaagcugagaggaguugcuccccuccaucugggcaaaugcaacaucgccggguggauucugggaaauccugagugugaaucucucagcaccgccuccucuuggagcuacaucguggagacguccucuagcgacaacgggaccugcuauccgggcgauuuuauugacuacgaagaacugcgggagcagcuuuccagcgucucuuccuucgaacgcuuugagaucuuccccaagacaagcucuuggccuaaucacgauuccaacaagggagugaccgcugccuguccccaugcuggcgccaagagcuuuuauaagaaucugaucuggcucguuaaaaagggcaacucuuacccuaaacuguccaagagcuauauuaaugacaaggggaaagaagugcuuguccuguggggaauccaccaccccuccacaucugcggaucaacagagccucuaccagaacgccgacgcuuacguguucgugggcaccuccagauauagcaagaaauuuaagccugagauugccauccggccgaaaguccgcgaucaggaggggagaaugaauuacuauuggacgcugguugaacccggagacaagauuacauucgaggcuaccggcaaccugguggugccucgguacgccuuugcgauggaacgcaacgccgggucuggaaucauuaucuccgauacacccguccaugacugcaauaccaccugucaaacaccuaaaggcgcuaucaacacgagccuccccuuccagaauauucacccgaucaccauuggcaagugcccuaaguaugugaaaucuacaaagcugagacuugccaccgggcugcggaacguucccagcauccagucccgcggacucuuuggcgcuauugccggguucaucgagggaggcuggacagggaugguggacggaugguacggcuaucaucaccagaaugaacaaggcucuggguacgccgcugaucugaaaagcacccagaacgcgaucgacgagauuacgaauaaggucaacuccgugaucgagaaaaugaauacacaguuuaccgccguuggaaaggaguucaaccaccuugagaagagaauugaaaaucugaacaaaaagguggaugacggcuuccucgauaucuggaccuacaaugcugagcugcugauucuccuggaaaacgagcggacacuugacuaucaugauagcaaugucaaaaaccuguacgagaaggugcgcucucagcucaaaaacaaugccaaggaaaucgggaacggauguuuugaguucuaucacaagugcgacaauaccuguauggaauccgucaaaaacggcacauacgauuauccuaaguacagcgaggaagccaaacugaauagagaggagaucgacggggugaaacuugaaucuacgcggauuuaucaaauccuggcuauuuacuccaccguugccagcucccucgugcuggucgugucucugggcgcgaucagcuuuuggaugugcuccaacggaucucuccagugccgcauuuguaucuga

SEQ ID NO: 197228 - RNA, 1701 nt, Artificial Sequence
  derived and/or modified CDS sequence (opt5) from hemagglutinin__InfluenzaA__ADJ40474
augaaggccauccuggugguccuccuguacaccuucgcuacagccaacgcggacacgcuuugcauuggcuaucacgcuaauaacagcaccgauacaguugacaccgugcuggagaaaaaugugacagucacccauuccgugaaccuccuggaagauaagcacaaugggaaacuuuguaagcugagaggaguugcuccccuccaucugggcaaaugcaacaucgccggguggauucugggaaauccugagugugaaucucucagcacagccuccucuuggagcuacaucguggagaccuccucuagcgacaacggcacgugcuauccgggggauuuuauugacuacgaagaacugcgggagcagcuuuccagcgucucuuccuucgaacgcuuugagaucuuccccaagaccagcucuuggccuaaucacgauuccaacaagggagugacagccgcuuguccccaugccggcgcgaaaucuuuuuauaagaaucugaucuggcucguuaaaaagggcaacagcuacccuaaacuguccaagagcuauauuaaugacaaggggaaagaagugcuuguccuguggggaauccaccaccccuccaccucugccgaucaacagagccucuaccagaacgcugacgccuacguguucgugggcacauccagauauagcaagaaauuuaagccugagauugcuauccggccgaaaguccgcgagcaggaagggagaaugaauuacuauuggacccugguugagcccggagauaagauuacguucgaagccacaggcaaccugguggugccucgguacgcguuugccauggagcgcaacgcugggucuggaaucauuaucuccgacacccccguccaugauugcaauacaaccugucaaaccccuaaaggcgccaucaacacaagccuccccuuccagaauauucacccgaucacgauuggcaagugcccuaaguaugugaaaucuaccaagcugagacuugcuacagggcugcggaacguucccagcauccagucccgcggacucuuuggcgccauugccggguucaucgaaggaggcuggaccgggaugguggacggaugguacggcuaucaucaccagaaugagcaaggcucuggguacgcugcggaccugaaaagcacacagaacgccaucgaugagauuaccaauaaggucaacuccgugaucgaaaagaugaauacgcaguuuacagcuguuggaaaggaguucaaccaccuugaaaagagaauugagaaucugaacaaaaagguggacgauggcuuccucgacaucuggaccuacaaugccgaacugcugguccuccuggagaacgagcggacccuugauuaucaugacagcaaugugaaaaaccuguacgaaaagguccgcagacagcucaaaaacaaugccaaggagauugggaacggauguuuugaguucuaucacaagugcgauaauacauguauggagucugugaaaaacggcaccuacgacuauccuaaguacuccgaagaggcuaaacugaaucgggaggaaaucgaugggguuaaacuugagagcacacgcaucuaucaaauucuggccaucuacucuacgguggcguccagccucguccuggugguuucccugggcgcuauuucuuuuuggaugugcagcaacggaucccuccagugcagaaucuguauuuga

SEQ ID NO: 197229 - RNA, 1701 nt, Artificial Sequence
  derived and/or modified CDS sequence (opt5) from hemagglutinin__InfluenzaA__ADJ40494
augaaggccauccuggugguccuccuguacaccuucgcuacagccaacgcggacacgcuuugcauuggcuaucacgcuaauaacagcaccgauacaguugacaccgugcuggagaagaaugugacagucacccauuccguggaucuccuggaagacaagcacaacgggaaacuuuguaagcugagaggaguugcuccccuccaucugggcaaaugcaauaucgccggguggauucugggaaacccugagugugaaucucucagcacagccuccucuuggagcuacaucguggagaccuccucuagcgauaauggcacgugcuauccgggggacuuuauugauuacgaagaacugcgggagcagcuuuccagcgucucuuccuucgaacgcuuugagaucuuccccaagaccagcucuuggccuaaccacgacuccaauaagggagugacagccgcuuguccccaugccggcgcgaaaucuuuuuauaagacccugaucuggcucguuaaaaagggcaacagcuacccuaaacuguccaagagcuauauuaaugauaaggggaaagaagugcuuguccuguggggaauccaccaccccuccacaucugccgaccaacagagccucuaccagaacgcugaugccuacguguucgugggcaccuccagauauagcaagaaauuuaagccugagauugcuauccggccgaaaguccgcgaccaggaggggagaaugaauuacuauuggacgcugguugaacccggagauaagauuacauucgaggccaccggcaaccugguggugccucgguacgcguuugccauggaacgcaaugcugggucuggaaucauuaucuccgacacacccguccaugacugcaacaccaccugucaaacaccuaaaggcgccaucaacacgagccuccccuuccagaauauucacccgaucaccauuggcaagugcccuaaguaugugaaaucuacaaagcugagacuugcuaccgggcugcggaacguucccagcauccagucccgcggacucuuuggcgccauugccggguucaucgagggaggcuggacagggaugguggauggaugguacggcuaucaucaccagaaugaacaaggcucuggguacgcugcggaccugaaaagcacccagaacgccaucgaugagauuacgaauaaggucaacuccgugaucgagaaaaugaauacacaguuuaccgcuguuggaaaggaguucaaccaccuugagaagagaauugaaaaucugaacaaaaagguggacgauggcuuccucgacaucuggaccuacaaugccgagcugcugguccuccuggaaaacgagcggacacuugauuaucaugacagcaaugugaaaaaccuguacgagaagguccgcucucagcucaaaaauaacgccaaggaaauugggaacggauguuuugaguucuaucacaagugcgauaauaccuguauggaauccgugaaaaacggcacauacgacuauccuaaguacagcgaggaagcuaaacugaauagagaggagaucgaugggguuaaacuugaaucuacgcggaucuaucaaauucuggccaucuacuccaccguggcgagcucccucguccuggugguuucucugggcgcuauuagcuuuuggaugugcuccaacggaucucuccagugccgcaucuguauuuga

SEQ ID NO: 197230 - RNA, 1701 nt, Artificial Sequence
  derived and/or modified CDS sequence (opt5) from hemagglutinin__InfluenzaA__ADJ40514
augaaggccgugcuggucguucuccuguacaccuucgcuacaacgaacgccgacacccuuugcaucggcuaucacgcgaauaacagcacagauaccguggacacagugcuggagaaaaaugucaccgugacacauuccguuaaccuccuggaagauaagcacaaugggaaacuuuguaagcugagaggaguggcuccccuccaucugggcaaaugcaacauugccggguggauccugggaaauccugagugugaaucucucagcaccgccuccucuuggagcuacauugucgagacguccucuagcgacaacggaaccugcuauccgggggauuuuaucgacuacgaagaacugcgggagcagcuuuccagcgugucuuccuucgaacgcuuugagauuuuccccaagacaagcucuuggccuaaucacgauuccaacaagggaguuaccgcugccuguccccaugcuggcgccaagagcuuuuauaagaaucugaucuggcucgugaaaaagggcaacucuuacccuaaacuguccaagagcuauaucaaugacaaggggaaagaaguccuugugcuguggggcauucaccaccccuccacaucugcggaucaacagagccucuaccagaacgccgacgcuuacguguucgucggcaccuccagauauagcaagaaauuuaagccugagaucgccauucggccgaaaguucgcaaucaggaggggagaaugaacuacuauuggacgcugguggaacccggagauaagaucacauucgaggcuaccggcaaccugguggucccucgguacgccuuugcgauggaacgcaaugccgggucuggaauuaucauuuccgacacacccgugcaugauugcaacaccaccugucaaacaccuaaaggcgcuaucaauacgagccuccccuuccagaacauccacccgauuaccaucggcaagugcccuaaguauguuaaaucuacaaagcugagacuugccaccgggcugcggaaugugcccagcauucagucccgcggacucuuuggcgcuaucgccggguucauugagggaggcuggacagggauggucgacggaugguacggcuaucaucaccagaacgaacaaggcucuggguacgccgcugaccugaaaagcacccagaaugcgaucgaugagaucacgaacaagguuaauuccgugauugagaaaaugaacacacaguuuaccgccgugggaaaggaguucaaucaccuugagaagagaaucgaaaaccugaauaaaaaggucgacgauggcuuccucgacauuuggaccuacaacgcugagcugcuggugcuccuggaaaaugagcggacacuugauuaucaugacagcaacgucaaaaaccuguacgagaaggugcgcucucagcucaaaaauaacgccaaggaaaucgggaauggauguuuugaguucuaucacaagugcgauaacaccuguauggaauccguuaaaaauggcacauacgacuauccuaaguacagcgaggaagccaaacugaacagagaggagauugauggggugaaacuugaaucuacgcggaucuaucaaauccuggcuauuuacuccaccgucgccagcucccucgugcugguugugucucugggcgcgaucagcuuuuggaugugcuccaauggaucucuccagugccgcauuuguaucuga

SEQ ID NO: 197231 - RNA, 1701 nt, Artificial Sequence; identical to SEQ ID NO: 194741
  derived and/or modified CDS sequence (opt5) from hemagglutinin__InfluenzaA__ADJ40524

SEQ ID NO: 197232 - RNA, 1701 nt, Artificial Sequence; identical to SEQ ID NO: 195094
  derived and/or modified CDS sequence (opt5) from hemagglutinin__InfluenzaA__ADJ40534

SEQ ID NO: 197233 - RNA, 1701 nt, Artificial Sequence
  derived and/or modified CDS sequence (opt5) from hemagglutinin__InfluenzaA__ADJ40554
augaaggccauccuggugguccuccuguacaccuucgcuacagccaacgcggacacgcuuugcauuggcuaucacgcuaauaacagcaccgauacaguugacaccgugcuggagaaaaaugugacagucacccauuccgugaaccuccuggaagauaagcacaaugggaaacuuuguaagcugagaggaguugcgccccuccaucugggcaaaugcaacaucgccggguggauucugggaaauccugagugugaaucucucagcacagcuuccucuuggagcuacaucguggagaccuccucuagcgacaacggcacgugcuauccgggggauuuuauugacuacgaagaacugcgggagcagcuuuccagcgucucuuccuucgaacgcuuugagaucuuccccaauaccagcucuuggccuaaccacgauuccaauaagggagugacagccgcuuguccccaugccggcgccaagagcuuuuauaaaaaccugaucuggcucguuaagaaaggcaauucuuacccuaagcuguccaaaagcuauauuaacgacaaggggaaggaagugcuuguccuguggggaauccaccaccccuccaccucugccgaucaacagagccucuaccagaaugcugacgccuacguguucgugggcacauccagauauagcaaaaaguuuaaaccugagauugcuauccggccgaagguccgcgaucaggaggggagaaugaacuacuauuggacccugguugaacccggagacaaaauuacguucgaggccacaggcaaccugguggugccucgguacgcguuugccauggaacgcaaugcugggucuggaaucauuaucuccgauacccccguccaugacugcaacacaaccugucaaaccccuaagggcgccaucaauacaagccuccccuuccagaacauucacccgaucacgauuggcaaaugcccuaaguaugugaagucuaccaaacugagacuugcuacagggcugcggaauguucccagcauccagucccgcggacucuuuggcgccauugccggguucaucgagggaggcuggaccgggaugguggacggaugguacggcuaucaucaccagaacgaacaaggcucuggguacgcugcggaucuuaagagcacacagaaugccaucgacgagauuaccaacaaagucaauuccgugaucgagaagaugaacacgcaguuuacagcuguuggaaaagaguucaaucaccuggagaagagaauugaaaaccugaauaagaaaguggaugacggcuuccucgauaucuggaccuacaacgccgagcugcugguccuccuggaaaaugagcggacccuugacuaucaugauagcaacgugaagaaccuguacgagaaaguccgcucucagcucaagaauaacgccaaagaaauugggaauggauguuuugaguucuaucacaagugcgacaacacauguauggaauccgugaagaauggcaccuacgauuauccuaaauacagcgaggaagcuaagcugaacagagaggagaucgacgggguuaaacuugaaucuacacggaucuaucaaauucuggccaucuacuccacgguggcgagcucccucguccuggugguuucucugggcgcuauuagcuuuuggaugugcuccaauggaucucuccagugccgcaucuguauuuga

SEQ ID NO: 197234 - RNA, 1701 nt, Artificial Sequence; identical to SEQ ID NO: 194741
  derived and/or modified CDS sequence (opt5) from hemagglutinin__InfluenzaA__ADJ40564

SEQ ID NO: 197235 - RNA, 1701 nt, Artificial Sequence; identical to SEQ ID NO: 194741
  derived and/or modified CDS sequence (opt5) from hemagglutinin__InfluenzaA__ADJ40574

SEQ ID NO: 197236 - RNA, 1701 nt, Artificial Sequence; identical to SEQ ID NO: 196161
  derived and/or modified CDS sequence (opt5) from hemagglutinin__InfluenzaA__ADJ40584

SEQ ID NO: 197237 - RNA, 1701 nt, Artificial Sequence; identical to SEQ ID NO: 194741
  derived and/or modified CDS sequence (opt5) from hemagglutinin__InfluenzaA__ADJ40594

SEQ ID NO: 197238 - RNA, 1701 nt, Artificial Sequence; identical to SEQ ID NO: 195310
  derived and/or modified CDS sequence (opt5) from hemagglutinin__InfluenzaA__ADJ40604

SEQ ID NO: 197239 - RNA, 1701 nt, Artificial Sequence; identical to SEQ ID NO: 195310
  derived and/or modified CDS sequence (opt5) from hemagglutinin__InfluenzaA__ADJ40614

SEQ ID NO: 197240 - RNA, 1701 nt, Artificial Sequence; identical to SEQ ID NO: 194741
  derived and/or modified CDS sequence (opt5) from hemagglutinin__InfluenzaA__ADJ40634

SEQ ID NO: 197241 - RNA, 1701 nt, Artificial Sequence; identical to SEQ ID NO: 194741
  derived and/or modified CDS sequence (opt5) from hemagglutinin__InfluenzaA__ADJ40644

SEQ ID NO: 197242 - RNA, 1701 nt, Artificial Sequence; identical to SEQ ID NO: 194741
  derived and/or modified CDS sequence (opt5) from hemagglutinin__InfluenzaA__ADJ40654

SEQ ID NO: 197243 - RNA, 1701 nt, Artificial Sequence; identical to SEQ ID NO: 194741
  derived and/or modified CDS sequence (opt5) from hemagglutinin__InfluenzaA__ADJ40664

SEQ ID NO: 197244 - RNA, 1701 nt, Artificial Sequence; identical to SEQ ID NO: 194741
  derived and/or modified CDS sequence (opt5) from hemagglutinin__InfluenzaA__ADJ40674

SEQ ID NO: 197245 - RNA, 1701 nt, Artificial Sequence
  derived and/or modified CDS sequence (opt5) from hemagglutinin__InfluenzaA__ADJ41816
augaagaccaucauugcccugagcuacauguucugccucguguuugcucagaaccugcccggcaaugacaacuccacagccacgcuuugucuggggcaccaugcggucccuaauggaacccucguuaaaacaaucaccaacgaucaaauugaggugacaaaugcuaccgaacuggugcagucuagcuccacaggcagaaucugcgacucuccgcaccggauucuugaugggaagaacuguacccugaucgacgcccuccugggagauccccauugcgacggcuuccagaaugagaaaugggaucuguuugucgaacgcagcaaggccuucuccaacuguuauccuuacgacgugcccgauuaugcuucucucagaagccugguugccuccagcgggacgcuugaguuuaucaaugaaggauucaacuggaccggcgugacacagucuggcggguccugcaccuguaaacggggaagcaaugacagcuuuuucucccgccugaacuggcucuacgagagcgagucuaaguauccuguccugaaugugacaaugcccaacaauggcaaguuugauaaacuuuacauuugggggauccaccauccuuccaccgacaaggaacaaacgaaccuguauauuagagcuagcggacggguuacaguguccaccaaacgcucucagcagacagucaucccgaacauuggcagcagacccugggugcgggggcucuccagccgcaucucuauuuacuggaccaucgugaagccuggagauauccugcugauuuccagcaccggcaaucucaucgcccccagaggcuacuucaaaauucggacagggaagucuagcaucaugcgcuccgacgcgccuauuggaacgugcucuagcgaguguaucacccccaacggcuccaucccgaaugacaagccuuuucagaacgucaauaaaauuacauauggggccugccccagauacguuaagcaaaacacccugaaacuugcuacaggaaugcggaaugugccugaaaagcagacccgcggcaucuucggggccauugcuggauuuaucgagaacggcugggagggcaugguggaugggugguauggauucagacaccagaauagcgaaggcacggggcaggccgcggaccugaaaucuacacaagccgcuauugaucagaucaacggaaagcucaaucgggucaucgagaaaaccaacgaaaaguuccaccagauugagaaggaauuuuccgagguggagggcagaauccaagaccuggaaaaauacguugaggauaccaagauugaccuuuggagcuauaaugccgaacugcucguggcucuggagaaccagcauacaaucgaucugaccgacucugaaaugaauaaacucuucgagaagacacgcaaacagcugcgggagaacgccgaagauauggggaacggcuguuuuaagauuuaccacaagugcgacaaugccugcaucggauccauuagaaacggcacguaugaucaugacgucuaccgcgacgaggcucuuaauaaccgguuccagaucaaagggguggaacugaagucuggauacaaagauuggauccucuggauuuccuuugcgaucucuuguuuccugcuuugcguugugcugcucggcuuuauuaugugggccugucaaaaggggaauaucagaugcaacauuuguaucuga

SEQ ID NO: 197246 - RNA, 1701 nt, Artificial Sequence; identical to SEQ ID NO: 194741
  derived and/or modified CDS sequence (opt5) from hemagglutinin__InfluenzaA__ADJ56640

SEQ ID NO: 197247 - RNA, 1701 nt, Artificial Sequence; identical to SEQ ID NO: 195539
  derived and/or modified CDS sequence (opt5) from hemagglutinin__InfluenzaA__ADJ56650

SEQ ID NO: 197248 - RNA, 1701 nt, Artificial Sequence; identical to SEQ ID NO: 194832
  derived and/or modified CDS sequence (opt5) from hemagglutinin__InfluenzaA__ADJ67983

SEQ ID NO: 197249 - RNA, 1701 nt, Artificial Sequence; identical to SEQ ID NO: 194832
  derived and/or modified CDS sequence (opt5) from hemagglutinin__InfluenzaA__ADJ67984

SEQ ID NO: 197250 - RNA, 1701 nt, Artificial Sequence; identical to SEQ ID NO: 194832
  derived and/or modified CDS sequence (opt5) from hemagglutinin__InfluenzaA__ADJ67985

SEQ ID NO: 197251 - RNA, 1701 nt, Artificial Sequence
  derived and/or modified CDS sequence (opt5) from hemagglutinin__InfluenzaA__ADJ80241
augaaggccauccuggugguccuccuguacaccuucgcuacagccaacgcggacacgcuuugcauuggcuaucacgcuaauaacagcaccgauacaguugacaccgugcuggagaaaaaugugacagucacccauuccgugaaccuccuggaagauaagcacaaugggaaacuuuguaagcugagaggaguugcuccccuccaucugggcaaaugcaacaucgccggguggauucugggaaauccugagugugaaucucucagcacagccuccucuuggagcuacaucguggagaccuccucuagcgacaacggcacgugcuauccgggggauuuuauugacuacgaagaacugcgggagcagcuuuccagcgucucuuccuucgaacgcuuugagaucuuccccaagaccagcucuuggccuaaucacgauuccaacaagggagugacagccgcuuguccccaugccggcgcgaaaucuuuuuauaagaaucugaucuggcucguuaaaaagggcaacagcuacccuaaacuguccaagagcuauauuaaugacaaggggaaagaagugcuuguccuguggggaauccaccaccccuccaccucugccgaucaacagagccucuaccagaacgcugacgccuacguguucgugggcacauccagauauagcaagaaauuuaagccugagauugcuauccggccgaaaguccgcaaucaggaggggagaaugaacuacuauuggacccugguugaacccggagauaagauuacguucgaggccacaggcaaccugguggugccucgguacgcguuugccauggaacgcaaugcugggucuggaaucauuaucuccgacacccccguccaugauugcaacacaaccugucaaaccccuaaaggcgccaucaauacaagccuccccuuccagaacauucacccgaucacgauuggcaagugcccuaaguaugugaaaucuaccaagcugagacuugcuacagggcugcggaauguucccagcauccagucccgcggacucuuuggcgccauugccggguucaucgagggaggcuggaccgggaugguggacggaugguacggcuaucaucaccagaacgaacaaggcucuggguacgcugcggaccugaaaagcacacagaaugccaucgauaagauuaccaacaaagucaauuccgugaucgagaagaugaacacgcaguuuacagcuguuggaaaggaguucaaucaccuugagaaaagaauugagaaccugaauaagaaaguggacgauggcuuccucgacaucuggaccuacaacgccgaacugcugguccuccuggagaaugaacggacccuugauuaucaugacagcaacgugaagaaccuguacgagaaaguccgcucucagcucaagaauaacgccaaggagauugggaauggauguuuugaguucuaucacaaaugcgauaacacauguauggaauccgugaagaauggcaccuacgacuauccuaaauacagcgaagaggcuaagcugaacagagaagagaucgaugggguuaaacuugagucuacacggaucuaucaaauucuggccaucuacuccacgguggcgagcucccucguccuggugguuucucugggcgcuauuagcuuuuggaugugcuccaauggaucucuccagugccgcaucuguauuuga

SEQ ID NO: 197252 - RNA, 1701 nt, Artificial Sequence
  derived and/or modified CDS sequence (opt5) from hemagglutinin__InfluenzaA__ADJ80242
augaaggccauccuggugguccuccuguacaccuucgcuacagccaacgcggacacgcuuugcauuggcuaucacgcuaauaacagcaccgauacaguugacaccgugcuggagaagaaugugacagucacccauuccgugaaccuccuggaagauaagcacaaugggaaacuuuguaagcugagaggaguugcuccccuccaucugggcaaaugcaacaucgccggguggauucugggaaauccugagugugaaucucucagcacagccuccucuuggagcuacaucguggagaccuccucuagcgacaacggcacgugcuauccgggggauuuuauugacuacgaagaacugcgggagcagcuuuccagcgucucuuccuucgaacgcuuugagaucuuccccaagaccagcucuuggccuaaucacgauuccaacaagggagugacagccgcuuguccccaugccggcgcgaaaucuuuuuauaagaaucugaucuggcucguuaaaaagggcaacagcuacccuaaacuguccaagagcuauauuaaugacaaggggaaagaagugcuuguccuguggggaauccaccaccccuccaccucugccgaucaacagagccucuaccagaacgcugacgccuacguguucgugggcacauccagauauagcaagaaauuuaagccugagauugcuauccggccgaaaguccgcgaucaggaggggagaaugaauuacuauuggacccugguugaacccggagacaagauuacguucgaggccacaggcaaccugguggugccucgguacgcguuugccauggaacgcaacgcugggucuggaaucauuaucuccgauacccccguccaugacugcaauacaaccugucaaaccccuaaaggcgccaucaacacaagccuccccuuccagaauauucacccgaucacgauuggcaagugcccuaaguaugugaaaucuaccaagcugagacuugcuacagggcugcggaacguucccagcauccagucccgcggacucuuuggcgccauugccggguucaucgagggaggcuggaccgggaugguggacggaugguacggcuaucaucaccagaaugaacaaggcucuggguacgcugcggaucugaaaagcacacagaacgccaucgacgagauuaccaauaaggucaacuccgugaucgagaaaaugaauacgcaguuuacagcuguuggaaaggaguucaaccaccuugagaagagaauugaaaaucugaacaaaaagguggaugacggcuuccucgauaucuggaccuacaaugccgagcugcugguccuccuggaaaacgagcggacccuugacuaucaugauagcaaugugaaaaaccuguacgagaagguccgcucucagcucaaaaacaaugccaaggaaauugggaacggauguuuugaguucuaucacaagugcgacaauacauguauggaauccgugaaaaacggcaccuacgauuauccuaaguacagcgaggaagcuaaacugaauagagaggagaucgacgggguuaaacuugaaucuacacggaucuaucaaauucuggccaucuacuccacggcggcuagcucccucgugcuggucgugucucugggcgccauuagcuuuuggaugugcuccaacggaucucuccagugccgcaucuguauuuga

SEQ ID NO: 197253 - RNA, 1701 nt, Artificial Sequence; identical to SEQ ID NO: 196293
  derived and/or modified CDS sequence (opt5) from hemagglutinin__InfluenzaA__ADJ80243

SEQ ID NO: 197254 - RNA, 1701 nt, Artificial Sequence; identical to SEQ ID NO: 194741
  derived and/or modified CDS sequence (opt5) from hemagglutinin__InfluenzaA__ADJ80634

SEQ ID NO: 197255 - RNA, 1701 nt, Artificial Sequence; identical to SEQ ID NO: 196743
  derived and/or modified CDS sequence (opt5) from hemagglutinin__InfluenzaA__ADJ80644

SEQ ID NO: 197256 - RNA, 1701 nt, Artificial Sequence; identical to SEQ ID NO: 196743
  derived and/or modified CDS sequence (opt5) from hemagglutinin__InfluenzaA__ADJ80654

SEQ ID NO: 197257 - RNA, 1701 nt, Artificial Sequence; identical to SEQ ID NO: 195905
  derived and/or modified CDS sequence (opt5) from hemagglutinin__InfluenzaA__ADJ80674

SEQ ID NO: 197258 - RNA, 1701 nt, Artificial Sequence; identical to SEQ ID NO: 195905
  derived and/or modified CDS sequence (opt5) from hemagglutinin__InfluenzaA__ADJ80684

SEQ ID NO: 197259 - RNA, 1701 nt, Artificial Sequence
  derived and/or modified CDS sequence (opt5) from hemagglutinin__InfluenzaA__ADJ80694
augaaggccauccuggugguccuccuguacaccuucgcuacagccaacgcggacacgcuuugcauuggcuaucacgcuaauaacagcaccgauacaguugacaccgugcuggagaaaaaugugacagucacccauuccgugaacauccucgaagauaaucacaacgggaagcuguguaaacuuagaggaguugcgccccugcaucucggcaagugcaauauugccggguggauccugggaaacccugagugugaaucucugagcacagcuuccucuuggagcuacauuguggagaccuccucuagcgacaauggcacgugcuauccgggggauuuuaucgacuacgaagaacuccgggagcagcuguccagcgucucuuccuucgaacgcuuugagaucuuccccaaaaccagcucuuggccuaaccacgauuccaauaagggagugacagccgcuuguccccaugccggcgccaagagcuuuuauaaaaaccuuauuuggcugguuaagaaaggcaauucuuacccuaagcucuccaaaagcuauaucaacgacaaggggaaggaagugcugguccuuuggggcauucaccaccccuccaccucugccgaucaacagagccuguaccagaaugcugacgccuacguguucgugggauccagcagauauucuaaaaaguuuaaaccugagaucgcuauucggccgaagguccgcgaucaggaggggagaaugaacuacuauuggacacucguugaacccggagacaaaaucaccuucgaggccacgggcaaccugguggugccucgguacgcguuugccauggaacgcaaugcuggguccggaauuaucaucagcgauacacccguccaugacugcaacaccacaugucaaaccccuaagggcgccauuaauaccucucugcccuuccagaacauccacccgauuacaaucggcaaaugcccuaaguauguuaagagcacgaaacucagacuggcuaccgggcuucggaaugugcccuccauucagucucgcggacuguuuggcgccaucgccggguucaucgagggaggcuggacagggaugguggacggaugguacggcuaucaucaccagaacgaacaaggcagcggguacgcugcggaucucaaguccacccagaaugccauugacgagaucacaaacaaagucaauagcgugauugagaagaugaacacccaguuuacggcuguuggaaaagaguucaaucaccuggagaagagaaucgaaaaccuuaauaagaaaguggaugacggcuuccuggauauuuggacauacaacgccgagcuccugguccugcucgaaaaugagcggacccuggacuaucaugauucuaacgugaagaaccuuuacgagaaaguccgcucccagcugaagaauaacgccaaagaaguggggaauggauguuuugaguucuaucacaagugcgacaacaccuguauggaaagcguuaagaauggcacauacgauuauccuaaauacucugaggaagcuaagcucaacagagaggagaucgacggggugaaacuggaauccacccggaucuaucaaauucuugccaucuacagcacagcggcuuccucucugguccucgugguuagccugggcgccauuuccuuuuggaugugcucuaauggaagccugcagugccgcaucuguauuuga

SEQ ID NO: 197260 - RNA, 1701 nt, Artificial Sequence; identical to SEQ ID NO: 195905
  derived and/or modified CDS sequence (opt5) from hemagglutinin__InfluenzaA__ADJ80704

SEQ ID NO: 197261 - RNA, 1701 nt, Artificial Sequence
  derived and/or modified CDS sequence (opt5) from hemagglutinin__InfluenzaA__ADJ80714
augaaggccauccuggugguccuccuguacaccuucgcuacagccaacgcggacacgcuuugcauuggcuaucacgcuaauaacagcaccgauacaguugacaccgugcuggagaaaaaugugacagucacccauuccgugaaccuccuggaagauaagcacaaugggaaacuuuguaagcugagaggagccgcuccccuccaucugggcaaaugcaacaucgccggguggauucugggaaauccugagugugaaucucucagcacagccuccucuuggagcuacaucguugagaccuccucuagcgacaacggcacgugcuauccgggggauuuuauugacuacgaagaacugcgggagcagcuuuccagcgugucuuccuucgaacgcuuugagaucuuccccaagaccagcucuuggccuaaucacgauuccaacaagggagucacagcugccuguccccaugcgggcgccaagagcuuuuauaaaaaucugaucuggcucgugaaaaagggcaacucuuacccuaaacuguccaagagcuauauuaaugacaaggggaaagaaguucuugugcuguggggaauccaccaccccuccaccucugcugaucaacagagccucuaccagaacgccgacgcuuacgucuucgugggcacauccagauauagcaagaaauuuaagccugagauugccauccggccgaaagugcgcgaucaggaggggagaaugaauuacuauuggacccuggucgaacccggagacaagauuacguucgaggcgacaggcaaccugguugugccucgguacgccuuugcuauggaacgcaacgccgggucuggaaucauuaucuccgauacccccgugcaugacugcaauacaaccugucaaaccccuaaaggcgcuaucaacacaagccuccccuuccagaauauucacccgaucacgauuggcaagugcccuaaguaugucaaaucuaccaagcugagacuugccacagggcugcggaacgugcccagcauccagucccgcggacucuuuggcgccauugcuggguucaucgagggaggcuggaccgggaugguugacggaugguacggcuaucaucaccagaaugaacaaggcucuggguacgcggccgaucugaaaagcacacagaacgcuaucgacaagauuaccaauaaagugaacuccgucaucgagaagaugaauacgcaguuuacagccgugggaaaggaguucaaccaccuugagaaaagaauugagaaucugaacaagaaaguugaugacggcuuccucgauaucuggaccuacaaugccgaacugcuggugcuccuggagaacgaacggacccuugacuaucaugauagcaaugucaagaaccuguacgagaaagugcgcucucagcucaagaacaaugcuaaggagauugggaacggauguuuugaguucuaucacaaaugcgacaauacauguauggaauccgucaagaacggcaccuacgauuauccuaaauacagcgaagaggccaagcugaauagagaagagaucgacggggugaaacuugagucuacacggaucuaucaaauucuggcgaucuacuccacgguugcuagcucccucgugcuggucgugucucugggcgccauuagcuuuuggaugugcuccaacggaucucuccagugccgcaucuguauuuga

SEQ ID NO: 197262 - RNA, 1701 nt, Artificial Sequence; identical to SEQ ID NO: 194741
  derived and/or modified CDS sequence (opt5) from hemagglutinin__InfluenzaA__ADJ80724

SEQ ID NO: 197263 - RNA, 1701 nt, Artificial Sequence; identical to SEQ ID NO: 195905
  derived and/or modified CDS sequence (opt5) from hemagglutinin__InfluenzaA__ADJ80734

SEQ ID NO: 197264 - RNA, 1701 nt, Artificial Sequence; identical to SEQ ID NO: 195905
  derived and/or modified CDS sequence (opt5) from hemagglutinin__InfluenzaA__ADJ80744

SEQ ID NO: 197265 - RNA, 1701 nt, Artificial Sequence; identical to SEQ ID NO: 195905
  derived and/or modified CDS sequence (opt5) from hemagglutinin__InfluenzaA__ADJ80754

SEQ ID NO: 197266 - RNA, 1701 nt, Artificial Sequence
  derived and/or modified CDS sequence (opt5) from hemagglutinin__InfluenzaA__ADJ80774
augaaggccauccuggugguccuccuguacaccuucgcuacagccaacgcggacacgcuuugcauuggcuaucacgcuaauaacagcaccgauacaguugacaccgugcuggagaaaaaugugacagucacccauuccgugaacauccucgaagauaagcacaaugggaaacuguguaaacuuagaggaguugcuccccugcaucucggcaagugcaacauugccggguggauccugggaaauccugagugugaaucucugagcacagccaacuccuggucuuacauuguggagaccagcuccucugacaauggcacgugcuauccgggggauuuuaucgacuacgaagaacuccgggagcagcugagcuccgucagcucuuucgaacgcuuugagaucuuccccaagaccuccagcuggccuaaccacgauucuaauaagggagugacagccgcuuguccccaugccggcgcgaaauccuuuuauaagaaccuuauuuggcugguuaaaaagggcaauagcuacccuaaacucucuaaguccuauaucaacgacaaggggaaagaagugcugguccuuuggggcauucaccaccccagcaccuccgccgaucaacagucucuguaccagaaugcugacgccuacguguucgugggaagcuccagauauagcaagaaauuuaagccugagaucgcuauucggccgaaaguccgcgaucaggaggggagaaugaacuacuauuggacacucguugaacccggagacaagaucaccuucgaggccacgggcaaccugguggugccucgguacgcguuugccauggaacgcaaugcugggucuggaauuaucaucuccgauacacccguccaugacugcaacaccacaugucaaaccccuaaaggcgccauuaauaccagccugcccuuccagaacauccacccgauuacaaucggcaagugcccuaaguaugugaaaucuacgaagcucagacuggcuaccgggcuucggaauguucccagcauucagucccgcggacuguuuggcgccaucgccggguucaucgagggaggcuggacagggaugguggacggaugguacggcuaucaucaccagaacgaacaaggcucuggguacgcugcggaucucaaaagcacccagaaugccauugacgagaucacaaacaaggucaauuccgugauugagaaaaugaacacccaguuuacggcuguuggaaaggaguucaaucaccuggagaagagaaucgaaaaccuuaauaaaaagguggaugacggcuuccuggauauuuggacauacaacgccgagcuccugguccugcucgaaaaugagcggacccuggacuaucaugauagcaacgugaaaaaccuuuacgagaagguccgcucucagcugaaaaauaacgccaaggaaguggggaauggauguuuugaguucuaucacaagugcgacaacaccuguauggaauccguuaaaaauggcacauacgauuauccuaaguacagcgaggaagcuaaacucaacagagaggagaucgacggggugaagcuggaaucuacccggaucuaucaaauucuugccaucuacuccacagcggcuagcucccugguccucgugguuucucugggcgccauuagcuuuuggaugugcuccaauggaucucugcagugccgcaucuguauuuga

SEQ ID NO: 197267 - RNA, 1701 nt, Artificial Sequence
  derived and/or modified CDS sequence (opt5) from hemagglutinin__InfluenzaA__ADJ80784
augaaggccauccuggugguccuccuguacaccuucgcuacagccaacgcggacacgcuuugcauuggcuaucacgcuaauaacagcaccgauacaguugacaccgugcuggagaaaaaugugacagucacccauuccgugaaccuccuggaagauaagcacaaugggaaacuuuguaagcugagaggaguugcuccccuccaucugggcaaaugcaacaucgccggguggauucugggaaauccugagugugaaucucucagcacagccuccucuuggagcuacaucguggagaccuccucuagcgacaacggcacgugcuauccgggggauuuuauugacuacgaagaacugcgggagcagcuuuccagcgucucuuccuucgaacgcuuugagaucuuccccaagaccagcucuuggccuaaucacgauuccaacaagggagugacagccgcuuguccccaugccggcgcgaaaucuuuuuauaagaaucugaucuggcucguuaaaaagggcaacagcuacccuaaacuguccaagagcuauauuaaugacaaggggaaagaagugcuuguccuguggggaauccaccaccccuccaccucugccgaucaacagagccucuaccagaacgcugacgccuacguguucgugggcacauccagauauagcaagaaauuuaagccugagauugcuauccggccgaaaguccgcgaucaggaggggagaaugaauuacuauuggacccugguugaacccggagacaagauuacguucgaggccacaggcaaccugguggugccucgguacgcguuugccauggaacgcaacgcugggucuggaaucauuaucuccgauacccccguccaugacugcaauacaaccugucaaaccccuaaaggcgccaucaacacaagccuccccuuccacaauauucauccgaucacgauuggcaagugcccuaaguaugugaaaucuaccaagcugagacuugcuacagggcugcggaacguucccagcauccagucccgcggacucuuuggcgccauugccggguucaucgagggaggcuggaccgggaugguggacggaugguacggcuaucaccaccagaaugaacagggcucuggguacgcugcggaucugaaaagcacacaaaacgccaucgacaagauuaccaauaaagucaacuccgugaucgagaagaugaauacgcaguuuacagcuguuggaaaggaguucaaccaucuugagaaaagaauugagaaucugaacaagaaaguggaugacggcuuccucgauaucuggaccuacaaugccgaacugcugguccuccuggagaacgaacggacccuugacuaucacgauagcaaugugaagaaccuguacgagaaaguccgcucucagcucaagaacaaugccaaggagauugggaacggauguuuugaguucuaucauaaaugcgacaauacauguauggaauccgugaagaacggcaccuacgauuauccuaaauacagcgaagaggcuaagcugaauagagaagagaucgacgggguuaaacuugagucuacacggaucuaucagauucuggccaucuacuccacgguggcgagcucccucguccuggugguuucucugggcgcuauuagcuuuuggaugugcuccaacggaucucuccaaugccgcaucuguauuuga

SEQ ID NO: 197268 - RNA, 1701 nt, Artificial Sequence; identical to SEQ ID NO: 195905
  derived and/or modified CDS sequence (opt5) from hemagglutinin__InfluenzaA__ADJ80794

SEQ ID NO: 197269 - RNA, 1701 nt, Artificial Sequence; identical to SEQ ID NO: 196743
  derived and/or modified CDS sequence (opt5) from hemagglutinin__InfluenzaA__ADJ80804

SEQ ID NO: 197270 - RNA, 1701 nt, Artificial Sequence
  derived and/or modified CDS sequence (opt5) from hemagglutinin__InfluenzaA__ADJ80814
augaaggccauccuggugguccuccuguacaccuucgcuacagccaacgcggacacgcuuugcauuggcuaucacgcuaauaacagcaccgauacaguugacaccgugcuggagaaaaaugugacagucacccauuccgugaaccuccuggaagauaagcacaaugggaaacuuuguaagcugagaggaguugcuccccuccaucugggcaaaugcaacaucgccggguggauucugggaaauccugagugugaaucucucagcacagccuccucuuggagcuacaucguggagaccuccucuagcgacaacggcacgugcuauccgggggauuuuauugacuacgaagaacugcgggagcagcuuuccagcgucucuuccuucgaacgcuuugagaucuuccccaagaccagcucuuggccuaaucacgauuccaacaagggagugacagccgcuugucccagagccggcgcgaaaucuuuuuauaagaaucugaucuggcucguuaaaaagggcaacagcuacccuaaacuguccaagagcuauauuaaugacaaggggaaagaagugcuuguccuguggggaauccaucaccccuccaccucugccgaucaacagagccucuaccagaacgcugacgccuacguguucgugggcacaucccgguauagcaagaaauuuaagccugagauugcuauccgcccgaaagucagagaucaggaggggcggaugaauuacuauuggacccugguugaacccggagacaagauuacguucgaggccacaggcaaccugguggugccucgcuacgcguuugccaucgaaagaaacgcugggucuggaauuaucaucuccgauacccccguccacgacugcaauacaaccugucaaaccccuaaaggcgccauuaacacaagccuccccuuccagaauauccauccgauuacgaucggcaagugcccuaaguaugugaaaucuaccaagcugcggcuugcuacagggcugcgcaacguucccagcauucaguccagaggacucuuuggcgccaucgccggguucaucgagggaggcuggaccgggaugguggacggaugguacggcuaucaccaucagaaugaacaaggcucuggguacgcugcggaucugaaaagcacacagaacgccauugacaagaucaccaauaaagucaacuccgugauugagaagaugaauacgcaguuuacagcuguuggaaaggaguucaaccaccuugaaaaacggaucgagaaucugaacaagaaaguggaugacggcuuccucgauauuuggaccuacaaugccgaacugcugguccuccuggagaacgaacgcacccuugacuaucacgauagcaaugugaagaaccuguacgagaaagucagaucucagcucaagaacaaugccaaggagaucgggaacggauguuuugaguucuaucauaaaugcgacaauacauguauggaguccgugaagaacggcaccuacgauuauccuaaauacagcgaagaggcuaagcugaaucgggaagagaucgacgggguuaaacuugagucuacacgcauuuaucaaauccuggccauuuacuccacgguggcgagcucccucguccuggugguuucucugggcgcuaucagcuuuuggaugugcuccaacggaucucuccagugcagaauuuguaucuga

SEQ ID NO: 197271 - RNA, 1701 nt, Artificial Sequence
  derived and/or modified CDS sequence (opt5) from hemagglutinin__InfluenzaA__ADJ80834
augaaggccauccuggugguccuccuguacaccuucgcuacagccaacgcggacacgcuuugcauuggcuaucacgcuaauaacagcaccgauacaguugacaccgugcuggagaagaaugugacagucacccauuccgugaaccuccuggaagauaagcacaaugggaaacuuuguaagcugagaggaguugcuccccuccaucugggcaaaugcaacaucgccggguggauucugggaaauccugagugugaaucucucagcacagccuccucuuggagcuacaucguggagaccuccucuagcgacaacggcacgugcuauccgggggauuuuauugacuacgaagaacugcgggagcagcuuuccagcgucucuuccuucgaacgcuuugagaucuuccccaagaccagcucuuggccuaaucacgauuccaacaagggagugacagccgcuuguccccaugccggcgcgaaaucuuuuuauaagaaucugaucuggcucguuaaaaagggcaacagcuacccuaaacuguccaagagcuauauuaaugacaaggggaaagaagugcuuguccuguggggaauccaccaccccuccaccucuacagaucaacagagccucuaccagaacgccgacgcuuacguguucgugggcaccuccagauauagcaagaaauuuaagccugagauugccauccggccgaaaguccgcgaucaggaggggagaaugaauuacuauuggacgcugguugaacccggagacaagauuacauucgaggcuaccggcaaccugguggugccucgguacgccuuugcgauggaacgcaacucuggguccggaaucauuaucagcgauacacccguccauuauugcaauaccaccugucaaacaccuaaaggcgccaucaacacgucucuccccuuccagaauauucacccgaucaccauuggcaagugcccuaaguacgugaaaagcacaaagcugagacuugcuaccgggcugcggaacguucccuccauccagucucgcggacucuuuggcgccauugcuggguucaucgagggaggcuggacagggaugguggacggaugguauggcuaccaucaccagaaugaacaaggcagcggguacgccgccgaccugaaauccacccagaacgcuaucgaugagauuacgaauaaggucaacagcgugaucgagaaaaugaauacacaguuuaccgcgguuggaaaggaguucaaccaccuugagaagagaauugaaaaucugaacaaaaagguggacgauggcuuccucgacaucuggaccuauaaugccgagcugcugguccuccuggaaaacgagcggacacuugauuaccaugacucuaaugugaaaaaccuguaugagaagguccgcucccagcucaaaaacaaugcuaaggaaauugggaacggauguuuugaguucuaccacaagugcgauaauaccuguauggaaagcgugaaaaacggcacauaugacuacccuaaguauucugaggaagccaaacugaauagagaggagaucgaugggguuaaacuugaauccacgcggaucuaccaaauucuggccaucuacagcaccguggcuuccucucucguccuggugguuagccugggcgccauuuccuuuuggaugugcucuaacggaagccuccagugccgcaucuguauuuga

SEQ ID NO: 197272 - RNA, 1701 nt, Artificial Sequence; identical to SEQ ID NO: 196943
  derived and/or modified CDS sequence (opt5) from hemagglutinin__InfluenzaA__ADJ80848

SEQ ID NO: 197273 - RNA, 1701 nt, Artificial Sequence
  derived and/or modified CDS sequence (opt5) from hemagglutinin__InfluenzaA__ADJ80858
augaagaccauccuggugguccuccuguacacauucgccacggcuaacgccgacacccuuugcauuggcuaucacgcgaauaacagcacagauaccguugacacagugcuggagaaaaaugugaccgucacacauuccgugaaccuccuggaagauaagcacaaugggaaacuuuguaagcugagaggaguugcuccccuccaucugggcaaaugcaacaucgccggguggauucugggaaauccugagugugaaucucucagcaccgccuccucuuggagcuacaucguggagacguccucuagcgacaacgggaccugcuauccgggcgauuuuauugacuacgaagaacugcgggagcagcuuuccagcgucucuuccuucgaacgcuuugagaucuuccccaagacaagcucuuggccuaaucacgauuccaacaagggagugaccgcugccuguccccaugcuggcgccaagagcuuuuauaaaaaucugaucuggcucguuaaaaagggcaacucuuacccuaaacuguccaagagcuauauuaaugacaaggggaaagaagugcuuguccuguggggaauccaccaccccuccacaucugcggaucaacagagccucuaccagaacgccgacgcuuacguguucgugggcaccuccagauauagcaagaaauuuaagccugagauugccauccggccgaaaguccgcgaucaggaggggagaaugaauuacuauuggacgcugguugaacccggagacaagauuacauucgaggcuaccggcaaccugguggugccucgguacgccuuugcgauggaacgcaacgccgggucuggaaucauuaucuccgauacacccguccaugacugcaauaccaccugucaaacaccuaaaggcgcuaucaacacgagccuccccuuccagaauauucacccgaucaccauuggcaagugcccuaaguaugugaaaucuacaaagcugagacuugccaccgggcugcggaacguucccagcauccagucccgcggacucuuuggcgcuauugccggguucaucgagggaggcuggacagggaugguggacggaugguacggcuaucaucaccagaaugaacaaggcucuggguacgccgcugaucugaaaagcacccagaacgcgaucgacaagauuacgaauaaagucaacuccgugaucgagaagaugaauacacaguuuaccgccguuggaaaggaguucaaccaccuugagaaaagaauugagaaucugaacaagaaaguggaugacggcuuccucgauaucuggaccuacaaugcugaacugcugguccuccuggagaacgaacggacacuugacuaucaugauagcaaugugaagaaccuguacgagaaaguccgcucucagcucaagaacaaugccaaggagauugggaacggauguuuugaguucuaucacaaaugcgacaauaccuguauggaauccgugaagaacggcacauacgauuauccuaaauacagcgaagaggccaagcugaauagagaagagaucgacgggguuaaacuugagucuacgcggaucuaucaaauucuggcuaucuacuccaccguggccagcucccucguccuggugguuucucugggcgcgauuagcuuuuggaugugcuccaacggaucucuccagugccgcaucuguauuuga

SEQ ID NO: 197274 - RNA, 1701 nt, Artificial Sequence
  derived and/or modified CDS sequence (opt5) from hemagglutinin__InfluenzaA__ADJ80868
augaaggccauccuggugguccuccuguacaccuucgcuacagccaacgcggacacgcuuugcauuggcuaucacgcuaauaacagcaccgauacaguugacaccgugcuggagaaaaaugugacagucacccauuccgugaaccuccuggaagauaagcacaaugggaaacuuuguaagcugagaggaguugcuccccuccaucugggcaaaugcaacaucgccggguggauucugggaaauccugagugugaaucucucagcacagccuccucuuggagcuacaucguggagaccuccucuagcgacaacggcacgugcuauccgggggauuuuauugacuacgaagaacugcgggagcagcuuuccagcgucucuuccuucgaacgcuuugagaucuuccccaagaccagcucuuggccuaaucacgauuccaacaagggagugacagccgcuugucccaaugccggcgcgaaaucuuuuuauaagaaccugaucuggcucguuaaaaagggcaauagcuacccuaaacuguccaagagcuauauuaacgacaaggggaaagaagugcuuguccuguggggaauccaucaccccuccaccucugccgaucaacagagccucuaccagaaugcugacgccuacguguucgugggcacauccagauauagcaagaaauuuaagccugagauugcuauccggccgaaaguccgcgaucaggaggggagaaugaacuacuauuggacccugguugaacccggaggcaagauuacguucgaggccacagggaaccugguggugccucgguacgcguuugccauggaacgcaaugcuggaucuggcaucauuaucuccgacacccccguccacgauugcaacacaaccugucaaaccccuaaaggcgccaucaauacaagccuccccuuccagaacauucauccgaucacgauugggaagugcccuaaguaugugaaaucuaccaagcugagacuugcuacaggacugcggaauguucccagcauccagucccgcggccucuuuggggccauugccggauucaucgagggcggguggaccggaaugguggacggcugguacggcuaucaccaucagaacgaacaagggucuggauacgcugcggaccugaaaagcacacagaaugccaucgauaagauuaccaacaaagucaauuccgugaucgagaagaugaacacgcaguuuacagcuguuggcaaggaguucaaucaccuugagaaaagaauugagaaccugaauaagaaaguggacgauggguuccucgacaucuggaccuacaacgccgaacugcugguccuccuggagaaugaacggacccuugauuaucacgacagcaacgugaagaaccuguacgagaaaguccgcucucagcucaagaauaacgccaaggagauuggaaauggcuguuuugaguucuaucauaaaugcgauaacacauguauggaauccgugaagaaugggaccuacgacuauccuaaauacagcgaagaggcuaagcugaacagagaagagaucgauggcguuaaacuugagucuacacggaucuaucaaauucuggccaucuacuccacgguggcgagcucccucguccuggugguuucucugggagcuauuagcuuuuggaugugcuccaauggcucucuccagugccgcaucuguauuuga

SEQ ID NO: 197275 - RNA, 1701 nt, Artificial Sequence; identical to SEQ ID NO: 195905
  derived and/or modified CDS sequence (opt5) from hemagglutinin__InfluenzaA__ADJ80883

SEQ ID NO: 197276 - RNA, 1701 nt, Artificial Sequence; identical to SEQ ID NO: 195905
  derived and/or modified CDS sequence (opt5) from hemagglutinin__InfluenzaA__ADJ80893

SEQ ID NO: 197277 - RNA, 1701 nt, Artificial Sequence; identical to SEQ ID NO: 195905
  derived and/or modified CDS sequence (opt5) from hemagglutinin__InfluenzaA__ADJ80910

SEQ ID NO: 197278 - RNA, 1701 nt, Artificial Sequence; identical to SEQ ID NO: 194741
  derived and/or modified CDS sequence (opt5) from hemagglutinin__InfluenzaA__ADJ80927

SEQ ID NO: 197279 - RNA, 1701 nt, Artificial Sequence
  derived and/or modified CDS sequence (opt5) from hemagglutinin__InfluenzaA__ADJ80937
augaaggccauccuggugguccuccuguacaccuucgcuacagccaacgcggacacgcuuugcauuggcuaucacgcuaauaacagcaccgauacaguugacaccgugcuggagaagaaugugacagucacccauuccgugaaccuccuggaagauaagcacaaugggaaacuuuguaagcugagaggaguugcuccccuccaucugggcaaaugcaacaucgccggguggauucugggaaauccugagugugaaucucucagcacagccuccucuuggagcuacaucguggagaccuccucuagcgacaacggcacgugcuauccgggggauuuuauugacuacgaagaacugcgggagcagcuuuccagcgucucuuccuucgaacgcuuugagaucuuccccaagaccagcucuuggccuaaucacgauuccaacaagggagugacagccgcuuguccccaugccggcgcgaaauccuuuuauaagaaucugaucuggcucguuaaaaagggcaacucuuacccuaaacuguccaagagcuauauuaaugacaaggggaaagaagugcuuguccuguggggaauccaccaccccuccaccucugccgaucaacagagccucuaccagaacgcugacgccuacgcuuucgugggcacauccagauauagcaagaaauuuaagccugagauugccauccggccgaaagugcgcgaucaggaggggagaaugaauuacuauuggacccuggucgaacccggagacaagauuacguucgaggcgacaggcaaccugguugugccucgguacgccuuugcuauggaacgcaacgccgggucuggaaucauuaucuccgauacccccgugcauaauugcaacacaaccugucaaaccccuaaaggcgcuaucaauacaagccuccccuuccagaacauucacccgaucacgauuggcaagugcccuaaguaugucaaaucuaccaagcugagacuugccacagggcugcggaaugugcccagcauccagucccgcggacucuuuggcgccauugcuggguucaucgagggaggcuggaccgggaugguugacggaugguacggcuaucaucaccagaacgaacaaggcucuggguacgcggccgaccugaaaagcacacagaaugcuaucgaugagauuaccaacaaggugaauagcgucaucgagaaaaugaacacgcaguuuacagccgugggaaaggaguucaaucaccuugagaagagaauugaaaaccugaauaaaaagguugacgauggcuuccucgacaucuggaccuacaacgccgagcugcuggugcuccuggaaaaugagcggacccuugauuaucaugacagcaacgucaaaucucuguacgagaaggugcgcucccagcucaaaaacaaugcuaaggaaauugggaacggauguuuugaguucuaucacaagugcgauaauacauguauggaaagcgucaaaaacggcaccuacgacuauccuaaguacucugaggaagccaaacugaauagagaggagaucgauggggugaaacuugaauccacacggaucuaucaaauucuggcgaucuacagcacgguugcuuccucucucgugcuggucgugagccugggcgccauuuccuuuuggaugugcucuaacggaagccuccagugccgcaucuguauuuga

SEQ ID NO: 197280 - RNA, 1701 nt, Artificial Sequence; identical to SEQ ID NO: 195905
  derived and/or modified CDS sequence (opt5) from hemagglutinin__InfluenzaA__ADJ80947

SEQ ID NO: 197281 - RNA, 1701 nt, Artificial Sequence; identical to SEQ ID NO: 195905
  derived and/or modified CDS sequence (opt5) from hemagglutinin__InfluenzaA__ADJ80967

SEQ ID NO: 197282 - RNA, 1701 nt, Artificial Sequence; identical to SEQ ID NO: 195905
  derived and/or modified CDS sequence (opt5) from hemagglutinin__InfluenzaA__ADJ80977

SEQ ID NO: 197283 - RNA, 1701 nt, Artificial Sequence
  derived and/or modified CDS sequence (opt5) from hemagglutinin__InfluenzaA__ADJ80993
augaaggccauccuggugguccuccuguacaccuucgcuacagccaacgcggacacgcuuugcauuggcuaucacgcuaauaacagcaccgauacaguugacaccgugcuggagaaaaaugugacagucacccauuccgugaaccuccuggaagauaagcacaaugggaaacuuuguaagcugagaggaguugcuccccuccaucugggcaaaugcaacaucgccggguggauucugggaaauccugagugugaaucucucagcacagccuccucuuggagcuacaucguggagaccuccucuagcgacaacggcacgugcuauccgggggauuuuauugacuacgaagaacugcgggagcagcuuuccagcgucucuuccuucgaacgcuuugagaucuuccccaagaccagcucuuggccuaaucacgauuccaacaagggagugacagccgcuugucccaaugccggcgcgaaaucuuuuuauaagaaccugaucuggcucguuaaaaagggcaauagcuacccuaaacuguccaagagcuauauuaacgacaaggggaaagaagugcuuguccuguggggaauccaucaccccuccaccucugccgaucaacagagccucuaccagaaugcugacgccuacguguucgugggcacauccagauauagcaagaaauuuaagccugagauugcuauccggccgaaaguccgcgaucaggaggggagaaugaacuacuauuggacccugguugaacccggagacaagauuacguucgaggccacaggcaaccugguggugccucgguacgcguuugccauggaacgcaaugcugggucuggaaucauuaucuccgauacccccguccacgacugcaacacaaccugucaaaccccuaaaggcgccaucaauacaagccuccccuuccagaacauucauccgaucacgauuggcaagugcccuaaguaugugaaaucuaccaagcugagacuugcuacagggcugcggaauguucccagcauccagucccgcggacucuuuggcgccauugccggguucaucgagggaggcuggaccgggaugguggacggaugguacggcuaucaccaucagaacgaacaaggcucuggguacgcugcggaucugaaaagcacacagaaugccaucgacaagauuaccaacaaagucaauuccgugaucgagaagaugaacacgcaguuuacagcuguuggaaaggaguucaaucaccuugagaaaagaauugagaaccugaauaagaaaguggaugacggcuuccucgauaucuggaccuacaacgccgaacugcugguccuccuggagaaugaacggacccuugacuaucacgauagcaacgugaagaaccuguacgagaaaguccgcucucagcucaagaauaacgccaaggagauugggaauggauguuuugaguucuaucauaaaugcgacaacacauguauggaauccgugaagaauggcaccuacgauuauccuaaauacagcgaagaggcuaagcugaacagagaagagaucgacgggguuaaacuugagucuacacggaucuaucaaauucuggccaucuacuccacgguggcgagcucccucguccuggugguuucucugggcgcuauuagcuuuuggaugugcuccaauggaucucuccagugccgcaucuguauuuga

SEQ ID NO: 197284 - RNA, 1701 nt, Artificial Sequence
  derived and/or modified CDS sequence (opt5) from hemagglutinin__InfluenzaA__ADJ81003
augaaggccauccuggugguccuccuguacaccuucgcuacagccaacgcggacacgcuuugcauuggcuaucacgcuaauaacagcaccgauacaguugacaccgugcuggagaaaaaugugacagucacccauuccgugaaccuccuggaagauaagcacaaugggaaacuuuguaagcugagaggaguugcuccccuccaucugggcaaaugcaacaucgccggguggauucugggaaauccugagugugaaucucucagcacagccuccucuuggagcuacaucguggagaccuccucuagcgacaacggcacgugcuauccgggggauuuuauugacuacgaagaacugcgggagcagcuuuccagcgucucuuccuucgaacgcuuugagaucuuccccaagaccagcucuuggccuaaucacgauuccaacaagggagugacagccgcuuguccccaugccggcgcgaaaucuuuuuauaagaaucugaucuggcucguuaaaaagggcaacagcuacccuaaacuguccaagagcuauauuaaugacaaggggaaagaagugcuuguccuguggggaauccaccaccccuccaccucugccgaucaacagagccucuaccagaacgcugacgccuacguguucgugggcacauccagauauagcaagaaauuuaagccugagauugcuauccggccgaaaguccgcgaucaggaggggagaaugaauuacuauuggacccugguugaacccggagacaagauuacguucgaggccacaggcaaccugguggugccucgguacgcguuugccauggaacgcaacgcugggucuggaaucauuaucuccgauacccccguccaugacugcaauacaaccugucaaaccccuaaaggcgccaucaacacaagccuccccuuccagaauauucacccgaucacgauuggcaagugcccuaaguaugugaaaucuaccaagcugagacuugcuacagggcugcggaacguucccagcauccagucccgcggacucuuuggcgccauugccggguucaucgagggaggcuggaccgggaugguggacggaugguacggcuaucaucaccagaaugaacaaggcucuggguacgcugcggaucugaaaagcacacagaacgccaucgacaagauuaccaauaaagucaacuccgugaucgagaagaugaauacgcaguuuacagcuguuggaaaggaguucaaccaccuugaaaagagaauugagaaucugaacaagaaaguggaugacggcuuccucgauaucuggaccuacaaugccgaacugcugguccuccuggagaacgaacggacccuugacuaucaugauagcaaugugaagaaccuguacgagaaaguccgcucucagcucaagaacaaugccaaggagauugggaacggauguuuugaguucuaucacaaaugcgacaauacauguauggaguccgugaagaacggcaccuacgauuauccuaaauacagcgaagaggcuaagcugaauagagagaaaaucgacgggguuaaacuugaaucuacacggaucuaucaaauucuggccaucuacuccacgguggcgagcucccucguccuggugguuucucugggcgcuauuagcuuuuggaugugcuccaacggaucucuccagugccgcaucuguauuuga

SEQ ID NO: 197285 - RNA, 1701 nt, Artificial Sequence; identical to SEQ ID NO: 196943
  derived and/or modified CDS sequence (opt5) from hemagglutinin__InfluenzaA__ADJ81013

SEQ ID NO: 197286 - RNA, 1701 nt, Artificial Sequence
  derived and/or modified CDS sequence (opt5) from hemagglutinin__InfluenzaA__ADJ81023
augaaggccauccuggugguccuccuguacaccuucgcuacagccaacgcggacacgcuuugcauuggcuaucacgcuaauaacagcaccgauacaguugacaccgugcuggagaagaaugugacagucacccauuccgugaaccuccuggaagauaagcacaaugggaaacuuuguaagcugagaggaguugcuccccuccaucugggcaaaugcaacaucgccggguggauucugggaaauccugagugugaaucucucagcacagccuccucuuggagcuacaucguggagaccuccucuagcgacaacggcacgugcuauccgggggauuuuauugacuacgaagaacugcgggagcagcuuuccagcgucucuuccuucgaacgcuuugagauguuccccaagaccagcucuuggccuaaucacgauuccaacaagggagugacagccgcuuguccccaugccggcgcgaaaucuuuuuauaagaaucugaucuggcucguuaaaaagggcaacagcuacccuaaacugaauaaguccuauaucaacgacaaggggaaagaagugcuuguccuguggggcauucaccaccccagcaccuccgccgaucaacagucucucuaccagaaugcugacgccuacguguucgugggaacaagcagauauuccaagaaauuuaagccugagaucgcuauucggccgaaaguccgcgaucaggaggggagaaugaacuacuauuggacccugguugaacccggagacaagaucacguucgaggccacaggcaaccugguggugccucgguacgcguuugccauggaacgcaaugcugggagcggaauuaucauuucugauacccccguccaugacugcaacacaaccugucaaaccccuaaaggcgccaucaauacaucccuccccuuccagaacauccacccgauuacgaucggcaagugcccuaaguaugugaaaagcaccaagcugagacuugcuacagggcugcggaauguucccucuauucagagccgcggacucuuuggcgccaucgccggguucauugagggaggcuggaccgggaugguggacggaugguacggcuaucaucaccagaacgaacaaggcuccggguacgcugcggaucugaaaucuacacagaaugccaucgacgagaucaccaacaaggucaauagcgugauugagaaaaugaacacgcaguuuacagcuguuggaaaggaguucaaucaccuugagaagagaaucgaaaaccugaauaaaaagguggaugacggcuuccucgauauuuggaccuacaacgccgagcugcugguccuccuggaaaaugagcggacccuugacuaucaugauuccaacgugaaaaaccuguacgagaagguccgcagccagcucaaaaauaacgccaaggaaaucgggaauggauguuuugaguucuaucacaagugcgacaacacauguauggaaucugugaaaaauggcaccuacgauuauccuaaguacuccgaggaagcuaaacugaacagagaggagauugacgggguuaaacuugaaagcacacggaucuaucaaauccuggccauuuacucuacgguggcguccagccucguccuggugguuucccugggcgcuaucucuuuuuggaugugcagcaauggaucccuccagugccgcauuuguaucuga

SEQ ID NO: 197287 - RNA, 1701 nt, Artificial Sequence; identical to SEQ ID NO: 195905
  derived and/or modified CDS sequence (opt5) from hemagglutinin__InfluenzaA__ADJ81033

SEQ ID NO: 197288 - RNA, 1701 nt, Artificial Sequence; identical to SEQ ID NO: 194741
  derived and/or modified CDS sequence (opt5) from hemagglutinin__InfluenzaA__ADJ81043

SEQ ID NO: 197289 - RNA, 1701 nt, Artificial Sequence
  derived and/or modified CDS sequence (opt5) from hemagglutinin__InfluenzaA__ADJ81053
augaaggccauccuggugguccuccuguacaccuucacaacggcuaacgccgacacccuuugcauuggcuaucacgcgaauaacagcacagauaccguugacacagugcuggagaaaaaugugaccgucacacauuccgugaaccuccuggaagauaagcacaaugggaaacuuuguaagcugagaggaguugcuccccuccaucugggcaaaugcaacaucgccggguggauucugggaaauccugagugugaaucucucagcaccgccuccucuuggagcuacaucguggagacguccucuagcgacaacgggaccugcuauccgggcgauuuuauugacuacgaagaacugcgggagcagcuuuccagcgucucuuccuucgaacgcuuugagaucuuccccaagacaagcucuuggccuaaucacgauuccaacaagggagugaccgcugccuguccccaugcuggcgccaagagcuuuuauaaaaaucugaucuggcucguuaaaaagggcaacucuuacccuaaacuguccaagagcuauauuaaugacaaggggaaagaagugcuuguccuguggggaauccaccaccccuccacaucugcggaucaacagagccucuaccagaacgccgacgcuuacguguucgugggcaccuccagauauagcaagaaauuuaagccugagauugccauccggccgaaaguccgcgaucaggaggggagaaugaauuacuauuggacgcugguugaacccggagacaagauuacauucgaggcuaccggcaaccugguggugccucgguacgccuuugcgauggaacgcaacgccgggucuggaaucauuaucuccgauacacccguccaugacugcaauaccaccugucaaacaccuaaaggcgcuaucaacacgagccuccccuuccagaauauucacccgaucaccauuggcaagugcccuaaguaugugaaaucuacaaagcugagacuugccaccgggcugcggaacguucccagcauccagucccgcggacucuuuggcgcuauugccggguucaucgagggaggcuggacagggaugguggacggaugguacggcuaucaucaccagaaugaacaaggcucuggguacgccgcugaucugaaaagcacccagaacgcgaucgacaagauuacgaauaaagucaacuccgugaucgagaagaugaauacacaguuuaccgccguuggaaaggaguucaaccaccuugagaaaagaauugagaaucugaacaagaaaguggaugacggcuuccucgauaucuggaccuacaaugcugaacugcugguccuccuggagaacgaacggacacuugacuaucaugauagcaaugugaagaaccuguacgagaaaguccgcucucagcucaagaacaaugccaaggagauugggaacggauguuuugaguucuaucacaaaugcgacaauaccuguauggaauccgugaagaacggcacauacgauuauccuaaauacagcgaagaggccaagcugaauagagaagagaucgacgggguuaaacuugagucuacgcggaucuaucaaauucuggcuaucuacuccaccguggccagcucccucguccuggugguuucucugggcgcgauuagcuuuuggaugugcuccaacggaucucuccagugccgcaucuguauuuga

SEQ ID NO: 197290 - RNA, 1701 nt, Artificial Sequence; identical to SEQ ID NO: 195905
  derived and/or modified CDS sequence (opt5) from hemagglutinin__InfluenzaA__ADJ81063

SEQ ID NO: 197291 - RNA, 1701 nt, Artificial Sequence; identical to SEQ ID NO: 195685
  derived and/or modified CDS sequence (opt5) from hemagglutinin__InfluenzaA__ADJ84772

SEQ ID NO: 197292 - RNA, 1701 nt, Artificial Sequence
  derived and/or modified CDS sequence (opt5) from hemagglutinin__InfluenzaA__ADJ88782
augaagaccaucauugcccugagcuacaugcucugccugguguucgcucagaaacuucccggcaacgacaauuccacagccacgcugugucucgggcaccaugcggucccuaacggaaccaucguuaagacaauuaccaaugaucaaaucgaggugacaaacgcuaccgaacuggugcagucuagcuccacaggcgagauuugcgacucuccgcaccagauccuugauggggaaaauuguacccugaucgacgcccuccugggagauccccagugcgacggcuuucaaaacaaaaagugggaucuguucgucgagagaagcaaagccuauuccaauuguuacccuuaugacgugcccgauuacgcuucucuccggagccugauugccuccagcgggacgcuugaauuuaacaaugagucuuucaacuggaccggaguuacacagaauggcaccuccagcgcuugcauccgcagaucuaacaauuccuuuuucagccggcugaacuggcucacacaucugaaguuuaaguauccugcccuuaaugugaccaugcccaacaacgagcaguucgacaaacuguacauuuggggcguccaccauccugggacggauaaugaccagaucuuucucuaugcgcaagccucuggacgcauuacaguguccaccaagagaagccagcagacaguuaucccgaacauuggcucccggccccgcgugagaaauaucccuucucggaucagcauuuacuggaccaucgucaaacccggggauauucugcugaucaacuccaccggaaaucucauugcuccucgcggcuacuucaagaucagaagcgggaaaucuuccaucaugcggagcgacgcccccauuggaaaguguaacucugaaugcaucacaccgaauggcagcauuccuaacgacaagcccuuucagaaugugaaccgcaucacguauggcgcuuguccuagauacgugaaacaaaauacccugaaacuugccacagggaugcggaacguccccgagaagcagacccgcggaauuuucggcgcgaucgccggguuuaucgaaaauggaugggagggcaugguugaugggugguauggauucagacaccagaacuccgagggccggggccaagcugccgaccugaagucuacacaggcugccauugaucagaucaaugggaaacucaacagacugauuggaaagaccaacgaaaaauuccaccagaucgagaaggaauuuagcgagguggaaggccgcauucaagaccuugagaaguacguggaggauacgaaaaucgaccugugguccuauaaugccgaacuccuggucgcucuggagaaccagcauacaauugaucucaccgacagcgaaaugaauaagcuguucgagaaaaccaagaaacagcuuggggaaaacgcggaggauaugggaaauggcugcuuuaagaucuaccacaagugugacaacgccugcaucgggucuauucggaauggcacauaugaucaugacguguacagagacgaggcucugaacaaucgcuuccagaucaaaggaguugaacucaaguccggcuacaaagauuggauucuguggaucagcuuugccauuucuugcuuccuucuguguguggcccuccugggguuuaucaugugggcuugccaaaagggaaacauccgguguaauauuugcaucuga

SEQ ID NO: 197293 - RNA, 1701 nt, Artificial Sequence
  derived and/or modified CDS sequence (opt5) from hemagglutinin__InfluenzaA__ADK21733
augaaggccauccuggugguccuccuguacaccuucgcuacagccaacgcggacacgcuuugcauuggcuaucacgcuaauaacagcaccgauacaguugacaccgugcuggagaaaaaugugacagucacccauuccgugaaccuccuggaagauaagcacaaugggaaacuuuguaagcugagaggaguugcuccccuccaucugggcaaaugcaacaucgccggguggauucugggaaauccugagugugaaucucucagcacagccuccucuuggagcuacaucguggagaccuccucuagcgacaacggcacgugcuauccgggggauuuuauugacuacgaagaacugcgggagcagcuuuccagcgucucuuccuucgaacgcuuugagaucuuccccaagaccagcucuuggccuaaucacgauuccaacaagggagugacagccgcuuguccccaugccggcgcgaaaucuuuuuauaagaaucugaucuggcucguuaaaaagggcaacagcuacccuaaacuguccaagagcuauauuaaugacaaggggaaagaagugcuuguccuguggggaauccaccaccccuccaccucuacagaucaacagagccucuaccagaacgccgacgcuuacguguucgugggcaccuccagauauagcaagaaauuuaagccugagauugccauccggccgaaaguccgcgaucaggaggggagaaugaauuacuauuggacgcugguugaacccggagacaagauuacauucgaggcuaccggcaaccugguggugccucgguacgccuuugcgauggaacgcaacgccgggucuggaaucauuaucuccgauacacccgcucaugacugcaauaccaccugucaaacaccuaaaggcgccaucaacacgagccuccccuuccagaauauucacccgaucaccauuggcaagugcccuaaguaugucaaaucuacaaagcugagacuugcuaccgggcugcggaacgugcccagcauccagucccgcggacucuuuggcgccauugccggguucaucgagggaggcuggacagggaugguugacggaugguacggcuaucaucaccagaaugaacaaggcucuggguacgcugcggaucugaaaagcacccagaacgccaucgacaagauuacgaauaaagugaacuccgucaucgagaagaugaauacacaguuuaccgcugugggaaaggaguucaaccaccuugagaaaagaauugagaaucugaacaagaaaguugaugacggcuuccucgauaucuggaccuacaaugccgaacugcuggugcuccuggagaacgaacggacacuugacuaucaugauagcaaugucaagaaccuguacgagaaagugcgcucucagcucaagaacaaugccaaggagauugggaacggauguuuugaguucuaucacaaaugcgacaauaccuguauggaauccgucaagaacggcacauacgauuauccuaaauacagcgaagaggcuaagcugaauagagaagagaucgacggggugaaacuugagucuacgcggaucuaucaaauucuggccaucuacuccaccguugcgagcucccucgugcuggucgugucucugggcgcuauuagcuuuuggaugugcuccaacggaucucuccagugccgcaucuguauuuga

SEQ ID NO: 197294 - RNA, 1701 nt, Artificial Sequence
  derived and/or modified CDS sequence (opt5) from hemagglutinin__InfluenzaA__ADK21743
augaaggccauccuggugguccuccuguacaccuucgcuacagccaacgcggacacgcuuugcauuggcuaucacgcuaauaacagcaccgauacaguugacaccgugcuggagaaaaaugugacagucacccauuccgugaaccuccuggaagauaagcacaaugggaaacuuuguaagcugagaggaguugcuccccuccaucugggcaaaugcaacaucgccggguggauucugggaaauccugagugugaaucucucagcacagccuccucuuggagcuacaucguggagaccuccucuagcgacaacggcacgugcuauccgggggauuuuauugacuacgaagaacugcgggagcagcuuuccagcgucucuuccuucgaacgcuuugagaucuuccccaagaccagcucuuggccuaaucacgauuccaacaagggagugacagccgcuuguccccaugccggcgcgaaauccuuuuauaagaaucugaucuggcucguuaaaaagggcaacucuuacccuaaaauuuccaauagcuauaucaacgacaaggggaaggaagugcugguccuuuggggcauucaccaccccuccaccucugccgaucaacagagccuguaccagaaugcugacgccuacguguucgugggaacauccagauauagcaaaaaguuuaaaccugagaucgcuauucggccgaagguccgcgaucaggaggggagaaugaacuacuauuggacccucguugaacccggagacaaaaucacguucgaggccacaggcaaccugguggugccucgguacgcguuugccauggaacgcaaugcugggucuggaauuaucaucuccgauacccccgcccaugacugcaacacaaccugucaaaccccuaagggcgcuauuaauacaagccugcccuuccagaacauccacccgauuacgaucggcaaaugcccuaaguaugucaagucuaccaaacucagacuggccacagggcuucggaaugugcccagcauucagucccgcggacuguuuggcgccaucgcuggguucaucgagggaggcuggaccgggaugguugacggaugguacggcuaucaucaccagaacgaacaaggcucuggguacgcggccgaucucaagagcacacagaaugcuauugacgagaucaccaacaaagugaauagcgucauugagaagaugaacacgcaguuuacagccgugggaaaagaguucaaucaccuggagaagagaaucgaaaaccuuaauaagaaaguugaugacggcuuccuggauauuuggaccuacaacgccgagcuccuggugcugcucgaaaaugagcggacccuggacuaucaugauagcaacgucaagaaccuuuacgagaaagugcgcucucagcugaagaauaacgcuaaagaaaucgggaauggauguuuugaguucuaucacaagugcgacaacacauguauggaauccgucaagaauggcaccuacgauuauccuaaauacagcgaggaagccaagcucaacagagaggagaucgacggggugaaacuggaaucuacacggauuuaucaaauccuugcgauuuacuccacgguugcuagcucccuggugcucgucgugucucugggcgccaucagcuuuuggaugugcuccaauggaucucugcagugccgcauuuguaucuga

SEQ ID NO: 197295 - RNA, 1701 nt, Artificial Sequence
  derived and/or modified CDS sequence (opt5) from hemagglutinin__InfluenzaA__ADK21753
augaaggccauccuggugguccuccuguacaccuucgcuacagccaacgcggacacgcuuugcauuggcuaucacgcuaauaacagcaccgauacaguugacaccgugcuggagaaaaaugugacagucacccauuccgugaaccuccuggaagauaagcacaaugggaaacuuuguaagcugagaggaguugcuccccuccaucugggcaaaugcaacaucgccggguggauucugggaaauccugagugugaaucucucagcacagccuccucuuggagcuacaucguggagaccuccucuagcgacaacggcacgugcuauccgggggauuuuauugacuacgaagaacugcgggagcagcuuuccagcgucucuuccuucgaacgcuuugagaucuuccccaagaccagcucuuggccuaaucacgauuccaacaagggagugacagccgcuuguccccaugccggcgcgaaaucuuuuuauaagaaucugaucuggcucguuaaaaagggcaacagcuacccuaaacuguccaagagcuauauuaaugacaaggggaaagaagugcuuguccuguggggaauccaccaccccuccaccucugccgaucaacagagccucuaccagaacgcugacgccuacguguucgugggcacauccagauauagcaagaaauuuaagccugagauugcuauccggccgaaaguccgcgaucaggaggggagaaugaauuacuauuggacccugguugaacccggagacaagauuacguucgaggccacaggcaaccugguggugccucgguacgcguuugccauggaagggaacgcuggaucuggcaucauuaucuccgauacccccguccaugacugcaauacaaccugucaaaccccuaaaggcgccaucaacacaagccuccccuuccagaauauucacccgaucacgauugggaagugcccuaaguaugugaaaucuaccaagcugcgccuugcuacaggacugagaaacguucccagcauccagucccggggccucuuuggggccauugccggauucaucgagggcggguggaccggaaugguggacggcugguacggcuaucaucaccagaaugaacaagggucuggauacgcugcggaucugaaaagcacacagaacgccaucgacaagauuaccaauaaagucaacuccgugaucgagaagaugaauacgcaguuuacagcuguuggcaaggaguucaaccaccuugaaaaacgcauugagaaucugaacaagaaaguggaugacggguuccucgauaucuggaccuacaaugccgaacugcugguccuccuggagaacgaaagaacccuugacuaucaugauagcaaugugaagaaccuguacgagaaaguccggucucagcucaagaacaaugccaaggagauuggaaacggcuguuuugaguucuaucacaaaugcgacaauacauguauggaguccgugaagaacgggaccuacgauuauccuaaauacagcgaagaggcuaagcugaaucgcgaagagaucgacggcguuaaacuugagucuacaagaaucuaucaaauucuggccaucuacuccacgguggcgagcucccucguccuggugguuucucugggagcuauuagcuuuuggaugugcuccaacggcucucuccagugccggaucuguauuuga

SEQ ID NO: 197296 - RNA, 1701 nt, Artificial Sequence
  derived and/or modified CDS sequence (opt5) from hemagglutinin__InfluenzaA__ADK21763
augaaggccauccuggugguccuccuguacaccuucgcuacagccaacgcggacacgcuuugcauuggcuaucacgcuaauaacagcaccgauacaguugacaccgugcuggagaaaaaugugacagucacccauuccgugaaccuccuggaagauaagcacaaugggaaacuuuguaagcugagaggaguugcuccccuccaucugggcaaaugcaacaucgccggguggauucugggaaauccugagugugaaucucucagcacagccuccucuuggagcuacaucguggagaccuccucuagcgacaacggcacgugcuauccgggggauuuuauugacuacgaagaacugcgggagcagcuuuccagcgucucuuccuucgaacgcuuugagaucuuccccaagaccagcucuuggccuaaucacgauuccaacaagggagugacagccgcuuguccccaugccggcgcgaaaucuuuuuauaagaaucugaucuggcucguuaaaaagggcaacagcuacccuaaacuguccaagagcuauauuaaugacaaggggaaagaagugcuuguccuguggggaauccaccaccccuccaccucugccgaucaacagagccucuaccagaacgcugacgccuacguguucgugggcacauccaaguauagcaaaaaguuuaaaccugagauugcuaucagaccgaagguccgggaucaggaggggcgcaugaauuacuauuggacccugguugaacccggagacaaaauuacguucgaggccacaggcaaccugguggugccuagauacgcguuugccauggaacggaacgcugggucuggaaucauuaucuccgauacccccguccaugacugcaauacaaccugucaaaccccuaagggcgccaucaacacaagccuccccuuccagaauauucacccgaucacgauuggcaagugcccuaaauaugugaagucuaccaaacugcgccuugcuacagggcugagaaacguucccagcauccagucccggggacucuuuggcgccauugccggguucaucgagggaggcuggaccgggaugguggacggaugguacggcuaucaucaccagaaugaacaaggcucuggguacgcugcggaucuuaagagcacacagaacgccaucgacgagauuaccaauaaagucaacuccgugaucgagaagaugaauacgcaguuuacagcuguuggaaaggaguucaaccaccuggagaaacgcauugaaaaucugaacaagaaaguggaugacggcuuccucgauaucuggaccuacaaugccgagcugcugguccuccuggaaaacgagagaacccuugacuaucaugauagcaaugugaagaaccuguacgagaaaguccggucucagcucaagaacaaugccaaggaaauugggaacggauguuuugaguucuaucacaaaugcgacaauacauguauggaauccgugaagaacggcaccuacgauuauccuaaauacagcgaggaagcuaagcugaaucgcgaggagaucgacgggguuaaacuugaaucuacaagaaucuaucaaauucuggccaucuacuccacgguggcgagcucccucguccuggugguuucucugggcgcuauuagcuuuuggaugugcuccaacggaucucuccagugccggaucuguauuuga

SEQ ID NO: 197297 - RNA, 1701 nt, Artificial Sequence; identical to SEQ ID NO: 195905
  derived and/or modified CDS sequence (opt5) from hemagglutinin__InfluenzaA__ADK21773

SEQ ID NO: 197298 - RNA, 1701 nt, Artificial Sequence; identical to SEQ ID NO: 195905
  derived and/or modified CDS sequence (opt5) from hemagglutinin__InfluenzaA__ADK21783

SEQ ID NO: 197299 - RNA, 1701 nt, Artificial Sequence; identical to SEQ ID NO: 194741
  derived and/or modified CDS sequence (opt5) from hemagglutinin__InfluenzaA__ADK21813

SEQ ID NO: 197300 - RNA, 1701 nt, Artificial Sequence; identical to SEQ ID NO: 196161
  derived and/or modified CDS sequence (opt5) from hemagglutinin__InfluenzaA__ADK21823

SEQ ID NO: 197301 - RNA, 1701 nt, Artificial Sequence
  derived and/or modified CDS sequence (opt5) from hemagglutinin__InfluenzaA__ADK21833
augaaggccauccuggugguccuccuguacaccuucgcuacagccaacgcggacacgcuuugcauuggcuaucacgcuaauaacagcaccgauacaguugacaccgugcuggagaagaaugugacagucacccauuccgugaaccuccuggaagauaagcacaaugggaaacuuuguaagcugagaggaguugcuccccuccaucugggcaaaugcaacaucgccggguggauucugggaaauccugagugugaaucucucagcacagccuccucuuggagcuacaucguggagaccuccucuagcgacaacggcacgugcuauccgggggauuuuauugacuacgaagaacugcgggagcagcuuuccagcgucucuuccuucgaacgcuuugagaucuuccccaagaccagcucuuggccuaaucacgauuccaacaagggagugacagccgcuuguccccaugccggcgcgaaaucuuuuuauaagaaucugaucuggcucguuaaaaagggcaacagcuacccuaaacuguccaagagcuauauuaaugacaaggggaaagaagugcuuguccuguggggaauccaccaccccuccaccucugccgaucaacagagccucuaccagaacgcugacgccuacguguucgugggcacauccagauauagcaagaaauuuaagccugagauugcuauccggccgaaaguccgcgaucaggaggggagaaugaauuacuauuggacccugguugaacccggagacaagauuacguucgaggccacaggcaaccugguggugccucgguacgcguuugccauggaacgcaacgcugggucuggaaucauuaucuccgauacccccgucagagacugcaauacaaccugucaaaccccuaaaggcgccaucaacacaagccuccccuuccagaauauucauccgaucacgauuggcaagugcccuaaguaugugaaaucuaccaagcugcggcuugcuacagggcugcgcaacguucccagcauccaguccagaggacucuuuggcgccauugccggguucaucgagggaggcuggaccgggaugguggacggaugguacggcuaucaccaucagaaugaacaaggcucuggguacgcugcggaucugaaaagcacacagaacgccaucgacgagauuaccaauaaggucaacuccgugaucgagaaaaugaauacgcaguuuacagcuguuggaaaggaguucaaccaccuugagaagcggauugaaaaucugaacaaaaagguggaugacggcuuccucgauaucuggaccuacaaugccgagcugcugguccuccuggaaaacgagcgcacccuugacuaucacgauagcaaugugaaaaaccuguacgagaaggucagaucucagcucaaaaacaaugccaaggaaauugggaacggauguuuugaguucuaucauaagugcgacaauacauguauggaauccgugaaaaacggcaccuacgauuauccuaaguacagcgaggaagcuaaacugaaucgggaggagaucgacgggguuaaacuugaaucuacacgcaucuaucaaauucuggccaucuacuccacgguggcgagcucccucguccuggugguuucucugggcgcuauuagcuuuuggaugugcuccaacggaucucuccagugcagaaucuguauuuga

SEQ ID NO: 197302 - RNA, 1701 nt, Artificial Sequence; identical to SEQ ID NO: 195905
  derived and/or modified CDS sequence (opt5) from hemagglutinin__InfluenzaA__ADK21843

SEQ ID NO: 197303 - RNA, 1701 nt, Artificial Sequence; identical to SEQ ID NO: 195094
  derived and/or modified CDS sequence (opt5) from hemagglutinin__InfluenzaA__ADK21853

SEQ ID NO: 197304 - RNA, 1701 nt, Artificial Sequence; identical to SEQ ID NO: 196390
  derived and/or modified CDS sequence (opt5) from hemagglutinin__InfluenzaA__ADK21863

SEQ ID NO: 197305 - RNA, 1701 nt, Artificial Sequence; identical to SEQ ID NO: 195188
  derived and/or modified CDS sequence (opt5) from hemagglutinin__InfluenzaA__ADK21873

SEQ ID NO: 197306 - RNA, 1701 nt, Artificial Sequence
  derived and/or modified CDS sequence (opt5) from hemagglutinin__InfluenzaA__ADK21883
augaaggccauccuggugguccuccuguacaccuucgcuacagccaacgcggacacgcuuugcauuggcuaucacgcuaauaacagcaccgauacaguugacaccgugcuggagaaaaaugugacagucacccauuccgugaaccuccuggaagauaagcacaaugggaaacuuuguaagcugagaggaguugcuccccuccaucugggcaaaugcaacaucgccggguggauucugggaaauccugagugugaaucucucagcacagccuccucuuggagcuacaucguggagaccuccucuagcgacaacggcacgugcuauccgggggauuuuauugacuacgaagaacugcgggagcagcuuuccagcgucucuuccuucgaacgcuuugagaucuuccccaagaccagcucuuggccuaaucacgauuccaacaagggagugacagccgcuuguccccaugccggcgcgaaaucuuuuuauaagaaucugaucuggcucguuaaaaagggcaacagcuacccuaaacuguccaagagcuauauuaaugacaaggggaaagaagugcuuguccuguggggaauccaccaccccuccaccucugccgaucaacagagccucuaccagaacgcugacgccuacguguucgugggcacauccagauauagcaagaaauuuaagccugagauugcuauccggccgaaaguccgcgaucaggaggggagaaugaauuacuauuggacccugguugaacccggagacaagauuacguucgaggccacaggcaaccugguggugccuaaauacgcguuugccauggaacggaacgcugggucuggaaucauuaucuccgauacccccguccaugacugcaauacaaccugucaaaccccuaagggcgccaucaacacaagccuccccuuccagaauauucacccgaucacgauuggcaagugcccuaaauaugugaagucuaccaaacugcgccuugcuacagggcugagaaacauccccagcauucagucccggggacucuuuggcgccaucgccggguucaucgagggaggcuggaccgggaugguugacggaugguacggcuaucaucaccagaaugaacaaggcucuggguacgcugcggaucuuaagagcacacagaacgccauugacgagaucaccaauaaagugaacuccgucauugagaagaugaauacgcaguuuacagcugugggaaaggaguucaaccaccuggagaaacgcaucgaaaaucugaacaagaaaguugaugacggcuuccucgauauuuggaccuacaaugccgagcugcuggugcuccuggaaaacgagagaacccuugacuaucaugauagcaaugucaagaaccuguacgagaaagugcggucucagcucaagaacaaugccaaggaaaucgggaacggauguuuugaguucuaucacaaaugcgacaauacauguauggaauccgucaagaacggcaccuacgauuauccuaaauacagcgaggaagcuaagcugaaucgcgaggagaucgacggggugaaacuugaaucuacaagaauuuaucaaauccuggccauuuacuccacgguugcgagcucccucgugcuggucgugucucugggcgcuaucagcuuuuggaugugcuccaacggaucucuccagugccggauuuguaucuga

SEQ ID NO: 197307 - RNA, 1701 nt, Artificial Sequence; identical to SEQ ID NO: 194741
  derived and/or modified CDS sequence (opt5) from hemagglutinin__InfluenzaA__ADK21893

SEQ ID NO: 197308 - RNA, 1701 nt, Artificial Sequence; identical to SEQ ID NO: 196338
  derived and/or modified CDS sequence (opt5) from hemagglutinin__InfluenzaA__ADK21903

SEQ ID NO: 197309 - RNA, 1701 nt, Artificial Sequence; identical to SEQ ID NO: 196451
  derived and/or modified CDS sequence (opt5) from hemagglutinin__InfluenzaA__ADK21913

SEQ ID NO: 197310 - RNA, 1701 nt, Artificial Sequence
  derived and/or modified CDS sequence (opt5) from hemagglutinin__InfluenzaA__ADK21923
augaaggccauccuggugguccuccuguacaccuucgcuacagccaacgcggacacgcuuugcauuggcuaucacgcuaauaacagcaccgauacaguugacaccgugcuggagaaaaaugugacagucacccauuccgugaacauccucgaagauaagcacaaugggaaacuguguaaacuuagaggaguugcuccccugcaucucggcaagugcaacauugccggguggauccugggaaauccugagugugaaucucugagcacagccuccucuuggagcuacauuguggagaccuccucuagcgacaacggcacgugcuauccgggggauuuuaucgacuacgaagaacuccgggagcagcuguccagcgucucuuccuucgaacgcuuugagaucuuccccaagaccagcucuuggccuaaucacgauuccaacaagggagugacagccgcuuguccccaugccggcgcgaaaucuuuuuauaagaaucuuauuuggcugguuaaaaagggcaacagcuacccuaaacucuccaagagcuauaucaaugacaaggggaaagaagugcugguccuuuggggcauucaccaccccuccaccucugccgaucaacagagccuguaccagaacgcugacgccuacguguucgugggaacauccagauauagcaagaaauuuaagccugagaucgcuauucggccgaaaguccgcgaucaggaggggagaaugaauuacuauuggacccucguugaacccggagacaagaucacguucgaggccacaggcaaccugguggugccucgguacgcguuugccauggaacgcaacgcugggucuggaauuaucaucuccgauacccccguccaugacugcaauacaaccugucaaaccccuaaaggcgccauuaacacaagccugcccuuccagaauauccacccgauuacgaucggcaagugcccuaaguaugugaaaucuaccaagcucagacuggcuacagggcuucggaacguucccagcauucagucccgcggacuguuuggcgccaucgccggguucaucgagggaggcuggaccgggaugguggacggaugguacggcuaucaucaccagaaugaacaaggcucuggguacgcugcggaucucaaaagcacacagaacgccauugacgagaucaccaauaaggucaacuccgugauugagaaaaugaauacgcaguuuacagcuguuggaaaggaguucaaccaccuggagaagagaaucgaaaaucuuaacaaaaagguggaugacggcuuccuggauauuuggaccuacaaugccgagcuccugguccugcucgaaaacgagcggacccuggacuaucaugauagcaaugugaaaaaccuuuacgagaaggcccgcucucagcugaaaaacaaugcuaaggaaaucgggaacggauguuuugaguucuaucacaagugcgacaauacauguauggaauccgucaaaaacggcaccuacgauuauccuaaguacagcgaggaagccaaacucaauagagagaagaucgacggggugaaacuggagucuacacggauuuaucaaauccuugcgauuuacuccacgguugcuagcacccuggugcucgucgugucccugggcgccaucucuuuuuggaugugcagcaacggaucccugcagugccgcauuuguaucuga

SEQ ID NO: 197311 - RNA, 1701 nt, Artificial Sequence
  derived and/or modified CDS sequence (opt5) from hemagglutinin__InfluenzaA__ADK21933
augaaggccauccuggugguccuccuguacaccuucgcuacagccaacgcggacacgcuuugcauuggcuaucacgcuaauaacagcaccgauacaguugacaccgugcuggagaagaaugugacagucacccauuccguggaucuccuggaagacaagcacaacgggaaacuuuguaagcugagaggaguugcuccccuccaucugggcaaaugcaauaucgccggguggauucugggaaacccugagugugaaucucucagcacagccuccucuuggagcuacaucguggagaccuccucuagcgauaauggcacgugcuauccgggggacuuuauugauuacgaagaacugcgggagcagcuuuccagcgucucuuccuucgaacgcuuugagaucuuccccaagaccagcucuuggccuaaccacgacuccaauaagggagugacagccgcuugucccaacgccggcgcgaaaucuuuuuauaagaaucugaucuggcucguuaaaaagggcaacagcuacccuaaacuguccaagagcuauauuaaugauaaggggaaagaagugcuuguccuguggggaauccaucaccccuccaccucugccgaccaacagagccucuaccagaacgcugaugccuacguguucgugggcacauccagauauagcaagaaauuuaagccugagauugcuauccggccgaaaguccgcgaccaggaggggagaaugaauuacuauuggacccugguugaacccggagauaagauuacguucgaggccacaggcaaccugguggugccucgguacgcguuugccauggaacgcaacgcugggucuggaaucauuaucuccgacacccccguccacgacugcaauacaaccugucaaaccccuaaaggcgccaucaacacaagccuccccuuccagaauauucauccgaucacgauuggcaagugcccuaaguaugugaaaucuaccaagcugagacuugcuacagggcugcggaacguucccagcauccagucccgcggacucuuuggcgccauugccggguucaucgagggaggcuggaccgggaugguggauggaugguacggcuaucaccaucagaaugaacaaggcucuggguacgcugcggaccugaaaagcacacagaacgccaucgaugagauuaccaauaaggucaacuccgugaucgagaaaaugaauacgcaguuuacagcuguuggaaaggaguucaaccaccuugagaagagaauugaaaaucugaacaaaaagguggacgauggcuuccucgacaucuggaccuacaaugccgagcugcugguccuccuggaaaacgagcggacccuugauuaucacgacagcaaugugaaaaaccuguacgagaagguccgcucucagcucaaaaacaaugccaaggaaauugggaacggauguuuugaguucuaucauaagugcgauaauacauguauggaauccgugaaaaacggcaccuacgacuauccuaaguacagcgaggaagcuaaacugaauagagaggagaucgaugggguuaaacuugaaucuacacggaucuaucaaauucuggccaucuacuccacgguggcgagcucccucguccuggugguuucucugggcgcuauuagcuuuuggaugugcuccaacggaucucuccagugccgcaucuguauuuga

SEQ ID NO: 197312 - RNA, 1701 nt, Artificial Sequence; identical to SEQ ID NO: 194741
  derived and/or modified CDS sequence (opt5) from hemagglutinin__InfluenzaA__ADK21943

SEQ ID NO: 197313 - RNA, 1701 nt, Artificial Sequence
  derived and/or modified CDS sequence (opt5) from hemagglutinin__InfluenzaA__ADK21953
augaaggccauccuggugguccuccuguacaccuucgcuacagccaacgcggacacgcuuugcauuggcuaucacgcuaauaacagcaccgauacaguugacaccgugcuggagaagaaugugacagucacccauuccgugaaccuccuggaagauaagcacaaugggaaacuuuguaagcugagaggaguugcuccccuccaucugggcaaaugcaacaucgccggguggauucugggaaauccugagugugaaucucucagcacagccuccucuuggagcuacaucguggagaccuccucuagcgacaacggcacgugcuauccgggggauuuuauugaccacgaggagcugcgggagcagcuuuccagcgucucuuccuucgaacgcuuugagaucuuccccaagaccagcucuuggccuaaucaugauuccaacaagggagugacagccgcuuguccccacgccggcgcgaaaucuuuuuacaagaaucugaucuggcucguuaaaaagggcaacagcuauccuaaacuguccaagagcuacauuaaugacaaggggaaagaagugcuuguccugugggccauccaccaucccuccaccucugcugaucaacagagccucuaucagaacgccgacgcuuacguguucgugggaacauccagauacagcaagaaauuuaagccugagauugccauccggccgaaaguccgcgaucaggagggcagaaugaauuauuacuggacccugguugaacccggggacaagauuacguucgaggcgacaggaaaccugguggugccucgguaugccuuugcuauggaacgcaacgccggcucugggaucauuaucuccgauacccccguccacgacugcaauacaaccugucaaaccccuaaaggagcuaucaacacaagccuccccuuccagaauauucauccgaucacgauuggcaagugcccuaaguacgugaaaucuaccaagcugagacuugccacaggccugcggaacguucccagcauccagucccgcgggcucuuuggagccauugcuggcuucaucgaagggggauggaccggcaugguggacgggugguauggauaccaccaccagaaugaacaaggcucuggcuaugcggccgaucugaaaagcacacagaacgcuaucgacgagauuaccaauaaggucaacuccgugaucgagaaaaugaauacgcaguuuacagccguugggaaggaguucaaccaucuugaaaagagaauugaaaaucugaacaaaaagguggaugacggauuccucgauaucuggaccuacaaugccgagcugcugguccuccuggaaaacgagcggacccuugacuaccacgauagcaaugugaaaaaccuguaugagaagguccgcucucagcucaaaaacaaugcuaaggaaauuggcaacggguguuuugaguucuaccauaagugcgacaauacauguauggaauccgugaaaaacggaaccuaugauuacccuaaguauagcgaggaagccaaacugaauagagaggagaucgacggcguuaaacuugaaucuacacggaucuaccaaauucuggcgaucuauuccacgguggcuagcucccucguccuggugguuucucugggggccauuagcuuuuggaugugcuccaacggcucucuccagugccgcaucuguauuuga

SEQ ID NO: 197314 - RNA, 1701 nt, Artificial Sequence; identical to SEQ ID NO: 196928
  derived and/or modified CDS sequence (opt5) from hemagglutinin__InfluenzaA__ADK32390

SEQ ID NO: 197315 - RNA, 1701 nt, Artificial Sequence; identical to SEQ ID NO: 196928
  derived and/or modified CDS sequence (opt5) from hemagglutinin__InfluenzaA__ADK32400

SEQ ID NO: 197316 - RNA, 1701 nt, Artificial Sequence
  derived and/or modified CDS sequence (opt5) from hemagglutinin__InfluenzaA__ADK32420
augaaggccauccuggugguccuccuguacaccuucgcuacagccaacgcggacacgcuuugcauuggcuaucacgcuaauaacagcaccgauacaguugacaccgugcuggagaaaaaugugacagucacccauuccgugaaccuccuggaagauaagcacaaugggaaacuuuguaagcugagaggaguugcuccccuccaucugggcaaaugcaacaucgccggguggauucugggaaauccugagugugaaucucucagcacagccuccucuuggagcuacaucguggagaccuccucuagcgacaacggcacgugcuauccgggggauuuuauugacuacgaagaacugcgggagcagcuuuccagcgucucuuccuucgaacgcuuugagaucuuccccaagaccagcucuuggccuaaucacgauuccaacaagggagugacagccgcuuguccccaugccggcgcgaaaucuuuuuauaagaaucugaucuggcucguuaaaaagggcaacagcuacccuaaacuguccaagagcuauauuaaugacaaggggaaagaagugcuuguccuguggggaauccaccaccccuccaccucugccgaucaacagagccucuaccagaacgcugacgccuacguguucgugggcacauccagauauagcaagaaauuuaagccugagauugcuauccggccgaaaguccgcgagcaggaagggagaaugaauuacuauuggacccugguugagcccggagauaagauuacguucgaagccacaggcaaccugguggugccucgguacgcguuugccauggagcgcaacgcugggucuggaaucauuaucuccgacacccccguccaugauugcaauacaaccugucaaaccccuaaaggcgccaucaacacaagccuccccuuccagaauauucacucuaucacgauuggcaagugcccgaaguaugugaaaagcaccaagcugagacuugcuacagggcugcggaacguuccuuccauccagucucgcggacucuuuggcgccauugccggguucaucgaaggaggcuggaccgggaugguggacggaugguacggcuaucaucaccagaaugagcaaggcagcggguacgcugcggaccugaaauccacacagaacgccaucgaugagauuaccaauaaggucaacagcgugaucgaaaagaugaauacgcaguuuacagcuguuggaaaggaguucaaccaccuugaaaagagaauugagaaucugaacaaaaagguggacgauggcuuccucgacaucuggaccuacaaugccgaacugcugguccuccuggagaacgagcggacccuugauuaucaugacucuaaugugaaaaaccuguacgaaaagguccgcaaccagcucaaaaauaacgccaaggagauugggaauggauguuuugaguucuaucacaagugcgauaacacauguauggaguccgugaaaaauggcaccuacgacuaucccaaguacagcgaagaggcuaaacugaacagagaggaaaucgaugggguuaaacuugagucuacacggaucuaucaaauucuggccaucuacuccacgguggcgagcucccucguccuggugguuucucugggcgcuauuagcuuuuggaugugcuccaauggaucucuccagugccgcaucuguauuuga

SEQ ID NO: 197317 - RNA, 1701 nt, Artificial Sequence; identical to SEQ ID NO: 196293
  derived and/or modified CDS sequence (opt5) from hemagglutinin__InfluenzaA__ADK32430

SEQ ID NO: 197318 - RNA, 1701 nt, Artificial Sequence
  derived and/or modified CDS sequence (opt5) from hemagglutinin__InfluenzaA__ADK32440
augaaggccauccuggugguccuccuguacaccuucgcuacagccaacgcggacacgcuuugcauuggcuaucacgcuaauaacagcaccgauacaguugacaccgugcuggagaagaaugugacagucacccauuccgugaaccuccuggaagauaagcacaaugggaaacuuuguaagcugagaggaguugcuccccuccaucugggcaaaugcaacaucgccggguggauucugggaaauccugagugugaaucucucagcacagccuccucuuggagcuacaucguggagaccuccucuagcgacaacggcacgugcuauccgggggauuuuauugacuacgaagaacugcgggagcagcuuuccagcgucucuuccuucgaacgcuuugagaucuuccccaagaccagcucuuggccuaaucacgauuccaacaagggagugacagccgcuuguccccaugccggcgcgaaaucuuuuuauaagaaucugaucuggcucguuaaaaagggcaacagcuacccuaaacuguccaagagcuauauuaaugacaaggggaaagaagugcuuguccuguggggaauccaccaccccuccaccucugccgaucaacagagccucuaccagaacgcugacgccuacguguucgugggcacauccagauauagcaagaaauuuaagccugagauugcuauccggccgaaaguccgcgaucaggaggggagaaugaauuacuauuggacccugguugaacccggagacaagauuacguucgaggccacaggcaaccugguggugccucgguacgcguuugccauggaacgcaacgcugggucuggaaucauuaucuccgauacccccguccaugacugcaauacaaccugucaaaccccuaaaggcgccaucaacacaagccuccccuuccagaauauucacccgaucacgauuggcaagugcccuaaguaugugaaaucuaccaagcugagacuugcuacagggcugcggaacguucccagcauccagucccgcggacucuuuggcgccauugccggguucaucgagggaggcuggaccgggaugguggacggaugguacggcuaucaucaccagaaugaacaaggcucuggguacgcugcggaucugaaaagcacacagaacgccaucgacggaauuaccaauaaggucaacuccgugaucgagaaaaugaauacgcaguuuacagcuguuggcaaggaguucaaccaccuugaaaagagaauugagaaucugaacaaaaagguggaugacggguuccucgauaucuggaccuacaaugccgaacugcugguccuccuggagaacgaacggacccuugacuaucaugauagcaaugugaaaaaccuguacgagaagguccgcucucagcucaaaaacaaugccaaggagauuggaaacggcuguuuugaguucuaucacaagugcgacaauacauguauggaguccgugaaaaacgggaccuacgauuauccuaaguacagcgaagaggcuaaacugaauagagaagagaucgacggcguuaaacuugagucuacacggaucuaucaaauucuggccaucuacuccacgguggcgagcucccucguccuggugguuucucugggagcuauuagcuuuuggaugugcuccaacggcucucuccagugccgcaucuguauuuga

SEQ ID NO: 197319 - RNA, 1701 nt, Artificial Sequence
  derived and/or modified CDS sequence (opt5) from hemagglutinin__InfluenzaA__ADK32450
augaaggccauccuggugguccuccuguacaccuucgcuacagccaacgcggacacgcuuugcauuggcuaucacgcuaauaacagcaccgauacaguugacaccgugcuggagaaaaaugugacagucacccauuccgugaacauccucgaagauaagcacaaugggaaacuguguaaacuuagaggaguugcuccccugcaucucggcaagugcaacauugccggguggauccugggaaauccugagugugaaucucugagcacagccuccucuuggagcuacauuguggagaccuccucuagcgacaacggcacgugcuauccgggggauuuuaucgacuacgaagaacuccgggagcagcuguccagcgucucuuccuucgaacgcuuugagaucuuccccaagaccagcucuuggccuaaucacgauuccaacaagggagugacagccgcuuguccccaugccggcgcgaaaucuuuuuauaagaaucuuauuuggcugguuaaaaagggcaacagcuacccuaaacucuccaagagcuauaucaaugacaaggggaaagaagugcugguccuuuggggcauucaccaccccuccaccucugccgaucaacagagccuguaccagaacgcugacgccuacguguucgugggauccagcagauauucuaagaaauuuaagccugagaucgcuauucggccgaaaguccgcgaucaggaggggagaaugaauuacuauuggacacucguugaacccggagacaagaucaccuucgaggccacgggcaaccugguggugccucgguacgcguuugccauggaacgcaacgcuggguccggaauuaucaucagcgaugcccccguccaugacugcaauacaaccugucaaacaccuaaaggcgcuauuaacaccucucugcccuuccagaauauccacccgauuaccaucggcaagugcccuaaguaugugaaaagcacaaagcucagacuggccacggggcuucggaacguucccuccauucagucucgcggacuguuuggcgccaucgcuggguucaucgagggaggcuggaccgggaugguggacggaugguacggcuaucaucaccagaaugaacaaggcagcggguacgcggccgaucucaaauccacacagaacgcuauugacgagaucaccaauaaggucaacagcgugauugagaaaaugaauacacaguuuaccgccguuggaaaggaguucaaccaccuggagaagagaaucgaaaaucuuaacaaaaagguggaugacggcuuccuggauauuuggacguacaaugccgagcuccugguccugcucgaaaacgagcggacacuggacuaucaugauucuaaugugaaaaaccuuuacgagaagguccgcucccagcugaaaaacaaugcuaaggaaguggggaacggauguuuugaguucuaucacaagugcgacaauaccuguauggaaagcguuaaaaacggcaccuacgauuauccuaaguacucugaggaagccaaacucaauagagaggagaucgacggggugaagcuggaauccacacggaucuaucaaauucuugcgaucuacagcaccgcugccuccucucugguccucgugguuagccugggcgccauuuccuuuuggaugugcucuaacggaagccugcagugccgcaucuguauuuga

SEQ ID NO: 197320 - RNA, 1701 nt, Artificial Sequence
  derived and/or modified CDS sequence (opt5) from hemagglutinin__InfluenzaA__ADK32460
augaaggccauccuggugguccuccuguacaccuucgcuacagccaacgcggacacgcuuugcauuggcuaucacgcuaauaacagcaccgauacaguugacaccgugcuggagaagaaugugacagucacccauuccgugaaccuccuggaagauaagcacaaugggaaacuuuguaagcugagaggaguugcuccccuccaucugggcaaaugcaacaucgccggguggauucugggaaauccugagugugaaucucucagcacagccuccucuuggagcuacaucguggagaccuccucuagcgacaacggcacgugcuauccgggggauuuuauugacuacgaagaacugcgggagcagcuuuccagcgucucuuccuucgaacgcuuugagaucuuccccaagaccagcucuuggccuaaucacgauuccaacaagggagugacagccgcuuguccccaugccggcgcgaaaucuuuuuauaagaaucugaucuggcucguuaaaaagggcaacagcuacccuaaacuguccaagagcuauauuaaugacaaggggaaagaagugcuuguccuguggggaauccaccaccccuccaccucugccgaucaacagagccucuaccagaacgcugacgccuacgcuuucgugggcacauccagauauagcaagaaauuuaagccugagauugccauccggccgaaagugcgcgaucaggaggggagaaugaauuacuauuggacccuggucgaacccggagacaagauuacguucgaggcgacaggcaaccugguugugccucgguacgccuuugcuauggaacgcaacgccgggucuggaaucauuaucuccgauacccccgugcaugacugcaauacaaccugucaaaccccuaaaggcgcuaucaacacaagccuccccuuccagaauauucacccgaucacgauuggcaagugcccuaaguaugucaaaucuaccaagcugagacuugccacagggcugcggaacgugcccagcauccagucccgcggacucuuuggcgccauugcuggguucaucgagggaggcuggaccgggaugguugacggaugguacggcuaucaucaccagaaugaacaaggcucuggguacgcggccgaucugaaaagcacacagaacgcuaucgacgagauuaccaauaaggugaacuccgucaucgagaaaaugaauacgcaguuuacagccgugggaaaggaguucaaccaccuugagaagagaauugaaaaucugaacaaaaagguugaugacggcuuccucgauaucuggaccuacaaugccgagcugcuggugcuccuggaaaacgagcggacccuugacuaucaugauagcaaugucaaaaaccuguacgagaaggugcgcucucagcucaaaaacaaugcuaaggaaauugggaacggauguuuugaguucuaucacaagugcgacaauacauguauggaauccgucaaaaacggcaccuacgauuauccuaaguacagcgaggaagccaaacugaauagagaggagaucgacggggugaaacuugaaucuacacggaucuaucaaauucuggcgaucuacuccacgguugcuagcucccucgugcuggucgugucucugggcgccauuagcuuuuggaugugcuccaacggaucucuccagugccgcaucuguauuuga

SEQ ID NO: 197321 - RNA, 1701 nt, Artificial Sequence; identical to SEQ ID NO: 195905
  derived and/or modified CDS sequence (opt5) from hemagglutinin__InfluenzaA__ADK32470

SEQ ID NO: 197322 - RNA, 1701 nt, Artificial Sequence
  derived and/or modified CDS sequence (opt5) from hemagglutinin__InfluenzaA__ADK32480
augaaggccauccuggugguccuccuguacaccuucgcuacagccaacgcggacacgcuuugcauuggcuaucacgcuaauaacagcaccgauacaguugacaccgugcuggagaaaaaugugacagucacccauuccgugaaccuccuggaagauaagcacaaugggaaacuuuguaagcugagaggaguugcuccccuccaucugggcaaaugcaacaucgccggguggauucugggaaauccugagugugaaucucucagcacagccuccucuuggagcuacaucguggagaccuccucuagcgacaacggcacgugcuauccgggggauuuuauugacuacgaagaacugcgggagcagcuuuccagcgucucuuccuucgaacgcuuugagaucuuccccaagaccagcucuuggccuaaucacgauuccaacaagggagugacagccgcuuguccccaugccggcgcgaaaucuuuuuauaagaaucugaucuggcucguuaaaaagggcaacagcuacccuaaacuguccaagagcuauauuaaugacaaggggaaagaagugcuuguccuguggggaauccaccaccccuccaccucugccgaucaacagagccucuaccagaacgcugacgccuacguguucgugggcacauccagauauagcaagaaauuuaagccugagauugcuauccggccgaaaguccgcgaucaggaggggagaaugaauuacuauuggacccugguugaacccggagacaagauuacguucgaggccacaggcaaccugguggugccucgguacgcguuugccauggaacgcaacgcugggucuggaaucauuaucuccgauacccccgcccaugacugcaauacaaccugucaaaccccuaaaggcgcuaucaacacaagccuccccuuccagaauauucacccgaucacgauuggcaagugcccuaaguaugucaaaucuaccaagcugagacuugccacagggcugcggaacgugcccagcauccagucccgcggacucuuuggcgccauugcuggguucaucgagggaggcuggaccgggaugguugacggaugguacggcuaucaucaccagaaugaacaaggcucuggguacgcggccgaucugaaaagcacacagaacgcuaucgacaagauuaccaauaaagugaacuccgucaucgagaagaugaauacgcaguuuacagccgugggaaaggaguucaaccaccuugagaaaagaauugagaaucugaacaagaaaguugaugacggcuuccucgauaucuggaccuacaaugccgaacugcuggugcuccuggagaacgaacggacccuugacuaucaugauagcaaugucaagaaccuguacgagaaagugcgcucucagcucaagaacaaugcuaaggagauugggaacggauguuuugaguucuaucacaaaugcgacaauacauguauggaauccgucaagaacggcaccuacgauuauccuaaauacagcgaagaggccaagcugaauagagaagagaucgacggggugaaacuugagucuacacggaucuaucaaauucuggcgaucuacuccacgguugcuagcucccucgugcuggucgugucucugggcgccauuagcuuuuggaugugcuccaacggaucucuccagugccgcaucuguauuuga

SEQ ID NO: 197323 - RNA, 1701 nt, Artificial Sequence; identical to SEQ ID NO: 195905
  derived and/or modified CDS sequence (opt5) from hemagglutinin__InfluenzaA__ADK32490

SEQ ID NO: 197324 - RNA, 1701 nt, Artificial Sequence; identical to SEQ ID NO: 195905
  derived and/or modified CDS sequence (opt5) from hemagglutinin__InfluenzaA__ADK32502

SEQ ID NO: 197325 - RNA, 1701 nt, Artificial Sequence; identical to SEQ ID NO: 196377
  derived and/or modified CDS sequence (opt5) from hemagglutinin__InfluenzaA__ADK32637

SEQ ID NO: 197326 - RNA, 1701 nt, Artificial Sequence; identical to SEQ ID NO: 195905
  derived and/or modified CDS sequence (opt5) from hemagglutinin__InfluenzaA__ADK32647

SEQ ID NO: 197327 - RNA, 1701 nt, Artificial Sequence; identical to SEQ ID NO: 196069
  derived and/or modified CDS sequence (opt5) from hemagglutinin__InfluenzaA__ADK32657

SEQ ID NO: 197328 - RNA, 1701 nt, Artificial Sequence; identical to SEQ ID NO: 196293
  derived and/or modified CDS sequence (opt5) from hemagglutinin__InfluenzaA__ADK32677

SEQ ID NO: 197329 - RNA, 1701 nt, Artificial Sequence
  derived and/or modified CDS sequence (opt5) from hemagglutinin__InfluenzaA__ADK32687
augaaggccauccuggugguccuccuguacaccuucgcuacagccaacgcggacacgcuuugcauuggcuaucacgcuaauaacagcaccgauacaguugacaccgugcuggagaaaaaugugacagucacccauuccgugaaccuccuggaagauaagcacaaugggaaacuuuguaagcugagaggaguugcuccccuccaucugggcaaaugcaacaucgccggguggauucugggaaauccugagugugaaucucucagcacagccuccucuuggagcuacaucguggagaccuccucuagcgacaacggcacgugcuauccgggggauuuuauugacuacgaagaacugcgggagcagcuuuccagcgucucuuccuucgaacgcuuugagaucuuccccaagaccagcucuuggccuaaucacgauuccaacaagggagugacagccgcuuguccccaugccggcgcgaaaaauuuuuauaagaaccugaucuggcucguuaaaaagggcaauagcuacccuaaacugucuaaguccuauauuaacgacaaggggaaagaagugcuuguccuguggggaauccaccaccccagcaccuccgccgaucaacagucucucuaccagaaugcugacgccuacguguucgugggcacaagcagauauuccaagaaauuuaagccugagauugcuauccggccgaaaguccgcgaucaggaggggagaaugaacuacuauuggacccugguugaacccggagacaagauuacguucgaggccacaggcaaccugguggugccucgguacgcguuugccauggaacgcaaugcugggagcggaaucauuaucucugauacccccguccaugacugcaacacaaccugucaaaccccuaaaggcgccaucaauacaucccuccccuuccagaacauucacccgaucacgauuggcaagugcccuaaguaugugaaaagcaccaagcugagacuugcuacagggcugcggaauguucccucuauccagagccgcggacucuuuggcgccauugccggguucaucgagggaggcuggaccgggaugguggacggaugguacggcuaucaucaccagaacgaacaaggcuccggguacgcugcggaucugaaaucuacacagaaugccaucgacaagauuaccaacaaagucaauagcgugaucgagaagaugaacacgcaguuuacagcuguuggaaaggaguucaaucaccuugagaaaagaauugagaaccugaauaagaaaguggaugacggcuuccucgauaucuggaccuacaacgccgaacugcugguccuccuggagaaugaacggacccuugacuaucaugauuccaacgugaagaaccuguacgagaaaguccgcagccagcucaagaauaacgccaaggagauugggaauggauguuuugaguucuaucacaaaugcgacaacacauguauggaaucugugaagaauggcaccuacgauuauccuaaauacuccgaagaggcuaagcugaacagagaagagaucgacgggguuaaacuugagagcacacggaucuaucaaauucuggccaucuacucuacgguggcguccagccucguccuggugguuucccugggcgcuauuucuuuuuggaugugcagcaauggaucccuccagugccgcaucuguauuuga

SEQ ID NO: 197330 - RNA, 1701 nt, Artificial Sequence; identical to SEQ ID NO: 196532
  derived and/or modified CDS sequence (opt5) from hemagglutinin__InfluenzaA__ADK32697

SEQ ID NO: 197331 - RNA, 1701 nt, Artificial Sequence; identical to SEQ ID NO: 195905
  derived and/or modified CDS sequence (opt5) from hemagglutinin__InfluenzaA__ADK32776

SEQ ID NO: 197332 - RNA, 1701 nt, Artificial Sequence; identical to SEQ ID NO: 196293
  derived and/or modified CDS sequence (opt5) from hemagglutinin__InfluenzaA__ADK33621

SEQ ID NO: 197333 - RNA, 1701 nt, Artificial Sequence
  derived and/or modified CDS sequence (opt5) from hemagglutinin__InfluenzaA__ADK33631
augaaggccauccuggugguccuccuguacaccuucgcuacagccaacgcggacacgcuuugcauuggcuaucacgcuaauaacagcaccgauacaguugacaccgugcuggagaaaaaugugacagucacccauuccgugaaccuccuggaaguuaagcacaaugggaaacuuuguaagcugagaggaguggcuccccuccaucugggcaaaugcaacaucgccggguggauucugggaaauccugagugugaaucucucagcacagccuccucuuggagcuacaucgucgagaccuccucuagcgauaacggcacgugcuauccgggggacuuuauuaauuacgaagaacugcgggagcagcuuuccagcgugucuuccuucgaacgcuuugagaucuuccccaagaccagcucuuggccuaaccacgauuccaauaagggaguuacagccgcuuguccccaugccggcgcgaaauccuuuuauaagaaccugaucuggcucgugaaaaagggcaauucuuacccuaaacuguccaagagcuauauuaacgacaaggggaaagaaguccuugugcuguggggaauccaccaccccuccaccucugccgaucaacagagccucuaccagaaugcugacgccuacguguucgucggcacauccagauauagcaagaaauuuaagccugagauugcuauccggccgaaaguucgcgaucaggaggggagaaugaacuacuauuggacccugguggaacccggagacaagauuacguucgaggccacaggcaaccugguggucccucgguacgcguuugccauggaacgcaaugcugggucuggaaucauuaucuccgauacccccgugcaugacugcaacacaaccugucaaaccccuaaaggcgccaucaauacaagccuccccuuccagaacauucacccgaucacgauuggcaagugcccuaaguauguuaaaucuaccaagcugagacuugcuacagggcugcggaaugugcccagcauccagucccgcggacucuuuggcgccauugccggguucaucgagggaggcuggaccgggauggucgauggaugguacggcuaucaucaccagaacgaacaaggcucuggguacgcugcggaccugaaaagcacacagaaugccaucgacaagauuaccaacaaagugaauagcguuaucgagaagaugaacacgcaguuuacagcugugggaaaggaguucaaucaccuugagaaaagaauugagaaccugaauaagaaagucgaugacggcuuccucgauaucuggaccuacaacgccgaacugcuggugcuccuggagaaugaacggacccuugacuaucaugauagcaacgucaagaaccuguacgagaaagugcgcucucagcucaagaauaacgccaaggagauugggaauggauguuuugaguucuaucacaaaugcgacaacacauguauggaauccguuaagaauggcaccuacgauuauccuaaauacagcgaagaggcuaagcugaacagagaagagaucgacggggugaaacuugagucuacacggaucuaucaaauucuggccaucuacuccacggucgcgagcucccucgugcugguugugucucugggcgcuauuagcuuuuggaugugcuccaauggaucucuccagugccgcaucuguauuuga

SEQ ID NO: 197334 - RNA, 1701 nt, Artificial Sequence; identical to SEQ ID NO: 196293
  derived and/or modified CDS sequence (opt5) from hemagglutinin__InfluenzaA__ADK33641

SEQ ID NO: 197335 - RNA, 1701 nt, Artificial Sequence; identical to SEQ ID NO: 195905
  derived and/or modified CDS sequence (opt5) from hemagglutinin__InfluenzaA__ADK33651

SEQ ID NO: 197336 - RNA, 1701 nt, Artificial Sequence; identical to SEQ ID NO: 195905
  derived and/or modified CDS sequence (opt5) from hemagglutinin__InfluenzaA__ADK33661

SEQ ID NO: 197337 - RNA, 1701 nt, Artificial Sequence; identical to SEQ ID NO: 195905
  derived and/or modified CDS sequence (opt5) from hemagglutinin__InfluenzaA__ADK33671

SEQ ID NO: 197338 - RNA, 1701 nt, Artificial Sequence
  derived and/or modified CDS sequence (opt5) from hemagglutinin__InfluenzaA__ADK33681
augaaggccauccuggugguccuccuguacaccuucgcuacagccaacgcggacacgcuuugcauuggcuaucacgcuaauaacagcaccgauacaguugacaccgugcuggagaaaaaugugacagucacccauuccgugaaccuccuggaagauaagcacaaugggaaacuuuguaagcugagaggaguugcuccccuccaucugggcaaaugcaacaucgccggguggauucugggaaauccugagugugaaucucucagcacagccuccucuuggagcuacaucguggagaccuccucuagcgacaacggcacgugcuauccgggggauuuuauugacuacgaagaacugcgggagcagcuuuccagcgucucuuccuucgaacgcuuugagaucuuccccaagaccagcucuuggccuaaucacgauuccaacaagggagugacagccgcuuguccccaugccggcgcgaaaucuuuuuauaagaaucugaucuggcucguuaaaaagggcaacagcuacccuaaacuguccaagagcuauauuaaugacaaggggaaagaagugcuuguccuguggggaauccaccaccccuccaccucugccgaucaacagagccucuaccagaacgcugacgccuacguguucgugggcacauccagauauagcaagaaauuuaagccugagauugcuauccggccgaaaguccgcgaucaggaggggagaaugaauuacuauuggacccugguugaacccggagacaagauuacguucgaggccacaggcaaccugguggugccucgguacgcguuugccauggaacgcaacgcugggucuggaaucauuaucuccgauacccccguccaugacugcaauacaaccugucaaaccccuaaaggcgccaucaacacaagccuccccuuccagaauauucacccgaucacgauuggcaagugcccuaaguaugugaaaucuaccaagcugagacuugcuacagggcugcggaacguucccagcauccagucccgcggacucuuuggcgccauugccggguucaucgagggaggcuggaccgggaugguggacggaugguacggcuaucaucaccagaaugaacaaggcucuggguacgcugcggaucugaaaagcacacagaacgccaucgacgagauuaccaauaaggucaacuccgugaucgagaaaaugaauacgcaguuuacagcuguuggaaaggaguucaaccaccuugagaagagaauugaaaaucugaacaaaaagguggaugacggcuuccucgauaucuggaccuacaaugccgagcugcugguccuccuggaaaacgagcggacccuugacuaucaugauagcaaugugaaaaagcuguacgagaaaguccgcucucagcucaagaacaacgccaaggaaauugggaauggauguuuugaguucuaucacaaaugcgacaacacauguauggaauccgugaagaauggcaccuacgauuauccuaaauacagcgaggaagcuaagcugaacagagaggagaucgacgggguuaaacuugaaucuacacggaucuaucaaauucuggccaucuacuccacgguggcgagcucccucguccuggugguuucucugggcgcuauuagcuuuuggaugugcuccaauggaucucuccagugccgcaucuguauuuga

SEQ ID NO: 197339 - RNA, 1701 nt, Artificial Sequence; identical to SEQ ID NO: 196354
  derived and/or modified CDS sequence (opt5) from hemagglutinin__InfluenzaA__ADK33691

SEQ ID NO: 197340 - RNA, 1701 nt, Artificial Sequence
  derived and/or modified CDS sequence (opt5) from hemagglutinin__InfluenzaA__ADK33701
augaaggccauccuggugguccuccuguacaccuucgcuacagccaacgcggacacgcuuugcauuggcuaucacgcuaauaacagcaccgauacaguugacaccgugcuggagaaaaaugugacagucacccauuccgugaaccuccuggaagauaagcacaaugggaaacuuuguaagcugagaggaguugcuccccuccaucugggcaaaugcaacaucgccggguggauucugggaaauccugagugugaaucucucagcacagccuccucuuggagcuacaucguggagaccuccucuagcgacaacggcacgugcuauccgggggauuuuauugacuacgaagaacugcgggagcagcuuuccagcgucucuuccuucgaacgcuuugagaucuuccccaagaccagcucuuggccuaaucacgauuccaacaagggagugacagccgcuuguccccaugccggcgcgaaaucuuuuuauaagaaucugaucuggcucguuaaaaagggcaacagcuacccuaaacuguccaagagcuauauuaaugacaaggggaaagaagugcuuguccuguggggaauccaccaccccuccaccucugccgaucaacagagccucuaccagaacgcugacgccuacguguucgugggcacauccagauauagcaagaaauuuaagccugagauugcuauccggccgaaaguccgcgaucaggaggggagaaugaauuacuauuggacccugguugaacccggagacaagauuacguucgaggccacaggcaaccugguggugccucgguacgcguuugccauggaacgcaacgcugggucuggaaucauuaucuccgauacccccguccaugacugcaauacaaccugucaaaccccuaaaggcgccaucaacacaagccuccccuuccagaauauucacccgaucacgauuggcaagugcccuaaguaugugaaaucuaccaagcugagacuugcuacagggcugcggaacguucccagcauccagucccgcggacucuuuggcgccauugccggguucaucgagggaggcuggaccgggaugguggacggaugguacggcuaucaucaccagaaugaacaaggcucuggguacgcugcggaucugaaaagcacacagaacgccaucgacaagauuaccaauaaagucaacuccgugaucgagaagaugaauacgcaguuuacagcuguuggaaaggaguucaaccaccuugagaaaagaauugagaaucugaacaagaaaguggaugacggcuuccucgauaucuggaccuacaaugccgaacugcugguccuccuggagaacgaacggacccuugacuaucaugauagcaaugugaagaaccuguacgagaaaguccgcucucagcucaagaacaaugccaaggagauugggaacggauguuuugaguucuaucacaaaugcgacaauacauguauggaauccgugaagaacggcaccuacgauuauccuaaauacagcgaagaggcuaagcugaauagagaagagaucgacgggguuaaacuugagucuacacggguguaucaaauccuggccauuuacuccacggucgcgagcucccucgugcugguugugucucugggcgcuaucagcuuuuggaugugcuccaacggaucucuccagugccgcauuuguaucuga

SEQ ID NO: 197341 - RNA, 1701 nt, Artificial Sequence
  derived and/or modified CDS sequence (opt5) from hemagglutinin__InfluenzaA__ADK33711
augaaggccauccuggugguccuccuguacaccuucgcuacagccaacgcggacacgcuuugcauuggcuaucacgcuaauaacagcaccgauacaguugacaccgugcuggagaagaaugugacagucacccauuccgugaaccuccuggaagauaagcacaaugggaaacuuuguaagcugagaggaguugcuccccuccaucugggcaaaugcaacaucgccggguggauucugggaaauccugagugugaaucucucagcacagccuccucuuggagcuacaucguggagaccuccucuagcgacaacggcacgugcuauccgggggauuuuauugacuacgaagaacugcgggagcagcuuuccagcgucucuuccuucgaacgcuuugagaucuuccccaagaccagcucuuggccuaaucacgauuccaacaagggagugacagccgcuuguccccaugccggcgcgaaaucuuuuuauaagaaucugaucuggcucguuaaaaagggcaacagcuacccuaaacuguccaagagcuauauuaaugacaaggggaaagaaauccuugugcuguggggcauucaccaccccuccaccucugccgaucaacagagccucuaccagaacgcugacgccuacgucuucgugggaacauccagauauagcaagaaauuuaagccugagaucgcuauucggccgaaagugcgcgaucaggaggggagaaugaauuacuauuggacccuggucgaacccggagacaagaucacguucgaggccacaggcaaccugguugugccucgguacgcguuugccauggaacgcaacgcugggucuggaauuaucaucuccgauacccccgugcaugacugcaauacaaccugucaaaccccuaaaggcgccauuaacacaagccuccccuuccagaauauccacccgauuacgaucggcaagugcccuaaguaugucaaaucuaccaagcugagacuugcuacagggcugcggaacauucccagcauccagucccgcggacucuuuggcgccaucgccggguucauugagggaggcuggaccgggaugguggacggaugguacggcuaucaucaccagaaugaacaaggcucuggguacgcugcggaucugaaaagcacacagaacgccaucgacgagauuaccaauaagguuaacuccgugaucgagaaaaugaauacgcaguuuacagcugucggaaaggaguucaaccaccuugagaagagaauugaaaaucugaacaaaaagguggaugacggcuuccucgauaucuggaccuacaaugccgagcugcugguucuccuggaaaacgagcggacccuugacuaucaugauagcaaugugaaaaaccuguacgagaagguccgcucucagcucaaaaacaaugccaaggaaaucgggaacggauguuuugaguucuaucacaagugcgacaauacauguauggaauccgugaaaaacggcaccuacgauuauccuaaguacagcgaggaagcuaaacugaauagagaggagauugacggggucaaacuugaaucuacacggaucuaucaaauucuggccaucuacuccacgguggcgagcucccucguucugguggucucucugggcgcuauuagcuuuuggaugugcuccaacggaucucuccagugccgcaucuguauuuga

SEQ ID NO: 197342 - RNA, 1701 nt, Artificial Sequence
  derived and/or modified CDS sequence (opt5) from hemagglutinin__InfluenzaA__ADK33721
augaaggccauccuggugguccuccuguacaccuucguuacagcuaacgccgacacgcuuugcauuggcuaucacgcgaauaacagcaccgauacaguggacaccgugcuggagaaaaaugucacagugacccauuccguuaaccuccuggaagauaagcacaaugggaaacuuuguaagcugagaggaguggcuccccuccaucugggcaaaugcaacaucgccggguggauucugggaaauccugagugugaaucucucagcacagccuccucuuggagcuacaucgucgagaccuccucuagcgacaacggcacgugcuauccgggggauuuuauugacuacgaagaacugcgggagcagcuuuccagcgugucuuccuucgaacgcuuugagaucuuccccaagaccagcucuuggccuaaucacgauuccaacaagggaguuacagcugccuguccccaugcuggcgccaagagcuuuuauaagaaucugaucuggcucgugaaaaagggcaacucuuacccuaaacuguccaagagcuauauuaaugacaaggggaaagaaguccuugugcuguggggaauccaccaccccuccaccucugcggaucaacagagccucuaccagaacgccgacgcuuacguguucgucggcacauccagauauagcaagaaauuuaagccugagauugccauccggccgaaaguucgcgaucaggaggggagaaugaauuacuauuggacccugguggaacccggagacaagauuacguucgaggcuacaggcaaccugguggucccucgguacgccuuugcgauggaacgcaacgccgggucuggaaucauuaucuccgauacccccgugcaugacugcaauacaaccugucaaaccccuaaaggcgcuaucaacacaagccuccccuuccagaauauucacccgaucacgauuggcaagugcccuaaguauguuaaaucuaccaagcugagacuugccacagggcugcggaacgugcccagcauccagucccgcggacucuuuggcgcuauugccggguucaucgagggaggcuggaccgggauggucgacggaugguacggcuaucaucaccagaaugaacaaggcucuggguacgccgcugaucugaaaagcacacagcacgcgaucgacgagauuaccaacaagguuaauuccgugaucgagaaaaugaacacgcaguuuacagccgugggaaaggaguucaaucaucuugagaagagaauugaaaaccugaauaaaaaggucgaugacggcuuccucgauaucuggaccuacaacgcugagcugcuggugcuccuggaaaaugagcggacccuugacuaucacgauagcaacgucaaaaaucuguacgagaaggugcgcucucagcucaaaaacaacgccaaggaaauugggaauggauguuuugaguucuaucauaagugcgacaacacauguauggaauccguuaaaaauggcaccuacgauuauccuaaguacagcgaggaagccaaacugaacagagaggagaucgacggggugaaacuugaaucuacacggaucuaucaaauucuggcuaucuacuccacggucgccagcucccucgugcugguugugucucugggcgcgauuagcuuuuggaugugcuccaauggaucucuccagugccgcaucuguauuuga

SEQ ID NO: 197343 - RNA, 1701 nt, Artificial Sequence
  derived and/or modified CDS sequence (opt5) from hemagglutinin__InfluenzaA__ADK33731
augaaggccacccuggugguccuccuguacacauucgcuacggccaacgcggacacccuuugcaucggcuaucacgcuaauaacagcacagauaccguugacacagugcuggagaaaaaugugaccgucacacauuccgugaaccuccuggaagauaagcacaaugggaaacuuuguaagcugagaggaguugcuccccuccaucugggcaaaugcaacauugccggguggauccugggaaauccugagugugaaucucucagcaccgccuccucuuggagcuacauuguggagacguccucuagcggcaacgggaccugcuauccgggagacuuuaucgauuacgaagaacugcgggagcagcuuuccagcgucucuuccuucgaacgcuuugagauuuuccccaagacaagcucuuggccuaaucacgacuccaacaagggcgugaccgccgcuuguccccaugccggcgcgaaaucuuuuuauaagaaucugaucuggcucguuaaaaaggggaacagcuacccuaaacuguccaagagcuauaucaaugauaagggaaaagaagugcuuguccuguggggcauucaccaccccuccacaucugccgaccaacagagccucuaccagaacgcugaugccuacgcuuucguggggaccuccagauauagcaagaaauuuaagccugagaucgccauucggccgaaagugcgcgaccaggagggaagaaugaauuacuauuggacgcuggucgaacccggcgauaagaucacauucgaggcgaccgggaaccugcucguuccucgguacgccuuugcuauggaacgcaacgccggaucuggcauuaucauuuccgacacacccgugcaugauugcaauaccaccugucaaacaccuaaaggcgcuaucaacacgagccugcccuuccagaauauccacccgauuaccaucgggaagugcccuaaguaugugaaaucuacaaaacuuagacuggccaccggacuccggaacguccccagcauucagucccgcggccuguuuggggccaucgcuggauucauugagggcggguggacaggaaugguggacggcugguacggcuaucaucaccagaaugaacaagggucuggauacgcggccgaccuuaagagcacccagaacgcuaucgaugagaucacgaauaagguuaacuccgugauugagaaaaugaauacacaguuuaccgccgucggcaaggaguucaaccaccuggagaagagaaucgaaaaucucaacaaaaagguggacgauggguuccuggacauuuggaccuacaaugccgagcugcucguucugcuugaaaacgagcggacacuggauuaucaugacagcaaugugaaaaaccucuacgagaagguccgcucucagcugaaaaacaaugcuaaggaaaucggaaacggcuguuuugaguucuaucacaagugcgauaauaccuguauggaauccgugaaaaacgggacauacgacuauccuaaguacagcgaggaagccaaacuuaauagagaggagauugauggcgucaagcuggaaucuacgcggaucuaucaaauccucgcgauuuacuccaccguggcuagcucccugguucugguggucucucucggagccaucagcuuuuggaugugcuccaacggcucucugcagugccgcauuuguaucuga

SEQ ID NO: 197344 - RNA, 1701 nt, Artificial Sequence; identical to SEQ ID NO: 196908
  derived and/or modified CDS sequence (opt5) from hemagglutinin__InfluenzaA__ADK33741

SEQ ID NO: 197345 - RNA, 1701 nt, Artificial Sequence; identical to SEQ ID NO: 194741
  derived and/or modified CDS sequence (opt5) from hemagglutinin__InfluenzaA__ADK33751

SEQ ID NO: 197346 - RNA, 1701 nt, Artificial Sequence
  derived and/or modified CDS sequence (opt5) from hemagglutinin__InfluenzaA__ADK33761
augaaggccauccuggugguccuccuguacaccuucgcuacagccaacgcggacacgcuuugcauuggcuaucacgcuaauaacagcaccgauacaguugacaccgugcuggagaagaaugugacagucacccauuccgugaaccuccuggaagauaagcacaaugggaaacuuuguaagcugagaggaguugcuccccuccaucugggcaaaugcaacaucgccggguggauucugggaaauccugagugugaaucucucagcacagccuccucuuggagcuacaucguggagaccuccucuagcgacaacggcacgugcuauccgggggauuuuauugacuacgaagaacugcgggagcagcuuuccagcgucucuuccuucgaacgcuuugagaucuuccccaagaccagcucuuggccuaaucacgauuccaacaagggagugacagccgcuuguccccaugccggcgcgaaaucuuuuuauaagaaucugaucuggcucguuaaaaagggcaacagcuacccuaaacuguccaagagcuauauuaaugacaaggggaaagaagugcuuguccuguggggaauccaccaccccuccaccucugccgaucaacagagccucuaccagaacgcugacgccuacguguucgugggcacauccagauauagcaagaaauuuaagccugagauugcuauccggccgaaaguccgcgaucaggaggggagaaugaauuacuauuggacccugguugaacccggagacaagauuacguucgaggccacaggcaaccugguggugccucgguacgcguuugccauggaacgcaacgcugggucuggaaucauuaucuccgauacccccguccaugacugcaauacaaccugucaaaccccuaaaggcgccaucaacacaagccuccccuuccagaauauucacccgaucacgauuggcaagugcccuaaguaugugaaaucuaccaagcugagccuugcuacagggcugagaaacguucccuccauccagucucggggacucuuuggcgccauugccggguucaucgagggaggcuggaccgggaugguggacggaugguacggcuaucaucaccagaaugaacaaggcagcggguacgcugcggaucugaaauccacacagaacgccaucgacgagauuaccaauaaggucaacagcgugaucgagaaaaugaauacgcaguuuacagcuguuggaaaggaguucaaccaccuugagaagcgcauugaaaaucugaacaaaaagguggaugacggcuuccucgauaucuggaccuacaaugccgagcugcugguccuccuggaaaacgagagaacccuugacuaucaugauucuaaugugaaaaaccuguacgagaagguccggucccagcucaaaaacaaugccaaggaaauugggaacggauguuuugaguucuaucacaagugcgacaauacauguauggaaagcgugaaaaacggcaccuacgauuauccuaaguacucugaggaagcuaaacugaaucgcgaggagaucgacgggguuaaacuugaauccacaagaaucuaucaaauucuggccaucuacagcacgguggcguccucucucguccuggugguuagccugggcgcuauuuccuuuuggaugugcucuaacggaagccuccagugccggaucuguauuuga

SEQ ID NO: 197347 - RNA, 1701 nt, Artificial Sequence; identical to SEQ ID NO: 195905
  derived and/or modified CDS sequence (opt5) from hemagglutinin__InfluenzaA__ADK33771

SEQ ID NO: 197348 - RNA, 1701 nt, Artificial Sequence; identical to SEQ ID NO: 195905
  derived and/or modified CDS sequence (opt5) from hemagglutinin__InfluenzaA__ADK33781

SEQ ID NO: 197349 - RNA, 1701 nt, Artificial Sequence; identical to SEQ ID NO: 195842
  derived and/or modified CDS sequence (opt5) from hemagglutinin__InfluenzaA__ADK33791

SEQ ID NO: 197350 - RNA, 1701 nt, Artificial Sequence; identical to SEQ ID NO: 197340
  derived and/or modified CDS sequence (opt5) from hemagglutinin__InfluenzaA__ADK33801

SEQ ID NO: 197351 - RNA, 1701 nt, Artificial Sequence
  derived and/or modified CDS sequence (opt5) from hemagglutinin__InfluenzaA__ADK33811
augaaggccauccuggugguccuccuguacaccuucgcuacagccaacgcggacacgcuuugcauuggcuaucacgcuaauaacagcaccgauacaguugacaccgugcuggagaagaaugugacagucacccauuccgugaaccuccuggaagauaagcacaaugggaaacuuuguaagcugagaggaguugcuccccuccaucugggcaaaugcaacaucgccggguggauucugggaaauccugagugugaaucucucagcacagccuccucuuggagcuacaucguggagaccuccucuagcgacaacggcacgugcuauccgggggauuuuauugacuacgaagaacugcgggagcagcuuuccagcgucucuuccuucgaacgcuuugagaucuuccccaagaccagcucuuggccuaaucacgauuccaacaagggagugacagccgcuuguccccaugccggcgcgaaaucuuuuuauaagaaucugaucuggcucguuaaaaagggcaacagcuacccuaaacuguccaagagcuauauuaaugacaaggggaaagaagugcuuguccuguggggaauccaccaccccuccaccucugccgaucaacagagccucuaccagaacgcugacgccuacguguucgugggcacauccagauauagcaagaaauuuaagccugagauugcuauccggccgaaaguccgcgaucaggaggggagaaugaauuacuauuggacccugguugaacccggagacaagauuacguucgaggccacaggcaaccugguggugccucgguacgcguuugccauggaacgcaacgcugggucuggaaucauuaucuccgauacccccguccaugacugcaauacaaccugucaaaccccuaaaggcgccaucaacacaagccuccccuuccagaauauucacccgaucacgauuggcaagugcccuaaguaugugaaaucuaccaagcugagacuugcuacagggcugcggaacguucccagcauccagucccgcggacucuuuggcgccauugccggguucaucgagggaggcuggaccgggaugguggacggaugguacggcuaucaucaccagaaugaacaaggcucuggguacgcugcggaucugaaaagcacacagcacgccaucgacgagauuaccaacaaggucaauuccgugaucgagaaaaugaacacgcaguuuacagcuguuggaaaggaguucaaucaucuugagaagagaauugaaaaccugaauaaaaagguggaugacggcuuccucgauaucuggaccuacaacgccgagcugcugguccuccuggaaaaugagcggacccuugacuaucacgauagcaacgugaaaaaucuguacgagaagguccgcucucagcucaaaaacaacgccaaggaaauugggaauggauguuuugaguucuaucauaagugcgacaacacauguauggaauccgugaaaaauggcaccuacgauuauccuaaguacagcgaggaagcuaaacugaacagagaggagaucgacgggaucaaacuugaaucuacacggauuuaucaaauccuggccauuuacuccacgguugcgagcucccucgugcuggucgugucucugggcgcuaucagcuuuuggaugugcuccaauggaucucuccagugccgcauuuguaucuga

SEQ ID NO: 197352 - RNA, 1701 nt, Artificial Sequence
  derived and/or modified CDS sequence (opt5) from hemagglutinin__InfluenzaA__ADK33821
augaaggccauccuggugguccuccuguacaccuucgcuacagccaacgcggacacgcuuugcauuggcuaucacgcuaauaacagcaccgauacaguugacaccgugcuggagaagaaugugacagucacccauuccgugaaccuccuggaagauaagcacaaugggaaacuuuguaagcugagaggaguugcuccccuccaucugggcaaaugcaacaucgccggguggauucugggaaauccugagugugaaucucucagcacagccuccucuuggagcuacaucguggagaccuccucuagcgacaacggcacgugcuauccgggggauuuuauugacuacgaagaacugcgggagcagcuuuccagcgucucuuccuucgaacgcuuugagaucuuccccaagaccagcucuuggccuaaucacgauuccaacaagggagugacagccgcuuguccccaugccggcgcgaaaucuuuuuauaagaaucugaucuggcucguuaaaaagggcaacagcuacccuaaacuguccaagagcuauauuaaugacaaggggaaagaagugcuuguccuguggggaauccaccaccccuccaccucugccgaucaacagagccucuaccagaacgcugacgccuacguguucgugggcacauccagauauagcaagaaauuuaagccugagauugcuauccggccgaaaguccgcgaucaggaggggagaaugaauuacuauuggacccugguugaacccggagacaagauuacguucgaggccacaggcaaccugguggugccucgguacgcguuuaccauggaacgcaacgccgggucuggaaucauuaucuccgauacacccguccaugacugcaauaccaccugucaaacaccuaaaggcgcuaucaacacgagccuccccuuccagaauauucacccgaucaccauuggcaagugcccuaaguaugugaaaucuacaaagcugagacuugccaccgggcugcggaacguucccagcauccagucccgcggacucuuuggcgcuauugccggguucaucgagggaggcuggacagggaugguggacggaugguacggcuaucaucaccagaaugaacaaggcucuggguacgccgcugaucugaaaagcacccagaacgcgaucgacgagauuacgaauaaggucaacuccgugaucgagaaaaugaauacacaguuuaccgccguuggaaaggaguucaaccaccuugagaagagaauugaaaaucugaacaaaaagguggaugacggcuuccucgauaucuggaccuacaaugcugagcugcugguccuccuggaaaacgagcggacacuugacuaucaugauagcaaugugaaaaaccuguacgagaagguccgcaaccagcucaaaaauaacgccaaggaaauugggaauggauguuuugaguucuaucacaagugcgacaacaccuguauggaaucugugaaaaauggcacauacgauuauccuaaguacuccgaggaagccaaacugaacagagaggagaucgacgggguuaaacuugaaagcacgcggaucuaucaaauucuggcuaucuacucuaccguggccuccagccucguccuggcggugucccugggcgcuauuucuuuuuggaugugcagcaauggaucccuccagugccgcaucuguauuuga

SEQ ID NO: 197353 - RNA, 1701 nt, Artificial Sequence
  derived and/or modified CDS sequence (opt5) from hemagglutinin__InfluenzaA__ADK33831
augaaggccauccuggugguccuccuguacaccuucgcuacagccaacgcggacacgcuuugcauuggcuaucacgcuaauaacagcaccgauacaguugacaccgugcuggagaaaaaugugacagucacccauuccgugaaccuccuggaagauaagcacaaugggaaacuuuguaagcugagaggaaucgcgccccuccaucugggcaaaugcaacauugccggguggauccugggaaauccugagugugaaucucucagcacagcuuccucuuggagcuacauuguugagaccuccucuagcgacaacggcacgugcuauccgggggauuuuaucgacuacgaagaacugcgggagcagcuuuccagcgugucuuccuucgaacgcuuugagaucuuccccaauaccagcucuuggccuaaccacgauuccaauaagggagucacagccgcuuguccccaugccggcgccaagagcuuuuauaaaaaccugauuuggcucgugaagaaaggcaauucuuacccuaagcuguccaaaagcuauaucaacgacaaggggaaggaaguucuugugcuguggggcauucaccaccccuccaccucugccgaucaacagagccucuaccagaaugcugacgccuacgucuucgugggaacauccagauauagcaaaaaguuuaaaccugagaucgcuauucggccgaaggugcgcgaucaggaggggagaaugaacuacuauuggacccuggucgaacccggagacaaaaucacguucgaggccacaggcaaccugguugugccucgguacgcguuugccauggaacgcaaugcugggucuggaauuaucaucuccgauacccccgugcaugacugcaacacaaccugucaaaccccuaagggcgccauuaauacaagccuccccuuccagaacauccacccgauuacgaucggcaaaugcccuaaguaugucaagucuaccaaacugagacuugcuacagggcugcggaaugugcccagcauucagucccgcggacucuuuggcgccaucgccggguucaucgagggaggcuggaccgggaugguugacggaugguacggcuaucaucaccagaacgaacaaggcucuggguacgcugcggaucuuaagagcacacagaaugccauugacgagaucaccaacaaagucaauuccgugauugagaagaugaacacgcaguuuacagcugugggaaaagaguucaaucaccuggagaagagaaucgaaaaccugaauaagaaaguugaugacggcuuccucgauauuuggaccuacaacgccgagcugcuggugcuccuggaaaaugagcggacccuugacuaucaugauagcaacgucaagaaccuguacgagaaagugcgcucucagcucaagaauaacgccaaagaaaucgggaauggauguuuugaguucuaucacaagugcgacaacacauguauggaauccgucaagaauggcaccuacgauuauccuaaauacagcgaggaagcuaagcugaacagagaggagaucgacggggugaaacuugaaucuacacggauuuaucaaauccuggccauuuacuccacgguugcgagcucccucgugcuggucgugucucugggcgcuaucagcuuuuggaugugcuccaauggaucucuccagugccgcauuuguaucuga

SEQ ID NO: 197354 - RNA, 1701 nt, Artificial Sequence; identical to SEQ ID NO: 196161
  derived and/or modified CDS sequence (opt5) from hemagglutinin__InfluenzaA__ADK33841

SEQ ID NO: 197355 - RNA, 1701 nt, Artificial Sequence; identical to SEQ ID NO: 196908
  derived and/or modified CDS sequence (opt5) from hemagglutinin__InfluenzaA__ADK33851

SEQ ID NO: 197356 - RNA, 1701 nt, Artificial Sequence; identical to SEQ ID NO: 194741
  derived and/or modified CDS sequence (opt5) from hemagglutinin__InfluenzaA__ADK33861

SEQ ID NO: 197357 - RNA, 1701 nt, Artificial Sequence
  derived and/or modified CDS sequence (opt5) from hemagglutinin__InfluenzaA__ADK33871
augaaggccauccuggugguccuccuguacaccuucgcuacagccaacgcggacacgcuuugcauuggcuaucacgcuaauaacagcaccgauacaguugacaccgugcuggagaaaaaugugacagucacccauuccgugaaccuccuggaagauaagcacaaugggaaacuuuguaagcugagaggaguugcuccccuccaucugggcaaaugcaacaucgccggguggauucugggaaauccugagugugaaucucucagcacagccuccucuuggagcuacaucguggagaccuccucuagcgacaacggcacgugcuauccgggggauuuuauugacuacgaagaacugcgggagcagcuuuccagcgucucuuccuucgaacgcuuugagaucuuccccaagaccagcucuuggccuaaucacgauuccaacaagggagugacagccgcuuguccccaugccggcgcgaaaucuuuuuauaagaaucugaucuggcucguuaaaaagggcaacagcuacccuaaacuguccaagagcuauauuaaugacaaggggaaagaagugcuuguccuguggggaauccaccaccccuccaccucugccgaucaacagagccucuaccagaacgcugacgccuacguguucgugggcacauccagauauagcaagaaauuuaagccugagauugcuauccggccgaaaguccgcgagcaggaagggagaaugaauuacuauuggacccugguugagcccggagauaagauuacguucgaagccacaggcaaccuggugaucccucgguacgcguuugccauggagcgcaacgcugggucuggaauuaucaucuccgacacccccgugcaugauugcaauacaaccugucaaaccccuaaaggcgccauuaacacaagccuccccuuccagaauauccacccgauuacgaucggcaagugcccuaaguaugucaaaucuaccaagcugagacuugcuacagggcugcggaacgugcccagcauucagucccgcggacucuuuggcgccaucgccggguucaucgaaggaggcuggaccgggaugguugacggaugguacggcuaucaucaccagaaugagcaaggcucuggguacgcugcggaccugaaaagcacacagaacgccauugaugagaucaccaauaaggugaacuccgucauugaaaagaugaauacgcaguuuacagcugugggaaaggaguucaaccaccuugaaaagagaaucgagaaucugaacaaaaagguugacgauggcuuccucgacauuuggaccuacaaugccgaacugcuggugcuccuggagaacgagcggacccuugauuaucaugacagcaaugucaaaaaccuguacgaaaaggugcgcucucagcucaaaaacaaugccaaggagaucgggaacggauguuuugaguucuaucacaagugcgauaauacauguauggaguccgucaaaaacggcaccuacgacuauccuaaguacagcgaagaggcuaaacugaauagagaggaaaucgauggggugaaacuugagucuacacggauuuaucaaauccuggccauuuacuccacgguugcgagcucccucgugcugcuggucucucucggcgcuaucagcuuuuggaugugcuccaacggaucucugcagugccgcauuuguaucuga

SEQ ID NO: 197358 - RNA, 1701 nt, Artificial Sequence
  derived and/or modified CDS sequence (opt5) from hemagglutinin__InfluenzaA__ADK33881
augaaggccauccuggugguccuccuguacaccuucgcuacagccaacgcggacacgcuuugcauuggcuaucacgcuaauaacagcaccgauacaguugacaccgugcuggagaaaaaugugacagucacccauuccgugaacauccucgaagauaagcacaaugggaaacuguguaaacuuagaggaguugcuccccugcaucucggcaagugcaacauugccggguggauccugggaaauccugagugugaaucucugagcacagccuccucuuggagcuacauuguggagaccuccucuagcgacaacggcacgugcuauccgggggauuuuaucgacuacgaagaacuccgggagcagcuguccagcgucucuuccuucgaacgcuuugagaucuuccccaagaccagcucuuggccuaaucacgauuccaacaagggagugacagccgcuuguccccaugccggcgcgaaaucuuuuuauaagaaucuuauuuggcugguuaaaaagggcaacagcuacccuaaacucuccaagagcuauaucaaugacaaggggaaagaagugcugguccuuuggggcauucaccaccccuccaccucugccgaucaacagagccuguaccagaacgcugacgccuacguguucgugggaacauccagauauagcaagaaauuuaagccugagaucgcuauucggccgaaaguccgcgaucaggaggggagaaugaauuacuauuggacccucguugaacccggagacaagaucacguucgaggccacaggcaaccugguggugccucgguacgcguuugccauggaacgcaacgcugggucuggaauuaucaucuccgauacccccguccaugacugcaauacaaccugucaaaccccuaaaggcgccauuaacacaagccugcccuuccagaauauccacccgauuacgaucggcaagugcccuaaguaugugaaaucuaccaagcucagacuggcuacagggcuucggaacguucccagcauucagucccgcggacuguuuggcgccaucgccggguucaucgagggaggcuggaccgggaugguggacggaugguacggcuaucaucaccagaaugaacaaggcucuggguacgcugcggaucucaaaagcacacagaacgccauugacgagaucaccaauaaggucaacuccgugauugagaaaaugaauacgcaguuuacagcuguuggaaaggaguucaaccaccuggagaagagaaucgaaaaucuuaacaaaaagguggaugacggcuuccuggauauuuggaccuacaaugccgagcuccugguccugcucgaaaacgagcggacccuggacuaucaugauagcaaugugaaaaaccuuuacgagaagguccgcucucagcugaaaaacaaugccaaggaaaucgggaacggauguuuugaguucuaucacaagugcgacaauacauguauggaauccgugaaaaacggcaccuacgauuauccuaaguacagcgaggaagcuaaacucaauagagaggagaucgacgggguuaagcuggaaucuacaaaaauuuaucaaauccuugccauuuacuccacgguggcgagcucccugguccucgugguuucucugggcgcuaucagcuuuuggaugugcuccaacggaucucugcagugccggauuuguaucuga

SEQ ID NO: 197359 - RNA, 1701 nt, Artificial Sequence
  derived and/or modified CDS sequence (opt5) from hemagglutinin__InfluenzaA__ADK33891
augaaggccauccuggugguccuccuguacaccuucgcuacagccaacgcggacacgcuuugcauuggcuaucacgcuaauaacagcaccgauacaguugacaccgugcuggagaagaaugugacagucacccauuccgugaaccuccuggaagauaagcacaaugggaaacuuuguaagcugagaggaaucgcuccccuccaucugggcaaaugcaacauugccggguggauccugggaaauccugagugugaaucucucagcacagccuccucuuggagcuacauuguugagaccuccucuagcgacaacggcacgugcuauccgggggauuuuaucgacuacgaagaacugcgggagcagcuuuccagcgugucuuccuucgaacgcuuugagaucuuccccaagaccagcucuuggccuaaucacgauuccaacaagggagucacagccgcuuguccccaugccggcgcgaaaucuuuuuauaagaaucugauuuggcucgugaaaaagggcaacagcuacccuaaacuguccaagagcuauaucaaugacaaggggaaagaaguucuugugcuguggggcauucaccaccccuccaccucugccgaucaacagagccucuaccagaacgcugacgccuacgucuucgugggaacauccagauauagcaagaaauuuaagccugagaucgcuauucggccgaaagugcgcgaucaggaggggagaaugaauuacuauuggacccuggucgaacccggagacaagaucacguucgaggccacaggcaaccugguugugccucgguacgcguuugccauggaacgcaacgcugggucuggaauuaucaucuccgauacccccgugcaugacugcaauacaaccugucaaaccccuaaaggcgccauuaacacaagccuccccuuccagaauauccacccgauuacgaucggcaagugcccuaaguaugucaaaucuaccaagcugagacuugcuacagggcugcggaacgugcccagcauucagucccgcggacucuuuggcgccaucgccggguucaucgagggaggcuggaccgggaugguugacggaugguacggcuaucaucaccagaaugaacaaggcucuggguacgcugcggaucugaaaagcacacagaacgccauugacgagaucaccaauaaggugaacuccgucauugagaaaaugaauacgcaguuuacagcugugggaaaggaguucaaccaccuugagaagagaaucgaaaaucugaacaaaaagguugaugacggcuuccucgauauuuggaccuacaaugccgagcugcuggugcuccuggaaaacgagcggacccuugacuaucaugauagcaaugucaaaaaccuguacgagaaggugcgcaaccagcucaaaaauaacgccaaggaaaucgggaauggauguuuugaguucuaucacaagugcgacaacacauguauggaaucugucaaaaauggcaccuacgauuauccuaaguacuccgaggaagcuaaacugaacagagaggagaucgacggggugaaacuugaaagcacacggauuuaucaaauccuggccauuuacucuacgguugcguccagccucgugcuggucgugucccugggcgcuaucucuuuuuggaugugcagcaauggaucccuccagugccgcauuuguaucuga

SEQ ID NO: 197360 - RNA, 1701 nt, Artificial Sequence; identical to SEQ ID NO: 196908
  derived and/or modified CDS sequence (opt5) from hemagglutinin__InfluenzaA__ADK33901

SEQ ID NO: 197361 - RNA, 1701 nt, Artificial Sequence
  derived and/or modified CDS sequence (opt5) from hemagglutinin__InfluenzaA__ADK33911
augaaggccauccuggugguccuccuguacaccuucgcuacagccaacgcggacacgcuuugcauuggcuaucacgcuaauaacagcaccgauacaguugacaccgugcuggagaagaaugugacagucacccauuccgugaaccuccuggaagggaagcacaauggaaaacuuuguaagcugagaggcguugcuccccuccaucuggggaaaugcaacaucgccggauggauucugggcaauccugagugugaaucucucagcacagccuccucuuggagcuacaucguggagaccuccucuagcgauaacgggacgugcuauccgggagacuuuauugauuacgaagaacugcgggagcagcuuuccagcgucucuuccuucgaacgcuuugagaucuuccccaagaccagcucuuggccuaaucacgacuccaacaagggcgugacagccgcuuguccccaugccggcgcgaaaucuuuuuauaagaaucugaucuggcucauuaaaaaggggaacagcuacccuaaacuguccaagagcuauaucaaugauaagggaaaagaaguucuugugcuguggggcauucaccaccccuccaccucugccgaccaacagagccucuaccagaacgcugaugccuacgucuucguggggacauccagauauagcaagaaauuuaagccugagaucgcuauucggccgaaagugcgcgaccaggagggaagaaugaauuacuauuggacccuggucgaacccggcgauaagaucacguucgaggccacagggaaccugguugugccucgguacgcguuugccauggaacgcaacgcuggaucuggcauuaucaucuccgacacccccgugcaugauugcaauacaaccugucaaaccccuaaaggcgccauuaacacaagccuccccuuccagaauauccacccgauuacgaucgggaagugcccuaaguaugucaaaucuaccaagcugagacuugcuacaggacugcggaacauucccagcauccagucccgcggccucuuuggggccaucgccggauucauugagggcggguggaccggaaugguggacggcugguacggcuaucaucaccagaaugaacaagggucuggauacgcugcggaccugaaaagcacacagaacgccaucgaugagauuaccaauaagguuaacuccgugaucgagaaaaugaauacgcaguuuacagcugucggcaaggaguucaaccaccuugagaagagaauugaaaaucugaacaaaaagguggacgauggguuccucgacaucuggaccuacaaugccgagcugcugguucuccuggaaaacgagcggacccuugauuaucaugacagcaaugugaaaaaccuguacgagaagguccgcucucagcucaaaaacaaugccaaggaaaucggaaacggcuguuuugaguucuaucacaagugcgauaauacauguauggaauccgugaaaaacgggaccuacgacuauccuaaguacagcgaggaagcuaaacugaauagagaggagauugauggcgucaaacuugaaucuacacggaucuaucaaauucuggccaucuacuccacgguggcgagcucccucguucugguggucucucugggagcuauuagcuuuuggaugugcuccaacggcucucuccagugccgcaucuguauuuga

SEQ ID NO: 197362 - RNA, 1701 nt, Artificial Sequence
  derived and/or modified CDS sequence (opt5) from hemagglutinin__InfluenzaA__ADK33931
augaaggccauccuggugguccuccuguacaccuucgcuacagccaacgcggacacgcuuugcauuggcuaucacgcuaauaacagcaccgauacaguugacaccgugcuggagaaaaaugugacagucacccauuccgugaaccuccuggaagauaagcacaaugggaaacuuuguaagcugagaggaguugcuccccuccaucugggcaaaugcaacaucgccggguggauucugggaaauccugagugugaaucucucagcacagccuccucuuggagcuacaucguggagaccuccucuagcgacaacggcacgugcuauccgggggauuuuauugacuacgaagaacugcgggagcagcuuuccagcgucucuuccuucgaacgcuuugagaucuuccccaagaccagcucuuggccuaaucacgauuccaacaagggagugacagccgcuuguccccaugccggcgcgaaaucuuuuuauaagaaucugaucuggcucguuaaaaagggcaacagcuacccuaaacuguccaagagcuauauuaaugacaaggggaaagaagugcuuguccuguggggaauccaccaccccuccaccucugccgaucaacagagccucuaccagaacgcugacgccuacguguucgugggcacauccagauauagcaagaaauuuaagccugagauugcuauccggccgaaaguccgcgagcaggaagggagaaugaauuacuauuggacccugguugagcccggagauaagauuacguucgaagccacaggcaaccugguggugccucgguacgcguuugccauggagcgcaacgcugggucuggaaucauuaucuccgacacccccguccaugauugcaauacaaccugucaaaccccuaaaggcgccaucaacacaagccuccccuuccagaauauucacccgaucacgauuggcaagugcccuaaguaugugaaaucuaccaagcugagacuugcuacagggcugcggaacguucccagcauccagucccgcggacucuuuggcgccauugccggguucaucgaaggaggcuggaccgggaugguggacggaugguacggcuaucaucaccagaaugagcaaggcucuggguacgcugcggaccugaaaagcacacagaacgccaucgaugagauuaccaauaaggucaacuccgugaucgaaaagaugaauacgcaguuuacagcuguuggaaaggaguucaaccaccuugaaaagagaauugagaaucugaacaaaaagguggacgauggcuuccucgacaucuggaccuacaaugccgaacugcugguccuccuggagaacgagcggacccuugauuaucaugacagcaaugugaaaaaccuguacgaaaagguccgcucucagcucaaaaacaaugccaaggagauugggaacggauguuuugaguucuaucacaagugcgauaauacauguauggaguccgugaaaaacggcaccuacgacuauccuaaguacagcgaagaggcuaaacugaauagagaggaaaucgaugggguuaaacuugagucuacacggaucuaucaaauucuggccaucuacuccacgguggcgagcucccucguccugcuggugucucucggcgcuauuagcuuuuggaugugcuccaacggaucucugcagugccgcaucuguauuuga

SEQ ID NO: 197363 - RNA, 1701 nt, Artificial Sequence
  derived and/or modified CDS sequence (opt5) from hemagglutinin__InfluenzaA__ADK33941
augaaggccauccuggugguccuccuguacaccuucgcuacagccaacgcggacacgcuuugcauuggcuaucacgcuaauaacagcaccgauacaguugacaccgugcuggagaaaaaugugacagucacccauuccgugaaccuccuggaagauaagcacaaugggaaacuuuguaagcugagaggaguugcuccccuccaucugggcaaaugcaacaucgccggguggauucugggaaauccugagugugaaucucucagcacagccuccucuuggagcuacaucguggagaccuccucuagcgacaacggcacgugcuauccgggggauuuuauugacuacgaagaacugcgggagcagcuuuccagcgucucuuccuucgaacgcuuugagaucuuccccaagaccagcucuuggccuaaucacgauuccaacaagggagugacagccgcuuguccccaugccggcgcgaaaucuuuuuauaagaaucugaucuggcucguuaaaaagggcaacagcuacccuaaacuguccaagagcuauauuaaugacaaggggaaagaagugcuuguccuguggggaauccaccaccccuccaccucugccgaucaacagagccucuaccagaacgcugacgccuacguguucgugggcacauccagauauagcaagaaauuuaagccugagauugcuauccggccgaaaguccgcgaucaggaggggagaaugaauuacuauuggacccugguugaacccggagacaagauuacguucgaggccacaggcaaccugguggugccucgguacgcguuugccauggaacgcaacgcugggucuggaaucgucauuuccgauacccccgugcaugacugcaauacaaccugucaaaccccuaaaggcgccaucaacacaagccuccccuuccagaauauccacccgauuacgaucggcaagugcccuaaguauguuaaaucuaccaagcugagacuugcuacagggcugcggaacauucccagcauccagucccgcggacucuuuggcgccauugccggguucaucgagggaggcuggaccgggaugguggacggaugguacggcuaucaucaccagaaugaacaaggcucuggguacgcugcggaucugaaaagcacacagaacgccaucgacaagauuaccaauaaagucaacuccgugaucgagaagaugaauacgcaguuuacagcuguuggaaaggaguucaaccaccuugagaaaagaauugagaaucugaacaagaaaguggaugacggcuuccucgauaucuggaccuacaaugccgaacugcugguccuccuggagaacgaacggacccuugacuaucaugauagcaaugugaagaaccuguacgagaaaguccgcucucagcucaagaacaaugccaaggagauugggaacggauguuuugaguucuaucacaaaugcgacaauacauguauggaauccgugaagaacggcaccuacgauuauccuaaauacagcgaagaggcuaagcugaauagagaagagaucgacgggguuaaacuugagucuacacggaucuaucaaauucuggccaucuacuccacgguggcgagcucccucguccuggugguuucucugggcgcuauuagcuuuuggaugugcuccaacggaucucuccagugccgcaucuguauuuga

SEQ ID NO: 197364 - RNA, 1701 nt, Artificial Sequence; identical to SEQ ID NO: 197361
  derived and/or modified CDS sequence (opt5) from hemagglutinin__InfluenzaA__ADK33951

SEQ ID NO: 197365 - RNA, 1701 nt, Artificial Sequence; identical to SEQ ID NO: 195905
  derived and/or modified CDS sequence (opt5) from hemagglutinin__InfluenzaA__ADK33961

SEQ ID NO: 197366 - RNA, 1701 nt, Artificial Sequence; identical to SEQ ID NO: 195685
  derived and/or modified CDS sequence (opt5) from hemagglutinin__InfluenzaA__ADK45312

SEQ ID NO: 197367 - RNA, 1701 nt, Artificial Sequence
  derived and/or modified CDS sequence (opt5) from hemagglutinin__InfluenzaA__ADK45410
augaagaccaucauugcccugagcuacauccucugccugguguucgcucagaaacuucccggcaacgacaauuccacagccacgcugugucucgggcaccaugcggucccuaacggaaccauuguuaagacaaucaccaaugaucaaauugaggugacaaacgcuaccgaacuggugcagucuagcuccacaggcgagaucugcgacucuccgcaccagauccuugauggggaaaauuguacccugauugacgcccuccugggagauccccagugcgacggcuuucaaaacaaaaagugggaucuguucgucgagagaagcaaagcccauuccaauuguuauccuuacgacgugcccgauuaugcuucucuccggagccugguugccuccagcgggacgcuugaauuuaacaaugagucuuucaacuggaccggagugacacagaauggcaccuccagcgcuugcauccgcagaucuaacaauuccuuuuucagccggcugaacuggcucacacaccugaaguuuaaguacccugcccuuaaugucaccaugcccaacaacgagcaguucgacaaacuguauauuuggggcgugcaucacccugggacggauaaugaccagaucuuucucuacgcgcaagccucuggacgcauuacaguuuccaccaagagaagccagcagacagugaucccgaacauuggcucccggccccgcgucagaaauaucccuucucggaucagcauuuauuggaccaucgugaaacccggggauauucugcugaucaacuccaccggaaaucucauugcuccucgcggcuacuucaagaucagaagcgggaaaucuuccaucaugcggagcgacgcccccauuggaaaguguaacucugaaugcaucacaccgaauggcagcauuccuaacgacaagcccuuucagaaugugaaccgcaucacguacggcgcuuguccuagauaugucaaacaaaauacccugaaacuugccacagggaugcggaacguucccgagaagcagacccgcggaauuuucggcgcgaucgccggguuuaucgaaaauggaugggagggcaugguggaugggugguacggauucagacaccagaacuccgagggccggggccaagcugccgaccugaagucuacacaggcugccauugaucagaucaaugggaaacucaacagacugauuggaaagaccaacgaaaaauuccaucagaucgagaaggaauuuagcgagguggaaggccgcauucaagaccuugagaaguaugucgaggauacgaaaaucgaccugugguccuacaaugccgaacuccugguggcucuggagaaccagcacacaauugaucucaccgacagcgaaaugaauaagcuguucgagaaaaccaagaaacagcuucgggaaaacgcggaggauauggggaauggaugcuuuaagaucuaucauaagugugacaacacaugcaucggcucuauuagaaaugggaccuacgaucacgacguuuaucgcgacgaggcccugaacaaucgguuccagaucaaaggcguggaacucaaguccggauacaaagauuggauucuguggaucagcuuugcuauuucuugcuuccuucugugugucgcccuccugggcuuuaucaugugggccugccaaaaggggaacaucagauguaauauuugcaucuga

SEQ ID NO: 197368 - RNA, 1701 nt, Artificial Sequence
  derived and/or modified CDS sequence (opt5) from hemagglutinin__InfluenzaA__ADK45421
augaagaccaucauugcccugagcuacauccucugccugguguucgcucagaaacuucccggcaacgacaauuccacagccacgcugugucucgggcaccaugcggucccuaacggaaccauuguuaagacaaucaccaaugaucaaauugaggugacaaacgcuaccgaacuggugcagucuagcuccacaggcgagaucugcgacucuccgcaccagauccuugaugggaaaaauuguacccugauugacgcccuccugggagauccccagugcgacggcuuucaaaacaagaaaugggaucuguucgucgaaagaagcaaggccuauuccaauuguuacccuuaugacgugcccgauuacgcuucucuccggagccugguugccuccagcgggacgcuugaguuuaacaaugaaucuuucaacuggaccggagugacacagaauggcaccuccagcgcuugcauccgcagaucuaagaacuccuuuuucagccggcugaauuggcucacacaucugaacuuuaaauauccugcccuuaaugucaccaugcccaacaacgagcaguucgacaagcuguacauuuggggcgugcaccauccugggacggauaaagaccagaucuuucucuaugcgcaagccucuggacgcauuacaguuuccaccaagagaagccagcagacagugaucccgaauauuggcucccggccccgcaucagaaacaucccuucucggauuagcaucuacuggaccauugucaaacccggggauauccugcugauuaauuccaccggaaaccucaucgcuccucgcggcuacuucaagaucagaagcgggaagucuuccauuaugcggagcgacgcccccaucggaaaauguaauucugagugcauuacaccgaacggcagcaucccuaaugacaagcccuuucagaacgugaaucgcauuacguauggcgcuuguccuagauacgugaaacaauccacccugaaacuugccacagggaugcggaacguccccgaaaaacagacccgcggaaucuucggcgcgaucgccggguuuauugagaauggaugggaaggcaugguugaugggugguauggauucagacaccagaacucugagggccggggccaagcugccgaccucaagagcacacaggcugccaucgaucagauuaaugggaaacugaacagacugaucggaaagaccaaugagaaguuccaccagauugaaaaagaguuuuccgaaguggagggccgcauccaagaccuugaaaaguacguggaggauacgaaaauugaccuguggagcuauaacgccgagcuccuggucgcucuggaaaaccagcauacaaucgaucucaccgacucugagaugaauaagcuguucgaaaagaccaagaagcagcuucgggagaacgcggaagauauggggaauggaugcuuuaaaaucuaccacaagugugacaacgccugcauuggcuccaucagaaaugggacauaugaucaugacguguaccgcgacgaggcucugaacaaucgguuccagauuaaaggcguugagcucaagagcggauacaaagauuggauccuguggauuucuuuugccaucuccugcuuccuucuguguguggcccuccugggcuuuaucaugugggcuugccaaaaggggaacauuagauguaauaucugcauuuga

SEQ ID NO: 197369 - RNA, 1701 nt, Artificial Sequence
  derived and/or modified CDS sequence (opt5) from hemagglutinin__InfluenzaA__ADK45432
augaagaccaucauugcccugagcuacacacucugccugguguucgcucagaaacuucccagaaacgacaauuccacggccacccugugucucggccaccaugcggucccuaacgggacaaucguuaagaccauuacaaaugaucaaaucgaggugaccaacgcuacagaacuggugcagucuagcuccaccggagagauuugcgacaauccgcaccagauccuugauggcgaaaacuguacgcugaucgacgcccuccugggggauccccagugcgacggauuucaaaauaaaaagugggaucuguucgucgagcggucuaaagccuauagcaacuguuacccuuaugacgugcccgauuacgcuucccuccgcucucugguugccagcuccggcacccuugaauuuaauaacgagagcuucaauuggacaggggugacccagaacggaacaucuuccgcuugcauuagacggagcaauaacuccuuuuucucucgccugaauuggcucacccaucugaaguuuaaguauccugcccuuaacgucacgaugcccaacaaugagcaguucgacaaacuguacaucuggggcgugcaccauccuggcacagauaacgaccagauuuuucucuaugcgcaagccagcgggagaaucaccguuucuacaaagcggucccagcagaccgugauuccgaauaucggaagccgccccagaguccggaacauuccuucccgcaucucuaucuacuggaccauugugaaacccggcgauauccugcugauuaauagcacagggaaccucaucgcuccuagaggauacuucaagauucgguccggcaaaagcucuaucaugcgcuccgacgcccccaucgggaaguguaauagcgaaugcauuacgccgaacggaucuaucccuaaugacaagcccuuucagaacgugaauagaauuaccuauggcgcuuguccucgguacgucaaacaaaacacacugaaacuugccaccggcaugcgcaauguucccgagaagcagacaagagggaucuucggagcgauugccggcuuuaucgaaaacgggugggagggaaugguggauggcugguauggguuccggcaccagaauagcgagggaagaggccaagcugccgaccugaaguccacccaggcugccaucgaucagauuaacggcaaacucaaccgccugaucgggaagacgaaugaaaaauuccaccagauugagaaggaauuuucugagguggaaggacggauccaagaccuugagaaguacgucgaggauacaaaaauugaccuguggagcuauaacgccgaacuccugguggcucuggagaaucagcauaccaucgaucucaccgacuccgaaaugaacaagcuguucgagaaaacaaagaaacagcuuagagaaaaugcggaggauaugggcaacgggugcuuuaagauuuaccacaagugugacaaugccugcaucggaagcauccgcaacggcaccuaugaucaugacguuuaccgggacgaggcucugaauaacagauuccagauuaaagggguggaacucaagucuggcuacaaagauuggauccuguggauuuccuuugccaucagcugcuuccuucugugugucgcccuccugggauuuauuaugugggcuugccaaaagggcaauauccgcuguaacaucugcauuuga

SEQ ID NO: 197370 - RNA, 1701 nt, Artificial Sequence; identical to SEQ ID NO: 194506
  derived and/or modified CDS sequence (opt5) from hemagglutinin__InfluenzaA__ADK45443

SEQ ID NO: 197371 - RNA, 1701 nt, Artificial Sequence; identical to SEQ ID NO: 196905
  derived and/or modified CDS sequence (opt5) from hemagglutinin__InfluenzaA__ADK48798

SEQ ID NO: 197372 - RNA, 1701 nt, Artificial Sequence; identical to SEQ ID NO: 195905
  derived and/or modified CDS sequence (opt5) from hemagglutinin__InfluenzaA__ADK62683

SEQ ID NO: 197373 - RNA, 1701 nt, Artificial Sequence
  derived and/or modified CDS sequence (opt5) from hemagglutinin__InfluenzaA__ADK62693
augaaggccauccuggugguccuccuguacaccuucgcuacagccaacgcggacacgcuuugcauuggcuaucacgcuaauaacagcaccgauacaguugacaccgugcuggagaagaaugugacagucacccauuccgugaaccuccuggaagauaagcacaaugggaaacuuuguaagcugagaggaguugcuccccuccaucugggcaaaugcaacaucgccggguggauucugggaaauccugaguguggcucucucagcacagccuccucuuggagcuacaucguggaaaccuccucuagcgacaacgggacgugcuauccgggagauuuuauugacuacgaggaacugcgggagcagcuuuccagcgucucuuccuucgagcgcuuugaaaucuuccccaagaccagcucuuggccuaaucacgauuccaacaagggcgugacagccgcuuguccccaugccggcgcgaaaucuuuuuauaagaaucugaucuggcucguuaaaaaggggaacagcuacccuaaacuguccaagagcuauauuaaugacaagggaaaagaggugcuuguccuguggggcauccaccaccccuccaccucugccgaucaacagagccucuaccagaacgcugacgccuacguguucguggggacauccagauauagcaagaaauuuaagccugaaauugcuauccggccgaaaguccgcgagcaggagggaagaaugaauuacuauuggacccugguugaacccggcgauaagauuacguucgaggccacagggaaccugguggugccucgguacgcguuugccauggaacgcaacgcuggaucuggcaucauuaucuccgacacccccguccaugauugcaauacaaccugucaaaccccuaaaggcgccaucaacacaagccuccccuuccagaaugugcacccgauuacgaucgggaagugcccuaaguauguuaaaucuaccaagcugagacuugcuacaggacugcggaacgugcccagcauucagucccgcggccucuuuggggccaucgccggauucauugagggcggguggaccggaauggucgacggcugguacggcuaucaucaccagaaugaacaagggucuggauacgcugcggaccugaaaagcacacagaacgccaucgaugagaucaccaauaaggugaacuccguuauugagaaaaugaauacgcaguuuacagcugugggcaaggaguucaaccaccuugaaaagagaaucgaaaaucugaacaaaaaggucgacgauggguuccucgacauuuggaccuacaaugccgagcugcuggugcuccuggaaaacgagcggacccuugauuaucaugacagcaaugucaaaaaccuguacgagaaggugcgcucucagcucaaaaacaaugccaaggaaaucggaaacggcuguuuugaguucuaucacaagugcgauaauacauguauggaauccguuaaaaacgggaccuacgacuauccuaaguacagcgaggaagcuaaacugaauagagaggagauugauggcgugaaacuugaaucuacacggaucuaucaaauccuggccauuuacuccacggucgcgagcucccucgugcugguugugucucugggagcuaucagcuuuuggaugugcuccaacggcucucuccagugccgcauuuguaucuga

SEQ ID NO: 197374 - RNA, 1701 nt, Artificial Sequence; identical to SEQ ID NO: 195842
  derived and/or modified CDS sequence (opt5) from hemagglutinin__InfluenzaA__ADK62703

SEQ ID NO: 197375 - RNA, 1701 nt, Artificial Sequence
  derived and/or modified CDS sequence (opt5) from hemagglutinin__InfluenzaA__ADK64992
augaaggccauccuggugguccuccuguacaccuucgcuacagccaacgcggacacgcuuugcauuggcuaucacgcuaauaacagcaccgauacaguugacaccgugcuggagaagaaugugacagucacccauuccgugaaccuccuggaagauaagcacaaugggaaacuuuguaagcugagaggaguugcuccccuccaucugggcaaaugcaacaucgccggguggauucugggaaauccugagugugaaucucucagcacagccuccucuuggagcuacaucguggagaccuccucuagcgacaacggcacgugcuauccgggggauuuuauugacuacgaagaacugcgggagcagcuuuccagcgucucuuccuucgaacgcuuugagaucuuccccaagaccagcucuuggccuaaucacgauuccaacaagggagugacagccgcuuguccccaugccggcgcgaaaucuuuuuauaagaaucugaucuggcucguuaaaaagggcaacagcuacccuaaacuguccaagagcuauauuaaugacaaggggaaagaagugcuuguccuguggggaauccaccaccccuccaccucugccgaucaacagagccucuaccagaacgcugacgccuacguguucgugggcacauccagauauagcaagaaauuuaagccugagauugcuauccggccgaaaguccgcgaucaggaggggagaaugaauuacuauuggacccugguugaacccggagacaagauuacguucgaggccacaggcaaccugguggugccucgguacgcguuugccauggaacgcaacgcugggucuggaaucauuaucuccgauacccccguccaugacugcaauacaaccugucaaaccccuaaaggcgccaucaacacaagccuccccuuccagaauauucacccgaucacgauuggcaagugcccuaaguaugugaaaucuaccaagcugagacuugcuacagggcugcggaacguucccagcauccagucccgcggacucuuuggcgccauugccggguucaucgagggaggcuggaccgggaugguggacggaugguacggcuaucaucaccagaaugaacaaggcucuggguacgcugcggaucugaaaagcacacagaacgccaucgacgagauuaccaauaaggucaacuccgugaucgagaaaaugaauacgcaguuuacagcuguuggaaaggaguucaaccaccuugagaagagaauugaaaaucugaacaaaaagguggaugacggcuuccucgauaucuggaccuacaaugccgagcugcugguccuccuggaaaacgagcggacccuugacuaucaugauagcaaugugaaaaaccuguacgagaagguccgcucucagcucaaaaacaaugccaaggaaauugggaacggauguuuugaguucuaucacaagugcgacaauacauguauggaauccgugaaaaacggcaccuacgauuauccuaaguacagcgaggaagcuaaacugaauagagaggagaucgacgggaucaaacuugaaucuacacggauuuaucaaauccuggccauuuacuccacgguugcgagcucccucgugcuggucgugucucugggcgcuaucagcuuuuggaugugcuccaacggaucucuccaguaccgcauuugcaucuga

SEQ ID NO: 197376 - RNA, 1701 nt, Artificial Sequence
  derived and/or modified CDS sequence (opt5) from hemagglutinin__InfluenzaA__ADK65001
augaaggccauccuggugguccuccuguacaccuucgcuacagccaacgcggacacgcuuugcauuggcuaucacgcuaauaacagcaccgauacaguugacaccgugcuggagaaaaaugugacagucacccauuccgugaaccuccuggaagauaagcacaaugggaaacuuuguaagcugggaggcguugcuccccuccaucuggggaaaugcaacaucgccggauggauucugggcaauccugagugugaaucucucagcacagccuccucuuggagcuacaucguggagaccuccucuagcgacaacgggacgugcuauccgggagauuuuauugacuacgaagaacugagagagcagcuuuccagcgucucuuccuucgaacgguuugagaucuuccccaagaccagcucuuggccuaaucacgauuccaacaagggcgugacagccgcuuguccccaugccggcgcgaaaucuuuuuauaagaaucugaucuggcucguuaaaaaggggaacagcuacccuaaacuguccaagagcuauauuaaugacaagggaaaagaagugcuuguccuguggggcauccaccaccccuccaccucugccgaucaacagagccucuaccagaacgcugacgccuacguguucguggggacaucccgcuauagcaagaaauuuaagccugagauugcuaucagaccgaaaguccgggaucaggagggacgcaugaauuacuauuggacccugguugaacccggcgacaagauuacguucgaggccacagggaaccugguggugccuagauacgcguuugccauggaacggaacgcuggaucuggcaucauuaucuccgauacccccguccaugacugcaauacaaccugucaaaccccuaaaggcgccaucaacacaagccuccccuuccagaauauucacccgaucacgauugggaagugcccuaaguaugugaaaucuaccaagcugcgccuugcuacaggacugagaaacguucccagcauccagucccggggccucuuuggggccauugccggauucaucgagggcggguggaccggaaugguggacggcugguacggcuaucaucaccagaaugaacaagggucuggauacgcugcggaucugaaaagcacacagaacgccaucgacgagauuaccaauaaggucaacuccgugaucgagaaaaugaauacgcaguuuacagcuguuggcaaggaguucaaccaccuugagaagcgcauugaaaaucugaacaaaaagguggaugacggguuccucgauaucuggaccuacaaugccgagcugcugguccuccuggaaaacgagagaacccuugacuaucaugauagcaaugugaaaaaccuguacgagaagguccggucucagcucaaaaacaaugccaaggaaauuggaaacggcuguuuugaguucuaucacaagugcgacaauacaugucuggaauccgugaaaaacgggaccuacgauuauccuaaguacagcgaggaagcuaaacuuaaucgcgaggagaucgacggcguuaagcuggaaucuacaagaaucuaucaaauucucgccaucuacuccacgguggcgagcucccugguccuggugguuucucucggagcuauuagcuuuuggaugugcuccaacggcucucugcagugccggaucuguauuuga

SEQ ID NO: 197377 - RNA, 1701 nt, Artificial Sequence
  derived and/or modified CDS sequence (opt5) from hemagglutinin__InfluenzaA__ADK65009
augaaggccauccuggugguccuccuguacaccuucgcuacagccaacgcggacacgcuuugcauuggcuaucacgcuaauaacagcaccgauacaguugacaccgugcuggagaagaaugugacagucacccauuccgugaaccuccuggaagauaagcacaaugggaaacuuuguaagcugagaggaguugcuccccuccaucugggcaaaugcaacaucgccggguggauucugggaaauccugagugugaaucucucagcacagccuccucuuggagcuacaucguggagaccuccucuagcgacaacggcacgugcuauccgggggauuuuauugacuacgaagaacugcgggagcagcuuuccagcgucucuuccuucgaacgcuuugagaucuuccccaagaccagcucuuggccuaaucacgaucccaacaagggagugacagccgcuuguccucaugccggcgcgaaauccuuuuauaagaaucugaucuggcucguuaaaaagggcaacagcuaccccaaacugucuaaguccuauauuaaugacaaggggaaagaagugcuuguccuguggggaauccaccacccuagcaccuccgccgaucaacagucucucuaccagaacgcugacgccuacguguucgugggcacaagcagauauuccaagaaauuuaagccggagauugcuauccggcccaaaguccgcgaucaggaggggagaaugaauuacuauuggacccugguugaaccuggagacaagauuacguucggcgccacagggaaccugguggugccccgguacgcguuugccauggagcgcaacgcuggaagcggcaucauuaucucugauaccccuguccaugacugcaauacaaccugucaaacccccaaaggcgccaucaacacaucccucccguuccagaauauucacccuaucacgauugggaagugccccaaguaugugaaaagcaccaagcugagacuugcuacaggacugcggaacguuccuucuauccagagccgcggccucuuuggggccauugccggauucaucgaaggcggguggaccggaaugguggacggcugguacggcuaucaucaccagaaugagcaaggguccggauacgcugcggaucugaaaucuacacagaacgccaucgacgaaauuaccaauaaggucaacagcgugaucgagaaaaugaauacgcaguuuacagcuguuggcaaggaguucaaccaccuugaaaagagaauugagaaucugaacaaaaagguggaugacggguuccucgauaucuggaccuacaaugccgaacugcugguccuccuggagaacgaacggacccuugacuaucaugauuccaaugugaaaaaccuguacgagaagguccgcagccagcucaaaaacaaugccaaggagauuggaaacggcuguuuugaguucuaucacaagugcgacaauacauguauggagucugugaaaaacgggaccuacgauuaucccaaguacuccgaagaggcuaaacugaauagagaagagaucgacggcguuaaacuugagagcacacggaucuaucaaauucuggccaucuacucuacgguggcguccagccucguccuggugguuucccugggagcuauuucuuuuuggaugugcagcaacggcucccuccagugccgcaucuguauuuga

SEQ ID NO: 197378 - RNA, 1701 nt, Artificial Sequence
  derived and/or modified CDS sequence (opt5) from hemagglutinin__InfluenzaA__ADK87287
augaagaccaucauugcccugagcuacauccucugccugguguucgcucagaaacuucccggcaacgacaauuccacagccacgcugugucucgggcaccaugcggucccuaacggaaccauuguuaagacaaucaccaaugaucaaauugaggugacaaacgcuaccgaacuggugcagucuagcuccacaggcgagaucugcgacucuccgcaccagauccuugaugggaaaaauuguacccugauugacgcccuccugggagauccccagugcgacggcuuucaaaacaagaaaugggaucuguucgucgaaagaagcaaggccuauuccaauuguuacccuuaugacgugcccgauuacgcuucucuccggagccugguugccuccagcgggacgcuugaguuuaacaaugaaucuuucaacuggaccggagugacacagaauggcaccuccagcgcuugcauccgcagaucuaagaacuccuuuuucagccggcugaauuggcucacacaucugaacuuuaaauauccugcccuuaaugucaccaugcccaacaacgagcaguucgacaagcuguacauuuggggcgugcaccauccugggacggauaaagaccagaucuuucucuaugcgcaagccucuggacgcauuacaguuuccaccaagagaagccagcagacagcuaucccgaauauuggcucccggccccgcgugagaaacaucccuucucggaucagcauuuacuggaccaucgucaaacccggggauauucugcugaucaauuccaccggaaaccucauugccccucgcggcuacuucaagaucagaagcgggaagucuuccaucaugcggagcgacgcucugauuggaaaauguaauucugagugcaucacacccaacggcagcauuccgaaugacaagccuuuucagaacgugaaucgcaucacguauggcgccugucccagauacgugaaacaaaacacccuuaagcuggcgacagggaugcggaaugucccugaaaaacagacccgcggaauuuucggcgccaucgcuggguuuaucgagaacggaugggaaggcaugguugaugggugguauggauucagacaccaaaauuccgagggccggggccaggccgcugaccucaagucuacacaggccgccauugaucagaucaacgggaaacugaauagacuuauuggaaagaccaacgagaaguuccaccagaucgaaaaagaguuuagcgaaguggagggccgcauucaagaccuggaaaaguacguggaggauacgaaaaucgaccucugguccuauaacgcugagcugcuggucgcgcucgaaaaucagcauacaauugaucugaccgacagcgagaugaacaaacuuuucgaaaagaccaagaagcagcugcgggagaaugccgaagauauggggaacggaugcuuuaaaaucuaccacaagugugacaaugcuugcaucggcucuauuagaaacgggacauaugaucaugacguguaccgcgacgaggcccucaauaaccgguuccagaucaaaggcguugagcugaaguccggauacaaagauuggauucuuuggaucagcuuugccauuucuugcuuccugcucuguguggcucugcugggcuuuaucaugugggccugccaaaaggggaauaucagauguaacauuugcaucuga

SEQ ID NO: 197379 - RNA, 1701 nt, Artificial Sequence
  derived and/or modified CDS sequence (opt5) from hemagglutinin__InfluenzaA__ADK87288
augaagaccaucauugcccugagcuacauccucugccugguguucgcucagaaacuucccggcaacgacaauuccacagccacgcugugucucgggcaccaugcggucccuaacggaaccauuguuaagacaaucaccaaugaucaaauugaggugacaaacgcuaccgaacuggugcagucuagcuccacaggcgagaucugcgacucuccgcaccagauccuugaugggaaaaauuguacccugauugacgcccuccugggagauccccagugcgacggcuuucaaaacaagaaaugggaucuguucgucgaaagaagcaaggccuauuccaauuguuacccuuaugacgugcccgauuacgcuucucuccggagccugguugccuccagcgggacgcuugaguuuaacaaugaaucuuucaacuggaccggagugacacagaauggcaccuccagcgcuugcauccgcagaucuaagaacuccuuuuucagccggcugaauuggcucacacaucugaacuuuaaauauccugcccuuaaugucaccaugcccaacaacgagcaguucgacaagcuguacauuuggggcgugcaccauccugggacggauaaagaccagaucuuucucuaugcgcaagccacaggacgcauuaccguuucuacaaagagaucccagcagaccgcuaucccgaauauuggcagccggccccgcgugagaaacaucccuucccggaucucuauuuacuggaccaucgucaaacccggggauauucugcugaucaauagcacaggaaaccucauugccccucgcggcuacuucaagaucagauccggaaagagcucuaucaugcgguccgacgcucccauugggaaauguaauagcgagugcaucacgccgaacggcucuauuccuaaugacaagcccuuucagaacgugaaucgcaucaccuauggcgccuguccuagauacgugaaacaaaacacacugaaacuugcgaccgggaugcggaauguccccgaaaaacagacacgcggaauuuucggcgccaucgcuggguuuaucgagaacggaugggaaggcaugguugaugggugguauggauucagacaccagaauagcgagggccggggccaagccgcugaccugaaguccacccaggccgccauugaucagaucaacgggaaacucaauagacugauuggaaagacgaacgagaaguuccaccagaucgaaaaagaguuuucugaaguggagggccgcauucaagaccuugaaaaguacguggaggauacaaaaaucgaccuguggagcuauaacgcugagcuccuggucgcgcuggaaaaucagcauaccauugaucucaccgacuccgagaugaacaagcuguucgaaaagacaaagaagcagcuucgggagaaugccgaagauauggggaacggaugcuuuaaaaucuaccacaagugugacaaugcuugcaucggcagcauuagaaacgggaccuaugaucaugacguguaccgcgacgaggcccugaauaaccgguuccagaucaaaggcguugagcucaagucuggauacaaagauuggauucuguggaucuccuuugccauuagcugcuuccuucuguguguggcucuccugggcuuuaucaugugggccugccaaaaggggaauaucagauguaacauuugcaucuga

SEQ ID NO: 197380 - RNA, 1701 nt, Artificial Sequence
  derived and/or modified CDS sequence (opt5) from hemagglutinin__InfluenzaA__ADK87289
augaagaccaucauugcccugagcuacauccucugccugguguucgcucagaaacuucccggcaacgacaauuccacagccacgcugugucucgggcaccaugcggucccuaacggaaccauuguuaagacaaucaccaaugaucaaauugaggugacaaacgcuaccgaacuggugcagucuagcuccacaggcgagaucugcgacucuccgcaccagauccuugaugggaaaaauuguacccugauugacgcccuccugggagauccccagugcgacggcuuucaaaacaagaaaugggaucuguucgucgaaagaagcaaggccuauuccaauuguuacccuuaugacgugcccgauuacgcuucucuccggagccugguugccuccagcgggacgcuuggauuuaacaaugagucuuucaacuggaccggcgugacacagaauggcaccuccagcgcuugcauccgcagaucuaagaacuccuuuuucagccggcugaauuggcucacacaucugaacuuuaaauauccugcccuuaaugucaccaugcccaacaacgaacaguucgacaagcuguacauuuggggagugcaccauccugggacggauaaagaccagaucuuucucuaugcgcaagccucuggccgcauuacaguuuccaccaagagaagccagcagacagcuaucccgaauauugggucccggccccgcgugagaaacaucccuucucggaucagcauuuacuggaccaucgucaaacccggagauauucugcugaucaauuccaccggcaaccucauugccccucgcggguacuucaagaucagaagcggaaagucuuccaucaugcggagcgacgcucccauuggcaaauguaauucugagugcaucacaccgaacggcagcauuccuaaugacaagcccuuucagaacgugaaucgcaucacguauggggccuguccuagauacgugaaacaaaacacccugaaacuugcgacaggaaugcggaauguccccgagaaacagacccgcggcauuuucggggccaucgcuggauuuaucgaaaacggcugggaggggaugguugauggaugguauggcuucagacaccaaaauuccgaaggccgggggcaggccgcugaccugaagucuacacaggccgccauugaucagaucaacggaaaacucaauagacugauuggcaagaccaacgagaaguuccaccagaucgagaaagaauuuagcgagguggaagggcgcauucaagaccuuggaaaguacguggaggauacgaaaaucgaccugugguccuauaacgcugaacuccuggucgcgcuggagaaucagcauacaauugaucucaccgacagcgagaugaacaagcuguucgaaaagaccaagaagcagcuucgggagaaugccgaagauaugggcaacgggugcuuuaaaaucuaccacaagugugacaaugcuugcaucggcucuauuagaaacggaacauaugaucaugacguguaccgcgacgaggcccugaauaaccgguuccagaucaaaggcguugaacucaaguccggguacaaagauuggauucuguggaucagcuuugccauuucuugcuuccuucuguguguggcucuccugggauuuaucaugugggccugccaaaagggcaauaucagauguaacauuugcaucuga

SEQ ID NO: 197381 - RNA, 1701 nt, Artificial Sequence
  derived and/or modified CDS sequence (opt5) from hemagglutinin__InfluenzaA__ADK87291
augaagaccaucauugcccugagcuacauccagugccucguguucgcucaaaaacugcccggcaacgacaauuccacagccacgcuuugucuggggcaccaugcggucccuaacggaaccauuguuaagacaaucaccaaugaucagauugaggugacaaacgcuaccgaacucgugcagucuagcuccacaggcgagaucugcgacucuccgcaccagauccuggaugggaaaaauuguacccuuauugacgcccugcucggagauccccaaugcgacggcuuucagaacaagaaaugggaucuguucgucgaaagaagcaaggccuauuccaauuguuacccuuaugacgugcccgauuacgcuucucugcggagccucguugccuccagcgggacgcuggaguuuaacaaugaaucuuucaacuggaccggagugacacagaauggcaccuccagcgcuugcauccgcagaucuaagaacuccuuuuucagccggcuuaauuggcugacacaucucaacuuuaaauauccugcccugaaugucaccaugcccaacaacgagcaguucgacaagcuguacauuuggggcgugcaccauccugggacggauaaagaccaaaucucucuguaugcgcaggccuccggacgcauuacaguuagcaccaagagaucccagcagacagcuaucccgaauauuggcucucggccccgcgugagaaacaucccuagccggaucuccauuuacuggaccaucgucaaacccggggauauucuccugaucaauagcaccggaaaccugauugccccucgcggcuacuuuaagaucagaucugggaaguccagcaucaugcggucugacgcucccauuggaaaauguaauagcgagugcaucacaccgaacggcuccauuccuaaugacaagcccuuccaaaacgugaaucgcaucacguauggcgccuguccuagauacgugaaacagaacacccucaagcuggcgacagggaugcggaauguccccgaaaaacagacccgcggaauuuuuggcgccaucgcuggguucaucgagaacggaugggaaggcaugguugaugggugguauggauuuagacaccaaaauucugagggccggggccaggccgcugaccuuaagagcacacaggccgccauugaucagaucaacgggaaacugaauagacucauuggaaagaccaacgagaaguuccaccaaaucgaaaaagaguucuccgaaguggagggccgcauucaggaccuggggaaguacguggaagauacgaaaaucgaccuuuggagcuauaacgcugagcugcucgucgcgcuggagaaucagcauacaauugaucugaccgacucugaaaugaacaagcucuuugagaaaaccaagaagcagcugcgggaaaaugccgaggauaugggaaacggcugcuucaaaaucuaccacaagugugacaaugcuugcaucggguccauuagaaacggcacauaugaucaugacguguaccgcgacgaagcccuuaauaaccgguuucaaaucaaaggaguugagcuuaagagcggcuacaaagauuggauucucuggaucucuuucgccauuuccugcuuucugcuuuguguggcucugcucggguucaucaugugggccugccagaagggaaauaucagauguaacauuugcaucuga

SEQ ID NO: 197382 - RNA, 1701 nt, Artificial Sequence
  derived and/or modified CDS sequence (opt5) from hemagglutinin__InfluenzaA__ADK87293
augaagaccaucauugcccugagcuacauccucugccugguguucgcucagaaacuucccggcaacgacaauuccacagccacgcugugucucgggcaccaugcggucccuaacggaaccauuguuaagacaaucaccaaugaucaaauugaggugacaaacgcuaccgaacuggugcagucuagcuccacaggcgagaucugcgacucuccgcaccagauccuugaugggaaaaauuguacccugauugacgcccuccugggagauccccagugcgacggcuuucaaaacaagaaaugggaucuguucgucgaaagaagcaaggccuauuccaauuguuacccuuaugacgugcccgauuacgcuucucuccggagccugguugccuccagcgggacgcuugaguuuaacaaugaaucuuucaacuggaccggagugacacaggacggcaccuccagcgcuugcauccgcagaucuaaaaauuccuuuuucagcaagcugaacuggcucacacaucugaauuuuaaguauccugcccuuaacgucaccaugcccaauaacgagcaguucgauaaacuguacauuuggggcgugcaccauccugggacggacaaggaucagacauuucucuaugcgcaagccucuggacggaucaccguuuccacaaaacgcagccagcagaccgcuauuccgaacaucggcuccagaccccgggugcgcaauauuccuucuagaaucagcaucuacuggaccauugucaagcccggggacauccugcugauuaacuccacaggaaaucucaucgccccucggggcuacuucaagauucgcagcgggaaaucuuccaucaugagaagcgacgcucccaucggaaaguguaacucugagugcauuacgccgaauggcagcaucccuaacgauaaacccuuucagaaugugaaccggauuaccuauggcgccuguccucgcuacgugaagcaaaauacacugaaacuugcgaccgggaugagaaacguccccgaaaagcagacacggggaaucuucggcgccauugcuggguuuaucgagaauggaugggaaggcaugguugacgggugguauggauuccgccaccagaacuccgagggcagaggccaagccgcugaucugaaaucuacccaggccgccaucgaccagauuaaugggaagcucaaccggcugaucggaaagacgaaugagaaauuccaccagauugaaaaggaguuuagcgaaguggagggcagaauccaagaucuugaaaaauacguggaggacacaaagauugaucugugguccuauaacgcugagcuccuggucgcgcuggaaaaccagcauaccaucgaccucaccgauagcgagaugucuaaacuguucgaaaagacaaagaaacagcuucgcgagaaugccgaagacauggggaacggaugcuuuaagauuuaccacaaaugugauaaugcuugcaucggcuccauccggaacgggaccuaugaccaugacguguacagagaugaggcccugaauaaccgcuuccagauuaagggcguugagcucaaaagcggauacaaggacuggauccuguggauuucuuuugccaucuccugcuuccuucuguguguggcucuccugggcuuuauuaugugggccugccaaaaggggaauauccgguguaacaucugcauuuga

SEQ ID NO: 197383 - RNA, 1701 nt, Artificial Sequence
  derived and/or modified CDS sequence (opt5) from hemagglutinin__InfluenzaA__ADK87295
augaagaccaucauugcccugagcuacauccucugccugguguucgcucagaaacuucccggcaacgacaauuccacagccacgcugugucucgggcaccaugcggucccuaacggaaccauuguuaagacaaucaccaaugaucaaauugaggugacaaacgcuaccgaacuggugcagucuagcuccacaggcgagaucugcgacucuccgcaccagauccuugaugggaaaaauuguacccugauugacgcccuccugggagauccccagugcgacggcuuucaaaacaagaaaugggaucuguucgucgaaagaagcaaggccuauuccaauuguuacccuuaugacgugcccgauuacgcuucucuccggagccugguugccuccagcgggucucuugaguuuaacaaugaauccuucaacuggacgggagugacccagaauggcacaagcucugcuugcauccgcagauccaagaacagcuuuuucucucggcugaauuggcucacccaucugaacuuuaaauauccugcccuuaaugucacaaugcccaacaacgagcaguucgacaagcuguacauuuggggcgugcaccauccugggaccgauaaagaccagaucuuucucuaugcgcaagccuccggacgcauuacgguuagcacaaagagaucccagcagaccgcuaucccgaauauuggcucucggccccgcgugagaaacaucccuagccggaucuccauuuacuggacaaucgucaaacccggggauauucugcugaucaauagcaccggaaaccucauugccccucgcggcuacuucaagaucagaucugggaaguccagcaucaugcggucugacgcucccauuggaaaauguaauagcgagugcaucaccccgaacggcuccauuccuaaugacaagcccuuucagaacgugaaucgcaucacauauggcgccuguccuagauacgugaaacaaaacacgcugaaacuugcgaccgggaugcggaauguccccgaaaaacagacacgcggaauuuucggcgccaucgcuggguuuaucgagaacggaugggaaggcaugguugaugggugguauggauucagacaccagaauagcgagggccggggccaagccgcugaccugaagucuacccaggccgccauugaucagaucaacgggaaacucaauagacugauuggaaagacaaacgagaaguuccaccagaucgaaaaagaguuuuccgaaguggagggccgcauucaagaccuugaaaaguacguggaggauaccaaaaucgaccuguggagcuauaacgcugagcuccuggucgcgcuggaaaaucagcauacgauugaucucacagacucugagaugaacaagcuguucgaaaagaccaagaagcagcuucgggagaaugccgaagauauggggaacggaugcuuuaaaaucuaccacaagugugacaaugcuugcaucggcuccauuagaaacgggaccuaugaucaugacguguaccgcgacgaggcccugaauaaccgguuccagaucaaaggcguugagcucaagagcggauacaaagauuggauucuguggaucucuuuugccauuuccugcuuccuucuguguguggcucuccugggcuuuaucaugugggccugccaaaaggggaauaucagacgcaacauuuguaucuga

SEQ ID NO: 197384 - RNA, 1701 nt, Artificial Sequence
  derived and/or modified CDS sequence (opt5) from hemagglutinin__InfluenzaA__ADK87296
augaaggccauccuggugguccuccuguacaccuucgcuacagccaacgcggacacgcuuugcauuggcuaucacgcuaauaacagcaccgauacaguugacaccgugcuggagaagaaugugacagucacccauuccgugaaccuccuggaagauaagcacaaugggaaacuuuguaagcugagaggaguugcuccccuccaucugggcaaaugcaacaucgccggguggauucugggaaauccugagugugaaucucucagcacagccuccucuuggagcuacaucguggagaccuccucuagcgacaacggcacgugcuauccgggggauuuuauugacuacgaagaacugcgggagcagcuuuccagcgucucuuccuucgaacgcuuugagaucuuccccaagaccagcucuuggccuaaucacgaucccaacaagggagugacagccgcuuguccucaugccggcgcgaaauccuuuuauaagaaucugaucuggcucguuaaaaagggcaacagcuaccccaaacugucuaaguccuauauuaaugacaaggggaaagaagugcuuguccuguggggaauccaccacccuagcaccuccgccgaucaacagucucucuaccagaacgcugacgccuacguguucgugggcacaagcagauauuccaagaaauuuaagccggagauugcuauccggcccaaaguccgcgaucaggaggggagaaugaauuacuauuggacccugguugaaccuggagacaagauuacguucgaggccacaggcaaccugguggugccccggugcgcguuugccauggaacgcaacgcugggagcggaaucauuaucucugauaccccuguccaugacuguaauacaaccugccaaacccccaaaggcgccaucaacacaucccucccguuccagaauauucacccuaucacgauuggcaagugucccaaguacgugaaaagcaccaagcugagacuugcuacagggcugcggaacguuccuucuauccagagccgcggacucuuuggcgccauugccggguucaucgagggaggcuggaccgggaugguggacggaugguauggcuaccaucaccagaaugaacaaggcuccggguaugcugcggaucugaaaucuacacagaacgccaucgacgagauuaccaauaaggucaacagcgugaucgagaaaaugaauacgcaguuuacagcuguuggaaaggaguucaaccaccuugagaagagaauugaaaaucugaacaaaaagguggaugacggcuuccucgauaucuggaccuacaaugccgagcugcugguccuccuggaaaacgagcggacccuugacuaccaugauuccaaugugaaaaaccuguaugagaagguccgcagccagcucaaaaacaaugccaaggaaauugggaacggaugcuuugaguucuaccacaagugugacaauacaugcauggaaucugugaaaaacggcaccuaugauuaccccaaguauuccgaggaagcuaaacugaauagagaggagaucgacgggguuaaacuugaaagcacacggaucuaccaaauucuggccaucuauucuacgguggcguccagccucguccuggugguuucccugggcgcuauuucuuuuuggaugugcagcaacggaucccuccagugucgcaucugcauuuga

SEQ ID NO: 197385 - RNA, 1701 nt, Artificial Sequence
  derived and/or modified CDS sequence (opt5) from hemagglutinin__InfluenzaA__ADK87298
augaaggccauccuggugguccuccuguacaccuucgcuacagccaacgcggacacgcuuugcauuggcuaucacgcuaauaacagcaccgauacaguugacaccgugcuggagaagaaugugacagucacccauuccgugaaccuccuggaagauaagcacaaugggaaacuuuguaagcugagaggaguugcuccccuccaucugggcaaaugcaacaucgccggguggauucugggaaauccugagugugaaucucucagcacagccuccucuuggagcuacaucguggagaccuccucuagcgacuccggcacgugcuauccgggggauuuuauugacuacgaagaacugcgggagcagcuuagcucugucuccagcuucgaacgcuuugagaucuuccccaagaccucuuccuggccuaaccacgaucccaauaagggagugacagccgcuuguccucaugccggcgcgaaaucuuuuuauaagaaccugaucuggcucguuaaaaagggcaauagcuaccccaaacuguccaagagcuauauuaacgacaaggggaaagaagugcuuguccuguggggaauccaccacccuuccaccucugccgaucaacagagccucuaccagaaugcugacgccuacguguucgugggcacauccagauauagcaagaaauuuaagccggagauugcuauccggcccaaaguccgcgaucaggaggggagaaugaacuacuauuggacccugguugaaccuggagacaagauuacguucgaggccacaggcaaucugguggugccccgguacgcguuugccauggaacgcaacgcugggucuggaaacaucauuuccgauaccccuguccaugacugcaauacaaccugucaaacccccaaaggcgccaucaacacaagccucccguuccagaauauccacccuauuacgaucggcaagugccccaaguaugugaaaucuaccaagcugagacuugcuacagggcugcggaacguuccuagcauucagucccgcggacucuuuggcgccaucgccggguucauugagggaggcuggaccgggaugguggacggaugguacggcuaucaucaccagaaugaacaaggcucuggguacgcugcggaucugaaaagcacacagaacgccaucgacgagaucaccaauaaggucaaccccgugauugagaaaaugaauacgcaguuuacagcuguuggaaaggaguucaaccaccuugagaagagaaucgaaaaucugaacaaaaagguggaugacggcuuccucgauauuuggaccuacaaugccgagcugcugguccuccuggaaaacgagcggacccuugacuaucaugauuccaaugugaaaaaccuguacgagaagguccgcagccagcucaaaaacaaugccaaggaaaucgggaacggauguuuugaguucuaucacaagugcgacaauacauguauggaaucugugaaaaacggcaccuacgauuaucccaaguacuccgaggaagcuaaacugaauagagaggagauugacgggguuaaacuugaaagcacacggaucuaucaaauccuggccauuuacucuacgguggcguccagccucguccuggugguuucccugggcgcuaucucuuuuuggaugugcagcaacggaucccuccagugccgcauuuguaucuga

SEQ ID NO: 197386 - RNA, 1701 nt, Artificial Sequence
  derived and/or modified CDS sequence (opt5) from hemagglutinin__InfluenzaA__ADK87300
augaagaccaucauugcccugagcuacauccucugcaugguguucgcucagaaacugcccggcaacgacaauuccacagccacgcuuugucuggggcaccaugcggucccuaacggaaccauuguuaagacaaucaccaaugaucaaauugaggugacaaacgcuaccgaacucgugcagucuagcuccacaggcgagaucugcgacucuccgcaccagauccuggaugggaaaaauuguacccuuauugacgcccugcucggagauccccagugcgacggcuuucaaaacaagaaaugggaucuguucgucgaaagaagcaaggccuauuccaauuguuacccuuaugacgugcccgauuacgcuucucugcggagccucguugccuccagcgggacgcuggaguuuaacaaugaaucuuucaacuggaccggagugacacagaauggcaccuccagcgcuugcauccgcagaucuaagaacucccuuuuuagccggcugaauuggcucacacaucugaacuucaaauauccugcccuuaaugucaccaugcccaacaacgagcaguuugacaagcuguacauuuggggcgugcaccauccugggacggauaaagaccagaucuuccucuaugcgcaagccucuggacgcauuacaguuuccaccaagagaagccagcagacagcuaucccgaauauuggcucccggccccgcgugagaaacaucccuucucggaucagcauuuacuggaccaucgucaaacccggggauauucugcugaucaauuccaccggaaaccucauugccccucgcggcuacuuuaagaucagaagcgggaagucuuccaucaugcggagcgacgcucccauuggaaaauguaauucugagugcaucgccccgaacggcagcauuccuaaugacaaguccuuccagaacgugaaucgcaucacauauggcgcgugucccagauacgugaaacaaaacacgcugaaacuugccaccgggaugcggaaugucccugaaaaacagacacgcggaauuuuuggcgcuaucgccggguucaucgagaacggaugggaaggcaugguugaugggugguauggauuuagacaccagaauagcgagggccggggccaagcugccgaccugaagucuacccaggccgcuauugaucagaucaacgggaaacucaauagacugauuggaaagacaaacgagaaguuccaccagaucgaaaaagaguucuccgaaguggagggccgcauucaagaccuugaaaaguacguggaggauaccaaaaucgaccuguggagcuauaacgcggagcuccuggucgcccuggaaaaucagcauacgauugaucucacagacucugagaugaacaagcuguuugaaaagaccaagaagcagcuucgggagaaugcugaagauauggggaacggaugcuucaaaaucuaccacaagugugacaaugccugcaucggcuccauuagaaacgggaccuaugaucaugacguguaccgcgacgaggcccugaauaaccgguuucagaucaaaggcguugagcucaagagcggauacaaagauuggauucuguggaucucuuucgcuauuuccugcuuucuucuguguguggcccuccugggcuucaucaugugggcgugccaaaaggggaauaucagauguaacauuugcaucuga

SEQ ID NO: 197387 - RNA, 1701 nt, Artificial Sequence
  derived and/or modified CDS sequence (opt5) from hemagglutinin__InfluenzaA__ADK87302
augaagaccaucauugcccugagcuacauccucugcaugguguucgcucagaaacugcccggcaacgacaauuccacagccacgcuuugucuggggcaccaugcggucccuaacggaaccauuguuaagacaaucaccaaugaucaaauugaggugacaaacgcuaccgaacucgugcagucuagcuccacaggcgagaucugcgacucuccgcaccagauccuggaugggaaaaauuguacccuuauugacgcccugcucggagauccccagugcgacggcuuucaaaacaagaaaugggaucuguucgucgaaagaagcaaggccuauuccaauuguuacccuuaugacgugcccgauuacgcuucucugcggagccucguugccuccagcgggacgcuggaguuuaacaaugaaucuuucaacuggaccggagugacacagaauggcaccuccagcgcuugcauccgcagaucuaagaacuccuuuuucagccggcuuaauuggcugacacaucucaacuuuaaauauccugcccugaaugucaccaugcccaacaacgagcaguucgacaaacuuuacauuuggggcgugcaccauccugggacggauaaagaccagaucuuucuguaugcgcaagccucuggacgcauuacaguuuccaccaagagaagccagcagacagcuaucccgaauauuggcucccggccccgcgugagaaacaucccuucucggaucagcauuuacuggaccaucgucaaacccggggauauucuccugaucaauuccaccggaaaccugauugccccucgcggcuacuucaagaucagaagcgggaagucuuccaucaugcggagcgacgcucccauuggaaaauguaauucugagugcaucacaccgaacggcagcauuccuaaugacaagcccuuucagaacgugaaucgcaucacguauggcgccuguccuagauacgugaaacaaaacacccucaagcuggcgacagggaugcggaauguccccgaaaaacagacccgcggaauuuucggcgccaucgcuggguuuaucgagaacggaugggaaggcaugguugaugggugguauggauucagacaccaaaauuccgagggccggggccaggccgcugaccuuaagucuacacaggccgccauugaucagaucaacgggaaacugaauagacucauuggaaagaccaacgagaaguuccaccagaucgaaaaagaguuuagcgaaguggagggccgcauucaagaccuggaaaaguacguggaggauacgaaaaucgaccuuugguccuauaacgcugagcugcucgucgcgcuggaaaaucagcauacaauugaucugaccgacagcgagaugaacaaacucuucgaaaagaccaagaagcagcugcgggagaaugccgaagauauggggaacggaugcuuuaagaucuaccacaagugugacaaugcuugcaucggcucuauuagaaacgggacauaugaucaugacguguaccgcgacgaggcccuuaauaaccgguuccagaucaaaggcguugagcugaaguccggauacaaagauuggauucucuggaucagcuuugccauuucuugcuuccugcuuuguguggcucugcucggcuuuaucaugugggccugccaaaaggggaauaucagaugugacauuugcaucuga

SEQ ID NO: 197388 - RNA, 1701 nt, Artificial Sequence
  derived and/or modified CDS sequence (opt5) from hemagglutinin__InfluenzaA__ADK87304
augaagaccaucauugcccugagcuacauccucugccugguguucgcucagaaaauucccggcaacgacaauuccacagccacgcuuugucuggggcaccaugcggucccuaacggaaccaucguuaagacaauuaccaaugaucaaaucgaggugacaaacgcuaccgaacucgugcagucuagcuccacaggcgagaucugcgacucuccgcaccagauucuggaugggaaaaauuguacccuuaucgacgcccugcucggagauccccagugcgacggcuuucaaaacaagaaaugggaucuguucgucgaaagaagcaaggccuauuccaauuguuacccuuaugacgugcccgauuacgcuucucugcggagccucguugccuccagcgggacgcuggaguuuaacaaugaaucuuucaacuggaccggagugacacagaauggcaccuccagcgcuugcauucgcagaucuaagaacuccuuuuucagccggcuuaauuggcugacacaucucaacuuuaaauauccugcccugaaugucaccaugcccaacaacgagcaguucgacaaacuuuacaucuggggcgugcaccauccugggacggauaaggaccagauuuuucuguaugcgcaagccucuggacgcaucacaguuuccaccaagagaagccagcagacagcuauuccgaauaucggcucccggccccgcgugagaaacaucccuucucggauuagcaucuacuggaccauugucaaacccggggauauccuccugauuaauuccaccggaaaccugaucgccccucgcggcuacuucaagaucagaagcgggaagucuuccauuaugcggagcgacgcucccaucggaaaauguaauucuggcugcauuacaccgaacggcagcaucccuaaugacaagcccuuucagaacgugaaucgcauuacguauggggccuguccuagauacgugaaacaaaacacccucaagcuggcgacaggaaugcggaauguccccgagaaacagacccgcggcaucuucggggccaucgcuggauuuauugaaaacggcugggaggggaugguugauggaugguauggcuucagacaccaaaauuccgaaggccgggggcaggccgcugaccuuaagucuacacaggccgccaucgaucagauuaacggaaaacugaauagacucaucggcaagaccaacgagaaguuccaccagauugagaaagaauuuagcgagguggaagggcgcauccaagaccuggagaaguacguggaagauacgaaaauugaccuuugguccuauaacgcugagcugcucgucgcgcuggagaaucagcauacaaucgaucugaccgacagcgaaaugaacaaacucuucgagaagaccaagaagcagcugcgggaaaaugccgaggauaugggaaacggcugcuuuaaaaucuaccacaagugugacaaugcuugcauugggucuaucagaaacggcacauauggacaugauguguaccgcgacgaagcccuuaauaaccgguuccagauuaaaggcguugagcugaaguccggguacaaagacugguuucucuggaucagcuucgccauuucuugcuuucugcuuuguguggcucugcucggauucaucaugugggccugccaaaagggcaauaucagauguaacauuugcaucuga

SEQ ID NO: 197389 - RNA, 1701 nt, Artificial Sequence
  derived and/or modified CDS sequence (opt5) from hemagglutinin__InfluenzaA__ADK87306
augaagaccaucauugcccugagcuacauccucugccugguguucgcucagaaacuucccggcaacgacaauuccacagccacgcugugucucgggcaccaugcggucccuaacggaaccauuguuaagacaaucaccaaugaucaaauugaggugacaaacgcugccgaacuggugcagucuagcuccaccggcgagaucugcgacucuccgcaccagauccuugaugggaaaaauuguacacugauugacgcccuccugggagauccccagugcgacggcuuucaaaacaagaaaugggaucuguucgucgggagaagcaaggcuuauuccaauuguuacccuuaugacgugcccgauuacgccucucuccggagccugguugcuuccagcggaacccuugaauuuaacaaugagucuuucaacuggacgggcgugacccagaauggcacauccagcgccugcauccgcagaucuaagaacuccuuuuucagccggcugaauuggcucacccaucugaacuuuaaauauccugcgcuuaaugucacaaugcccaacaacgaacaguucgacaagcuguacauuuggggagugcaccauccugggaccgauaaagaccagaucuuucucuaugcccaggcuucuggccgcauuacgguuuccacaaagagaagccagcagaccgccaucccgaauauugggucccggccccgcgugagaaacaucccuucucggaucagcauuuacuggacaaucgucaaacccggagauauucugcugaucaauuccaccggcaaccucauugcuccucgcggguacuucaagaucagaagcggaaagucuuccaucaugcggagcgacgcccccauuggcaaauguaauucugagugcaucaccccgaacggcagcauuccuaaugacaagcccuuucagaacgugaaucgcaucacauauggggcguguccuagauacgugaaacaaaacacgcugaagcuggccaccggaguccggaauguucccgagaaacagacacgcggcauuuucggggcuaucgccggauuuaucgaaaacggcugggaggggaugguggauggaugguauggcuucagacaccaaaauuccgaaggccgggggcaagcugccgaccugaagucuacccaggccgcuauggaucagauuaacggaaaacucaauagacugaucggcaagacaaacgagaaacuucaccagaccgagaaggaguucagcgaaguggaagggcgcauucaagaccuggagaaguacgucgaagauacgaaaaucgaccucugguccuauaacgcggagcugcugguggcccucgagagccagcauacaauugaucugaccgacucugaaaugaauaaacuuuuugagaagaccaagaagcagcugcgggaaaacgcugaggauaugggaaauggcugcuucaaaaucuaccacaagugugacaacgccugcauuggguccaucagaaauggcacauaugaucaugacguuuaccgcgacgaagcccucaacaaucgguuucagaucaaaggaguggagcuuaagagcggcuacaaagauuggauucuuuggaucucuuucgcuauuuccugcuuucugcucugugucgcccugcugggguucaucaugugggcgugccaaaagggaaacauuagauguaauaucugcaucuga

SEQ ID NO: 197390 - RNA, 1701 nt, Artificial Sequence
  derived and/or modified CDS sequence (opt5) from hemagglutinin__InfluenzaA__ADK87308
augaagaccaucauugcccugagcuacauccucugcaugguguucgcucagaaacugcccggcaacgacaauuccacagccacgcuuugucuggggcaccaugcggucccuaacggaaccauuguuaagacaaucaccaaugaucaaauugaggugacaaacgcuaccgaacucgugcagucuagcuccacaggcgagaucugcgacucuccgcaccagauccuggaugggaaaaauuguacccuuauugacgcccugcucggagauccccagugcgacggcuuucaaaacaagaaaugggaucuguucgucgaaagaagcaaggccuauuccaauuguuacccuuaugacgugcccgauuacgcuucucugcggagccucguugccuccagcgggacgcuggaguuuaacaaugaaucuuucaacuggaccggagugacacagaauggcaccuccagcgcuugcauccgcagaucuaagaacuccuuuuucagccggcuuaauuggcugacacaucucaacuuuaaauauccugcccugaaugucaccaugcccaacaacgagcaguucgacaaacuuuacauuuggggcgugcaccauccugggacggauaaagaccagaucuuucuguaugcgcaagccucuggacgcauuacaguuuccaccaagagaagccagcagacagcuaucccgaauauuggcucccggccccgcgugagaaacaucccuucucggaucagcauuuacuggaccaucgucaaacccggggauauucuccugaucaauuccaccggaaaccugauugccccucgcggcuacuucaagaucagaagcgggaagucuuccaucaugcggagcgacgcucccauuggaaaauguaauucugagugcaucacaccgaacggcagcauuccuaaugacaagcccuuucagaacgugaaucgcaucacguauggcgccuguccuagauacgugaaacaaaacacccucaagcuggcgacagggaugcggaauguccccgaaaaacagacccgcggaauuuucggcgccaucgcuggguuuaucgagaacggaugggaaggcaugguugaugggugguauggauucagacaccaaaauuccgagggccggggccaggccgcugaccuuaagucuacacaggccgccauugaucagaucaacgggaaacugaauagacucauuggaaagaccaacgagaaguuccaccagaucgaaaaagaguuuagcgaaguggagggccgcauucaagaccuggaaaaguacguggaggauacgaaaaucgaccuuugguccuauaacgcugagcugcucgucgcgcuggaaaaucagcauacaauugaucugaccgacagcgagaugaacaaacucuucgaaaagaccaagaagcagcugcgggagaaugccgaagauauggggaacggaugcuuuaagaucuaccacaagugugacaaugcuugcaucggcucuauuagaaacgggacauaugaucaugacguguaccgcgacgaggcccuuaauaaccgguuccagaucaaaggcguugagcugaaguccggauacaaagauuggauucucuggaucagcuuugccauuucuugcuuccugcuuagaguggcucugcucggcuuuaucaugugggccugucaaaaggggaauauccgcugcaacauuuguaucuga

SEQ ID NO: 197391 - RNA, 1701 nt, Artificial Sequence
  derived and/or modified CDS sequence (opt5) from hemagglutinin__InfluenzaA__ADK87309
augaagaccaucauugcccugagcuacauccucugccugguguucgcucagaaacuucccggcaacgacaauuccacagccacgcugugucucgggcaccaugcggucccuaacggaaccauuguuaagacaaucaccaaugaucaaauugaggugacaaacgcuaccgaacuggugcagucuagcuccacaggcgagaucugcgacucuccgcaccagauccuugaugggaaaaauuguacccugauugacgcccuccugggagauccccagugcgacggcuuucaaaacaagaaaugggaucuguucgucgaaagaagcaaggccuauuccaauuguuacccuuaugacgugcccgauuacgcuucucuccggagccugguugccuccagcgggacgcuugaguuuaacaaugaaucuuucaacuggaccggagugacacagaauggcaccuccagcgcuugcauccgcagaucuaagaacuccuuuuucagccggcugaauuggcucacacaucugaacuuuaaauauccugcccuuaaugucaccaugcccaacaacgagcaguucgacaagcuguacauuuggggcgugcaccauccugggacggauaaagaccagaucuuucucuaugcgcaagccucuggacgcauuacaguuuccaccaagagaagccagcagacagcuaucccgaauauuggcucccggccccgcgugagaaacaucccuucucggaucagcauuuacuggaccaucgucaaacccggggauauucugcugaucaauuccaccggaaaccucauugccccucgcggcuacuucaagaucagaagcgggaagucuuccaucaugcggagcgacgcucccauuggaaaauguaauucugagugcaucacaccgaacggcagcauuccuaaugacaagcccuuucagaacgugaaucgcaucacguauggcgccuguccuagauacgugaaacaaaacacccugaaacuugcgacagggaugcggaauguccccgaaaaacagacccgcggaauuuucggcgccaucgcuggguuuaucgagaacggaugggaaggcaugguugaugggugguauggauucagacaccaaaauuccgagggccggggccaggccgcugaccugaagucuacacaggccgccauugaucagaucaacgggaaacucaauagacugauuggaaagaccaacgagaaguuccaccagaucgaaaaagaguuuagcgaaguggagggccgcauucaagaccuugaaaaguacguggaggauacgaaaaucgaccugugguccuauaacgcugagcuccuggucgcgcuggaaaaucagcauacaauugaucucaccgacagcgagaugaacaagcuguucgaaaagaccaagaagcagcuucgggagaaugccgaagauauggggaacggaugcuuuaaaaucuaccacaagugugacaaugcuugcaucggcucuauuagaaacgggacauaugaucaugacguguaccgcgacgaggcccugaauaaccgguuccagaucaaaggcguugagcucaaguccggauacaaagauuggauucuguggaucagcuuugccauuucuugcuuccuucuguguguggcucucuccggcuuuaucaugugggccugccaaaaggggaauaucagauguaacauuugcaucuga

SEQ ID NO: 197392 - RNA, 1701 nt, Artificial Sequence
  derived and/or modified CDS sequence (opt5) from hemagglutinin__InfluenzaA__ADK87310
augaaggccauccuggugguccuccuguacaccuucgcuacagccaacgcggacacgcuuugcauuggcuaucacgcuaauaacagcaccgauacaguugacaccgugcuggagaagaaugugacagucacccauuccgugaaccuccuggaagauaagcacaaugggaaacuuuguaagcugagaggaguugcuccccuccaucugggcaaaugcaacaucgccggguggauucugggaaauccugagugugaaucucucagcacagccuccucuuggagcuacaucguggagaccuccucuagcgacaacggcacgugcuauccgggggauuuuauugacuacgaagaacugcgggagcagcuuuccagcgucucuuccuucgaacgcuuugagaucuuccccaagaccggaagcuggccuaaucacgaucccaacaagggcgugacagccgcuuguccucaugccggcgcgaaaucuuuuuauaagaaucugaucuggcucguuaaaaaggggaacuccuaccccaaacugagcaagucuuauauuaaugacaagggaaaagaagugcuuguccuguggggcauccaccacccuuccaccagcgccgaucaacagucccucuaccagaacgcugacgccuacguguucguggggacaucuagauauagcaagaaauuuaagccggagauugcuauccggcccaaaguccgcgaucaggagggaagaaugaauuacuauuggacccugguugaaccuggcgacaagauuacguucgaggccacagggaaccugguggugccccgguacgcguuugccauggaacgcaacgcuggauccggcaucauuaucagcgauaccccuguccaugacugcaauacaaccugucaaacccccaaaggcgccaucaacacaucucucccguuccagaauauucacccuaucacgauugggaagugccccaaguaugugaaauccaccaagcugagacuugcuacaggacugcggaacguuccuagcauccagucucgcggccucuuuggggccauugccggauucaucgagggcggguggaccggaaugguggacggcugguacggcuaucaucaccagaaugaacaagggagcggauacgcugcggaucugaaauccacacagaacgccaucgacgagauuaccaauaaggucaacucugugaucgagaaaaugaauacgcaguuuacagcuguuggcaaggaguucaaccaccuugagaagagaauugaaaaucugaacaaaaagguggaugacggguuccucgauaucuggaccuacaaugccgagcugcugguccuccuggaaaacgagcggacccuugacuaucaugauagcaaugugaaaaaccuguacgagaagguccgcucccagcucaaaaacaaugccaaggaaauuggaaacggcuguuuugaguucuaucacaagugcgacaauacauguauggaaagcgugaaaaacgggaccuacgauuaucccaaguacucugaggaagcuaaacugaauagagaggagaucgacggcguuaaacuugaauccacacggaucuaucaaauucuggccaucuacagcacgguggcgucuucccucguccuggugguuagccugggagcuauuuccuuuuggaugugcucuaacggcagccuccagugccgcaucuguauuuga

SEQ ID NO: 197393 - RNA, 1701 nt, Artificial Sequence
  derived and/or modified CDS sequence (opt5) from hemagglutinin__InfluenzaA__ADK87311
augaaggccauccuggugguccuccuguacaccuucgcuacagccaacgcggacacgcuuugcauuggcuaucacgcugauaauagcaccgacacaguugauaccgugcuggagagaaacgugacagucacccauuccgugaaucuccuggaagacaaacacaacgggaaacuuuguaagcugcggggaguugcgccccuccaucugggcaagugcaauaucgccggguggauucugggaaacccugagugugaaucucucagcacagcuuccucuuggagcuacaucguggagaccuccucuagcgauaauggcacgugcuauccgggggacuuuauugauuacgaagaacugcgcgagcagcuuuccagcgucucuuccuucgaaagauuugagaucuuccccaaaaccagcucuuggccuaaccacgacuccaauaagggagugacagccgcuuguccccaugccggcgccaagagcuuuuauaaaaaccugaucuggcucguuaagaaaggcaauucuuacccuaagcuguccaaaagcuauauuaacgauaaggggaaggaagugcuuguccuguggggaauccaccaccccuccaccucugccggccaacagagccucuaccagaaugcugacgccuacguguucguggggacaucccgguauagcaaaaaguuuaaaccugagauugcuauccgcccgaaggucagagaucaggagggacggaugaacuacuauuggacccugguugaacccggcgacaaaauuacguucgaggccacagggaaucugguggugccucgcuacgcguuugccauggaaagaaacgcuggaucuggcaucauuaucuccgauacccccguccaugacugcaacacaaccugucaaaccccuaagggcgccaucaauacaagcccgcccuuccagaacauucacccuaucacgauugggaaaugccccaaguaugugaagucuaccaaacuccggcuggcuacaggacuucgcaauguuccuagcauccaguccagaggccuguuuggggccauugccggauucaucgagggcggguggaccggaaugguggacggcugguacggcuaucaucaccagaacgaacaagggucuggauacgcugcggaucucaagagcacacagaaugccaucgacgagauuaccaacaaagucaauuccgugaucgagaagaugaacacgcaguuuacagcuguuggcaaagaguucaaucaccuggagaagcggauugaaaaccuuaauaagaaaguggaugacggguuccuggauaucuggaccuacaacgccgagcuccugguccugcucgaaaaugagcgcacccuggacuaucaugauagcaacgugaagaaucuuuacgagaaagucagaucucagcugaagaacaacgccaaagaaauuggaaauggcuguuuugaguucuaucacaagugcgacaacacauguauggaauccgugaagaaugggaccuacgauuaucccaaauacagcgaggaagcuaagcucaaccgggaggagaucgacggcguuaaacuggaaucuacacgcaucuaucaaauucuugccaucuacuccacgguggcgagcucccugguccucgugguuucucugggagcuauuagcuuuuggaugugcuccaauggcucucugcagugcagaaucuguauuuga

SEQ ID NO: 197394 - RNA, 1701 nt, Artificial Sequence
  derived and/or modified CDS sequence (opt5) from hemagglutinin__InfluenzaA__ADK87313
augaagaccaucauugcccugagcuacauccucugccugguguucgcucagaaaauucccggcaacgacaauuccacagccacgcuuugucuggggcaccaugcggucccuaacggaaccaucguuaagacaauuaccaaugaucaaaucgaggugacaaacgcuaccgaacucgugcagucuagcuccacaggcgagaucugcgacucuccgcaccagauucuggaugggaaaaauuguacccuuaucgacgcccugcucggagauccccagugcgacggcuuucaaaacaagaaaugggaucuguucgucgaaagaagcaaggccuauuccaauuguuacccuuaugacgugcccgauuacgcuucucugcggagccucguugccuccagcgggacgcuggaguuuaacaaugaaucuuucaacuggaccggagugacacagaauggcaccuccagcgcuugcauucgcagaucuaagaacuccuuuuucagccggcuuaauuggcugacacaucucaacuuuaaauauccugcccugaaugucaccaugcccaacaacgagcaguucgacaaacuuuacaucuggggcgugcaccauccugggacggauaaggaccagauuuuucuguaugcgcaagccucuggacgcaucgcuguuuccacaaagagaagccagcagaccgccauuccgaauaucggcucccggccccgcgugagaaacaucccuucucggauuagcaucuacuggacaauugucaaacccggggauauccuccugauuaauuccaccggaaaccugaucgcuccucgcggcuacuucaagaucagaagcgggaagucuuccauuaugcggagcgacgcccccaucggaaaauguaauucuggcugcauuaccccgaacggcagcaucccuaaugacaagcccuuucagaacgugaaucgcauuacauauggggcguguccuagauacgugaaacaaaacacgcucaagcuggccaccggaaugcggaauguccccgagaaacagacacgcggcaucuucggggcuaucgccggauuuauugaaaacggcugggaggggaugguugauggaugguauggcuucagacaccaaaauuccgaaggccgggggcaggcugccgaccuuaagucuacccaggccgcuaucgaucagauuaacggaaaacugaauagacucaucggcaagacaaacgagaaguuccaccagauugagaaagaauuuagcgagguggaagggcgcauccaagaccuggagaaguacguggaagauaccaaaauugaccuuugguccuauaacgcggagcugcucgucgcccuggagaaucagcauacgaucgaucugacagacagcgaaaugaacaaacucuucgagaagaccaagaagcagcugcgggaaaaugcugaggauaugggaaacggcugcuuuaaaaucuaccacaagugugacaaugccugcauugggucuaucagaaacggcaccuaugaucaugacguguaccgcgacgaagcccuuaauaaccgguuccagauuaaaggaguugagcugaaguccggcuacaaagauugguuucucuggaucagcuucgcuauuucuugcuuucugcuuuguguggcccugcucggguucaucaugugggcgugccaaaagggaaauaucagauguaacauuugcaucuga

SEQ ID NO: 197395 - RNA, 1701 nt, Artificial Sequence
  derived and/or modified CDS sequence (opt5) from hemagglutinin__InfluenzaA__ADK87315
augaaggccauccuggugguccuccuguacaccuucgcuacagccaacgcggacacgcuuugcauuggcuaucacgcuaauaacagcaccgauacaguugacaccgugcuggagaaaaaugugacagucacccauuccgugaaccuccuggaagauaagcacaaugggaaacuuuguaagcugagaggaguugcuccccuccaucugggcaaaugcaacaucgccggguggauucugggaaauccugagugugaaucucucagcacagccuccucuuggagcuacaucguggagaccuccucuagcgacaacggcacgugcuauccgggggauuuuauugacuacgaggaacugcgggagcagcuuuccagcgucucuuccuucgaacgcuuugagaucuuccccaagaccagcccuuggcccaaucacgauccuaacaagggagugacagccgcuuguccccaugccggcgcgaaaucuuuuuauaagaaucugaucuggcucguuaaaaagggcaacuccuacccuaaacugagcaagucuuauauuaaugacaaggggaaagaagugcuuguccuguggggaauccaccacccguccaccagcgccgaucaacagucccucuaccagaacgcugacgccuacguguucgugggcacaucuagauauagcaagaaauuuaagcccgagauugcuauccggccuaaaguccgcgaucaggaggggagaaugaauuacuauuggacccugguugaacccggagacaagauuacguucgaggccacaggcaaccugguggugccucgguacgcguuugccauggaacgcaacgcuggguccggaaucauuaucagcgauacccccguccaugacugcaauacaaccugucaaaccccgaaaggcgccaucaacacaucucucccuuuccagaauauucaccccaucacgauuggcaagugcccuaaguaugugaaauccaccaagcugagacuugcuacagggcugcggaacguucccagcauccagucucgcggacucuuuggcgccauugccggguucaucgagggaggcuggaccgggaugguggacggaugguacggcuaucaucaccagaaugaacaaggcagcggguacgcugcggaucugaaauccacacagaacgccaucgacgagauuaccaauaaggucaacucugugaucgagaaaaugaauacgcaguuuacagcuguuggaaaggaaagcaaccaccuugagaccagaauugaaaaucugaacaagaaaguggaugacggcuuccucgauaucuggaccuacaaugccgagcugcugguccuccuggaaaacgagcggacacuugacuaucaugauuccaaugugaagaaccuguacgagaaaguccgcagccagcucaagaacaaugccaaagaaauugggaacggauguuucgaguuuuaucacaagugcgacucuaccuguauggaauccgugaagaauggcacauacgauuaucccaaauacagcgaggaagcuaagcugaacagagaggagaucgacgggguuaaacuugaaucuacgcggaucuaucaaauucuggccaucuacuccaccguggcgagcucccucguccuggugguuucucugggcgcuauuagcuucuggaugugcuccaauggaucucuccagugccgcaucuguauuuga

SEQ ID NO: 197396 - RNA, 1701 nt, Artificial Sequence; identical to SEQ ID NO: 195539
  derived and/or modified CDS sequence (opt5) from hemagglutinin__InfluenzaA__ADK87317

SEQ ID NO: 197397 - RNA, 1701 nt, Artificial Sequence
  derived and/or modified CDS sequence (opt5) from hemagglutinin__InfluenzaA__ADK87319
augaaggccauccuggugguccuccuguacaccuucgcuacagccaacgcggacacgcuuugcauuggcuaucacgcuaauaacagcaccgauacaguugacaccgugcuggagaaaaaugugacagucacccauuccgugaaccuccuggaagauaagcacaaugggaaacuuuguaagcugagaggaguugcuccccuccaucugggcaaaugcaacaucgccggguggauucugggaaauccugagugugaaucucucagcacagccuccucuuggagcuacaucguggagaccuccucuagcgacaacggcacgugcuauccgggggauuuuauugacuacgaagaacugcgggagcagcuuuccagcgucucuuccuucgaacgcuuugagaucuuccccaagaccagcucuuggccuaaucacgaucccaacaagggagugacagccgcuuguccucaugccggcgcgaaauccuuuuauaagaaucugaucuggcucguuaaaaagggcaacagcuaccccaaacugucuaaguccuauauuaaugacaaggggaaagaagugcuuguccuguggggaauccaccacccuagcaccuccgccgaucaacagucucucuaccagaacgcugacgccuacguguucgugggcacaagcagauauuccaagaaauuuaagccggagauugcuauccggcccaaaguccgcgaucaggaggggagaaugaauuacuauuggacccugguugaaccuggagacaagauuacguucgaggccacaggcaaccugguggugccccgguacgcguuugccauggaacgcaacgcugggagcggaaucauuaucucugauaccccuguccaugacugcaauacaaccugucaaacccccaaaggcgccaucaacacaucccucccguuccagaauauucacccuaucacgauuggcaagugccccaaguaugugaaaagcaccgagcugagacuugcuacagggcugcggaacguuccuucuauccagagccgcggacucuuuggcgccauugccggguucaucgaaggaggcuggaccgggaugguggacggaugguacggcuaucaucaccagaaugagcaaggcuccggguacgcugcggaucugaagucuacacagaacgccaucgacgagauuaccaauaaagucaacagcgugaucgaaaagaugaauacgcaguuuacagcuguuggaaaagaguucaaccaccuugaaaagagaauugagaaucugaacaagaaaguggaugacggcuuccucgauaucuggaccuacaaugccgaacugcugguccuccuggagaacgagcggacccuugacuaucaugauuccaaugugaagaaccuguacgaaaaaguccgcagccagcucaagaacaaugccaaagagauugggaacggauguuuugaguucuaucacaagugcgacaauacauguauggagucugugaagaacggcaccuacgauuaucccaaauacuccgaagaggcuaagcugaauagagaggaaaucgacgggguuaaacuugagagcacacggaucuaucgcauucuggccaucuacucuacgguggcguccagccucguccuggugguuucccugggcgcuauuucuuuuuggaugugcagcaacggaucccuccaaugcagaaucuguauuuga

SEQ ID NO: 197398 - RNA, 1701 nt, Artificial Sequence
  derived and/or modified CDS sequence (opt5) from hemagglutinin__InfluenzaA__ADK87321
augaagaccaucauugcccugagcuacauccucugccugguguucgcucagaaaauucccggcaacgacaauuccacagccacgcuuugucuggggcaccaugcggucccuaacggaaccaucguuaagacaauuaccaaugaucaaaucgaggugacaaacgcuaccgaacucgugcagucuagcuccacaggcgagaucugcgacucuccgcaccagauucuggaugggaaaaauuguacccuuaucgacgcccugcucggagauccccagugcgacggcuuucaaaacaagaaaugggaucuguucgucgaaagaagcaaggccuauuccaauuguuacccuuaugacgugcccgauuacgcuucucugcggagccucguugccuccagcgggacgcuggaguuuaacaaugaaucuuucaacuggaccggagugacacagaauggcaccuccagcgcuugcaugcgcagaucuaagaacuccuuuuucagccggcuuaauuggcugacacaucucaacuuuaaauauccugcccugaaugucaccaugcccaacaacgagcaguucgacaaacuuuacauuuggggcgugcaccauccugggacggauaaggaccagaucuuucuguaugcgcaagccucuggacgcauuacaguuuccaccaagagaagccagcagacagcuaucccgaauauuggcucccggccccgcgugagaaacaucccuucucggaucagcgucuacuggaccauugugaaacccggggauauccuccugauuaauuccaccggaaaccugaucgccccucgcggcuacuucaagauuagaagcgggaagucuuccaucaugcggagcgacgcuucuaucggaaaauguaauagcggcugcauuacacccaacggcuccaucccgaaugacaagccuuuucagaacgugaaucgcauuacguauggggccugucccagauacgucaaacaaaacacccucaagcuggcgacaggaaugcggaauguuccugagaaacagacccgcggcaucuucggggccauugcuggauuuaucgaaaacggcugggaggggaugguggauggaugguauggcuucagacaccaaaauucugaaggccgggggcaggccgcugaccuuaagagcacacaggccgccaucgaucagauuaacggaaaacugaauagacucaucggcaagaccaacgagaaguuccaccagauugagaaagaauuucccgagguggaagggcgcauccaagaccuggagaaguacgucgaagauacgaaaauugaccuuugguccuauaacgcugagccccugguggcgcucgagaaucagcauacaaucgaucugaccgacagcgaaaugaacaagcuguucgagaaaaccaagaagcagcuccgggaaaaugccgaggauaugggaaacggcugcuuuaaaauuuaccacaagugugacaaugcuugcaucgggucuaucagaaacggcacauaugaucaugacguuuaccgcgacgaagcccugaauaaccgguuccagauuaaaggaguggagcuuaaguccggcuacaaagauugguuucuguggaucagcuucgccauuucuugcuuucuccugugugucgcccuucugggguucaucaugugggcuugccaaaagggaaauauuagauguaacaucugcaucuga

SEQ ID NO: 197399 - RNA, 1701 nt, Artificial Sequence
  derived and/or modified CDS sequence (opt5) from hemagglutinin__InfluenzaA__ADK87323
augaagaccaucauugcccugagcuacauccucugccugguguucgcucagaaacuucccggcaacgacaauuccacagccacgcugugucucgggcaccaugcggucccuaacggaaccauuguuaagacaaucaccaaugaucaaauugaggugacaaacgcuaccgaacuggugcagucuagcuccacaggcgagaucugcgacucuccgcaccagauccuugaugggaaaaauuguacccugauugacgcccuccugggagauccccagugcgacggcuuucaaaacaagaaaugggaucuguucgucgaaagaagcaaggccuauuccaauuguuacccuuaugacgugcccgauuacgcuucucuccggagccugguugccuccagcgggacgcuugaguuuaacaaugaaucuuucaacuggaccggagugacacagaauggcaccuccagcgcuugcauccgcagaucuaagaacuccuuuuucagccggcugaauuggcucacacaucugaacuuuaaauauccugcccuuaaugucaccaugcccaacaacgagcaguucgacaagcuguacauuuggggcgugcaccauccugggacggauaaagaccagaucuuucucuaugcgcaagccucuggacgcauuacaguuuccaccaagagaagccagcagacagcuaucccgaauauuggcucccggccccgcguggggaacaucccuucuagaaucagcauuuacuggaccaucgucaaacccggagauauucugcugaucaauuccaccggcaaccucauugccccucggggguacuucaagauccgcagcggaaagucuuccaucaugagaagcgacgcucccauuggcaaauguaauucugagugcaucacaccgaacggcagcauuccuaaugacaagcccuuucagaacgugaaucggaucacguauggggccuguccucgcuacgugaaacaaaacacccugaaacuugcgacaggaaugagaaauguccccgaaaaacagacccggggcauuuucggggccaucgcuggauuuaucgagaacggcugggaagggaugguugauggaugguauggcuuccgccaccaaaauuccgagggcagagggcaggccgcugaccugaagucuacacaggccgccauugaucagaucaacggaaaacucaaucggcugauuggcaagaccaacgagaaguuccaccagaucgaaaaagaguuuagcgaaguggaggggcgcauucaagaccuugaaaaguacguggaggauacgaaaaucgaccugugguccuauaacgcugagcuccuggucgcgcuggaaaaucagcauacaauugaucucaccgacagcgagaugaacaagcuguucgaaaagaccaagaagcagcuuagagagaaugccgaagauaugggaaacggcugcuuuaaaaucuaccacaagugugacaaugcuugcaucgggucuauucggaacggcacauaugaucaugacguguacagagacgaggcccugaauaaccgcuuccagaucaaaggaguugagcucaaguccggcuacaaagauuggauucuguggaucagcuuugccauuucuugcuuccuucuguguguggcucuccugggguuuaucaugugggccugccaaaagggaaauauccgguguaacauuugcaucuga

SEQ ID NO: 197400 - RNA, 1701 nt, Artificial Sequence
  derived and/or modified CDS sequence (opt5) from hemagglutinin__InfluenzaA__ADK87325
augaagaccaucauugcccugagcuacauccucugccugguguucgcucagaaacuucccggcaacgacaauuccacagccacgcugugucucgggcaccaugcggucccuaacggaaccauuguuaagacaaucaccaaugaucaaauugaggugacaaacgcuaccgaacuggugcagucuagcuccacaggcgagaucugcgacucuccgcaccagauccuugaugggaaaaauuguacccugauugacgcccuccugggagauccccagugcgacggcuuucaaaacaagaaaugggaucuguucgucgaaagaagcaaggccuauuccaauuguuacccuuaugacgugcccgauuacgcuucucuccggagccugguugccuccagcgggacgcuugaguuuaacaaugaaucuuucaacuggaccggagugacacagaauggcaccuccagcgcuugcauccgcagaucuaagaacuccuuuuucagccggcugaauuggcucacacaucugaacuuuaaauauccugcccuuaaugucaccaugcccaacaacgagcaguucgacaagcuguacauuuggggcgugcaccauccugggacggauaaagaccagaucuuucucuaugcgcaagccucuggacgcauuacaguuuccaccaagagaagccagcagacagcuaucccgaauauuggcucccggccccgcgugagaaacaucccuucucggaucagcauuuacuggaccaucgucaaacccggggauauucugcugaucaauuccaccggaaaccucauugccccucgcggcuacuucaagaucagaagcgggaagucuuccaucaugcggagcgacgcucccauuggaaaauguaauucugagugcaucacaccgaacggcagcauuccuaaugacaagcccuuucagaacgugaaucgcaucacguauggcgccuguccuagacacgugaaacaaaacacccugaaacuugcgacagggaugcggaauguccccgaaaaacagacccgcggaauuuucggcgccaucgcuggguuuaucgagaacggaugggaaggcaugguugaugggugguacggauucagacaccaaaauuccgagggccggggccaggccgcugaccugaagucuacacaggccgccauugaucagaucaacgggaaacucaauagacugauuggaaagaccaacgagaaguuccaucagaucgaaaaagaguuuagcgaaguggagggccgcauucaagaccuugaaaaguauguggaggauacgaaaaucgaccugugguccuacaacgcugagcuccuggucgcgcuggaaaaucagcacacaauugaucucaccgacagcgagaugaacaagcuguucgaaaagaccaagaagcagcuucgggagaaugccgaagauauggggaacggaugcuuuaaaaucuaucauaagugugacaaugcuugcaucggcucuauuagaaacgggacauacgaucacgacguguaucgcgacgaggcccugaauaaccgguuccagaucaaaggcguugagcucaaguccggauacaaagauuggauucuguggaucagcuuugccauuucuugcuuccuucuguguguggcucuccugggcuuuaucaugugggccugccaaaaggggaauaucagauguaacauuugcaucuga

SEQ ID NO: 197401 - RNA, 1701 nt, Artificial Sequence
  derived and/or modified CDS sequence (opt5) from hemagglutinin__InfluenzaA__ADK87326
augaagaccaucauugcccugagcuacauccucugccugguguucgcucagaaacuucccggcaacgacaauuccacagccacgcugugucucgggcaccaugcggucccuaacggaaccauuguuaagacaaucaccaaugaucaaauugaggugacaaacgcuaccgaacuggugcagucuagcuccacaggcgagaucugcgacucuccgcaccagauccuugaugggaaaaauuguacccugauugacgcccuccugggagauccccagugcgacggcuuucaaaacaagaaaugggaucuguucgucgaaagaagcaaggccuauuccaauuguuacccuuaugacgugcccgauuacgcuucucuccggagccugguugccuccagcgggacgcuugaguuuaacaaugaaucuuucaacuggaccggagugacacagaauggcaccuccagcgcuugcauccgcagaucuaagaacuccuuuuucagccggcugaauuggcucacacaucugaacuuuaaauauccugcccuuaaugucaccaugcccaacaacgagcaguucgacaagcuguacauuuggggcgugcaccauccugggacggauaaagaccagaucuuucucuaugcgcaagccucuggacgcauuacaguuuccaccaagagaagccagcagacagcuaucccgaauauuggcucccggccccgcgugagaaacaucccuucucggaucagcauuuacuggaccaucgucaaacccggggauauucugcugaucaauuccaccggaaaccucauugccccucgcggcuacuucaagaucagaagcgggaagucuuccaucaugcggagcgacgcucccauuggaaaauguaauucugagugcaucacaccgaacggcagcauuccuaaugacaagcccuuucagaacgugaaucgcaucacguauggcgccuguccuagauacgugaaacaaaacacccugaaacuugcgacagggaugcggaauguccccgaaaaacagacccgcggaauuuucggcgccaucgcuggguuuaucgagaacggaugggaaggcaugguugaugggugguauggauucagacaccaaaauuccgagggccggggccaggccgcugaccugaagucuacacaggccgccauugaucagaucaacgggaaacucaauagacugauuggaaagaccaacgagaaguuccaccagaucgaaaaagaguuuagcgaaguggagggccgcauucaagaccuugaaaaguacguggaggauacgaaaaucgaccugugguccuauaacgcugagcuccuggucgcgcuggaaaaucagcauacaauugaucucaccgacagcgagaugaacaagcuguucgaaaagaccaagaagcagcuucgggagaaugccgaagauauggggaacggaugcuuuaaaaucuaccacaagugugacaaugcuugcaucggcucuauuagaaacgggacauaugaucaugacguguaccgcgacgaggcccugaauaaccgguuccagaucaaaggcguugagcucaaguccggaugcaaagauuggauucuguggaucagcuuugccauuucuuguuuccuucugugcguggcucuccugggcuuuaccaugugggccugucaaaaggggaauaucagaugcaacaucuguauuuga

SEQ ID NO: 197402 - RNA, 1701 nt, Artificial Sequence
  derived and/or modified CDS sequence (opt5) from hemagglutinin__InfluenzaA__ADK87328
augaaggccauccuggugguccuccuguacaccuucgcuacagccaacgcggacacgcuuugcauuggcuaucacgcuaauaacagcaccgauacaguugacaccgugcuggagaagaaugugacagucacccauuccgugaaccuccuggaagauaagcacaaugggaaacuuuguaagcugagaggaguugcuccccuccaucugggcaaaugcaacaucgccggguggauucugggaaauccugagugugaaucucucagcacagccuccucuuggagcuacaucguggagaccuccucuagcgacaacggcacgugcuauccgggggauuuuauugacuacgaggagcugcgggagcagcuuuccagcgucucuuccuucgaacgcuuugagaucuuccccaagaccagcucuuggccuaaucacgaucccaacaagggagugacagccgcuuguccucaugccggcgcgaaauccuuuuauaagaaucugaucuggcucguuaaaaagggcaacagcuaccccaaacugucuaaguccuauauuaaugacaaggggaaagaagugcuuguccuguggggaauccaccacccuagcaccuccgccgaucaacagucucucuaccagaacgcugacgccuacguguucgugggcacaagcagauauuccaagaaauuuaagccggagauugcuauccggcccaaaguccgcgaucaggaggggagaaugaauuacuauuggacccugguugaaccuggagacaagauuacguucgaggccacaggcaaccugguggugccccgguacgcguuugccauggaacgcaacgcugggagcggaaucauuaucucugauaccccuguccaugacugcaauacaaccugucaaacccccaaauccgccaucaacacaagccucccguuccagaauauucacccuaucacgauuggcaagugccccaaguaugugaaaucuaccaagcugagacuugcuacaggccugcggaacguuccuagcauccagucccgcgggcucuuuggagccauugccggcuucaucgaagggggauggaccggcaugguggacgggugguacggauaucaucaccagaaugaacaaggcucuggcuacgcugcggaucugaaaagcacacagaacgccaucgacgagauuaccaauaaggucaacuccgugaucgagaaaaugaauacgcaguuuacagcuguugggaaggaguucaaccaccuugaaaagagaauugaaaaucugaacaaaaagguggaugacggauuccucgauaucuggaccuacaaugccgagcugcugguccuccuggaaaacgagcggacccuugacuaucaugauagcaaugugaaaaaccuguacgagaagguccgcucucagcucaaaaacaaugccaaggaaauuggcaacggguguuuugaguucuaucacaagugcgacaauacauguauggaauccgugaaaaacggaaccuacgauuaucccaaguacagcgaggaagcuaaacugaauagagaggagaucgacggcguuaaacuugaaucuacacggaucuaucaaauucuggccaucuacuccacgguggcgagcucccucguccuggugguuucucugggggcuauuagcuuuuggaugugcuccaacggcucucuccagugccgcaucuguauuuga

SEQ ID NO: 197403 - RNA, 1701 nt, Artificial Sequence
  derived and/or modified CDS sequence (opt5) from hemagglutinin__InfluenzaA__ADK87334
augaagaccaucauugcccugagcuacauccucugccugguguucgcucagaaacuucccggcaacgacaauuccacagccacgcugugucucgggcaccaugcggucccuaacggaaccauuguuaagacaaucaccucugaucaaauugaggugacaaaugcuaccgaacuggugcagagcuccucuacaggcgagaucugcgacagcccgcaccagauccuugaugggaaaaacuguacccugauugacgcccuccugggagauccccagugcgacggcuuucaaaauaagaaaugggaucuguucgucgaaagauccaaggccuauucuaacuguuacccuuaugacgugcccgauuacgcuagccuccggucccugguugccagcucugggacgcuugaguuuaauaacgaauccuucaauuggaccggagugacacagaacggcaccagcucugcuugcauccgcagauccaagaauagcuuuuucucuaaacugaacuggcucacacaucugaauuuuaaguauccugcccuuaacgucaccaugcccaauaacgagcaguucgacaaacuguacauuuggggcgugcggcacccugggacggauaaggaccagaucuuucucuaugcgcaagccuccggacgcauuacaguuagcaccaaaagaucccagcagacagugaucccgaacauuggcucucggccccgcgucagaaauaucccuagccggaucuccaccuacuggaccauugugaagcccggggauauccugcugauuaacagcacaggaaaucucaucgcuccucgcggcuacuucaagauuagaucugggaaauccagcaucaugcggucugacacgcccaucggaaaguguaacagcgagugcauuaccccgaauggcuccaucccuaacgacaaacccuuucagaaugugaaccgcauuacauauggcgccuguccuagauacgucaagcaaaauacccugaaacuugcuacagggaugcggaacguucccgaaaagcagacccgcggaaucuucggcgccauugcgggguuuaucgagaauggaugggaaggcaugguggaugggugguauggauucagacaucagaacucugagggccggggccaagccgcugaccugaaaagcacgcaggccgcuaucgaucagauuaaugggaagcucaacagacugaucggaaagacaaaugagaaauuccaccagauugaaaaggaguuuuccgaaguggagggccgcauccaagaccuugaaaaauacgucgaggauaccaagauugaccuguggagcuauaacgccgagcuccugguggcccuggaaaaccagcacaccaucgaucucacagacucugagaugaauaaacuguucgaaaagaccaagaaacagcuucgggagaacgcugaagauauggggaauggaugcuuuaagauuuaccauaaaugugacaacgcgugcaucggcuccaucagaaaugggacauaugaucacgacguuuaccgcgacgaggcccugaacaaucgguuccagauuaagggcguggagcucaaaagcggauacaaggauuggauccuguggauuucuuuugcuaucuccugcuuccuucugugugucgcccuccugggcuuuauuaugugggccugccaaaaggggaacaucagauguaauaucugcauuuga

SEQ ID NO: 197404 - RNA, 1701 nt, Artificial Sequence
  derived and/or modified CDS sequence (opt5) from hemagglutinin__InfluenzaA__ADK87336
augaagaccaucauugcccugagcuacauccucugccugguguucgcucagaaacuucccggcaacgacaauuccacagccacgcugugucucgggcaccaugcggucccuaacggaaccauuguuaagacaaucaccaaugaucaaauugaggugacaaacgcuaccgaacuggugcagucuagcuccacaggcgagaucugcgacucuccgcaccagauccuugaugggaaaaauuguacccugauugacgcccuccugggagauccccagugcgacggcuuucaaaacaagaaaugggaucuguucgucgaaagaagcaaggccuauuccaauuguuacccuuaugacgugcccgauuacgcuucucuccggagccugguugccuccagcgggacgcuugaguuuaacaaugaaucuuucaacuggaccggagugacacagaauggcaccuccagcgcuugcauccgcagaucuaagaacuccuuuuucagcaaacugaauuggcucacacaucugaacuuuaaguauccugcccuuaaugucaccaugcccaacaacgagcaguucgacaaacuguacauuuggggcgugcaccauccugggacggaucgggaccagaucuuucucuaugcgcaagccucuggacgcauuacaguuuccaccaagagaagccagcagacagugaucccgaauauuggcucccggccccgcgucagaaacaucccuucucggaucagcauuuacuggaccaucgugaaacccggggauauucugcugaucaauuccaccggaaaccucauugcuccucgcggcuacuucaagaucagaagcgggaagucuuccaucaugcggagcgacacacccauuggaaaaucuaauagcgaguguaucacgccgaacggcuccauuccuaaugacaagcccuuucagaacgugaaucgcaucaccuauggcgccugcccuagauacgucaaacaaaacacacugaaacuugcuaccgggaugcggaauguucccgaaaaacagacacgcggaauuuucggcgccaucgcgggguuuaucgagaacggaugggaaggcaugguggaugggugguauggauucagacaccagaauagcgagggccggggccaagccgcugaccugaagucuacccaggccgcuauugaucagaucaacgggaaacucaauagacugauuggaaagacgaacgagaaguuccaccagaucgaaaaagaguuuuccgaaguggagggccgcauucaagaccuugaaaaguacgucgaggauacaaaaaucgaccuguggagcuauaacgccgagcuccugguggcccuggaaaaucagcauaccauugaucucaccgacucugagaugaacaagcuguucgaaaagacaaagaagcagcuucgggaggaugcugaagacauggggaauggauguuuuaaaaucuaccacaagugcgauaacgcguguaucggcuccauuagaaaugggaccuaugaccaugacguuuaccgcgaugaggcccugaacaaucgguuccagaucaaaggcguggagcucaagagcggauacaaagacuggauucuguggaucucuuuugcuauuuccugcuuccuucugugcgucgcccuccugggcuuuaucaugugggccugucaaaaggggaacaucagaugcaauauuuguaucuga

SEQ ID NO: 197405 - RNA, 1701 nt, Artificial Sequence; identical to SEQ ID NO: 194741
  derived and/or modified CDS sequence (opt5) from hemagglutinin__InfluenzaA__ADK87338

SEQ ID NO: 197406 - RNA, 1701 nt, Artificial Sequence
  derived and/or modified CDS sequence (opt5) from hemagglutinin__InfluenzaA__ADK90193
augaaggccauccuggugguccuccuguacaccuucgcuacagccaacgcggacacgcuuugcauuggcuaucacgcuaauaacagcaccgauacaguugacaccgugcuggagaagaaugugacagucacccauuccgugaaccuccuggaagauaagcacaaugggaaacuuuguaagcugagaggaguugcuccccuccaucugggcaaaugcaacaucgccggguggauucugggaaauccugagugugaaucucucagcacagccuccucuuggagcuacaucguggagaccuccucuagcgacaacggcacgugcuauccgggggauuuuauugacuacgaagaacugcgggagcagcuuuccagcgucucuuccuucgaacgcuuugagaucuuccccaagaccagcucuuggccuaaucacgauuccaacaagggagugacagccgcuuguccccaugccggcgcgaaaucuuuuuauaagaaucugaucuggcucguuaaaaagggcaacagcuacccuaaacuguccaagagcuauauuaaugacaaggggaaagugguccuugugcuguggggaauccaccaccccuccaccucugccgaucaacagagccucuaccagaacgcugacgccuacguguucgucggcacauccagauauagcaagaaauuuaagccugaaauugcuauccggccgaaaguucgcgaucaggaggggagaaugaauuacuauuggacccugguggagcccggagacaagauuacguucgaagccacaggcaaccugguggucccucgguacgcguuugccauggagcgcaacgcugggucuggaaucauuaucuccgauacccccgugcaugacugcaauacaaccugucaaaccccuaaaggcgccaucaacacaagccuccccuuccagaauauucacccgaucacgauuggcaagugcccuaaguauguuaaaucuaccaagcugagacuugcuacagggcugcggaacgugcccagcauccagucccgcggacucuuuggcgccauugccggguucaucgaaggaggcuggaccgggauggucgacggaugguacggcuaucaucaccagaaugagcaaggcucuggguacgcugcggaucugaaaagcacacagaacgccaucgacgaaauuaccaauaaggugaacuccguuaucgagaaaaugaauacgcaguuuacagcugugggaaaggaguucaaccaccuugaaaagagaauugagaaucugaacaaaaaggucgaugacggcuuccucgauaucuggaccuacaaugccgaacugcuggugcuccuggagaacgaacggacccuugacuaucaugauagcaaugucaaaaaccuguacgagaaggugcgcucucagcucaaaaacaaugccaaggagauugggaacggauguuuugaguucuaucacaagugcgacaauacauguauggaguccguuaaaaacggcaccuacgauuauccuaaguacagcgaagaggcuaaacugaauagagaagagaucgacggggugaaacuugagucuacacggaucuaucaaauucuggccaucuacuccacggucgcgagcucccucgugcugguugugucucugggcgcuauuagcuuuuggaugugcuccaacggaucucuccagugccgcaucuguauuuga

SEQ ID NO: 197407 - RNA, 1701 nt, Artificial Sequence
  derived and/or modified CDS sequence (opt5) from hemagglutinin__InfluenzaA__ADK90194
augaaggccauccuggugguccuccuguacaccuucgcuacagccaacgcggacacgcuuugcauuggcuaucacgcuaauaacagcaccgauacaguugacaccgugcuggagaaaaaugugacagucacccauuccgugaaccuccuggaagauaagcacaaugggaaacuuuguaagcugagaggaguugcuccccuccaucugggcaaaugcaacaucgccggguggauucugggaaauccugagugugaaucucucagcacagccuccucuuggagcuacaucguggagaccuccucuagcgacaacggcacgugcuauccgggggauuuuauugacuacgaagaacugcgggagcagcuuuccagcgucucuuccuucgaacgcuuugagaucuuccccaagaccagcucuuggccuaaucacgauuccaacaagggagugacagccgcuuguccccaugccggcgcgaaaucuuuuuauaagaaucugaucuggcucguuaaaaagggcaacagcuacccuaaacuguccaagagcuauauuaaugacaaggggaaagaagugcuuguccuguggggaauccaccaccccuccaccucugccgaucaacagagccucuaccagaacgcugacgccuacguguucgugggcacauccaaguauagcaaaaaguuuaaaccugagauugcuaucagaccgaagguccgggaucaggaggggcgcaugaauuacuauuggacccugguugaacccggagacaaaauuacguucgaggccacaggcaaccugguggugccuagauacgcguuugccauggaacggaacgcugggucuggaaucauuaucuccgauacccccguccaugacugcaauacaaccugucaaaccccuaagggcgccaucaacacaagccuccccuuccagaauauucacccgaucacgauuggcaagugcccuaaauaugugaagucuaccaaacugcgccuugcuacagggcugagaaacguucccagcauccagucccggggacucuuuggcgccauugccggguucaucgagggaggcuggaccgggaugguggacggaugguacggcuaucaucaccagaaugaacaaggcucuggguacgcugcggaucuuaagagcacacagaacgccaucgacgagauuaccaauaaagucaacuccgugaucgagaagaugaauacgcaguuuacagcuguuggaaaggaguucaaccaccuggagaaacgcauugaaaaucugaacaagaaaaucgaugacggcuuccucgauauuuggaccuacaaugccgagcugcuggugcuccuggaaaacgagagaacccuugacuaucaugauagcaaugucaagaaccuguacgagaaagugcggucucagcucaagaacaaugccaaggaaaucgggaacggauguuuugaguucuaucacaaaugcgacaauacauguauggaauccgucaagaacggcaccuacgauuauccuaaauacagcgaggaagcuaagcugaaucgcgaggagaucgacggggugaaacuugaaucuacaagaauuuaucaaauccuggccauuuacuccacgguugcgagcucccucgugcuggucgugucucugggcgcuaucagcuuuuggaugugcuccaacggaucucuccagugccggauuuguaucuga

SEQ ID NO: 197408 - RNA, 1701 nt, Artificial Sequence
  derived and/or modified CDS sequence (opt5) from hemagglutinin__InfluenzaA__ADK90195
augaaggccauccuggugguccuccuguacaccuucgcuacagccaacgcggacacgcuuugcauuggcuaucacgcuaauaacagcaccgauacaguugacaccgugcuggagaagaaugugacagucacccauuccgugaaccuccuggaagauaagcacaaugggaaacuuuguaagcugagaggaguugcuccccuccaucugggcaaaugcaacaucgccggguggauucugggaaauccugagugugaaucucucagcacagccuccucuuggagcuacaucguggagaccuccucuagcgacaacggcacgugcuauccgggggauuuuauugacuacgaagaacugcgggagcagcuuuccagcgucucuuccuucgaacgcuuugagaucuuccccaagaccagcucuuggccuaaucacgauuccaacaagggagugacagccgcuuguccccaugccggcgcgaaaucuuuuuauaagaaucugaucuggcucguuaaaaagggcaacagcuacccuaaacuguccaagagcuauauuaaugacaaggggaaagaagugcuuguccuguggggaauccaccaccccuccaccucugccgaucaacagagccucuaccagaacgcugacgccuacguguucgugggcacauccagauauagcaagaaauuuaagccugagauugcuauccggccgaaaguccgcgaucaggaggggagaaugaauuacuauuggacccugguugaacccggagacaagauuacguucgaggccacaggcaaccugguggugccucgguacgcguuugccauggaacgcaacgcugggucuggaaucgucauuuccgauacccccgugcaugacugcaauacaaccugucaaaccccuaaaggcgccaucaacacaagccuccccuuccagaauauccacccgauuacgaucggcaagugcccuaaguauguuaaaucuaccaagcugagacuugcuacagggcugcggaacgugcccagcauucagucccgcggacucuuuggcgccaucgccggguucauugagggaggcuggaccgggauggucgacggaugguacggcuaucaucaccagaaugaacaaggcucuggguacgcugcggaucugaaaagcacacagaacgccaucgacgagaucaccaauaaggugaacuccguuauugagaaaaugaauacgcaguuuacagcugugggaaaggaguucaaccaccuugagaagagaaucgaaaaucugaacaaaaagauugaugacggcuuccucgauaucuggaccuacaaugccgagcugcugguccuccuggaaaacgagcggacccuugacuaucaugauagcaaugugaaaaaccuguacgagaagguccgcucucagcucaaaaacaaugccaaggaaauugggaacggauguuuugaguucuaucacaagugcgacaauacauguauggaauccgugaaaaacggcaccuacgauuauccuaaguacagcgaggaagcuaaacugaauagagaggagaucgacgggguuaaacuugaaucuacacggaucuaucaaauucuggccaucuacuccacgguggcgagcucccucguccuggugguuucucugggcgcuauuagcuuuuggaugugcuccaacggaucucuccagugccgcaucuguauuuga

SEQ ID NO: 197409 - RNA, 1701 nt, Artificial Sequence; identical to SEQ ID NO: 194728
  derived and/or modified CDS sequence (opt5) from hemagglutinin__InfluenzaA__ADK90196

SEQ ID NO: 197410 - RNA, 1701 nt, Artificial Sequence
  derived and/or modified CDS sequence (opt5) from hemagglutinin__InfluenzaA__ADK90197
augagagccauccugggcgugcuccuguacaccuucgcuacagccaacgcggacacgcuuugcauuggguaucacgcuaauaacagcaccgauacagucgacaccguucuggagaagaaugugacagugacccauuccgucaaccuccuggaagauaaacacaauggaaagcuguguaaacugcggggcguggcgccccuccaucuggggaagugcaacaucgccggauggauucugggcaauccugagugugaaucucucagcacagcuuccucuuggagcuacaucguugagaccuccucuagcgacaacgggacgugcuauccgggagauuuuauugacuacgaagaacugcgcgagcagcuuuccagcgugucuuccuucgaaagauuugagaucuuccccaaaaccagcucuuggccuaaucacgauuccaacaagggcgucacagccgcuuguccccaugccggcgccaagagcuuuuauaaaaaucugaucuggcucgugaagaaagggaacucuuacccuaagcuguccaaaagcuauauuaaugacaagggaaaggaaguucuugugcuguggggcauccaccaccccuccaccucugccgaucaacagagccucuaccagaacgcugacgccuacgucuucguggggacaucccgguauagcaaaaaguuuaaaccugagauugcuauccgcccgaaggugagagaucaggagggacggaugaauuacuauuggacccuggucgaacccggcgacaaaauuacguucgaggccacagggaaccugguugugccucgcuacgcguuugccauggaaagaaacgcuggaucuggcaucauuaucuccgauacccccgugcaugacugcaauacaaccugucaaaccccuaagggcgccaucaacacaagccuccccuuccagaauauucacccgaucacgauugggaaaugcccuaaguaugucaagucuaccaaacugcggcuugcuacaggacugcgcaacgugcccagcauccaguccagaggccucuuuggggccauugccggauucaucgagggcggguggaccggaaugguugacggcugguacggcuaucaucaccagaaugaacaagggucuggauacgcugcggaucuuaagagcacacagaacgccaucgacgagauuaccaauaaagugaacuccgucaucgagaagaugaauacgcaguuuacagcugugggcaaagaguucaaccaccuugagaagcggauugaaaaucugaacaagaaaguugaugacggguuccucgauaucuggaccuacaaugccgagcugcuggugcuccuggaaaacgagcgcacccuugacuaucaugauagcaaugucaagaaccuguacgagaaagugagaucucagcucaagaacaaugccaaagaaauuggaaacggcuguuuugaguucuaucacaagugcgacaauacauguauggaauccgucaagaacgggaccuacgauuauccuaaauacagcgaggaagcuaagcugaaucgggaggagaucgacggcgugaaacuugaaucuacacgcaucuaucaaauucuggccaucuacuccacgguugcgagcucccucgugcuggucgugucucugggagcuauuagcuuuuggaugugcuccaacggcucucuccagugcagaaucuguauuuga

SEQ ID NO: 197411 - RNA, 1701 nt, Artificial Sequence
  derived and/or modified CDS sequence (opt5) from hemagglutinin__InfluenzaA__ADK90198
augaaggccauccugggcgugcuccuguacaccuucgcuacagccaacgcggacacgcuuugcauuggguaucacgcuaauaacagcaccgauacagucgacaccguucuggagaagaaugugacagugacccauuccgucaaccuccuggaagauaagcacaauggaaaacuuuguaagcugagaggcguggcuccccuccaucuggggaaaugcaacaucgccggauggauucugggcaauccugagugugaaucucucagcacagccuccucuuggagcuacaucguugagaccuccucuagcgacaacgggacgugcuauccgggagauuuuauugacuacgaagaacugcgggagcagcuuuccagcgugucuuccuucgaacgcuuugagaucuuccccaagaccagcucuuggccuaaucacgauuccaacaagggcgucacagccgcuuguccccaugccggcgcgaaaucuuuuuauaagaaucugaucuggcucgugaaaaaggggaacagcuacccuaaacuguccaagagcuauauuaaugacaagggaaaagaaguucuugugcuguggggcauccaccaccccuccaccucugccgaucaacagagccucuaccagaacgcugacgccuacgucuucguggggacauccagauauagcaagaaauuuaagccugagauugcuauccggccgaaagugcgcgaucaggagggaagaaugaauuacuauuggacccuggucgaacccggcgacaagauuacguucgaggccacagggaaccugguugugccucgguacgcguuugccauggaacgcaacgcuggaucuggcaucauuaucuccgauacccccgugcaugacugcaauacaaccugucaaaccccuaaaggcgccaucaacacaagccuccccuuccagaauauucacccgaucacgauugggaagugcccuaaguaugucaaaucuaccaagcugagacuugcuacaggacugcggaacgugcccagcauccagucccgcggccucuuuggggccauugccggauucaucgagggcggguggaccggaaugguugacggcugguacggcuaucaucaccagaaugaacaagggucuggauacgcugcggaucugaaaagcacacagaacgccaucgacgagauuaccaauaaggugaacuccgucaucgagaaaaugaauacgcaguuuacagcugugggcaaggaguucaaccaccuugagaagagaauugaaaaucugaacaaaaagguugaugacggguuccucgauaucuggaccuacaaugccgagcugcuggugcuccuggaaaacgagcggacccuugacuaucaugauagcaaugucaaaaaccuguacgagaaggugcgcucucagcucaaaaacaaugccaaggaaauuggaaacggcuguuuugaguucuaucacaagugcgacaauacauguauggaauccgucaaaaacgggaccuacgauuauccuaaguacagcgaggaagcuaaacugaauagagaggagaucgacggcgugaaacuugaaucuacacggaucuaucaaauucuggccaucuacuccacgguugcgagcucccucgugcuggucgugucucugggagcuauuagcuuuuggaugugcuccaacggcucucuccagugccgcaucuguauuuga

SEQ ID NO: 197412 - RNA, 1701 nt, Artificial Sequence; identical to SEQ ID NO: 194741
  derived and/or modified CDS sequence (opt5) from hemagglutinin__InfluenzaA__ADK90199

SEQ ID NO: 197413 - RNA, 1701 nt, Artificial Sequence
  derived and/or modified CDS sequence (opt5) from hemagglutinin__InfluenzaA__ADK90200
augaaggccauccuggugguccuccuguacaccuucgcuacagccaacgcggacacgcuuugcauuggcuaucacgcuaauaacagcaccgauacaguugacaccgugcuggagaagaaugugacagucacccauuccgugaaccuccuggaagauaagcacaaugggaaacuuuguaagcugagaggaguugcuccccuccaucugggcaaaugcaacaucgccggguggauucugggaaauccugagugugaaucucucagcacagccuccucuuggagcuacaucguggagaccuccucuagcgacaacggcacgugcuauccgggggauuuuauugacuacgaagaacugcgggagcagcuuuccagcgucucuuccuucgaacgcuuugagaucuuccccaagaccagcucuuggccuaaucacgauuccaacaagggagugacagccgcuuguccccaugccggcgcgaaaucuuuuuauaagaaucugaucuggcucguuaaaaagggcaacagcuacccuaaacuguccaagagcuauauuaaugacaaggggaaagaagugcuuguccuguggggaauccaccaccccuccaccucugccgaucaacagagccucuaccagaacgcugacgccuacguguucgugggcacauccagauauagcaagaaauuuaagccugagauugcuauccggccgaaaguccgcgaucaggaggggagaaugaauuacuauuggacccugguugaacccggagacaagauugccuucgaggcgacgggcaaccugguggugccucgguacgccuuugcuauggaacgcaacgccgggucuggaaucauuaucuccgauacacccguccaugacugcaauaccacaugucaaaccccuaaaggcgcuaucaacaccagccuccccuuccagaauauucacccgaucacaauuggcaagugcccuaaguaugugaaaucuacgaagcugagacuugccaccgggcugcggaacguucccagcauccagucccgcggacucuuuggcgccauugcuggguucaucgagggaggcuggacagggaugguggacggaugguacggcuaucaucaccagaaugaacaaggcucuggguacgcggccgaucugaaaagcacccagaacgcuaucgacgagauuacaaauaaggucaacuccgugaucgagaaaaugaauacccaguuuacggccguuggaaaggaguucaaccaccuugagaagagaauugaaaaucugaacaaaaagguggaugacggcuuccucgauaucuggacauacaaugccgagcugcugguccuccuggaaaacgagcggacccuugacuaucaugauagcaaugugaaaaaccuguacgagaagguccgcucucagcucaaaaacaaugcuaaggaaauugggaacggauguuuugaguucuaucacaagugcgacaauaccuguauggaauccgugaaaaacggcacauacgauuauccuaaguacagcgaggaagccaaacugaauagagaggagaucgacgggguuaaacuugaaucuacccggaucuaucaaauucuggcgguguacuccacagucgcuagcucccucgugcugguugugucucugggcgccaucagcuuuuggaugugcuccaacggaucucuccagugccgcauuuguaucuga

SEQ ID NO: 197414 - RNA, 1701 nt, Artificial Sequence
  derived and/or modified CDS sequence (opt5) from hemagglutinin__InfluenzaA__ADK90201
augaaggccauccuggugguccuccuguacaccuucgcuacagccaacgcggacacgcuuugcauuggcuaucacgcuaauaacagcaccgauacaguugacaccgugcuggagaagaaugugacagucacccauuccgugaaccuccuggaagauaagcacaaugggaaacuuuguaagcugagaggaguugcuccccuccaucugggcaaaugcaacaucgccggguggauucugggaaauccugagugugaaucucucagcacagccuccucuuggagcuacaucguggagaccuccucuagcgacaacggcacgugcuauccgggggauuuuauugacuacgaagaacugcgggagcagcuuuccagcgucucuuccuucgaacgcuuugagaucuuccccaagaccagcucuuggccuaaucacgauuccaacaagggagugacagccgcuuguccccaugccggcgcgaaaucuuuuuauaagaaucugaucuggcucguuaaaaagggcaacagcuacccuaaacuguccaagagcuauauuaaugacaaggggaaagaagugcuuguccuguggggaauccaccaccccuccaccucugccgaucaacagagccucuaccagaacgcugacgccuacguguucgugggcacauccagauauagcaagaaauuuaagccugagauugcuguccggccgaaaguucgcgaucaggaggggagaaugaauuacuauuggacccugguggaacccggagacaagaucacguucgaggccacaggcaaccugguggucccucgguacgcguuugccauggaacgcaacgcugggucuggaauuaucauuuccgauacccccgugcaugacugcaauacaaccugucaaaccccuaaaggcgccaucaacacaagccuccccuuccagaauauccacccgauuacgaucggcaagugcccuaaguauguuaaaucuaccaagcugagacuugcuacagggcugcggaacgugcccagcauucagucccgcggacucuuuggcgccaucgccggguucauugagggaggcuggaccgggauggucgacggaugguacggcuaucaucaccagaaugaacaaggcucuggguacgcugcggaucugaaaagcacacagaacgccaucgacgagaucaccaauaaggugaacuccguuauugagaaaaugaauacgcaguuuacagcugugggaaaggaguucaaccaccuugagaagagaaucgaaaaucugaacaaaaaggucgaugacggcuuccucgauauuuggaccuacaaugccgagcugcuggugcuccuggaaaacgagcggacccuugacuaucaugauagcaaugucaaaaaccuguacgagaaggugcgcucucagcucaaaaacaaugccaaggaaaucgggaacggauguuuugaguucuaucacaagugcgacaauacauguauggaauccguuaaaaacggcaccuacgauuauccuaaguacagcgaggaagcuaaacugaauagagaggagauugacggggugaaacuugaaucuacacggaucuaucaaauccuggccauuuacuccacggucgcgagcucccucgugcugguugugucucugggcgcuaucagcuuuuggaugugcuccaacggaucucuccagugccgcauuuguaucuga

SEQ ID NO: 197415 - RNA, 1701 nt, Artificial Sequence
  derived and/or modified CDS sequence (opt5) from hemagglutinin__InfluenzaA__ADK90202
augaaggccauccuggugguccuccuguacaccuucgcuacagccaacgcggacacgcuuugcauuggcuaucacgcuaauaacagcaccgauacaguugacaccgugcuggagaaaaaugugacagucacccauuccgugaaccuccuggaagauaagcacaaugggaaacuuuguaagcugagaggaguugcuccccuccaucugggcaaaugcaacaucgccggguggauucugggaaauccugagugugaaccgcucucuacagccagcuccuggucuuacaucguggagaccagcuccucugacaacggcacgugcuaucccggggauuuuauugacuacgaggaacugcgggagcagcuuagcuccgucagcucuuucgaacgccuggagaucuuuccuaagaccuccagcuggcccaaucacgauucuaacaagggagugacagccgcuuguccucaugccggcgcgaaauccuucuauaagaaucucaucuggcugguuaaaaagggcaacagcuaccccaaacuuucuaaguccuauauuaaugacaaggggaaagaagugcugguccucuggggaauccaccacccuagcaccuccgccgaucaacagucucuguaccagaacgcugacgccuacguguuugugggcacaagcagauauuccaagaaauucaagccggagauugcuauccggcccaaaguccgcgaucaggaggggagaaugaauuacuauuggacccugguugaaccuggagacaagauuacguuugaggccacaggcaaccucguggugccccgguacgcguucgccauggaacgcaacgcugggagcggaaucauuaucucugauaccccuguccaugacugcaauacaaccugucaaacccccaacggcgccaucaauacaucccugccguuucagaacauucacccuaucacgauuggcaaaugccccaaguauguuaagagcaccaaacuuagacuggcuacagggcuccggaaugugccuucuauccagagccgcggacuguucggcgccauugccggguuuaucgagggaggcuggaccgggaugguggacggaugguacggcuaucaucaccagaacgaacaaggcuccggguacgcugcggaucuuaagucuacacagaaugccaucgacgagauuaccaacaaagucaauagcgugaucgagaagaugaacacgcaguucacagcuguuggaaaagaauuuaaucaccuggagaagagaauugaaaaccucaauaagaaaguggaugacggcuuccuggauaucuggaccuacaacgccgagcugcucguccugcuugaaaaugagcggacccuggacuaucaugauuccaacgugaagaaccucuacgagaaaguccgcagccagcugaagaauaacgccaaagaaauugggaauggauguuucgaguuuuaucacaagugcgacaacacauguauggaaucugugaagaauggcaccuacgauuaucccaaauacuccgaggaagcuaaacuuaacagagaggagaucgacgggguuaagcuggaaagcacacggaucuaucaaauucucgccaucuacucuacgguggcguccagccugguccuggugguuucccucggcgcuauuucuuucuggaugugcagcaauggaucccugcagugccgcaucuguauuuga

SEQ ID NO: 197416 - RNA, 1701 nt, Artificial Sequence; identical to SEQ ID NO: 194921
  derived and/or modified CDS sequence (opt5) from hemagglutinin__InfluenzaA__ADK90203

SEQ ID NO: 197417 - RNA, 1701 nt, Artificial Sequence; identical to SEQ ID NO: 195842
  derived and/or modified CDS sequence (opt5) from hemagglutinin__InfluenzaA__ADK90204

SEQ ID NO: 197418 - RNA, 1701 nt, Artificial Sequence
  derived and/or modified CDS sequence (opt5) from hemagglutinin__InfluenzaA__ADK94191
augaagaccaucauugcccugagcuacauccucugccugguguucgcucagaaacuucccggcaacgacaauuccacagccacgcugugucucgggcaccaugcggucccuaacggaaccguugugaagacaauuaccaaugaucaaaucgaggugacaaacgcuaccgaacugguccagucuagcuccacaggcgagauuugcgacucuccgcaccagauccuugaugggaaaaauuguacccugaucgacgcccuccugggagauccccagugcgacggcuuucaaaacaagaaaugggaucuguucguggaaagaagcaaggccuauuccaauuguuacccuuaugacguucccgauuacgcuucucuccggagccugguggccuccagcgggacgcuugaguuuaacaaugaaucuuucaacuggaccggagucacacagaauggcaccuccagcgcuugcauucgcagaucuaagaacuccuuuuucagccggcugaauuggcucacacaucugaacuuuaaauauccugcccuuaaugugaccaugcccaacaacgagcaguucgacaagcuguacaucuggggcguucaccauccugggacggauaaagaccagauuuuucucuaugcgcaagccucuggacgcaucacaguguccaccaagagaagccagcagacagucauuccgaauaucggcucccggccccgcgugagaaacauuccuucucgggugagcaucuacuggaccaucgucaaacccggggauauucugcugaucaauuccaccggaaaccucauugcuccucgcggcuacuucaagaucagaagcgggaagucuuccauuaugcggagcgacgcccccaucggaaaauguaauucugagugcaucacaccgaacggcagcauuccuaaugacaagcccuuucagaacguuaaucgcaucacguauggcgcuuguccuagauacgugaaacaaaacacccugaaacuugccacagggaugcggaaugugcccgaaaaacagacccgcggaauuuucggcgcgaucgccggguuuauugagaacggaugggaaggcauggucgaugggugguauggauucagacaccaaaauuccgagggccggggccaggcugccgaccugaagucuacacaggcugccaucgaucagaucaacgggaaacucaauagacugauuggaaagaccaacgagaaguuccaccagaucgaaaaagaguuuagcgaaguggagggccgcauucaagaccuugaaaaguacguugaggauacgaaaaucgaccugugguccuauaacgccgagcuccugguggcucuggaaaaucagcauacaauugaucucaccgacagcgagaugaacaagcuguucgaaaagaccaagaagcagcuucgggagaaugcggaagauauggggaacggaugcuuuaaaaucuaccacaagugugacaaugccugcauuggcucuaucagaaacgggacauaugaucaugacgucuaccgcgacgaggcucugaauaaccgguuccagaucaaaggcguggagcucaaguccggauacaaagauuggauucuguggaucagcuuugccauuucuugcuuccuucuguguguugcccuccugggcuuuaucaugugggcuugccaaaaggggaauauuagauguaacaucugcaucuga

SEQ ID NO: 197419 - RNA, 1701 nt, Artificial Sequence
  derived and/or modified CDS sequence (opt5) from hemagglutinin__InfluenzaA__ADK94202
augaagaccaucauugcccugagcuacauccucugccugguguucgcucagaaacuucccggcaacgacaauuccacagccacgcugugucucgggcaccaugcggucccuaacggaaccauuguuaagacaaucaccaaugaucaaauugaggugacaaacgcuaccgaacuggugcagucuagcuccacaggcgagaucugcgacucuccgcaccagauccuugauggggaaaauuguacccugauugacgcccuccugggagauccccagugcgacggcuuucaaaacaaaaagugggaucuguucgucgagagaagcaaagccuauuccaauuguuacccuuaugacgugcccgauuacgcuucucuccggagccugaucgccuccagcgggacgcuugaauuuaacaaugagucuuucaacuggaccggaguuacacagaauggcaccuccagcgcuugcauucgcagaucuaacaauuccuuuuucagccggcugaacuggcucacacaucugaaguuuaaguauccugcccuuaaugugaccaugcccaacaacgagcaguucgacaaacuguacaucuggggcguccaccauccugggacggauaaugaccagauuuuucucuaugcgcaagccucuggacgcaucacaguguccaccaagagaagccagcagacaguuauuccgaacaucggcucccggccccgcgugagaaauaucccuucucggauuagcaucuacuggaccauugucaaacccggggauauccugcugauuaacuccaccggaaaucucaucgcuccucgcggcuacuucaagaucagaagcgggaaaucuuccauuaugcggagcgacgcccccaucggaaaguguaacucugaaugcauuacaccgaauggcagcaucccuaacgacaagcccuuucagaaugugaaccgcauuacguauggcgcuuguccuagauacgugaaacaaaauacccugaaacuugccacagggaugcggaacguccccgagaagcagacccgcggaaucuucggcgcgaucgccggguuuauugaaaauggaugggagggcaugguugaugggugguauggauucagacaccagaacuccgagggccggggccaagcugccgaccugaagucuacacaggcugccaucgaucagauuaaugggaaacucaacagacugaucggaaagaccaacgaaaaauuccaccagauugagaaggaauuuagcgagguggaaggccgcauccaagaccuugagaaguacguggaggauacgaaaauugaccugugguccuauaaugccgaacuccuggucgcucuggagaaccagcauacaaucgaucucaccgacagcgaaaugaauaagcuguucgagaaaaccaagaaacagcuucgggaaaacgcggaggauauggggaauggaugcuuuaagaucuaccacaagugugacaacgccugcauuggcucuaucagaaaugggacauaugaucaugacguguaccgcgacgaggcucugaacaaucgguuccagauuaaaggcguugaacucaaguccggauacaaagauuggauccuguggauuagcuuugccaucucuugcuuccuucuguguguggcccuccugggcuuuaucaugugggcuugccaaaaggggaacauuagauguaauaucugcauuuga

SEQ ID NO: 197420 - RNA, 1701 nt, Artificial Sequence; identical to SEQ ID NO: 194506
  derived and/or modified CDS sequence (opt5) from hemagglutinin__InfluenzaA__ADK94213

SEQ ID NO: 197421 - RNA, 1701 nt, Artificial Sequence; identical to SEQ ID NO: 195685
  derived and/or modified CDS sequence (opt5) from hemagglutinin__InfluenzaA__ADK94224

SEQ ID NO: 197422 - RNA, 1701 nt, Artificial Sequence
  derived and/or modified CDS sequence (opt5) from hemagglutinin__InfluenzaA__ADK94257
auggagaccaucauugcccugagcuacauccucugccugguguucgcucagaaacuucccggcaacgacaauuccacagccacgcugugucucgggcaccaugcggucccuaacggaaccauuguuaagacaaucaccaaugaucaaauugaagugacaaacgcuaccgagcuggugcagucuagcuccacaggcgaaaucugcgacucuccgcaccagauccuugaugggaagaauuguacccugauugacgcccuccugggagauccccagugcgacggcuuucaaaacaaaaagugggaucuguucgucgagagaagcaaagccuauuccaauuguuacccuuaugacgugcccgauuacgcuucucuccggagccugguugccuccagcgggacgcuugaauuuaacaaugagucuuucaacuggaccggagugacacagaauggcaccuccagcgcuugcauccgcagaucuaagaacuccuuuuucagccggcugaauuggcucacacaucugaacuuuaaguauccugcccuuaaugucaccaugcccaacaacgagcaguucgacaaacuguacauuuggggcgugcaccauccugggacggauaaggaccagaucuuucucuaugcgcaagccucuggacgcauuacaguuuccaccaaaagaagccagcagacagugaucccgaauauuggcucccggccccgcgucagaaacaucccuucucggaucagcauuuacuggaccaucgugaagcccggggauauucugcugaucaauuccaccggaaaccucauugcuccucgcggcuacuucaaaaucagaagcgggaagucuuccaucaugcggagcgacgcccccauuggaaaguguaauucugaaugcaucacaccgaacggcagcauuccuaaugacaaacccuuucagaacgugaaucgcaucacguauggcgcuuguccuagauacgucaagcaauccacccugaaacuugccacagggaugcggaacguucccgagaagcagacccgcggaauuuucggcgcgaucgccggguuuaucgaaaauggaugggagggcaugguggaugggugguauggauucagacaccagaacucugagggccggggccaagcugccgaccugaaaagcacacaggcugccauugaucagaucaaugggaagcucaacagacugauuggaaaaaccaaugaaaaguuccaccagaucgagaaggaauuuuccgagguggaaggccgcauucaagaccuugagaaauacgucgaggauacgaagaucgaccuguggagcuauaacgccgaacuccugguggcucuggagaaccagcauacaauugaucucaccgacucugaaaugaauaaacuguucgagaagaccaaaaagcagcuucgggaaaacgcggaggauauggggaauggaugcuuuaagaucuaccacaaaugugacaacgccugcaucggcuccauuagaaaugggacauaugaucaugacguuuaccgcgacgaggcucugaacaaucgguuccagaucaagggcguggaacucaaaagcggauacaaggauuggauucuguggaucucuuuugccauuuccugcuuccuucugugugucgcccuccugggcuuuaucaugugggcuugccaaaaagggaacaucagauguaauauuugcaucuga

SEQ ID NO: 197423 - RNA, 1701 nt, Artificial Sequence
  derived and/or modified CDS sequence (opt5) from hemagglutinin__InfluenzaA__ADK94268
augaagaccaucauugcccugagcuacauccucugccugguguucgcucagaaacuucccggcaacgacaauuccacagccacgcugugucucgggcaccaugcggucccuaacggaaccauuguuaagacaaucaccaaugaucaaauugaggugacaaacgcuaccgaacuggugcagucuagcuccacaggcgagaucugcgacucuccgcaccagauccuugaugggaaaaauuguacccugauugacgcccuccugggagauccccagugcgacggcuuucaaaacaagaaaugggaucuguucgucgaaagaagcaaggccuauuccaauuguuacccuuaugacgugcccgauuacgcuucucuccggagccugguugccuccagcgggacgcuugaguuuaacaaugaaucuuucaacuggaccggagugacacagaauggcaccuccagcgcuugcauccgcagaucuaagaacuccuuuuucagccggcugaauuggcucacacaucugaacuuuaaauauccugcccuuaaugucaccaugcccaacaacgagcaguucgacaagcuguacauuuggggcgugcaccauccugggacggauaaagaccagaucuuucucuaugcgcaagccucuggacgcauuacaguuuccaccaagagaagccagcagacagugaucccgaauauuggcucccggccccgcgucagaaacaucccuucucggaucagcauuuacuggaccaucgugaaacccggggauauucugcugaucaauuccaccggaaaccucauugcuccucgcggcuacuucaagaucagaagcgggaagucuuccaucaugcggagcgacgcccccauuggaaaauguaauucugagugcaucacaccgaacggcagcauuccuaaugacaagcccuuucagaacgugaaucgcaucacguauggcgcuuguccuagauacgucaaacaauccacccugaaacuugccacagggaugcggaacguucccgaaaaacagacccgcggaauuuucggcgcgaucgccggguuuaucgagaauggaugggaaggcaugguggaugggugguauggauucagacaccagaacucugagggccggggccaagcugccgaccucaagagcacacaggcugccauugaucagaucaaugggaaacugaacagacugauuggaaagaccaaugagaaguuccaccagaucgaaaaagaguuuuccgaaguggagggccgcauucaagaccuugaaaaguacgucgaggauacgaaaaucgaccuguggagcuauaacgccgagcuccugguggcucuggaaaaccagcauacaauugaucucaccgacucugagaugaauaagcuguucgaaaagaccaagaagcagcuucgggagaacgcggaagauauggggaauggaugcuuuaaaaucuaccacaagugugacaacgccugcaucggcuccauuagaaaugggacauaugaucaugacguuuaccgcgacgaggcucugaacaaucgguuccagaucaaaggcguggagcucaagagcggauacaaagauuggauucuguggaucucuuuugccauuuccugcuuccuucugugugucgcccuccugggcuuuaucaugugggcuugccaaaaggggaacaucagauguaauauuugcaucuga

SEQ ID NO: 197424 - RNA, 1701 nt, Artificial Sequence
  derived and/or modified CDS sequence (opt5) from hemagglutinin__InfluenzaA__ADK94279
augaagaccaucauugcccugagcuacauccucugccugguguucgcucagaaacuucccggcaacgacaauuccacagccacgcugugucucgggcaccaugcggucccuaacggaaccauuguuaagacaaucaccaaugaucaaauugaggugacaaacgcuaccgaacuggugcagucuagcuccacaggcgagaucugcaauucuccgcaccagauccuugacggggaaaacuguacccugauugaugcccuccugggagacccccagugcgauggcuuucaaaauaaaaagugggaccuguucgucgagagaagcaaagccuauuccaacuguuacccuuaugaugugcccgacuacgcuucucuccggagccugguugccuccagcgggacgcuugaauuuaauaacgagucuuucaauuggaccggagugacacagaacggcaccuccagcgcuugcauccgcagaucuaauaacuccuuuuucagccggcugaauuggcucacacaucugaaguuuaaguauccugcccuuaacgucaccaugcccaacaaugagcaguucgauaaacuguacauuuggggcgugcaccauccugggacggacaacgaucagaucuuucucuaugcgcaagccucuggacgcauuacaguuuccaccaagagaagccagcagacagugaucccgaauauuggcucccggccccgcgucagaaacaucccuucucggaucagcauuuacuggaccaucgugaaacccggggacauucugcugaucaauuccaccggaaaccucauugcuccucgcggcuacuucaagaucagaagcgggaaaucuuccaucaugcggagcgaugcccccauuggaaaguguaauucugaaugcaucacaccgaacggcagcauuccuaaugacaagcccuuucagaacgugaaucgcaucacguauggcgcuuguccuagauacgucaaacaaaacacccugaaacuugccacagggaugcggaauguucccgagaagcagacccgcggaauuuucggcgcgaucgccggguuuaucgaaaacggaugggagggcaugguggacgggugguauggauucagacaccaaaauuccgagggccggggccaggcugccgaucugaagucuacacaggcugccauugaccagaucaacgggaaacucaacagacugauuggaaagaccaaugaaaaauuccaccagaucgagaaggaauuuagcgagguggaaggccgcauucaagaucuugagaaguacgucgaggacacgaaaaucgaucugugguccuauaacgccgaacuccugguggcucuggagaaucagcauacaauugaccucaccgauagcgaaaugaacaagcuguucgagaaaaccaagaaacagcuucgggaaaaugcggaggacauggggaacggaugcuuuaagaucuaccacaagugugauaaugccugcaucggcucuauuagaaacgggacauaugaccaugauguuuaccgcgacgaggcucugaauaaccgguuccagaucaaaggcguggaacucaaguccggauacaaagacuggauucuguggaucagcuuugccauuucuugcuuccuucugugugucgcccuccugggcuuuaucaugugggcuugccaaaaggggaauaucagauguaacauuugcaucuga

SEQ ID NO: 197425 - RNA, 1701 nt, Artificial Sequence; identical to SEQ ID NO: 195685
  derived and/or modified CDS sequence (opt5) from hemagglutinin__InfluenzaA__ADK94290

SEQ ID NO: 197426 - RNA, 1701 nt, Artificial Sequence; identical to SEQ ID NO: 195685
  derived and/or modified CDS sequence (opt5) from hemagglutinin__InfluenzaA__ADK94301

SEQ ID NO: 197427 - RNA, 1701 nt, Artificial Sequence
  derived and/or modified CDS sequence (opt5) from hemagglutinin__InfluenzaA__ADK94323
augaagaccaucauugcccugagcuacauccucugccugguguucgcucagaaacuucccggcaacgacaauuccacagccacgcugugucucgggcaccaugcggucccuaacggaaccauuguuaagacaaucaccaaugaucaaauugaggugacaaacgcuaccgaacuggugcagucuagcuccacaggcgagaucugcgacucuccgcaccagauccuugaugggaaaaauuguacccugauugacgcccuccugggagauccccagugcgacggcuuucaaaacaagaaaugggaucuguucgucgaaagaagcaaggccuauuccaauuguuacccuuaugacgugcccgauuacgcuucucuccggagccugguugccuccagcgggacgcuugaguuuaacaaugaaucuuucaacuggaccggagugacacagaauggcaccuccagcgcuugcauccgcagaucuaagaacuccuuuuucagccggcugaauuggcucacacaucugaacuuuaaauauccugcccuuaaugucaccaugcccaacaacgagcaguucgacaagcuguacauuuggggcgugcaccauccugggacggauaaagaccagaucuuucucuaugcgcaagccucuggacgcauuacaguuuccaccaagagaagccagcagacagugaucccgaauauuggcucccggccccgcaucagaaacaucccuucucggauuagcaucuacuggaccauugucaaacccggggauauccugcugauuaauuccaccggaaaccucaucgcuccucgcggcuacuucaagaucagaagcgggaagucuuccauuaugcggagcgacgcccccaucggaaaauguaauucugagugcauuacaccgaacggcagcaucccuaaugacaagcccuuucagaacgugaaucgcauuacguauggcgcuuguccuagauacgugaaacaaaacacccugaaacuugccacagggaugcggaauguccccgaaaaacagacccgcggaaucuucggcgcgaucgccggguuuauugagaacggaugggaaggcaugguugaugggugguauggauucagacaccaaaauuccgagggccggggccaggcugccgaccugaagucuacacaggcugccaucgaucagauuaacgggaaacucaauagacugaucggaaagaccaacgagaaguuccaccagauugaaaaagaguuuagcgaaguggagggccgcauccaagaccuugaaaaguacguggaggauacgaaaauugaccugugguccuauaacgccgagcuccuggucgcucuggaaaaucagcauacaaucgaucucaccgacagcgagaugaacaagcuguucgaaaagaccaagaagcagcuucgggagaaugcggaagauauggggaacggaugcuuuaaaaucuaccacaagugugacaaugccugcauuggcucuaucagaaacgggacauaugaucaugacguguaccgcgacgaggcucugaauaaccgguuccagauuaaaggcguugagcucaaguccggauacaaagauuggauccuguggauuagcuuugccaucucuugcuuccuucuguguguggcccuccugggcuuuaucaugugggcuugccaaaaggggaauauuagauguaacaucugcauuuga

SEQ ID NO: 197428 - RNA, 1701 nt, Artificial Sequence; identical to SEQ ID NO: 197418
  derived and/or modified CDS sequence (opt5) from hemagglutinin__InfluenzaA__ADK94441

SEQ ID NO: 197429 - RNA, 1701 nt, Artificial Sequence
  derived and/or modified CDS sequence (opt5) from hemagglutinin__InfluenzaA__ADK94476
augaagaccaucauugcccugagcuacauccucugccugguguucgcucagaaacuucccggcaacgacaauuccacagccacgcugugucucgggcaccaugcggucccuaacggaaccauuguuaagacaaucaccaaugaucaaauugaggugacaaacgcuaccgaacuggugcagucuagcuccacaggcgagaucugcgacucuccgcaccagauccuugaugggaaaaauuguacccugauugacgcccuccugggagauccccagugcgacggcuuucaaaacaagaaaugggaucuguucgucgaaagaagcaaggcccauuccaauuguuauccuuacgacgugcccgauuaugcuucucuccggagccugguugccuccagcgggacgcuugaguuuaacaaugaaucuuucaacuggaccggagugacacagaauggcaccuccagcgcuugcauccgcagaucuaagaacuccuuuuucagccggcugaauuggcucacacaccugaacuuuaaauacccugcccuuaaugucaccaugcccaacaacgagcaguucgacaagcuguauauuuggggcgcgcaucacccugggacggauaaagaccagaucuuucucuacgcccaggcuucuggacgcauuacaguguccaccaagagaagccagcagacaguuaucccgaauauuggcucccggccccgcgugagaaacaucccuucucggaucagcauuuauuggaccaucgucaaacccggggauauucugcugaucaauuccaccggaaaccucauugccccucgcggcuacuucaagaucagaagcgggaagucuuccaucaugcggagcgacgcucccauuggaaaauguaauucugagugcaucacaccgaacggcagcauuccuaaugacaagcccuuucagaacgugaaucgcaucacguacggcgccuguccuagauaugugaaacaaaacacccugaaacuugcgacagggaugcggaauguccccgaaaaacagacccgcggaauuuucggcgccaucgcuggguuuaucgagaacggaugggaaggcaugguugaugggugguacggauucagacaccaaaauuccgagggccggggccaagccgcugaccugaagucuacacaggccgccauugaucagaucaacgggaaacucaauagacugauuggaaagaccaacgagaaguuccaucagaucgaaaaagaguuuagcgaaguggagggccgcauucaagaccuugaaaaguauguggaggauacgaaaaucgaccugugguccuacaacgcugagcuccuggucgcgcuggaaaaucagcacacaauugaucucaccgacagcgagaugaacaagcuguucgaaaagaccaagaagcagcuucgggagaaugccgaagauauggggaacggaugcuuuaaaaucuaucauaagugugacaaugcuugcaucggcucuauuagaaacgggacauacgaucacgacguguaucgcgacgaggcccugaauaaccgguuccagaucaaaggcguugagcucaaguccggauacaaagauuggauucuguggaucagcuuugccauuucuugcuuccuucuguguguggcucuccugggcuuuaucaugugggccugccaaaaggggaauaucagauguaacauuugcaucuga

SEQ ID NO: 197430 - RNA, 1701 nt, Artificial Sequence; identical to SEQ ID NO: 195685
  derived and/or modified CDS sequence (opt5) from hemagglutinin__InfluenzaA__ADK94487

SEQ ID NO: 197431 - RNA, 1701 nt, Artificial Sequence
  derived and/or modified CDS sequence (opt5) from hemagglutinin__InfluenzaA__ADK94498
augaagaccaucauugcccugagcuacauccucugccugguguucgcucagaaacuucccggcaacgacaauuccacagccacgcugugucucgggcaccaugcggucccuaacggaaccguugugaagacaauuaccaaugaucaaaucgaggugacaaacgcuaccgaacugguccagucuagcuccacaggcgagauuugcgacucuccgcaccagauccuugaugggaaaaauuguacccugaucgacgcccuccugggagauccccagugcgacggcuuucaaaacaagaaaugggaucuguucguggaaagaagcaaggccuauuccaauuguuacccuuaugacguucccgauuacgcuucucuccggagccugguggccuccagcgggacgcuugaguuuaacaaugaaucuuucaacuggaccggagucacacagaauggcaccuccagcgcuugcauucgcagaucuaagaacuccuuuuucagccggcugaauuggcucacacaucugaacuuuaaauauccugcccuuaaugugaccaugcccaacaacgagcaguucgacaagcuguacaucuggggcguucaccauccugggacggauaaagaccagauuuuucucuaugcgcaagccucuggacgcaucacaguguccaccaagagaagccagcagacagucauuccgaauaucggcucccggccccgcgugagaaacauuccuucucggaucagcaucuacuggaccauugugaaacccggggauauccugcugauuaauuccaccggaaaccucaucgcuccucgcggcuacuucaagauuagaagcgggaagucuuccaucaugcggagcgacgcccccaucggaaaauguaauucugagugcauuacaccgaacggcagcaucccuaaugacaagcccuuucagaacgucaaucgcauuacguauggcgcuuguccuagauacguuaaacaaaacacccugaaacuugccacagggaugcggaaugugcccgaaaaacagacccgcggaaucuucggcgcgauugccggguuuaucgagaacggaugggaaggcaugguggaugggugguauggauucagacaccaaaauuccgagggccggggccaggcugccgaccugaagucuacacaggcugccaucgaucagauuaacgggaaacucaauagacugaucggaaagaccaacgagaaguuccaccagauugaaaaagaguuuagcgaagucgagggccgcauccaagaccuugaaaaguacguggaggauacgaaaauugaccugugguccuauaacgccgagcuccugguugcucuggaaaaucagcauacaaucgaucucaccgacagcgagaugaacaagcuguucgaaaagaccaagaagcagcuucgggagaaugcggaagauauggggaacggaugcuuuaaaauuuaccacaagugugacaaugccugcaucggcucuaucagaaacgggacauauaaucaugauguguaccgcgacgaggcucugaacaaucgguuccagauuaaaggcgucgagcucaaguccggauacaaagacuggauccuguggauuagcuuugccaucucuugcuuccuucuguguguggcccuccugggcuuuauuaugugggcuugccaaaaggggaacaucagauguaauaucugcauuuga

SEQ ID NO: 197432 - RNA, 1701 nt, Artificial Sequence
  derived and/or modified CDS sequence (opt5) from hemagglutinin__InfluenzaA__ADK94509
augaagaccaucauugcccugagcuacauccucugccugguguucgcucagaaacuucccggcaacgacaauuccacagccacgcugugucucgggcaccaugcggucccuaacggaaccauuguuaagacaaucaccaaugaucaaauugaggugacaaacgcuaccgaacuggugcagucuagcuccacaggcgagaucugcgacucuccgcaccagauccuugaugggaaaaauuguacccugauugacgcccuccugggagauccccagugcgacggcuuucaaaacaagaaaugggaucuguucgucgaaagaagcaaggccuauuccaauuguuacccuuaugacgugcccgauuacgcuucucuccggagccugguugccuccagcgggacgcuugaguuuaacaaugaaucuuucaacuggaccggagugacacagaauggcaccuccagcgcuugcauccgcagaucuaagaacuccuuuuucagccggcugaauuggcucacacaucugaacuuuaaauauccugcccuuaaugucaccaugcccaacaacgagcaguucgacaagcuguacauuuggggcgugcaccauccugggacggauaaagaccagaucuuucucuaugcgcaagccucuggacgcauuacaguuuccaccaagagaagccagcagacagcuaucccgaauauuggcucccggccccgcgugagaaacaucccuucucggaucagcauuuacuggaccaucgucaaacccggggauauucugcugaucaauuccaccggaaaccucauugccccucgcggcuacuucaagaucagaagcgggaagucuuccaucaugcggagcgacgcucccauuggaaaauguaauucugagugcaucacaccgaacggcagcauuccuaaugacaagcccuuucagaacgugaaucgcaucacguauggcgccuguccuagauacauuaaacaaaacacccugaaacuugcgacagggaugcggaaugugcccgaaaaacagacccgcggaaucuucggcgccaucgcuggguuuauugagaacggaugggaaggcauggucgaugggugguauggauucagacaccaaaauuccgagggccggggccaggccgcugaccugaagucuacacaggccgccaucgaucagauuaacgggaaacucaauagacugaucggaaagaccaacgagaaguuccaccagauugaaaaagaguuuagcgaaguugagggccgcauccaagaccuugaaaaguacguggaggauacgaaaauugaccugugguccuauaacgcugagcuccugguggcgcuggaaaaucagcauacaaucgaucucaccgacagcgagaugaacaagcuguucgaaaagaccaagaagcagcuucgggagaaugccgaagauauggggaacggaugcuuuaaaaucuaccacaagugugacaaugcuugcauuggcucuaucagaaacgggacauaugaucaugacgucuaccgcgacgaggcccugaauaaccgguuccagauuaaaggcguggagcucaaguccggauacaaagauuggauccuguggauuagcuuugccaucucuugcuuccuucuguguguugcucuccugggcuuuaucaugugggccugccaaaaggggaauauuagauguaacaucugcauuuga

SEQ ID NO: 197433 - RNA, 1701 nt, Artificial Sequence
  derived and/or modified CDS sequence (opt5) from hemagglutinin__InfluenzaA__ADK94520
augaagaccaucauugcccugagcuacauccucugccugguguucgcucagaaacuucccggcaacgacaauuccacagccacgcugugucucgggcaccaugcggucccuaacggaaccauuguuaagacaaucaccaaugaucaaauugaggugacaaacgcuaccgaacuggugcagucuagcuccacaggcgagaucugcgacucuccgcaccagauccuugauggggaaaauuguacccugauugacgcccuccugggagauccccagugcgacggcuuucaaaacaaaaagugggaucuguucgucgagagaagcaaagccuauuccaauuguuacccuuaugacgugcccgauuacgcuucucuccggagccugaucgccuccagcgggacgcuugaauuuaacaaugagucuuucaacuggaccggaguuacacagaauggcaccuccagcgcuugcauucgcagaucuaacaauuccuuuuucagccggcugaacuggcucacacaucugcgcuuuaaguauccugcccuuaaugugaccaugcccaacaacgagcaguucgacaagcuguacaucuggggcguccaccauccugggacggauaaugaccagauuuuucucuaugcgcaagccucuggaagaaucacaguguccaccaaacggagccagcagacaguuauuccgaacaucggcucccgccccagagugcggaauaucccuucucgcauuagcaucuacuggaccauugucaagcccggggauauccugcugauuaacuccaccggaaaucucaucgcuccuagaggcuacuucaaaauccggagcgggaagucuuccauuaugcgcagcgacgcccccaucggaaaauguaacucugaaugcauuacaccgaauggcagcaucccuaacgacaagcccuuucagaaugugaacagaauuacguauggcgcuuguccucgguacgugaagcaaaauacccugaaacuugccacagggaugcgcaacguccccgagaagcagaccagaggaaucuucggcgcgaucgccggguuuauugaaaauggaugggagggcaugguugaugggugguauggauuccggcaccagaacuccgagggcagaggccaagcugccgaccugaaaucuacacaggcugccaucgaucagauuaaugggaagcucaaccgccugaucggaaaaaccaacgaaaaguuccaccagauugagaaagaauuuagcgagguggaaggccggauccaagaccuugagaaguacguggaggauacgaagauugaccugugguccuauaaugccgaacuccuggucgcucuggagaaccagcauacaaucgaucucaccgacagcgaaaugaauaaacuguucgagaagaccaaaaagcagcuuagagaaaacgcggaggauauggggaauggaugcuuuaaaaucuaccacaagugugacaacgccugcauuggcucuauccgcaaugggacauaugaucaugacguguaccgggacgaggcucugaacaauagauuccagauuaagggcguugaacucaaauccggauacaaggauuggauccuguggauuagcuuugccaucucuugcuuccuucuguguguggcccuccugggcuuuaucaugugggcuugccaaaaagggaacauuaaguguaauaucugcauuuga

SEQ ID NO: 197434 - RNA, 1701 nt, Artificial Sequence; identical to SEQ ID NO: 195685
  derived and/or modified CDS sequence (opt5) from hemagglutinin__InfluenzaA__ADK94531

SEQ ID NO: 197435 - RNA, 1701 nt, Artificial Sequence; identical to SEQ ID NO: 194506
  derived and/or modified CDS sequence (opt5) from hemagglutinin__InfluenzaA__ADK94542

SEQ ID NO: 197436 - RNA, 1701 nt, Artificial Sequence
  derived and/or modified CDS sequence (opt5) from hemagglutinin__InfluenzaA__ADK94553
augaagaccaucauugcccugagcuacauccucugccugguguucgcucagaaacuucccggcaacgacaauuccacagccacgcugugucucgggcaccaugcggucccuaacggaaccauuguuaagacaaucaccaaugaucaaauugaggugacaaacgcuaccgaacuggugcagucuagcuccacaggcgagaucugcgacucuccgcaccagauccuugaugggaaaaauuguacccugauugacgcccuccugggagauccccagugcgacggcuuucaaaacaagaaaugggaucuguucgucgaaagaagcaaggccuauuccaauuguuacccuuaugacgugcccgauuacgcuucucuccggagccugguugccuccagcgggacgcuugaguuuaacaaugaaucuuucaacuggaccggagugacacagaauggcaccuccagcgcuugcauccgcagaucuaagaacuccuuuuucagccggcugaauuggcucacacaucugaacuuuaaauauccugcccuuaaugucaccaugcccaacaacgagcaguucgacaagcuguacauuuggggcgugcaccauccugggacggauaaagaccagaucuuucucuaugcgcaagccucuggacgcauuacaguuuccaccaagagaagccagcagacagugaucccgaauauuggcucccggccccgcgucagaaacaucccuucucggaucagcauuuacuggaccaucgugaaacccggggauauucugcugaucaauuccaccggaaaccucauugcuccucgcggcuacuucaagaucagaagcgggaagucuuccaucaugcggagcgacgcccccauuggaaaauguaauucugagugcaucacaccgaacggcagcauuccuaaugacaagcccuuucagaacgugaaucgcaucacguauggcgcuuguccuagauacgucaaacaauccacccugaaacuugccacagggaugcggaacguucccgaaaaacagacccgcggaauuuucggcgcgaucgccggguuuaucgagaauggaugggaaggcaugguggaugggugguauggauucagacaccagaacucugagggccggggccaagcugccgaccucaagagcacacaggcugccauugaucagaucaaugggaaacugaacagacugauuggaaagaccaaugagaaguuccaccagaucgaaaaagaguuuuccgaaguggagggccgcauucaagaccuugaaaaguacgucgaggauacgaaaaucgaccuguggagcuauaacgccgagcuccugguggcucuggaaaaccagcauacaauugaucucaccgacucugagaugaauaagcuguucgaaaagaccaagaagcagcuucgggagaacgcggaagauauggggaauggaugcuuuaaaaucuaccacaaguguaacaaugccugcaucggcuccauuagaaacgggacauaugaccaugauguuuaccgcgacgaggcucugaauaaccgguuccagaucaaaggcguggagcucaagagcggauacaaagacuggauucuguggaucucuuuugccauuuccugcuuccuucugugugucgcccuccugggcuuuaucaugugggcuugccaaaaggggaauaucagauguaacauuugcaucuga

SEQ ID NO: 197437 - RNA, 1701 nt, Artificial Sequence; identical to SEQ ID NO: 195685
  derived and/or modified CDS sequence (opt5) from hemagglutinin__InfluenzaA__ADK94564

SEQ ID NO: 197438 - RNA, 1701 nt, Artificial Sequence
  derived and/or modified CDS sequence (opt5) from hemagglutinin__InfluenzaA__ADK98501
augaaggccauccuggugguccuccuguacaccuucgcuacagccaacgcggacacgcuuugcauuggcuaucacgcuaauaacagcaccgauacaguugacaccgugcuggagaagaaugugacagucacccauuccgugaaccuccuggaagauaagcacaaugggaaacuuuguaagcugagaggaguugcuccccuccaucugggcaaaugcaacaucgccggguggauucugggaaauccugagugugaaucucucagcacagccuccucuuggagcuacaucguggagaccuccucuagcggcaacgggacgugcuauccgggagacuuuauugauuacgaagaacugcgggagcagcuuuccagcgucucuuccuucgaacgcuuugagaucuuccccaagaccagcucuuggccuaaucacgacuccaacaagggcgugacagccgcuuguccccaugccggcgcgaaaucuuuuuauaagaaucugaucuggcucguuaaaaaggggaacagcuacccuaaacuguccaagagcuauauuaaugauaagggaaaagaagugcuuguccuguggggcauccaccaccccuccaccucugccgaccaacagagccucuaccagaacgcugaugccuacguguucguggggacauccagauauagcaagaaauuuaagccugagauugcuauccggccgaaaguccgcgaccaggagggaagaaugaauuacuauuggacccugguugaacccggcgauaagauuacguucgagacaaccgggaaccugguggugccucgguacgccuuugcgauggaacgcaacgccggaucuggcaucauuaucuccgacacacccguccaugauugcaauaccaccugucaaacaccuaaaggcgcuaucaacacgagccuccccuuccagaauauucacccgaucaccauugggaagugcccuaaguaugugaaaucuacaaagcugagacuugccaccggacugcggaacguucccagcauccagucccgcggccucuuuggggcuauugccggauucaucgagggcggguggacaggaaugguggacggcugguacggcuaucaucaccagaaugaacaagggucuggauacgccgcugaccugaaaagcacccagaacgcgaucgaugagauuacgaauaaggucaacuccgugaucgagaaaaugaauacacaguuuaccgccguuggcaaggaguucaaccaccuugagaagagaauugaaaaucugaacaaaaagguggacgauggguuccucgacaucuggaccuacaaugcugagcugcugguccuccuggaaaacgagcggacacuugauuaucaugacagcaaugugaaaaaccuguacgagaagguccgcucucagcucaaaaacaaugccaaggaaauuggaaacggcuguuuugaguucuaucacaagugcgauaauaccuguauggaauccgugaaaaacgggacauacgacuauccuaaguacagcgaggaagccaaacugaauagagaggagaucgauggcguuaaacuugaaucuacgcggaucuaucaaauucuggcuaucuacuccaccguggccagcucccucguccuggugguuucucugggagcgauuagcuuuuggaugugcuccaacggcucucuccagugccgcaucuguauuuga

SEQ ID NO: 197439 - RNA, 1701 nt, Artificial Sequence
  derived and/or modified CDS sequence (opt5) from hemagglutinin__InfluenzaA__ADK98503
augaaggccauccuggugguccuccuguacaccuucgcuacagccaacgcggacacgcuuugcauuggcuaucacgcuaauaacagcaccgauacaguugacaccgugcuggagaagaaugugacagucacccauuccgugaaccuccuggaagauaagcacaaugggaaacuuuguaagcugagaggaguugcuccccuccaucugggcaaaugcaacaucgccggguggauucugggaaauccugagugugaaucucucagcacagccuccucuuggagcuacaucguggagaccuccucuagcgacaacggcacgugcuauccgggggauuuuauugacuacgaagaacugcgggagcagcuuuccagcgucucuuccuucgaacgcuuugagaucuuccccaagaccagcucuuggccuaaucacgaucccaacaagggagugacagccgcuuguccucaugccggcgcgaaauccuuuuauaagaaucugaucuggcucguuaaaaagggcaacagcuaccccaaacugucuaaguccuauauuaaugacaaggggaaagaagugcuuguccuguggggaauccaccacccuagcaccuccgccgaucaacagucucucuaccagaacguggacgcuuacguguucgucggcacaagcagauauuccaagaaauuuaagccggagauugccauccggcccaaaguucgcgaucaggaggggagaaugaauuacuauuggacccugguggaaccuggagacaagauuacguucgaggcuacaggcaaccugguggucccccgguacgccuuugcgauggaacgcaacgccgggagcggaaucauuaucucugauaccccugugcaugacugcaauacaaccugucaaacccccaaaggcgcuaucaacacaucccucccguuccagaauauucacccuaucacgauuggcaagugccccaaguauguuaaaagcaccaagcugagacuugccacagggcugcggaacgugccuucuauccagagccgcggacucuuuggcgcuauugccggguucaucgagggaggcuggaccgggauggucgacggaugguacggcuaucaucaccagaaugaacaaggcuccggguacgccgcugaucugaaaucuacacagaacgcgaucgacgagauuaccaauaaggugaacagcguuaucgagaaaaugaauacgcaguuuacagccgugggaaaggaguucaaccaccuugagaagagaauugaaaaucugaacaaaaaggucgaugacggcuuccucgauaucuggaccuacaaugcugagcugcuggugcuccuggaaaacgagcggacccuugacuaucaugauuccaaugucaaaaaccuguacgagaaggugcgcagccagcucaaaaacaaugccaaggaaauugggaacggauguuuugaguucuaucacaagugcgacaauacauguauggaaucuguuaaaaacggcaccuacgauuaucccaaguacuccgaggaagccaaacugaauagagaggagaucgacggggugaaacuugaaagcacacggaucuaucaaauucuggcuaucuacucuacggucgccuccagccucgugcugguugugucccugggcgcgauuucuuuuuggaugugcagcaacggaucccuccagugccgcaucuguauuuga

SEQ ID NO: 197440 - RNA, 1701 nt, Artificial Sequence; identical to SEQ ID NO: 197423
  derived and/or modified CDS sequence (opt5) from hemagglutinin__InfluenzaA__ADK98623

SEQ ID NO: 197441 - RNA, 1701 nt, Artificial Sequence; identical to SEQ ID NO: 194506
  derived and/or modified CDS sequence (opt5) from hemagglutinin__InfluenzaA__ADK98634

SEQ ID NO: 197442 - RNA, 1701 nt, Artificial Sequence; identical to SEQ ID NO: 194506
  derived and/or modified CDS sequence (opt5) from hemagglutinin__InfluenzaA__ADK98645

SEQ ID NO: 197443 - RNA, 1701 nt, Artificial Sequence; identical to SEQ ID NO: 197369
  derived and/or modified CDS sequence (opt5) from hemagglutinin__InfluenzaA__ADK98656

SEQ ID NO: 197444 - RNA, 1701 nt, Artificial Sequence; identical to SEQ ID NO: 197436
  derived and/or modified CDS sequence (opt5) from hemagglutinin__InfluenzaA__ADK98667

SEQ ID NO: 197445 - RNA, 1701 nt, Artificial Sequence
  derived and/or modified CDS sequence (opt5) from hemagglutinin__InfluenzaA__ADK98678
augaagaccaucauugcccugagcuacauccucugccugguguucgcucagaaacuucccggcaacgacaauuccacagccacgcugugucucgggcaccaugcggucccuaacggaaccauuguuaagacaaucaccaaugaucaaauugaggugacaaacgcuaccgaacuggugcagucuagcuccacaggcgagaucugcgacucuccgcaccagauccuugauggggaaaauuguacccugauugacgcccuccugggagauccccagugcgacggcuuucaaaacaaaaagugggaucuguucgucgagagaagcaaagccuauuccaauuguuacccuuaugacgugcccgauuacgcuucucuccggagccugguugccuccagcgggacgcuugaauuuaacaaugagucuuucaacuggaccggagugacacagaauggcaccuccagcgcuugcauccgcagaucuaacaauuccuuuuucagccggcugaacuggcucacacaucugaaguuuaaguauccugcccuuaaugucaccaugcccaacaacgagcaguucgacaaacuguacauuuggggcgugcaccauccugggacggauaaugaccagaucuuucucuaugcgcaagccucuggacgcauuacaguuuccaccaagagaagccagcagacagugaucccgaacauuggcucccggccccgcgucagaaauaucccuucucggaucagcauuuacuggaccaucgugaaacccggggauauucugcugaucaacuccaccggaaaucucauugcuccucgcggcuacuucaagaucagaagcgggaaaucuuccaucaugcggagcgacgcccccauuggaaaguguaacucugaaugcaucacacagaauggcagcauuccgaacgacaagccuuuucaaaaugugaaccgcaucacguauggcgcuugucccagauacgucaaacagaauacccugaaacuugccacagggaugcggaacguuccugagaagcagacccgcggaauuuucggcgcgaucgccggguuuaucgaaaauggaugggagggcaugguggaugggugguauggauucagacaccaaaacuccgagggccggggccaggcugccgaccugaagucuacacaggcugccauugaucagaucaaugggaaacucaacagacugauuggaaagaccaacgaaaaauuccaccaaaucgagaaggaauuuagcgagguggaaggccgcauucaggaccuugagaaguacgucgaggauacgaaaaucgaccugugguccuauaaugccgaacuccugguggcucuggagaaccagcauacaauugaucucaccgacagcgaaaugaauaagcuguucgagaaaaccaagaaacagcuucgggaaaacgcggaggauauggggaauggaugcuuuaagaucuaccacaagugugacaacgccugcaucggcucuauuagaaaugggacauaugaucaugacguuuaccgcgacgaggcucugaacaaucgguuccaaaucaaaggcguggaacucaaguccggauacaaagauuggauucuguggaucagcuuugccauuucuugcuuccuucugugugucgcccuccugggcuuuaucaugugggcuugccagaaggggaacaucagauguaauauuugcaucuga

SEQ ID NO: 197446 - RNA, 1701 nt, Artificial Sequence; identical to SEQ ID NO: 194506
  derived and/or modified CDS sequence (opt5) from hemagglutinin__InfluenzaA__ADK98689

SEQ ID NO: 197447 - RNA, 1701 nt, Artificial Sequence; identical to SEQ ID NO: 194506
  derived and/or modified CDS sequence (opt5) from hemagglutinin__InfluenzaA__ADK98700

SEQ ID NO: 197448 - RNA, 1701 nt, Artificial Sequence; identical to SEQ ID NO: 194506
  derived and/or modified CDS sequence (opt5) from hemagglutinin__InfluenzaA__ADK98711

SEQ ID NO: 197449 - RNA, 1701 nt, Artificial Sequence
  derived and/or modified CDS sequence (opt5) from hemagglutinin__InfluenzaA__ADK98722
augaagaccaucauugcccugagcuacauccucugccugguguucgcucagaaacuucccggcaacgacaauuccacagccacgcugugucucgggcaccaugcggucccuaacggaaccauuguuaagacaaucaccaaugaucaaauugaggugacaaacgcuaccgaacuggugcagucuagcuccacaggcgagaucugcgacucuccgcaccagauccuugauggggaaaauuguacccugauugacgcccuccugggagauccccagugcgacggcuuucaaaacaaaaagugggaucuguucgucgagagaagcaaagccuauuccaauuguuacccuuaugacgugcccgauuacgcuucucuccggagccugguugccuccagcgggacgcuugaauuuaacaaugagucuuucaacuggaccggagugacacagaauggcaccuccagcgcuugcauccgcagaucuaacaauuccuuuuucagccggcugaacuggcucacacaucugaaguuuaaguauccugcccuuaaugucaccaugcccaacaacgagcaguucgacaaacuguacauuuggggcgugcaccauccugggacggauaaugaccagaucuuucucuaugcgcaagccucuggacgcauuacaguuuccaccaagggcagccagcagacagugaucccgaacauuggguccagaccccggguccgcaauaucccuucuagaaucagcauuuacuggaccaucgugaaacccggagauauucugcugaucaacuccaccggcaaucucauugcuccucggggguacuucaagauccgcagcggaaaaucuuccaucaugagaagcgacgcccccauuggcaaguguaacucugaaugcaucacaccgaauggcagcauuccuaacgacaagcccuuucagaaugugaaccggaucacguauggggcuuguccucgcuacgucaaacaaaauacccugaaacuugccacaggaaugagaaacguucccgagaagcagacccggggcauuuucggggcgaucgccggauuuaucgaaaauggcugggaggggaugguggauggaugguauggcuuccgccaccagaacuccgagggcagagggcaagcugccgaccugaagucuacacaggcugccauugaucagaucaauggaaaacucaaccggcugauuggcaagaccaacgaaaaauuccaccagaucgagaaggaauuuagcgagguggaagggcgcauucaagaccuugagaaguacgucgaggauacgaaaaucgaccugugguccuauaaugccgaacuccugguggcucuggagaaccagcauacaauugaucucaccgacagcgaaaugaauaagcuguucgagaaaaccaagaaacagcuuagagaaaacgcggaggauaugggaaauggcugcuuuaagaucuaccacaagugugacaacgccugcaucgggucuauucggaauggcacauaugaucaugacguuuacagagacgaggcucugaacaaucgcuuccagaucaaaggaguggaacucaaguccggcuacaaagauuggauucuguggaucagcuuugccauuucuugcuuccuucugugugucgcccuccugggguuuaucaugugggcuugccaaaagggaaacauccgguguaauauuugcaucuga

SEQ ID NO: 197450 - RNA, 1701 nt, Artificial Sequence; identical to SEQ ID NO: 197423
  derived and/or modified CDS sequence (opt5) from hemagglutinin__InfluenzaA__ADK98733

SEQ ID NO: 197451 - RNA, 1701 nt, Artificial Sequence; identical to SEQ ID NO: 194506
  derived and/or modified CDS sequence (opt5) from hemagglutinin__InfluenzaA__ADK98744

SEQ ID NO: 197452 - RNA, 1701 nt, Artificial Sequence; identical to SEQ ID NO: 194506
  derived and/or modified CDS sequence (opt5) from hemagglutinin__InfluenzaA__ADK98777

SEQ ID NO: 197453 - RNA, 1701 nt, Artificial Sequence; identical to SEQ ID NO: 194506
  derived and/or modified CDS sequence (opt5) from hemagglutinin__InfluenzaA__ADK98788

SEQ ID NO: 197454 - RNA, 1701 nt, Artificial Sequence; identical to SEQ ID NO: 195685
  derived and/or modified CDS sequence (opt5) from hemagglutinin__InfluenzaA__ADK98799

SEQ ID NO: 197455 - RNA, 1701 nt, Artificial Sequence
  derived and/or modified CDS sequence (opt5) from hemagglutinin__InfluenzaA__ADK98810
augaagaccaucauugcccugagcuacauccucugccugguguucgcucagaaacuucccggcaacgacaauuccacagccacgcugugucucgggcaccaugcggucccuaacggaaccauuguuaagacaaucaccaaugaucaaauugaggugacaaacgcuaccgaacuggugcagucuagcuccacaggcgagaucugcgacucuccgcaccagauccuugauggggaaaauuguacccugauugacgcccuccugggagauccccagugcgacggcuuucaaaacaaaaagugggaucuguucgucgagagaagcaaagccuauuccaauuguuacccuuaugacgugcccgauuacgcuucucuccggagccugguugccuccagcgggacgcuugaauuuaacaaugagucuuucaacuggaccggagugacacagaauggcaccuccagcgcuugcauccgcagaucuaacaauuccuuuuucagccggcugaacuggcucacacaucugaaguuuaaguauccugcccuuaaugucaccaugcccaacaacgagcaguucgacaaacuguacauuuggggcgugcaccauccugggacggauaaugaccagacauuucucuaugcgcaagccucuggacgcaucaccguuuccacaaagagaagccagcagaccgugauuccgaacaucggcucccggccccgcgucagaaauauuccuucucggaucagcaucuacuggaccauugugaaacccggggauauccugcugauuaacuccacaggaaaucucaucgcuccucgcggcuacuucaagauuagaagcgggaaaucuuccaucaugcggagcgacgcccccaucggaaaguguaacucugaaugcauuacgccgaauggcagcaucccuaacgacaagcccuuucagaaugugaaccgcauuaccuauggcgcuuguccuagauacgucaaacaaaauacacugaaacuugccaccgggaugcggaacguucccgagaagcagacacgcggaaucuucggcgcgauugccggguuuaucgaaaauggaugggagggcaugguggaugggugguauggauucagacaccagaacuccgagggccggggccaagcugccgaccugaagucuacccaggcugccaucgaucagauuaaugggaaacucaacagacugaucggaaagacgaacgaaaaauuccaccagauugagaaggaauuuagcgagguggaaggccgcauccaagaccuugagaaguacgucgaggauacaaaaauugaccugugguccuauaaugccgaacuccugguggcucuggagaaccagcauaccaucgaucucaccgacagcgaaaugaauaagcuguucgagaaaacaaagaaacagcuucgggaaaacgcggaggauauggggaauggaugcuuuaagauuuaccacaagugugacaacgccugcaucggcucuaucagaaaugggaccuaugaucauaacguuuaccgcgacgaggcucugaauaaccgguuccagauuaaagaaguggagcucaaguccggcuacaaagacuggauccuguggauuagcuuugccaucucuugcuuccuucugugugucgcccuccugggauuuauuaugugggcuugccaaaagggcaauaucagauguaacaucugcauuuga

SEQ ID NO: 197456 - RNA, 1701 nt, Artificial Sequence
  derived and/or modified CDS sequence (opt5) from hemagglutinin__InfluenzaA__ADK98821
augaagaccaucauugcccugagcuacauccucugccugguguucgcucagaaacuucccggcaacgacaauuccacagccacgcugugucucgggcaccaugcggucccuaacggaaccauuguuaagacaaucaccaaugaucaaauugaggugacaaacgcuaccgaacuggugcagucuagcuccacaggcgagaucugcgacucuccgcaccagauccuugaugggaaaaauuguacccugauugacgcccuccugggagauccccagugcgacggcuuucaaaacaagaaaugggaucuguucgucgaaagaagcaaggccuauuccaauuguuacccuuaugacgugcccgauuacgcuucucuccggagccugguugccuccagcgggacgcuugaguuuaacaaugaaucuuucaacuggaccggagugacacagaauggcaccuccagcgcuugcauccgcagaucuaagaacuccuuuuucagccggcugaauuggcucacacaucugaacuuuaaauauccugcccuuaaugucaccaugcccaacaacgagcaguucgacaagcuguacauuuggggcgugcaccauccugggacggauaaagaccagaucuuucucuaugcgcaagccucuggacgcauuacaguuuccaccaagagaagccagcagacagcuaucccgaauauuggcucccggccccgcgugagaaacaucccuucucggaucagcauuuacuggaccaucgucaaacccggggauauucugcugaucaauuccaccggaaaccucauugccccucgcggcuacuucaagaucagaagcgggaagucuuccaucaugcggagcgacgcucccauuggaaaauguaauucugagugcaucacaccgaacggcagcauuccuaaugacaagcccuuucagaacgugaaucgcaucacguauggcgccuguccuagauacgugaaacaaaacacccugaaacuugcgacagggaugcggaauguccccgaaaaacagacccgcggaauuuucggcgccaucgcuggguuuaucgagaacggaugggaaggcaugguugaugggugguauggauucagacaccaaaauuccgagggccggggccaggccgcugaccugaagucuacacaggccgccauugaucagaucaacgggaaacucaauagacugauuggaaagaccaacgagaaguuccaccagaucgaaaaagaguuuagcgaaguggagggccgcauucaagaccuugaaaaguacguggaggauacgaaaaucgaccugugguccuauaacgcugagcuccuggucgcgcuggaaaaucagcauacaauugaucucaccgacagcgagaugaacaagcuguucgaaaagacccggaagcagcuuagagagaaugccgaagauauggggaacggaugcuuuaagaucuaccacaaaugugacaaugcuugcaucggcucuauucgcaacgggacauaugaucaugacguguaccgggacgaggcccugaauaacagauuccagaucaagggcguugagcucaaauccggauacaaggauuggauucuguggaucagcuuugccauuucuugcuuccuucuguguguggcucuccugggcuuuaucaugugggccugccaaaaagggaauauccgcuguaacauuugcaucuga

SEQ ID NO: 197457 - RNA, 1701 nt, Artificial Sequence; identical to SEQ ID NO: 194506
  derived and/or modified CDS sequence (opt5) from hemagglutinin__InfluenzaA__ADK98832

SEQ ID NO: 197458 - RNA, 1701 nt, Artificial Sequence; identical to SEQ ID NO: 197436
  derived and/or modified CDS sequence (opt5) from hemagglutinin__InfluenzaA__ADK98843

SEQ ID NO: 197459 - RNA, 1701 nt, Artificial Sequence
  derived and/or modified CDS sequence (opt5) from hemagglutinin__InfluenzaA__ADK98854
augaagaccaucauugcccugagcuacauccucugccugguguucacacagaaacuucccggcaacgacaauuccacggcuacccugugucucgggcaccaugccgucccuaacggaacaauuguuaagaccaucacaaaugaucaaauugaggugaccaacgcgacagaacuggugcagucuagcuccaccggcgagaucugcgacucuccgcaccagauccuugauggggaaaauuguacgcugauugacgcucuccugggagauccccagugcgacggcuuucaaaacaaaaagugggaucuguucgucgagagaagcaaagccuauuccaauuguuacccuuaugacgugcccgauuacgccucucuccggagccugguugcuuccagcgggacccuugaauuuaacaaugagucuuucaacuggacaggagugacccagaauggcacauccagcgccugcauccgcagaucuaacaauuccuuuuucagccggcugaacuggcucacccaucugaaguuuaaguauccugcucuuaaugucacgaugcccaacaacgagcaguucgacaaacuguacauuuggggcgugcaccauccugggacagauaaugaccagaucuuucucuaugcccaagcgucuggacgcauuaccguuuccacaaagagaagccagcagaccgugaucccgaacauuggcucccggccccgcgucagaaauaucccuucucggaucagcauuuacuggaccaucgugaaacccggggauauucugcugaucaacuccacaggaaaucucauugccccucgcggcuacuucaagaucagaagcgggaaaucuuccaucaugcggagcgacgcucccauuggaaaguguaacucugaaugcaucacgccgaauggcagcauuccuaacgacaagcccuuucagaaugugaaccgcaucaccuauggcgccuguccuagauacgucaaacaaaauacacugaaacuugcuaccgggaugcggaacguucccgagaagcagacacgcggaauuuucggcgccaucgcgggguuuaucgaaaauggaugggagggcaugguggaugggugguauggauucagacaccagaacuccgagggccggggccaagccgcugaccugaagucuacccaggccgcuauugaucagaucaaugggaaacucaacagacugauuggaaagacgaacgaaaaauuccaccagaucgagaaggaauuuagcgagguggaaggccgcauucaagaccuugagaaguacgucgaggauacaaaaaucgaccugugguccuauaaugccgaacuccugguggcccuggagaaccagcauaccauugaucucaccgacagcgaaaugaauaagcuguucgagaaaacaaagaaacagcuucgggaaaacgcugaggauauggggaauggaugcuuuaagaucuaccacaagugugacaacgcgugcaucggcucuauuagaaaugggaccuaugaucaugacguuuaccgcgacgaggcccugaacaaucgguuccagaucaaaggcguggaacucaagcccggauacaaagauuggauucuguggaucuccuuugcuauuagcugcuuccuucugugugucgcccuccugggcuuuaucaugugggccugccaaaaggggaacaucagauguaauauuugcaucuga

SEQ ID NO: 197460 - RNA, 1701 nt, Artificial Sequence
  derived and/or modified CDS sequence (opt5) from hemagglutinin__InfluenzaA__ADK98865
augaagaccaucauugcccugagcuacauccucugccugguguucgcucagaaacuucccggcuccgacaacucuacagccacgcugugucucgggcaccaugcggucccuaauggaaccauuguuaagacaaucaccaacgaucaaauugaggugacaaaugcuaccgaacuggugcagagcuccucuacaggcgagaucugcgacagcccgcaccagauccuugauggggaaaacuguacccugauugacgcccuccugggagauccccagugcgacgauuuucaaaauaaaaagugggaccuguucgucgagagauccaaagccuauucuaacuguuacccuuaugaugugcccgacuacgcuagccuccggucccugguugccagcucuggcacgcuugaauuuaauaacgaguccuucaauuggaccggggugacacagaacggaaccagcucugcuugcauccgcagauccagcaauuccuuuuucucucggcugaacuggcucacacaucugcgcuuuaaguauccugcccuuaaugucaccaugcccaacaaugagcaguucgauaagcuguacauuuggggcgugcaccauccuggcacggacaacgaucagaucuuucucuaugcgcaagccagcgggagaauuacaguuuccaccaaacggucucagcagacagugaucccgaacauuggaagccgccccagaguccggaauaucccuucccgcaucagcauuuacuggaccaucgugaagcccggcgacauucugcugaucaacucuaccgggaaucucauugcuccuagaggauacuucaaaauccgguccggcaagagcucuaucaugcgcagcgacgcccccauugggaaauguaacuccgaaugcaucacaccgaauggaucuauuccuaacgauaagcccuuucagaaugugaacagaaucacguauggcgcuuguccucgguacgucaagcaaaauacccugaaacuugccacaggcaugcgcaacguucccgagaagcagaccagagggauuuucggagcgaucgccggcuuuaucgaaaaugggugggagggaaugguggacggcugguauggguuccggcaccagaacagcgagggaagaggccaagcugccgaucugaaauccacacaggcugccauugaccagaucaauggcaagcucaaccgccugauugggaaaaccaaugaaaaguuccaccagaucgagaaagaauuuagcgagguggaaggacggauucaagaucuugagaaguacgucgaggacacgaagaucgaucuguggucuuauaacgccgaacuccugguggcucuggagaaccagcauacaauugaccucaccgauuccgaaaugaauaaacuguucgagaagaccaaaaagcagcuuagagaaaacgcggaggacaugggcaaugggugcuuuaaaaucuaccacaagugugauaacgccugcaucggaagcauucgcaauggcacauaugaccaugacguuuaccgggaugaggcucugaacaauagauuccagaucaaggggguggaacucaaaucuggcuacaaggacuggauucuguggaucuccuuugccauuagcugcuuccuucugugugucgcccuccugggauuuaucaugugggcuugccaaaaaggcaacauccgcuguaauauuugcaucuga

SEQ ID NO: 197461 - RNA, 1701 nt, Artificial Sequence
  derived and/or modified CDS sequence (opt5) from hemagglutinin__InfluenzaA__ADK98876
augaagaccaucauugcccugagcuacauccucugccugguguucgcucagaaacuucccggcaacgacaauuccacagccacgcugugucucgggcaccaugcggucccuaacggaaccauuguuaagacaaucaccaaugaucaaauugaggugacaaacgcuaccgaacuggugcaaaauucuagcacaggcgagaucugcgacuccccgcaccagauccuugaugggaaaaacuguacccugauugacgcccuccugggagauccccagugcgacggcuuucagaauaagaaaugggaucuguucgucgaaagaucuaaggccuauagcaacuguuacccuuaugacgugcccgauuacgcuucccuccggucucugguugccagcuccgggacgcuugaguuuaauaacgaaucuuucaauuggaccggagugacacagaacggcaccucuuccgcuugcauccgcagaagcaagaauagcuuuuucucccggcugaacuggcucacacaucugaauuuuaaauauccugcccuuaacgucaccaugcccaacaauggccaguucgacaagcuguacauuuggggagugcaccauccugggacggauaaagaccagaucuuucucuaugcgcaagccagcggccgcauuacaguuucuaccaagagaucccagcagacagugaucccgaacauugggagccggccccgcgucagaaauaucccuucccggaucucuauuuacuggaccaucgugaaacccggagauauucugcugaucaacagcaccggcaaucucauugcuccucgcggguacuucaagaucagauccggaaagagcucuaucaugcgguccgacgcccccauuggcaaauguaacagcgagugcaucacaccgaauggcucuauuccuaacgacaagcccuuucagaaugugaaccgcaucacguauggggcuuguccuagauacgucaaacaaaauacccugaaacuugccacaggaaugcggaacguucccgagaagcagacccgcggcauuuucggggcgaucgccggauuuaucgaaaauggcugggaggggaugguggauggaugguauggcuucagacaccagaacagcgaaggccgggggcaagcugccgaccugaaguccacacaggcugccauugaucagaucaauggaaaacucaacagacugauuggcaagaccaacgagaaguuccaccagaucgagaaagaauuuucugagguggaagggcgcauucaagaccuugagaaguacgucgaagauacgaaaaucgaccuguggagcuauaaugccgagcuccugguggcucuggagaaccagcauacaauugaucucaccgacuccgaaaugaauaagcuguucgagaaaaccaagaagcagcuucgggaaaacgcggaggauaugggaaauggcugcuuuaaaaucuaccacaagugugacaacgccugcaucgggagcauuagaaauggcacauaugaucaugacguuuaccgcgacgaagcucugaacaaucgguuccagaucaaaggaguggagcucaagucuggcuacaaagauuggauucuguggaucuccuuugccauuagcugcuuccuucugugugucgcccuccugggguuuaucaugugggcuugccaaaagggaaacaucagauguaauauuugcaucuga

SEQ ID NO: 197462 - RNA, 1701 nt, Artificial Sequence; identical to SEQ ID NO: 197436
  derived and/or modified CDS sequence (opt5) from hemagglutinin__InfluenzaA__ADK98887

SEQ ID NO: 197463 - RNA, 1701 nt, Artificial Sequence; identical to SEQ ID NO: 194506
  derived and/or modified CDS sequence (opt5) from hemagglutinin__InfluenzaA__ADK98898

SEQ ID NO: 197464 - RNA, 1701 nt, Artificial Sequence
  derived and/or modified CDS sequence (opt5) from hemagglutinin__InfluenzaA__ADK98909
augaagaccaucauugcccugagcuacauccucugccugguguucgcucagaaacuucccggcaacgacaauuccacagccacgcugugucucgggcaccaugcggucccuaacggaaccauuguuaagacaaucaccaaugaucaaauugaggugacaaacgcuaccgaacuggugcagaucucuagcacaggcgagaucugcgacuccccgcaccagauucuugauggggaaaauuguacccugaucgacgcccuccugggagauccccagugcgacggcuuucaaaacaaaaagugggaucuguucgucgagagaucuaaagccuauagcaauuguuacccuuaugacgugcccgauuacgcuucccuccggucucugguugccagcuccgggacgcuugaauuuaacaaugagagcuucaacuggaccggagugacacagaauggcaccucuuccgcuugcauucgcagaagcaacaauuccuuuuucucucggcugaacuggcucacacaucugaaguuuaaguauccugcccuuaaugucaccaugcccaacaacgagcaguucgacaaacuguacaucuggggcgugcaccauccugggacggauaaugaccagauuuuucucuaugcgcaagccagcggacgcaucacaguuucuaccaagagaucccagcagacagugauuccgaacaucggcagccggccccgcgucagaaauaucccuucccggauuucuaucuacuggaccauugugaaacccggggauauccugcugauuaacagcaccggaaaucucaucgcuccucgcggcuacuucaagaucagauccgggaaaagcucuauuaugcgguccgacgcccccaucggaaaguguaacagcgaaugcauuacaccgaauggcucuaucccuaacgacaagcccuuucagaaugugaaccgcauuacguauggcgcuuguccuagauacgucaaacaaaauacccugaaacuugccacagggaugcggaacguucccgagaagcagacccgcggaaucuucggcgcgaucgccggguuuauugaaaauggaugggagggcaugguggaugggugguauggauucagacaccagaacagcgagggccggggccaagcugccgaccugaaguccacacaggcugccaucgaucagauuaaugggaaacucaacagacugaucggaaagaccaacgaaaaauuccaccagauugagaaggaauuuucugagguggaaggccgcauccaagaccuugagaaguacgucgaggauacgaaaauugaccuguggagcuauaaugccgaacuccugguggcucuggagaaccagcauacaaucgaucucaccgacuccgaaaugaauaagcuguucgagaaaaccaagaaacagcuucgggaaaacgcggaggauauggggaauggaugcuuuaagaucuaccacaagugugacaacgccugcauuggcagcaucagaaaugggacauaugaucaugacguuuaccgcgacgaggcucugaacaaucgguuccagauuaaaggcguggaacucaagucuggauacaaagauuggauccuguggauuuccuuugccaucagcugcuuccuucugugugucgcccuccugggcuuuaucaugugggcuugccaaaaggggaacauuagauguaauaucugcauuuga

SEQ ID NO: 197465 - RNA, 1701 nt, Artificial Sequence
  derived and/or modified CDS sequence (opt5) from hemagglutinin__InfluenzaA__ADK98920
augaagaccaucauugcccugagcuacauccucugccugguguucgcucagaaacuucccggcaacgacaauuccacagccacgcugugucucgggcaccaugcggucccuaacggaaccauuguuaagacaaucaccaaugaucaaauugaggugacaaacgcuaccgaacuggugcagucuagcuccacaggcgagaucugcgacucuccgcaccagauccuugaugggaaaaauuguacccugauugacgcccuccugggagauccccagugcgacggcuuucaaaacaagaaaugggaucuguucgucgaaagagggaaggccuauagcaauuguuacccuuaugacgugcccgauuacgcuucccuccggucucugguugccagcuccggaacgcuugaguuuaacaaugaaucuuucaacuggaccggcgugacacagaauggcaccucuuccgcuugcauccgcagaagcaagaacagcuuuuucucccggcugaauuggcucacacaucugaacuuuaaauauccugcccuuaaugucaccaugcccaacaacgagcaguucgacaagcuguacauuuggggagugcaccauccugggacggauaaagaccagaucuuucucuaugcgcaagccagcggccgcauuacaguuucuaccaagagaucccagcagacagugaucccgaauauugggagccggccccgcgucagaaacaucccuucccggaucucuauuuacuggaccaucgugaaacccggagauauucugcugaucaauagcaccggcaaccucauugcuccucgcggguacuucaagaucagauccggaaagagcucuaucaugcgguccgacgcccccauuggcaaauguaauagcgagugcaucacaccgaacggcucuauuccuaaugacaagcccuuucagaacgugaaucgcaucacguauggggcuuguccuagauacgucaaacaaagcacccugaaacuugccacaggaaugcggaacguucccgaaaaacagacccgcggcauuuucggggcgaucgccggauuuaucgagaauggcugggaagggaugguggauggaugguauggcuucagacaccagaacuccgagggccgggggcaagcugccgaccugaagucuacacaggcugccauugaucagaucaauggaaaacucaacagacugauuggcaagaccaaugagaaguuccaccagaucgaaaaagaguuuagcgaaguggaggggcgcauucaagaccuugaaaaguacgucgaggauacgaaaaucgaccugugguccuauaacgccgagcuccugguggcucuggaaaaccagcauacaauugaucucaccgacagcgagaugaauaagcuguucgaaaagaccaagaagcagcuucgggagaacgcggaagauaugggaaauggcugcuuuaaaaucuaccacaagugugacaacgccugcaucgggucuauuagaaauggcacauaugaucaugacguuuaccgcgacgaggcucugaacaaucgguuccagaucaaaggaguggagcucaaguccggcuacaaagauuggauucuguggaucagcuuugccauuucuugcuuccuucugugugucgcccuccugggguuuaucaugugggcuugccaaaagggaaacaucagauguaauauuugcaucuga

SEQ ID NO: 197466 - RNA, 1701 nt, Artificial Sequence; identical to SEQ ID NO: 194506
  derived and/or modified CDS sequence (opt5) from hemagglutinin__InfluenzaA__ADK98931

SEQ ID NO: 197467 - RNA, 1701 nt, Artificial Sequence
  derived and/or modified CDS sequence (opt5) from hemagglutinin__InfluenzaA__ADK98942
augaagaccaucauugcccugagcuacauccucugccugguguucgcucagaaacuucccggcaacgacaauuccacagccacgcugugucucgggcaccaugcggucccuaacggaaccauuguuaagacaaucaccaaugaucaaauugaggugacaaacgcuaccgaacuggugcagucuagcuccacaggcgagaucugcgacucuccgcaccagauccuugauggggaaaauuguacccugauugacgcccuccugggagauccccagugcgacggcuuucaaaacaaaaagugggaucuguucgucgagagaagcaaagccuauuccaauuguuacccuuaugacgugcccgauuacgcuucucuccggagccugguugccuccagcgggacgcuugaauuuaacaaugagucuuucaacuggaccggagugacacagaauggcaccuccagcgcuugcauccgcagaucuaacaauuccuuuuucagccggcugaacuggcucacacaucugaaguuuaaguauccugcccuuaaugucaccaugcccaacaacgagcaguucgacaaacuguacauuuggggcgugcaccauccugggacggauaaugaccagaucuuucucuaugcgcaagccucuggacgcauuacaguuuccaccaagagaagccagcagacagugaucuccaacauuggcucucggccgcgcgucagaaauauccccagccggaucuccauuuacuggaccaucgugaaaccuggggauauucugcugaucaacagcaccggaaaucucauugcuccccgcggcuacuucaagaucagaucugggaaauccagcaucaugcggucugacgccccuauuggaaaguguaacagcgaaugcaucacacccaauggcuccauuccgaacgacaagccuuuucagaaugugaaccgcaucacguauggcgcuugucccagauacgucaaacaaaauacccugaagcuggccacagggaugcggaacguuccugagaaacagacccgcggaauuuucggcgcgaucgccggguuuaucgaaaauggaugggagggcaugguggaugggugguauggauucagacaccagaacucugagggccggggccaagcugccgaccuuaagagcacacaggcugccauugaucagaucaaugggaaacucaacagacugauuggaaagaccaacgaaaaauuccaccagaucgagaaggaauuuuccgagguggaaggccgcauucaagaccuugagaaguacgucgaggauacgaaaaucgaccuguggagcuauaaugccgaacuccugguggcucuggagaaccagcauacaauugaucucaccgacucugaaaugaauaagcuguucgagaaaaccaagaaacagcuucgggaaaacgcggaggauauggggaauggaugcuuuaagaucuaccacaagugugacaacgccugcaucggcuccauuagaaaugggacauaugaucauaacguuuaccgcgacgaggcucugaauaaccgguuccagaucaaaggcguggaacucaagagcggauacaaagacuggauucuguggaucucuuuugccauuuccugcuuccuucugugugucgcccuccugggcuuuaucaugugggcuugccaaaaggggaauaucagauguaacauuugcaucuga

SEQ ID NO: 197468 - RNA, 1701 nt, Artificial Sequence
  derived and/or modified CDS sequence (opt5) from hemagglutinin__InfluenzaA__ADK98953
augaagaccaucauugcccugagcuacaugcucugccugguguucgcucagaaacuucccggcaacgacaauuccacagccacgcugugucucgggcaccaugcggucccuaacggaaccaucguuaagacaauuaccaaugaucaaaucgaggugacaaacgcuaccgaacuggugcagucuagcuccacaggcgagauuugcgacucuccgcaccagauccuugauggggaaaauuguacccugaucgacgcccuccugggagauccccagugcgacggcuuucaaaacaaaaagugggaucuguucgucgagagaagcaaagccuauuccaauuguuacccuuaugacgugcccgauuacgcuucucuccggagccugauugccuccagcgggacgcuugaauuuaacaaugagucuuucaacuggaccggaguuacacagaauggcaccuccagcgcuugcauccgcagaucuaacaauuccuuuuucagccggcugaacuggcucacacaucugaaguuuaaguauccugcccuuaaugugaccaugcccaacaacgagcaguucgacaaacuguacauuuggggcguccaccauccugggacggauaaugaccagaucuuucucuaugcgcaagccucuggacgcauuacaguguccaccaagagaagccagcagacaguuaucccgaacauuggcucccggccccgcgugagaaauaucccuucucggaucagcauuuacuggaccaucgucaaacccggggauauucugcugaucaacuccaccggaaaucucauugcuccucgcggcuacuucaagaucagaagcgggaaaucuuccaucaugcggagcgacgcccccauuggaaaguguaacucugaaugcaucacaccgaauggcagcauuccuaacgacaagcccuuucagaaugugaaccgcaucacguauggcgcuuguccuagauacgugaaacaaaauacccugaaacuugccacagggaugcggaacguccccgagaagcagacccgcggaauuuucggcgcgaucgccggguuuaucgaaaauggaugggagggcaugguugaugggugguauggauucagacaccagaacuccgagggccggggccaagcugccgaccugaagucuacacaggcugccauugaucagaucaaugggaaacucaacagacugauuggaaagaccaacgaaaaauuccaccagaucgagaaggaauuuagcgagguggaaggccgcauucaagaccuugagaaguacguggaggauacgaaaaucgaccugugguccuauaaugccgaacuccuggucgcucuggagaaccagcauacaauugaucucaccgacagcgaaaugaauaagcuguucgagaaaaccaagaaacagcuucgggaaaacgcggaggauauggggaauggaugcuuuaagaucuaccacaagugugacaacgccugcaucggcucuauuagaaaugggacauaugaucaugacguguaccgcgacgaggcucugaacaaucgguuccagaucaaaggcguugaacucaaguccggauacaaagauuggauucuguggaucagcuuugccauuucuugcuuccuucuguguguggcccuccugggcuuuaucaugugggcuugccaaaaggggaacaucagauguaauauuugcaucuga

SEQ ID NO: 197469 - RNA, 1701 nt, Artificial Sequence; identical to SEQ ID NO: 194506
  derived and/or modified CDS sequence (opt5) from hemagglutinin__InfluenzaA__ADK98964

SEQ ID NO: 197470 - RNA, 1701 nt, Artificial Sequence; identical to SEQ ID NO: 197423
  derived and/or modified CDS sequence (opt5) from hemagglutinin__InfluenzaA__ADK98975

SEQ ID NO: 197471 - RNA, 1701 nt, Artificial Sequence; identical to SEQ ID NO: 197468
  derived and/or modified CDS sequence (opt5) from hemagglutinin__InfluenzaA__ADK98986

SEQ ID NO: 197472 - RNA, 1701 nt, Artificial Sequence; identical to SEQ ID NO: 195685
  derived and/or modified CDS sequence (opt5) from hemagglutinin__InfluenzaA__ADK98997

SEQ ID NO: 197473 - RNA, 1701 nt, Artificial Sequence; identical to SEQ ID NO: 197468
  derived and/or modified CDS sequence (opt5) from hemagglutinin__InfluenzaA__ADK99008

SEQ ID NO: 197474 - RNA, 1701 nt, Artificial Sequence
  derived and/or modified CDS sequence (opt5) from hemagglutinin__InfluenzaA__ADK99030
augaagaccaucauugcccugagcuacauccucugccugguguucgcucagaaacuucccggcaacgacaauuccacagccacgcugugucucgggcaccaugcggucccuaacggaaccauuguuaagacaaucaccaaugaucaaauugaggugacaaacgcuaccgaacuggugcagucuagcuccacaggcgagaucugcgacucuccgcaccagauccuugaugggaaaaauuguacccugauugacgcccuccugggagauccccagugcgacggcuuucaaaacaagaaaugggaucuguucgucgaaagaagcaaggccuauuccaauuguuacccuuaugacgugcccgauuacgcuucucuccggagccugguugccuccagcgggacgcuugaguuuaacaaugaaucuuucaacuggaccggagugacacagaauggcaccuccagcgcuugcauccgcagaucuaagaacuccuuuuucagccggcugaauuggcucacacaucugaacuuuaaauauccugcccuuaaugucaccaugcccaacaacgagcgcuucgacaagcuguacauuuggggcgugcaccauccugggacggauaaagaccagaucuuucucuaugcgcaggccucuggaagaauuacaguuuccaccaagcggagccaacagacagugaucccgaauauuggcucccgccccagaguccggaacaucccuucucgcaucagcauuuacuggaccaucgugaaacccggggauauucugcugaucaauuccaccggaaaccucauugcuccuagaggcuacuucaagauccggagcgggaagucuuccaucaugcgcagcgacgcccccauuggaaaauguaauucugagugcaucacaccgaacggcagcauuccuaaugacaagcccuuucagaacgugaauagaaucacguauggcgcuuguccucgguacgucaaacagaacacccugaaacuugccacagggaugcgcaauguucccgaaaaacaaaccagaggaauuuucggcgcgaucgccggguuuaucgagaacggaugggaaggcaugguggaugggugguauggauuccggcaccaaaauuccgagggcagaggccaggcugccgaccugaagucuacacaggcugccauugaucagaucaacgggaaacucaaucgccugauuggaaagaccaacgagaaguuccaccagaucgaaaaagaguuuagcgaaguggagggccggauucaggaccuugaaaaguacgucgaggauacgaaaaucgaccugugguccuauaacgccgagcuccugguggcucuggaaaaucaacauacaauugaucucaccgacagcgagaugaacaagcuguucgaaaagaccaagaagcagcuuagagagaaugcggaagauauggggaacggaugcuuuaaaaucuaccacaagugugacaaugccugcaucggcucuauucgcaacgggacauaugaucaugacguuuaccgggacgaggcucugaauaacagauuccagaucaaaggcguggagcucaaguccggauacaaagauuggauucuguggaucagcuuugccauuucuugcuuccuucugugugucgcccuccugggcuuuaucaugugggcuugccagaaggggaauauccgcuguaacauuugcaucuga

SEQ ID NO: 197475 - RNA, 1701 nt, Artificial Sequence
  derived and/or modified CDS sequence (opt5) from hemagglutinin__InfluenzaA__ADK99041
augaagaccaucauugcccugagcuacauccucugccugguguucgcucagaaacuucccggcaacgacaauuccacagccacgcugugucucgggcaccaugcggucccuaacggaaccauuguuaagacaaucgcuaaugaucaaauugaggugaccaacgccacagaacuggugcagucuagcuccaccggcgagaucugcgacucuccgcaccagauccuugauggggaaaauuguacacugauugacgcccuccugggagauccccagugcgacggcuuucaaaacaaaaagugggaucuguucgucgagagaagcaaggcuuauuccaauuguuacccuuaugacgugcccgauuacgccucucuccggagccugguugcuuccagcgggacccuugaauuuaacaaugagucuuucaacuggacgggagugacccagaauggcacauccagcgccugcauccgcagaucuaacaauuccuuuuucagccggcugaacuggcucacccaucugaaguuuaaguauccugcgcuuaaugucacaaugcccaacaacgagcaguucgacaaacuguacauuuggggcgugcaccauccugggaccgauaaugaccagaucuuucucuaugcccaggcuucuggacgcauuacgguuuccacaaagagaagccaacagaccgugaucccgaacauuggcucccggccccgcgucagaaauaucccuucucggaucagcauuuacuggacaaucgugaaacccggggauauucugcugaucaacuccaccggaaaucucauugccccucgcggcuacuucaagaucagaagcgggaaaucuuccaucaugcggagcgacgcucccauuggaaaguguaacucugaaugcaucaccccgaauggcagcauuccuaacgacaagcccuuucagaaugugaaccgcaucacauauggcgccuguccuagauacgucaaacaaaauacgcugaaacuugcgaccgggaugcggaacguucccgagaaacagacacgcggaauuuucggcgccaucgcuggguuuaucgaaaauggaugggagggcaugguggaugggugguauggauucagacaccagaacuccgagggccggggccaagccgcugaccugaagucuacccaggccgccauugaucagaucaaugggaaacucaacagacugauuggaaagacaaacgaaaaauuccaccagaucgagaaggaauuuagcgagguggaaggccgcauucaagaccuugagaaguacgucgaggauaccaaaaucgaccugugguccuauaaugcugaacuccugguggcgcuggagaaccagcauacgauugaucucacagacagcgaaaugaauaagcuguucgagaaaaccaagaaacagcuucgggaaaacgccgaggauauggggaauggaugcuuuaagaucuaccacaagugugacaacgcuugcaucggcucuauuagaaaugggaccuaugaucaugacguuuaccgcgacgaggcccugaacaaucgguuccagaucaaaggcguggaacucaaguccggauacaaagauuggauucuguggaucagcuuugccauuucuugcuuccuucugugugucgcucuccugggcuuuaucaugugggccugccaaaaggggaacaucagauguaauauuugcaucuga

SEQ ID NO: 197476 - RNA, 1701 nt, Artificial Sequence; identical to SEQ ID NO: 197423
  derived and/or modified CDS sequence (opt5) from hemagglutinin__InfluenzaA__ADK99063

SEQ ID NO: 197477 - RNA, 1701 nt, Artificial Sequence; identical to SEQ ID NO: 194506
  derived and/or modified CDS sequence (opt5) from hemagglutinin__InfluenzaA__ADK99085

SEQ ID NO: 197478 - RNA, 1701 nt, Artificial Sequence; identical to SEQ ID NO: 194506
  derived and/or modified CDS sequence (opt5) from hemagglutinin__InfluenzaA__ADK99096

SEQ ID NO: 197479 - RNA, 1701 nt, Artificial Sequence; identical to SEQ ID NO: 194506
  derived and/or modified CDS sequence (opt5) from hemagglutinin__InfluenzaA__ADK99107

SEQ ID NO: 197480 - RNA, 1701 nt, Artificial Sequence
  derived and/or modified CDS sequence (opt5) from hemagglutinin__InfluenzaA__ADK99118
augaagaccaucauugcccugagcuacauccucugccugguguucgcucagaaacuucccggcaacgacaauuccacagccacgcugugucucgggcaccaugcggucccuaacggaaccauuguuaagacaaucaccaaugaucaaauugaggugacaaacgcuaccgaacuggugcagucuagcuccacaggcgagaucugcgacaucccgcaccagauucuugaugggaaaaauuguacccugaucgacgcccuccugggagauccccagugcgacggcuuucaaaacaagaaaugggaucuguucgucgaaagaucuaaggccuauagcaauuguuacccuuaugacgugcccgauuacgcuucccuccggucucugguugccagcuccgggacgcuugaguuuaacaaugaaucuuucaacuggaccggagugacacagaauggcaccucuuccgcuugcauucgcagaagcaagaacagcuuuuucucccggcugaauuggcucacacaucugaacuuuaaauauccugcccuuaaugucaccaugcccaacaacgagcaguucgacaagcuguacaucuggggcgugcaccauccugggacggauaaagaccagauuuuucucuaugcgcaagccagcggacgcaucacaguuucuaccaagagaucccagcagacagugauuccgaauaucggcagccggccccgcgucagaaacaucccuucccggauuucuaucuacuggaccauugugaaacccggggauauccugcugauuaauagcaccggaaaccucaucgcuccucgcggcuacuucaagaucagauccggaaagagcucuauuaugcgguccgacgcccccaucgggaaauguaauagcgagugcauuacaccgaacggcucuaucccuaaugacaagcccuuucagaacgugaaucgcauuacguauggcgcuuguccuagauacgucaaacaaagcacccugaaacuugccacagggaugcggaacguucccgaaaaacagacccgcggaaucuucggcgcgaucgccggguuuauugagaauggaugggaaggcaugguggaugggugguauggauucagacaccagaacuccgagggccggggccaagcugccgaccugaagucuacacaggcugccaucgaucagauuaaugggaaacucaacagacugaucggaaagaccaaugagaaguuccaccagauugaaaaagaguuuagcgaaguggagggccgcauccaagaccuugaaaaguacgucgaggauacgaaaauugaccugugguccuauaacgccgagcuccugguggcucuggaaaaccagcauacaaucgaucucaccgacagcgagaugaauaagcuguucgaaaagaccaagaagcagcuucgggagaacgcggaagauauggggaauggaugcuuuaaaaucuaccacaaguguaacaaugccugcauuggcucuaucagaaacgggacauaugaccaugauguuuaccgcgacgaggcucugaauaaccgguuccagauuaaaggcguggagcucaaguccggauacaaagacuggauccuguggauuagcuuugccaucucuugcuuccuucugugugucgcccuccugggcuuuaucaugugggcuugccaaaaggggaauauuagauguaacaucugcauuuga

SEQ ID NO: 197481 - RNA, 1701 nt, Artificial Sequence
  derived and/or modified CDS sequence (opt5) from hemagglutinin__InfluenzaA__ADK99129
augaagaccaucauugcccugagcuacauccucugccugguguucgcucagaaacuucccggcaacgacaauuccacagccacgcugugucucgggcaccaugcggucccuaacggaaccauuguuaagacaaucaccaaugaucaaauugaggugacaaacgcuaccgaacuggugcagucuagcuccacaggcgagaucugcgacucuccgcaccagauccuugaugggaaaaauuguacccugauugacgcccuccugggagauccccagugcgacggcuuucaaaacaagaaaugggaucuguucgucgaaagaagcaaggccuauuccaauuguuacccuuaugacgugcccgauuacgcuucucuccggagccugguugccuccagcgggacgcuugaguuuaacaaugaaucuuucaacuggaccggagugacacagaauggcaccuccagcgcuugcauccgcagaucuaagaacuccuuuuucagccggcugaauuggcucacacaucugaacuuuaaauauccugcccuuaauaugaccaugcccaacaacgagcaguucgacaagcuguacauuuggggcguccaccauccugggacggauaaagaccagaucuuucucuaugcgcaagccucuggacgcauuacaguguccaccaagagaagccagcagacaguuaucccgaauauuggcucccggccccgcgugagaaacaucccuucucggaucagcauuuacuggaccaucgucaaacccggggauauucugcugaucaauuccaccggaaaccucauugcuccucgcggcuacuucaagaucagaagcgggaagucuuccaucaugcggagcgacgcccccauuggaaaauguaauucugagugcaucacaccgaacggcagcauuccuaaugacaagcccuuucagaacgugaaucgcaucacguauggcgcuuguccuagauacgugaaacaauccacccugaaacuugccacagggaugcggaacguccccgaaaaacagacccgcggaauuuucggcgcgaucgccggguuuaucgagaauggaugggaaggcaugguugaugggugguauggauucagacaccagaacucugagggccggggccaagcugccgaccucaagagcacacaggcugccauugaucagaucaaugggaaacugaacagacugauuggaaagaccaaugagaaguuccaccagaucgaaaaagaguuuuccgaaguggagggccgcauucaagaccuugaaaaguacguggaggauacgaaaaucgaccuguggagcuauaacgccgagcuccuggucgcucuggaaaaccagcauacaauugaucucaccgacucugagaugaauaagcuguucgaaaagaccaagaagcagcuucgggagaacgcggaagauauggggaauggaugcuuuaaaaucuaccacaaguguaacaaugccugcaucggcuccauuagaaacgggacauaugaccaugauguguaccgcgacgaggcucugaauaaccgguuccagaucaaaggcguugagcucaagagcggauacaaagacuggauucuguggaucucuuuugccauuuccugcuuccuucuguguguggcccuccugggcuuuaucaugugggcuugccaaaaggggaauaucagauguaacauuugcaucuga

SEQ ID NO: 197482 - RNA, 1701 nt, Artificial Sequence; identical to SEQ ID NO: 197423
  derived and/or modified CDS sequence (opt5) from hemagglutinin__InfluenzaA__ADK99140

SEQ ID NO: 197483 - RNA, 1701 nt, Artificial Sequence
  derived and/or modified CDS sequence (opt5) from hemagglutinin__InfluenzaA__ADK99151
augaagaccaucauugcccugagcuacauccucugccugguguucgcucagaaacuucccggcaacgacaauuccacagccacgcugugucucgggcaccaugcggucccuaacggaaccauuguuaagacaaucaccaaugaucaaauugaggugacaaacgcuaccgaacuggugcagucuagcuccacaggcgagaucugcgacucuccgcaccagauccuugaugggaaaaauuguacccugauugacgcccuccugggagauccccagugcgacggccugcaaaacaagaaaugggaucucuuugucgaaagaagcaaggccuauuccaauuguuacccuuaugacgugcccgauuacgcuucucugcggagccuuguugccuccagcgggacgcuggaguucaacaaugaaucuuuuaacuggaccggagugacacagaauggcaccuccagcgcuugcauccgcagaucuaagaacuccuucuuuagccggcucaauuggcugacacaucuuaacuucaaauauccugcccugaaugucaccaugcccaacaacgagcaguuugacaagcucuacauuuggggcgugcaccauccugggacggauaaagaccagaucuuccuguaugcgcaagccucuggacgcauuacaguuuccaccaagagaagccagcagacagcuaucccgaauauuggcucccggccccgcgugagaaacaucccuucucggaucagcauuuacuggaccaucgucaaacccggggauauucugcucaucaauuccaccggaaaccugauugccccucgcggcuacuuuaagaucagaagcgggaagucuuccaucaugcggagcgacgcucccauuggaaaauguaauucuaagugcaucacaccgaacggcagcauuccuaaugacaaacccuuccagaacgugaaucgcaucacguauggcgccuguccuagauacgugaagcaaaacacccuuaaacuggcgacagggaugcggaauguccccgagaagcagacccgcggaauuuuuggcgccaucgcuggguucaucgaaaacggaugggagggcaugguugaugggugguauggauuuagacaccaaaauuccgaaggccggggccaggccgcugaccucaaaucuacacaggccgccauugaucagaucaacgggaagcugaauagacuuauuggaaagaccaacgagaaauuccaccagaucgagaaggaguucagcgaaguggaaggccgcauucaagaccuggagaaauacguggaagauacgaagaucgaccucugguccuauaacgcugagcugcuggucgcgcucgagaaucagcauacaauugaucugaccgacagcgaaaugaacaaacuuuuugagaagaccaagaaacagcugcgggaaaaugccgaggauauggggaacggaugcuucaagaucuaccacaaaugugacaaugcuugcaucggcucuauuagaaacgggacauaugaucaugacguguaccgcgacgaagcccucaauaaccgguuucagaucaagggcguugagcugaaauccggauacaaggauuggauucuuuggaucagcuucgccauuucuugcuuucugcucuguguggcucugcugggcuucaucaugugggccugccaaaaggggaauaucagauguaacauuugcaucuga

SEQ ID NO: 197484 - RNA, 1701 nt, Artificial Sequence; identical to SEQ ID NO: 197423
  derived and/or modified CDS sequence (opt5) from hemagglutinin__InfluenzaA__ADK99162

SEQ ID NO: 197485 - RNA, 1701 nt, Artificial Sequence
  derived and/or modified CDS sequence (opt5) from hemagglutinin__InfluenzaA__ADK99173
augaagaccaucauugcccugagcuacauccucugccugguguucgcucagaaacuucccggcaacgacaauuccacagccacgcugugucucgggcaccaugcggucccuaacggaaccauuguuaagacaaucaccaaugaucaaauugaggugacaaacgcuaccgaacugauccagucuagcuccacaggcgagaucugcgacucuccgcaccagauucuugauggggaaaauuguacccugaucgacgcccuccugggagauccccagugcgacggccugcaaaacaaaaagugggaucucuuuguggagagaagcaaagccuauuccaauuguuacccuuaugacguccccgauuacgcuucucugcggagccuuguggccuccagcgggacgcuggaguucaacaaugaaucuuuuaacuggaccggaguuacacagaauggcaccuccagcgcuugcauucgcagaucuaacaauuccuucuuuagccggcucaacuggcugacacaucuuaaguucaaguauccugcccugaaugugaccaugcccaacaacgagcaguuugacaaacucuacaucuggggcguccaccauccugggacggauaaugaccagauuuuccuguaugcgcaagccucuggacgcaucacaguguccaccaagagaagccagcagacaguuauuccgaacaucggcucccggccccgcgugagaaauaucccuucucggauuagcaucuacuggaccauugucaaacccggggauauccugcucauuaacuccaccggaaaucugaucgcuccucgcggcuacuuuaagaucagaagcgggaaaucuuccauuaugcggagcgacgcccccaucggaaaguguaacucugaaugcauuacaccgaauggcagcaucccuaacgacaagcccuuccagaaugugaaccgcauuacguauggcgcuuguccuagauacgugaaacaaaauacccuuaagcuggccacagggaugcggaacguccccgagaaacagacccgcggaaucuuuggcgcgaucgccggguucauugaaaauggaugggagggcaugguugaugggugguauggauuuagacaccagaacuccgagggccggggccaagcugccgaccucaagucuacacaggcugccaucgaucagauuaaugggaaacugaacagacuuaucggaaagaccaacgaaaaauuccaccagauugagaaggaguucagcgaaguggaaggccgcauccaagaccuggagaaguacguggaggauacgaaaauugaccucugguccuauaaugccgaacugcuggucgcucucgagaaccagcauacaaucgaucugaccgacagcgaaaugaauaaacuuuuugagaagaccaagaaacagcugcgggaaaacgcggaggauauggggaauggaugcuucaagaucuaccacaagugugacaacgccugcauuggcucuaucagaaaugggacauaugaucaugacguguaccgcgacgaggcucucaacaaucgguuucagauuaaaggcguugaacugaaguccggauacaaagauuggauccuuuggauuagcuucgccaucucuugcuuucugcucuguguggcccugcugggcuucaucaugugggcuugccaaaaggggaacauuagauguaauaucugcauuuga

SEQ ID NO: 197486 - RNA, 1701 nt, Artificial Sequence
  derived and/or modified CDS sequence (opt5) from hemagglutinin__InfluenzaA__ADK99184
augaagaccaucauugcccugagcuacauccucugccugguguccgcucagaaacuucccggcaacgacaauucuacagccacgcugugucucgggcaccaugcggucccuaacggaaccauuguuaagacaaucaccaaugaucaaauugaggugacaaacgcuaccgaacuggugcagagcuccucuacaggcgagaucugcaauagcccgcaccagauccuugacggggaaaacuguacccugauugaugcccuccugggagacccccagugcgauggcuuccaaaauaaaaagugggaccuguuugucgagagauccaaagccuauucuaacuguuacccuuaugaugugcccgacuacgcuagccuccggucccugguugccagcucugggacgcuugaguucaauaacgaauccuuuaauuggaccggagugacacagaacggcaccagcucugcuugcauccgcagauccaauaacagcuucuuuucucggcugaauuggcucacacaucugaaguucaaguauccugcccuuaacgucaccaugcccaacaaugagcaguuugauaaacuguacauuuggggcgugcaccauccugggacggacaacgaucagaucuuccucuaugcgcaagccuccggacgcauuacaguuagcaccaagagaucccagcagacagugaucccgaauauuggcucucggccccgcgucagaaacaucccuagccggaucuccauuuacuggaccaucgugaaacccggggacauucugcugaucaauagcaccggaaaccucauugcuccucgcggcuacuuuaagaucagaucugggaaauccagcaucaugcggucugaugcccccauuggaaaguguaauagcgaaugcaucacaccgaacggcuccauuccuaaugacaagcccuuccagaacgugaaucgcaucacguauggcgcuuguccuagauacgucaaacaaaacacccugaagcuggccacagggaugcggaauguucccgagaaacagacccgcggaauuuuuggcgcgaucgccggguucaucgaaaacggaugggagggcaugguggacgggugguauggauuuagacaccaaaauucugagggccggggccaggcugccgaucuuaagagcacacaggcugccauugaccagaucaacgggaaacucaacagacugauuggaaagaccaaugaaaaauuccaccagaucgagaaggaguucuccgaaguggaaggccgcauucaagaucuugagaaguacgucgaggacacgaaaaucgaucuguggagcuauaacgccgaacuccugguggcucuggagaaucagcauacaauugaccucaccgauucugaaaugaacaagcuguuugagaaaaccaagaaacagcuucgggaaaaugcggaggacauggggaacggaugcuucaagaucuaccacaagugugauaaugccugcaucggcuccauuagaaacgggacauaugaccaugauguuuaccgcgacgaggcucugaauaaccgguuucagaucaaaggcguggaacucaagagcggauacaaagacuggauucuguggaucucuuucgccauuuccugcuuucuucugugugucgcccuccugggcuucaucaugugggcuugccaaaaggggaauaucagauguaacauuugcaucuga

SEQ ID NO: 197487 - RNA, 1701 nt, Artificial Sequence; identical to SEQ ID NO: 194506
  derived and/or modified CDS sequence (opt5) from hemagglutinin__InfluenzaA__ADK99195

SEQ ID NO: 197488 - RNA, 1701 nt, Artificial Sequence
  derived and/or modified CDS sequence (opt5) from hemagglutinin__InfluenzaA__ADK99206
augaagaccaucauugcccugagcuacauccucugccugguguucgcucagaaacuucccggcaacgacaauuccacagccacgcugugucucgggcaccaugcggucccuaacggaaccguugugaagacaauuaccaaugaucaaaucgaggugacaaacgcuaccgaacugguccagucuagcuccacaggcgagauuugcgacucuccgcaccagauccuugaugggaaaaauuguacccugaucgacgcccuccugggagauccccagugcgacggcuuucaaaacaagaaaugggaucuguucguggaaagaagcaaggccuauuccaauuguuacccuuaugacguucccgauuacgcuucucuccggagccugguggccuccagcgggacgcuugaguuuaacaaugaaucuuucaacuggaccggagucacacagaauggcaccuccagcgcuugcauucgcagaucuaagaacuccuuuuucagccggcugaauuggcucacacaucugaacuuuaaauauccugcccuuaaugugaccaugcccaacaacgagcaguucgacaagcuguacaucuggggcguucaccauccugggacggauaaagaccagauuuuucucuaugcgcaagccucuggacgcaucacaguguccaccaagagaagccagcagacagucauuccgaauaucggcucccggccccgcgugagaaacauuccuucucgggugagcaucuacuggaccaucgucaaacccggggauauucugcugaucaauuccaccggaaaccucauugcuccucgcggcuacuucaagaucagaagcgggaagucuuccauuaugcggagcgacgcccccaucggaaaauguaauucugagugcaucacaccgaacggcagcauuccuaaugacaagcccuuucagaacguuaaucgcaucacguauggcgcuuguccuagauacgugaaacaaaacacccugaaacuugccacagggaugcggaaugugcccgaaaaacagacccgcggaauuuucggcgcgaucgccggguuuauugagaacggaugggaaggcauggucgaugggugguauggauucagacaccaaaauuccgagggccggggccaggcugccgaccugaagucuacacaggcugccaucgaucagaucaacgggaaacucaauagacugauuggaaagaccaacgagaaguuccaccagaucgaaaaagaguuuagcgaaguggagggccgcauucaagaccuugaaaaguacguugaggauacgaaaaucgaccugugguccuauaacgccgagcuccuggugagccuggaaaaucagcauacaauugaucucaccgacucugagaugaacaagcuguucgaaaagaccaagaagcagcuucgggagaaugcugaagauauggggaacggaugcuuuaaaaucuaccacaagugugacaaugcgugcauuggcuccaucagaaacgggacauaugaucaugacgucuaccgcgacgaggcccugaauaaccgguuccagaucaaaggcguggagcucaagagcggauacaaagauuggauucuguggaucucuuuugcuauuuccugcuuccuucuguguguugcccuccugggcuuuaucaugugggccugccaaaaggggaauauuagauguaacaucugcaucuga

SEQ ID NO: 197489 - RNA, 1701 nt, Artificial Sequence; identical to SEQ ID NO: 197423
  derived and/or modified CDS sequence (opt5) from hemagglutinin__InfluenzaA__ADK99217

SEQ ID NO: 197490 - RNA, 1701 nt, Artificial Sequence; identical to SEQ ID NO: 197423
  derived and/or modified CDS sequence (opt5) from hemagglutinin__InfluenzaA__ADK99228

SEQ ID NO: 197491 - RNA, 1701 nt, Artificial Sequence
  derived and/or modified CDS sequence (opt5) from hemagglutinin__InfluenzaA__ADK99239
augaagaccaucauugcccugagcuacauccucugccugguguucgcucagaaacuucccggcaacgacaauuccacagccacgcugugucucgggcaccaugcggucccuaacggaaccauuguuaagacaaucaccaaugaucaaauugaggugacaaacgcuaccgaacuggugcagucuagcuccacaggcgagaucugcgacucuccgcaccagauccuugaugggaaaaauuguacccugauugacgcccuccugggagauccccagugcgacggcuuucaaaacaagaaaugggaucuguucgucgaaagaagcaaggccuauuccaauuguuacccuuaugacgugcccgauuacgcuucucuccggagccugguugccuccagcgggacgcuugaguuuaacaaugaaucuuucaacuggaccggagugacacagaauggcaccuccagcgcuugcauccgcagaucuaagaacuccuuuuucagccggcugaauuggcucacacaucugaacuuuaaauauccugcccuuaaugucaccaugcccaacaacgagcaguucgacaagcuguacauuuggggcgugcaccauccugggacggauaaagaccagaucuuucucuaugcgcaagccucuggacgcauuacaguuuccaccaagagaagccagcagacagugaucccgaauauuggcucccggccccgcgucagaaacaucccuucucggaucagcauuuacuggaccaucgugaaacccggggauauucugcugaucaauuccaccggaaaccucauugcuccucgcggcuacuucaagaucagaagcgggaagucuuccaucaugcggagcgacgcccccauuggaaaauguaauucugagugcaucacaccgaacggcagcauuccuaaugacaagcccuuucagaacgugaaucgcaucacguauggcgcuuguccuagauacgucaaacaaaacacccugaaacuugccacagggaugcggaauguucccgaaaaacagacccgcggaauuuucggcgcgaucgccggguuuaucgagaacggaugggaaggcaugguggaugggugguauggauucagacaccaaaauuccgagggccggggccaggcugccgaccugaagucuacacaggcugccauugaucagaucaacgggaaacucaauagacugauuggaaagaccaacgagaaguuccaccagaucgaaaaagaguuuagcgaaguggagggccgcauucaagaccuugaaaaguacgucgaggauacgaaaaucgaccugugguccuauaacgccgagcuccugguggcucuggaaaaucagcauacaauugaucucaccgacagcgagaugaacaagcuguucgaaaagaccaagaagcagcuucgggagaaugcggaagauauggggaacggaugcuuuaaaaucuaccacaagugugacaaugccugcaucggcucuauuagaaacgggacauaugaucaugacguuuaccgcgacgaggcucugaauaaccgguuccagaucaaaggcguggagcucaaguccggauacaaagauuggauucuguggaucagcuuugccauuucuugcuuccuucugugugucgcccuccugggcuuuaucaugugggcuugccaaaaggggaauaucagauguaacauuugcaucuga

SEQ ID NO: 197492 - RNA, 1701 nt, Artificial Sequence
  derived and/or modified CDS sequence (opt5) from hemagglutinin__InfluenzaA__ADK99250
augaagaccaucauugcccugagcuacauccucugccugguguucgcucagaaacuucccggcaacgacaauuccacagccacgcugugucucgggcaccaugcggucccuaacggaaccauuguuaagacaaucaccaaugaucaaauugaggugacaaacgcuaccgaacuggugcagucuagcuccacaggcgagaucugcgacucuccgcaccagauccuugauggggaaaauuguacccugauugacgcccuccugggagauccccagugcgacggcuuucaaaacaaaaagugggaucuguucgucgagagaagcaaagccuauuccaauuguuacccuuaugacgugcccgauuacgcuucucuccggagccugguugccuccagcgggacgcuugaauuuaacaaugagucuuucaacuggaccggagugacacagaauggcaccuccagcgcuugcauccgcagaucuaacaauuccuuuuucagccggcugaacuggcucacacaucugaaguuuaaguauccugcccuuaaugucaccaugcccaacaacgagcaguucgacaaacuguacauuuggggcgugcaccauccugggacggauaaugaccagaucuuucucuaugcgcaagccucuggacgcauuacaguuuccaccaagagaagccagcagacagugaucccgaacauuggcucccggccccgcgucagaaauaucccuucucggaucagcauuuacuggaccaucgugaaacccggggauauucugcugaucaacuccaccggaaaucucauugcuccucgcggcuacuucaagaucagaagcgggaaaucuuccaucaugcggagcgacgcccccauuggaaaguguaacucugaaugcaucacaccgaauggcagcauuccuaacgacaagcccuuucagaaugugaaccgcaucacguauggcgcuuguccuagauacgucaaacaaaauacccugaaacuugccacagggaugcggaacguucccgagaagcagacccgcggaauuuucggcgcgaucgccggguuuaucgaaaauggaugggagggcaugguggaugggugguauggauucagacaccagaacuccgagggccggggccaagcugccgaccugaagucuacacaggcugccauugaucagaucaaugggaaacucaacagacugauuggaaagaccaacgaaaaauuccaccagaucgagaaggaauuuagcgagguggaaggccgcauucaagacaucgagaaguacgucgaggauacgaaaauugaccuuugguccuauaaugccgaacugcucguggcucuggagaaccagcauacaaucgaucugaccgacagcgaaaugaauaaacucuucgagaagaccaagaaacagcugcgggaaaacgcggaggauauggggaauggaugcuuuaagaucuaccacaagugugacaacgccugcauuggcucuaucagaaaugggacauaugaucaugacguuuaccgcgacgaggcucuuaacaaucgguuccagauuaaaggcguggaacugaaguccggauacaaagauuggauccucuggauuagcuuugccaucucuugcuuccugcuuugugucgcccugcucggcuuuaucaugugggcuugccaaaaggggaacauuagauguaauaucugcauuuga

SEQ ID NO: 197493 - RNA, 1701 nt, Artificial Sequence; identical to SEQ ID NO: 197423
  derived and/or modified CDS sequence (opt5) from hemagglutinin__InfluenzaA__ADK99261

SEQ ID NO: 197494 - RNA, 1701 nt, Artificial Sequence
  derived and/or modified CDS sequence (opt5) from hemagglutinin__InfluenzaA__ADK99283
augaagaccaucauugcccugagcuacauccucugccugguguucgcucagaaacuucccggcaacgacaauuccacagccacgcugugucucgggcaccaugcggucccuaacggaaccauuguuaagacaaucaccaaugaucaaauugaggugacaaacgcuaccgaacuggugcagucuagcuccacaggcgagaucugcgacucuccgcaccagauccuugaugggaaaaauuguacccugauugacgcccuccugggagauccccagugcgacggcuuucaaaacaagaaaugggaucuguucgucgaaagaagcaaggccuauuccaauuguuacccuuaugacgugcccgauuacgcuucucuccggagccugguugccuccagcgggacgcuugaguuuaacaaugaaucuuucaacuggaccggagugacacagaauggcaccuccagcgcuugcauccgcagaucuaagaacuccuuuuucagccggcugaauuggcucacacaucugaacuuuaaauauccugcccuuaaugucaccaugcccaacaacgagcaguucgacaagcuguacauuuggggcgugcaccauccugggacggauaaagaccagaucuuucucuaugcgcaagccucuggacgcauuacaguuuccaccaagagaagccagcagacagugaucccgaauauuggcucccggccccgcgucagaaacaucccuucucggaucagcauuuacuggaccaucgugaaacccggggauauucugcugaucaauuccaccggaaaccucauugcuccucgcggcuacuucaagaucagaagcgggaagucuuccaucaugcggagcgacgcccccauuggaaaauguaauucugagugcaucacaccgaacggcagcauuccuaaugacaagcccuuucagaacgugaaucgcaucacguauggcgcuuguccuagauacgucaaacaaaacacccugaaacuugccacagggaugcggaauguucccgaaaagcagacccgcggaauuuucggcgcgaucgccggguuuaucgagaacggaugggaaggcaugguggaugggugguauggauucagacaccaaaauuccgagggccggggccaggcugccgaccugaagucuacacaggcugccauugaucagaucaacgggaaacucaauagacugauuggaaagaccaacgagaaguuccaccagaucgaaaaagaguuuagcgaaguggagggccgcauucaagaccuugaacgguacgucgaggauacgaagaucgaccugugguccuauaacgccgagcuccugguggcucuggaaaaucagcauacaauugaucucaccgacagcgagaugaacaaacuguucgaaaagaccaaaaagcagcuuagagagaaugcggaagauauggggaacggaugcuuuaagaucuaccacaaaugugacaaugccugcaucggcucuauucgcaacgggacauaugaucaugacguuuaccgggacgaggcucugaauaacagauuccagaucaagggcguggagcucaaauccggauacaaggauuggauucuguggaucagcuuugccauuucuugcuuccuucugugugucgcccuccugggcuuuaucaugugggcuugccaaaaagggaauauccgcuguaacauuugcaucuga

SEQ ID NO: 197495 - RNA, 1701 nt, Artificial Sequence
  derived and/or modified CDS sequence (opt5) from hemagglutinin__InfluenzaA__ADK99294
augaagaccaucauugcccugagcuacauccucugccugguguucgcucagaaacuucccggcaacgacaauuccacagccacgcugugucucgggcaccaugcggucccuaacggaaccauuguuaagacaaucaccaaugaucaaauugaggugacaaacgcuaccgaacuggugcagucuagcuccacaggcgagaucugcgacucuccgcaccagauccuugauggggaaaauuguacccugauugacgcccuccugggagauccccagugcgacggcuuucaagauaaaaagugggaccuguucgucgagagaagcaaagccuauuccaacuguuacccuuaugaugugcccgacuacgcuucucuccggagccugguugccuccagcgggacgcuugaauuuaauaacgagucuuucaauuggaccggagugacacagaacggcaccuccagcgcuugcauccgcagaucuaauaacuccuuuuucagccggcugaauuggcucacacaucugaacuuuaaguauccugcccuuaaugucaccaugcccaacaacgagcaguucgauaagcuguacauuuggggcgugcaccauccugggacggacaaagaucagaucuuucucuaugcgcaagccucuggacgcauuacaguuuccaccaagagaagccagcaggcugugaucccgaauauuggcucccggccccgcgucagaaacaucccuucucggaucagcauuuacuggacaaucgugaaacccggggacauucugcugaucaauuccaccggaaaccucauugccccucgcggcuacuucaagaucagaagcgggaaaucuuccaucaugcggagcgacgcucccauuggaaaguguaauucugaaugcaucaccccgaacggcagcauuccuaaugauaagcccuuucagaacgugaaucgcaucacauauggcgccuguccuagauacgucaaacaaaacacgcugaaacuugcgaccgggaugcggaauguucccgagaagcagacacgcggaauuuucggcgccaucgcuggguuuaucgaaaacggaugggagggcaugguggacgggugguauggauucagacaccaaaauuccgagggccggggccaggccgcugaucugaagucuacccaggccgccauugaccagaucaacgggaaacucaauagacugauuggaaagacaaacgaaaaauuccaccagaucgagaaggaauuuagcgagguggaaggccgcauucaagaucuugagaaguacgucgaggacaccaaaaucgaucugugguccuauaacgcugaacuccugguggcgcuggagaaucagcauacgauugaccucacagauagcgaaaugaacaagcuguucgagaaaaccaagaaacagcuucgggaaaaugccgaggacauggggaacggaugcuuuaagaucuaccacaagugugauaaugcuugcaucggcucuauuagaaacgggaccuaugaccaugacguuuaccgcgaugaggcccugaauaaccgguuccagaucaaaggcguggaacucaaguccggauacaaagacuggauucuguggaucagcuuugccauuucuugcuuccuucugugugucgcucuccugggcuuuaucaugugggccugccaaaaggggaauaucagauguaacauuugcaucuga

SEQ ID NO: 197496 - RNA, 1701 nt, Artificial Sequence; identical to SEQ ID NO: 194506
  derived and/or modified CDS sequence (opt5) from hemagglutinin__InfluenzaA__ADK99305

SEQ ID NO: 197497 - RNA, 1701 nt, Artificial Sequence; identical to SEQ ID NO: 194506
  derived and/or modified CDS sequence (opt5) from hemagglutinin__InfluenzaA__ADL27989

SEQ ID NO: 197498 - RNA, 1701 nt, Artificial Sequence
  derived and/or modified CDS sequence (opt5) from hemagglutinin__InfluenzaA__ADL28000
augaagaccaucauugcccugagcuacauccucugccugguguucgcucagaaacuucccggcaacgacaauuccacagccacgcugugucucgggcaccaugcggucccuaacggaaccaugguuaagacaauuaccaaugaucaaaucgaggugacaaacgcuaccgaacuggugcagucuagcuccacaggcgagauuugcgacucuccgcaccagauccuugaugggaaaaauuguacccugaucgacgcccuccugggagauccccagugcgacggcuuucaaaacaagaaaugggaucuguucgucgaaagaagcaaggccuauuccaauuguuacccuuaugacgugcccgauuacgcuucucuccggagccugguugccuccagcgggacgcuugaguuuaacaaugaaucuuucaacuggaccggagugacacagaauggcaccuccagcgcuugcauucgcagaucuaagaacuccuuuuucagccggcugaauuggcucacacaucugaacuuuaaauauccugcccuuaaugucaccaugcccaacaacgagcaguucgacaagcuguacaucuggggcgugcaccauccugggacggauaaagaccagauuuuucucuaugcgcaagccucugagcgcaucacaguuuccaccaagagaagccagcagacagugauuccgaauaucggaucccggccccgcgucagaaacauuccuucucggaucagcaucuacuggaccauugugaaacccggcgauauccugcugauuaauuccaccgggaaccucaucgcuccucgcggauacuucaagauuagaagcggcaagucuuccaucaugcggagcgacgcccccaucgggaaauguaauucugaaugcauuacaccgaacggaagcaucccuaaugacaagcccuuucagaacgugaaucgcauuacguauggcgcuuguccuagauacgucaaacaauccacccugaagcuggccacaggcaugcggaacguucccgagaaacagacccgcgggaucuucggagcgauugccggcuuuaucgaaaaugggugggagggaaugguggauggcugguauggguucagacaccagaacucugagggacggggccaagcugccgaccuuaagagcacacaggcugccaucgaucagauuaauggcaaacucaacagacugaucgggaagaccaaugaaaaguuccaccagauugagaaagaauuuuccgagguggaaggacgcauccaagaccuugagaaguacgucgaggauacgaaaauugaccuguggagcuauaacgccgaacuccugguggcucuggagaaccagcauacaaucgaucucaccgacucugaaaugaauaagcuguucgagaaaaccaagaagcagcuucgggaaaacgcggaggauaugggcaaugggugcuuuaaaauuuaccacaagugugacaacgccugcaucggauccaucagaaauggcacauaugaucaugacguuuaccgcgacgaggcucugaacaaucgguuccagauuaaagggguggaacucaagagcggcuacaaagauuggauccuguggauuucuuuugccaucuccugcuuccuucugugugucgcccuccugggauuuauuaugugggcuugccaaaagggcaacaucagauguaauaucugcauuuga

SEQ ID NO: 197499 - RNA, 1701 nt, Artificial Sequence
  derived and/or modified CDS sequence (opt5) from hemagglutinin__InfluenzaA__ADL28011
augaagaccaucauugcccugagcuacauccucugccugguguucgcucagaaacuucccggcaacgacaauuccacagccacgcugugucucgggcaccaugcggucccuaacggaaccauuguuaagacaaucaccaaugaucaaauugaggugacaaacgcuaccgaacuggugcagucuagcuccacaggcgagaucugcgacucuccgcaccagauccuugauggggaaaauuguacccugauugacgcccuccugggagauccccagugcgacggcuuucaaaacaaaaagugggaucuguucgucgagagaagcaaagccuauuccaauuguuacccuuaugacgugcccgauuacgcuucucuccggagccugguugccuccagcgggacgcuugaauuuaacaaugagucuuucaacuggaccggagugacacagaauggcaccuccagcgcuugcauccgcagaucuaacaauuccuuuuucagccggcugaacuggcucacacaucugaaguuuaaguauccugcccuuaaugucaccaugcccaacaacgagcaguucgacaaacuguacauuuggggcgugcaccauccugggacggauaaugaccagaucuuucucuaugcgcaagccucuggacgcauuacaguuuccaccagacggagccagcagacagugaucccgaacauuggcucccgccccagaguccggaauaucccuucucgcaucagcauuuacuggaccaucgugaagcccggggauauucugcugaucaacuccaccggaaaucucauugcuccuagaggcuacuucaaaauccggagcgggaagucuuccaucaugcgcagcgacgcccccauuggaaaauguaacucugaaugcaucacaccgaauggcagcauuccuaacgacaagcccuuucagaaugugaacagaaucacguauggcgcuuguccucgguacgucaagcaaaauacccugaaacuugccacagggaugcgcaacguucccgagaagcagaccagaggaauuuucggcgcgaucgccggguuuaucgaaaauggaugggagggcaugguggaugggugguauggauuccggcaccagaacuccgagggcagaggccaagcugccgaccugaaaucuacacaggcugccauugaucagaucaaugggaagcucaaccgccugauuggaaaaaccaacgaaaaguuccaccagaucgagaaagaauuuagcgagguggaaggccggauucaagaccuugagaaguacgucgaggauacgaagaucgaccugugguccuauaaugccgaacuccugguggcucuggagaaccagcauacaauugaucucaccgacagcgaaaugaauaaacuguucgagaagaccaaaaagcagcuuagagaaaacgcggaggauauggggaauggaugcuuuaaaaucuaccacaagugugacaacgccugcaucggcucuauucgcaaugggacauaugaucaugacguuuaccgggacgaggcucugaacaauagauuccagaucaagggcguggaacucaaauccggauacaaggauuggauucuguggaucagcuuugccauuucuugcuuccuucugugugucgcccuccugggcuuuaucaugugggcuugccaaaaagggaacauccgcuguaauauuugcaucuga

SEQ ID NO: 197500 - RNA, 1701 nt, Artificial Sequence; identical to SEQ ID NO: 197423
  derived and/or modified CDS sequence (opt5) from hemagglutinin__InfluenzaA__ADL28022

SEQ ID NO: 197501 - RNA, 1701 nt, Artificial Sequence; identical to SEQ ID NO: 194506
  derived and/or modified CDS sequence (opt5) from hemagglutinin__InfluenzaA__ADL28033

SEQ ID NO: 197502 - RNA, 1701 nt, Artificial Sequence; identical to SEQ ID NO: 195685
  derived and/or modified CDS sequence (opt5) from hemagglutinin__InfluenzaA__ADL28044

SEQ ID NO: 197503 - RNA, 1701 nt, Artificial Sequence
  derived and/or modified CDS sequence (opt5) from hemagglutinin__InfluenzaA__ADL28055
augaagaccaucguggcccugagcuacauucucugccuggucuucgcucagaaacuucccggcaacgacaauuccacagccacgcugugucucgggcaccaugcgguuccuaacggaaccaucgugaagacaauuaccaaugaucaaaucgaggugacaaacgcuaccgaacugguccagucuagcuccacaggcgagauuugcgacucuccgcaccagauccuugauggggaaaauuguacccugaucgacgcccuccugggagauccccagugcgacggcuuucaaaacaaaaagugggaucuguucguggagagaagcaaagccuauuccaauuguuacccuuaugacguucccgauuacgcuucucuccggagccugguggccuccagcgggacgcuugaauuuaacaaugagucuuucaacuggaccggagucacacagaauggcaccuccagcgcuugcauucgcagaucuaacaauuccuuuuucagccggcugaacuggcucacacaucugaaguuuaaguauccugcccuuaaugugaccaugcccaacaacgagcaguucgacaaacuguacaucuggggcguucaccauccugggacggauaaugaccagauuuuucucuaugcgcaagccucuggacgcaucacaguguccaccaagagaagccagcagacagucauuccgaacaucggcucccggccccgcgugagaaauauuccuucucggaucagcaucuacuggaccauugugaaacccggggauauccugcugauuaacuccaccggaaaucucaucgcuccucgcggcuacuucaagauuagaagcgggaaaucuuccaucaugcggagcgacgcccccaucggaaaguguaacucugaaugcauuacaccgaauggcagcaucccuaacgacaagcccuuucagaaugucaaccgcauuacguauggcgcuuguccuagauacguuaaacaaaauacccugaaacuugccacagggaugcggaacgugcccgagaagcagacccgcggaaucuucggcgcgauugccggguuuaucgaaaauggaugggagggcaugguggaugggugguauggauucagacaccagaacuccgagggccggggccaagcugccgaccugaagucuacacaggcugccaucgaucagauuaaugggaaacucaacagacugaucggaaagaccaacgaaaaauuccaccagauugagaaggaauuuagcgaggucgaaggccgcauccaagaccuugagaaguacguggaggauacgaaaauugaccugugguccuauaaugccgaacuccugguugcucuggagaaccagcauacaaucgaucucaccgacagcgaaaugaauaagcuguucgagaaaaccaagaaacagcuucgggaaaacgcggaggauauggggaauggaugcuuuaagauuuaccacaagugugacaacgccugcaucggcucuaucagaaaugggacauaugaucaugacguguaccgcgacgaggcucugaacaaucgguuccagauuaaaggcgucgaacucaaguccggauacaaagauuggauccuguggauuagcuuugccaucucuugcuuccuucuguguguggcccuccugggcuuuauuaugugggcuugccaaaaggggaacaucagauguaauaucugcauuuga

SEQ ID NO: 197504 - RNA, 1701 nt, Artificial Sequence; identical to SEQ ID NO: 194506
  derived and/or modified CDS sequence (opt5) from hemagglutinin__InfluenzaA__ADL28066

SEQ ID NO: 197505 - RNA, 1701 nt, Artificial Sequence; identical to SEQ ID NO: 197423
  derived and/or modified CDS sequence (opt5) from hemagglutinin__InfluenzaA__ADL28077

SEQ ID NO: 197506 - RNA, 1701 nt, Artificial Sequence
  derived and/or modified CDS sequence (opt5) from hemagglutinin__InfluenzaA__ADL28088
augaagaccaucauugcccugagcuacauccucugccugguguucgcucagaaacuucccggcaacgacaauuccacagccacgcugugucucgggcaccaugcggucccuaacggaaccauuguuaagacaaucaccaaugaucaaauugaggugacaaacgcuaccgaacuggugcagucuagcuccacaggcgagaucugcgacucuccgcaccagauccuugauggggaaaauuguacccugauugacgcccuccugggagauccccagugcgacggcuuucaaaacaaaaagugggaucuguucgucgagagaagcaaagccuauuccaauuguuacccuuaugacgugcccgauuacgcuucucuccggagccugguugccuccagcgggacgcuugaauuuaacaaugagucuuucaacuggaccggagugacacagaauggcaccuccagcgcuugcauccgcagaucuaacaauuccuuuuucagccggcugaacuggcucacacaucugaaguuuaaguauccugcccuuaaugucaccaugcccaacaacgagcaguucgacaaacuguacauuuggggcgugcaccauccugggacggauaaugaccagaucuuucucuauucucaagcguccggacgcauuacaguuagcaccaagagaucccagcagacagugaucccgaacauuggcucucggccccgcgucagaaauaucccuagccggaucuccauuuacuggaccaucgugaaacccggggauauucugcugaucaacagcaccggaaaucucauugccccucgcggcuacuucaagaucagaucugggaaauccagcaucaugcggucugacgcucccauuggaaaguguaacagcgaaugcaucacaccgaauggcuccauuccuaacgacaagcccuuucagaaugugaaccgcaucacguauggcgccuguccuagauacgucaaacaaaauacccugaagcuggcuacagggaugcggaacguucccgagaaacagacccgcggaauuuucggcgccaucgcgggguuuaucgaaaauggaugggagggcaugguggaugggugguauggauucagacaccagaacucugagggccggggccaagccgcugaccuuaagagcacacaggccgcuauugaucagaucaaugggaaacucaacagacugauuggaaagaccaacgaaaaauuccaccagaucgagaaggaauuuuccgagguggaaggccgcauucaagaccuugagaaguacgucgaggauacgaaaaucgaccuguggagcuauaaugccgaacuccugguggcccuggagaaccagcauacaauugaucucaccgacucugaaaugaauaagcuguucgagaaaaccaagaaacagcuucgggaaaacgcugaggauauggggaauggaugcuuuaagaucuaccacaagugugacaacgcgugcaucggcuccauuagaaaugggacauaugaucaugacguuuaccgcgacgaggcccugaacaaucgguuccagaucaaaggcguggaacucaagagcggauacaaagauuggauucuguggaucucuuuugcuauuuccugcuuccuucugugugucgcccuccugggcuuuaucaugugggccugccaaaaggggaacaucagauguaauauuugcaucuga

SEQ ID NO: 197507 - RNA, 1701 nt, Artificial Sequence; identical to SEQ ID NO: 194506
  derived and/or modified CDS sequence (opt5) from hemagglutinin__InfluenzaA__ADL28099

SEQ ID NO: 197508 - RNA, 1701 nt, Artificial Sequence
  derived and/or modified CDS sequence (opt5) from hemagglutinin__InfluenzaA__ADL28110
augaagaccaucauugcccugagcuacauccucugccugguguucgcucagaaacuucccggcaacgacaauuccacagccacgcuguguauugggcaccaugcggucccuaacggaaccaucguuaagacaauuaccaaugaucaaaucgaggugacaaacgcuaccgaacucgugcaaaauucuagcacaggcgagaucugcgacuccccgcaccagauucuggaugggaaaaacuguacccuuaucgacgcccugcucggagauccccagugcgacggcuuucagaauaagaaaugggaucuguucgucgaaagaucuaaggccuauagcaacuguuacccuuaugacgugcccgauuacgcuucccugcggucucucguugccagcuccgggacgcuggaguuuaauaacgaaucuuucaauuggaccggagugacacagaacggcaccucuuccgcuugcauucgcagaagcaagaauagcuuuuucucccggcuuaacuggcugacacaucucaauuuuaaauauccugcccugaacgucaccaugcccaacaaugagcaguucgacaaacuuuacaucuggggcgugcaccauccugggacggauaaagaccagauuuuucuguaugcgcaagccagcggacgcaucacaguuucuaccaagagaucccagcagacagcuauuccgaacaucggcagccggccccgcgugagaaauaucccuucccggauuucuaucuacuggaccauugucaaacccggggauauccuccugauuaacagcaccggaaaucugaucgccccucgcggcuacuucaagaucagauccggaaagagcucuauuaugcgguccgacgcucccaucgacaaauguaacagcgagugcauuacaccgaaugggucuaucccuaacgauaagcccuuucagaaugugaaccgcauuacguauggcgccuguccuagauacgugaaacaaaauacccucaagcuggcgacaggcaugcggaacguccccgaaaaacagacccgcgggaucuucggagccaucgcuggcuuuauugagaaugggugggaaggaaugguugacggcugguauggguucagacaccagaacagcgagggacggggccaagccgcugaucuuaaguccacacaggccgccaucgaccagauuaauggcaaacugaacagacucaucgggaagaccaacgagaaguuccaccagauugaaaaagaguuuucugaaguggagggacgcauccaagaucuggaaaaguacguggaggacacgaaaauugaucuuuggagcuauaaugcugagcugcucgucgcgcuggaaaaccagcauacaaucgaccugaccgauuccgagaugaauaaacucuucgaaaagaccaagaagcagcugcgggagaacgccgaagacaugggcaaugggugcuuuaagaucuaccacaagugugauaacgcuugcauuggaagcaucagaaauggcacauaugaccaugacguguaccgcgaugaggcccuuaacaaucgguuccagauuaaagggguugagcugaagucuggcuacaaagacuggauccucuggauuuccuuugccaucagcugcuuccugcuuuguguggcucugcucggauuuaucaugugggccugccaaaagggcaacauuagauguaauaucugcauuuga

SEQ ID NO: 197509 - RNA, 1701 nt, Artificial Sequence
  derived and/or modified CDS sequence (opt5) from hemagglutinin__InfluenzaA__ADL28126
augaagaccaucauugcccugagcuacauccucugccugguguucgcucagaaacuucccggcaacgacaauuccacagccacgcugugucucgggcaccaugcggucccuaacggaaccauuguuaagacaaucaccaaugaucaaauugaggugacaaacgcuaccgaacuggugcagucuagcuccacaggcgagaucugcgacucuccgcaccagauccuugauggggaaaauuguacccugauugacgcccuccugggagauccccagugcgacggcuuucaaaacaaaaagugggaucuguucgucgagagaagcaaagccuauuccaauuguuacccuuaugacgugcccgauuacgcuucucuccggagccugguugccuccagcgggacgcuugaauuuaacaaugagucuuucaacuggaccggagugaaucagaacggcacauccagcgcuugcauccgcagaucuaauaacuccuuuuucagccggcugaauuggcucacccaucugaaguuuaaguauccugcccuuaacgucacaaugcccaacaaugagcaguucgacaaacuguacauuuggggcgugcaccauccugggaccgauaacgaccagaucuuucucuaugcgcaagccucuggacgcauuacgguuuccacaaagagaagccagcagaccgugaucccgaauauuggcucccggccccgcgucagaaacaucccuucucggaucagcauuuacuggacaaucgugaaacccggggauauucugcugaucaauuccaccggaaaccucauugcuccucgcggcuacuucaagaucagaagcgggaaaucuuccaucaugcggagcgacgcccccauuggaaaguguaauucugaaugcaucaccccgaacggcagcauuccuaaugacaagcccuuucagaacgugaaucgcaucacauauggcgcuuguccuagauacgucaaacaaaacacgcugaaacuugccaccgggaugcggaauguucccgagaagcagacacgcggaauuuucggcgcgaucgccggguuuaucgaaaacggaugggagggcaugguggaugggugguauggauucagacaccaaaauuccgagggccggggccaggcugccgaccugaagucuacccaggcugccauugaucagaucaacgggaaacucaacagacugauuggaaagacaaaugaaaaauuccaccagaucgagaaggaauuuagcgagguggaaggccgcauucaagaccuugagaaguacgucgaggauaccaaaaucgaccugugguccuauaacgccgaacuccugguggcucuggagaaucagcauacgauugaucucacagacagcgaaaugaacaagcuguucgagaaaaccaagaaacagcuucgggaaaaugcggaggauauggggaacggaugcuuuaagaucuaccacaagugugacaaugccugcaucggcucuauuagaaacgggaccuaugaucaugacguuuaccgcgacgaggcucugaauaaccgguuccagaucaaaggcguggaacucaaguccggauacaaagauuggauucuguggaucagcuuugccauuucuugcuuccuucugugugucgcccuccugggcuuuaucaugugggcuugccaaaaggggaauaucagauguaacauuugcaucuga

SEQ ID NO: 197510 - RNA, 1701 nt, Artificial Sequence
  derived and/or modified CDS sequence (opt5) from hemagglutinin__InfluenzaA__ADL28137
augaagaccaucauugcccugagcuacauccucugccugguguccgcucagaaacuucccggcaacgacaauucuacagccacgcugugucucgggcaccaugcggucccuaacggaaccauuguuaagacaaucaccaaugaucaaauugaggugacaaacgcuaccgaacuggugcagagcuccucuacaggcgagaucugcgacgggccgcaccagauccuugauggagaaaauuguacccugauugacgcccuccugggcgauccccagugcgacggguuccaaaacaaaaagugggaucuguuugucgagagaagcaaagccuauuccaauuguuacccuuaugacgugcccgauuacgcuucucuccggagccugguugccuccagcggaacgcuugaguucaacaaugaaucuuuuaacuggaccggcgugacacagaauggcaccuccagcgcuugcauccgcagaucuaacaauuccuucuuuagccggcugaacuggcucacacaucugaaguucaaguauccugcccuuaaugucaccaugcccaacaacgagcaguuugacaaacuguacauuuggggagugcaccauccugggacggauaaugaccagaucuuccucuaugcgcaagccucuggccgcauuacaguuuccaccaagagaagccagcagacagugaucccgaacauugggucccggccccgcgucagaaauaucccuucucggaucagcauuuacuggaccaucgugaaacccggagauauucugcugaucaacuccaccggcaaucucauugcuccucgcggguacuuuaagaucagaagcggaaaaucuuccaucaugcggagcgacgcccccauuggcaaguguaacucugaaugcaucacaccgaauggcagcauuccuaacgacaagcccuuccagaaugugaaccgcaucacguauggggcuuguccuagauacgucaaacaaaauacccugaaacuugccacaggaaugcggaacguucccgagaagcagacccgcggcauuuuuggggcgaucgccggauucaucgaaaauggcugggaggggaugguggauggaugguauggcuuuagacaccagaacuccgagggccgggggcaagcugccgaccugaagucuacacaggcugccauugaucagaucaauggaaaacucaacagacugauuggcaagaccaacgaaaaauuccaccagaucgagaaggaguucagcgaaguggaagggcgcauucaagaccuugagaaguacgucgaggauacgaaaaucgaccugugguccuauaaugccgaacuccugguggcucuggagaaccagcauacaauugaucucaccgacagcgaaaugaauaagcuguuugagaaaaccaagaaacagcuucgggaaaacgcggaggauaugggaaauggcugcuucaagaucuaccacaagugugacaacgccugcaucgggucuauuagaaauggcacauaugaucaugacguuuaccgcgacgaggcucugaacaaucgguuucagaucaaaggaguggaacucaaguccggcuacaaagauuggauucuguggaucagcuucgccauuucuugcuuucuucugugugucgcccuccugggguucaucaugugggcuugccaaaagggaaacaucagauguaauauuugcaucuga

SEQ ID NO: 197511 - RNA, 1701 nt, Artificial Sequence; identical to SEQ ID NO: 194506
  derived and/or modified CDS sequence (opt5) from hemagglutinin__InfluenzaA__ADL28148

SEQ ID NO: 197512 - RNA, 1701 nt, Artificial Sequence; identical to SEQ ID NO: 197423
  derived and/or modified CDS sequence (opt5) from hemagglutinin__InfluenzaA__ADL28170

SEQ ID NO: 197513 - RNA, 1701 nt, Artificial Sequence; identical to SEQ ID NO: 194506
  derived and/or modified CDS sequence (opt5) from hemagglutinin__InfluenzaA__ADL28181

SEQ ID NO: 197514 - RNA, 1701 nt, Artificial Sequence; identical to SEQ ID NO: 197418
  derived and/or modified CDS sequence (opt5) from hemagglutinin__InfluenzaA__ADL28192

SEQ ID NO: 197515 - RNA, 1701 nt, Artificial Sequence; identical to SEQ ID NO: 197424
  derived and/or modified CDS sequence (opt5) from hemagglutinin__InfluenzaA__ADL28203

SEQ ID NO: 197516 - RNA, 1701 nt, Artificial Sequence; identical to SEQ ID NO: 195483
  derived and/or modified CDS sequence (opt5) from hemagglutinin__InfluenzaA__ADL28214

SEQ ID NO: 197517 - RNA, 1701 nt, Artificial Sequence
  derived and/or modified CDS sequence (opt5) from hemagglutinin__InfluenzaA__ADL28225
augaagaccaucauugcccugagcuacauccucugccugguguucgcucagaaacuucccggcaacgacaauuccacagccacgcugugucucgggcaccaugcggucccuaacggaaccauuguuaagacaaucaccaaugaucaaauugaggugacaaacgcuaccgaacuggugcagucuagcuccacaggcgagaucugcgacucuccgcaccagauccuugauggggaaaauuguacccugauugacgcccuccugggagauccccagugcgacggcuuucaaaacaaaaagugggaucuguucgucgagagaagcaaagccuauuccaauuguuacccuuaugacgugcccgauuacgcuucucuccggagccugguugccuccagcgggacgcuugaauuuaacaaugagucuuucaacuggaccggagugacacagaauggcaccuccagcgcuugcauccgcagaucuaacaauuccuuuuucagccggcugaacuggcucacacaucugaaguuuaaguauccugcccuuaaugucaccaugcccaacaacgagcaguucgacaaacuguacauuuggggcgugcaccauccugggacggauaaugaccagaucuuucucuauucucaagcguccggacgcauuacaguuagcaccaagagaucccagcagacagugaucccgaacauuggcucucggccccgcgucagaaauaucccuagccggaucuccauuuacuggaccaucgugaaacccggggauauucugcugaucaacagcaccggaaaucucauugccccucgcggcuacuucaagaucagaucugggaaauccagcaucaugcggucugacgcucccauuggaaaguguaacagcgaaugcaucacaccgaauggcuccauuccuaacgacaagcccuuucagaaugugaaccgcaucacguauggcgccuguccuagauacgucaaacaaaauacccugaagcuggcuacagggaugcggaacguucccgagaaacagacccgcggaauuuucggcgccaucgcgggguuuaucgaaaauggaugggagggcaugguggaugggugguauggauucagacaccagaacucugagggccggggccaagccgcugaccuuaagagcacacaggccgcuauugaucagaucaaugggaaacucaacagacugauuggaaagaccaacgaaaaauuccaccagaucgagaaggaauuuuccgagguggaaggccgcauucaagaccuugagaaguacgucgaggauacgaaaacagaccuguggagcuauaaugccgaacuccugguggcccuggagaaccagcauaccaucgaucucaccgacucugaaaugaauaagcuguucgagaaaacaaagaaacagcuucgggaaaacgcugaggauauggggaauggaugcuuuaagauuuaccacaagugugacaacgcgugcaucggcuccaucagaaaugggaccuaugaucaugacguuuaccgcgacgaggcccugaacaaucgguuccagauuaaaggcguggaacucaagagcggauacaaagauuggauccuguggauuucuuuugcuaucuccugcuuccuucugugugucgcccuccugggcuuuauuaugugggccugccaaaaggggaacaucagauguaauaucugcauuuga

SEQ ID NO: 197518 - RNA, 1701 nt, Artificial Sequence; identical to SEQ ID NO: 197423
  derived and/or modified CDS sequence (opt5) from hemagglutinin__InfluenzaA__ADL28236

SEQ ID NO: 197519 - RNA, 1701 nt, Artificial Sequence; identical to SEQ ID NO: 194506
  derived and/or modified CDS sequence (opt5) from hemagglutinin__InfluenzaA__ADL28247

SEQ ID NO: 197520 - RNA, 1701 nt, Artificial Sequence; identical to SEQ ID NO: 197436
  derived and/or modified CDS sequence (opt5) from hemagglutinin__InfluenzaA__ADL28258

SEQ ID NO: 197521 - RNA, 1701 nt, Artificial Sequence; identical to SEQ ID NO: 194506
  derived and/or modified CDS sequence (opt5) from hemagglutinin__InfluenzaA__ADL28370

SEQ ID NO: 197522 - RNA, 1701 nt, Artificial Sequence; identical to SEQ ID NO: 194741
  derived and/or modified CDS sequence (opt5) from hemagglutinin__InfluenzaA__ADL29672

SEQ ID NO: 197523 - RNA, 1701 nt, Artificial Sequence; identical to SEQ ID NO: 194983
  derived and/or modified CDS sequence (opt5) from hemagglutinin__InfluenzaA__ADL29682

SEQ ID NO: 197524 - RNA, 1701 nt, Artificial Sequence; identical to SEQ ID NO: 194741
  derived and/or modified CDS sequence (opt5) from hemagglutinin__InfluenzaA__ADL29692

SEQ ID NO: 197525 - RNA, 1701 nt, Artificial Sequence
  derived and/or modified CDS sequence (opt5) from hemagglutinin__InfluenzaA__ADL29702
augaaggccauccuggugguccuccuguacaccuucgcuacagccaacgcggacacgcuuugcauuggcuaucacgcuaauaacagcaccgauacaguugacaccgugcuggagaagaaugugacagucacccauuccgugaaccuccuggaagauaagcacaaugggaaacuuuguaagcugagaggaguugcuccccuccaucugggcaaaugcaacaucgccggguggauucugggaaauccugagugugaaucucucagcacagccuccucuuggagcuacaucguggagaccuccucuagcgacaacggcacgugcuauccgggggauuuuauugacuacgaagaacugcgggagcagcuuuccagcgucucuuccuucgaacgcuuugagaucuuccccaagaccagcucuuggccuaaucacgauuccaacaagggagugacagccgcuuguccccaugccggcgcgaaaucuuuuuauaagaaucugaucuggcucguuaaaaagggcaacagcuacccuaaacuguccaagagcuauauuaaugacaaggggaaagaagugcuuguccuguggggaauccaccaccccuccaccucugccgaucaacagagccucuaccagaacgcugacacauacguguucgugggcaccuccagauauagcaagaaauuuaagccugagauugccauccggccgaaaguccgcgaucaggaggggagaaugaauuacuauuggacgcugguugaacccggagacaagauuacauucgaggcuaccggcaaccugguggugccucgguacgccuuugcgauggaacgcaacgccgggucuggaaucauuaucuccgauacacccguccaugacugcaauaccaccugucaaacaccuaaaggcgcuaucaacacgagccuccccuuccagaauauucacccgaucaccauuggcaagugcccuaaguaugugaaaucuacaaagcugagacuugccaccgggcugcggaacguucccagcauccagucccgcggacucuuuggcgcuauugccggguucaucgagggaggcuggacagggaugguggacggaugguacggcuaucaucaccagaaugaacaaggcucuggguacgccgcugaucugaaaagcacccagaacgcgaucgacgagauuacgaauaaggucaacuccgugaucgagaaaaugaauacacaguuuaccgccguuggaaaggaguucaaccaccuugagaagagaauugaaaaucugaacaaaaagaucgaugacggcuuccucgauauuuggaccuacaaugcugagcugcuggugcuccuggaaaacgagcggacacuugacuaucaugauagcaaugucaaaaaccuguacgagaaggugcgcaaccagcucaaaaauaacgccaaggaaaucgggaauggauguuuugaguucuaucacaagugcgacaacaccuguauggaaucugucaaaaauggcacauacgauuauccuaaguacuccgaggaagccaaacugaacagagaggagaucgacggggugaaacuugaaagcacgcggauuuaucaaauccuggcuauuuacucuaccguugccuccagccucgugcuggucgugucccugggcgcgaucucuuuuuggaugugcagcaauggaucccuccagugccgcauuuguaucuga

SEQ ID NO: 197526 - RNA, 1701 nt, Artificial Sequence; identical to SEQ ID NO: 194741
  derived and/or modified CDS sequence (opt5) from hemagglutinin__InfluenzaA__ADL29730

SEQ ID NO: 197527 - RNA, 1701 nt, Artificial Sequence; identical to SEQ ID NO: 194741
  derived and/or modified CDS sequence (opt5) from hemagglutinin__InfluenzaA__ADL29740

SEQ ID NO: 197528 - RNA, 1701 nt, Artificial Sequence; identical to SEQ ID NO: 194741
  derived and/or modified CDS sequence (opt5) from hemagglutinin__InfluenzaA__ADL29750

SEQ ID NO: 197529 - RNA, 1701 nt, Artificial Sequence
  derived and/or modified CDS sequence (opt5) from hemagglutinin__InfluenzaA__ADL29760
augaaggccauccuggugguccuccuguacaccuucgcuacagccaacgcggacacgcuuugcauuggcuaucacgcuaauaacagcaccgauacaguugacaccgugcuggagaagaaugugacagucacccauuccgugaaccuccuggaauacaagcacaaugggaaacuuuguaagcugagaggaguugcuccccuccaucugggcaaaugcaacaucgccggguggauucugggaaauccugagugugaaucucucagcacagccuccucuuggagcuauaucguggagaccuccucuagcgauaacggcacgugcuacccgggggacuuuauugauuaugaagaacugcgggagcagcuuuccagcgucucuuccuucgaacgcuuugagaucuuccccaagaccagcucuuggccuaaucacgacuccaacaagggagugacagccgcuuguccccaugccggcgcgaaaucuuuuuacaagaaucugaucuggcucguuaaaaagggcaacagcuauccuaaacuguccaagagcuacauuaaugauaaggggaaagaagugcuuguccuguggggaauccaccaccccuccaccucugccgaccaacagagccucuaccagaacgcugaugccuauguguucgugggcacauccagauacagcaagaaauuuaagccugagauugcuauccggccgaaaguccgcgaccaggaggggagaaugaauuauuacuggacccugguugaacccggagauaagauuacguucgaggccacaggcaaccugguggugccucgguaugcguuugccauggaacgcaacgcugggucuggaaucauuaucuccgacacccccguccaugauugcaauacaaccugucaaaccccuaaaggcgccaucaacacaagccuccccuuccagaauauucacccgaucacgauuggcaagugcccuaaguacgugaaaucuaccaagcugagacuugcuacagggcugcggaacguucccagcauccagucccgcggacucuuuggcgccauugccggguucaucgagggaggcuggaccgggaugguggacggaugguauggcuaccaucaccagaaugaacaaggcucuggguacgcugcggaccugaaaagcacacagaacgccaucgaugagauuaccaauaaggucaacuccgugaucgagaaaaugaauacgcaguuuacagcuguuggaaaggaguucaaccaccuugagaagagaauugaaaaucugaacaaaaagguggacgauggcuuccucgacaucuggaccuauaaugccgagcugcugguccuccuggaaaacgagcggacccuugauuaccaugacagcaaugugaaaaaccuguaugagaagguccgcucucagcucaaaaacaaugccaaggaaauugggaacggauguuuugaguucuaccacaagugcgauaauacauguauggaauccgugaaaaacggcaccuaugacuacccuaaguauagcgaggaagcuaaacugaauagagaggagaucgaugggguuaaacuugaaucuacacggaucuaccaaauucuggccaucuacuccacgguggcgagcucccucguccuggugguuucucugggcgcuauuagcuuuuggaugugcuccaacggaucucuccagugccgcaucuguauuuga

SEQ ID NO: 197530 - RNA, 1701 nt, Artificial Sequence; identical to SEQ ID NO: 194741
  derived and/or modified CDS sequence (opt5) from hemagglutinin__InfluenzaA__ADL29770

SEQ ID NO: 197531 - RNA, 1701 nt, Artificial Sequence; identical to SEQ ID NO: 196241
  derived and/or modified CDS sequence (opt5) from hemagglutinin__InfluenzaA__ADL29780

SEQ ID NO: 197532 - RNA, 1701 nt, Artificial Sequence
  derived and/or modified CDS sequence (opt5) from hemagglutinin__InfluenzaA__ADL29879
augaaggccauccuggugguccuccuguacaccuucgcuacagccaacgcggacacgcuuugcauuggcuaucacgcuaauaacagcaccgauacaguugacaccgugcuggagaaaaaugugacagucacccauuccgugaaccuccuggaagauaagcacaaugggaaacuuuguaagcugagaggaguugcuccccuccaucugggcaaaugcaacaucgccggguggauucugggaaauccugagugugaaucucucagcacagccuccucuuggagcuacaucguggagaccuccucuagcgacaacggcacgugcuauccgggggauuuuauugacuacgaagaacugcgggagcagcuuuccagcgucucuuccuucgaacgcuuugagaucuuccccaagaccagcucuuggccuaaucacgauuccaacaagggagugacagccgcuuguccccaugccggcgcgaaaucuuuuuauaagaaucugaucuggcucguuaaaaagggcaacagcuacccuaaacuguccaagagcuauauuaaugacaaggggaaagaagugcuuguccuguggggaauccaccaccccuccaccucugccgaucaacagagccucuaccagaacgcugacuccuacguguucgugggcacaagcaaguauucuaaaaaguuuaaaccugagauugccaucagaccgaagguccgggaucaggaggggcgcaugaauuacuauuggacccugguugaacccggagacaaaauuacguucgaggcuacaggcaaccugguggugccuagauacgccuuugcgauggaacggaacgccggguccggaaucauuaucagcgauacccccguccaugacugcaauacaaccugucaaaccccuaagggcgcuaucaacacaucucuccccuuccagaauauucacccgaucacgauuggcaagugcccuaaauauguuaagagcaccaaacugcgccuugccacagggcugagaaacgugcccuccauccagucucggggacucuuuggcgcuauugccggguucaucgagggaggcuggaccgggaugguggacggaugguacggcuaucaucaccagaaugaacaaggcagcggguacgccgcugaucugaaguccacacagaacgcgaucgacgagauuaccaauaaagucaacagcgugaucgagaagaugaauacgcaguuuacagccguuggaaaggaguucaaccaccuugagaaacgcauugaaaaucugaacaagaaaguggaugacggcuuccucgauaucuggaccuacaaugcugagcugcugguccuccuggaaaacgagagaacccuugacuaucaugauucuaaugugaagaaccuguacgagaaaguccggucccagcucaagaacaaugccaaggaaauugggaacggauguuuugaguucuaucacaaaugcgacaauacauguauggaaagcgugaagaacggcaccuacgauuauccuaaauacucugaggaagccaagcugaaucgcgaggagaucgacgggguuaaacuugaauccacaagaaucuaucaaauucuggcuaucuacagcacgguggccuccucucucguccuggugguuagccugggcgcgauuuccuuuuggaugugcucuaacggaagccuccagugccggaucuguauuuga

SEQ ID NO: 197533 - RNA, 1701 nt, Artificial Sequence
  derived and/or modified CDS sequence (opt5) from hemagglutinin__InfluenzaA__ADL32017
augaaggccauccuggugguccuccuguacaccuucgcuacagccaacgcggacacgcuuugcauuggcuaucacgcuaauaacagcaccgauacaguugacaccgugcuggagaaaaaugugacagucacccauuccgugaaccuccuggaagauaagcacaaugggaaacuuugucagcugagaggaguugcgccccuccaucugggcaagugcaacaucgccggguggauucugggaaauccugagugugaaucucucagcacagcuuccucuuggagcuacaucguggagaccuccucuagcgacaacggcacgugcuauccgggggauuuuauugacuacgaagaacugcgggagcaacuuuccagcgucucuuccuucgaacgcuuugagaucuuccccaaaaccagcucuuggccuaaucacgauuccaacaagggagugacagccgcuuguccccaugccggcgccaagagcuuuuauaaaaaucugaucuggcucguuaagaaaggcaacucuuacccuaagcuguccaaaagcuauauuaaugacaaggggaaggaagugcuuguccuguggggaauccaccaccccuccaccucugccgaucagcagagccucuaccagaacgcugacacauacguguucgugggcaccuccagauauagcaaaaaguuuaaaccugagauugccauccggccgaagguccgcgaucaagaggggagaaugaauuacuauuggacgcugguugaacccggagacaaaauuacauucgaggcuaccggcaaccugguggugccucgguacgccuuugcgauggaacgcaacgccgggucuggaaucauuaucuccgauacacccguccaugacugcaauaccaccugucagacaccuaagggcgcuaucaacacgagccuccccuuccagaauauucacccgaucaccauuggcaaaugcccuaaguaugugaagucuacaaaacugagacuugccaccgggcugcggaacguucccagcauccagucccgcggacucuuuggcgcuauugccggguucaucgagggaggcuggacagggaugguggacggaugguacggcuaucaucaccaaaaugaacagggcucuggguacgccgcugaucuuaagagcacccagaacgcgaucgacgagauuacgaauaaagucaacuccgugaucgagaagaugaauacacaguuuaccgccguuggaaaagaguucaaccaccuggagaagagaauugaaaaucugaacaagaaaaucgaugacggcuuccucgauauuuggaccuacaaugcugagcugcuggugcuccuggaaaacgagcggacacuugacuaucaugauagcaaugucaagaaccuguacgagaaagugcgcucucaacucaagaacaaugccaaagaaaucgggaacggauguuuugaguucuaucacaagugcgacaauaccuguauggaauccgucaagaacggcacauacgauuauccuaaauacagcgaggaagccaagcugaauagagaggagaucgacggggugaaacuugaaucuacgcggauuuaucagauccuggcuauuuacuccaccguugccagcucccucgugcuggucgugucucugggcgcgaucagcuuuuggaugugcuccaacggaucucuccagugccgcauuuguaucuga

SEQ ID NO: 197534 - RNA, 1701 nt, Artificial Sequence
  derived and/or modified CDS sequence (opt5) from hemagglutinin__InfluenzaA__ADL32037
augaaggccauccuggugguccuccuguacaccuucgcuacagccaacgcggacacgcuuugcauuggcuaucacgcuaauaacagcaccgauacaguugacaccgugcuggagaagaaugugacagucacccauuccgugaaccuccuggaagauaagcacaaugggaaacuuuguaagcugagaggaguugcuccccuccaucugggcaaaugcaacaucgccggguggauucugggaaauccugagugugaaucucucagcacagccuccucuuggagcuacaucguggagaccuccucuagcgacaacggcacgugcuauccgggggauuuuauugacuacgaagaacugcgggagcagcuuuccagcgucucuuccuucgaacgcuuugagaucuuccccaagaccagcucuuggccuaaucacgauuccaacaagggagugacagccgcuuguccccaugccggcgcgaaaucuuuuuauaagaaucugaucuggcucguuaaaaagggcaacagcuacccuaaacuguccaagagcuauauuaaugacaaggggaaagaagugcuuguccuguggggaauccaccaccccuccaccucuguggaucaacagagccucuaccagaacgccgacgcuuacguguucgucggcacauccagauauagcaagaaauuuaagccugagauugccauccggccgaaaguucgcgaucaggaggggagaaugaauuacuauuggacccugguggaacccggagacaagauuacguucgaggcuacaggcaaccugguggucccucgguacgccuuugcgauggaacgcaacgccgggucuggaaucauuaucuccgauacccccgugcaugacugcaauacaaccugucaaaccccuaaaggcgcuaucaacacaagccuccccuuccagaauauucacccgaucacgauuggcaagugcccuaaguauguuaaaucuaccaagcugagacuugccacagggcugcggaacgugcccagcauccagucccgcggacucuuuggcgcuauugccggguucaucgagggaggcuggaccgggauggucgacggaugguacggcuaucaucaccagaaugaacaaggcucuggguacgccgcugaucugaaaagcacacagaacgcgaucgacgagauuaccaauaaggugaacuccguuaucgagaaaaugaauacgcaguuuacagccgugggaaaggaguucaaccaccuugagaagagaauugaaaaucugaacaaaaaggucgaugacggcuuccucgauaucuggaccuacaaugcugagcugcuggugcuccuggaaaacgagcggacccuugacuaucaugauagcaaugucaaaaaccuguacgagaaggugcgcucucagcucaaaaacaaugccaaggaaauugggaacggauguuuugaguucuaucacaagugcgacaauacauguauggaauccguuaaaaacggcaccuacgauuauccuaaguacagcgaggaagccaaacugaauagagaggagaucgacggggugaaacuugaaucuacacggaucuaucaaauucuggcuaucuacuccacggucgccagcucccucgugcugguugugucucugggcgcgauuagcuuuuggaugugcuccaacggaucucuccagugccgcaucuguauuuga

SEQ ID NO: 197535 - RNA, 1701 nt, Artificial Sequence; identical to SEQ ID NO: 194741
  derived and/or modified CDS sequence (opt5) from hemagglutinin__InfluenzaA__ADL32047

SEQ ID NO: 197536 - RNA, 1701 nt, Artificial Sequence
  derived and/or modified CDS sequence (opt5) from hemagglutinin__InfluenzaA__ADL32057
augaaggccauccuggugguccuccuguacaccuucgcuacagccaacgcggacacgcuuugcauuggcuaucacgcuaauaacagcaccgauacaguugacaccgugcuggagaagaaugugacagucacccauuccgugaaccuccuggaagauaagcacaaugggaaacuuuguaagcugagaggaguugcuccccuccaucugggcaaaugcaacaucgccggguggauucugggaaauccugagugugaaucucucagcacagccuccucuuggagcuacaucguggagaccuccucuagcgacaacggcacgugcuauccgggggauuuuauugacuacgaggagcugcgggagcagcuuuccagcgucucuuccuucgaacgcuuugagaucuuccccaagaccagcucuuggccuaaucacgauuccaacaagggagugacagccgcuuguccccaugccggcgcgaaaucuuuuuauaagaaucugaucuggcucguuaaaaagggcaacagcuacccuaaacuguccaagagcuauauuaaugacaaggggaaagaagugcuuguccuguggggaauccaccaccccuccaccucugccgaucaacagggccucuaccagaacgcugacgccuacguguucguggggacaagcagauauuccaagaaauuuaagccugagauugcuauccggccgaaaguccgcgaucaggagggaagaaugaauuacuauuggacccugguugaacccggcgacaagauuacguucgaggccacagggaaccugguggugccucgguacgcguuugccauggaacgcaacgcuggaagcggcaucauuaucucugauacccccguccaugacugcaauacaaccugucaaaccccuaaaggcgccaucaacacaucccuccccuuccagaauauucacccgaucacgauugggaagugcccuaaguaugugaaaggaaccaagcugagacuugcuacaggccugcggaacguucccagcauccagucucgcgggcucuuuggagccauugccggcuucaucgaagggggauggaccggcaugguggacggcugguacggguaucaucaccagaaugaacaaggaagcggcuacgcugcggaucugaaauccacacagaacgccaucgacgagauuaccaauaaggucaacucugugaucgagaaaaugaauacgcaguuuacagcuguugggaaggaguucaaccaccuugaaaagagaauugaaaaucugaacaaaaagguggaugacggauuccucgauaucuggaccuacaaugccgagcugcugguccuccuggaaaacgagcggacccuugacuaucaugauagcaaugugaaaaaccuguacgagaagguccgcucccagcucaaaaacaaugccaaggaaauuggcaacggguguuuugaguucuaucacaagugcgacaauacauguauggaaagcgugaaaaacggcaccuacgauuauccuaaguacucugaggaagcuaaacugaauagagaggagaucgacggaguuaaacuugaauccacacggaucuaucaaauucuggccaucuacagcacgguggcgucuucccucguccuggugguuagccugggcgcuauuuccuuuuggaugugcucuaacgggagccuccagugccgcaucuguauuuga

SEQ ID NO: 197537 - RNA, 1701 nt, Artificial Sequence; identical to SEQ ID NO: 194741
  derived and/or modified CDS sequence (opt5) from hemagglutinin__InfluenzaA__ADL32090

SEQ ID NO: 197538 - RNA, 1701 nt, Artificial Sequence; identical to SEQ ID NO: 194741
  derived and/or modified CDS sequence (opt5) from hemagglutinin__InfluenzaA__ADL32114

SEQ ID NO: 197539 - RNA, 1701 nt, Artificial Sequence; identical to SEQ ID NO: 194741
  derived and/or modified CDS sequence (opt5) from hemagglutinin__InfluenzaA__ADL32344

SEQ ID NO: 197540 - RNA, 1701 nt, Artificial Sequence; identical to SEQ ID NO: 195188
  derived and/or modified CDS sequence (opt5) from hemagglutinin__InfluenzaA__ADL32354

SEQ ID NO: 197541 - RNA, 1701 nt, Artificial Sequence
  derived and/or modified CDS sequence (opt5) from hemagglutinin__InfluenzaA__ADL32364
augaaggccauccuggugguccuccuguacaccuucgcuacagccaacgcggacacgcuuugcauuggcuaucacgcuaauaacagcaccgauacaguugacaccgugcuggagaagaaugugacagucacccauuccgugaaccuccuggaagauaagcacaaugggaaacuuuguaagcugagaggaguugcuccccuccaucugggcaaaugcaacaucgccggguggauucugggaaauccugagugugaaucucucagcacagccaucuccuggucuuacauuguggagaccagcuccucugacaacggcacgugcuauccgggggauuuuaucgacuacgaagaacugcgggagcagcuuagcuccgucagcucuuucgaacgcuuugagaucuuccccaagaccuccagcuggccuaaucacgauucuaacaagggagugacagccgcuuguccccaugccggcgcgaaauccuuuuauaagaaucugauuuggcucguuaaaaagggcaacagcuacccuaaacugucuaaguccuauaucaaugacaaggggaaagaagugcuuguccuguggggcauucaccaccccagcaccuccgccgaucaacagucucucuaccagaacgcugacacauacguguucgugggaaccagcagauauuccaagaaauuuaagccugagaucgccauucggccgaaaguccgcgaucaggaggggagaaugaauuacuauuggacgcugguugaacccggagacaagaucacauucgaggcuaccggcaaccugguggugccucgguacgccuuugcgauggaacgcaacgccgggagcggaauuaucaucucugauacacccguccaugacugcaauaccaccugucaaacaccuaaaggcgcuauuaacacgucccuccccuuccagaauauccacccgauuaccaucggcaagugcccuaaguaugugaaaagcacaaagcugagacuugccaccgggcugcggaacguucccucuauucagagccgcggacucuuuggcgcuaucgccggguucaucgagggaggcuggacagggaugguggacggaugguacggcuaucaucaccagaaugaacaaggcuccggguacgccgcugaucugaaaucuacccagaacgcgauugacgagaucacgaauaaggucaacagcgugauugagaaaaugaauacacaguuuaccgccguuggaaaggaguucaaccaccuugagaagagaaucgaaaaucugaacaaaaagauugaugacggcuuccucgauaucuggaccuacaaugcugagcugcuggugcuccuggaaaacgagcggacacuugacuaucaugauuccaaugucaaaaaccuguacgagaaggugcgcagccagcucaaaaacaaugccaaggaaaucgggaacggauguuuugaguucuaucacaagugcgacaauaccuguauggaaucugucaaaaacggcacauacgauuauccuaaguacuccgaggaagccaaacugaauagagaggagauugacggggugaaacuugaaagcacgcggaucuaucaaauucuggcuaucuacucuaccguugccuccagccucgugcuggucgugucccugggcgcgauuucuuuuuggaugugcagcaacggaucccuccagugccgcaucuguauuuga

SEQ ID NO: 197542 - RNA, 1701 nt, Artificial Sequence; identical to SEQ ID NO: 194741
  derived and/or modified CDS sequence (opt5) from hemagglutinin__InfluenzaA__ADL32374

SEQ ID NO: 197543 - RNA, 1701 nt, Artificial Sequence
  derived and/or modified CDS sequence (opt5) from hemagglutinin__InfluenzaA__ADL32384
augaaggccauccuggugguccuccuguacaccuucgcuacagccacggcggacacccuuugcauuggcuaucacgcuaacaauagcacagauaccguugacacagugcuggagaagaacgugaccgucacacauuccgugaaucuccuggaagauaagcacaacgggaaacuuuguaagcugagaggaguugcuccccuccaucugggcaaaugcaauaucgccggguggauucugggaaacccugagugugaaucucucagcaccgccuccucuuggagcuacaucguggagacguccucuagcgacaaugggaccugcuauccgggcgauuuuauugacuacgaagaacugcgggagcagcuuuccagcgucucuuccuucgaacgcuuugagaucuuccccaagacaagcucuuggccuaaccacgauuccaauaagggagugaccgccgcuuguccccaugccggcgcgaaaucuuuuuauaagaaccugaucuggcucguuaaaaagggcaauagcuacccuaaacuguccaagagcuauauuaacgacaaggggaaagaagugcuuguccuguggggaauccaccaccccuccacaucugccgaucaacagagccucuaccagaaugcugacgccuacguguucgugggcaccuccagauauagcaagaaauuuaagccugagauugcuauccggccgaaaguccgcgaucaggaggggagaaugaacuacuauuggacgcugguugaacccggagacaagauuacauucgaggccaccggcaaucugguggugccucgguacgcguuugccauggaacgcaacgcugggucuggaaucauuaucuccgauacacccguccaugacugcaacaccaccugucaaacaccuaaaggcgccaucaauacgagccuccccuuccagaacauucacccgaucaccauuggcaagugcccuaaguaugugaaaucuacaaagcugagacuugcuaccgggcugcggaauguucccagcauccagucccgcggacucuuuggcgccauugccggguucaucgagggaggcuggacagggaugguggacggaugguacggcuaucaucaccagaacgaacaaggcucuggguacgcugcggaucugaaaagcacccagaaugccaucgacgagauuacgaacaaggucaauuccgugaucgagaaaaugaacacacaguuuaccgcuguuggaaaggaguucaaucaccuugagaagagaauugaaaaccugaauaaaaagguggaugacggcuuccucgauaucuggaccuacaacgccgagcugcugguccuccuggaaaaugagcggacacuugacuaucaugauagcaacgugaaaaaucuguacgagaagguccgcucucagcucaaaaacaacgccaaggaaauugggaauggauguuuugaguucuaucacaagugcgacaacaccuguauggaauccgugaaaaauggcacauacgauuauccuaaguacagcgaggaagcuaaacugaacagagaggagaucgacgggguuaaacuugaaucuacgcggaucuaucaaauucuggccaucuacuccaccguggcgagcucccucguccuggugguuucucugggcgcuauuagcuuuuggaugugcuccaauggaucucuccagugccgcaucuguauuuga

SEQ ID NO: 197544 - RNA, 1701 nt, Artificial Sequence
  derived and/or modified CDS sequence (opt5) from hemagglutinin__InfluenzaA__ADL32394
augaaggccauccuggugguccuccuguacaccuucgcuacagccaacgcggacacgcuuugcauuggcuaucacgcuaauaacagcaccgauacaguugacaccgugcuggagaaaaaugugacagucacccauuccgugaaccuccuggaagauaagcacaaugggaaacuuuguaagcugagaggaguugcuccccuccaucugggcaaaugcaacaucgccggguggauucugggaaauccugagugugaaucuuuuagcacaaccuccucuuggagcuacaucguggagacguccucuagcgacaacgggaccugcuauccgggcgauuucauugacuacgaagaacuccgggagcagcuguccagcgucucuuccuuugaacgcuucgagaucuuucccaagacaagcucuuggccuaaucacgauuccaacaagggagugaccgccgccuguccccaugcuggcgccaagagcuucuauaaaaaucuuaucuggcugguuaaaaagggcaacucuuacccuaaacucuccaagagcuauauuaaugacaaggggaaagaagugcugguccuuuggggaauccaccaccccuccacaucugcggaucaacagagccuguaccagaacgccgacaccuacguguuugugggcacguccagauauagcaagaaauucaagccugagauugcuauccggccgaaaguccgcgaucaggaggggagaaugaauuacuauuggacacucguugaacccggagacaagauuaccuuugaggccacaggcaaccugguggugccucgguacgcuuucgccauggaacgcaacgcggggucuggaaucauuaucuccgauacccccguccaugacugcaauaccacaugucaaacgccuaaaggcgccaucaacaccagccugcccuuucagaauauucacccgaucacaauuggcaagugcccuaaguaugugaaaucuaccaagcucagacuggcuacagggcuucggaacguucccagcauccagucccgcggacuguucggcgccauugcuggguuuaucgagggaggcuggaccgggaugguggacggaugguacggcuaucaucaccagaaugaacaaggcucuggguacgccgccgaucucaaaagcacgcagaacgcuaucgacgagauuacaaauaaggucaacuccgugaucgagaaaaugaauacccaguucaccgcgguuggaaaggaguucaaccaccuggagaagagaauugaaaaucuuaacaaaaagaucgaugacggcuuucuggauauuuggacauacaaugccgagcuccuggugcugcucgaaaacgagcggacccuggacuaucaugauagcaaugucaaaaaccuuuacgagaaggugcgcucucagcugaaaaacaaugcuaaggaaaucgggaacggauguuucgaguuuuaucacaagugcgacaauacauguauggaauccgucaaaaacggcacguacgauuauccuaaguacagcgaggaagccaaacucaauagagaggagaucgacggggugaagcuggaaucuacccggauuuaucaaauccuugccauuuacuccacaguugcuagcucccuggugcucgucgugucucugggcgccaucagcuucuggaugugcuccaacggaucucugcagugccgcauuuguaucuga

SEQ ID NO: 197545 - RNA, 1701 nt, Artificial Sequence; identical to SEQ ID NO: 194741
  derived and/or modified CDS sequence (opt5) from hemagglutinin__InfluenzaA__ADL32404

SEQ ID NO: 197546 - RNA, 1701 nt, Artificial Sequence
  derived and/or modified CDS sequence (opt5) from hemagglutinin__InfluenzaA__ADL32414
augaaggccauccuggugguccuccuguacaccuucgcuacagccaacgcggacacgcuuugcauuggcuaucacgcuaauaacagcaccgauacaguugacaccgugcuggagaagaaugugacagucacccauuccgugaaccuccuggaagauaagcacaaugggaaacuuuguaagcugagaggaguugcuccccuccaucugggcaaaugcaacaucgccggguggauucugggaaauccugagugugaaucucucagcacagccuccucuuggagcuacaucguggagaccuccucuagcgacaacggcacgugcuauccgggggauuuuauugacuacgaagaacugcgggagcagcuuuccagcgucucuuccuucgaacgcuuugagaucuuccccaagaccagcucuuggccuaaucacgauuccaacaagggagugacagccgcuuguccccaugccggcgcgaaaucuuuuuauaagaaucugaucuggcucguuaaaaagggcaacagcuacccuaaacuguccaagagcuauauuaaugacaaggggaaagaagugcuuguccuguggggaauccaccaccccuccaccucugccgaucaacagagccucuaccagaacgcugacgccuacguguucgugggcacauccagauauagcaagaaauuuaagccugagauugcuauccggccgaaaguccgcgcccaggaggggagaaugaauuacuauuggacccugguugaacccggagauaagauuacguucgaggcgacaggcaaccugguggugccucgguacgccuuugcuauggaacgcaacgccgggucuggaaucauuaucuccgacacccccguccaugauugcaauacaaccugucaaaccccuaaaggcgcuaucaacacaagccuccccuuccagaauauucacccgaucacgauuggcaagugcccuaaguaugugaaaucuaccaagcugagacuugccacagggcugcggaacguucccagcauccagucccgcggacucuuuggcgccauugcuggguucaucgagggaggcuggaccgggaugguggacggaugguacggcuaucaucaccagaaugaacaaggcucuggguacgcggccgaccugaaaagcacacagcacgcuaucgaugagauuaccaacaaggucaauuccgugaucgagaaaaugaacacgcaguuuacagccguuggaaaggaguucaaucaucuugagaagagaauugaaaaccugaauaaaaagguggacgauggcuuccucgacaucuggaccuacaacgccgagcugcugguccuccuggaaaaugagcggacccuugauuaucacgacagcaacgugaaaaaucuguacgagaagguccgcucucagcucaaaaacaacgcuaaggaaauugggaauggauguuuugaguucuaucauaagugcgauaacacauguauggaauccgugaaaaauggcaccuacgacuauccuaaguacagcgaggaagccaaacugaacagagaggagaucgaugggguuaaacuugaaucuacacggaucuaucaaauucuggcgaucuacuccacgguggcuagcucccucguccuggugguuucucugggcgccauuagcuuuuggaugugcuccaauggaucucuccagugccgcaucuguauuuga

SEQ ID NO: 197547 - RNA, 1701 nt, Artificial Sequence
  derived and/or modified CDS sequence (opt5) from hemagglutinin__InfluenzaA__ADL32424
augaaggccauccuggugguccuccuguacaccuucgcuauugccaacgcggacacacuuugcaucggcuaucacgcuaauaacagcacggauaccguugacacagugcuggagaagaaugugaccgucacacauuccgugaaccuccuggaagauaagcacaaugggaaacuuuguaagcugagaggaguugcuccccuccaucugggcaaaugcaacauugccggguggauccugggaaauccugagugugaaucucucagcaccgccuccucuuggagcuacauuguggagacauccucuagcgacaacggaaccugcuauccgggggauuuuaucgacuacgaagaacugcgggagcagcuuuccagcgucucuuccuucgaacgcuuugagaucuuccccaagacgagcucuuggccuaaucacgauuccaacaagggagugaccgccgcuuguccccaugccggcgcgaaaucuuuuuauaagaaucugauuuggcucguuaaaaagggcaacagcuacccuaaacuguccaagagcuauaucaaugacaaggggaaagaagugcuuguccuguggggcauucaccaccccuccacaucugccgaucaacagagccucuaccagaacgcugacgccuacguguucgugggcaccuccagauauagcaagaaauuuaagccugagaucgcuauucggccgaaaguccgcgaucaggaggggagaaugaauuaccauuggacacugguugaacccggagacaagaucaccuucgaggccacgggcaaccugguggugccucgguaugcguuugccauggaacgcaacgcugggucuggaauuaucaucuccgauacacccguccacgacugcaauaccacaugucaaaccccuaaaggcgccauuaacaccagccuccccuuccagaauauccauccgauuacaaucggcaagugcccuaaguacgugaaaucuacgaagcugagacuugcuaccgggcugcggaacguucccagcauucagucccgcggacucuuuggcgccaucgccggguucaucgagggaggcuggacagggaugguggacggaugguauggcuaccaccaccagaaugaacaaggcucuggguaugcugcggaucugaaaagcacccagcaugccauugacgagaucacaaacaaggucaauuccgugauugagaaaaugaacacccaguuuacggcuguuggaaaggaguucaaucaccuugagaagagaaucgaaaaccugaauaaaaagguggaugacggcuuccucgauauuuggacauacaacgccgagcugcugguccuccuggaaaaugagcggacccuugacuaccaugauagcaacgugaaaaaucuguaugagaagguccgcucucagcucaaaaacaacgccaaggaaaucgggaauggauguuuugaguucuaccacaagugcgacaacaccuguauggaauccgugaaaaauggcacauaugauuacccuaaguauagcgaggaagcuaaacugaacagagaggagaucaaugggguuaaacuugaaucuacccggauuuaccaaauccuggccauuuauuccacaguggcgagcucccucguccuggugguuucucugggcgcuaucagcuuuuggaugugcuccaacggaucucuccagugccgcauuuguaucuga

SEQ ID NO: 197548 - RNA, 1701 nt, Artificial Sequence
  derived and/or modified CDS sequence (opt5) from hemagglutinin__InfluenzaA__ADL32434
augaaggccauccuggugguccuccuguacaccuucgcuacagccaacgcggacacgcuuugcauuggcuaucacgcuaauaacagcaccgauacaguugacaccgugcuggagaagaaugugacagucacccauuccgugaaccuccuggaagauaagcacaaugggaaacuuuguaagcugagaggaguugcuccccuccaucugggcaaaugcaacaucgccggguggauucugggaaauccugagugugaaucucucagcacagccuccucuuggagcuacaucguggagaccuccucuagcgacaacggcacgugcuauccgggggauuuuauugacuacgaagaacugcgggagcagcuuuccagcgucucuuccuucgaacgcuuugagaucuuccccaagaccagcucuuggccuauccacgauuccaauaagggagugacagccgcuuguccccaugccggcgcgaaaucuuuuuauaagaaccugauuuggcucguuaaaaagggcaauagcuacccuaaacuguccaagagcuauaucaacgacaaggggaaagaagugcuuguccuguggggcauucaccaccccuccaccucugccgaucaacagagccucuaccagaaugcugacgccuacguguucgugggaacauccagauauagcaagaaauuuaagccugagaucgcuauucggccgaaaguccgcgaucaggaggggagaaugaacuacuauuggauccugguugaacccggagacaagauuaccuucgaggccacgggcaaucugguggugccucgguacgcguuugccauggaacgcaacgcugggucuggaaucaucauuuccgauacacccguccaugacugcaacaccacaugucaaaccccuaaaggcgccaucaauaccagccuccccuuccagaacauucacccgaucacaauuggcaagugcccuaaguaugugaaaucuacgaagcugagacuugcuaccgggcugcggaauguucccagcauccagucccgcggacucuuuggcgccaucgccggguucauugagggaggcuggacagggaugguggacggaugguacggcuaucaucaccagaacgaacaaggcucuggguacgcugcggaucugaaaagcacccagcacgccaucgacgagauuacaaauaaggucaacuccgugaucgagaaaaugaauacccaguuuacggcuguuggaaaggaguucaaccaucuugagaagagaauugaaaaucugaacaaaaagguggaugacggcuuccucgauaucuggacauacaaugccgagcugcugguccuccuggaaaacgagcggacccuugacuaucacgauagcaaugugaaaaaccuguacgagaagguccgcucucagcucaaaaauaacgccaaggaaaucgggaacggauguuuugaguucuaucauaagugcgacaauaccuguauggaauccgugaaaaacggcacauacgauuauccuaaguacagcgaggaagcuaaacugaauagagaggagauugacgggguuaaacuugaaucuacccggaucuaucaaauucuggccaucuacuccacaguggcgagcucccucguccuggugguuucucugggcgcuauuagcuuuuggaugugcuccaacggaucucuccagugccgcaucuguauuuga

SEQ ID NO: 197549 - RNA, 1701 nt, Artificial Sequence; identical to SEQ ID NO: 196161
  derived and/or modified CDS sequence (opt5) from hemagglutinin__InfluenzaA__ADL32444

SEQ ID NO: 197550 - RNA, 1701 nt, Artificial Sequence
  derived and/or modified CDS sequence (opt5) from hemagglutinin__InfluenzaA__ADL32454
auggaggccauccuggugguccuccuguacaccuucgcuacagccaacgcggacacgcuuugcauuggcuaucacgcuaauaacagcaccgauacaguugacaccgugcuggaaaagaaugugacagucacccauuccgugaaccuccuggaggauaaacacaaugggaaacuuuguaagcugagaggaguugcgccccuccaucugggcaagugcaacaucgccggguggauucugggaaauccugaaugugagucucucagcacagcuuccucuuggagcuacaucguggaaaccuccucuagcgacaacggcacgugcuauccgggggauuuuauugacuacgaggagcugcgggaacagcuuuccagcgucucuuccuucgagcgcuuugaaaucuuccccaaaaccagcucuuggccuaaucacgauuccaacaagggagugacagccgcuuguccccaugccggcgccaagagcuuuuauaaaaaucugaucuggcucguuaagaaaggcaacucuuacccuaagcuguccaaaagcuauauuaaugacaaggggaaggaggugcuuguccuguggggaauccaccaccccuccaccucugccgaucaacagagccucuaccagaacgcugacgccuacguguucgugggcuccagcagauauucuaaaaaguuuaaaccugagauugcuauccggccgaagguccgcgaucaggaagggagaaugaauuacuauuggacacugguugagcccggagacaaaauuaccuucgaagccacgggcaaccugguggugccucgguacgcguuugccauggagcgcaacgcuggguccggaaucauuaucagcgauacacccguccaugacugcaauaccacaugucaaaccccuaagggcgccaucaacaccucucuccccuuccacaauauucauccgaucacaauuggcaaaugcccuaaguauguuaagagcacgaaacugagacuugcuaccgggcugcggaacgugcccuccauccagucucgcggacucuuuggcgccauugccggguucaucgaaggaggcuggacagggaugguggacggaugguacggcuaucaccaccagaaugagcagggcagcggguacgcugcggaucugaaguccacccaaaacgccaucgacgagauuacaaauaaagucaacagcgugaucgaaaagaugaauacccaguuuacggcuguuggaaaagaguucaaccaucuugaaaagagaauugagaaucugaacaagaaaguggaugacggcuuccucgauaucuggacauacaaugccgaacugcugguccuccuggagaacgagcggacccuugacuaucacgauucuaaugugaagaaccuguacgaaaaaguccgcucccagcucaagaacaaugccaaagagcuggggaacggauguuuugaguucuaucauaagugcgacaauaccuguauggaaagcgugaagaacggcacauacgauuauccuaaauacucugaagaggcuaaacuuaauagagaggaaauugacgggguuaagcuggaguccacccggaucuaucagauccucgccauuuacagcacaguggcguccucucugguccuggugguuagccucggcgcuaucuccuuuuggaugugcucuaacggaagccugcaaugccgcauuuguaucuga

SEQ ID NO: 197551 - RNA, 1701 nt, Artificial Sequence; identical to SEQ ID NO: 196908
  derived and/or modified CDS sequence (opt5) from hemagglutinin__InfluenzaA__ADL32464

SEQ ID NO: 197552 - RNA, 1701 nt, Artificial Sequence; identical to SEQ ID NO: 196908
  derived and/or modified CDS sequence (opt5) from hemagglutinin__InfluenzaA__ADL32484

SEQ ID NO: 197553 - RNA, 1701 nt, Artificial Sequence
  derived and/or modified CDS sequence (opt5) from hemagglutinin__InfluenzaA__ADL32504
augaaggccauccuggugguccuccuguacaccuucgcuacagccaacgcggacacgcuuugcauuggcuaucacgcuaauaacagcaccgauacaguugacaccgugcuggagaagaaugugacagucacccauuccgugaaccuccuggaagauaagcacaaugggaaacuuuguaagcugagaggaguugcuccccuccaucugggcaaaugcaacaucgccggguggauucugggaaauccugagugugaaucucucagcacagccuccucuuggagcuacaucguggagaccuccucuagcgacaacggcaugugcuauccgggggauuuuauugacuacgaagaacugcgggagcagcuuuccagcgucucuuccuucgaacgcuuugagaucuuccccaagacgagcucuuggccuaaucacgauuccaacaagggagugaccgccgcuuguccccaugccggcgcgaaaucuuuuuauaagaaucugaucuggcucguuaaaaagggcaacagcuacccuaaacuguccaagagcuauauuaaugacaaggggaaagaagugcuuguccuguggggaauccaccaccccuccacaucugccgaucaacagagccucuaccagaacgcugacgccuacguguucgugggcaccuccagauauagcaagaaauuuaagccugagauugcuauccggccgaaaguccgcgaucaggaggggagaaugaauuacuauuggacacugguugaacccggagacaagauuaccuucgaggccacgggcaaccugguggugccucgguacgcguuugccauggaacgcaacgcugggucuggaaucauuaucuccgauacacccguccaugacugcaauaccacaugucaaaccccuaaaggcgccaucaacaccagccuccccuuccagaauauucacccgaucacaauuggcaagugcccuaaguaugugaaaucuacgaagcugagacuugcuaccgggcugcggaacguucccagcauccagucccgcggacucuuuggcgccauugccggguucaucgagggaggcuggacagggaugguggacggaugguacggcuaucaucaccagaaugaacaaggcucuggguacgcugcggaucugaaaagcacccagcacgccaucgacgagauuacaaacaaggucaauuccgugaucgagaaaaugaacacccaguuuacggcuguuggaaaggaguucaaucaucuugagaagagaauugaaaaccugaauaaaaagguggaugacggcuuccucgauaucuggacauacaacgccgagcugcugguccuccuggaaaaugagcggacccuugacuaucacgauagcaacgugaaaaaucuguacgagaagguccgcucucagcucaaaaacaacgccaaggaaauugggaauggauguuuugaguucuaucauaagugcgacaacaccuguauggaauccgugaaaaauggcacauacgauuauccuaaguacagcgaggaagcuaaacugaacagagaggagaucgacgggguuaaacuugaaucuacccggaucuaucaaauucuggccaucuacuccacaguggcgagcucccucguccuggugguuucucugggcgcuauuagcuuuuggaugugcuccaauggaucucuccagugccgcaucuguauuuga

SEQ ID NO: 197554 - RNA, 1701 nt, Artificial Sequence; identical to SEQ ID NO: 196161
  derived and/or modified CDS sequence (opt5) from hemagglutinin__InfluenzaA__ADL32514

SEQ ID NO: 197555 - RNA, 1701 nt, Artificial Sequence; identical to SEQ ID NO: 196908
  derived and/or modified CDS sequence (opt5) from hemagglutinin__InfluenzaA__ADL32524

SEQ ID NO: 197556 - RNA, 1701 nt, Artificial Sequence
  derived and/or modified CDS sequence (opt5) from hemagglutinin__InfluenzaA__ADL32544
augaaggccauccuggugguccuccuguacaccuucgcuacaagcaacgccgacacgcuuugcauuggcuaucacgcgaauaacuccaccgauacaguugacaccgugcuggagaagaaugugacagucacccauucugugaaccuccuggaagauaagcacaaugggaaacuuuguaagcugagaggaguugcuccccuccaucugggcaaaugcaacaucgccggguggauucugggaaauccugagugugaaagccucuccacagccucuagcugguccuacaucguggagaccucuagcuccgacaacggcacgugcuauccgggggauuuuauugacuacgaagaacugcgggagcagcuuagcucugucuccagcuucgaacgcuuugagaucuuccccaagaccucuuccuggccuaaucacgauagcaacaagggagugacagcugccuguccccaugcuggcgccaaaucuuuuuauaagaaucugaucuggcucguuaaaaagggcaacuccuacccuaaacugagaaagagcuauauuaaugacaaggggaaagaagugcuuguccuguggggaauccaccaccccuccaccucugcggaucaacagagccucuaccagaacgccgacgcuuacguguucgugggcacaucccgguauagcaagaaauuuaagccugagauugccauccgcccgaaagucagagaucaggaggggcggaugaauuacuauuggacccugguugaacccggagacaagauuacguucgaggcuacaggcaaccugguggugccucgcuacgccuuugcgauggaaagaaacgccgggucuggaaucauuaucuccgauacccccguccaugacugcaauacaaccugucaaaccccuaaaggcgcuaucaacacaagccuccccuuccagaauauucacccgaucacgauuggcaagugcccuaaguaugugaaaucuaccaagcugcggcuugccacagggcugcgcaacguucccagcauccaguccagaggacucuuuggcgcuauugccggguucaucgagggaggcuggaccgggaugguggacggaugguacggcuaucaucaccagaaugaacaaggcucuggguacgccgcugaucugaaaagcacacagcacgcgaucgacgagauuaccaacaaggucaauuccgugaucgagaaaaugaacacgcaguuuacagccguuggaaaggaguucaaucaucuugagaagcggauugaaaaccugaauaaaaagguggaugacggcuuccucgauaucuggaccuacaacgcugagcugcugguccuccuggaaaaugagcgcacccuugacuaucacgauagcaacgugaaaaaucuguacgagaaggucagaucucagcucaaaaacaacgccaaggaaauugggaauggauguuuugaguucuaucauaagugcgacaacacauguauggaauccgugaaaaauggcaccuacgauuauccuaaguacagcgaggaagccaaacugaaccgggaggagaucgacgggguuaaacuugaaucuacacgcaucuaucaaauucuggcuaucuacuccacgguggccagcucccucguccuggugguuucucugggcgcgauuagcuuuuggaugugcuccaauggaucucuccagugcagaaucuguauuuga

SEQ ID NO: 197557 - RNA, 1701 nt, Artificial Sequence; identical to SEQ ID NO: 197342
  derived and/or modified CDS sequence (opt5) from hemagglutinin__InfluenzaA__ADL32554

SEQ ID NO: 197558 - RNA, 1701 nt, Artificial Sequence; identical to SEQ ID NO: 196354
  derived and/or modified CDS sequence (opt5) from hemagglutinin__InfluenzaA__ADL32670

SEQ ID NO: 197559 - RNA, 1701 nt, Artificial Sequence
  derived and/or modified CDS sequence (opt5) from hemagglutinin__InfluenzaA__ADL32690
augaaggccauccuggugguccuccuguacaccuucgcuacagccaacgcggacacgcuuugcauuggcuaucacgcuaauaacagcaccgauacaguugacaccgugcuggagaaaaaugugacagucacccauuccgugaacauccucgaagauaagcacaaugggaaacuguguaaacuuagaggaguugcuccccugcaucucggcaagugcaacauugccggguggauccugggaaauccugagugugaaucucugagcacagccuccucuuggagcuacauuguggagaccuccucuagcgacaacggcacgugcuauccgggggauuuuaucgacuacgaagaacuccgggagcagcuguccagcgucucuuccuucgaacgcuuugagaucuuccccaagaccagcucuuggccuaaucacgauuccaacaagggagugacagccgcuuguccccaugccggcgcgaaaucuuuuuauaagaaucuuauguggcugguuaaaaagggcaacagcuacccuaaacucuccaagagcuauauuaaugacaaggggaaagaagugcugguccuuuggggaauccaccaccccuccaccucugccgaucaacagagccuguaccagaacgcugacgccuacguguucgugggcuccagcagauauucuaagaaauuuaagccugagauugcuauccggccgaaaguccgcgaucaggaggggagaaugaauuacuauuggacacucguugaacccggagacaagauuaccuucgaggccacgggcaaccugguggugccucgguacgcguuugccauggaacgcaacgcuggguccggaaucauuaucagcgauacacccguccaugacugcaauaccacaugucaaaccccuaaaggcgccaucaacaccucucugcccuuccagaauauucacccgaucacaauuggcaagugcccuaaguaugugaaaagcacgaagcucagacuggcuaccgggcuucggaacguucccuccauccagucucgcggacuguuuggcgccauugccggguucaucgagggaggcuggacagggaugguggacggaugguacggcuaucaucaccagaaugaacaaggcagcggguacgcugcggaucucaaauccacccagaacgccaucgacgagauuacaaauaaggucaacagcgugaucgagaaaaugaauacccaguuuacggcuguuggaaaggaguucaaccaccuggagaagagaauugaaaaucuuaacaaaaagguggaugacggcuuccuggauaucuggacauacaaugccgagcuccugguccugcucgaaaacgagcggacccuggacuaucaugauucuaaugugaaaaaccuuuacgagaagguccgcucccagcugaaaaacaaugccaaggaaauugggaacggauguuuugaguucuaucacaagugcgacaauaccuguauggaaagcgugaaaaacggcacauacgauuauccuaaguacucugaggaagcuaaacucaauagagaggagaucgacgggguuaagcuggaauccacccggaucuaucaaauucuugccaucuacagcacaguggcguccucucugguccucgugguuagccugggcgcuauuuccuuuuggaugugcucuaacggaagccugcagugccgcaucuguauuuga

SEQ ID NO: 197560 - RNA, 1701 nt, Artificial Sequence; identical to SEQ ID NO: 194921
  derived and/or modified CDS sequence (opt5) from hemagglutinin__InfluenzaA__ADL32710

SEQ ID NO: 197561 - RNA, 1701 nt, Artificial Sequence; identical to SEQ ID NO: 194741
  derived and/or modified CDS sequence (opt5) from hemagglutinin__InfluenzaA__ADL32720

SEQ ID NO: 197562 - RNA, 1701 nt, Artificial Sequence; identical to SEQ ID NO: 196513
  derived and/or modified CDS sequence (opt5) from hemagglutinin__InfluenzaA__ADL32730

SEQ ID NO: 197563 - RNA, 1701 nt, Artificial Sequence; identical to SEQ ID NO: 196513
  derived and/or modified CDS sequence (opt5) from hemagglutinin__InfluenzaA__ADL32740

SEQ ID NO: 197564 - RNA, 1701 nt, Artificial Sequence; identical to SEQ ID NO: 195685
  derived and/or modified CDS sequence (opt5) from hemagglutinin__InfluenzaA__ADL39137

SEQ ID NO: 197565 - RNA, 1698 nt, Artificial Sequence
  derived and/or modified CDS sequence (opt5) from hemagglutinin__InfluenzaA__ADL39148
augaaggugaaacugcucguccugcuuugcaccuucacagccacguacgcugacaccaucuguauuggcuaucacgccaacaauagcacagauaccguugacacagugcuggagaagaacgugaccgucacacauuccgugaaucuccuggaaaacucucacaaugggaaacuuugccugcucaagggaaucgcgccccugcagcugggcaacuguagcguugcuggguggauucucggaaauccugagugcgaacugcuuaucuccaaagagucuuggagcuacauuguggaaaagccgaaccccgagaauggcaccuguuauccugggcauuuugccgauuacgaggaacugagagagcaacucuccucugucagcuccuucgaacgguuugagaucuuccccaaggagagcucuuggccuaaccacacggugaccggaguuuccgccagcugcucucauaauggcgaauccagcuuuuaucgcaaccugcuuuggcugacaggcaaaaaugggcucuaccccaaccugucuaaguccuaugcuaauaacaaagagaaggaagugcugguccucuggggagugcaccacccuccgaacaucguggaccagaaaacccuguacagaacagagaaugccuacgucagcguuguguccucucauuauagccggaaguucacccccgaaauugcuaagcgcccuaaagugagagaucaggagggccggaucaacuacuauuggacgcuucuggagcccggggacacaauuaucuuugaagccaauggaaaccucauugcgccucgcuacgccuucgcucuguccagagauuuuggcagcgggaucauuaauucuaacgcccccauggacaagugugaugcuaaaugccagaccccgcaaggagccaucaauuccagccuuccuuuccagaacguccaccccgugacaaucggcgaguguccuaaguauguucggucugcgaaacugcgcauggugaccggccucagaaauauucccagcauccagucccgggggcuguuuggagccauugcuggcuucaucgaagggggauggaccggcauggucgacgggugguacggauaucaucaccagaacgagcaaggcucuggcuacgccgcugaucaaaagagcacacagaaugccauuaacgggaucacgaauaaagugaacuccguuaucgaaaagaugaauacccaguuuacagccgugggaaaggaguucaacaaacuggagcgcagaauggaaaaccucaauaagaaagucgacgauggcuucauugacaucuggaccuacaacgcugagcugcuugugcugcucgaaaaugagcggacacuggacuuucacgauagcaacgucaagaaucuuuaugaaaaagugaagucucagcugaagaacaaugcgaaagagauugggaacggaugcuucgaguuuuaccauaaguguaaugacgaaugcauggaguccguuaaaaacggcaccuaugauuaccccaaguauagcgaagagucuaaacucaaucgcgagaagaucgacggggugaagcuggaauccaugggcgucuaccagauucuggccaucuauagcacgguggcuuccucucucguucugcuugugagccugggagccaucuccuucuggaugugcucuaacggcagccuccaguguagaauuugcaucuga

SEQ ID NO: 197566 - RNA, 1701 nt, Artificial Sequence
  derived and/or modified CDS sequence (opt5) from hemagglutinin__InfluenzaA__ADL39159
augaagaccaucauugcccugagcuacauccucugccugguguucgcucagaaacuucccggcaacgacaauuccacagccacgcugugucucgggcaccaugcggucccuaacggaaccauuguuaagacaaucaccaaugaucaaauugaggugacaaacgcuaccgaacuggugcagucuagcuccacaggcgagaucugcgacucuccgcaccagaucauugauggggaaaauuguacccuuaucgacgcccugcucggagauccccagugcgacggcuuucaaaacaaaaagugggaucuguucgucgagagaagcaaagccuauuccaauuguuacccuuaugacgugcccgauuacgcuucucugcggagccucguugccuccagcgggacgcuggaauuuaacaaugagucuuucaacuggaccggagugacacagaauggcaccuccagcgcuugcauucgcagaucuaacaauuccuuuuucagccggcuuaacuggcugacacaucucaaguuuaaguauccugcccugaaugucaccaugcccaacaacgagcaguucgacaaacuuuacaucuggggcgugcaccauccugggacggauaaugaccagauuuuucuguaugcgcaagccucuggacgcaucacaguuuccaccaagagaagccagcagacagugauuccgaacaucggcucccggccccgcgucagaaauaucccuucucggauuagcaucuacuggaccauugugaaacccggggauauccuccugauuaacuccaccggaaaucugaucgcuccucgcggcuacuucaagaucagaagcgggaaaucuuccauuaugcggagcgacgcccccaucggaaaguguaacucugaaugcauuacaccgaauggcagcaucccuaacgacaagcccuuucagaaugugaaccgcauuacguauggcgcuuguccuagauacgucaaacaaaauacccucaagcuggccacagggaugcggaacguucccgagaaacagacccgcggaaucuucggcgcgaucgccggguuuauugaaaauggaugggagggcaugguggaugggugguauggauucagacaccagaacuccgagggccggggccaagcugccgaccuuaagucuacacaggcugccaucgaucagauuaaugggaaacugaacagacucaucggaaagaccaacgaaaaauuccaccagauugagaaggaauuuagcgagguggaaggccgcauccaagaccuggagaaguacgucgaggauacgaaaauugaccuuugguccuauaaugccgaacugcucguggcucuggagaaccagcauacaaucgaucugaccgacagcgaaaugaauaaacucuucgagaagaccaagaaacagcugcgggaaaacgcggaggauauggggaauggaugcuuuaagaucuaccacaagugugacaacgccugcauuagaucuauccgcaauggcacauaugaucaugacguuuaccgggacgaggcucuuaacaauagauuccagauuaaagggguggaacugaaguccggcuacaaagauuggauccucuggauuagcuuugccaucucuugcuuccugcuuuguuuugcccugcucggauucaucaugugggcuugccaaaagggcaacauucgcuguaauaucugcauuuga

SEQ ID NO: 197567 - RNA, 1701 nt, Artificial Sequence
  derived and/or modified CDS sequence (opt5) from hemagglutinin__InfluenzaA__ADL39170
augaagaccaucauugcccugagcuacauccucugccugguguucgcucagaaacuucccggcaacgacaauuccacagccacgcugugucucgggcaccaugcggucccuaacggaaccauuguuaagacaaucaccaaugaucaaauugaggugacaaacgcuaccgaacuggugcagucuagcuccacaggcgagaucugcgacucuccgcaccagauccuugaugggaaaaauuguacccugauugacgcccuccugggagauccccagugcgacggcuuucaaaacaagaaaugggaucuguucgucgaaagaagcaaggccuauuccaauuguuacccuuaugacgugcccgauuacgcuucucuccggagccugguugccuccagcgggacgcuugaguuuaacaaugaaucuuucaacuggaccggagugacacagaauggcaccuccagcgcuugcauccgcagaucuaagaacuccuuuuucagccggcugaauuggcucacacaucugaacuuuaaauauccugcccuuaaugucaccgugcccaacaacgagcaguucgacaagcuguacauuuggggcguucaccauccugggacggauaaagaccagaucuuucucuaugcgcaagccucuggacgcauuacaguguccaccaagagaagccagcagacagucaucccgaauauuggcucccggccccgcgugagaaacaucccuucucggaucagcauuuacuggaccaucgugaaacccggggauguccugcugauuaauuccaccggaaaccucaucgcuccucgcggcuacuucaagauuagaagcgggaagucuuccaucaugcggagcgacgcccccaucggaaaauguaauucugagugcauuacaccgaacggcagcaucccuaaugacaagcccuuucagaacguuaaucgcauuacguauggcgcuuguccuagauacgugaaacaaaacacccugaaacuugccacagggaugcggaaugugcccgaaaaacagacccgcggaaucuucggcgcgauugccggguuuaucgagaacggaugggaaggcauggucgaugggugguauggauucagacaccaaaauuccgagggccggggccaggcugccgaccugaagucuacacaggcugccaucgaucagauuaacgggaaacucaauagacugaucggaaagaccaacgagaaguuccaccagauugaaaaagaguuuagcgaaguggagggccgcauccaagaccuugaaaaguacguugaggauacgaaaauugaccugugguccuauaacgccgagcuccugguggcucuggaaaaucagcauacaaucgaucucaccgacagcgagaugaacaagcuguucgaaaagaccaagaagcagcuucgggagaaugcggaagauauggggaacggaugcuuuaaaauuuaccacaagugugacaaugccugcaucggcucuaucagaaacgggacauaugaucaugacgucuaccgcgacgaggcucugaauaaccgguuccagauuaaaggcguggagcucaaguccggauacaaagauuggauccuguggauuagcuuugccaucucuugcuuccuucuguguguugcccuccugggcuuuauuaugugggcuugccaaaaggggaauaucagauguaacaucugcauuuga

SEQ ID NO: 197568 - RNA, 1701 nt, Artificial Sequence; identical to SEQ ID NO: 195685
  derived and/or modified CDS sequence (opt5) from hemagglutinin__InfluenzaA__ADL39203

SEQ ID NO: 197569 - RNA, 1701 nt, Artificial Sequence; identical to SEQ ID NO: 194506
  derived and/or modified CDS sequence (opt5) from hemagglutinin__InfluenzaA__ADL39214

SEQ ID NO: 197570 - RNA, 1698 nt, Artificial Sequence
  derived and/or modified CDS sequence (opt5) from hemagglutinin__InfluenzaA__ADL39225
augaaggugaaacugcucguccugcuuugcaccuucacagccacguacgcugacaccaucuguauuggcuaucacgccaacaauagcacagauaccguugacacagugcuggagaagaacgugaccgucacacauuccgugaaucuccuggaaaacucucacaaugggaaacuuugccugcucaagggaaucgcgccccugcagcugggcaacuguagcguugcuggguggauucucggaaauccugagugcgaacugcuuaucuccaaagagucuuggagcuacauuguggaaaagccgaaccccgagaauggcaccuguuauccuggguacuuugccgauuaugaggaacugagagagcaacucuccucugucagcuccuucgaacgguuugagaucuuccccaaggagagcucuuggccuaaccauacggugaccggagccuccgcuagcugcucucacaauggcgaaaacuccuuuuaccgcaaucugcuuuggcugacaggcaaaaacgggcucuaucccaaucugagcaagucuuacgccaacaacaaagagaaggaaguucuggugcucuggggaguccaucacccuccgaauaucgcugaccagaaaacccuguaccacacagagaacgccuauguguccguggucagcucccauuacucuagaaaguucacccccgaaauugcgaagcggccuaaaguucgcgaucaggagggcagaaucaauuauuacuggacgcuucuggagcccggggacacaauuaucuuugaagccaacggaaaucucauugcuccucgguaugccuucgcucugagccgcggcuuuggguccggaaucauuaacagcaaugcccccauggauaagugugacgcgaaaugccagaccccgcaaggcgccaucaacucuucccuuccuuuccagaaugugcaccccgugacaaucggcgaguguccuaaguacgucagaagcgcuaaacugcggauggugaccgggcuccgcaacauucccucuauccagagcagaggacuguuuggcgccauugcuggguucaucgaaggaggcuggaccgggaugguugauggaugguauggcuaccaucaccagaaugagcaaggcuccggguacgccgccgaccagaagucuacacagaacgcuauuaauggaaucacgaacaaagugaauagcgucaucgaaaagaugaacacccaguuuacagcggugggcaaggaguucaacaaacuggagcggcgcauggaaaaucucaacaagaaaguugaugacggguucauugauaucuggaccuauaaugccgagcugcuugugcugcucgaaaacgagagaacacuggacuuucacgacuccaaugucaagaaccuuuacgaaaaagucaagagccaacugaagaauaacgcuaaagagauuggaaauggcugcuucgaguuuuaucauaaguguaacgaugaaugcauggagucugugaaaaaugggaccuacgacuaucccaaguacuccgaagagagcaaacucaaccgggagaagaucgauggcgugaagcuggaaucuaugggaguuuaucagauucuggccaucuacuccacgguggccagcucccucguccugcuugugucucugggcgcuaucagcuucuggaugugcuccaaugggucucuccagugucgcauuugcaucuga

SEQ ID NO: 197571 - RNA, 1698 nt, Artificial Sequence
  derived and/or modified CDS sequence (opt5) from hemagglutinin__InfluenzaA__ADL39236
augaaggugaaacugcucguccugcuuugcaccuucacagccacguacgcugacaccaucuguauuggcuaucacgccaacaauagcacagauaccguugacacagugcuggagaagaacgugaccgucacacauuccgugaaucuccuggaaaacucucacaaugggaaacuuugccugcucaagggaaucgcgccccugcagcugggcaacuguagcguugcuggguggauucucggaaauccugagugcgaacugcuuaucuccaaagagucuuggagcuacauuguggaaaagccgaaccccgagaauggcaccuguuauccuggguacuuugccgauuaugaggaacugagagagcaacucuccucugucagcuccuucgaacgguuugagaucuuccccaaggagagcucuuggccuaaccauacggugaccggaguuuccgccagcugcucucacaauggcgaauccagcuuuuaccgcaaccugcuuuggcugacaggcaaaaaugggcucuaucccaaccugucuaaguccuacaccaauaacaaagagaaggaagugcugguccucuggggagugcaucacccuccgaacaucguggaccagaaaacacuguacagaaccgagaaugcuuaugucagcguuguguccucucacuacagccggaaguucacgcccgaaauugccaagcgcccuaaagugagagaucaggagggccggaucaacuauuacuggacacuucuggagcccggggacaccauuaucuuugaagcuaauggaaaccucauugccccucgcuaugcguucgcccuguccagaggcuuugggagcggaaucauuaauucuaacgcucccaugggcaagugugaugccaaaugccagacaccgcaaggcgcuaucaauuccagccuuccuuuccagaacguccaucccgugaccaucggggaguguccuaaguacguucggucugccaaacugcgcauggugaccggacucagaaauauucccagcauccagucccggggccuguuuggggcgauugccggauucaucgaaggcggguggacaggaauggucgacggcugguauggcuaccaccaucagaacgagcaagggucuggauacgcugccgaucaaaagagcacgcagaaugcuauuaacggcaucaccaauaaagugaacuccguuaucgaaaagaugaauacacaguuuaccgccguggggaaggaguucaacaaacuggagcgcagaauggaaaaccucaauaagaaagucgacgauggauucauugacaucuggacauauaacgccgagcugcuugugcugcucgaaaaugagcggacccuggauuuucacgacagcaacgucaagaaucuuuacgaaaaagugaagucucagcugaagaacaaugcuaaagagauuggcaacgggugcuucgaguuuuaucacaaguguaaugacgaaugcauggaguccguuaaaaacggcacguacgauuaucccaaguacagcgaagagucuaaacucaaucgcgagaagaucgacggagugaagcuggaauccaugggcgucuaucagauucuggcgaucuacagcacaguggccuccucucucguucugcuugugagccugggggcuaucuccuucuggaugugcucuaacggaagccuccaguguagaauuugcaucuga

SEQ ID NO: 197572 - RNA, 1701 nt, Artificial Sequence
  derived and/or modified CDS sequence (opt5) from hemagglutinin__InfluenzaA__ADL39280
augaagaccaucauugcccugagcuacauccucugccugguguucgcucagaaacuucccggcaacgacaauuccacagccacgcugugucucgggcaccaugcggucccuaacggaaccauuguuaagacaaucaccaaugaucaaauugaggugacaaacgcuaccgaacuggugcagucuagcuccacaggcgagaucugcgacucuccgcaccagauccuugauggggaaaauuguacccugauugacgcccuccugggagauccccagugcgacggcuuucaaaacaaaaagugggaucuguucgucgagagaagcaaagccuauuccaauuguuacccuuaugacgugcccgauuacgcuucucuccggagccugguugccuccagcgggacgcuugaauuuaacaaugagucuuucaacuggaccggagugacacagaauggcaccuccagcgcuugcauccgcagaucuaacaauuccuuuuucagccggcugaacuggcucacacaucugcgcuuuaaguauccugcccuuaaugucaccaugcccaacaacgagcaguucgacaagcuguacauuuggggcgugcaccauccugggacggauaaugaccagaucuuucucuaugcgcaagccucuggaagaauuacaguuuccaccaaacggagccagcagacagugaucccgaacauuggcucccgccccagaguccggaauaucccuucucgcaucagcauuuacuggaccaucgugaagcccggggauauucugcugaucaacuccaccggaaaucucauugcuccuagaggcuacuucaaaauccggagcgggaagucuuccaucaugcgcagcgacgcccccauuggaaaauguaacucugaaugcaucacaccgaauggcagcauuccuaacgacaagcccuuucagaaugugaacagaaucacguauggcgcuuguccucgguacgucaagcaaaauacccugaaacuugccacagggaugcgcaacguucccgagaagcagaccagaggaauuuucggcgcgaucgccggguuuaucgaaaauggaugggagggcaugguggaugggugguauggauuccggcaccagaacuccgagggcagaggccaagcugccgaccugaaaucuacacaggcugccauugaucagaucaaugggaagcucaaccgccugauuggaaaaaccaacgaaaaguuccaccagaucgagaaagaauuuagcgagguggaaggccggauucaagaccuugagaaguacgucgaggauacgaagaucgaccugugguccuauaaugccgaacuccugguggcucuggagaaccagcauacaauugaucucaccgacagcgaaaugaauaaacuguucgagaagaccaaaaagcagcuuagagaaaacgcggaggauauggggaauggaugcuuuaaaaucuaccacaagugugacaacgccugcaucggcucuauucgcaaugggacauaugaucaugacguuuaccgggacgaggcucugaacaauagauuccagaucaagggcguggaacucaaauccggauacaaggauuggauucuguggaucagcuuugccauuucuugcuuccuucugugugucgcccuccugggcuuuaucaugugggcuugccaaaaagggaacauccgcuguaauauuugcaucuga

SEQ ID NO: 197573 - RNA, 1698 nt, Artificial Sequence
  derived and/or modified CDS sequence (opt5) from hemagglutinin__InfluenzaA__ADL39291
augaaggugaaacugcucguccugcuuugcaccuucacagccacguacgcugacaccaucuguauuggcuaucacgccaacaauagcacagauaccguugacacagugcuggagaagaacgugaccgucacacauuccgugaaucuccuggaaaacucucacaaugggaaacuuugccugcucaagggaaucgcgccccugcagcugggcaacuguagcguugcuggguggauucucggaaauccugagugcgaacugcuuaucuccaaagagucuuggagcuacauuguggaaaagccgaaccccgagaauggcaccuguuauccugggcauuuugccgauuacgaggaacugagagagcaacucuccucugucagcuccuucgaacgguuugagaucuuccccaaggagagcucuuggccuaaccacacggugaccggaguuuccgccagcugcucucauaauggcgaauccagcuuuuaucgcaaccugcuuuggcugacagagaaaaauggccucuaccccaaccugucuaaguccuaugcuaauaacaaagaaaaggaggugcugguccucuggggagugcaccacccuccgaacaugggggaccagaaaacccuguaccauacagaaaaugccuacgugagcgucguuuccucucacuauagcagaaaguucacccccgagaucgcuaagcggccuaaagugcgcgaucaggagggcagaauuaacuacuauuggacgcuucuggaacccggggacacaaucauuuuugaggccaauggaaaccucaucgcgccucgguacgccuucgcucugucccgcggcuuugggagcggaauuaucaauucuaacgcccccauggauaagugugacgcuaaaugccagaccccgcaaggcgccauuaauuccagccuuccuuuccagaacgugcaucccgucacaaucggcgaauguccuaaguaugugagaucugcgaaacugcggaugguuaccgggcuccgcaauauccccagcauucaguccagaggacuguuuggcgccaucgcuggguucauugagggaggcuggaccgggaugguggauggaugguacggcuaucaccaccagaacgaacaaggcucuggguacgccgcugaccaaaagagcacacagaaugccaucaacggaauuacgaauaaagucaacuccgugaucgagaagaugaauacccaguuuacagccguuggcaaggaguucaacaaacuggaacggcgcauggagaaccucaauaagaaaguggaugacggguucaucgauauuuggaccuacaacgcugaacugcuuguccugcucgagaaugaaagaacacuggacuuucaugacagcaacgugaagaaucuuuaugagaaagucaagucucagcugaagaacaaugcgaaagagaucggaaacggcugcuucgaauuuuaccacaaguguaaugaugagugcauggaauccgugaaaaacgggaccuaugacuaccccaaguauagcgaggagucuaaacucaaucgggaaaagauugauggcguuaagcuggaguccaugggaguguaccagauccuggccauuuauagcacggucgcuuccucucucgugcugcuuguuagccugggcgccaucuccuucuggaugugcucuaacgggagccuccagugucgcaucugcauuuga

SEQ ID NO: 197574 - RNA, 1701 nt, Artificial Sequence; identical to SEQ ID NO: 194506
  derived and/or modified CDS sequence (opt5) from hemagglutinin__InfluenzaA__ADL39302

SEQ ID NO: 197575 - RNA, 1701 nt, Artificial Sequence; identical to SEQ ID NO: 197572
  derived and/or modified CDS sequence (opt5) from hemagglutinin__InfluenzaA__ADL39313

SEQ ID NO: 197576 - RNA, 1701 nt, Artificial Sequence
  derived and/or modified CDS sequence (opt5) from hemagglutinin__InfluenzaA__ADL39335
augaagaccaucauugcccugagcuacauccucugccugguguucgcucagaaacuucccggcaacgacaauuccacagccacgcugugucucgggcaccaugcggucccuaacggaaccauuguuaagacaaucaccaaugaucaaauugaggugacaaacgcuaccgaacuggugcagucuagcuccacaggcgagaucugcgacucuccgcaccagauccuugauggggaaaauuguacccugauugacgcccuccugggagauccccagugcgacggcuuucaaaacaaaaagugggaucuguucgucgagagaagcaaagccuauuccaauuguuacccuuaugacgugcccgauuacgcuucucuccggagccugguugccuccagcgggacgcuugaauuuaacaaugagucuuucaacuggaccggagugacacagaauggcaccuccagcgcuugcauccgcagaucuaacaauuccuuuuucagccggcugaacuggcucacacaucugcgcuuuaaguauccugcccuuaaugucaccaugcccaacaacgagcaguucgacaagcuguacauuuggggcgugcaccauccugggacggauaaugaccagaucuuucucuaugcgcaagccucuggaagaauuacaguuuccaccaaacggagccagcagacagugaucccgaacauuggcucccgccccagaguccggaauaucccuucucgcaucagcauuuacuggaccaucgugaagcccggggauauucugcugaucaacuccaccggaaaucucauugcuccuagaggcuacuucaaaauccggagcgggaagucuuccaucaugcgcagcgacgcccccauuggaaaauguaacucugaaugcaucacaccgaauggcagcauuccuaacgacaagcccuuucagaaugugaacagaaucacguauggcgcuuguccucgguacgucaagcaaaauacccugaaacuugccacagggaugcgcaacguucccgagaagcagaccagaggaauuuucggcgcgaucgccggguuuaucgaaaauggaugggagggcaugguggaugggugguauggauuccggcaccagaacuccgagggcagaggccaagcugccgaccugaaaucuacacaggcugccauugaucagaucaaugggaagcucaaccgccugauuggaaaaaccaacgaaaaguuccaccagaucgagaaagaauuuagcgagguggaaggccggauucaagaccuugagaaguacgucgaggauacgaagaucgaccugugguccuauaaugccgaacuccugguggcucuggagaaccagcauacaauucaccucaccgauagcgaaaugaauaaacuguucgagaagaccaaaaagcagcuuagagaaaacgcggaggacauggggaauggaugcuuuaaaaucuaccauaagugugauaacgccugcaucggcucuauucgcaaugggacauaugaccacgauguuuaccgggacgaggcucugaacaauagauuccagaucaagggcguggaacucaaauccggauacaaggacuggauucuguggaucagcuuugccauuucuugcuuccuucugugugucgcccuccugggcuuuaucaugugggcuugccaaaaagggaacauccgcuguaauauuugcaucuga

SEQ ID NO: 197577 - RNA, 1701 nt, Artificial Sequence; identical to SEQ ID NO: 194506
  derived and/or modified CDS sequence (opt5) from hemagglutinin__InfluenzaA__ADL39368

SEQ ID NO: 197578 - RNA, 1698 nt, Artificial Sequence
  derived and/or modified CDS sequence (opt5) from hemagglutinin__InfluenzaA__ADL39390
augaaggugaaacugcucguccugcuuugcaccuucacagccacguacgcugacaccaucuguauuggcuaucacgccaacaauagcacagauaccguugacacagugcuggagaagaacgugaccgucacacauuccgugaaucuccuggaaaacucucacaaugggaaacuuugccugcucaagggaaucgcgccccugcagcugggcaacuguagcguugcuggguggauucucggaaauccugagugcgaacugcuuaucuccaaagagucuuggagcuacauuguggaaaagccgaaccccgagaauggcaccuguuauccugggcauuuugccgauuacgaggaacugagagagcaacucuccucugucagcuccuucgaacgguuugagaucuuccccaaggagagcucuuggccuaaccacacggugaccggaguuuccgccagcugcucucauaauggcgaauccagcuuuuaucgcaaccugcuuuggcugacaggcaaaaaugggcucuaccccucucuguccaagagcuaugcuaacaauaaagagaaggaagugcugguccucuggggagugcaccacccuccgaacaucguggaccagaaaacccuguacagaacagagaacgccuacgucuccguugugucuagccauuauucccggaaguucacccccgaaauugcuaagcgcccuaaagugagagaucaggagggccggaucaauuacuauuggacgcuucuggagcccggggacacaauuaucuuugaagccaacggaaaucucauugcgccucgcuacgccuucgcucugagcagaggcuuugggucuggaaucauuaacuccaaugcccccaugggcaagugugaugcuaaaugccagaccccgcaaggcgccaucaacagcucucuuccuuuccagaauguccaccccgugacaaucggggaguguccuaaguauguucggagcgcgaaacugcgcauggugaccggacucagaaacauucccuccauccagucucggggccuguuuggggccauugcuggauucaucgaaggcggguggaccggaauggucgacggcugguacggcuaucaucaccagaaugagcaagggagcggauacgccgcugaucagaaguccacacagaacgccauuaauggcaucacgaacaaagugaauagcguuaucgaaaagaugaacacccaguuuacagccguggggaaggaguucaauaaacuggagcgcagaauggaaaaccucaacaagaaagucgacgauggauucauugacaucuggaccuacaaugcugagcugcuugugcugcucgaaaacgagcggacacuggauuuucacgacucuaaugucaagaaccuuuaugaaaaagugaagucccaacugaagaauaacgcgaaagagauuggcaaugggugcuucgaguuuuaccauaaguguaacgacgaaugcauggagagcguuaaaaauggcaccuaugauuaccccaaguauucugaagaguccaaacucaaccgcgagaagaucgacggagugaagcuggaaagcaugggcgucuaccagauucuggccaucuauuccacgguggcuucuagccucguucugcuugugucccugggggccaucucuuucuggaugugcagcaauggaucccuccaguguagaauuugcaucuga

SEQ ID NO: 197579 - RNA, 1701 nt, Artificial Sequence
  derived and/or modified CDS sequence (opt5) from hemagglutinin__InfluenzaA__ADL39401
augaagaccaucauugcccugagcuacauccucugccugguguucgcucagaaacuucccggcaacgacaauuccacagccacgcugugucucgggcaccaugcggucccuaacggaaccauuguuaagacaaucaccaaugaucaaauugaggugacaaacgcuaccgaacuggugcagucuagcuccacaggcgagaucugcgacucuccgcaccagauccuugauggggaaaauuguacccugauugacgcccuccugggagauccccagugcgacggcuuucaaaacaaaaagugggaucuguucgucgagagaagcaaagccuauuccaauuguuacccuuaugacgugcccgauuacgcuucucuccggagccugguugccuccagcgggacgcuugaauuuaacaaugagucuuucaacuggaccggagugacacagaauggcaccuccagcucuugcaugcgcagauccaacaauagcuuuuucucucggcugaacuggcucacacaucugaaguuuaaguauccugcucuuaaugucaccaugcccaacaacgagcaguucgacaaacuguacaucuggggcgugcaccauccugggacggauaaugaccagauuuuucucuaugcccaagcguccggacgcaucacaguuagcaccaagagaucccagcagacagugauuccgaacaucggcucucggccccgcgucagaaauauuccuagccggaucuccaucuacuggaccauugugaaacccggggauauccugcugauuaacagcaccggaaaucucaucgccccucgcggcuacuucaagauuagaucugggaaauccagcaucaugcggucugacgcucccaucggaaaguguaacagcgaaugcauuacaccgaauggcuccaucccuaacgacaagcccuuucagaaugugaaccgcauuacguauggcgccuguccuagauacgucaaacaaaauacccugaagcuggcuacagggaugcggaacguucccgagaaacagacccgcggaaucuucggcgccauugcgggguuuaucgaaaauggaugggagggcaugguggaugggugguauggauucagacaccagaacucugagggccggggccaagccgcugaccuuaagagcacacaggccgcuaucgaucagauuaaugggaaacucaacagacugaucggaaagaccaacgaaaaauuccaccagauugagaaggaauuuuccgagguggaaggccgcauccaagaccuugagaaguacgucgaggauacgaaaauugaccuguggagcuauaaugccgaacuccugguggcccuggagaaccagcauacaaucgaucucaccgacucugaaaugaauaagcuguucgagaaaaccaagaaacagcuucgggaaaacgcugaggauauggggaauggaugcuuuaagauuuaccacaagugugacaacgcgugcaucggcuccaucagaaaugggacauaugaucaugacguuuaccgcgacgaggcccugaacaaucgguuccagauuaaaggcguggaacucaagagcggauacaaagauuggauccuguggauuucuuuugcuaucuccugcuuccuucugugugucgcccuccugggcuuuauuaugugggccugccaaaaggggaacaucagauguaauaucugcauuuga

SEQ ID NO: 197580 - RNA, 1701 nt, Artificial Sequence
  derived and/or modified CDS sequence (opt5) from hemagglutinin__InfluenzaA__ADL39412
augaagaccaucauugcccugagcuacauccucugccugguguucgcucagaaacuucccggcaacgacaauuccacagccacgcugugucucgggcaccaugcggucccuaacggaaccauuguuaagacaaucaccaaugaucaaauugaggugacaaacgcuaccgaacuggugcagucuagcuccacaggcgagaucugcgacucuccgcaccagauccuugauggggaaaauuguacccugauugacgcccuccugggagauccccagugcgacggcuuucaaaacaaaaagugggaucuguucgucgagagaagcaaagccuauuccaauuguuacccuuaugacgugcccgauuacgcuucucuccggagccugguugccuccagcgggacgcuugaauuuaacaaugagucuuucaacuggaccggagugacacagaauggcaccuccagcgcuugcauccgcagaucuaacaauuccuuuuucagccggcugaacuggcucacacaucugaaguuuaaguauccugcccuuaaugucaccaugcccaacaacgagcaguucgacaaacuguacauuuggggcgugcaccauccugggacggauaaugaccagaucuuucucuaugcgcaagccucuggacgcauuacaguuuccaccaagagaagccagcagacagugaucccgaacauuggcucccggccccgcgucagaaauaucccuucucggaucagcauuuacuggaccaucgugaaacccggggauauucugcugaucaacuccaccggaaaucucauugcuccucgcggcuacuucaagaucagaagcgaaaaaucuuccaucaugcggagcgacgcccccauugggaaguguaacucugagugcaucacaccgaauggaagcauuccuaacgacaagcccuuucagaaugugaaccgcaucacguauggcgcuuguccuagauacgucaaacaaaauacccugaaacuugccacaggcaugcggaacguucccgaaaaacagacccgcgggauuuucggagcgaucgccggcuuuaucgagaaugggugggagggaaugguggauggcugguauggguucagacaccagaacuccgaaggacggggccaagcugccgaccugaagucuacacaggcugccauugaucagaucaauggcaaacucaacagacugauugggaagaccaacgagaaauuccaccagaucgaaaaggaguuuagcgaaguggagggacgcauucaagaccuugagaaguacgucgaagauacgaaaaucgaccugugguccuauaaugccgagcuccugguggcucuggaaaaccagcauacaauugaucucaccgacagcgagaugaauaagcuguucgaaaagaccaagaaacagcuucgggagaacgcggaggauaugggcaaugggugcuuuaagaucuaccacaagugugacaacgccugcaucggaucuauuagaaauggcacauaugaucaugacguuuaccgcgacgaagcucugaacaaucgguuccagaucaaagggguggagcucaaguccggcuacaaagauuggauucuguggaucagcuuugccauuucuugcuuccuucugugugucgcccuccugggauuuaucaugugggcuugccaaaagggcaacaucagauguaauauuugcaucuga

SEQ ID NO: 197581 - RNA, 1698 nt, Artificial Sequence
  derived and/or modified CDS sequence (opt5) from hemagglutinin__InfluenzaA__ADL39423
augaaggugaaacugcucguccugcuuugcaccuucacagccacguacgcugacaccaucuguauuggcuaucacgccaacaauagcacagauaccguugacacagugcuggagaagaacgugaccgucacacauuccgugaaucuccuggaaaacucucacaaugggaaacuuugccugcucaagggaaucgcgccccugcagcugggcaacuguagcguugcuggguggauucucggaaauccugagugcgaacugcuuaucuccaaagagucuuggagcuacauuguggaaaagccgaaccccgagaauggcaccuguuauccugggcauuuugccgauuacgaggaacugagagagcaacucuccucugucagcuccuucgaacgguuugagaucuuccccaaggagagcucuuggccuucccacacggugaccggaguuagcgccucuugcucccauaacggcgaaaauagcuuuuaucgcaaccugcuuuggcugacaggcaaaaaugggcucuaccccaaccugucuaaguccuaugcuaauaacaaagagaaggaagugcugguccucuggggagugcaccacccuccgaacaucgccgaccagaaaacccuguaccauacagagaaugcuuacgugagcgucguuuccucucacuauagcagaaaguucacccccgaaauugccaagcggccuaaagugcgcgaucaggagggcagaaucaacuacuauuggacgcuucuggagcccggggacacaauuaucuuugaagcgaauggaaaccucauugccccucgguacgcuuucgcccugucccgcggcuuugggagcggaaucauuaauucuaacgcucccauggauaagugugacgccaaaugccagaccccgcaaggcgcgaucaauuccagccuuccuuuccagaacgugcaucccgucacaaucggcgaguguccuaaguaugugagaucugccaaacugcggaugguuaccgggcuccgcaauauucccagcauccaguccagaggacuguuuggcgcuauugccggguucaucgaaggaggcuggaccgggaugguggauggaugguacggcuaucaccaccagaacgagcaaggcucuggguacgcugccgaccaaaagagcacacagaaugccauuaacggaaucacgaauaaagucaacuccgugaucgaaaagaugaauacccaguuuacagcuguuggcaaggaguucaacaaacuggagcggcgcauggaaaaccucaauaagaaaguggaugacggguucauugauaucuggaccuacaacgcggagcugcuuguccugcucgaaaaugagagaacacuggacuuucaugacagcaacgugaagaaucuuuaugaaaaagucaagaaccagcugaagaauaacgccaaagagauuggaaauggcugcuucgaguuuuaccacaaguguaacgaugaaugcauggagucugugaaaaaugggaccuaugacuaccccaaguauuccgaagagagcaaacucaaccgggagaagaucgauggcguuaagcuggaaucuaugggaguguaccagauucuggcuaucuauuccacggucgccagcucccucgugcugcuuguuucucugggcgccaucagcuucuggaugugcuccaaugggucucuccagugucgcauuugcaucuga

SEQ ID NO: 197582 - RNA, 1701 nt, Artificial Sequence
  derived and/or modified CDS sequence (opt5) from hemagglutinin__InfluenzaA__ADL39434
augaagaccaucauugcccugagcuacauccucugccugguguucgcucagaaacuucccggcaacgacaauuccacagccacgcugugucucgggcaccaugcggucccuaacggaaccauuguuaagacaaucaccaaugaucaaauugaggugacaaacgcuaccgaacuggugcagucuagcuccacaggcgagaucugcgacucuccgcaccagauccuugauggggaaaauuguacccugauugacgcccuccugggagauccccagugcgacggcuuucaaaacaaaaagugggaucuguucgucgagagaagcaaagccuauuccaauuguuacccuuaugacgugcccgauuacgcuucucuccggagccugguugccuccagcgggacgcuugaauuuaacaaugagucuuucaacuggaccggagugacacagaauggcaccuccagcgcuugcauccgcagaucuaacaauuccuuuuucagccggcugaacuggcucacacaucugcgcuuuaaguauccugcccuuaaugucaccaugcccaacaacgagcaguucgacaagcuguacauuuggggcgugcaccauccugggacggauaaugaccagaucuuucucuaugcgcaagccucuggaagaauuacaguuuccaccaaacggagccagcagacagugaucccgaacauuggcucccgccccagaguccgggauaucccuucucgcaucagcauuuacuggaccaucgugaagcccggggacauucugcugaucaauuccaccggaaaccucauugcuccuagaggcuacuucaaaauccggagcgggaagucuuccaucaugcgcagcgacgcccccauuggaaaauguaauucugaaugcaucacaccgaacggcagcauuccuaaugauaagcccuuucagaacgugaauagaaucacguauggcgcuuguccucgguacgucaagcaaaacacccugaaacuugccacagggaugcgcaauguucccgagaagcagaccagaggaauuuucggcgcgaucgccggguuuaucgaaaacggaugggagggcaugguggacgggugguauggauuccggcaccaaaauuccgagggcagaggccaggcugccgaucugaaaucuacacaggcugccauugaccagaucaacgggaagcucaaucgccugauuggaaaaaccaacgaaaaguuccaccagaucgagaaagaauuuagcgagguggaaggccggauucaagaucuugagaaguacgucgaggacacgaagaucgaucugugguccuauaacgccgaacuccugguggcucuggagaaucagcauacaauugaccucaccgauagcgaaaugaacaaacuguucgagaagaccaaaaagcagcuuagagaaaaugcggaggacauggggaacggaugcuuuaaaaucuaccacaagugugauaaugccugcaucggcucuauucgcaacgggacauaugaccaugacguuuaccgggaugaggcucugaauaacagauuccagaucaagggcguggaacucaaauccggauacaaggacuggauucuguggaucagcuuugccauuucuugcuuccuucugugugucgcccuccugggcuuuaucaugugggcuugccaaaaagggaauauccgcuguaacauuugcaucuga

SEQ ID NO: 197583 - RNA, 1698 nt, Artificial Sequence
  derived and/or modified CDS sequence (opt5) from hemagglutinin__InfluenzaA__ADL39445
augaaggugaaacugcucguccugcuuugcaccuucacagccacguacgcugacaccaucuguauuggcuaucacgccaacaauagcacagauaccguugacacagugcuggagaagaacgugaccgucacacauuccgugaaucuccuggaaaacucucacaaugggaaacuuugccugcucaagggaaucgcgccccugcagcugggcaacuguagcguugcuggguggauucucggaaauccugagugcgaacugcuuaucuccaaagagucuuggagcuacauuguggaaaagccgaaccccgagaauggcaccuguuauccugggcauuuugccgauuacgaggaacugagagagcaacucuccucugucagcuccuucgaacgguuugagaucuuccccaaggagagcucuuggccuaaccacacggugaccggaguuuccgccagcugcucucauaauggcgaauccagcuuuuaucgcaaccugcuuuggcugacaggcaaaaaugggcucuaccccacccugucuaaguccuaugcuaacaauaaagagaaggaagugcugguccucuggggagugcaccacccuccgaacaucguggaccagaaaacacuguacagaaccgagaacgccuacgucagcguuguguccucucauuauagccggaaguucacgcccgaaauugcuaagcgcccuaaagugagagaucaggagggccggaucaauuacuauuggacacuucuggagcccggggacaccauuaucuuugaagccaacggaaaucucauugcgccucgcuacgccuucgcucuguccagaggcuuugggagcggaaucauuaacucuaaugcccccauggauaagugugacgcuaaaugccagacaccgcaaggcgccaucaacuccagccuuccuuuccagaauguccaccccgugaccaucggcgaguguccuaaguauguucggucugcgaaacugcgcauggugaccgggcucagaaacauucccagcauccagucccggggacuguuuggcgccauugcuggguucaucgaaggaggcuggacagggauggucgauggaugguacggcuaucaucaccagaaugagcaaggcucuggguacgccgcugaccagaaguccacgcagaacgccauuaauggaaucaccaacaaagugaauagcguuaucgaaaagaugaacacacaguuuaccgccgugggcaaggaguucaauaaacuggagcgcagaauggaaaaccucaacaagaaagucgaugacggguucauugauaucuggacauacaaugcugagcugcuugugcugcucgaaaacgagcggacccuggacuuucacgacagcaaugucaagaaccuuuaugaaaaagugaagucucaacugaagaauaacgcgaaagagauuggaaauggcugcuucgaguuuuaccauaaguguaacgaugaaugcauggaguccguuaaaaaugggacguaugacuaccccaaguauagcgaagagucuaaacucaaccgcgagaagaucgauggcgugaagcuggaauccaugggagucuaccagauucuggccaucuauagcacaguggcuuccucucucguucugcuugugagccugggcgccaucuccuucuggaugugcucuaaugggagccuccaguguagaauuugcaucuga

SEQ ID NO: 197584 - RNA, 1698 nt, Artificial Sequence
  derived and/or modified CDS sequence (opt5) from hemagglutinin__InfluenzaA__ADL39456
augaaggugaaacugcucguccugcuuugcaccuucacagccacguacgcugacaccaucuguauuggcuaucacgccaacaauagcacagauaccguugacacagugcuggagaagaacgugaccgucacacauuccgugaaucuccuggaaaacucucacaaugggaaacuuugccugcucaagggaaucgcgccccugcagcugggcaacuguagcguugcuggguggauucucggaaauccugagugcgaacugcuuaucuccaaagagucuuggagcuacauuguggaaaagccgaaccccgagaauggcaccuguuauccugggcauuuugccgauuacgaggaacugagagagcaacucuccucugucagcuccuucgaacgguuugagaucuuccccaaggagagcucuuggccuucccacacggugaccggaguuagcgccucuugcucccauaacggcgaaaauagcuuuuaucgcaaccugcuuuggcugacaggcaaaaaugggcucuaccccaaccugucuaaguccuaugcuaauaacaaagagaaggaagugcugguccucuggggagugcaccacccuccgaacaucgccgaccagaaaacccuguaccauacagagaaugcuuacgugagcgucguuuccucucacuauagcagaaaguucacccccgaaauugccaagcggccuaaagugcgcgaucaggagggcagaaucaacuacuauuggacgcuucuggagcccggggacacaauuaucuuugaagcgaauggaaaccucauugccccucgguacgcuuucgcccugucccgcggcuuugggagcggaaucauuaauucuaacgcucccauggauaagugugacgccaaaugccagaccccgcaaggcgcgaucaauuccagccuuccuuuccagaacgugcaucccgucacaaucggcgaguguccuaaguaugugagaucugccaaacugcggaugguuaccgggcuccgcaauauucccagcauccaguccagaggacuguuuggcgcuauugccggguucaucgaaggaggcuggaccgggaugguggauggaugguacggcuaucaccaccagaacgagcaaggcucuggguacgcugccgaccaaaagagcacacagaaugccauuaacggaaucacgaauaaagucaacuccgugaucgaaaagaugaauacccaguuuacagcuguuggcaaggaguucaacaaacuggagcggcgcauggaaaaccucaauaagaaaguggaugacggguucauugauaucuggaccuacaacgcggagcugcuuguccugcucgaaaaugagagaacacuggacuuucaugacagcaacgugaagaaucuuuaugaaaaagucaagucucagcugaagaacaaugccaaagagauuggaaacggcugcuucgaguuuuaccacaaguguaaugaugaaugcauggaguccgugaaaaacgggaccuaugacuaccccaaguauagcgaagagucuaaacucaaucgggagaagaucgauggcguuaagcuggaauccaugggaguguaccagauucuggcuaucuauagcacggucgccuccucucucgugcugcuuguuagccugggcgccaucuccuucuggaugugcucuaacgggagccuccagugucgcauuugcaucuga

SEQ ID NO: 197585 - RNA, 1698 nt, Artificial Sequence
  derived and/or modified CDS sequence (opt5) from hemagglutinin__InfluenzaA__ADL39467
augaaggugaaacugcucguccugcuuugcaccuucacagccacguacgcugacaccaucuguauuggcuaucacgccaacaauagcacagauaccguugacacagugcuggagaagaacgugaccgucacacauuccgugaaucuccuggaaaacucucacaaugggaaacuuugccugcucaagggaaucgcgccccugcagcugggcaacuguagcguugcuggguggauucucggaaauccugagugcgaacugcuuaucuccaaagagucuuggagcuacauuguggaaaagccgaaccccgagaauggcaccuguuauccugggcauuuugccgauuacgaggaacugagagagcaacucuccucugucagcuccuucgaacgguuugagaucuuccccaaggagagcucuuggccuaaccacacggugaccggaguuuccgccagcugcucucauaauggcgaauccagcuuuuaucgcaaccugcuuuggcugacaggcaaaaaugggcucuaccccaaccugucuaaguccuaugcuaauaacaaagagaaggaagugcugguccucuggggagugcaccacccuccgaacaucguggaccagaaaacccuguacagaacagagaaugccuacgucagcguuguguccucucauuauagccggaaguucacccccgaaauugcuaagcgcccuaaagugagagaucaggagggccggaucaacuacuauuggacgcuucuggagcccggggacacaauuaucuuugaagccaauggaaaccucauugcgccucgcuacgccuucgcucuguccagaggcuuugggagcggaaucauuaauucuaacgcccccaugggcaagugugaugcuaaaugccagaccccgcaaggcgccaucaauuccagccuuccuuuccagaacguccaccccgugacaaucggggaguguccuaaguauguucggucugcgaaacugcgcauggugaccggacucagaaauauucccagcauccagucccggggccuguuuggggccauugcuggauucaucgaaggcggguggaccggaauggucgacggcugguacggcuaucaucaccagaacgagcaagggucuggauacgccgcugaucaaaagagcacacagaaugccauuaacggcaucacgaauaaagugaacuccguuaucgaaaagaugaauacccaguuuacagccguggggaaggaguucaacaaacuggagcgcagaauggaaaaccucaauaagaaagucgacgauggauucauugacaucuggaccuacaacgcugagcugcuugugcugcucgaaaaugagcggacacuggauuuucacgacagcaacgucaagaaucuuuaugaaaaagugaagucucagcugaagaacaaugcgaaagagauuggcaacgggugcuucgaguuuuaccauaaguguaaugacgaaugcauggaguccguuaaaaacggcaccuaugauuaccccaaguauagcgaagagucuaaacucaaucgcgagaagaucgacggagugaagcuggaauccaugggcgucuaccagauucuggccaucuauagcacgguggcuuccucucucguucugcuugugagccugggggccaucuccuucuggaugugcucuaacggaagccuccaguguagaauuugcaucuga

SEQ ID NO: 197586 - RNA, 1701 nt, Artificial Sequence; identical to SEQ ID NO: 194741
  derived and/or modified CDS sequence (opt5) from hemagglutinin__InfluenzaA__ADL41164

SEQ ID NO: 197587 - RNA, 1701 nt, Artificial Sequence; identical to SEQ ID NO: 194834
  derived and/or modified CDS sequence (opt5) from hemagglutinin__InfluenzaA__ADL41173

SEQ ID NO: 197588 - RNA, 1698 nt, Artificial Sequence
  derived and/or modified CDS sequence (opt5) from hemagglutinin__InfluenzaA__ADL60242
augaaggugaaacugcucguccugcuuugcaccuucacagccacguacgcugacaccaucuguauuggcuaucacgccaacaauagcacagauaccguugacacagugcuggagaagaacgugaccgucacacauuccgugaaucuccuggaaaacucucacaaugggaaacuuugccugcucaagggaaucgcgccccugcagcugggcaacuguagcguugcuggguggauucucggaaauccugagugcgaacugcuuaucuccaaagagucuuggagcuacauuguggaaaagccgaaccccgagaauggcaccuguuauccugggcauuuugccgauuacgaggaacugagagagcaacucuccucugucagcuccuucgaacgguuugagaucuuccccaaggagagcucuuggccuaaccacacggugaccggaguuuccgccagcugcucucauaauggcgaacgcuccuuuuauagaaaccugcuuuggcugacaggcaaaaaugggcucuaccccaaccugagcaagucuuaugcuaauaacaaagagaaggaagugcugguccucuggggagugcaccacccuccggacaucggcaaccagaaaacccuguaccauacagagaaugccuacguguccgucguuagcucccacuauucucggaaguucacccccgaaauugcuaagcgcccuaaagugagagaucaggaggggcggaucaacuacuauuggacgcuucuggagcccggagacacaauuaucuuugaagccaauggcaaccucauugcgccucgcuacgccuucgcucugagcagaggguuuggauccggcaucauuaauagcaacgcccccauggauaagugugacgcuaaaugccagaccccgcaaggcgccaucaauucuucccuuccuuuccagaacgugcaucccgucacaaucggggaguguccuaaguaugugcggagcgcgaaacugcgcaugguuaccggacucagaaauauucccucuauccagagccggggccuguuuggggccauugcuggauucaucgaaggcggguggaccggaaugguggauggcugguacggcuaucaccaccagaacgagcaaggguccggauacgccgcugaccagaagucuacacagaaugccauuaacggcaucacgaauaaagucaacagcgugaucgaaaagaugaauacccaguuuacagccguugggaaggaguucaacaaacuggagcgcagaauggaaaaccucaauaagaaaguggaugacggauucauugauaucuggaccuacaacgcugagcugcuuguccugcucgaaaaugagcggacacuggacuuucaugacuccaacgugaagaaucuuuaugaaaaagucaagagccaacugaagaacaaugcgaaagagauuggcaacgggugcuucgaguuuuaccacaaguguaaugaugaaugcauggagucugugaaaaacggcaccuaugacuaccccaaguauuccgaagagagcaaacucaaucgcgagaagaucgauggaguuaagcuggaaucuaugggcguguaccagauucuggccaucuauuccacggucgcuagcucccucgugcugcuuguuucucugggggccaucagcuucuggaugugcuccaacggaucucuccaguguagaauuugcaucuga

SEQ ID NO: 197589 - RNA, 1698 nt, Artificial Sequence
  derived and/or modified CDS sequence (opt5) from hemagglutinin__InfluenzaA__ADL60253
augaaggugaaacugcucguccugcuuugcaccuucacagccacguacgcugacaccaucuguauuggcuaucacgccaacaauagcacagauaccguugacacagugcuggagaagaacgugaccgucacacauuccgugaaucuccuggaaaacucucacaaugggaaacuuugccugcucaagggaaucgcgccccugcagcugggcaacuguagcguugcuggguggauucucggaaauccugagugcggccugcuuaucuccaaagaaucuuggagcuacauuguggagaagccgaaccccgaaaaugggaccuguuauccuggauacuuugccgauuaugaggagcugagagaacaacucuccucugucagcuccuucgagcgguuugaaaucuuccccaaggagagcucuuggccuaaccauacggugaccggcguuuccgccagcugcucucacaauggcgaguccagcuuuuaccgcaaccugcuuuggcugacagggaaaaauggacucuaucccaaccugucuaaguccuacgcuaauaacaaagaaaaggaggugcugguccucuggggcgugcaucacccuccgaacaucgggaaucagaaagcccuguaccacaccgaaaacgcuuaugugagcgucguuuccucucauuacagcagaaaguucacacccgagauugccaagcggccuaaagugcgcgaccaggaaggaagaaucaauuauuacuggacccuucuggagcccggcgauacgauuaucuuugaggcgaacgggaaucucauugccccucgguaugcuuucgcccugucccgcggauuuggcagcggcaucauuaacucuaaugcucccauggacaagugugaugccaaaugccagacaccgcaaggggcgaucaacuccagccuuccuuuccagaaugugcaccccgucaccaucggagaauguccuaaguacgugagaucugccaaacugcggaugguuacaggccuccgcaacauucccagcauccaguccagagggcuguuuggagcuauugccggcuucaucgaagggggauggaccggcaugguggacggcugguauggguaccaucaccagaaugaacaaggaucuggcuacgcugccgaucaaaagagcacccagaacgccauuaaugggaucacaaacaaagucaauuccgugaucgagaagaugaacacgcaguuuaccgcuguuggaaaggaguucaacaaacuggagcggcgcauggagaaucucaacaagaaaguggacgauggcuucauugacaucuggacauauaaugcggaacugcuuguccugcucgagaacgaaagaacccuggauuuucacgacagcaaugugaagaaccuuuacgagaaagucaagucucagcugaagaauaacgccaaagaaauugggaauggcugcuucgaguuuuaucauaaguguaacgacgagugcauggaauccgugaaaaauggaacauacgauuaucccaaguacagcgaggaaucuaaacucaaccgggagaagaucgacggcguuaagcuggaguccauggggguguaucagauucuggcuaucuacagcaccgucgccuccucucucgugcugcuuguuagccugggagccaucuccuucuggaugugcucuaauggcagccuccagugucgcauuugcaucuga

SEQ ID NO: 197590 - RNA, 1698 nt, Artificial Sequence; identical to SEQ ID NO: 197588
  derived and/or modified CDS sequence (opt5) from hemagglutinin__InfluenzaA__ADL60264

SEQ ID NO: 197591 - RNA, 1698 nt, Artificial Sequence; identical to SEQ ID NO: 197588
  derived and/or modified CDS sequence (opt5) from hemagglutinin__InfluenzaA__ADL60275

SEQ ID NO: 197592 - RNA, 1698 nt, Artificial Sequence
  derived and/or modified CDS sequence (opt5) from hemagglutinin__InfluenzaA__ADL60286
augaaggugaaacugcucguccugcuuugcaccuucacagccacguacgcugacaccaucuguauuggcuaucacgccaacaauagcacagauaccguugacacagugcuggagaagaacgugaccgucacacauuccgugaaucuccuggaaaacucucacaaugggaaacuuugccugcucaagggaaucgcgccccugcagcugggcaacuguagcguugcuggguggauucucggaaauccugagugcgaacugcuuaucuccaaagagucuuggagcuacauuguggaaaagccgaaccccgagaauggcaccuguuauccugggcauuuugccgauuacgaggaacugagagagcaacucuccucugucagcuccuucgaacgguuugagaucuuccccaaggagagcucuuggccuaaccacacggugaccggaguuuccgccagcugcucucauaauggcgaauccagcuuuuaucgcaaccugcuuuggcugacaggcaaaaaugggcucuaccccaaccugucuaaguccuaugcuaauaacaaagagaaggaagugcugguccucuggggagugcaccacccuccgagcaucuccaaccagaaaacccuguaccauacagagaaugccuacgugucugucguuagcucccacuauagcagaaaguucacccccgaaguggcuaagcggccuaaagugcgcgaccaggagggcagaauuaacuacuauuggacgcuucuggagcccggggauacaaucauuuuugaagccaauggaaaccucaucgcgccucgguacgccuucgcucugucucgcggcuuuggguccggaauuaucaauagcaacgcccccauggacaagugugaugcuaaaugccagaccccgcaaggcgccauuaauucuagccuuccuuuccagaacguccaucccgugacaaucggcgaguguccuaaguauguuagauccgcgaaacugcggauggugaccgggcuccgcaauauccccucuauucagagcagaggacuguuuggcgccaucgcuggguucauugaaggaggcuggaccgggauggucgacggaugguacggcuaucaccaccagaacgagcaaggcuccggguacgccgcugaucaaaagagcacacagaaugccaucaacggaauuacgaauaaagugaacucuguuaucgaaaagaugaauacccaguuuacagccgugggcaaggaguucaacaaacuggagcggcgcauggaaaaccucaauaagaaagucgacgauggguucaucgacauuuggaccuacaacgcugagcugcuugugcugcucgaaaaugagagaacacuggauuuucaugacuccaacgucaagaaucuuuaugaaaaaguuaagagccagcugaagaacaaugcgaaagagaucggaaacggcugcuucgaguuuuaccacaaguguaaugacgaaugcauggagucugugaaaaacgggaccuaugauuaccccaaguauuccgaagagagcaaacucaaucgggagaagauugacggcgugaagcuggaauccaugggagucuaccagauccuggccauuuauucuacgguggcuagcucccucguucugcuugugucucugggcgccaucagcuucuggaugugcuccaacgggagccuccagugucgcaucugcauuuga

SEQ ID NO: 197593 - RNA, 1698 nt, Artificial Sequence
  derived and/or modified CDS sequence (opt5) from hemagglutinin__InfluenzaA__ADL60297
augaaggugaaacugcucguccugcuuugcaccuucacagccacguacgcugacaccaucuguauuggcuaucacgccaacaauagcacagauaccguugacacagugcuggagaagaacgugaccgucacacauuccgugaaucuccuggaaaacucucacaaugggaaacuuugccugcucaagggaaucgcgccccugcagcugggcaacuguagcguugcuggguggauucucggaaauccugagugcgaacugcuuaucuccaaagagucuuggagcuacauuguggaaaagccgaaccccgagaauggcaccuguuauccugggcauuuugccgauuacgaggaacugagagagcaacucuccucugucagcuccuucgaacgguuugagaucuuccccaaggagagcucuuggccuaaccacacggugaccggaguuuccgccagcugcucucauaauggcgaauccagcuuuuaucgcaaccugcuuuggcugacaagaaagaauggccucuaccccaaccugucuaaguccuaugcuaauaacaaagagaaggaagugcugguccucuggggagugcaccacccuccgaacaucggggaccagaaaacccuguaccauacagagaaugccuacgugagcgucguuuccucucacuauagccggaaguucacccccgaaauugcuaagcgcccuaaagugagagaucaggagggccggaucaacuacuauuggacgcuucuggagcccggggacacaauuaucuuugaagccaauggaaaccucauugcgccucgcuacgccuucgcucuguccagaggcuuugggagcggaaucauuaauucuaacgcccccauggauaagugugacgcuaaaugccagaccccgcaaggcgccaucaauuccagccuuccuuuccagaacgugcaucccgucacaaucggcgaguguccuaaguaugugcggucugcgaaacugcgcaugguuaccgggcucagaaauauucccagcauccagucccggggacuguuuggcgccauugcuggguucaucgaaggaggcuggaccgggaugguggauggaugguacggcuaucaccaccagaacgagcaaggcucuggguacgccgcugaccagaaaagcacacagaaugccauuaacggaaucacgaauaaagucaacuccgugaucgaaaagaugaauacccaguuuacagccguuggcaaggaguucaacaaacuggagcgcagaauggaaaaccucaauaagaaaguggaugacggguucauugauaucuggaccuacaacgcugagcugcuuguccugcucgaaaaugagcggacacuggacagccaugacucuaacgugaagaaucuuuaugaaaaagucaagucccaacugaagaacaaugcgaaagagauuggaaacggcugcuuugaguucuaccacaaguguaaugaugaaugcauggagagcgugaaaaacgggaccuaugacuaccccaaguauucugaagaguccaaacucaaucgcgagaagaucgauggcguuaagcuggaaagcaugggaguguaccagauucuggccaucuauuccacggucgcuucuagccucgugcugcuuguuucccugggcgccaucucuuuuuggaugugcagcaacgggucccuccaguguagaauuugcaucuga

SEQ ID NO: 197594 - RNA, 1698 nt, Artificial Sequence
  derived and/or modified CDS sequence (opt5) from hemagglutinin__InfluenzaA__ADL60308
augaaggugaaacugcucguccugcuuugcaccuucgccgcuacauacgccgacacgaucuguauuggcuaucacgcgaacaauagcaccgauacaguugacaccgugcuggagaagaacgugacagucacccauuccgugaaucuccuggaaaacucucacaaugggaaacuuugccugcucaagggaaucgcuccccugcagcugggcaacuguagcguugccggguggauucucggaaauccugagugcgaacugcuuaucuccaaagagucuuggagcuacauuguggaaaagccgaaccccgagaauggcacauguuauccugggcauuuugccgauuacgaggaacugagagagcaacucuccucugucagcuccuucgaacgguuugagaucuuccccaaggagagcucuuggccuaaccacaccgugacgggaguuuccgcuagcugcucucauaauggcgaauccagcuuuuaucgcaaccugcuuuggcugaccggcaaaaaugggcucuaccccaaccugucuaaguccuaugccaauaacaaagagaaggaagugcugguccucuggggagugcaccacccuccgaacaucggcgugcagaaagcucuguaccauacagagaaugccuacgucagcguuguguccucucacuauagcagaaaguucacccccgaaauugcgaagcggccuaaagugcgcgaccaggaggggagaaucaacuacuauuggacacuucuggagcccggagauaccauuaucuuugaagccaauggcaaccucauugcuccucgguacgccuucgcucugucccgcggguuuggaagcggcaucauuaauucuaacgcccccauggacaagugugaugcgaaaugccagacgccgcaaggcgccaucaauuccagccuuccuuuccagaacguccaucccgugacaaucggggaguguccuaaguauguuagaucugcuaaacugcggauggugaccggacuccgcaauauucccagcauccaguccagaggccuguuuggggccauugcuggauucaucgaaggcggguggacaggaauggucgacggcugguacggcuaucaccaccagaacgagcaagggucuggauacgccgccgaucaaaagagcacccagaaugcuauuaacggcaucaccaauaaagugaacuccguuaucgaaaagaugaauacacaguuuacggcgguggggaaggaguucaacaaacuggagcggcgcauggaaaaccucaauaagaaagucgacgauggauucauugacaucuggaccuacaacgccgagcugcuugugcugcucgaaaaugagagaacacuggauuuucaugacagcaacgucaagaaucuuuaugaaaaagugaagucucagcugaagaacaaugcuaaagagauuggcaacgggugcuucgaguuuuaccacaaguguaaugacgaaugcauggaguccguuaaaaacggcaccuaugauuaccccaaguauagcgaagagucuaaacucaaucgggagaagaucgacggagugaagcuggaauccaugggcgucuaccagauucuggccaucuauagcacaguggccuccucucucguucugcuugugagccugggggcuaucuccuucuggaugugcucuaacggaagccuccagugucgcauuugcaucuga

SEQ ID NO: 197595 - RNA, 1698 nt, Artificial Sequence
  derived and/or modified CDS sequence (opt5) from hemagglutinin__InfluenzaA__ADL60341
augaaggugaaacugcucguccugcuuugcaccuucacagccacguacgcugacaccaucuguauuggcuaucacgccaacaauagcacagauaccguugacacagugcuggagaagaacgugaccgucacacauuccgugaaucuccuggaaaacucucacaaugggaaacuuugccugcucaagggaaucgcgccccugcagcugggcaacuguagcguugcuggguggauucucggaaauccugagugcgaacugcuuaucuccaaagagucuuggagcuacauuguggaaaagccgaaccccgagaauggcaccuguuauccugggcauuuugccgauuacgaggaacugagagagcaacucuccucugucagcuccuucgaacgguuugagaucuuccccaaggagagcucuuggccuaaccacacggugaccggaguuuccgccagcugcucucauaauggcgaauccagcuuuuaucgcaaccugcuuuggcugacaggcaaaaaugggcucuaccccaaccugucuaaguccuaugcuaauaacaaagagaaggaagugcugguccucuggggagugcaccacccuccgaacaucggcgugcagaaagcccuguaccauaccgagauugcuuacgucagcguuguguccucucacuauagcagaaaguucacacccgaaaucgccaagcggccuaaagugcgcgaccaggaggggagaauuaauuacuauuggaccauccuugagcccggagauacgauuaucuuugaagcgaacggcaaucugauugccccucgguacgcuuucgcccucucccgcggguuuggaagcggcaucaucaacucuaaugcucccauggacaagugugaugccaaaugccagacaccgcaaggcgcgauuaacuccagccugccuuuccagaauguccaucccgugaccaucggggaguguccuaaguauguuagaucugccaaacuucggauggugacaggacugcgcaacauucccagcauccaguccagaggccucuuuggggcuauugccggauucaucgaaggcggguggaccggaauggucgacggcugguacggcuaucaccaccagaaugagcaagggucuggauacgcugccgaucagaaguccacccagaacgccaucaauggcauuacaaacaaagugaauagcguuaucgaaaagaugaacacgcaguuuaccgcuguggggaaggaguucaauaaacuggagcggcgcauggaaaaccugaacaagaaagucgacgauggauucauugacaucuggacauacaaugcggagcuccuggugcuucuggaaaacgagagaacccucgauuuucaugacagcaaugucaagaaccuguaugaaaaagugaagucucaacuuaagaauaacgccaaagagauuggcaaugggugcuucgaguuuuaccacaaguguaacgacgaaugcauggaguccguuaaaaauggcacauaugauuaccccaaguauagcgaagagucuaaacugaaccgggagaagaucgacggagugaagcucgaauccaugggcgucuaccagauccuggcuauuuauagcaccguggccuccucucugguucuccuggugagccuuggggccaucuccuucuggaugugcucuaauggaagccugcagugucgcauuugcaucuga

SEQ ID NO: 197596 - RNA, 1698 nt, Artificial Sequence
  derived and/or modified CDS sequence (opt5) from hemagglutinin__InfluenzaA__ADL60352
augaaggugaaacugcucguccugcuuugcaccuucacagccacguacgcugacaccaucuguauuggcuaucacgccaacaauagcacagauaccguugacacagugcuggagaagaacgugaccgucacacauuccgugaaucuccuggaaaacucucacaaugggaaacuuugccugcucaagggaaucgcgccccugcagcugggcaacuguagcguugcuggguggauucucggaaauccugagugcgaacugcuuaucuccaaagagucuuggagcuacauuguggaaaagccgaaccccgagaauggcaccuguuauccugggcauuuugccggauacgaggaacugagagagcaacucuccucugucagcuccuucgaacgguuugagaucuuccccaaggagagcucuuggccuaaccacacggugaccggcguuuccgccagcugcucucauaauggcgaacgcuccuuuuauagaaaccugcuuuggcugacagggaaaaauggacucuaccccaaccugagcaagucuuaugcuaauaacaaagagaaggaagugcugguccucuggggcgugcaccacccuccggauaucgggaaccagaaaacccuguaccauacagagaaugccuacguguccgucguuagcucccacuauucucggaaguucacccccgaaauugcuaagcgcccuaaagugagagaccaggagggacggaucaacuacuauuggacgcuucuggagcccggcgauacaauuaucuuugaagccaaugggaaccucauugcgccucgcuacgccuucgcucugagcagaggauuuggcuccggcaucauuaauagcaacgcccccauggacaagugugaugcuaaaugccagaccccgcaaggggccaucaauucuucccuuccuuuccagaacgugcaucccgucacaaucggagaguguccuaaguaugugcggagcgcgaaacugcgcaugguuaccggccucagaaauauucccucuauccagagccgggggcuguuuggagccauugcuggcuucaucgaagggggauggaccggcaugguggacggcugguacggguaucaccaccagaacgagcaaggauccggcuacgccgcugaucagaagucuacacagaaugccauuaacgggaucacgaauaaagucaacagcgugaucgaaaagaugaauacccaguuuacagccguuggaaaggaguucaacaaacuggagcgcagaauggaaaaccucaauaagaaaguggacgauggcuucauugacaucuggaccuacaacgcugagcugcuuguccugcucgaaaaugagcggacacuggauuuucaugacuccaacgugaagaaucuuuaugaaaaagucaagagccaacugaagaacaaugcgaaagagauugggaacggcugcuucgaguuuuaccacaaguguaaugacgaaugcauggagucugugaaaaacggaaccuaugauuaccccaaguauuccgaagagagcaaacucaaucgcgagaagaucgacggcguuaagcuggaaucuauggggguguaccagauucuggccaucuauuccacggucgcuagcucccucgugcugcuuguuucucugggagccaucagcuucuggaugugcuccaacggcucucuccaguguagaauuugcaucuga

SEQ ID NO: 197597 - RNA, 1701 nt, Artificial Sequence
  derived and/or modified CDS sequence (opt5) from hemagglutinin__InfluenzaA__ADL60363
augaagaccaucauugcccugagcuacauccucugccugguguucgcucagaaauuucccggcaacgacaauuccacagccacgcuuugucuggggcaccaugcggucccuaacggaaccauuguuaagacaaucaccaaugaucaaauugaggugacaaacgcuaccgaacucgugcagucuagcuccacaggcgagaucugcgacucuccgcaccagauccuggauggggaaaauuguacccuuauugacgcccugcucggagauccccagugcgacggcuuccaaaacaaaaauugggaucuguuugucgagagaagcaaggccuauuccaacuguuacccuuaugacgugcccgauuacgcuucucugcggagccucaucgccuccagcgggacgcuggaguucaauaacgaaucuuuuaauuggaccggaguuacacagaacggcaccuccagcgcuugcauucgcagaucuaauaacuccuucuuuagccggcuuaauuggcugacacauucuaaauucaaguauccugcccucaacgugaccaugcccaacaaugagaacuuugacaagcuguacaucuggggcguccaccauccugggacggauaaugaccagauuuuccuuuaugcgcaggccuccggacgcaucacaauuagcaccaaaagaucccaacagacagugaucccgaacaucggcucucggccccgcguuagagauauuccuagccggaucuccauuuacuggaccaucgugaagcccggggacauucugcucaucaauagcaccggaaaccugaucgcuccucgcggcuacuuuaaaauuagaucugggaaguccagcaucaugcggucugacgcccccauuggaaaauguaauagcgaaugcaucacaccgaacggcuccauuccuaaugauaagcccuuccagaacgucaaucgcaucacguauggcgcuuguccuagauacgugaagcagaacacccugaaacucgccacagggaugcggaaugugcccgagaagcaaacccgcggaaucuuuggcgcgauugccggguucaucgaaaacggaugggagggcauggucgacgggugguauggauucagacaccaaaauucugagggcguuggccaggcugccgaucugaaaagcacacaggcugccauugaccagaucaacgggaaacuuaaccggcugauuggaaagaccaaugaaaaguuucaccagaucgagaaagaguucuccgaaguggaaggccgcauucaggaucucgagaaguacguggaggacacgaagaucgaucuguggagcuauaacgccgaacuucuggucgcucucgagaaucaacauacaaucgaccugaccgauucugaaaugaacaaacuguuugagaagaccaaaaagcagcucagagaaaaugcggaggacauggggaacggaugcuucaaaauuuaccacaagugugauaaugccugcaucggcuccauucggaacgggacauaugaccaugacguguacagagaugaggcucugaauaaccgcuuucagaucaagggcguugaacuuaaaagcggauacaaggacuggauucuguggaucucuuucgccaucuccugcuuucuccuguguauugcccuucugggcuucaucaugugggcuugccagaaagggaauauucgguguaacaucugcauuuga

SEQ ID NO: 197598 - RNA, 1698 nt, Artificial Sequence
  derived and/or modified CDS sequence (opt5) from hemagglutinin__InfluenzaA__ADL60374
augaaggugaaacugcucguccugcuuugcaccuucacagccacguacgcugacaccaucuguauuggcuaucacgccaacaauagcacagauaccguugacacagugcuggagaagaacgugaccgucacacauuccgugaaucuccuggaaaacucucacaaugggaaacuuugccugcucaagggaaucgcgccccugcagcugggcaacuguagcguugcuggguggauucucggaaauccugagugcgaacugcuuaucuccaaagagucuuggagcuacauuguggaaaagccgaaccccgagaauggcaccuguuauccugggcauuuugccgauuacgaggaacugagagagcaacucuccucugucagcuccuucgaacgguuugagaucuuccccaaggagagcucuuggccuaaccacacggugaccggaguuuccgccagcugcucucaugacggcgaauccagcuuuuaucgcaaucugcuuuggcugacaggcaaaaacgggcucuaccccaaucugucuaaguccuaugcuaacaauaaagagaaggaagugcugguccucuggggagugcaccacccuccgaacaucggcgaucagaaagcccuguaccauaccgagaacgcuuacgugagcgucguuuccucucacuauagcagaaaguucacacccgaaauugccaagcggccuaaagugcgcgaccaggaggggagaaucaauuacuauuggacccuucuggagcccggagauacgauuaucuuugaagcgaacggcaaucucauugccccucgguacgcuuucgcccugucccgcggguuuggaagcggcaucauuaacucuaaugcucccauggacaagugugaugccaaaugccagacaccgcaaggcgcgaucaacuccagccuuccuuuccagaaugugcaucccgucaccaucggggaguguccuaaguaugugagaucugccaaacugcggguugugacaggacuccgcaacauucccagcauccaguccagaggccuguuuggggcuauugccggauucaucgaaggcggguggaccggaauggucgacggcugguacggcuaucaccaccagaaugagcaagggucuggauacgcugccgaucagaaguccacccagaacgccauuaauggcaucacaaacaaagugaauagcguuaucgaaaagaugaacacgcaguuuaccgcuguggggaaggaguucaauaaacuggagcggcgcauggaaaaccucaacaagaaagucgacgauggauucauugacaucuggacauacaaugcggagcugcuugugcugcucgaaaacgagagaacccuggacuuucaugauagcaaugucaagaaccuuuaugaaaaagugaagucucaacugaagaauaacgccaaagagauuggcaaugggugcuucgaguuuuaccacaaguguaacgacgaaugcauggaguccguuaaaaauggcacauaugauuaccccaaguauagcgaagagucuaaacucaaccgggagaagaucgacggagugaagcuggaauccaugggcgucuaccagauucuggcuaucuauagcaccguggccuccucucucguucugcuugugagccugggggccaucuccuucuggaugugcucuaauggaagccuccagugucgcauuugcaucuga

SEQ ID NO: 197599 - RNA, 1701 nt, Artificial Sequence
  derived and/or modified CDS sequence (opt5) from hemagglutinin__InfluenzaA__ADM07135
augaaggccauccuggugguccuccuguacaccuucgcuacagccaacgcggacacgcuuugcauuggcuaucacgcuaauaacagcaccgauacaguugacaccgugcuggagaaaaaugugacagucacccauuccgugaaccuccuggaagauaagcacaaugggaaacuuuguaagcugagaggaguugcuccccuccaucugggcaaaugcaacaucgccggguggauucugggaaauccugagugugaaucucucagcacagccuccucuuggagcuacaucguggagaccuccucuagcgacaacggcacgugcuauccgggggauuuuauugacuacgaagaacugcgggagcagcuuuccagcgucucuuccuucgaacgcuuugagaucuuccccaagaccagcucuuggccuaaucacgaauccaacaagggagugacagccgcuuguccccaugccggcgcgaaaucuuuuuauaagaaucugaucuggcucguuaaaaagggcaacagcuacccuaaacuguccaagagcuauauuaaugauaaggggaaagaggugcuuguccuguggggaauccaccaccccuccaccucugccgaccaacagagccucuaccagaacgcugaugccuacguguucgugggcacauccagauauagcaagaaauuuaagccugagauugcuauccggccgaaaguccgcgaccaggaagggagaaugaauuacuauuggacccugguugagcccggagauaagauuacguucgaagccacaggcaaccugguggugccucgguacgcguuugccauggagcgcaacgcugggucuggaaucauuaucuccgacacccccguccaugauugcaauacaaccugucaaaccccuaaaggcgccaucaacacaagccuccccuuccagaauauucacccgaucacgauuggcaagugcccuaaguaugugaaaucuaccaagcugagacuugcuacagggcugcggaacguucccagcauccagucccgcggacucuuuggcgccauugccggguucaucgaaggaggcuggaccgggaugguggacggaugguacggcuaucaucaccagaaugagcaaggcucuggguacgcugcggaccugaaaagcacacagaacgccaucgaugagauuaccaauaaggucaacuccgugaucgaaaagaugaauacgcaguuuacagcuguuggaaaggaguucaaccaccuugaaaagagaauugagaaucugaacaaaaagguggacgauggcuuccucgacaucuggaccuacaaugccgaacugcugguccuccuggagaacgagcggacccuugauuaucaugacagcaaugugaaaaaccuguacgaaaagguccgcucucagcucaaaaacaaugccaaggagauugggaacggauguuuugaguucuaucacaagugcgauaauacauguauggaguccgugaaaaacggcaccuacgacuauccuaaguacagcgaagaggcuaaacugaauagagaggaaaucgaugggguuaaacuugagucuacacggaucuaucaaauucuggccaucuacuccacgguggcgagcucccucguccuggugguuucucugggcgcuauuagcuuuuggaugugcuccaacggaucucuccagugccgcaucuguauuuga

SEQ ID NO: 197600 - RNA, 1701 nt, Artificial Sequence; identical to SEQ ID NO: 195226
  derived and/or modified CDS sequence (opt5) from hemagglutinin__InfluenzaA__ADM07144

SEQ ID NO: 197601 - RNA, 1701 nt, Artificial Sequence
  derived and/or modified CDS sequence (opt5) from hemagglutinin__InfluenzaA__ADM07154
augaaggccauccuggugguccuccuguacaccuucgcuacagccaacgcggacacgcuuugcauuggcuaucacgcuaauaacagcaccgauacaguugacaccgugcuggagaagaaugugacagucacccauuccgugaaccuccuggaagauaagcacaaugggaaacuuuguaagcugagaggaguugcuccccuccaucugggcaaaugcaacaucgccggguggauucugggaaauccugagugugaaucucucagcacagccuccucuuggagcuacaucguggagaccuccucuagcgacaacggcacgugcuauccgggggauuuuauugacuacgaagaacugcgggagcagcuuuccagcgucucuuccuucgaacgcuuugagaucuuccccaagaccagcucuuggccuaaucacgauuccaacaagggagugacagccgcuuguccccaugccggcgcgaaaucuuuuuauaagaaucugaucuggcucguuaaaaagggcaacagcuacccuaaacuguccaagagcuauauuaaugacaaggggaaagaagugcuuguccuguggggaauccaccaucccccuaccuccgccgaucaacagucucucuaccagaacgcugacgccuacguguucgugggcacaagcagauauuccaagaaauuuaagccggagauugcuauccggcccaaaguccgcgaucaggaggggagaaugaauuacuauuggacccugguugaaccuggagacaagauuacguucgaggccacaggcaaccugguggugccccgguacgcguuugccaugguccgcaacgcugggagcggaaucauuaucucugauaccccugugcacgacugcaauacaaccugucaaacccccaaaggcgccaucaacacaucccucccguuccagaauauucacccuaucacgauuggcaagugccccaaguauguuaaaagcaccaagcugagacuugcuacagggcugcggaacgugccuucuauccagagccgcggacucuuuggcgccauugccggguucaucgaaggaggcuggaccgggauggucgacggaugguacggcuaucaucaccagaaugagcaaggcuccggguacgcugcggaucugaaaucuacacagaacgccaucgacgaaauuaccaauaaggugaacagcguuaucgagaaaaugaauacgcaguuuacagcugugggaaaggaguucaaccaccuugaaaagagaauugagaaucugaacaaaaaggucgaugacggcuuccucgauaucuggaccuacaaugccgaacugcuggugcuccuggagaacgaacggacccuugacuaucaugauuccaaugucaaaaaccuguacgagaaggugcgcagccagcucaaaaacaaugccaaggagauugggaacggauguuuugaguucuaucacaagugcgacaauacauguauggagucuguuaaaaacggcaccuacgauuaucccaaguacuccgaagaggcuaaacugaauagagaagagaucgacggggugaaacuugagagcacacggaucuaucaaauucuggccaucuacucuacggucgcguccagccucgugcugguugugucccugggcgcuauuucuuuuuggaugugcagcaacggaucccuccagugccgcaucuguauuuga

SEQ ID NO: 197602 - RNA, 1701 nt, Artificial Sequence; identical to SEQ ID NO: 195226
  derived and/or modified CDS sequence (opt5) from hemagglutinin__InfluenzaA__ADM07163

SEQ ID NO: 197603 - RNA, 1698 nt, Artificial Sequence; identical to SEQ ID NO: 197585
  derived and/or modified CDS sequence (opt5) from hemagglutinin__InfluenzaA__ADM07460

SEQ ID NO: 197604 - RNA, 1701 nt, Artificial Sequence
  derived and/or modified CDS sequence (opt5) from hemagglutinin__InfluenzaA__ADM07504
augaagaccaucauugcccugagcuacauccucugccugguguucgcucagaaacuucccggcaacgacaauuccacagccacgcugugucucgggcaccaugcggucccuaacggaaccauuguuaagacaaucaccaaugaucaaauugaggugacaaacgcuaccgaacuggugcagucuagcuccacaggcgagaucugcgacucuccgcaccagauccuugauggggaaaauuguacccugauugacgcccuccugggagauccccagugcgacggcuuucaaaacaaaaagugggaucuguucgucgagagaagcaaagccuauuccaauuguuacccuuaugacgugcccgauuacgcuucucuccggagccugguugccuccagcgggacgcuugaauuuaacaaugagucuuucaacuggaccggagugacacagaauggcaccuccagcgcuugcauccgcagaucuaacaauuccuuuuucagccggcugaacuggcucacacaucugaauuuuaaguauccugcccuuaacgucaccaugcccaacaaugagcaguucgacaagcuguacauuuggggcgugcaccauccugggacggauaaagaccagaucuuucucuaugcgcaagccucuggacgcauuacaguuuccaccaagagaagccagcaggcugugaucccgaacauuggcucccggccccgcgucagaaauaucccuucucggaucagcauuuacuggacaaucgugaaacccggggauauucugcugaucaacuccaccggaaaucucauugccccucgcggcuacuucaagaucagaaacgggaaaagcucuaucaugcgguccgacgcucccauuggaaaguguaauagcgaaugcaucaccccgaacggcucuauuccuaaugacaagcccuuucagaacgugaaucgcaucacauauggcgccuguccuagauacgucaaacaaaacacgcugaaacuugcgaccgggaugcggaauguucccgagaagcagacacgcggaauuuucggcgccaucgcuggguuuaucgaaaacggaugggagggcaugguggaugggugguauggauucagacaccagaauagcgagggccggggccaagccgcugaccugaaguccacccaggccgccauugaucagaucaacgggaaacucaacagacugauuggaaagacaaaugaaaaauuccaccagaucgagaaggaauuuucugagguggaaggccgcauucaagaccuugagaaguacgucgaggauaccaaaaucgaccuguggagcuauaacgcugaacuccugguggcgcuggagaaucagcauacgauugaucucacagacuccgaaaugaacaagcuguucgagaaaaccaagaaacagcuucgggaaaaugccgaggauauggggaacggaugcuuuaagaucuaccacaagugugacaaugcuugcaucggcagcauuagaaacgggaccuaugaucaugacguuuaccgcgacgaggcccugaauaaccgguuccagaucaaaggcguggaacucaagucuggauacaaagauuggauucuguggaucuccuuugccauuagcugcuuccuucugugugucgcucuccugggcuuuaucaugugggccugccaaaaggggaauaucagauguaacauuugcaucuga

SEQ ID NO: 197605 - RNA, 1701 nt, Artificial Sequence
  derived and/or modified CDS sequence (opt5) from hemagglutinin__InfluenzaA__ADM12806
augaagaccaucauugcccugagcuacauccucugccugguguucgcucagaaacuucccggcaacgacaauuccacagccacgcugugucucgggcaccaugcggucccuaacggaaccauuguuaagacaaucaccaaugaucaaauugaggugacaaacgcuaccgaacuggugcagucuagcuccacaggcgagaucugcgacucuccgcaccagauccuugauggggaaaauuguacccugauugacgcccuccugggagauccccagugcgacggcuuucaaaacaaaaagugggaucuguucgucgagagaagcaaagccuauuccaauuguuacccuuaugacgugcccgauuacgcuucucuccggagccugguugccuccagcgggacgcuugaauuuaacaaugagucuuucaacuggaccggagugacacagaauggcaccuccagcgcuugcauccgcagaucuaacaauuccuuuuucagccggcugaacuggcucacacaucugaauuuuaaguauccugcccuuaacgucaccaugcccaacaaugagcaguucgacaagcuguacauuuggggcgugcaccauccugggacggauaaagaccagaucuuucucuaugcgcaagccucuggacgcauuacaguuuccaccaagagaagccagcaggcugugaucccgaacauuggcucccggccccgcgucagaaauaucccuucucggaucagcauuuacuggacaaucgugaaacccggggauauucugcugaucaacuccaccggaaaucucauugccccucgcggcuacuucaagaucagaagcgggaaaucuuccaucaugcggagcgacgcucccauuggaaaguguaacucugaaugcaucaccccgaauggcagcauuccuaacgacaagcccuuucagaaugugaaccgcaucacauauggcgccuguccuagauacgucaaacaauccacgcugaagcuggcgaccgggaugcggaauguucccgagaaacagacacgcggaauuuucggcgccaucgcuggguuuaucgaaaacggaugggagggcaugguggaugggugguauggauucagacaccaaaauucugagggccggggccaggccgcugaccuuaagagcacccaggccgccauugaucagaucaacgggaaacucaauagacugauuggaaagacaaacgaaaaauuccaccagaucgagaaggaauuuuccgagguggaaggccgcauucaagaccuugagaaguacgucgaggauaccaaaaucgaccuguggagcuauaacgcugaacuccugguggcgcuggagaaucagcauacgauugaucucacagacucugaaaugaacaagcuguucgagaaaaccaagaaacagcuucgggaaaaugccgaggauauggggaacggaugcuuuaccaucuaccacaagugugacaaugcuugcaucggcuccauuagaaacgggacauaugaucauaauguuuaccgcgacgaggcccugaacaaucgguuccagaucaagggcguggaacucaaaagcggauacaaggacuggauucuguggaucucuuuugccauuuccugcuuccuucugugugucgcucuccugggcuuuaucaugugggccugccaaaaagggaacaucagauguaauauuugcaucuga

SEQ ID NO: 197606 - RNA, 1701 nt, Artificial Sequence; identical to SEQ ID NO: 197605
  derived and/or modified CDS sequence (opt5) from hemagglutinin__InfluenzaA__ADM12817

SEQ ID NO: 197607 - RNA, 1701 nt, Artificial Sequence; identical to SEQ ID NO: 197605
  derived and/or modified CDS sequence (opt5) from hemagglutinin__InfluenzaA__ADM12828

SEQ ID NO: 197608 - RNA, 1701 nt, Artificial Sequence; identical to SEQ ID NO: 197605
  derived and/or modified CDS sequence (opt5) from hemagglutinin__InfluenzaA__ADM12839

SEQ ID NO: 197609 - RNA, 1701 nt, Artificial Sequence
  derived and/or modified CDS sequence (opt5) from hemagglutinin__InfluenzaA__ADM12850
augaaggccaucauugcucugagcuacauccucugccugguguucgcccagaaacuucccggcaacgacaauuccaccgcgacacugugucucgggcaccaugcugucccuaacggaacgauuguuaagaccaucacaaaugaucaaauugaggugaccaacgccacagaacuggugcagucuagcuccaccggcgagaucugcgacucuccgcaccagauccuugauggggaaaauuguacacugauugacgcccuccugggagauccccagugcgacggcuuucaaaacaaaaagugggaucuguucgucgagagaagcaaggcuuauuccaauuguuacccuuaugacgugcccgauuacgccucucuccggagccugguugcuuccagcgggacccuugaauuuaacaaugagucuuucaacuggacgggagugacccagaauggcacauccagcgccugcauccgcagaucuaacaauuccuuuuucagccggcugaacuggcucacccaucugaauuuuaaguauccugcgcuuaacgucacaaugcccaacaaugagcaguucgacaagcuguacauuuggggcgugcaccauccugggaccgauaaagaccagaucuuucucuaugcccaggcuucuggacgcauuacgguuuccacaaagagaagccagcaggccgugaucccgaacauuggcucccggccccgcgucagaaauaucccuucucggaucagcauuuacuggaccaucgugaaacccggggauauucugcugaucaacuccacaggaaaucucauugcuccucgcggcuacuucaagaucagaagcgggaaaucuuccaucaugcggagcgacgcccccauuggaaaguguaacucugaaugcaucaccccgaauggcagcauuccuaacgacaagcccuuucagaaugugaaccgcaucaccuauggcgcguguccuagauacgucaaacaauccacacugaaacuugccacggggaugcggaauguucccgagaaacagacccgcggaauuuucggcgcuaucgccggguuuaucgaaaacggaugggagggcaugguggaugggugguauggauucagacaccaaaauucugagggccggggccaagcugccgaccucaagagcacacaggccgcuauugaucagaucaacgggaaacugaauagacugauuggaaagaccaacgaaaaauuccaccagaucgagaaggaauuuuccgagguggaaggccgcauucaagaccuugagaaguacgucgaggauacaaaaaucgaccuguggagcuauaacgcggaacuccugguggcccuggagaaucagcauaccauugaucucacggacucugaaaugaacaagcuguucgagaaaacaaagaaacagcuucgggaaaaugcugaggauauggggaacggaugcuuuaccaucuaccacaagugugacaaugccugcaucggcuccauuagaaacgggaccuaugaucauaauguuuaccgcgacgaggcccugaacaaucgguuccagaucaagggcguggaacucaaaagcggauacaaggacuggauucuguggaucucuuuugcuauuuccugcuuccuucugugugucgcccuccugggcuuuaucaugugggcgugccaaaaagggaacaucagauguaauauuugcaucuga

SEQ ID NO: 197610 - RNA, 1701 nt, Artificial Sequence; identical to SEQ ID NO: 194741
  derived and/or modified CDS sequence (opt5) from hemagglutinin__InfluenzaA__ADM12861

SEQ ID NO: 197611 - RNA, 1701 nt, Artificial Sequence; identical to SEQ ID NO: 194741
  derived and/or modified CDS sequence (opt5) from hemagglutinin__InfluenzaA__ADM12871

SEQ ID NO: 197612 - RNA, 1701 nt, Artificial Sequence; identical to SEQ ID NO: 194741
  derived and/or modified CDS sequence (opt5) from hemagglutinin__InfluenzaA__ADM12881

SEQ ID NO: 197613 - RNA, 1701 nt, Artificial Sequence; identical to SEQ ID NO: 194741
  derived and/or modified CDS sequence (opt5) from hemagglutinin__InfluenzaA__ADM12891

SEQ ID NO: 197614 - RNA, 1701 nt, Artificial Sequence; identical to SEQ ID NO: 194741
  derived and/or modified CDS sequence (opt5) from hemagglutinin__InfluenzaA__ADM12901

SEQ ID NO: 197615 - RNA, 1701 nt, Artificial Sequence; identical to SEQ ID NO: 195843
  derived and/or modified CDS sequence (opt5) from hemagglutinin__InfluenzaA__ADM12911

SEQ ID NO: 197616 - RNA, 1701 nt, Artificial Sequence; identical to SEQ ID NO: 194741
  derived and/or modified CDS sequence (opt5) from hemagglutinin__InfluenzaA__ADM12921

SEQ ID NO: 197617 - RNA, 1701 nt, Artificial Sequence; identical to SEQ ID NO: 194741
  derived and/or modified CDS sequence (opt5) from hemagglutinin__InfluenzaA__ADM12931

SEQ ID NO: 197618 - RNA, 1701 nt, Artificial Sequence; identical to SEQ ID NO: 194741
  derived and/or modified CDS sequence (opt5) from hemagglutinin__InfluenzaA__ADM12941

SEQ ID NO: 197619 - RNA, 1701 nt, Artificial Sequence; identical to SEQ ID NO: 194741
  derived and/or modified CDS sequence (opt5) from hemagglutinin__InfluenzaA__ADM12951

SEQ ID NO: 197620 - RNA, 1701 nt, Artificial Sequence
  derived and/or modified CDS sequence (opt5) from hemagglutinin__InfluenzaA__ADM12961
augaaggccgugcuggucguucuccuguacaccuucgcuacagccaacgcggacacgcuuugcaucggcuaucacgcuaauaacagcaccgauacaguggacaccgugcuggagaaaaaugucacagugacccauuccguuaacauucucgaagauaagcacaaugggaaacuguguaaacuuggaggcguggcuccccugcaucucgggaagugcaacaucgccggauggauucugggcaauccugagugugaaucucugagcacagccuccucuuggagcuacaucgucgagaccuccucuagcgacaacgggacgugcuauccgggagauuuuauugacuacgaagaacucagagagcagcuguccagcgugucuuccuucgaacgguuugagaucuuccccaagaccagcucuuggccuaaucacgauuccaacaagggcguuacagccgcuuguccccaugccggcgcgaaaucuuuuuauaagaaucuuaucuggcuggugaaaaaggggaacagcuacccuaaacucuccaagagcuauauuaaugacaagggaaaagaaguccuggugcuuuggggcauccaccaccccuccaccucugccgaucaacagagccuguaccagaacgcugacgccuacguguucgucgggacaucccgcuauagcaagaaauuuaagccugagauugcuaucagaccgaaaguucgggaucaggagggacgcaugaauuacuauuggacccucguggaacccggcgacaagauuacguucgaggccacagggaaccugguggucccuagauacgcguuugccauggaacggaacgcuggaucuggcaucauuaucuccgauacccccgugcaugacugcaauacaaccugucaaaccccuaaaggcgccaucaacacaagccugcccuuccagaauauucacccgaucacgauugggaagugcccuaaguauguuaaaucuaccaagcuccgccuggcuacaggacuuagaaacgugcccagcauccagucccggggccuguuuggggccauugccggauucaucgagggcggguggaccggaauggucgacggcugguacggcuaucaucaccagaaugaacaagggucuggauacgcugcggaucucaaaagcacacagaacgccaucgacgagauuaccaauaaggugaacuccguuaucgagaaaaugaauacgcaguuuacagcugugggcaaggaguucaaccaccuggagaagcgcauugaaaaucuuaacaaaaaggucgaugacggguuccuggauaucuggaccuacaaugccgagcuccuggugcugcucgaaaacgagagaacccuggacuaucaugauagcaaugucaaaaaccuuuacgagaaggugcggucucagcugaaaaacaaugccaaggaaauuggaaacggcuguuuugaguucuaucacaagugcgacaauacauguauggaauccguuaaaaacgggaccuacgauuauccuaaguacagcgaggaagcuaaacucaaucgcgaggagaucgacggcgugaagcuggaaucuacaagaaucuaucaaauucuugccaucuacuccacggucgcgagcucccuggugcucguugugucucugggagcuauuagcuuuuggaugugcuccaacggcucucugcagugccggaucuguauuuga

SEQ ID NO: 197621 - RNA, 1701 nt, Artificial Sequence; identical to SEQ ID NO: 196390
  derived and/or modified CDS sequence (opt5) from hemagglutinin__InfluenzaA__ADM12971

SEQ ID NO: 197622 - RNA, 1701 nt, Artificial Sequence; identical to SEQ ID NO: 195842
  derived and/or modified CDS sequence (opt5) from hemagglutinin__InfluenzaA__ADM12981

SEQ ID NO: 197623 - RNA, 1701 nt, Artificial Sequence
  derived and/or modified CDS sequence (opt5) from hemagglutinin__InfluenzaA__ADM12991
augaaggccauccuggugguccuccuguacaccuucgagacagcuaacgccgacacgcuuugcauuggcuaucacgcgaauaacagcaccgauacaguugacaccgugcuggagaaaaaugugacagucacccauuccgugaaccuccuggaagauaagcacaaugggaaacuuuguaagcugagaggaguugcuccccuccaucugggcaaaugcaacaucgccggguggauucugggaaauccugaaugugagucucucagcacagccuccucuuggagcuacaucguggaaaccuccucuagcgacaacggcacgugcuauccgggggauuuuauugacuacgaggagcugcgggaacagcuuuccagcgucucuuccuucgagcgcuuugaaaucuuccccaagaccagcucuuggccuaaucacgauuccaacaagggagugacagcugccuguccccaugcuggcgccaagagcuuuuauaagaaucugaucuggcucguuaaaaagggcaacucuuacccuaaacuguccaagagcuauauuaaugacaaggggaaagaggugcuuguccuguggggaauccaccaccccuccaccucugcggaucaacagagccucuaccagaacgccgacgcuuacguguucgugggcacauccagauauagcaagaaauuuaagccugagauugccauccggccgaaaguccgcgaucaggaagggagaaugaauuacuauuggacccugguugagcccggagacaagauuacguucgaagcuacaggcaaccugguggugccucgguacgccuuugcgauggagcgcaacgccgggucuggaaucauuaucuccgauacccccguccaugacugcaauacaaccugucaaaccccuaaaggcgcuaucaacacaagccuccccuuccagaauauucacccgaucacgauuggcaagugcccuaaguaugugaaaucuaccaagcugagacuugccacagggcugcggaacguucccagcauccagucccgcggacucuuuggcgcuauugccggguucaucgaaggaggcuggaccgggaugguggacggaugguacggcuaucaucaccagaaugagcaaggcucuggguacgccgcugaucugaaaagcacacagcacgcgaucgacgagauuaccaacaaggucaauuccgugaucgaaaagaugaacacgcaguuuacagccguuggaaaagaguucaaucaucuugaaaagagaauugagaaccugaauaaaaagguggaugacggcuuccucgauaucuggaccuacaacgcugaacugcugguccuccuggagaaugagcggacccuugacuaucacgauagcaacgugaaaaaucuguacgaaaagguccgcucucagcucaaaaacaacgccaaggagauugggaauggauguuuugaguucuaucauaagugcgacaacacauguauggaauccgugaaaaauggcaccuacgauuauccuaaguacagcgaagaggccaaacugaacagagaggaaaucgacgggguuaaacuugagucuacacggaucuaucaaauucuggcuaucuacuccacgguggccagcucccucguccuggugguuucucugggcgcgauuagcuuuuggaugugcuccaauggaucucuccagugccgcaucuguauuuga

SEQ ID NO: 197624 - RNA, 1701 nt, Artificial Sequence
  derived and/or modified CDS sequence (opt5) from hemagglutinin__InfluenzaA__ADM13001
augaaggccauccuggugguccuccuguacaccuucgcuacagccaacgcggacacgcuuugcauuggcuaucacgcuaauaacagcaccgauacaguugacaccgugcuggagaagaaugugacagucacccauuccgugaaccuccuggaagauaagcacaaugggaaacuuuguaagcugagaggaguugcuccccuccaucugggcaaaugcaacaucgccggguggauucugggaaauccugagugugaaucucucagcacagccuccucuuggagcuacaucguggagaccuccucuagcgacaacggcacgugcuauccgggggauuuuauugacuacgaagaacugcgggagcagcuuuccagcgucucuuccuucgaacgcuuugagaucuuccccaagaccagcucuuggccuaaucacgauuccaacaagggagugacagccgcuuguccccaugccggcgcgaaauccuuuuauaagaaucugaucuggcucguuaaaaagggcaacucuuacccuaaacuguccaagagcuauauuaaugacaaggggaaagaagugcuuguccuguggggaauccaccaccccuccaccucugccgaucaacagagccucuaccagaacgcugacgccuacguguucgugggcacauccagauauagcaagaaauuuaagccugagauugcuauccggccgaaaguccgcgaucaggaggggagaaugaauuacuauuggacccugguugaacccggagacaagauuacguucgaggccacaggcaaccugguggugccucgguacgcguuugccauggaacgcaacgcugggucuggaaucauuaucuccgauacccccguccaugacugcaauacaaccugucaaaccccuaaaggcgccaucaacacaagccuccccuuccagaauauucacccgaucacgauuggcaagugcccuaaguaugugaaaucuaccaagcugagacuugcuacagggcugcggaacauccccagcauucagucccgcggacucuuuggcgccaucgccggguucaucgagggaggcuggaccgggaugguugacggaugguacggcuaucaucaccagaaugaacaaggcucuggguacgcugcggaucugaaaagcacacagcacgccauugacgagaucaccaacaaggugaauagcgucauugagaaaaugaacacgcaguuuacagcugugggaaaggaguucaaucaucuugagaagagaaucgaaaaccugaauaaaaagguugaugacggcuuccucgauauuuggaccuacaacgccgagcugcuggugcuccuggaaaaugagcggacccuugacuaucacgauagcaacgucaaaaaucuguacgagaaggugcgcucucagcucaaaaacaacgccaaggaaaucgggaauggauguuuugaguucuaucauaagugcgacaacacauguauggaauccgucaaaaauggcaccuacgauuauccuaaguacagcgaggaagcuaaacugaacagagaggagaucgacggggugaaacuugaaucuacacggauuuaucaaauccuggccauuuacuccacgguugcgagcucccucgugcuggucgugucucugggcgcuaucagcuuuuggaugugcuccaauggaucucuccagugccgcauuuguaucuga

SEQ ID NO: 197625 - RNA, 1701 nt, Artificial Sequence; identical to SEQ ID NO: 195905
  derived and/or modified CDS sequence (opt5) from hemagglutinin__InfluenzaA__ADM13011

SEQ ID NO: 197626 - RNA, 1701 nt, Artificial Sequence
  derived and/or modified CDS sequence (opt5) from hemagglutinin__InfluenzaA__ADM13021
augaaggccauccuggugguccuccuguacaccuucgcuacagccaacgcggacacgcuuugcauuggcuaucacgcuaauaacagcaccgauacaaucgacaccguucuggagaaaaaugugacagugacccauuccgucaaccuccuggaagauaagcacaaugggaaacuuuguaagcugagaggaguggcuccccuccaucugggcaaaugcaacauugccggguggauccugggaaauccugagugugaaucucucagcacagccuccucuuggagcuacauuguugagaccuccucuagcgacaacggcacgugcuauccgggggauuuuaucgacuacgaagaacugcgggagcagcuuuccagcgugucuuccuucgaacgcuuugagaucuuccccaagaccagcucuuggccuaaucacgauuccaacaagggagucacagccgcuuguccccaugccggcgcgaaaucuuuuuauaagaaucugauuuggcucgugaaaaagggcaacagcuacccuaaacuguccaagagcuauaucaaugacaaggggaaagaaguucuugugcuguggggcauucaccaccccuccaccucugccgaucaacagagccucuaccagaacgcugacgccuacgucuucgugggaacauccagauauagcaagaaauuuaagccugagaucgcuauucggccgaaagugcgcgaucaggaggggagaaugaauuacuauuggacccuggucgaacccggagacaagaucacguucgaggccacaggcaaccugguugugccucgguacgcguuugccauggaacgcaacgcugggucuggaauuaucaucuccgauacccccgugcaugacugcaauacaaccugucaaaccccuaaaggcgccauuaacacaagccuccccuuccagaauauccacccgauuacgaucggcaagugcccuaaguaugucaaaucuaccaagcugagacuugcuacagggcugcggaacgugcccagcauucagucccgcggacucuuuggcgccaucgccggguucaucgagggaggcuggaccgggaugguugacggaugguacggcuaucaucaccagaaugaacaaggcucuggguacgcugcggaucugaaaagcacacagaacgccauugacaagaucaccaauaaagugaacuccgucauugagaagaugaauacgcaguuuacagcugugggaaaggaguucaaccaccuugagaaaagaaucgagaaucugaacaagaaaguugaugacggcuuccucgauauuuggaccuacaaugccgaacugcuggugcuccuggagaacgaacggacccuugacuaucaugauagcaaugucaagaaccuguacgagaaagugcgcucucagcucaagaacaaugccaaggagaucgggaacggauguuuugaguucuaucacaaaugcgacaauacauguauggaauccgucaagaacggcaccuacgauuauccuaaauacagcgaagaggcuaagcugaauagagaagagaucgacggggugaaacuugagucuacacggauuuaucaaauccuggccauuuacuccacgguugcgagcucccucgugcuggucgugucucugggcgcuaucagcuuuuggaugugcuccaacggaucucuccagugccgcauuuguaucuga

SEQ ID NO: 197627 - RNA, 1701 nt, Artificial Sequence; identical to SEQ ID NO: 196087
  derived and/or modified CDS sequence (opt5) from hemagglutinin__InfluenzaA__ADM13031

SEQ ID NO: 197628 - RNA, 1701 nt, Artificial Sequence
  derived and/or modified CDS sequence (opt5) from hemagglutinin__InfluenzaA__ADM13041
augaaggccauccuggugguccuccuguacaccuucgcuacagccaacgcggacacgcuuugcauuggcuaucacgcuaauaacagcaccgauacaguugacaccgugcuggagaaaaaugugacagucacccauuccgugaaccuccuggaagauaagcacaaugggaaacuuuguaagcugagaggaguugcuccccuccaucugggcaaaugcaacaucgccggguggauucugggaaauccugagugugaaucucucagcacagccuccucuuggagcuacaucguggagaccuccucuagcgacaacggcacgugcuauccgggggauuuuauugacuacgaagaacugcgggagcagcuuuccagcgucucuuccuucgaacgcuuugagaucuuccccaagaccagcucuuggccuaaucacgauuccaacaagggagugacagccgcuuguccccaugccggcgcgaaaucuuuuuauaagaaucugaucuggcucguuaaaaagggcaacagcuacccuaaacuguccaagagcuauauuaaugacaaggggaaagaagugcuuguccuguggggaauccaccaccccuccaccucugccgaucaacagagccucuaccagaacgcugacgccuacguguucgugggcacauccagauauagcaagaaauuuaagccugagauugcuauccggccgaaaguccgcgagcaggaagggagaaugaauuacuauuggacccugguugagcccggagauaagauuacguucgaagccacaggcaaccugguggugccucgguacgcguuugccauggagcgcaacgcugggucuggaaucauuaucuccgacacccccguccaugauugcaauacaaccugucaaaccccuaaaggcgccaucaacacaagccuccccuuccagaaugugcacccgauuacgaucggcaagugcccuaaguauguuaaaucuaccaagcugagacuugcuacagggcugcggaacgugcccagcauucagucccgcggacucuuuggcgccaucgccggguucauugaaggaggcuggaccgggauggucgacggaugguacggcuaucaucaccagaaugagcaaggcucuggguacgcugcggaccugaaaagcacacagaacgccaucgaugagaucaccaauaaggugaacuccguuauugaaaagaugaauacgcaguuuacagcugugggaaaggaguucaaccaccuugaaaagagaaucgagaaucugaacaaaaaggucgacgauggcuuccucgacauuuggaccuacaaugccgaacugcuggugcuccuggagaacgagcggacccuugauuaucaugacagcaaugucaaaaaccuguacgaaaaggugcgcucucagcucaaaaacaaugccaaggagaucgggaacggauguuuugaguucuaucacaagugcgauaauacauguauggaguccguuaaaaacggcaccuacgacuauccuaaguacagcgaagaggcuaaacugaauagagaggaaauugauggggugaaacuugagucuacacggaucuaucaaauccuggccauuuacuccacggucgcgagcucccucgugcugguugugucucugggcgcuaucagcuuuuggaugugcuccaacggaucucuccagugccgcauuuguaucuga

SEQ ID NO: 197629 - RNA, 1701 nt, Artificial Sequence
  derived and/or modified CDS sequence (opt5) from hemagglutinin__InfluenzaA__ADM13051
augaaggccauccuggugguccuccuguacaccuucgcuacaacgaacgccgacacccuuugcauuggcuaucacgcgaauaacagcacagauaccguugacacagugcuggagaaaaaugugaccgucacacauuccgugaaccuccuggaagauaagcacaaugggaaacuuuguaagcugagaggaguugcuccccuccaucugggcaaaugcaacaucgccggguggauucugggaaauccugagugugaaucucucagcaccgccuccucuuggagcuacaucguggagacguccucuagcgacaacgggaccugcuauccgggcgauuuuauugacuacgaagaacugcgggagcagcuuuccagcgucucuuccuucgaacgcuuugagaucuuccccaagacaagcucuuggccuaaucacgauuccaacaagggagugaccgcugccuguccccaugcuggcgccaagagcuuuuauaaaaaucugaucuggcucguuaaaaagggcaacucuuacccuaaacuguccaagagcuauauuaaugacaaggggaaagaagugcuuguccuguggggaauccaccaccccuccacaucugcggaucaacagagccucuaccagaacgccgacgcuuacguguucgugggcaccuccagauauagcaagaaauuuaagccugagauugccauccggccgaaaguccgcgaucaggaggggagaaugaauuacuauuggacgcugguugaacccggagacaagauuacauucgaggcuaccggcaaccugguggugccucgguacgccuuugcgauggaacgcaacgccgggucuggaaucauuaucuccgauacacccguccaugacugcaauaccaccugucaaacaccuaaaggcgcuaucaacacgagccuccccuuccagaauauucacccgaucaccauuggcaagugcccuaaguaugugaaaucuacaaagcugagacuugccaccgggcugcggaacguucccagcauccagucccgcggacucuuuggcgcuauugccggguucaucgagggaggcuggacagggaugguggacggaugguacggcuaucaucaccagaaugaacaaggcucuggguacgccgcugaucugaaaagcacccagaacgcgaucgacaagauuacgaauaaagucaacuccgugaucgagaagaugaauacacaguuuaccgccguuggaaaggaguucaaccaccuugagaaaagaauugagaaucugaacaagaaaguggaugacggcuuccucgauaucuggaccuacaaugcugaacugcugguccuccuggagaacgaacggacacuugacuaucaugauagcaaugugaagaaccuguacgagaaaguccgcucucagcucaagaacaaugccaaggagauugggaacggauguuuugaguucuaucacaaaugcgacaauaccuguauggaauccgugaagaacggcacauacgauuauccuaaauacagcgaagaggccaagcugaauagagaagagaucgacgggguuaaacuugagucuacgcggaucuaucaaauucuggcuaucuacuccaccguggccagcucccucguccuggugguuucucugggcgcgauuagcuuuuggaugugcuccaacggaucucuccagugccgcaucuguauuuga

SEQ ID NO: 197630 - RNA, 1701 nt, Artificial Sequence
  derived and/or modified CDS sequence (opt5) from hemagglutinin__InfluenzaA__ADM13061
augaaggccauccuggugguccuccuguacaccuucgcuacagccaacgcggacacgcuuugcauuggcuaucacgcuaauaacagcaccgauacaguugacaccgugcuggagaagaaugugacagucacccauuccgugaaccuccuggaagauaagcacaaugggaaacuuuguaagcugagaggaaucgcuccccuccaucugggcaaaugcaacauugccggguggauccugggaaauccugagugugaaucucucagcacagccuccucuuggagcuacauuguugagaccuccucuagcgacaacggcacgugcuauccgggggauuuuaucgacuacgaagaacugcgggagcagcuuuccagcgugucuuccuucgaacgcuuugagaucuuccccaagaccagcucuuggccuaaucacgauuccaacaagggagucacagccgcuuguccccaugccggcgcgaaaucuuuuuauaagaaucugauuuggcucgugaaaaagggcaacagcuacccuaaacuguccaagagcuauaucaaugacaaggggaaagaaguucuugugcuguggggcauucaccaccccuccaccucugccgaucaacagagccucuaccagaacgcugacgccuacgucuucgugggaacauccagauauagcaagaaauuuaagccugagaucgcuauucggccgaaagugcgcgaucaggaggggagaaugaauuacuauuggacccuggucgaacccggagacaagaucacguucgaggccacaggcaaccugguugugccucgguacgcguuugccauggaacgcaacgcugggucuggaauuaucaucuccgauacccccgugcaugacugcaauacaagcugucaaaccccuaaaggcgccauuaacaccucucuccccuuccagaauauccacccgauuacaaucggcaagugcccuaaguaugucaaaagcacgaagcugagacuugcuaccgggcugcggaacgugcccuccauucagucucgcggacucuuuggcgccaucgccggguucaucgagggaggcuggacagggaugguugacggaugguacggcuaucaucaccagaaugaacaaggcagcggguacgcugcggaucugaaauccacccagaacgccauugacgagaucacaaauaaggugaacagcgucauugagaaaaugaauacccaguuuacggcugugggaaaggaguucaaccaccuugagaagagaaucgaaaaucugaacaaaaagguugaugacggcuuccucgauauuuggacauacaaugccgagcugcuggugcuccuggaaaacgagcggacccuugacuaucaugauucuaaugucaaaaaccuguacgagaaggugcgcucccagcucaaaaacaaugccaaggaaaucgggaacggauguuuugaguucuaucacaagugcgacaauaccuguauggaaagcgucaaaaacggcacauacgauuauccuaaguacucugaggaagcuaaacugaauagagaggagaucgacggggugaaacuugaauccacccggauuuaucaaauccuggccauuuacagcacaguugcguccucucucgugcuggucgugagccugggcgcuaucuccuuuuggaugugcucuaacggaagccuccagugccgcauuuguaucuga

SEQ ID NO: 197631 - RNA, 1701 nt, Artificial Sequence; identical to SEQ ID NO: 196908
  derived and/or modified CDS sequence (opt5) from hemagglutinin__InfluenzaA__ADM13071

SEQ ID NO: 197632 - RNA, 1701 nt, Artificial Sequence
  derived and/or modified CDS sequence (opt5) from hemagglutinin__InfluenzaA__ADM13081
augaaggccauccuggugguccuccuguacaccuucgcuacagccaacgcggacacgcuuugcauuggcuaucacgcuaauaacagcaccgauacaguugacaccgugcuggagaaaaaugugacagucacccauuccgugaaccuccuggaagauaagcacaaugggaaacuuuguaagcugagaggaaucgcuccccuccaucugggcaaaugcaacauugccggguggauccugggaaauccugagugugaaucucucagcacagccuccucuuggagcuacauuguugagaccuccggcucugacaacgggacgugcuauccgggagauuuuaucgacuacgaagaacugcgggagcagcuuagcuccgugagcucuuucgaacgcuuugagaucuuccccaagaccuccagcuggccuaaucacgauucuaacaagggcgucacagccgcuuguccccaugccggcgcgaaauccuuuuauaagaaucugauuuggcucgugaaaaaggggaacagcuacccuaaacugucuaaguccuauaucaaugacaaggaaaaagagguucuugugcuguggggcauucaccaccccagcaccuccgccgaucaacagucucucuaccagaacgcugacgccuacgucuucgugggaacaagcagauauuccaagaaauuuaagccugagaucgcuauucggccgaaagugcgcgaucaggaagggagaaugaauuacuauuggacccuggucgagcccggagacaagaucacguucgaagccacaggcaaccugguugugccucgguacgcguuugccauggagcgcaacgcugggagcggaauuaucaucucugauacccccgugcaugacugcaauacaaccugucaaaccccuaaaggcgccauuaacacaucccuccccuuccagaauauccacccgauuacgaucggcaagugcccuaaguaugucaaaagcaccaagcugagacuugcuacagggcugcggaacgugcccucuauucagagccgcggacucuuuggcgccaucgccggguucaucgaaggaggcuggaccgggaugguugacggaugguacggcuaucaucaccagaaugagcaaggcuccggguacgcugcggaucugaaaucuacacagaacgccauugacgagaucaccaauaaggugaacagcgucauugaaaagaugaauacgcaguuuacagcugugggaaaggaguucaaccaccuugaaaagagaaucgagaaucugaacaaaaagguugaugacggcuuccucgauauuuggaccuacaaugccgaacugcuggugcuccuggagaacgagcggacccuugacuaucaugauuccaaugucaaaaaccuguacgaaaaggugcgcagccagcucaaaaacaaugccaaggagaucgggaacggauguuuugaguucuaucacaagugcgacaauacauguauggagucugucaaaaacggcaccuacgauuauccuaaguacuccgaagaggcuaaacugaauagagaggaaaucgacggggugaaacuugagagcacacggauuuaucaaauccuggccauuuacucuacgguugcguccagccucgugcuggucgugucccugggcgcuaucucuuuuuggaugugcagcaacggaucccuccagugccgcauuuguaucuga

SEQ ID NO: 197633 - RNA, 1701 nt, Artificial Sequence; identical to SEQ ID NO: 196161
  derived and/or modified CDS sequence (opt5) from hemagglutinin__InfluenzaA__ADM13091

SEQ ID NO: 197634 - RNA, 1701 nt, Artificial Sequence; identical to SEQ ID NO: 195905
  derived and/or modified CDS sequence (opt5) from hemagglutinin__InfluenzaA__ADM13101

SEQ ID NO: 197635 - RNA, 1701 nt, Artificial Sequence
  derived and/or modified CDS sequence (opt5) from hemagglutinin__InfluenzaA__ADM13111
augaaggccauccuggugguccuccuguacaccuucgagacagcuaacgccgacacgcuuugcauuggcuaucacgcgaauaacagcaccgauacaguugacaccgugcuggaaaagaaugugacagucacccauuccgugaaccuccuggaggauaagcacaaugggaaacuuuguaagcugagaggaguugcuccccuccaucugggcaaaugcaacaucgccggguggauucugggaaauccugaaugugagucucucagcacagccuccucuuggagcuacaucguggaaaccuccucuagcgacaacggcacgugcuauccgggggauuuuauuaauuacgaggagcugcgggaacagcuuuccagcgucucuuccuucgagcgcuuugaaaucuuccccaagaccagcucuuggccuaaccacgacuccaauaagggagugacagcugccuguccccaugcuggcgccaagagcuuuuauaagaaccugaucuggcucguuaaaaagggcaauucuuacccuaaacuguccaagagcuauauuaacgauaaggggaaagaggugcuuguccuguggggaauccaccaccccuccaccucugcggaccaacagagccucuaccagaaugccgaugcuuacguguucgugggcacauccagauauagcaagaaauuuaagccugagauugccauccggccgaaaguccgcgaccaggaagggagaaugaacuacuauuggacccugguugaucccggagacaagauuacguucgaggcuacaggcaaccugguggugccucgguacgccuuugcgauggaacgcaaugccgggucuggaaucauuaucuccgauacccccguccaugacugcaacacaaccugucaaaccccuaauggcgcuaucaacacaagccuccccuuccagaauauucacccgaucacgauuggcaaaugcccuaaguaugugaagucuaccaaacugagacuugccacagggcugcggaacguucccagcauccagucccgcggacucuuuggcgcuauugccggguucaucgagggaggcuggaccgggaugguggacggaugguacggcuaucaucaccagaaugaacaaggcucuggguacgccgcugaucugaaaagcacacagaacgcgaucgacaaaauuaccaauaaggucaacuccgugaucgagaaaaugaauacgcaguuuacagccguuggaaaggaguucaaccaccuugaaaagagaauugagaaucugaacaaaaagguggaugacggcuuccucgauaucuggaccuacaaugcugaacugcugguccuccuggagaacgaacggacccuugacuaucaugauagcaacgugaaaaaucuguacgagaagguccgcucucagcucaaaaacaaugccaaggagauugggaacggauguuuugaguucuaucacaagugcgacaauacauguauggaauccgugaaaaacggcaccuacgauuauccuaaguacagcgaagaggccaaacugaauagagaagagaucgacgggguuaaacuugagucuacacggaucuaucaaauucuggcuaucuacuccacgguggccagcucccucguccuggugguuucucugggcgcgauuagcuuuuggaugugcuccaacggaucucuccagugccgcaucuguauuuga

SEQ ID NO: 197636 - RNA, 1701 nt, Artificial Sequence; identical to SEQ ID NO: 194741
  derived and/or modified CDS sequence (opt5) from hemagglutinin__InfluenzaA__ADM13121

SEQ ID NO: 197637 - RNA, 1701 nt, Artificial Sequence; identical to SEQ ID NO: 195905
  derived and/or modified CDS sequence (opt5) from hemagglutinin__InfluenzaA__ADM13131

SEQ ID NO: 197638 - RNA, 1701 nt, Artificial Sequence; identical to SEQ ID NO: 196069
  derived and/or modified CDS sequence (opt5) from hemagglutinin__InfluenzaA__ADM13141

SEQ ID NO: 197639 - RNA, 1701 nt, Artificial Sequence; identical to SEQ ID NO: 196069
  derived and/or modified CDS sequence (opt5) from hemagglutinin__InfluenzaA__ADM13151

SEQ ID NO: 197640 - RNA, 1701 nt, Artificial Sequence; identical to SEQ ID NO: 195842
  derived and/or modified CDS sequence (opt5) from hemagglutinin__InfluenzaA__ADM13161

SEQ ID NO: 197641 - RNA, 1701 nt, Artificial Sequence; identical to SEQ ID NO: 196390
  derived and/or modified CDS sequence (opt5) from hemagglutinin__InfluenzaA__ADM13171

SEQ ID NO: 197642 - RNA, 1701 nt, Artificial Sequence; identical to SEQ ID NO: 196390
  derived and/or modified CDS sequence (opt5) from hemagglutinin__InfluenzaA__ADM13181

SEQ ID NO: 197643 - RNA, 1701 nt, Artificial Sequence
  derived and/or modified CDS sequence (opt5) from hemagglutinin__InfluenzaA__ADM13191
augaaggccauccuggugguccuccuguacacccuugcuacagccaacgcggacacgcugugcauuggcuaucacgcuaauaacagcaccgauacaguugacaccgugcucgagaaaaaugugacagucacccauuccgugaaccugcuugaagauaagcacaaugggaaacuguguaagcucagaggaguugcuccccugcaucugggcaaaugcaacaucgccggguggauucucggaaauccugagugugaaucucugagcacagccuccucuuggagcuacaucguggagaccuccucuagcgacaacggcacgugcuauccgggggauuucauugacuacgaggaacuucgggagcagcuguccagcgucucuuccuuugaacgcuucgagaucuuucccaagaccagcucuuggccuaaucacgauuccaacaagggagugacagccgcuuguccccaugccggcgcgaaaucuuucuauaagaaucucaucuggcugguuaaaaagggcaacagcuacccuaaacuuuccaagagcuauauuaaugacaaggggaaagaagugcugguccucuggggaauccaccaccccuccaccucugccgaucaacagagccuguaccagaacgcugacgccuacguguuugugggcacauccagauauagcaagaaauucaagccugagauugcuauccggccgaaaguccgcgaucaggaggggagaaugaauuacuauuggacccugguugaacccggagacaagauuacguuugaggccacaggcaaccucguggugccucgguacgcguucgccauggaacgcaacgcugggucuggaaucauuaucuccgauacccccguccaugacugcaauacaaccugucaaaccccuaaaggcgccaucaacacaagccugcccuuucagaauauucacccgaucacgauuggcaagugcccuaaguaugugaaaucuaccaaacuuagacuggcuacagggcuccggaacguucccagcauccagucccgcggacuguucggcgccauugccggguuuaucgagggaggcuggaccgggaugguggacggaugguacggcuaucaucaccagaaugaacaaggcucuggguacgcugcggaucuuaagagcacacagcacgccaucgacgagauuaccaacaaggucaauuccgugaucgagaaaaugaacacgcaguucacagcuguuggaaaggaauuuaaucaucuggagaagagaauugaaaaccucaauaaaaagguggaugacggcuuccuggauaucuggaccuacaacgccgagcugcucguccugcuugaaaaugagcggacccuggacuaucacgauagcaacgugaaaaaucucuacgagaagguccgcucucagcugaaaaacaacgccaaggaaauugggaauggauguuucgaguuuuaucauaagugcgacaacacauguauggaauccgugaaaaauggcaccuacgauuauccuaaguacagcgaggaagcuaaacuuaacagagaggagaucgacgggguuaagcuggaaucuacacggaucuaucaaauucucgccaucuacuccacgguggcgagcucccugguccuggugguuucucucggcgcuauuagcuucuggaugugcuccaauggaucucugcagugccgcaucuguauuuga

SEQ ID NO: 197644 - RNA, 1701 nt, Artificial Sequence
  derived and/or modified CDS sequence (opt5) from hemagglutinin__InfluenzaA__ADM13211
augaaggccauccuggugguccuccuguacacccuugcuacagccaacgcggacacgcugugcauuggcuaucacgcuaauaacagcaccgauacaguugacaccgugcucgagaaaaaugugacagucacccauuccgugaaccugcuugaagauaagcacaaugggaaacuguguaagcucagaggaaucgcuccccugcaucugggcaaaugcaacauugccggguggauccucggaaauccugagugugaaucucugagcacagccuccucuuggagcuacauuguugagaccuccucuagcgacaacggcacgugcuauccgggggauuucaucgacuacgaggaacuucgggagcagcuguccagcgugucuuccuuugaacgcuucgagaucuuucccaagaccagcucuuggccuaaucacgauuccaacaagggagucacagccgcuuguccccaugccggcgcgaaaucuuucuauaagaaucucauuuggcuggugaaaaagggcaacagcuacccuaaacuuuccaagagcuauaucaaugacaaggggaaagaaguucuggugcucuggggcauucaccaccccuccaccucugccgaucaacagagccuguaccagaacgcugacgccuacgucuuugugggaacauccagauauagcaagaaauucaagccugagaucgcuauucggccgaaagugcgcgaucaggaggggagaaugaauuacuauuggacccuggucgaacccggagacaagaucacguuugaggccacaggcaaccucguugugccucgguacgcguucgccauggaacgcaacgcugggucuggaauuaucaucuccgauacccccgugcaugacugcaauacaaccugucaaaccccuaaaggcgccauuaacacaagccugcccuuucagaauauccacccgauuacgaucggcaagugcccuaaguaugucaaaucuaccaaacuuagacuggcuacagggcuccggaacgugcccagcauucagucccgcggacuguucggcgccaucgccggguuuaucgagggaggcuggaccgggaugguugacggaugguacggcuaucaucaccagaaugaacaaggcucuggguacgcugcggaucuuaagagcacacagaacgccauugacgagaucaccaauaaggugaacuccgucauugagaaaaugaauacgcaguucacagcugugggaaaggaauuuaaccaccuggagaagagaaucgaaaaucucaacaaaaagguugaugacggcuuccuggauauuuggaccuacaaugccgagcugcucgugcugcuugaaaacgagcggacccuggacuaucaugauagcaaugucaaaaaccucuacgagaaggugcgcucucagcugaaaaacaaugccaaggaaaucgggaacggauguuucgaguuuuaucacaagugcgacaauacauguauggaauccgucaaaaacggcaccuacgauuauccuaaguacagcgaggaagcuaaacuuaauagagaggagaucgacggggugaagcuggaaucuacacggauuuaucaaauccucgccauuuacuccacgguugcgagcucccuggugcuggucgugucucucggcgcuaucagcuucuggaugugcuccaacggaucucugcagugccgcauuuguaucuga

SEQ ID NO: 197645 - RNA, 1701 nt, Artificial Sequence; identical to SEQ ID NO: 197644
  derived and/or modified CDS sequence (opt5) from hemagglutinin__InfluenzaA__ADM13221

SEQ ID NO: 197646 - RNA, 1701 nt, Artificial Sequence
  derived and/or modified CDS sequence (opt5) from hemagglutinin__InfluenzaA__ADM13231
augaaggccauccuggugguccuccuguacaccuucgagacagcuaacgccgacacgcuuugcauuggcuaucacgcgaauaacagcaccgauacaguugacaccgugcuggaaaagaaugugacagucacccauuccgugaaccuccuggaggauaagcacaaugggaaacuuuguaagcugagaggaguugcuccccuccaucugggcaaaugcaacaucgccggguggauucugggaaauccugaaugugagucucucagcacagccuccucuuggagcuacaucguggaaaccuccucuagcgacaacggcacgugcuauccgggggauuuuauuaauuacgaggagcugcgggaacagcuuuccagcgucucuuccuucgagcgcuuugaaaucuuccccaagaccagcucuuggccuaaccacgacuccaauaagggagugacagcugccuguccccaugcuggcgccaagagcuuuuauaagaaccugaucuggcucguuaaaaagggcaauucuuacccuaaacuguccaagagcuauauuaacgauaaggggaaagaggugcuuguccuguggggaauccaccaccccuccaccucugcggaccaacagagccucuaccagaaugccgaugcuuacguguucgugggcacauccagauauagcaagaaauuuaagccugagauugccauccggccgaaaguccgcgaccaggaagggagaaugaacuacuauuggacccugguugagcccggagauaagauuacguucgaagcuacaggcaaccugguggugccucgguacgccuuugcgauggagcgcaaugccgggucuggaaucauuaucuccgacacccccguccaugauugcaacacaaccugucaaaccccuaauggcgcuaucaacacaagccuccccuuccagaauauucacccgaucacgauuggcaaaugcccuaaguaugugaagucuaccaaacugagacuugccacagggcugcggaacguucccagcauccagucccgcggacucuuuggcgcuauugccggguucaucgaaggaggcuggaccgggaugguggacggaugguacggcuaucaucaccagaaugagcaaggcucuggguacgccgcugaccugaaaagcacacagaacgcgaucgauaaaauuaccaauaaggucaacuccgugaucgagaaaaugaauacgcaguuuacagccguuggaaaggaguucaaccaccuugaaaagagaauugaaaaucugaacaaaaagguggacgauggcuuccucgacaucuggaccuacaaugcugagcugcugguccuccuggaaaacgagcggacccuugauuaucaugacagcaacgugaaaaaucuguacgagaagguccgcucucagcucaaaaacaaugccaaggaaauugggaacggauguuuugaguucuaucacaagugcgauaauacauguauggaauccgugaaaaacggcaccuacgacuauccuaaguacagcgaggaagccaaacugaauagagaggagaucgaugggguuaaacuugaaucuacacggaucuaucaaauucuggcuaucuacuccacgguggccagcucccucguccuggugguuucucugggcgcgauuagcuuuuggaugugcuccaacggaucucuccagugccgcaucuguauuuga

SEQ ID NO: 197647 - RNA, 1701 nt, Artificial Sequence; identical to SEQ ID NO: 195905
  derived and/or modified CDS sequence (opt5) from hemagglutinin__InfluenzaA__ADM13241

SEQ ID NO: 197648 - RNA, 1701 nt, Artificial Sequence
  derived and/or modified CDS sequence (opt5) from hemagglutinin__InfluenzaA__ADM13251
augaaggccauccuggugguccuccuguacaccuucgcuacaacgaacgccgacacccuuugcauuggcuaucacgcgaauaacagcacagauaccguugacacagugcuggagaaaaaugugaccgucacacauuccgugaaccuccuggaagauaagcacaaugggaaacuuuguaagcugagaggaguugcuccccuccaucugggcaaaugcaacaucgccggguggauucugggaaauccugagugugaaucucucagcaccgccuccucuuggagcuacaucguggagacguccucuagcgacaacgggaccugcuauccgggcgauuuuauugacuacgaagaacugcgggagcagcuuuccagcgucucuuccuucgaacgcuuugagaucuuccccaagacaagcucuuggccuaaucacgauuccaacaagggagugaccgcugccuguccccaugcuggcgccaagagcuuuuauaaaaaucugaucuggcucguuaaaaagggcaacucuuacccuaaacuguccaagagcuauauuaaugacaaggggaaagaagugcuuguccuguggggaauccaccaccccuccacaucugcggaucaacagagccucuaccagaacgccgacgcuuacguguucgugggcaccuccagauauagcaagaaauuuaagccugagauugccauccggccgaaaguccgcgaucaggaggggagaaugaauuacuauuggacgcugguugaacccggagacaagauuacauucgaggcuaccggcaaccugguggugccucgguacgccuuugcgauggaacgcgaugccgggucuggaaucauuaucuccgacacacccguccaugacugcaacaccaccugucaaacaccuaaaggcgcuaucaauacgagccuccccuuccagaacauucacccgaucaccauuggcaagugcccuaaguaugugaaaucuacaaagcugagacuugccaccgggcugcggaauguucccagcauccagucccgcggacucuuuggcgcuauugccggguucaucgagggaggcuggacagggaugguggauggaugguacggcuaucaucaccagaacgaacaaggcucuggguacgccgcugaccugaaaagcacccagaaugcgaucgauaagauuacgaacaaagucaauuccgugaucgagaagaugaacacacaguuuaccgccguuggaaaggaguucaaucaccuugagaaaagaauugagaaccugaauaagaaaguggacgauggcuuccucgacaucuggaccuacaacgcugaacugcugguccuccuggagaaugaacggacacuugauuaucaugacagcaacgugaagaaucuguacgagaaaguccgcucucagcucaagaacaacgccaaggagauugggaauggauguuuugaguucuaucacaaaugcgauaacaccuguauggaauccgugaagaauggcacauacgacuauccuaaauacagcgaagaggccaagcugaacagagaagagaucgaugggguuaaacuugagucuacgcggaucuaucaaauucuggcuaucuacuccaccguggccagcucccucguccuggugguuucucugggcgcgauuagcuuuuggaugugcuccaauggaucucuccagugccgcaucuguauuuga

SEQ ID NO: 197649 - RNA, 1701 nt, Artificial Sequence
  derived and/or modified CDS sequence (opt5) from hemagglutinin__InfluenzaA__ADM13261
augaaggccauccuggugguccuccuguacaccuucgcuacagccaacgcggacacgcuuugcauuggcuaucacgcuaauaacagcaccgauacaguugacaccgugcuggagaagaaugugacagucacccauuccgugaaccuccuggaagauaagcacaaugggaaacuuuguaagcugagaggaaucgcuccccuccaucugggcaaaugcaacauugccggguggauccugggaaauccugagugugaaucucucagcacagccuccucuuggagcuacauuguugagaccuccggcucugacaacgggacgugcuauccgggagauuuuaucgacuacgaagaacugcgggagcagcuuagcuccgugagcucuuucgaacgcuuugagaucuuccccaagaccuccagcuggccuaaucacgauucuaacaagggcgucacagccgcuuguccccaugccggcgcgaaauccuuuuauaagaaucugauuuggcucgugaaaaaggggaacagcuacccuaaacugucuaaguccuauaucaaugacaagggaaaagaaguucuugugcuguggggcauucaccaccccagcaccuccgccgaucaacagucucucuaccagaacgcugacgccuacgucuucguggggacaagcagauauuccaagaaauuuaagccugagaucgcuauucggccgaaagugcgcgaucaggagggaagaaugaauuacuauuggacccuggucgaacccggcgacaagaucacguucgaggccacagggaaccugguugugccucgguacgcguuugccauggaacgcaacgcuggaagcggcauuaucaucucugauacccccgugcaugacugcaauacaaccugucaaaccccuaaaggcgccauuaacacaucccuccccuuccagaauauccacccgauuacgaucgggaagugcccuaaguaugucaaaagcaccaagcugagacuugcuacaggacugcggaacgugcccucuauucagagccgcggccucuuuggggccaucgccggauucaucgagggcggguggaccggaaugguugacggcugguacggcuaucaucaccagaaugaacaaggguccggauacgcugcggaucugaaaucuacacagaacgccauugacgagaucaccaauaaggugaacagcgucauugagaaaaugaauacgcaguuuacagcugugggcaaggaguucaaccaccuugagaagagaaucgaaaaucugaacaaaaagguugaugacggguuccucgauauuuggaccuacaaugccgagcugcuggugcuccuggaaaacgagcggacccuugacuaucaugauuccaaugucaaaaaccuguacgagaaggugcgcagccagcucaaaaacaaugccaaggaaaucggaaacggcuguuuugaguucuaucacaagugcgacaauacauguauggaaucugucaaaaacgggaccuacgauuauccuaaguacuccgaggaagcuaaacugaauagagaggagaucgacggcgugaaacuugaaagcacacggauuuaucaaauccuggccauuuacucuacgguugcguccagccucgugcuggucgugucccugggagcuaucucuuuuuggaugugcagcaacggcucccuccagugccgcauuuguaucuga

SEQ ID NO: 197650 - RNA, 1701 nt, Artificial Sequence
  derived and/or modified CDS sequence (opt5) from hemagglutinin__InfluenzaA__ADM13271
augaaggccauccuggugguccuccuguacaccuucgcuacagccaacgcggacacgcuuugcauuggcuaucacgcuaauaacagcaccgauacaguugacaccgugcuggagaaaaaugugacagucacccauuccgugaaccuccuggaagauaagcacaaugggaaacuuuguaagcugagaggaguugcuccccuccaucugggcaaaugcaacaucgccggguggauucugggaaauccugagugugaaucucucagcacagccuccucuuggagcuacaucguggagaccuccucuagcgacaacggcacgugcuauccgggggauuuuauugacuacgaagaacugcgggagcagcuuuccagcgucucuuccuucgaacgcuuugagaucuuccccaagaccagcucuuggccuaaucacgauuccaacaagggagugacagccgcuuguccccaugccggcgcgaaaucuuuuuauaagaaucugaucuggcucguuaaaaagggcaacagcuacccuaaacuguccaagagcuauauuaaugacaaggggaaagaagugcuuguccuguggggaauccaccaccccuccaccucugccgaucaacagagccucuaccagaacgcugacgccuacguguucgugggcacauccagauauagcaagaaauuuaagccugagauugcuauccggccgaaaguccgcgaucaggaggggagaaugaauuacuauuggacccugguugaacccggagacaagauuacguucgaggccacaggcaaccugguggugccucgguacgcguuugccauggaacgcaacgcugggucuggaaucauuaucuccgauacccccguccaugacugcaauacaaccugucaaaccccuaaaggcgccaucaacacaagccuccccuuccagaauauucacccgaucacgauuggcaagugcccuaaguaugugaaaucuaccaagcugagacuugcuacagggcugcggaacguucccagcauccagucccgcggacucuuuggcgccauugccggguucaucgagggaggcuggaccgggaugguggacggaugguacggcuaucaucaccagaaugaacaaggcucuggguacgcugcggaucugaaaagcacacagaacgccaucgacaagauuaccaauaaagucaacuccgugaucgagaagaugaauacgcaguuuacagcuguuggaaaggaguucaaccaccuugagaaaagaauugagaaucugaacaagaaaguggaugacggcuuccucgauaucuggaccuacaaugccgaacugcugguccuccuggagaacgaacggacccuugacuaucaugauagcaaugugaagaaccuguacgagaaaguccgcucucagcucaagaacaaugccaaggagauugggaacggauguuuugaguucuaucacaaaugcgacaauacauguauggaauccgugaagaacggcaccuacgauuauccuaaauacagcgaagaggcuaagcugaauagagaagagaucgacgggguuaaacuugagucuacacggauccaucaaauucuggccaucuauuccacgguggcgagcucccucguccuggugguuucucugggcgcuauuagcuuuuggaugugcuccaacggaucucuccagugccgcaucuguauuuga

SEQ ID NO: 197651 - RNA, 1701 nt, Artificial Sequence; identical to SEQ ID NO: 197646
  derived and/or modified CDS sequence (opt5) from hemagglutinin__InfluenzaA__ADM13281

SEQ ID NO: 197652 - RNA, 1701 nt, Artificial Sequence; identical to SEQ ID NO: 195842
  derived and/or modified CDS sequence (opt5) from hemagglutinin__InfluenzaA__ADM13291

SEQ ID NO: 197653 - RNA, 1701 nt, Artificial Sequence
  derived and/or modified CDS sequence (opt5) from hemagglutinin__InfluenzaA__ADM13301
augaaggccauccuggugguccuccuguacaccuucgcuacagccaacgcggacacgcuuugcauuggcuaucacgcuaauaacagcaccgauacaguugacaccauccuggagaaaaaugugacagugacccauuccgucaaccuccuggaagauaagcacaaugggaaacuuuguaagcugagaggaguggcuccccuccaucugggcaaaugcaacauugccggguggauccugggaaauccugagugugaaucucucagcacagccuccucuuggagcuacauuguugagaccuccucuagcgacaacggcacgugcuauccgggggauuuuaucgacuacgaagaacugcgggagcagcuuuccagcgugucuuccuucgaacgcuuugagaucuuccccaagaccagcucuuggccuaaucacgauuccaacaagggagucacagccgcuuguccccaugccggcgcgaaaucuuuuuauaagaaucugauuuggcucgugaaaaaggaaaacagcuacccuaaacuguccaagagcuauaucaaugacaagggcaaagagguucuugugcugugggggauucaccaccccuccaccucugccgaucaacagagccucuaccagaacgucgacgcuuacguguucgugggaacauccagauauagcaagaaauuuaagccugagaucgccauucggccgaaaguccgcgaucaggaaggcagaaugaauuacuauuggacccugguugagcccggggacaagaucacguucgaagcuacaggaaaccugguggugccucgguacgccuuugcgauggagcgcaacgccggcucugggauuaucaucuccgauacccccguccaugacugcaauacaaccugucaaaccccuaaaggagcuauuaacacaagccuccccuuccagaauauccacccgauuacgaucggcaagugcccuaaguaugugaaaucuaccaagcugagacuugccacaggccugcggaacguucccagcauucagucccgcgggcucuuuggagcuaucgccggcuucaucgaagggggauggaccggcaugguggacgggugguacggauaucaucaccagaaugagcaaggcucuggcuacgccgcugaucugaaaagcacacagaacgcgauugacgagaucaccaauaaggucaacuccgugauugaaaagaugaauacgcaguuuacagccguugggaaggaguucaaccaccuugaaaagagaaucgagaaucugaacaaaaagguggaugacggauuccucgauauuuggaccuacaaugcugaacugcugguccuccuggagaacgagcggacccuugacuaucaugauagcaaugugaaaaaccuguacgaaaagguccgcucucagcucaaaaacaaugccaaggagaucggcaacggguguuuugaguucuaucacaagugcgacaauacauguauggaguccgugaaaaacggaaccuacgauuauccuaaguacagcgaagaggccaaacugaauagagaggaaaucgacggcguuaaacuugagucuacacggauuuaucaaauccuggcuauuuacuccacgguggccagcucccucguccuggugguuucucugggggcgaucagcuuuuggaugugcuccaacggcucucuccagugccgcauuuguaucuga

SEQ ID NO: 197654 - RNA, 1701 nt, Artificial Sequence
  derived and/or modified CDS sequence (opt5) from hemagglutinin__InfluenzaA__ADM13311
augaaggccauccuggugguccuccuguacaccuucgcuacagccaacgcggacacgcuuugcauuggcuaucacgcuaauaacagcaccgauacaguugacaccauccuggagaagaaugugacagugacccauuccgucaaccuccuggaaaauaagcacaacgggaaacuuuguaagcugagaggagugucuccccuccaucugggcaaaugcaauauugccggguggauccugggaaacccugagugugaaagccucuccacagccucuagcugguccuacauuguugagaccucuagcuccgauaauggcacgugcuauccgggggacuuuaucgauuacgaagaacugcgggagcagcuuagcucuguguccagcuucgaacgcuuugagaucuuccccaagaccucuuccuggccuaaccacgacagcaauaagggagucacagcugccuguccccaugcuggcgccaaaucuuuuuauaagaaccugauuuggcucgugaaaaagggcaauuccuacccuaaacugagcaaguccuauaucaacgauaaggggaaagaaguucuugugcuguggggcauucaccaccccucuaccagcgcggaccaacagucccucuaccagaaugccgaugcuuacgucuucgugggaacaagcagauauucuaagaaauuuaagccugagaucgccauucggccgaaagugcgcgaccaggaggggagaaugaacuacuauuggacccuggucgaacccggagauaagaucacguucgaggcuacaggcaaccugguugugccucgguacgccuuugcgauggaacgcaaugccggguccggaauuaucaucagcgacacccccgugcaugauugcaacacaaccugucaaaccccuaaaggcgcuauuaauacaucucuccccuuccagaacauccacccgauuacgaucggcaagugcccuaaguaugucaaaagcaccaagcugagacuugccacagggcugcggaaugugcccuccauucagucucgcggacucuuuggcgcuaucgccggguucaucgagggaggcuggaccgggaugguugacggaugguacggcuaucaucaccagaacgaacaaggcagcggguacgccgcugaccugaaauccacacagaaugcgauugaugagaucaccaacaaggugaauagcgucauugagaaaaugaacacgcaguuuacagccgugggaaaggaguucaaucaccuugagaagagaaucgaaaaccugaauaaaaagguugacgauggcuuccucgacauuuggaccuacaacgcugagcugcuggugcuccuggaaaaugagcggacccuugauuaucaugacucuaacgucaaaaaccuguacgagaaggugcgcucccagcucaaaaauaacgccaaggaaaucgggaauggauguuuugaguucuaucacaagugcgauaacacauguauggaaagcgucaaaaauggcaccuacgacuauccuaaguacucugaggaagccaaacugaacagagaggagaucgauggggugaaacuugaauccacacggauuuaucaaauccuggcuauuuacagcacggccgcguccucucucguucugguggucagccugggcgcuaucuccuuuuggaugugcucuaauggaagccuccagugccgcauuuguaucuga

SEQ ID NO: 197655 - RNA, 1701 nt, Artificial Sequence; identical to SEQ ID NO: 195905
  derived and/or modified CDS sequence (opt5) from hemagglutinin__InfluenzaA__ADM13321

SEQ ID NO: 197656 - RNA, 1701 nt, Artificial Sequence
  derived and/or modified CDS sequence (opt5) from hemagglutinin__InfluenzaA__ADM13331
augaaggccauccuggugguccuccuguacaccuucgcuacagccaacgcggacacgcuuugcauuggcuaucacgcuaauaacagcaccgauacaguugacaccgugcuggagaaaaaugugacagucacccauuccgugaaccuccuggaagauaagcacaaugggaaacuuuguaagcugagaggaguugcuccccuccaucugggcaaaugcaacaucgccggguggauucugggaaauccugagugugaaucucucagcacagccuccucuuggagcuacaucguggagaccuccucuagcgacaacggcacgugcuauccgggggauuuuauugacuacgaagaacugcgggagcagcuuuccagcgucucuuccuucgaacgcuuugagaucuuccccaagaccagcucuuggccugaucacgacuccaauaagggagugacagccgcuuguccccaugccggcgcgaaaucuuuuuauaagaaccugaucuggcucguuaaaaagggcaauagcuacccuaaacuguccaagagcuauauuaacgauaaggggaaagaagugcuuguccuguggggaauccaccaccccuccaccucugccgaccaacagagccucuaccagaaugcugaugccuacguguucgugggcacauccagauauagcaagaaauuuaagccugagauugcuauccggccgaaaguccgcgaccaggaggggagaaugaacuacuauuggacccugguugaacccggagauaagauuacguucgaggccacaggcaaucugguggugccucgguacgcguuugccauggaacgcaacgcugggucuggaaucauuaucuccgacacccccguccaugacugcaacacaaccugucaaaccccuaaaggcgccaucaauacaagccuccccuuccagaacauucacccgaucacgauuggcaagugcccuaaguaugugaaaucuaccaagcugagacuugcuacagggcugcggaauguucccagcauccagucccgcggacucuuuggcgccauugccggguucaucgagggaggcuggaccgggaugguggauggaugguacggcuaucaucaccagaacgaacaaggcucuggguacgcugcggaccugaaaagcacacagaaugccaucgauaagauuaccaacaaagucaauuccgugaucgagaagaugaacacgcaguuuacagcuguuggaaaggaguucaaucaccuugagaaaagaauugagaaccugaauaagaaaguggacgauggcuuccucgacaucuggaccuacaacgccgaacugcugguccuccuggagaaugaacggacccuugauuaucaugacagcaacgugaagaaucuguacgagaaaguccgcucucagcucaagaacaacgccaaggagauugggaauggauguuuugaguucuaucacaaaugcgauaacacauguauggaauccgugaagaauggcaccuacgacuauccuaaauacagcgaagaggcuaagcugaacagagaagagaucgaugggguuaaacuugagucuacacggaucuaucaaauucuggccaucuacuccacgguggcgagcucccucguccuggugguuucucugggcgcuauuagcuuuuggaugugcuccaauggaucucuccagugccgcaucuguauuuga

SEQ ID NO: 197657 - RNA, 1701 nt, Artificial Sequence; identical to SEQ ID NO: 196354
  derived and/or modified CDS sequence (opt5) from hemagglutinin__InfluenzaA__ADM13341

SEQ ID NO: 197658 - RNA, 1701 nt, Artificial Sequence; identical to SEQ ID NO: 197320
  derived and/or modified CDS sequence (opt5) from hemagglutinin__InfluenzaA__ADM13351

SEQ ID NO: 197659 - RNA, 1701 nt, Artificial Sequence; identical to SEQ ID NO: 194401
  derived and/or modified CDS sequence (opt5) from hemagglutinin__InfluenzaA__ADM13442

SEQ ID NO: 197660 - RNA, 1701 nt, Artificial Sequence; identical to SEQ ID NO: 194401
  derived and/or modified CDS sequence (opt5) from hemagglutinin__InfluenzaA__ADM13443

SEQ ID NO: 197661 - RNA, 1701 nt, Artificial Sequence; identical to SEQ ID NO: 194401
  derived and/or modified CDS sequence (opt5) from hemagglutinin__InfluenzaA__ADM13444

SEQ ID NO: 197662 - RNA, 1701 nt, Artificial Sequence; identical to SEQ ID NO: 195348
  derived and/or modified CDS sequence (opt5) from hemagglutinin__InfluenzaA__ADM13445

SEQ ID NO: 197663 - RNA, 1701 nt, Artificial Sequence; identical to SEQ ID NO: 194401
  derived and/or modified CDS sequence (opt5) from hemagglutinin__InfluenzaA__ADM13446

SEQ ID NO: 197664 - RNA, 1701 nt, Artificial Sequence
  derived and/or modified CDS sequence (opt5) from hemagglutinin__InfluenzaA__ADM13447
augaagaccaucauugcccugagcuacaucuucugccucgcucugggccaggaccuucccgggaacgauaauuccacagccacgcugugucucggacaccaugcggugccuaacggcacccuggucaaaacaauuaccgacgaucaaaucgagguuacaaaugcuaccgaacuugugcagucuagcuccacagggaagauuugcaacaauccgcacagaauccuggacggaaucgauuguacccucauugacgcccugcugggcgauccccauugcgacguguuucagaacgagacgugggaucucuucgucgaacggucuaaagccuuuagcaauuguuauccuuacgacgugcccgauuaugcuucccugcgcucucuuguugccagcuccgggacccuggaguucaucacagaaggauuuaccuggacaggcgugacccagaacggcgggagcaaugcuugcaagagaggaccuggcucuggguucuuuucccggcucaacuggcugacgaaaagcggaucuacauacuccguccuuaaugugaccaugcccaacaaugacaacuucgauaagcuguauauuuggggcguucaccauccuagcacaaaucaagagcagaccucucucuacgugcaggccuccgggcgcgucaccgugagcacaagacggucccagcaaacgaucauuccgaacaucggaucucgccccugggugagaggccugagcucccggauuagcaucuauuggaccaucgucaagccuggcgacguucuggugauuaacucuaaugggaaccucaucgcgccccgcggauacuuuaaaaugagaacaggcaaguccagcauuaugcggucugacgccccuaucgauaccuguauuagcgagugcaucacacccaauggguccaucccgaacgacaaaccuuuccagaaugugaacaagauuaccuacggagcuugucccaaauaugucaagcagaauacgcugaaacuugccacaggcaugcgcaacgugccugaaaagcagaccagagggcuguuuggagcuaucgccggcuucauugagaauggcugggaagggaugaucgauggaugguacggcuuucggcaccaaaacucugaggggaccggacaggcggccgaccucaagagcacacaggcugccauugaucaaaucaauggcaaacugaaccgcguuaucgagaagaccaaugaaaaauuccaccagauugagaaggaguucuccgaaguggaagggagaauccaggaccuugagaaauaugucgaggauacaaagauugaccuguggagcuacaacgcugaacuccugguggcccuggagaaucagcauacgaucgaucucaccgacucugaaaugaacaagcuguuugagaaaacacggagacaacuucgcgaaaacgccgaggauaugggcaauggaugcuucaagauuuaucacaaaugugacaacgcuugcaucgaguccauucggaauggcaccuacgaccaugauguuuauagagacgaagcgcugaacaaucgcuuucagaucaaggggguggagcucaaaagcggauacaaggauuggauccuguggauuucuuucgccaucuccugcuuucuucugugugucgugcuccugggcuucauuaugugggcuugccagcgggggaacaucagauguaauauuugcaucuga

SEQ ID NO: 197665 - RNA, 1701 nt, Artificial Sequence; identical to SEQ ID NO: 194471
  derived and/or modified CDS sequence (opt5) from hemagglutinin__InfluenzaA__ADM13448

SEQ ID NO: 197666 - RNA, 1701 nt, Artificial Sequence
  derived and/or modified CDS sequence (opt5) from hemagglutinin__InfluenzaA__ADM13449
augaagaccaucauugcccugagcuacaucuucugccucgcuuuuggccaggaccugcccgggaacgauaauuccacagccacgcuuugucugggacaccaugcggugccuaacggcacccucgucaaaacaauuaccgacgaucaaaucgagguuacaaaugcuaccgaacuggugcagucuagcuccacagggaagauuugcaacaauccgcacagaauccuugacggaaucgauuguacccugauugacgcccuccugggcgauccccauugcgacguguuccagaacgagacgugggaucuguuugucgaacggucuaaagccuucagcaauuguuauccuuacgacgugcccgauuaugcuucccuccgcucucugguugccagcuccgggacccuugaguuuaucacagaaggauucaccuggacaggcgugacccagaacggcgggagcaaugcuugcaagagaggaccuggcucuggguuuuucucccggcugaacuggcucacgaaaagcggaucuacauaccccguccugaaugugaccaugccuaacaaugacaacuuugauaaacuuuauauuuggggcguucaccauccguccacaaaucaagagcagaccagccuguacgugcaggccucugggcgcgucaccguguccacaagacggagccagcaaacgaucauucccaacaucgagucccgcccuugggugagaggacucucuagccggauuuccaucuauuggaccaucgucaaccccggcgacguucuggugauuaauagcaacggcaaucugaucgcgccucgcggguacuucaagaugagaacaggaaaaucuuccauuaugcggagcgacgcccccaucgauaccuguauuucugaaugcaucacaccgaacggcagcaucccuaaugacaagcccuuucagaacgugaauaaaauuaccuacggggcuuguccuaaguaugucaaacagaacacgcucaagcuggccacaggaaugcgcaaugugcccgagaagcagaccagaggccuuuucggggcuaucgccggauuuauugaaaacggcugggagggcaugaucgaugggugguacggauuccggcaccaaaauuccgagggcaccgggcaggcggccgaccugaaaucuacacaggcugccauugaucaaaucaacggaaagcucaaucgcguuaucgaaaagaccaacgagaaguuccaccagauugaaaaagaguuuagcgaaguggagggcagaauccaggaccuggagaaguaugucgaagauacaaaaauugaccuuugguccuacaaugcugagcugcucguggcccuggaaaaccagcauacgaucgaucugaccgacagcgagaugaacaaacucuucgaaaagacacggagacaacugcgcgagaaugccgaggauauggggaacggcugcuuuaagauuuaucacaagugugacaaugcuugcaucgaaucuauucggaacggaaccuacgaccaugauguuuauagagacgaggcgcuuaauaaccgcuuccagaucaaaggcguggaacugaaguccggguacaaagauuggauccucuggauuagcuuugccaucucuugcuuccugcuuugugucgugcugcucggauuuauuaugugggcuugccagcggggcaauaucagauguaacauuugcaucuga

SEQ ID NO: 197667 - RNA, 1701 nt, Artificial Sequence; identical to SEQ ID NO: 194503
  derived and/or modified CDS sequence (opt5) from hemagglutinin__InfluenzaA__ADM13450

SEQ ID NO: 197668 - RNA, 1701 nt, Artificial Sequence
  derived and/or modified CDS sequence (opt5) from hemagglutinin__InfluenzaA__ADM13451
augaagaccaucauugcccugagcuacaucuucugccucgcucugggccaggaccuucccgggaacgauaauagaacagccacgcugugucucggacaccaugcggugccuaacggcacccuggucaaaacaauuaccgacgaucaaaucgagguuacaaaugcuaccgaacuugugcaguccucuagcacagggaagauuugcaacaauccgcaccggauccuggacggaaucgauuguacccucauugacgcccugcugggcgauccccauugcgacguguuucagaacgagacgugggaucucuucgucgaacgcuccaaagccuuuucuaauuguuauccuuacgacgugcccgauuaugcuagccugagaucccuuguugccucuagcgggacccuggaguucaucacagaaggauuuaccuggacaggcgugacccagaacggcggguccaaugcuugcaagcggggaccuggcagcggguucuuuucucgccucaacuggcugacgaaauccggaagcacauaccccguccuuaaugugaccaugccuaacaaugacaacuucgauaagcuguauauuuggggcguucaccauccgucuacaaaucaagagcagaccucccucuacgugcaggccagcgggagagucaccgugucuacacggcgcucccagcaaacgaucauucccaacaucggaagcagaccuugggugcggggccuguccucucgcauuagcaucuauuggaccaucgucaagcccggcgacguucuggugauuaacuccaaugggaaccucaucgcgccuagaggauacuuuaaaaugcggacaggcaagagcucuauuaugcgcuccgacgcccccaucgauaccuguauuagcgagugcaucacaccgaaugggucuaucccuaacgacaaacccuuccagaaugugaacaagauuaccuacggagcuuguccuaaauaugucaagcagaauacgcugaaacuugccacaggcaugagaaacgugcccgaaaagcagacccgggggcuguuuggagcuaucgccggcuucauugagaauggcugggaagggaugaucgauggaugguacggcuuucgccaccaaaacagcgaggggaccggacaggcggccgaccucaaguccacacaggcuaccauugaucaaaucaauggcaaacugaacagaguuaucgagaagacaaaugaaaaauuccaccagauugagaaggaguucucugaaguggaagggcggauccaggaccuugagaaauaugucgaggauacgaagauugaccuguggagcuacaacgccgaacuccugguggcucuggagaaucagcauaccaucgaucucacagacuccgaaaugaacaagcuguuugagaaaaccagacgccaacuucgggaaaacgccgaggauaugggcaauggaugcuucaagauuuaucacaaaugugacaacgccugcaucgagagcauuagaaauggcacauacgaccaugauguuuaucgcgacgaagcucugaacaaucgguuucagaucaaggggguggagcucaaaucuggauacaaggauuggauccuguggauuuccuucgcgaucagcugcuuucuucugugugucgugcuccugggcuucauuaugugggccugccagagagggaacauccgcuguaauauuugcaucuga

SEQ ID NO: 197669 - RNA, 1701 nt, Artificial Sequence; identical to SEQ ID NO: 194388
  derived and/or modified CDS sequence (opt5) from hemagglutinin__InfluenzaA__ADM13452

SEQ ID NO: 197670 - RNA, 1701 nt, Artificial Sequence
  derived and/or modified CDS sequence (opt5) from hemagglutinin__InfluenzaA__ADM14467
augaaggccauccuggugguccuccuguacaccuucgcuacagccaacgcggacacgcuuugcauuggcuaucacgcuaauaacagcaccgauacaguugacaccgugcuggagaaaaaugugacagucacccauuccgugaaccuccuggaagauaagcacaaugggaaacuuuguaagcugagaggaguugcuccccuccaucugggcaaaugcaacaucgccggguggauucugggaaauccugagugugaaucucucagcacagccuccucuuggagcuacaucguggagaccuccucuagcgacaacggcacgugcuauccgggggauuuuauugacuacgaagaacugcgggagcagcuuuccagcgucucuuccuucgaacgcuuugagaucuuccccaagaccagcucuuggccuaaucacgauuccaacaagggagugacagccgcuuguagccaugccggcgcgaaaucuuuuuauaagaaucugaucuggcucguuaaaaagggcaacuccuaccccaaacugagcaaguccuauauuaaugacaaggggaaagaagugcuuguccuguggggaauccaccacccuucuaccagcgccgaucaacagucccucuaccagaacgcugacgccuacguguucgugggcacaagcagauauucuaagaaauuuaagcccgagauugcuauccggccuaaaguccgcgaucaggaggggagaaugaauuacuauuggacccugguugaaccgggagacaagauuacguucgaggccacaggcaaccugguggugccccgguacgcguuugccauggaacgcaacgcuggguccggaaucauuaucagcgauaccccuguccaugacugcaauacaaccugucaaacccccaaaggcgccaucaacacaucucucccuuuccagagcauucaccccaucacgauuggcaagugcccgaaguaugugaaauccaccaagcugagacuugcuacagggcugcggaauguuccuucuauccagagccgcggacucuuuggcgccauugccggguucaucgagggaggcuggaccgggaugguggacggaugguacggcuaucaucaccagaacgaacaaggcuccggguacgcugcggaucugaaaagcacacagaaugccaucgacaagauuaccaacaaagucaauucugugaucgagaagaugaacacgcaguuuacagcuguuggaaaggaguucaaucaccuugagaaaagaauugagaaccugaauaagaaaguggaugacggcuuccucgauaucuggaccuacaacgccgaacugcugguccuccuggagaaugaacggacccuugacuaucaugauuccaacgugaagaaucuguacgagaaaguccgcagccagcucaagaacaacgccaaggagauugggaauggauguuuugaguucuaucacaaaugcgacaacacauguauggaaucugugaagaauggcaccuacgauuaucccaaauacuccgaagaggcuaagcugaacagagaagagaucgacgggguuaaacuugagagcacacggaucuaucaaauucuggccaucuacuccacgguggcgucuagccucguccuggugguuucccugggcgcuauuucuuuuuggaugugcagcaauggaucccuccagugccgcaucuguauuuga

SEQ ID NO: 197671 - RNA, 1695 nt, Artificial Sequence
  derived and/or modified CDS sequence (opt5) from hemagglutinin__InfluenzaA__ADM14516
augaaggccauccuggugguccuccuguacaccuucgcuacagccaacgcggacacgcuuugcauuggcuaucacgcuaauaacagcaccgauacaguuaauaccgugcuggagaagaacgugacagucacccauuccgugaaucuccuggaagacaagcacaacgggaaacuuuguaagcugagaggaguugcuccccuccaucugggcaaaugcaauaucgccggguggauucugggaaacccugagugugaaucucucagcacagccuccucuuggagcuacaucguggagaccuccucuagcgauaauggcacgugcuauccgggggacuuuauugauuacgaagaacugcgggagcagcuuuccagcgucucuuccuucgaacgcuuugagaucuuccccaagaccagcucuuggccuaaccacgacuccaauaagggagugacagccgcuuguccccaugccggcgcgaaaucuuuuuauaagaaccugaucuggcucguuaaaaagggcaauagcuacccuaaacuguccaagagcuauauuaacgauaaggggaaagaagugcuuguccuguggggaauccaccaccccuccaccucuacagaccaacagagccucuaccagaaugccgaugcuuacguguucgugggcaccuccagauauagcaagaaauuuaagccugagauugccauccggccgaaaguccgcgaccaggaggggagaaugaacuacuauuggacgcugguugaacccggagauaagauuacauucgaggcuaccggcaaccugguggugccucgguacgccuuugcgauggaacgcaaugccgggucuggaaucauuaucuccgacacacccguccaugauugcaacaccaccugucaaacaccuaaaggcgcuaucaauacgagccuccccuuccagaacauucacccgaucaccauuggcaagugcccuaaguaugugaaaucuacaaagcugagacuugccaccgggcugcggaauguucccagcauccagucccgcggacucuuuggcgcuauugccggguucaucgagggaggcuggacagggaugguggacggaugguacggcuaucaucaccagaacgaacaaggcucuggguacgccgcugaccugaaaagcacccagaaugcgaucgaugagauuacgaacaaggucaauuccgugaucgagaaaaugaacacacaguuuaccgccguuggaaaggaguucaaucaccuugagaagagaauugaaaaccugaauaaaaagguggacgauggcuuccucgacaucuggaccuacaacgcugagcugcugguccuccuggaaaaugagcggacacuugauuaucaugacagcaacgugaaaaaccuguacgagaagguccgcucucagcucaaaaauaacgccaaggaaauugggaauggauguuuugaguucuaucacaagugcgauaacaccuguauggaauccgugaaaaauggcacauacgacuauccuaaguacagcgaggaagccaaacugaacagagaggagaucgaugggguuaaacuugaaucuacgcggaucuaucaaauucuggcuaucuacuccaccguggccagcucccucguccuggugguuucucugggcgcgauuagcuuuuggaugugcuccggacauucuugccgcaucuguauuuga

SEQ ID NO: 197672 - RNA, 1701 nt, Artificial Sequence
  derived and/or modified CDS sequence (opt5) from hemagglutinin__InfluenzaA__ADM14525
augaaggccacccuggugguccuccuguacacauucgcuacggccaacgcggacacccuuugcaucggcuaucacgcuaauaacagcacagauaccguugacacagugcuggagaaaaaugugaccgucacacauuccgugaaccuccuggaagauaagcacaaugggaaacuuuguaagcugagaggaguugcuccccuccaucugggcaaaugcaacauugccggguggauccugggaaauccugagugugaaucucucagcaccgccuccucuuggagcuacauuguggagacguccucuagcgacaacggaaccugcuauccgggggauuuuaucgacuacgaagaacugcgggagcagcuuuccagccugucuuccuucgaacgcuuugagauuuuccccaagacaagcucuuggccuaaucacgauuccaacaagggagucaccgccgcuuguccccaugccggcgcgaaaucuuuuuauaagaaucucaucuggcuggugaaaaagggcaacagcuacccuaaacuuuccaagagcuauaucaaugacaaggggaaagauguucuggugcucuggggcauucaccaccccuccacaucugccgaccaacagagccuguaccagaacgcugaugccuacgucuucgugggcaccuccagauauagcaagaaauuuaagccugaaaucgcuauucggccgaaagugcgcgaccaggaggggagaaugaauuacuauuggacgcuggucgagcccggagauaagaucacauucgaagccaccggcaaccucguugugccucgguacgcguuugccauggagcgcaacgcugggucuggaauuaucauuuccgacacacccgugcaugacugcaauaccaccugucaaacaccuaaaggcgccaucaacacgagccugcccuuccagaauauccacccgauuaccaucggcaagugcccuaaguaugucaaaucuacaaaacuuagacuggcuaccgggcuccggaacgugcccagcauucagucccgcggacuguuuggcgccaucgccggguucauugaaggaggcuggacagggaugguugauggaugguacggcuaucaucaccagaaugagcaaggcucuggguacgcugcggaccuuaagagcacccagaacgccaucgaugaaaucacgaauaaggugaacuccgucauugagaaaaugaauacacaguuuaccgcugugggaaaggaguucaaccaccuggaaaagagaaucgagaaucucaacaaaaagguugacgauggcuuccuggacauuuggaccuacaaugccgaacugcucgugcugcuugagaacgaacggacacuggauuaucaugacagcaaugucaaaaaccucuacgagaaggugcgcucucagcugaaaaacaaugccaaggagaucgggaacggauguuuugaguucuaucacaagugcgauaauaccuguauggaguccgucaaaaacggcacauacgacuauccuaaguacagcgaagaggcuaaacuuaauagagaagagauugauggggugaagcuggagucuacgcggaucuaucaaauccucgccauuuacuccaccguugcgagcucccuggugcuggucgugucucucggcgcuaucagcuuuuggaugugcuccaacggaucucugcagugccgcauuuguaucuga

SEQ ID NO: 197673 - RNA, 1695 nt, Artificial Sequence
  derived and/or modified CDS sequence (opt5) from hemagglutinin__InfluenzaA__ADM14553
augaaggccauccuggugguccuccuguacaccuucgcuacagccaacgcggacacgcuuugcauuggcuaucacgcuaauaacagcaccgauacaguugacaccauccuggagaaaaaugugacagugacccauuccgucaaccuccuggaagauaagcacaaugggaaacuuuguaagcugagaggaguggcuccccuccaucugggcaaaugcaacauugccggguggauccugggaaauccugagugugaaucucucagcacagccuccucuuggagcuacauuguugagaccuccucuagcgacaacggcacgugcuauccgggggauuuuaucgacuacgaagaacugcgggagcagcuuuccagcgugucuuccuucgaacgcuuugagaucuuccccaagaccagcucuuggccuaaucacgauuccaacaagggagucacagccgcuuguccccaugccggcgcgaaaucuuuuuauaagaaucugauuuggcucgugaaaaagggcaacagcuacccuaaacuguccaagagcuauaucaaugacaaggggaaagaaguucuugugcuguggggcauucaccaccccuccaccucugccgaucaacagagccucuaccagaacgcugacgccuacgucuucguggagacauccagauauagcaagaaauuuaagccugagaucgcuauucggccgaaagugcgcgaucaggaaggaagaaugaauuacuauuggacccuggucgagcccggggacaagaucacguucgaagccacaggaaaccugguugugccucgguacgcguuugccauggagcgcaacgcuggcucugggauuaucaucuccgauaccagcgugcaugacugcaauacaaccugucaaacccccaaaggagccauuaacacaucucucccuuuccagaauauccaccccauuacgaucggcaagugcccgaaguaugucaaaagcaccaagcugagacuugcuacaggccugcggaacgugccuuccauucagucucgcgggcucuuuggagccaucgccggcuucaucgaagggggauggaccggcaugguugacgggugguacggauaucaucaccagaaugagcaaggcagcggcuacgcugcggaucugaaauccacacagaacgccauugacgagaucaccaauaaggugaacagcgucauugaaaagaugaauacgcaguuuacagcuguggggaaggaguucaaccaccuugaaaagagaaucgagaaucugaacaaaaagguugaugacggauuccucgauauuuggaccuacaaugccgaacugcuggugcuccuggagaacgagcggacccuugacuaucaugauucuaaugucaaaaaccuguacgaaaaggugcgcucccagcucaaaaacaaugccaaggagaucggcaacggguguuuugaguucuaucacaagugcgacaauacauguauggagagcgucaaaaacggaaccuacgauuaucccaaguacucugaagaggcuaaacugaauagagaggaaaucgacggcgugaaacuugaguccacacggauuuaucaaauccuggccauuuacagcacgguugcguccucucucgugcuggucgugagccugggggcuaucuccuuuuggaugugcucuggccauagcugccgcauuuguaucuga

SEQ ID NO: 197674 - RNA, 1701 nt, Artificial Sequence; identical to SEQ ID NO: 195188
  derived and/or modified CDS sequence (opt5) from hemagglutinin__InfluenzaA__ADM14562

SEQ ID NO: 197675 - RNA, 1701 nt, Artificial Sequence; identical to SEQ ID NO: 194741
  derived and/or modified CDS sequence (opt5) from hemagglutinin__InfluenzaA__ADM14571

SEQ ID NO: 197676 - RNA, 1701 nt, Artificial Sequence
  derived and/or modified CDS sequence (opt5) from hemagglutinin__InfluenzaA__ADM14580
augaaggccauccuggugguccuccuguacaccuucgcuacagccaacgcggacacgcuuugcauuggcuaucacgcuaauaacagcaccgauacaguugacaccgugcuggagaaaaaugugacagucacccauuccgugaaccuccuggaagauaagcacaaugggaaacuuuguaagcugagaggaguugcuccccuccaucugggcaaaugcaacaucgccggguggauucugggaaauccugagugugaaucucucagcacagccuccucuuggagcuacaucguggagaccuccucuagcgacaacggcacgugcuauccgggggauuuuauugacuacgaagaacugcgggagcagcuuuccagcgucucuuccuucgaacgcuuugagaucuuccccaagaccagcucuuggccuaaucacgauuccaacaagggagugacagccgcuuguccccaugccggcgcgaaaucuuuuuauaagaaucugaucuggcucguuaaaaagggcaacagcuacccuaaacuguccaagagcuauauuaaugacaaggggaaagaagugcuuguccuguggggaauccaccaccccuccaccucugccgaucaacagagccucuaccagaacgcugacgccuacguguucgugggcacauccagauauagcaagaaauuuaagccugagauugcuauccggccgaaaguccgcgaucaggaggggagaaugaauuacuauuggacccugguugaacccggagacaagauuacguucgaggccacaggcaaccugguggugccucgguacgcguuugccauggaaaagaacgcugggucuggaaucauuaucuccgauacccccguccaugacugcaauacaaccugucaaaccccuaagggcgccaucaacacaagccuccccuuccagaauauucacccgaucacgauuggcaagugcccuaaauaugugaagucuaccaaacugcgccuugcuacagggcugagaaacguucccagcauccagucccggggacucuuuggcgccauugccggguucaucgagggaggcuggaccgggaugguggacggaugguacggcuaucaucaccagaaugaacaaggcucuggguacgcugcggaucugaaaagcacacagaacgccaucgacgagauuaccaauaaagucaacuccgugaucgagaagaugaauacgcaguuuacagcuguuggaaaggaguucaaccaccuugagaaacgcauugaaaaucugaacaagaaaguggaugacggcuuccucgauaucuggaccuacaaugccgagcugcugguccuccuggaaaacgagagaacccuugacuaucaugauagcaaugugaagaaccuguacgagaaaguccggucucagcucaagaacaaugccaaggaaauugggaacggauguuuugaguucuaucacaaaugcgacaauacauguauggaauccgugaagaacggcaccuacgauuauccuaaauacagcgaggaagcuaagcugaaucgcgaggagaucaacgggguuaaacuugaaucuacaagaaucuaucaaauucuggccaucuacuccacgguggcgagcucccucguccuggugguuucucugggcgcuauuagcuuuuggaugugcuccaauggaucucuccagugccggaucuguauuuga

SEQ ID NO: 197677 - RNA, 1701 nt, Artificial Sequence
  derived and/or modified CDS sequence (opt5) from hemagglutinin__InfluenzaA__ADM14589
augaaggccauccuggugguccuccuguacaccuucgcuacagccaacgcggacacgcuuugcauuggcuaucacgcuaauaacagcaccgauacaguugacaccgugcuggagaaaaaugugacagucacccauuccgugaaccuccuggaagauaagcacaaugggaaacuuuguaagcugagaggaguugcuccccuccaucugggcaaaugcaacaucgccggguggauucugggaaauccugagugugaaucucucagcacagccuccucuuggagcuacaucguggagaccuccucuagcgacaacggcacgugcuauccgggggauuuuauugacuacgaagaacugcgggagcagcuuuccagcgucucuuccuucgaacgcuuugagaucuuccccaagaccagcucuuggccuaaucacgauuccaacaagggagugacagccgcuuguccccaugccggcgcgaaaucuuuuuauaagaaucugaucuggcucguuaaaaagggcaacagcuacccuaaacuguccaagagcuauauuaaugacaaggggaaagaagugcuuguccuguggggaauccaccaccccuccaccucugccgaucaacagagccucuaccagaacgcugacgccuacguguucgugggcacauccagauauagcaagaaauuuaagccugagauugcuauccggccgaaaguccgcgaucaggaggggagaaugaauuacuauuggacccugguugaacccggagacaagauuacguucgaggccacaggcaaccugguggugccucgguacgcguuugccauggaaaagaacgcugggucuggaaucauuaucuccgauacccccguccaugacugcaauacaaccugucaaaccccuaagggcgccaucaacacaagccuccccuuccagaauauucacccgaucacgauuggcaagugcccuaaauaugugaagucuaccaaacugcgccuugcuacagggcugagaaacguucccagcauccagucccggggacucuuuggcgccauugccggguucaucgagggaggcuggaccgggaugguggacggaugguacggcuaucaucaccagaauggccaagggucuggauacgcugcggaucugaaaagcacacagaacgccaucgacgaaauuaccaauaaagucaacuccgugaucgagaagaugaauacgcaguuuacagcuguuggcaaggaguucaaccaccuugaaaaacgcauugagaaucugaacaagaaaguggaugacggguuccucgauaucuggaccuacaaugccgaacugcugguccuccuggagaacgaaagaacccuugacuaucaugauagcaaugugaagaaccuguacgagaaaguccggucucagcucaagaacaaugccaaggagauuggaaacggcuguuuugaguucuaucacaaaugcgacaauacauguauggaguccgugaagaacgggaccuacgauuauccuaaauacagcgaagaggcuaagcugaaucgcgaagagaucaacggcguuaaacuugagucuacaagaaucuaucaaauucuggccaucuacuccacgguggcgagcucccucguccuggugguuucucugggagcuauuagcuuuuggaugugcuccaauggcucucuccagugccggaucuguauuuga

SEQ ID NO: 197678 - RNA, 1701 nt, Artificial Sequence
  derived and/or modified CDS sequence (opt5) from hemagglutinin__InfluenzaA__ADM14599
augaaggccauccuggugguccuccuguacaccuucgcuacagccaacgcggacacgcuuugcauuggcuaucacgcuaauaacagcaccgauacaguugacaccgugcuggagaagaaugugacagucacccauuccgugaaccuccuggaagauaagcacaaugggaaacuuuguaagcugagaggaguugcuccccuccaucugggcaaaugcaacaucgccggguggauucugggaaauccugagugugaaucucucagcacagccuccucuuggagcuacaucguggagaccuccucuagcgacaacggcacgugcuauccgggggauuuuauugacuacgaagaacugcgggagcagcuuuccagcgucucuuccuucgaacgcuuugagaucuuccccaagaccagcucuuggccuaaucacgauuccaacaagggagugacagccgcuuguccccaugccggcgcgaaaucuuuuuauaagaaucugaucuggcucguuaaaaagggcaacagcuacccuaaacuguccaagagcuauauuaaugacaaggggaaagaagugcuuguccuguggggaauccaccaccccuccaccucugccgaucaacagagccucuaccagaacgcugacgccuacguguucgugggcacauccagauauagcaagaaauuuaagccugagauugucauccggccgaaaguucgcgaucaggaggggagaaugaauuacuauuggacccugguggaacccggagacaagauuacguucgaggcuacaggcaaccugguggucccucgguacgccuuugcgauggaacgcaacgccgggucuggaaucauuaucuccgauacccccgugcaugacugcaauacaaccugucaaaccccuaaaggcgcuaucaacacaagccuccccuuccagaauauucacccgaucacgauuggcaagugcccuaaguauguuaaaucuaccaagcugagacuugccacagggcugcggaacgugcccagcauccagucccgcggacucuuuggcgcuauugccggguucaucgagggaggcuggaccgggauggucgacggaugguacggcuaucaucaccagaaugaacaaggcucuggguacgccgcugaucugaaaagcacacagaacgcgaucgacgagauuaccaauaaggugaacuccguuaucgagaaaaugaauacgcaguuuacagccgugggaaaggaguucaaccaccuugagaagagaauugaaaaucugaacaaaaaggucgaugacggcuuccucgauaucuggaccuacaaugcugagcugcuggugcuccuggaaaacgagcggacccuugacuaucaugauagcaaugucaaaaaccuguacgagaaggugcgcucucagcucaaaaacaaugccaaggaaauugggaacggauguuuugaguucuaucacaagugcgacaauacauguauggaauccguuaaaaacggcaccuacgauuauccuaaguacagcgaggaagccaaacugaauagagaggagaucgacggggugaaacuugaaucuacacggaucuaucaaauucuggcuaucuacuccacggucgccagcucccucgugcugguugugucucugggcgcgauuagcuuuuggaugugcuccaacggaucucuccagugccgcaucuguauuuga

SEQ ID NO: 197679 - RNA, 1701 nt, Artificial Sequence; identical to SEQ ID NO: 195901
  derived and/or modified CDS sequence (opt5) from hemagglutinin__InfluenzaA__ADM14609

SEQ ID NO: 197680 - RNA, 1701 nt, Artificial Sequence
  derived and/or modified CDS sequence (opt5) from hemagglutinin__InfluenzaA__ADM14618
augaaggccauccuggugguccuccuguacaccuucgcuacagccaacgcggacacgcuuugcauuggcuaucacgcuaauaacagcaccgauacaguugacaccgugcuggagaagaaugugacagucacccauuccgugaaccuccuggaagauaagcacaaugggaaacuuuguaagcugagaggaguugcuccccuccaucugggcaaaugcaacaucgccggguggauucugggaaauccugagugugaaucucucagcacagccuccucuuggagcuacaucguggagaccuccucuagcgacaacggcacgugcuauccgggggauuuuauugacuacgaagaacugcgggagcagcuuuccagcgucucuuccuucgaacgcuuugagaucuuccccaagaccagcucuuggccuaaucacgauuccaacaagggagugacagccgcuuguccccaugccggcgcgaaaucuuuuuauaagaaucugaucuggcucguuaaaaagggcaacagcuacccuaaacuguccaagagcuauauuaaugacaaggggaaagaagugcuuguccuguggggaauccaccaccccuccaccucugccgaucaacagagccucuaccagaacgcugacgccuacguguucgugggcacauccagauauagcaagaaauuuaagccugagauugcuauccggccgaaaguccgcgaucaggaggggagaaugaauuacuauuggacccugguugaacccggagacaagauuacguucgaggccacaggcaaccugguggugccucgguacgcguuugccauggaacgcaacgcugggucuggaaucauuaucuccgauacccccguccaugacugcaauacaaccugucaaaccccuaaaggcgccaucaacacaagccuccccuuccagaauaaccacccgauuacgaucggcaagugcccuaaguaugugaaaucuaccaagcugagacuugcuacagggcugcggaauguucccagcauucagucccgcggacucuuuggcgccaucgccggguucauugagggaggcuggaccgggaugguggacggaugguacggcuaucaucaccagaacgaacaaggcucuggguacgcugcggaucugaaaagcacacagaaugccaucgacgagaucaccaacaaggucaauuccgugauugagaaaaugaacacgcaguuuacagcuguuggaaaggaguucaaucaccuugagaagagaaucgaaaaccugaauaaaaagguggaugacggcuuccucgauauuuggaccuacaacgccgagcugcugguccuccuggaaaaugagcggacccuugacuaucaugauagcaacgugaaaaaccuguacgagaagguccgcucucagcucaaaaauaacgccaaggaaaucgggaauggauguuuugaguucuaucacaagugcgacaacacauguauggaauccgugaaaaauggcaccuacgauuauccuaaguacagcgaggaagcuaaacugaacagagaggagauugacgggguuaaacuugaaucuacacggaucuaucaaauccuggccauuuacuccacgguggcgagcucccucguccuggugguuucucugggcgcuaucagcuuuuggaugugcuccaauggaucucuccagugccgcauuuguaucuga

SEQ ID NO: 197681 - RNA, 1701 nt, Artificial Sequence; identical to SEQ ID NO: 194741
  derived and/or modified CDS sequence (opt5) from hemagglutinin__InfluenzaA__ADM14627

SEQ ID NO: 197682 - RNA, 1701 nt, Artificial Sequence
  derived and/or modified CDS sequence (opt5) from hemagglutinin__InfluenzaA__ADM14655
augaaggccauccuggugguccuccuguacaccuucgcuacagccaacgcggacacgcuuugcauuggcuaucacgcuaauaacagcaccgauacaguugacaccgugcuggagaaaaaugugacagucacccauuccgugaaccuccuggaagauaagcacaaugggaaacuuuguaagcugagaggaguugcuccccuccaucugggcaaaugcaacaucgccggguggauucugggaaauccugagugugaaucucucagcacagccuccucuuggagcuacaucguggagaccuccucuagcgacaacggcacgugcuauccgggggauuuuauugacuacgaagaacugcgggagcagcuuuccagcgucucuuccuucgaacgcuuugagaucuuccccaagaccagcucuuggccuaaucacgauuccaacaagggagugacagccgcuuguccccaugccggcgcgaaaucuuuuuauaagaaucugaucuggcucguuaaaaagggcaacagcuacccuaaacuguccaagagcuauauuaaugacaaggggaaagaagugcuuguccuguggggaauccaccaccccuccaccucugccgaucaacagagccucuaccagaacgcugacgccuacguguucgugggcacauccagauauagcaagaaauuuaagccugagauugcuauccggccgaaaguccgcgaucaggaggggagaaugaauuacuauuggacccugguugaacccggagacaagauuacguucgaggccacaggcaaccugguggugccucgguacgcguuugccauggaacgcaacgcugggucuggaaucauuaucuccgauacccccguccaugacugcaauacaaccugucaaaccccuaaaggcgccaucaacacaagccuccccuuccagaauauucacccgaucacgauuggcaagugcccuaaguaugugagaucuaccaaacugcggcuugcuacagggcugcgcaacguucccagcauccaguccagaggacucuuuggcgccauugccggguucaucgagggaggcuggaccgggaugguggacggaugguacggcuaucaucaccagaaugaacaaggcucuggguacgcugcggaucuuaagagcacacagaacgccaucgacgagauuaccaauaaagucaacuccgugaucgagaagaugaauacgcaguuuacagcuguuggaaaagaguucaaccaccuggagaagcggauugaaaaucugaacaagaaaguggaugacggcuuccucgauaucuggaccuacaaugccgagcugcugguccuccuggaaaacgagcgcacccuugacuaucaugauagcaaugugaagaaccuguacgagaaagucagaucucagcucaagaacaaugccaaagaaauugggaacggauguuuugaguucuaucacaagugcgacaauacauguauggaauccgugaagaacggcaccuacgauuauccuaaauacagcgaggaagcuaagcugaaucgggaggagaucgacgggguuaaacuugaaucuacacgcaucuaucaaauucuggccaucuacuccacgguggcgagcucccucguccuggugguuucucugggcgcuauuagcuuuuggaugugcuccaacggaucucuccagugcagaaucuguauuuga

SEQ ID NO: 197683 - RNA, 1701 nt, Artificial Sequence
  derived and/or modified CDS sequence (opt5) from hemagglutinin__InfluenzaA__ADM14664
augaaggccauccuggugguccuccuguacaccuucgcuacagccaacgcggacacgcuuugcauuggcuaucacgcuaauaacagcaccgauacaguugacaccgugcuggagaaaaaugugacagucacccauuccgugaaccuccuggaagauaagcacaaugggaaacuuuguaagcugagaggaguugcuccccuccaucugggcaaaugcaacaucgccggguggauucugggaaauccugagugugaaucucucagcacagccuccucuuggagcuacaucguggagaccuccucuagcgacaacggcacgugcuauccgggggauuuuauugacuacgaagaacugcgggagcagcuuuccagcgucucuuccuucgaacgcuuugagaucuuccccaagaccagcucuuggccuaaucacgauuccaacaagggagugacagccgcuuguccccaugccggcgcgaaauccuuuuauaagaaucugaucuggcucguuaaaaagggcaacucuuacccuaaacuguccaagagcuauauuaaugacaaggggaaagaagugcuuguccuguggggaauccaccaccccuccaccucugccgaucaacagagccucuaccagaacgcugacgccuacguguucgugggcacauccagauauagcaagaaauuuaagccugagauugcuauccggccgaaaguccgcgaucaggaggggagaaugaauuacuauuggacccugguugaacccggagacaagauuacguucgaggccacaggcaaccugguggugccucgguacgcguuugccauggaacgcaacgcugggucuggaaucauuaucuccgauacccccguccaugacugcaauacaaccugucaaaccccuaacggcgccaucaauacaagccuccccuuccagaacauucacccgaucacgauuggcaaaugcccuaaguaugugaagucuaccaaacugagacuugcuacagggcugcggaauauccccagcauucagucccgcggacucuuuggcgccaucgccggguucaucgagggaggcuggaccgggaugguugacggaugguacggcuaucaucaccagaacgaacaaggcucuggguacgcugcggaucuuaagagcacacagaaugccauugacgagaucaccaacaaagugaauagcgucauugagaagaugaacacgcaguuuacagcugugggaaaagaguucaaucaccuggagaagagaaucgaaaaccugaauaagaaaguugaugacggcuuccucgauauuuggaccuacaacgccgagcugcuggugcuccuggaaaaugagcggacccuugacuaucaugauagcaacgucaagaaccuguacgagaaagugcgcucucagcucaagaauaacgccaaagaaaucgggaauggauguuuugaguucuaucacaagugcgacaacacauguauggaauccgucaagaauggcaccuacgauuauccuaaauacagcgaggaagcuaagcugaacagagaggagaucgacggggugaaacuugaaucuacacggauuuaucaaauccuggccauuuacuccacgguugcgagcucccucgugcuggucgugucucugggcgcuaucagcuuuuggaugugcuccaauggaucucuccagugccgcauuuguaucuga

SEQ ID NO: 197684 - RNA, 1701 nt, Artificial Sequence; identical to SEQ ID NO: 194741
  derived and/or modified CDS sequence (opt5) from hemagglutinin__InfluenzaA__ADM14673

SEQ ID NO: 197685 - RNA, 1701 nt, Artificial Sequence; identical to SEQ ID NO: 194741
  derived and/or modified CDS sequence (opt5) from hemagglutinin__InfluenzaA__ADM14682

SEQ ID NO: 197686 - RNA, 1701 nt, Artificial Sequence; identical to SEQ ID NO: 194741
  derived and/or modified CDS sequence (opt5) from hemagglutinin__InfluenzaA__ADM14691

SEQ ID NO: 197687 - RNA, 1701 nt, Artificial Sequence; identical to SEQ ID NO: 195905
  derived and/or modified CDS sequence (opt5) from hemagglutinin__InfluenzaA__ADM14700

SEQ ID NO: 197688 - RNA, 1695 nt, Artificial Sequence
  derived and/or modified CDS sequence (opt5) from hemagglutinin__InfluenzaA__ADM14709
augaaggccauccuggugguccuccuguacaccuucgcuacagccaacgcggacacgcuuugcauuggcuaucacgcuaauaacagcaccgauacaguugacaccgugcuggagaaaaaugugacagucacccauuccgugaaccuccuggaagauaagcacaaugggaaacuuuguaagcugagaggaguugcuccccuccaucugggcaaaugcaacaucgccggguggauucugggaaauccugagugugaaucucucagcacagccuccucuuggagcuacaucguggagaccuccucuagcgacaacggcacgugcuauccgggggauuuuauugacuacgaagaacugcgggagcagcuuuccagcgucucuuccuucgaacgcuuugagaucuuccccaagaccaauagcuggccuaaccacgauucuaauaagggagugacagccgcuuguccccaugccggcgcgaaauccuuuuauaagaaccugaucuggcucguuaaaaagggcaauagcuacccuaaacugucuaaguccuauauuaacgacaaggggaaagaagugcuuguccuguggggaauccaccaccccagcaccuccgccgaucaacagucucucuaccagaaugcugacgccuacguguucgugggcacaagcaaguauuccaaaaaguuuaaaccugagauugcuaucagaccgaagguccgggaucaggaggggcgcaugaacuacuauuggacccugguugaacccggagacaaaauuacguucgaggccacaggcaaccugguggugccuagauacgcguuugccauggaacggaaugcugggagcggaaucauuaucucugauacccccguccaugacugcaacacaaccugucaaaccccuaagggcgccaucaauacaucccuccccuuccagaacauucacccgaucacgauuggcaagugcccuaaauauguuaagagcaccaaacugcgccuugcuacagggcugagaaaugugcccucuauccagagccggggacucuuuggcgccauugccggguucaucgagggaggcuggaccgggaugguggacggaugguacggcuaucaucaccagaacgaacaaggcuccggguacgcugcggaucugaagucuacacagaaugccaucgacggaauuaccaacaaaaucaauagcgucauugagaagaugaacacgcaguuuacagcugugggcaaggaguucaaucaccuugaaaaacgcaucgagaaccugaauaagaaaguugaugacggguuccucgauauuuggaccuacaacgccgaacugcuggugcuccuggagaaugaaagaacccuuaacuaucaugacuccaacgucaagaaucuguacgagaaagugcggagccagcucaagaacaaugccaaggagaucggaaacggcuguuuugaguucuaucacaaaugcgauaauacauguauggagucugucaagaacgggaccuacgacuauccuaaauacuccgaagaggcuaagcugaaucgcgaagagaucgauggcgugaaacuugagagcacaagaauuuaucaaauccuggccauuuacucuacgguugcguccagccucgugcuggucgugucccugggagcuaucucuuuuuggaugugcagcggccauuccugccggauuuguaucuga

SEQ ID NO: 197689 - RNA, 1701 nt, Artificial Sequence
  derived and/or modified CDS sequence (opt5) from hemagglutinin__InfluenzaA__ADM14718
augaaggccauccuggugguccuccuguacaccuucgcuacagccaacgcggacacgcuuugcauuggcuaucacgcuaauaacagcaccgauacaguugacaccgugcuggagaaaaaugugacagucacccauuccgugaaccuccuggaagauaagcacaaugggaaacuuuguaagcugagaggaguugcuccccuccaucugggcaaaugcaacaucgccggguggauucugggaaauccugagugugaaucucucagcacagccuccucuuggagcuacaucguggagaccuccucuagcgacaacggcacgugcuauccgggggauuuuauugacuacgaagaacugcgggagcagcuuuccagcaugucuuccuucgaacgcuuugagaucuuccccaagaccagcucuuggccuaaucacgauuccaacaagggagucacagccgcuuguccccaugccggcgcgaaaucuuuuuauaagaaucugaucuggcucgugaaaaagggcaacagcuacccuaaacuguccaagagcuauauuaaugacaaggggaaagaaguucuugugcuguggggaauccaccaccccuccaccucugccgaucaacagagccucuaccagaacgcugacgccuacgucuucgugggcacauccagauauagcaagaaauuuaagccugagauugcuauccggccgaaagugcgcgaucaggaggggagaaugaauuacuauuggacccuggucgaacccggagacaagauuacguucgaggccacaggcaaccugguugugccucgguacgcguuugccauggaacgcaacgcugggucuggaaucauuaucuccgauacccccgugcaugacugcaauacaaccugucaaaccccuaaaggcgccaucaacacaagccuccccuuccagaauauucacccgaucacgauuggcaagugcccuaaguaugucaaaucuaccaagcugagacuugcuacagggcugcggaacgugcccagcauccagucccgcggacucuuuggcgccauugccggguucaucgagggaggcuggaccgggaugguugacggaugguacggcuaucaucaccagaaugaacaaggcucuggguacgcugcggaucugaaaagcacacagaacgccaucgacaagauuaccaauaaagugaacuccgucaucgagaagaugaauacgcaguuuacagcugugggaaaggaguucaaccaccuugagaaaagaauugagaaucugaacaagaaaguugaugacggcuuccucgauaucuggaccuacaaugccgaacugcuggugcuccuggagaacgaacggacccuugacuaucaugauagcaaugucaagaaccuguacgagaaagugcgcucucagcucaagaacaaugccaaggagauugggaacggauguuuugaguucuaucacaaaugcgacaauacauguauggaauccgucaagaacggcaccuacgauuauccuaaauacagcgaagaggcuaagcugaauagagaagagaucgacggggugaaacuugagucuacacggaucuaucaaauucuggccaucuacuccacgguugcgagcucccucgugcuggucgugucucugggcgcuauuagcuuuuggaugugcuccaacggaucucuccagugccgcaucuguauuuga

SEQ ID NO: 197690 - RNA, 1695 nt, Artificial Sequence
  derived and/or modified CDS sequence (opt5) from hemagglutinin__InfluenzaA__ADM14728
augaaggccauccuggugguccuccuguacaccuucgcuacagccaacgcggacacgcuuugcauuggcuaucacgcuaauaacagcaccgauacaguugacaccgugcuggagaaaaaugugacagucacccauuccgugaaccuccuggaagauaagcacaaugggaaacuuuguaagcugagaggaguugcuccccuccaucugggcaaaugcaacaucgccggguggauucugggaaauccugagugugaaucucucagcacagccuccucuuggagcuacaucguggagaccuccucuagcgacaacggcacgugcuauccgggggauuuuauugacuacgaagaacugcgggagcagcuuuccagcgucucuuccuucgaacgcuuugagaucuuccccaagaccagcucuuggccuaaucacgauuccaacaagggagugacagccgcuuguccccaugccggcgcgaaauccuuuuauaagaaucugaucuggcucguuaaaaagggcaacucuuacccuaaacuguccaauagcuauauuaacgacaaggggaaggaagugcuuguccuguggggaauccaccaccccuccaccucugccgaucaacagagccucuaccagaaugcugacgccuacguguucgugggcacauccagauauagcaaaaaguuuaaaccugagauugcuauccggccgaagguccgcgaucaggaggggagaaugaacuacuauuggacccugguugaacccggagacaaaauuacguucgaggccacaggcaaccugguggugccucgguacgcguuugccauggaacgcaaugcugggucuggaaucauuaucuccgauacccccgcccaugacugcaacacaaccugucaaaccccuaagggcgcuaucaauacaagccuccccuuccagaacauucacccgaucacgauuggcaaaugcccuaaguaugucaagucuaccaaacugagacuugccacagggcugcggaaugugcccagcauccagucccgcggacucuuuggcgccauugcuggguucaucgagggaggcuggaccgggaugguugacggaugguacggcuaucaucaccagaacgaacaaggcucuggguacgcggccgaucuuaagagcacacagaaugcuaucgacgagauuaccaacaaagugaauagcgucaucgagaagaugaacacgcaguuuacagccgugggaaaagaguucaaucaccuggagaagagaauugaaaaccugaauaagaaaguugaugacggcuuccucgauaucuggaccuacaacgccgagcugcuggugcuccuggaaaaugagcggacccuugacuaucaugauagcaacgucaagaaccuguacgagaaagugcgcucucagcucaagaauaacgcuaaagaaauugggaauggauguuuugaguucuaucacaagugcgacaacacauguauggaauccgucaagaauggcaccuacgauuauccuaaauacagcgaggaagccaagcugaacagagaggagaucgacggggugaaacuugaaucuacacggaucuaucaaauucuggcgaucuacuccacgguugcuagcucccucgugcuggucgugucucugggcgccauuagcuuuuggaugugcuccggacauucuugccgcaucuguauuuga

SEQ ID NO: 197691 - RNA, 1701 nt, Artificial Sequence
  derived and/or modified CDS sequence (opt5) from hemagglutinin__InfluenzaA__ADM14737
augaaggccauccuggugguccuccuguacaccuucgcuacagccaacgcggacacgcuuugcauuggcuaucacgcuaauaacagcaccgauacaguuaauaccgugcuggagaaaaacgugacagucacccauuccgugaaucuccuggaagacaagcacaacgggaaacuuuguaagcugagaggaguugcuccccuccaucugggcaaaugcaauaucgccggguggauucugggaaacccugagugugaaucucucagcacagccuccucuuggagcuacaucguggagaccuccucuagcgauaauggcacgugcuauccgggggacuuuauugauuacgaagaacugcgggagcagcuuuccagcgucucuuccuucgaacgcuuugagaucuuccccaagaccagcucuuggccuaaccacgacuccaauaagggagugacagccgcuuguccccaugccggcgcgaaaucuuuuuauaagaaccugaucuggcucguuaaaaagggcaauagcuacccuaaacuguccaagagcuauauuaacgauaaggggaaagaagugcuuguccuguggggaauccaccaccccuccaccucugccgaccaacagagccucuaccagaaugcugaugccuacguguucgugggcacauccagauauagcaagaaauuuaagccugagauugcuauccggccgaaaguccgcgaccaggaggggagaaugaacuacuauuggacccugguugaacccggagauaagauuacguucgaggccacaggcaaccugguggugccucgguacgcguuugccauggaaaagaaugcugggucuggaaucauuaucuccgacacccccguccaugauugcaacacaaccugucaaaccccuaagggcgccaucaauacaagccuccccuuccagaacauucacccgaucacgauuggcaagugcccuaaauaugugaagucuaccaaacugcgccuugcuacagggcugagaaauguucccagcauccagucccggggacucuuuggcgccauugccggguucaucgagggaggcuggaccgggaugguggacggaugguacggcuaucaucaccagaacgaacaaggcucuggguacgcugcggaccugaaaagcacacagaaugccaucgaugagauuaccaacaaagucaauuccgugaucgagaagaugaacacgcaguuuacagcuguuggaaaggaguucaaucaccuugagaaacgcauugaaaaccugaauaagaaaguggacgauggcuuccucgacaucuggaccuacaacgccgagcugcugguccuccuggaaaaugagagaacccuugauuaucaugacagcaacgugaagaaccuguacgagaaaguccggucucagcucaagaauaacgccaaggaaauugggaauggauguuuugaguucuaucacaaaugcgauaacacauguauggaauccgugaagaauggcaccuacgacuauccuaaauacagcgaggaagcuaagcugaaccgcgaggagaucgaugggguuaaacuugaaucuacaagaaucuaucaaauucuggccaucuacuccacgguggcgagcucccucguccuggugguuucucugggcgcuauuagcuuuuggaugugcuccaauggaucucuccagugccggaucuguauuuga

SEQ ID NO: 197692 - RNA, 1701 nt, Artificial Sequence
  derived and/or modified CDS sequence (opt5) from hemagglutinin__InfluenzaA__ADM14746
augaaggccauccuggugguccuccuguacaccuucgcuacagccaacgcggacacgcuuugcauuggcuaucacgcuaauaacagcaccgauacaguugacaccgugcuggagaaaaaugugacagucacccauuccgugaaccuccuggaagauaagcacaaugggaaacuuuguaagcugagaggaguugcuccccuccaucugggcaaaugcaacaucgccgggugggugcugggaaauccugagugugaaucucucagcacagccuccucuuggagcuacauugucgagaccccguccucugacaacggcacgugcuaucccggggauuuuaucgacuacgaagaacugcgggagcagcuuagcuccgugagcucuuucgaacgcuuugagauuuucccuaagaccuccagcuggcccaaucacgauucuaacaagggaguuacagccgcuuguccucaugccggcgcgaaauccuuuuauaagaaucugaucuggcucgugaaaaagggcaacagcuaccccaaacugucuaaguccuauaucaaugacaaggggaaagaaguccuugugcuguggggcauucaccacccuagcaccuccgccgaucaacagucucucuaccagaacgcugacgccuacguguucgucggaacaagcagauauuccaagaaauuuaagccggagaucgcuauucggcccaaaguucgcgaucaggaggggagaaugaauuacuauuggacccugguggaaccuggagacaagaucacguucgaggccacaggcaaccugguggucccccgguacgcguuugccauggaacgcaacgcugggagcggaauuaucauuucugauaccccugugcaugacugcaauacaaccugucaaacccccaaaggcgccaucaacacaucccucccguuccagaauauccacccuauuacgaucggcaagugccccaaguauguuaaaagcaagaaacugagacuugcuaccgggcugcggaacgugccuucuauucagagccgcggacucuuuggcgccaucgccggguucauugagggaggcuggacagggauggucgacggaugguacggcuaucaucaccagaaugaacaaggcuccggguacgcugcggaucugaagucuacccagaacgccaucgacgagaucacaaauaaagugaacagcguuauugagaagaugaauacccaguuuacggcugugggaaaggaguucaaccaccuugagaaaagaaucgaaaaucugaacaagaaagucgaugacggcuuccucgauauuuggacauacaaugccgagcugcuggugcuccuggaaaacgagcggacccuugacuaucaugauuccaaugucaagaaccuguacgagaaagugcgcagccagcucaagaacaaugccaaggaaaucgggaacggauguuuugaguucuaucacaaaugcgacaauaccuguauggaaucuguuaagaacggcacauacgauuaucccaaauacuccgaggaagcuaagcugaauagagaggagauugacggggugaaacuugaaagcacccggaucuaucaaauccuggccauuuacucuacagucgcguccagccucgugcugguugugucccugggcgcuaucucuuuuuggaugugcagcaacggaucccuccagugccgcauuuguaucuga

SEQ ID NO: 197693 - RNA, 1695 nt, Artificial Sequence
  derived and/or modified CDS sequence (opt5) from hemagglutinin__InfluenzaA__ADM14756
augaaggccauccuggugguccuccuguacaccuucgcuacagccaacgcggacacgcuuugcguuggcuaucacgcuaauaacagcaccgauacaguggacaccgugcuggagaaaaaugucacagugacccauuccguuaaccuccuggaagauaagcacaaugggaaacuuuguaagcugagaggaguggcuccccuccaucugggcaaaugcaacauugccggguggauccugggaaauccugagugugaaucucucagcacagccuccucuuggagcuacauugucgagaccuccucuagcgacaacggcacgugcuauccgggggauuuuaucgacuacgaagaacugcgggagcagcuuuccagcgugucuuccuucgaacgcuuugagauuuuccccaagaccagcucuuggccuaaucacgauuccaacaagggaguuacagccgcuuguccccaugccggcgcgaaaucuuuuuauaagaaucugaucuggcucgugaaaaagggcaacagcuacccuaaacuguccaagagcuauaucaaugacaaggggaaagaaguccuugugcuguggggcauucaccaccccuccaccucugccgaucaacagagccucuaccagaacgcugacgccuacguguucgucggaacauccagauauagcaagaaauuuaagccugagaucgcuauucggccgaaaguucgcgaucaggaggggagaaugaauuacuauuggacccugguggaacccggagacaagaucacguucgaggccacaggcaaccugguggucccucgguacgcguuugccauggaacgcaacgcugggucuggaauuaucauuuccgauacccccgugcaugacugcaauacaaccugucaaaccccuaaaggcgccaucaacacaagccuccccuuccagaauauccacccgauuacgaucggcaagugcccuaaguauguuaaaucuaccaagcugagacuugcuacagggcugcggaacgugcccagcauucagucccgcggacucuuuggcgccaucgccggguucauugagggaggcuggaccgggauggucgacggaugguacggcuaucaucaccagaaugaacaaggcucuggguacgcugcggaucugaaaagcacacagaacgccaucgacaagaucaccaauaaagugaacuccguuauugagaagaugaauacgcaguuuacagcugugggaaaggaguucaaccaccuugagaaaagaaucgagaaucugaacaagaaagucgaugacggcuuccucgauauuuggaccuacaaugccgaacugcuggugcuccuggagaacgaacggacccuugacuaucaugauagcaaugucaagaaccuguacgagaaagugcgcucucagcucaagaacaaugccaaggagaucgggaacggauguuuugaguucuaucacaaaugcgacaauacauguauggaauccguuaagaacggcaccuacgauuauccuaaauacagcgaagaggcuaagcugaauagagaagagauugacggggugaaacuugagucuacacggaucuaucaaauccuggccauuuacuccacggucgcgagcucccucgugcugguugugucucugggcgcuaucagcuuuuggaugugcuccggacauucuugccgcauuuguaucuga

SEQ ID NO: 197694 - RNA, 1701 nt, Artificial Sequence; identical to SEQ ID NO: 195905
  derived and/or modified CDS sequence (opt5) from hemagglutinin__InfluenzaA__ADM14765

SEQ ID NO: 197695 - RNA, 1695 nt, Artificial Sequence
  derived and/or modified CDS sequence (opt5) from hemagglutinin__InfluenzaA__ADM14775
augaaggccauccuggugguccuccuguacaccuucgcuacagccaacgcggacacgcuuugcauuggcuaucacgcuaauaacagcaccgauacaguugacaccgugcuggagaagaaugugacagucacccauuccgugaaccuccuggaagauaagcacaaugggaaacuuuguaagcugagaggaguugcuccccuccaucugggcaaaugcaacaucgccggguggauucugggaaauccugagugugaaucucucagcacagccuccucuuggagcuacaucguggagaccuccucuagcgacaacggcacgugcuauccgggggauuuuauugacuacgaagaacugcgggagcagcuuuccagcgucucuuccuucgaacgcuuugagaucuuccccaagaccagcucuuggccuaaucacgauuccaacaagggagugacagccgcuuguccccaugccggcgcgaaaucuuuuuauaagaaucugaucuggcucguuaaaaagggcaacagcuacccuaaacugaauaaguccuauauuaacgacaaggggaaagaagugcuuguccuguggggaauccaccaccccagcaccuccgccgaucaacagucucucuaccagaaugcugacgccuacguguucgugggcacaagcagauauuccaagaaauuuaagccugagauugcuauccggccgaaaguccgcgaucaggaggggagaaugaacuacuauuggacccugguugaacccggagacaagauuacguucgaggccacaggcaaccugguggugccucgguacgcguuugccauggaacgcaaugcugggagcggaaucauuaucucugauacccccguccaugacugcaacacaaccugucaaaccccuaaaggcgccaucaauacaucccuccccuuccagaacauucacccgaucacgauuggcgagugcccuaaguauguuaagagcaccaaacugagacuugcuacagggcugcggaaugugcccucuauccagagccgcggacucuuuggcgccauugccggguucaucgaaggaggcuggaccgggaugguggacggaugguacggcuaucaucaccagaacgagcaaggcuccggguacgcugcggaucugaagucuacacagaaugccaucgacaaaauuaccaacaaggucaauagcgugaucgagaaaaugaacacgcaguuuacagcuguuggaaaggaguucaaucaccuugagaagagaauugaaaaccugaauaaaaagguggaugacggcuuccucgauaucuggaccuacaacgccgagcugcugguccuccuggaaaaugagcggacccuugacuaucaugauuccaacgugaaaaaccuguacgagaagguccgcagccagcucaaaaauaacgccaaggaaauugggaauggauguuuugaguucuaucacaagugcgacaacacauguauggaaucugugaaaaauggcaccuacgauuauccuaaguacuccgaggaagcuaaacugaacagagaggagaucgacgggguuaaacuugaaagcacacggaucuaucaaauucuggccaucuacucuacgguggcguccagccucguccuggugguuucccugggcgcuauuucuuuuuggaugugcagcggacauuccugccgcaucuguauuuga

SEQ ID NO: 197696 - RNA, 1695 nt, Artificial Sequence
  derived and/or modified CDS sequence (opt5) from hemagglutinin__InfluenzaA__ADM14802
augaaggccauccuggugguccuccuguacaccuucgcuacagccaacgcggacacgcuuugcauuggcuaucacgcuaauaacagcaccgauacaguugacaccgugcuggagaaaaaugugacagucacccauuccgugaaccuccuggaagauaagcacaaugggaaacuuuguaagaucagaggaguugcuccccugcaucucggcaaaugcaacauugccggguggauccugggaaauccugagugugaaucucugagcacagccuccucuuggagcuacauuguggagaccuccucuagcgacaacggcacgugcuauccgggggauuuuaucgacuacgaagaacuccgggagcagcuguccagcgucucuuccuucgaacgcuuugagaucuuccccaagaccagcucuuggccuaaucacgauuccaacaagggagugacagccgcuuguccccaugccggcgcgaaaucuuuuuauaagaaucuuauuuggcugguuaaaaagggcaacagcuacccuaaacucuccaagagcuauaucaaugacaaggggaaagaagugcugguccuuuggggcauucaccaccccuccaccucugccgaucaacagagccuguaccagaacgcugacgccuacguguucgugggaacauccagauauagcaagaaauuuaagccugagaucgcuauucggccgaaaguccgcgaucaggaggggagaaugaauuacuauuggacccucguugaacccggagacaagaucacguucgaggccacaggcaaccugguggugccucgguacgcguuugccauggaacgcaacgcugggucuggaauuaucaucuccgauacccccguccaugacugcaauacaaccugucaaaccccuaaaggcgccauuaacacaagccugcccuuccagaauauccacccgauuacgaucggcaagugcccuaaguaugugaaaucuaccaagcucagacuggcuacagggcuucggaacguucccagcauucagucccgcggacuguuuggcgccaucgccggguucaucgagggaggcuggaccgggaugguggacggaugguacggcuaucaucaccagaaugaacaaggcucuggguacgcugcggaucucaaaagcacacagaacgccauugacgagaucaccaauaaggucaacuccgugauugagaaaaugaauacgcaguuuacagcuguuggaaaggaguucaaccaccuggagaagagaaucgaaaaucuuaacaaaaagguggaugacggcuuccuggauauuuggaccuacaaugccgagcuccugguccugcucgaaaacgagcggacccuggacuaucaugauagcaaugugaaaaaccuuuacgagaagguccgcucucagcugaaaaacaaugccaaggaaaucgggaacggauguuuugaguucuaucacaagugcgacaauacauguauggaauccgugaaaaacggcaccuacgauuauccuaaguacagcgaggaagcuaaacucaauagagaggagaucgacgggguuaagcuggaaucuacacggauuuaucaaauccuugccauuuacuccacgguggcgagcucccugguccucgugguuucucugggcgcuaucagcuuuuggaugugcuccggacauucuugccgcauuuguaucuga

SEQ ID NO: 197697 - RNA, 1704 nt, Artificial Sequence
  derived and/or modified CDS sequence (opt5) from hemagglutinin__InfluenzaA__ADM14830
augaaggccauccuggugguccuccuguacaccuucgcuacagccaacgcggacacgcuuugcauuggcuaucacgcuaauaacagcaccgauacaguugacaccgugcuggagaaaaaugugacagucacccauuccgugaaccuccuggaagauaagcacaaugggaaacuuuguaagcugagaggaguugcuccccuccaucugggcaaaugcaacaucgccggguggauucugggaaauccugagugugaacuccugucuacagccagcuccuggucuuacaucguggagaccagcuccucugacaacggcacgugcuauccgggggauuuuauugacuacgaagaacuucgggagcagcugagcuccgucagcucuuucgaacgcuuugagaucuuccccaagaccuccagcuggccuaaucacgauucuaacaagggagugacagccgcuuguccccaugccggcgcgaaauccuuuuauaagaaucucaucuggcugguuaaaaagggcaacagcuacccuaaacuuucuaaguccuauauuaaugacaaggggaaagaagugcugguccucuggggaauccaccaccccagcaccuccgccgaucaacagucucuguaccagaacgcugacgccuacguguucgugggcacaagcagauauuccaagaaauuuaagccugagauugcuauccggccgaaaguccgcgaucaggaggggagaaugaauuacuauuggacccugguugaacccggagacaagauuacguucgaggccacaggcaaccucguggugccucgguacgcguuugccauggaacgcaacgcugagagcgggaucauuaucucugauacccccguccaugacugcaauacaaccugucaaaccccuaaaggagccaucaacacaucccugcccuuccagaauauucacccgaucacgauuggcaagugcccuaaguaugugaaaagcaccaaacuuagacuggcuacaggccuccggaacguucccucuauccagagccgcgggcuguuuggagccauugccggcuucaucgaagggggauggaccggcaugguggacgggugguacggauaucaucaccagaaugagcaaggcuccggcuacgcugcggaucuuaaaucuacacagaacgccaucgacgagauuaccaauaaggucaacagcgugaucgaaaagaugaauacgcaguuuacagcuguugggaaggaguucaaccaccuggaaaagagaauugagaaucucaacaaaaagguggaugacggauuccuggauaucuggaccuacaaugccgaacugcucguccugcuugagaacgagcggacccuggacuaucaugauuccaaugugaaaaagcucuacgaaaaaguccgcagccagcugaagaacaacgccaaggagauuggcaauggguguuuugaguucuaucacaaaugcgacaacacauguauggagucugugaagaauggaaccuacgauuauccuaaauacuccgaagaggcuaaacuuaacagagaggaaaucgacggcguuaagcuggagagcacacggaucuaucaaauucucgccaucuacucuacgguggcguccagccugguccuggugguuucccucggggcuauuucuuuuuggaugugcagcggccauuccugccugcagugucgcaucugcauuuga

SEQ ID NO: 197698 - RNA, 1695 nt, Artificial Sequence
  derived and/or modified CDS sequence (opt5) from hemagglutinin__InfluenzaA__ADM14848
augaaggccauccuggugguccuccuguacaccuucgcuacagccaacgcggacacgcuuugcauuggcuaucacgcuaauaacagcaccgauacaguugacaccgugcuggagaagaaugugacagucacccauuccgugaaccuccuggaagauaagcacaaugggaaacuuuguaagcugagaggaguugcuccccuccaucugggcaaaugcaacaucgccggguggauucugggaaauccugagugugaaucucucagcacagccuccucuuggagcuacaucguggagaccuccucuagcgacaacggcacgugcuauccgggggauuuuauugacuacgaagaacugcgggagcagcuuuccagcgucucuuccuucgaacgcuuugagaucuuccccaagaccagcucuuggccuaaucacgauuccaacaagggagugacagccgcuuguccccaugccggcgcgaaaucuuuuuauaagaaucugaucuggcucguuaaaaagggcaacagcuacccuaaacuguccaagagcuauauuaaugacaaggggaaagaagugcuuguccuguggggaauccaccaccccuccaccucugccgaucaacagagccucuaccagaacgcugacgccuacguguucgugggcuccagcagauauucuaagaaauuuaagccugagauugcuauccggccgaaaguccgcgaucaggaggggagaaugaauuacuauuggacacugguugaacccggagacaagauuaccuucgaggccacgggcaaccugguggugccucgguacgcguuugccauggaacgcaacgcuggguccggaaucauuaucagcgauacacccguccaugacugcaauaccacaugucaaaccccuaaaggcgccaucaacaccucucuccccuuccagaauauucacccgaucacaauuggcaagugcccuaaguaugugaaaagcacgaagcugagacuugcuaccgggcugcggaacguucccuccauccagucucgcggacucuuuggcgccauugccggguucaucgagggaggcuggacagggaugguggacggaugguacggcuaucaucaccagaaugaacaaggcagcggguacgcugcggaucugaaauccacccagaacgccaucgacgagauuacaaauaaggucaacagcgugaucgagaaaaugaauacccaguuuacggcuguuggaaaggaguucaaccaccuugagaagagaauugaaaaucugaacaaaaagguggaugacggcuuccucgauaucuggacauacaaugccgagcugcugguccuccuggaaaacgagcggacccuugacuaucaugauucuaaugugaaaaaccuguacgagaagguccgcucccagcucaaaaacaaugccaaggaaauugggaacggauguuuugaguucuaucacaagugcgacaauaccuguauggaaagcgugaaaaacggcacauacgauuauccuaaguacucugaggaagcuaaacugaauagagaggagaucgacgggguuaaacuugaauccacccggaucuaucaaauucuggccaucuacagcacaguggcguccucucucguccuggugguuagccugggcgcuauuuccuuuuggaugugcucuggacauagcugccgcaucuguauuuga

SEQ ID NO: 197699 - RNA, 1695 nt, Artificial Sequence
  derived and/or modified CDS sequence (opt5) from hemagglutinin__InfluenzaA__ADM14866
augaaggccauccuggugguccuccuguacaccuucgcuacagccaacgcggacacgcuuugcauuggcuaucacgcuaauaacagcaccgauacaguugacaccgugcuggagaagaaugugacagucacccauuccgugaaccuccuggaagauaagcacaaugggaaacuuuguaagcugagaggaguugcuccccuccaucugggcaaaugcaacaucgccggguggauucugggaaauccugagugugaaucucucagcacagccuccucuuggagcuacaucguggagaccuccucuagcgacaacggcacgugcuauccgggggauuuuauugacuacgaagaacugcgggagcagcuuuccagcgucucuuccuucgaacgcuuugagaucuuccccaagaccagcucuuggccuaaucacgauuccgacaagggagugacagccgcuuguccccaugccggcgcgaaaucuuuuuauaagaaccugaucuggcucguuaaaaagggcaauagcuacccuaaacuguccaagagcuauauuaacgauaaggggaaagaagugcuuguccuguggggaauccaccaccccuccaccucugccgaccaacagagccucuaccagaaugcugaugccuacguguucgugggcacauccagauauagcaagaaauuuaagccugagauugcuauccggccgaaaguccgcgaccaggaggggagaaugaacuacuauuggacccugguugaacccggagauaagauuacguucgaggccacaggcaaucugguggugccucgguacgcguuugccauggaacgcaacgcugggucuggaaucauuaucuccgacacccccguccaugacugcaacacaaccugucaaaccccuaaaggcgccaucaauacaagccuccccuuccagaacauucacccgaucacgauuggcaagugcccuaaguaugugaaaucuaucaagcugagacuugcuaccgggcugcggaauguucccagcauucagucccgcggacucuuuggcgccaucgccggguucaucgagggaggcuggacagggaugguggauggaugguacggcuaucaucaccagaacgaacaaggcucuggguacgcugcggaccugaaaagcacccagaaugccauugaugagaucacaaacaaggucaauuccgugauugagaaaaugaacacccaguuuacggcuguuggaaaggaguucaaucaccuugagaagagaaucgaaaaccugaauaaaaagguggacgauggcuuccucgacauuuggacauacaacgccgagcugcugguccuccuggaaaaugagcggacccuugauuaucaugacagcaacgugaaaaaucuguacgagaagguccgcucucagcucaaaaacaacgccaaggaaaucgggaauggauguuuugaguucuaucacaagugcgauaacaccuguauggaauccgugaaaaauggcacauacgacuauccuaaguacagcgaggaagcuaaacugaacagagaggagaucgaugggguuaaacuugaaucuacccggauuuaucaaauccuggccauuuacuccacaguggcgagcucccucguccuggugguuucucugggcgcuaucagcuuuuggaugugcuccggacauucuugccgcauuuguaucuga

SEQ ID NO: 197700 - RNA, 1695 nt, Artificial Sequence
  derived and/or modified CDS sequence (opt5) from hemagglutinin__InfluenzaA__ADM14876
augaaggccauccuggugguccuccuguacaccuucgcuacagccaacgcggacacgcuuugcauuggcuaucacgcuaauaacagcaccgauacaguugacaccgugcuggagaaaaaugugacagucacccauuccgugaaccuccuggaagauaagcacaaugggaaacuuuguaagcugagaggaguugcuccccuccaucugggcaaaugcaacaucgccggguggauucugggaaauccugagugugaaucucucagcacagccuccucuuggagcuacaucguggagaccuccucuagcgacaacggcacgugcuauccgggggauuuuauugacuacgaagaacugcgggagcagcuuuccagcgucucuuccuucgaacgcuuugagaucuuccccaagaccagcucuuggccuaaucacgauuccaacaagggagugacagccgcuuguccccaugccggcgcgaaaucuuuuuauaagaaucugaucuggcucguuaaaaagggcaacagcuacccuaaacuguccaagagcuauauuaaugacaaggaaaaagaggugcuuguccugugggggauccaccaccccuccaccucugccgaucaacagagccucuaccagaacgcugacgccuacguguucgugggaacauccagauauagcaagaaauuuaagccugagauugcuauccggccgaaaguccgcgaucaggaaggcagaaugaauuacuauuggacccugguugagcccggggacaagauuacguucgaagccacaggaaaccugguggugccucgguacgcguuugccauggagcgcaacgcuggcucugggaucauuaucuccgauacccccguccaugacugcaauacaaccugucaaaccccuaaaggagccaucaacacaagccuccccuuccagaauauucacccgaucacgauuggcaagugcccuaaguaugugaaaucuaccaagcugagacuugcuacaggccugcggaacguucccagcauccagucccgcgggcucuuuggagccauugccggcuucaucgaagggggauggaccggcaugguggacgggugguacggauaucaucaccagaaugagcaaggcucuggcuacgcugcggaucugaaaagcacacagaacgccaucgacgagauuaccaauaaggucaacuccgugaucgaaaagaugaauacgcaguuuacagcuguugggaaggaguucaaccaccuugaaaagagaauugagaaucugaacaaaaagguggaugacggauuccucgauaucuggaccuacaaugccgaacugcugguccuccuggagaacgagcggacccuugacuaucaugauagcaaugugaaaaaccuguacgaaaagguccgcucucagcucaaaaacaaugccaaggagauuggcaacggguguuuugaguucuaucacaagugcgacaauacauguauggaguccgugaaaaacggaaccuacgauuauccuaaguacagcgaagaggcuaaacugaauagagaggaaaucgacggcguuaaacuugagucuacacggaucuaucaaauucuggccaucuacuccacgguggcgagcucccucguccuggugguuucucugggggcuauuagcuuuuggaugugcuccggccauucuugccgcaucuguauuuga

SEQ ID NO: 197701 - RNA, 1704 nt, Artificial Sequence
  derived and/or modified CDS sequence (opt5) from hemagglutinin__InfluenzaA__ADM14885
augaaggccauccuggugguccuccuguacaccuucgcuacagccaacgcggacacgcuuugcauuggcuaucacgcuaauaacagcaccgauacaguugacaccgugcuggagaaaaaugugacagucacccauuccgugaaccuccuggaagauaagcacaaugggaaacuuuguaagcugagaggaguugcuccccuccaucugggcaaaugcaacaucgccggguggauucugggaaauccugagugugaacuccugucuacagccagcuccuggucuuacaucguggagaccagcuccucugacaacggcacgugcuauccgggggauuuuauugacuacgaagaacuucgggagcagcugagcuccgucagcucuuucgaacgcuuugagaucuuccccaagaccuccagcuggccuaaucacgauucuaacaagggagugacagccgcuuguccccaugccggcgcgaaauccuuuuauaagaaucucaucuggcugguuaaaaagggcaacagcuacccuaaacuuucuaaguccuauauuaaugacaaggaaaaagaggugcugguccucugggggauccaccaccccagcaccuccgccgaucaacagucucuguaccagaacgcugacgccuacguguucgugggaacaagcagauauuccaagaaauuuaagccugagauugucauccggccgaaaguucgcgaucaggaaggcagaaugaauuacuauuggacccugguggagcccggggacaagauuacguucgaagcuacaggaaaccucguggucccucgguacgccuuugcgauggagcgcaacgccgaaagcggcaucauuaucucugauacccccgugcaugacugcaauacaaccugucaaaccccuaaaggggcuaucaacacaucccugcccuuccagaauauucacccgaucacgauuggaaagugcccuaaguauguuaaaagcaccaaacuuagacuggccacaggccuccggaacgugcccucuauccagagccgcggccuguuuggggcuauugccggauucaucgagggcggguggaccggaauggucgacggcugguacggguaucaucaccagaaugagcaaggauccggcuacgccgcugaucuuaagucuacacagaacgcgaucgacgaaauuaccaauaaggugaacagcguuaucgagaaaaugaauacgcaguuuacagccgugggcaaggaguucaaccaccuggagaagagaauugaaaaucucaacaaaaaggucgaugacggguuccuggauaucuggaccuacaaugcugagcugcucgugcugcuugagaacgaacggacccuggacuaucaugauuccaaugucaaaaagcucuacgagaaagugcgcagccagcugaagaacaacgccaaggaaauuggaaauggcuguuuugaguucuaucacaaaugcgacaacacauguauggaaucuguuaagaaugggaccuacgauuauccuaaauacuccgaggaggccaaacuuaacagagaagagaucgacggagugaagcuggaaagcacacggaucuaucaaauucucgcuaucuacucuacggucgccuccagccuggugcugguugugucccucggcgcgauuucuuuuuggaugugcagcgggcauggcucccugcagugccgcaucuguauuuga

SEQ ID NO: 197702 - RNA, 1695 nt, Artificial Sequence
  derived and/or modified CDS sequence (opt5) from hemagglutinin__InfluenzaA__ADM14894
augaaggccauccuggugguccuccuguacaccuucgcuacagccaacgcggacacgcuuugcauuggcuaucacgcuaauaacagcaccgauacaguugacaccgugcuggagaaaaaugugacagucacccauuccgugaaccuccuggaagauaagcacaaugggaaacuuuguaagcugagaggaguugcuccccuccaucugggcaaaugcaacaucgccggguggauucugggaaauccugagugugaaucucucagcacagccuccucuuggagcuacaucguggagaccuccucuagcgacaacggcacgugcuauccgggggauuuuauugacuacgaagaacugcgggagcagcuuuccagcgucucuuccuucgaacgcuuugagaucuuccccaagaccagcucuuggccuaaucacgauuccaacaagggagugacagccgcuuguccccaugccggcgcgaaaucuuuuuauaagaaucugaucuggcucguuaaaaagggcaacagcuacccuaaacuguccaagagcuauauuaaugacaaggaaaaagaggugcuuguccugugggggauccaccaccccuccaccucugccgaucaacagagccucuaccagaacgcugacgccuacguguucgugggaacauccagauauagcaagaaauuuaagccugagauugucauccggccgaaaguucgcgaucaggaaggcagaaugaauuacuauuggacccugguggagcccggggacaagauuacguucgaagcuacaggaaaccugguggucccucgguacgccuuugcgauggagcgcaacgccggcucugggaucgugauuuccgauacccccguucaugacugcaauacaaccugucaaaccccuaaaggagcuaucaacacaagccuccccuuccagaauauccacccgauuacgaucggcaagugcccuaaguaugugaaaucuaccaagcugagacuugccacaggccugcggaacguccccagcauucagucccgcgggcucuuuggagcuaucgccggcuucauugaagggggauggaccggcaugguggacgggugguacggauaucaucaccagaaugagcaaggcucuggcuacgccgcugaucugaaaagcacacagaacgcgaucgacgagaucaccaauaagguuaacuccgugauugaaaagaugaauacgcaguuuacagccgucgggaaggaguucaaccaccuugaaaagagaaucgagaaucugaacaaaaagguggaugacggauuccucgauauuuggaccuacaaugcugaacugcugguccuccuggagaacgagcggacccuugacuaucaugauagcaaugugaaaaagcuguacgaaaaaguucgcucucagcucaagaacaacgccaaggagaucggcaauggguguuuugaguucuaucacaaaugcgacaacacauguaugaaguccgugaaaaauggaaccuacgauuauccuaaguacagcgaggaagccaaacugaacagagaggagauugacggcgucaaacuugaaucuacacggaucuaucaaauccuggcuauuuacuccacgguggccagcucccucguucugguggucucucugggggcgaucagcuuuuggaugugcuccggccauucuugccgcauuuguaucuga

SEQ ID NO: 197703 - RNA, 1695 nt, Artificial Sequence
  derived and/or modified CDS sequence (opt5) from hemagglutinin__InfluenzaA__ADM14903
augaaggccauccuggugguccuccugugcaccuucgcuacagccaacgcggacacgcuuuguauuggcuaccacgcuaauaacagcaccgauacaguugacaccgugcuggagaaaaaugugacagucacccauuccgugaaccuccuggaagauaagcacaaugggaaacuuugcaagcugagaggaguugcuccccuccaucugggcaaauguaacaucgccggguggauucugggaaauccugagugcgaaucucucagcacagccuccucuuggagcuauaucguggagaccuccucuagcgacaacggcacguguuacccgggggauuuuauugacuaugaagaacugcgggagcagcuuuccagcgucucuuccuucgaacgcuuugagaucuuccccaagaccagcucuuggccuaaucacgauuccaacaagggagugacagccgcuugcccccaugccggcgcgaaaucuuuuuacaagaaucugaucuggcucguuaaaaagggcaacagcuauccuaaacuguccaagagcuacauuaaugacaaggggaaagaagugcuuguccuguggggaauccaccaccccuccaccucugccgaucaacagagccucuaucagaacgcugacgccuacguguucgugggcacauccagauacagcaagaaauuuaagccugagauugcuauccggccgaaaguccgcgaucaggaggggagaaugaauuauuacuggacccugguugaacccggagacaagauuacguucgaggccacaggcaaccugguggugccucgguaugcguuugccauggaacgcaacgcugggucuggaaucauuaucuccgauacccccguccaugacuguaauacaaccugccaaaccccuaaaggcgccaucaacacaagccuccccuuccagaauauucacccgaucacgauuggcaaguguccuaaguacgugaaaucuaccaagcugagacuugcuacagggcugcggaacguucccagcauccagucccgcggacucuuuggcgccauugccggguucaucgagggaggcuggaccgggaugguggacggaugguauggcuaccaucaccagaaugaacaaggcucuggguaugcugcggaucugaaaagcacacagaacgccaucgacaagauuaccaauaaagucaacuccgugaucgagaagaugaauacgcaguuuacagcuguuggaaaggaguucaaccaccuugagaaaagaauugagaaucugaacaagaaaguggaugacggcuuccucgauaucuggaccuacaaugccgaacugcugguccuccuggagaacgaacggacccuugacuaccaugauagcaaugugaagaaccuguaugagaaaguccgcucucagcucaagaacaaugccaaggagauugggaacggaugcuuugaguucuaccacaaaugugacaauacaugcauggaauccgugaagaacggcaccuaugauuacccuaaauauagcgaagaggcuaagcugaauagagaagagaucgacgggguuaaacuugagucuacacggaucuaccaaauucuggccaucuauuccacgguggcgagcucccucguccuggugguuucucugggcgcuauuagcuuuuggaugugcuccggacauucuugucgcaucugcauuuga

SEQ ID NO: 197704 - RNA, 1695 nt, Artificial Sequence
  derived and/or modified CDS sequence (opt5) from hemagglutinin__InfluenzaA__ADM14912
augaaggccauccuggugguccuccuguacaccuucgcuacagccaacgcggacacgcuuugcauuggcuaucacgcuaauaacagcaccgauacaguugacaccgugcuggagaaaaaugugacagucacccauuccgugaaccuccuggaagauaagcacaaugggaaacuuuguaagcugagaggaguugcuccccuccaucugggcaaaugcaacaucgccggguggauucugggaaauccugagugugaaucucucagcacagccuccucuuggagcuacaucguggagaccuccucuagcgacaacggcacgugcuauccgggggauuuuauugacuacgaagaacugcgggagcagcuuuccagcgucucuuccuucgaacgcuuugagaucuuccccaagaccagcucuuggccuaaucacgauuccaacaagggagugacagccgcuuguccccaugccggcgcgaaaucuuuuuauaagaaucugaucuggcucguuaaaaagggcaacagcuacccuaaacuguccaagagcuauauuaaugacaaggggaaagaagugcuuguccuguggggaauccaccaccccuccaccucugccgaucaacagagccucuaccagaacgcugacgccuacguguucgugggcacauccagauauagcaagaaauuuaagccugagauugcuauccggccgaaaguccgcgaucaggaggggagaaugaauuacuauuggacccugguugaacccggagacaagauuacguucgaggccacaggcaaccugguggugccucgguacgcguuugccauggaacgcaacgcugggucuggaaucauuaucuccgauacccccguccaugacugcaauacaaccugucaaaccccugagggcgccaucaacacaagccuccccuuccagaauauucacccgaucacgauuggcaaaugcccuaaguaugugaagucuaccaaacugagacuugcuacagggcugcggaacguucccagcauccagucccgcggacucuuuggcgccauugccggguucaucgaaggaggcuggaccgggaugguggacggaugguacggcuaucaucaccagaaugagcaaggcucuggguacgcugcggaucuuaagagcacacagaacgccaucgacgagauuaccaauaaagucaacuccgugaucgaaaagaugaauacgcaguuuacagcuguuggaaaagaguucaaccaccuggaaaagagaauugagaaucugaacaagaaaguggaugacggcuuccucgauaucuggaccuacaaugccgaacugcugguccuccuggagaacgagcggacccuugacuaucaugauagcaaugugaagaaccuguacgaaaaaguccgcucucagcucaagaacaaugccaaagagauugggaacggauguuuugaguucuaucacaagugcgacaauacauguauggaguccgugaagaacggcaccuacgauuauccuaaauacagcgaagaggcuaagcugaauagagaggaaaucgacgggguuaaacuugagucuacacggaucuaucaaauucuggccaucuacuccacgguggcgagcucccucguccuggugguuucucugggcgcuauuagcuuuuggaugugcuccggacauucuugccgcaucuguauuuga

SEQ ID NO: 197705 - RNA, 1695 nt, Artificial Sequence
  derived and/or modified CDS sequence (opt5) from hemagglutinin__InfluenzaA__ADM14921
augaaggccauccuggugguccuccuguacaccuucgcuacagccaacgcggacacgcuuugcauuggcuaucacgcuaauaacagcaccgauacaguugacaccgugcuggagaagaaugugacagucacccauuccgugaaccuccuggaagauaagcacaaugggaaacuuuguaagcugagaggaguugcuccccuccaucugggcaaaugcaacaucgccggguggauucugggaaauccugagugugaaucucucagcacagccuccucuuggagcuacaucguggagaccuccucuagcgacaacggcacgugcuauccgggggauuuuauugacuacgaagaacugcgggagcagcuuuccagcgucucuuccuucgaacgcuuugagaucuuccccaagaccagcucuuggccuaaucacgauuccaacaagggagugacagccgcuuguccccaugccggcgcgaaaucuuuuuauaagaaucugaucuggcucguuaaaaagggcaacagcuacccuaaacuguccaagagcuauauuaaugacaaggggaaagaagugcuuguccuguggggaauccaccaccccuccaccucugccgaucaacagagccucuaccagaacgcugacgccuacguguucgugggcacauccagauauagcaagaaauuuaagccugagauugcuauccggccgaaaguccgcgaucaggaggggagaaugaauuacuauuggacccugguugaacccggagacaagauuacguucgaggccacaggcaaccugguggugccucgguacgcguuugccauggaacgcaacgcugggucuggaaucauuaucuccgauacccccguccaugacugcaauacaaccugucaaaccccuaaaggcgccaucaacacaagccuccccuuccagaauauucacccgaucacgauuggcaagugcccuaaguaugugaaaucuaccaagcugagacuugcuacagggcugcggaacguucccagcauccagucccgcggacucuuuggcgccauugccggguucaucgagggaggcuggaccgggaugguggacggaugguacggcuaucaucaccagaaugaacaaggcucuggguacgcugcggaucugaaaagcacacagaacgccaucgacgagauuaccaauaaggucaacuccgugaucgagaaaaugaauacgcaguuuacagcuguuggaaaggaguucaaccaccuugagaagagaauugaaaaucugaacaaaaagguggaugacggcuuccucgauaucuggaccuacaaugccgagcugcugguccuccuggaaaacgagcggacccuugacuaucaugauagcaaugugaaaaaccuguacgagaagguccgcucucagcucaaaaacaaugccaaggaaauugggaacggauguuuugaguucuaucacaagugcgacaauacauguauggaauccgugaaaaacggcaccuacgauuauccuaaguacagcgaggaagcuaaacugaauagagaggagaucgacgggguuaaacuugaaucuacacggaucuaucaaauucuggccaucuacuccacgguggcgagcucccucguccuggugguuucucugggcgcuauuagcuuuuggaugugcuccggacauucuugccgcaucuguauuuga

SEQ ID NO: 197706 - RNA, 1701 nt, Artificial Sequence; identical to SEQ ID NO: 195905
  derived and/or modified CDS sequence (opt5) from hemagglutinin__InfluenzaA__ADM14930

SEQ ID NO: 197707 - RNA, 1701 nt, Artificial Sequence
  derived and/or modified CDS sequence (opt5) from hemagglutinin__InfluenzaA__ADM14948
augaaggccauccuggugguccuccuguacaccuucgcuacagccaacgcggacacgcuuugcauuggcuaucacgcuaauaacagcaccgauacaguugacaccgugcuggagaaaaaugugacagucacccauuccgugaaccuccuggaagauaagcacaaugggaaacuuuguaagcugagaggaguugcuccccuccaucugggcaaaugcaacaucgccggguggauucugggaaauccugagugugaaucucucagcacagccuccucuuggagcuacaucguggagaccuccucuagcgacaacggcacgugcuauccgggggauuuuauugacuacgaagaacugcgggagcagcuuuccagcgucucuuccuucgaacgcuuugagaucuuccccaagaccagcucuuggccuaaucacgauuccaacaagggagugacagccgcuuguccccaugccggcgcgaaaggcuuuuauaagaaucugaucuggcucguuaaaaaggggaacagcuacccuaaacugucuaaguccuauauuaaugacaagggaaaagaagugcuuguccuguggggcauccaccaccccagcaccuccgccgaucaacagucucucuaccagaacgcugacgccuacguguucguggggacaagcagauauucccggaaguuuaaaccugagauugcuauccgcccgaaggucagagaucaggagggacggaugaauuacuauuggacccugguugaacccggcgacaaaauuacguucgaggccacagggaaccugguggugccucgcuacgcguuugccauggaaagaaacgcuggaagcggcaucauuaucucugauacccccguccaugacugcaauacaaccugucaaaccccugagggcgccaucaacacaucccuccccuuccagaauauucacccgaucacgauugggaagugcccuaaauauguuaagagcaccaagcugcggcuugcuacaggacugcgcaacgugcccucuauccagagcagaggccucuuuggggccauugccggauucaucgaaggcggguggaccggaaugguggacggcugguacggcuaucaucaccagaaugagcaaggguccggauacgcugcggaucugaaaucuacacagaacgccaucgacgagauuaccaauaaggucaacagcgugaucgaaaagaugaauacgcaguuuacagcuguuggcaaggaguucaaccaccuugaaaaacggauugagaaucugaacaagaagguggaugacggguuccucgauaucuggaccuacaaugccgaacugcugguccuccuggagaacgagcgcacccuugacuaucaugauuccaaugugaaaaaccuguacgaaaaggucagaagccagcucaaaaacaaugccaaggagauuggaaacggcuguuuugaguucuaucacaaaugcgacaauacauguauggagucugugaagaacgggaccuacgauuauccuaaguacuccgaagaggcuaaacugaaucgggaggaaaucgacggcguuaaacuugagagcacacgcaucuaucaaauucuggccaucuacucuacgguggcguccagccucguccuggugguuucccugggagcuauuucuuuuuggaugugcagcaacggcucccuccagugcagaaucuguauuuga

SEQ ID NO: 197708 - RNA, 1695 nt, Artificial Sequence
  derived and/or modified CDS sequence (opt5) from hemagglutinin__InfluenzaA__ADM14966
augaaggccauccuggugguccuccuguacaccuucgcuacagccaacgcggacacgcuuugcauuggcuaucacgcuaauaacagcaccgauacaguugacaccgugcuggagaaaaaugugacagucacccauuccgugaacauccucgaagauaagcacaaugggaaacuguguaaacuuagaggaguugcuccccugcaucucggcaagugcaacauugccggguggauccugggaaauccugagugugaaucucugagcacagccuccucuuggagcuacauuguggagaccuccucuagcgacaacggcacgugcuauccgggggauuuuaucgacuacgaagaacuccgggagcagcuguccagcgucucuuccuucgaacgcuuugagaucuuccccaagaccagcucuuggccuaaucacgauuccaacaagggagugacagccgcuuguccccaugccggcgcgaaaucuuuuuauaagaaucuuauuuggcugguuaaaaagggcaacagcuacccuaaacucuccaagagcuauaucaaugacaaggggaaagaagugcugguccuuuggggcauucaccaccccuccaccucugccgaucaacagagccuguaccagaacgcugacgccuacguguucgugggauccagcagauauucuaagaaauuuaagccugagaucgcuauucggccgaaaguccgcgaucaggaggggagaaugaauuacuauuggacacucguugaacccggagacaagaucaccuucgaggccacgggcaaccugguggugccucgguacgcguuugccauggaacgcaacgcuggguccggaauuaucaucagcgauacacccguccaugacugcaauaccacaugucaaaccccuaaaggcgccauuaacaccucucugcccuuccagaauauccacccgauuacaaucggcaagugcccuaaguaugugaaaagcacgaagcucagacuggcuaccgggcuucggaacguucccuccauucagucucgcggacuguuuggcgccaucgccggguucaucgagggaggcuggacagggaugguggacggaugguacggcuaucaucaccagaaugaacaaggcagcggguacgcugcggaucucaaauccacccagaacgccauugacgagaucacaaauaaggucaacagcgugauugagaaaaugaauacccaguuuacggcuguuggaaaggaguucaaccaccuggagaagagaaucgaaaaucuuaacaaaaagguggaugacggcuuccuggauauuuggacauacaaugccgagcuccugguccugcucgaaaacgagcggacccuggacuaucaugauucuaaugugaaaaaccuuuacgagaagguccgcucccagcugaaaaacaaugccaaggaaaucgggaacggauguuuugaguucuaucacaagugcgacaauaccuguauggaaagcgugaaaaacggcacauacgauuauccuaaguacucugaggaagcuaaacucaauagagaggagaucgacgggguuaagcuggaauccacccggauuuaucaaauccuugccauuuacagcacaguggcguccucucugguccucgugguuagccugggcgcuaucuccuuuuggaugugcucuggacauagcugccgcauuuguaucuga

SEQ ID NO: 197709 - RNA, 1701 nt, Artificial Sequence; identical to SEQ ID NO: 194921
  derived and/or modified CDS sequence (opt5) from hemagglutinin__InfluenzaA__ADM14975

SEQ ID NO: 197710 - RNA, 1701 nt, Artificial Sequence
  derived and/or modified CDS sequence (opt5) from hemagglutinin__InfluenzaA__ADM14985
augaaggccauccuggugguccuccuguacaccuucgcuacagccaacgcggacacgcuuugcauuggcuaucacgcuaauaacagcaccgauacaguugacaccgugcuggagaaaaaugugacagucacccauuccgugaaccuccuggaagauaagcacaaugggaaacuuuguaagcugagaggaguugcuccccuccaucugggcaaaugcaacaucgccggguggauucugggaaauccugagugugaaucucucagcacagccuccucuuggagcuacaucguggagaccuccucuagcgacaacggcacgugcuauccgggggauuuuauugacuacgaagaacugcgggagcagcuuuccagcgucucuuccuucgaacgcuuugagaucuuccccaagaccagcucuuggccuaaucacgauuccaacaagggagugacagccgcuuguccccaugccggcgcgaaaucuuuuuauaagaaucugaucuggcucguuaaaaagggcaacagcuacccuaaacuguccaagagcuauauuaaugacaaggaaaaagaggugcuuguccugugggggauccaccaccccuccaccucugccgaucaacagagccucuaccagaacgcugacgccuacguguucgugggaacauccagauauagcaagaaauuuaagccugagauugcuauccggccgaaaguccgcggccaggaagggagaaugaauuacuauuggacccugguugagcccggagauaagauuacguucgaagccacaggcaaccugguggugccucgguacgcguuugccauggagcgcaacgcugggucuggaaucgucauuuccgacacccccgugcaugauugcaauacaaccugucaaaccccuaaaggcgccaucaacacaagccuccccuuccagaauauccacucuauuacgaucggcaagugcccgaaguauguuaaaagcaccaagcugagacuugcuacagggcugcggaacgugccuuccauucagucucgcggacucuuuggcgccaucgccggguucauugaaggaggcuggaccgggauggucgacggaugguacggcuaucaucaccagaaugagcaaggcagcggguacgcugcggaccugaaauccacacagaacgccaucgaugagaucaccaauaaggugaacagcguuauugaaaagaugaauacgcaguuuacagcugugggaaaggaguucaaccaccuugaaaagagaaucgagaaucugaacaaaaaggucgacgauggcuuccucgacauuuggaccuacaaugccgaacugcuggugcuccuggagaacgagcggacccuugauuaucaugacucuaaugucaaaaaccuguacgaaaaggugcgcucccagcucaaaaacaaugccaaggagaucgggaacggauguuuugaguucuaucacaagugcgauaauacauguauggagagcguuaaaaacggcaccuacgacuaucccaaguacucugaagaggcuaaacugaauagagaggaaauugauggggugaaacuugaguccacacggaucuaucaaauccuggccauuuacagcacggucgcguccucucucgugcugguugugagccugggcgcuaucuccuuuuggaugugcucuaacggaagccuccagugccgcauuuguaucuga

SEQ ID NO: 197711 - RNA, 1701 nt, Artificial Sequence
  derived and/or modified CDS sequence (opt5) from hemagglutinin__InfluenzaA__ADM23841
augaaggccauccuggugguccuccuguacaccuucgcuacagccaacgcggacacgcuuugcauuggcuaucacgcuaauaacagcaccgauacaguugacaccgugcuggagaagaaugugacagucacccauuccgugaaccuccuggaagauaagcacaaugggaaacuuuguaagcugagaggaguugcuccccuccaucugggcaaaugcaacaucgccggguggauucugggaaauccugagugugaaucucucagcacagccuccucuuggagcuacaucguggagaccuccucuagcgacaacggcacgugcuauccgggggauuuuauugacuacgaagaacugcgggagcagcuuuccagcgucucuuccuucgaacgcuuugagaucuuccccaagaccagcucuuggccuaaucacgauuccaacaagggagugacagccgcuuguccccaugccggcgcgaaaucuuuuuauaagaaucugaucuggcucguuaaaaagggcaacagcuacccuaaacuguccaagagcuauauuaaugacaaggggaaagaagugcuuguccuguggggaauccaccaccaauccaccucugccgaucagcagagccucuaccagaacgcugacgccuacguguucgugggcacauccagauauagcaagaaauuuaagcccgagauugcuauccggccuaaaguccgcgaucaagaggggagaaugaauuacuauuggacccugguugaaccgggagacaagauuacguucgaggccacaggcaaccugguggugccccgguacgcguuugccauggaacgcaacgcugggucuggaaucauuaucuccgauaccccuguccaugacugcaauacaaccugucagacccccaaaggcgccaucaacacaagccucccuuuccagaauauucaccccaucacgauuggcaagugcccgaaguaugugaaaucuaccaagcugagacuugcuacagggcugcggaacguuccuagcauccagucccgcggacucuuuggcgccauugccggguucaucgagggaggcuggaccgggaugguggacggaugguacggcuaucaucaccaaaaugaacagggcucuggguacgcugcggaucugaaaagcacacagaacgccaucgacgagauuaccaauaaggucaacuccgugaucgagaaaaugaauacgcaguuuacagcuguuggaaaggaguucaaccaccuugagaagagaauugaaaaucugaacaaaaagguggaugacggcuuccucgauaucuggaccuacaaugccgagcugcugguccuccuggaaaacgagcggacccuugacuaucaugauagcaaugugaaaaaccuguacgagaagguccgcucucaacucaaaaacaaugccaaggaaauugggaacggauguuuugaguucuaucacaagugcgacaauacauguauggaauccgugaaaaacggcaccuacgauuaucccaaguacagcgaggaagcuaaacugaauagagaggagaucgacgggguuaaacuugaaucuacacggaucuaucagauucuggccaucuacuccacgguggcgagcucccucguccuggugguuucucugggcgcuauuagcuuuuggaugugcuccaacggaucucuccagugccgcaucuguauuuga

SEQ ID NO: 197712 - RNA, 1701 nt, Artificial Sequence; identical to SEQ ID NO: 195905
  derived and/or modified CDS sequence (opt5) from hemagglutinin__InfluenzaA__ADM23843

SEQ ID NO: 197713 - RNA, 1701 nt, Artificial Sequence
  derived and/or modified CDS sequence (opt5) from hemagglutinin__InfluenzaA__ADM23844
augaaggccauccuggugguccuccuguacaccuucgcuacagccaacgcggacacgcuuugcauuggcuaucacgcuaauaacagcaccgauacaguugacaccgugcuggagaaaaaugugacagucacccauuccgugaaccuccuggaagauaagcacaaugggaaacuuuguaagcugagaggaguugcuccccuccaucugggcaaaugcaacaucgccggguggauucugggaaauccugagugugaaucucucagcacagccuccucuuggagcuacaucguggagaccuccauuucugacaacggcacgugcuauccgggggauuuuaucgacuacgaagaacugcgggagcagcuuagcuccgucagcucuuucgaacgcuuugagaucuuccccaagaccuccagcuggccuaaucacgauucuaacaagggagugacaaccgccuguccccaugcuggcgccaaaggcuuuuauaagaaucugauuuggcucguuaaaaaggggaacuccuacccuaaacugagcaagucuuauaucaaugacaagggaaaagaagugcuuguccuguggggcauucaccaccaauccacaagcgcggaucagcagucccucuaccagaacgccgacgcuuacguguucguggggaccucuagauauagcaagaaauuuaagcccgagaucgccauucggccuaaaguccgcgaucaagagggaagaaugaauuacuauuggacgcugguugaaccgggcgacaagaucacauucgaggcuaccgggaaccugguggugccccgguacgccuuugcgauggaacgcaacgccggauccggcauuaucaucagcgauacaccuguccaugacugcaauaccaccugucagacacccaaaggcgcuauuaacacgucucucccuuuccagaauauccaccccauuaccaucgggaagugcccgaaguaugugaaauccacaaagcugagacuugccaccggacugcggaacguuccuagcauucagucucgcggccucuuuggggcuaucgccggauucaucgagggcggguggacaggaaugguggacggcugguacggcuaucaucaccaaaaugaacaggggagcggauacgccgcugaucugaaauccacccagaacgcgauugacaagaucacgaauaaagucaacucugugauugagaagaugaauacacaguuuaccgccguuggcaaggaguucaaccaccuugagaaaagaaucgagaaucugaacaagaaaguggaugacggguuccucgauauuuggaccuacaaugcugaacugcugguccuccuggagaacgaacggacacuugacuaucaugauagcaaugugaagaaccuguacgagaaaguccgcucccaacucaagaacaaugccaaggagaucggaaacggcuguuuugaguucuaucacaaaugcgacaauaccuguauggaaagcgugaagaacgggacauacgauuaucccaaauacucugaagaggccaagcugaauagagaagagaucgacggcguuaaacuugaguccacgcggauuuaucagauccuggcuauuuacagcaccguggccucuucccucguccuggugguuagccugggagcgaucuccuuuuggaugugcucuaacggcagccuccagugccgcauuuguaucuga

SEQ ID NO: 197714 - RNA, 1701 nt, Artificial Sequence
  derived and/or modified CDS sequence (opt5) from hemagglutinin__InfluenzaA__ADM23845
augaaggccauccuggugguccuccuguacaccuucgcuacagccaacgcggacacgcuuugcauuggcuaucacgcuaauaacagcaccgauacaguugacaccgugcuggagaaaaaugugacagucacccauuccgugaaccuccuggaagauaagcacaaugggaaacuuuguaagcugagaggaguugcuccccuccaucugggcaaaugcaacaucgccggguggauucugggaaauccugagugugaaucucucagcacagccuccucuuggagcuacaucguggagaccuccauuucugacaacggcacgugcuauccgggggauuuuaucgacuacgaagaacugcgggagcagcuuagcuccgucagcucuuucgaacgcuuugagaucuuccccaagaccuccagcuggccuaaucacgauucuaacaagggagugacaaccgccuguccccaugcuggcgccaaauccuuuuauaagaaucugauuuggcucguuaaaaagggcaacagcuacccuaaacugucuaaguccuauaucaaugacaaggggaaagaagugcuuguccuguggggcauucaccaccaaagcacauccgcggaucagcagucucucuaccagaacgccgacgcuuacguguucgugggaaccagcagauauuccaagaaauuuaagcccgagaucgccauucggccuaaaguccgcgaucaagaggggagaaugaauuacuauuggacgcugguugaaccgggagacaagaucacauucgaggcuaccggcaaccugguggugccccgguacgccuuugcgauggaacgcaacgccgggagcggaauuaucaucucugauacaccuguccaugacugcaauaccaccugucagacacccaaaggcgcuauuaacacgucccucccuuuccagaauauccaccccauuaccaucggcaagugcccgaaguaugugaaaagcacaaagcugagacuugccaccgggcugcggaacguuccuucuauucagagccgcggacucuuuggcgcuaucgccggguucaucgagggaggcuggacagggaugguggacggaugguacggcuaucaucaccaaaaugaacagggcuccggguacgccgcugaucugaaaucuacccagaacgcgauugacaagaucacgaauaaagucaacagcgugauugagaagaugaauacacaguuuaccgccguuggaaaggaguucaaccaccuugagaaaagaaucgagaaucugaacaagaaaguggaugacggcuuccucgauauuuggaccuacaaugcugaacugcugguccuccuggagaacgaacggacacuugacuaucaugauuccaaugugaagaaccuguacgagaaaguccgcagccaacucaagaacaaugccaaggagaucgggaacggauguuuugaguucuaucacaaaugcgacaauaccuguauggaaucugugaagaacggcacauacgauuaucccaaauacuccgaagaggccaagcugaauagagaagagaucgacgggguuaaacuugagagcacgcggauuuaucagauccuggcuauuuacucuaccguggccuccagccucguccuggugguuucccugggcgcgaucucuuuuuggaugugcagcaacggaucccuccagugccgcauuuguaucuga

SEQ ID NO: 197715 - RNA, 1701 nt, Artificial Sequence
  derived and/or modified CDS sequence (opt5) from hemagglutinin__InfluenzaA__ADM23846
augaaggccauccuggugguccuccuguacaccuucgcuacagccaacgcggacacgcuuugcauuggcuaucacgcuaauaacagcaccgauacaguugacaccgugcuggagaaaaaugugacagucacccauuccgugaaccuccuggaagauaagcacaaugggaaacuuuguaagcugagaggaguugcuccccuccaucugggcaaaugcaacaucgccggguggauucugggaaauccugagugugaaucucucagcacagccuccucuuggagcuacaucguggagaccuccauuucugacaacggcacgugcuauccgggggauuuuaucgacuacgaagaacugcgggagcagcuuagcuccgucagcucuuucgaacgcuuugagaucuuccccaagaccuccagcuggccuaaucacgauucuaacaagggagugacaaccgccuguccccaugcuggcgccaaauccuuuuauaagaaucugauuuggcucguuaaaaagggcaacagcuacccuaaacugucuaaguccuauaucaaugacaaggggaaagaagugcuuguccuguggggcauucaccaccccagcacauccgcggaucaacagucucucuaccagaacgccgacgcuuacguguucgugggaaccagcagauauuccaagaaauuuaagccugagaucgccauucggccgaaaguccgcgaucaggaggggagaaugaauuacuauuggacgcugguugaacccggagacaagaucacauucgaggcuaccggcaaccugguggugccucgguacgccuuugcgauggaacgcaacgccgggagcggaauuaucaucucugauacacccguccaugacugcaauaccaccugucaaacaccuaaaggcgcuauuaacacgucccuccccuuccagaauauccacccgauuaccaucggcaagugcccuaaguaugugaaaagcacaaagcugagacuugccaccgggcugcggaacguucccucuauucagagccgcggacucuuuggcgcuaucgccggguucaucgagggaggcuggacagggaugguggacggaugguacggcuaucaucaccagaaugaacaaggcuccggguacgccgcugaucugaaaucuacccagaacgcgauugacaagaucacgaauaaagucaacagcgugauugagaagaugaauacacaguuuaccgccguuggaaaggaguucaaccaccuugagaaaagaaucgagaaucugaacaagaaaguggaugacggcuuccucgauauuuggaccuacaaugcugaacugcugguccuccuggagaacgaacggacacuugacuaucaugauuccaaugugaagaaccuguacgagaaaguccgcagccagcucaagaacaaugccaaggagaucgggaacggauguuuugaguucuaucacaaaugcgacaauaccuguauggaaucugugaagaacggcacauacgauuauccuaaauacuccgaagaggccaagcugaauagagaagagaucgacgggguuaaacuugagagcacgcggauuuaucaaauccuggcuauuuacucuaccguggccuccagccucguccuggugguuucccugggcgcgaucucuuuuuggaugugcagcaacggaucccuccagugccgcauuuguaucuga

SEQ ID NO: 197716 - RNA, 1701 nt, Artificial Sequence
  derived and/or modified CDS sequence (opt5) from hemagglutinin__InfluenzaA__ADM23847
augaaggccauccuggugguccuccuguacaccuucgcuacagccaacgcggacacgcuuugcauuggcuaucacgcuaauaacagcaccgauacaguugacaccgugcuggagaaaaaugugacagucacccauuccgugaaccuccuggaagauaagcacaaugggaaacuuuguaagcugagaggaguugcuccccuccaucugggcaaaugcaacaucgccggguggauucugggaaauccugagugugaaucucucagcacagccuccucuuggagcuacaucguggagaccuccauuucugacaacggcacgugcuauccgggggauuuuaucgacuacgaagaacugcgggagcagcuuagcuccgucagcucuuucgaacgcuuugagaucuuccccaagaccuccagcuggccuaaucacgauucuaacaagggagugacaaccgccuguccccaugcuggcgccaaaggcuuuuauaagaaucugauuuggcucguuaaaaaggggaacuccuacccuaaacugagcaagucuuauaucaaugacaagggaaaagaagugcuuguccuguggggcauucaccaccaauccacaagcgcggaucagcagucccucuaccagaacgccgacgcuuacguguucguggggaccucuagauauagcaagaaauuuaagcccgagaucgccauucggccuaaaguccgcgaucaagagggaagaaugaauuacuauuggacgcugguugaaccgggcgacaagaucacauucgaggcuaccgggaaccugguggugccccgguacgccuuugcgauggaacgcaacgucggauccggcauuaucaucagcgauacaccugugcaugacugcaauaccaccugucagacacccaaaggcgccauuaacacgucucucccuuuccagaauauccaccccauuaccaucgggaagugcccgaaguauguuaaauccacaaagcugagacuugcuaccggacugcggaacgugccuagcauucagucucgcggccucuuuggggccaucgcuggauucaucgagggcggguggacaggaauggucgacggcugguacggcuaucaucaccaaaaugaacaggggagcggauacgccgccgaucugaaauccacccagaacgcuauugacaagaucacgaauaaagugaacucuguuauugagaagaugaauacacaguuuaccgcggugggcaaggaguucaaccaccuugagaaaagaaucgagaaucugaacaagaaagucgaugacggguuccucgauauuuggaccuacaaugccgaacugcuggugcuccuggagaacgaacggacacuugacuaucaugauagcaaugucaagaaccuguacgagaaagugcgcucccaacucaagaacaaugcuaaggagaucggaaacggcuguuuugaguucuaucacaaaugcgacaauaccuguauggaaagcguuaagaacgggacauacgauuaucccaaauacucugaagaggccaagcugaauagagaagagaucgacggcgugaaacuugaguccacgcggauuuaucagauccuggccauuuacagcaccgucgcuucuucccucgugcugguugugagccugggagccaucuccuuuuggaugugcucuaacggcagccuccagugccgcauuuguaucuga

SEQ ID NO: 197717 - RNA, 1701 nt, Artificial Sequence
  derived and/or modified CDS sequence (opt5) from hemagglutinin__InfluenzaA__ADM23849
augaaggccauccuggugguccuccuguacaccuucgcuacagccaacgcggacacgcuuugcauuggcuaucacgcuaauaacagcaccgauacaguugacaccgugcuggagaaaaaugugacagucacccauuccgugaaccuccuggaagauaagcacaaugggaaacuuuguaagcugagaggaguugcuccccuccaucugggcaaaugcaacaucgccggguggauucugggaaauccugagugugaaucucucagcacagccuccucuuggagcuacaucguggagaccuccucuagcgacaacggcacgugcuauccgggggauuuuauugacuacgaagaacugcgggagcagcuuuccagcgucucuuccuucgaacgcuuugagaucuuccccaagaccagcucuuggccuaaucacgauuccaacaagggagugacagccgcuuguccccaugccggcgcgaaaucuuuuuauaagaaucugaucuggcucguuaaaaagggcaacagcuacccuaaacuguccaagagcuauauuaaugacaaggggaaagaagugcuuguccuguggggaauccaccaccaauccaccucugccgaucagcagagccucuaccagaacgcugacgccuacguguucgugggcacauccagauauagcaagaaauuuaagcccgagauugcuauccggccuaaaguccgcgaucaagaggggagaaugaauuacuauuggacccugguugaaccgggagacaagauuacguucgaggccacaggcaaccugguggugccccgguacgcguuugccauggaacgcaacgcugggucuggaaucauuaucuccgauaccccuguccaugacugcaauacaaccugucagacccccaaaggcgccaucaacacaagccucccuuuccagaauauucaccccaucacgauuggcaagugcccgaaguaugugaaaucuaccaagcugagacuugcuacagggcugcggaacguuccuagcauccagucccgcggacucuuuggcgccauugccggguucaucgagggaggcuggaccgggaugguggacggaugguacggcuaucaucaccaaaaugaacagggcucuggguacgcugcggaucugaaaagcacacagaacgccaucgacaagauuaccaauaaagucaacuccgugaucgagaagaugaauacgcaguuuacagcuguuggaaaggaguucaaccaccuugagaaaagaauugagaaucugaacaagaaaguggaugacggcuuccucgauaucuggaccuacaaugccgaacugcugguccuccuggagaacgaacggacccuugacuaucaugauagcaaugugaagaaccuguacgagaaaguccgcucucaacucaagaacaaugccaaggagauugggaacggauguuuugaguucuaucacaaaugcgacaauacauguauggaauccgugaagaacggcaccuacgauuaucccaaauacagcgaagaggcuaagcugaauagagaagagaucgacgggguuaaacuugagucuacacggaucuaucagauucuggccaucuacuccacgguggcgagcucccucguccuggugguuucucugggcgcuauuagcuuuuggaugugcuccaacggaucucuccagugccgcaucuguauuuga

SEQ ID NO: 197718 - RNA, 1701 nt, Artificial Sequence
  derived and/or modified CDS sequence (opt5) from hemagglutinin__InfluenzaA__ADM23851
auggaggccauccuggugguccuccuguacaccuucgcuacagccaacgcggacacgcuuugcauuggcuaucacgcuaauaacagcaccgauacaguugacaccgugcuggaaaagaaugugacagucacccauuccgugaaccuccuggaggauaagcacaaugggaaacuuuguaagcugagaggaguugcgccccuccaucugggcaagugcaacaucgccggguggauucugggaaauccugaaugugagucucucagcacagcuuccucuuggagcuacaucguggaaaccuccucuagcgacaacggcacgugcuauccgggggauuuuauugacuacgaggagcugcgggaacagcuuuccagcgucucuuccuucgagcgcuuugaaaucuuccccaaaaccagcucuuggccuaaucacgauuccaacaagggagugacagccgcuuguccccaugccggcgccaagagcuuuuauaaaaaucugaucuggcucguuaagaaaggcaacucuuacccuaagcuguccaaaagcuauauuaaugacaaggggaaggaggugcuuguccuguggggaauccaccaccaauccaccucugccgaucagcagagccucuaccagaacgcugacgccuacguguucgugggcuccagcagauauucuaaaaaguuuaaacccgagauugcuauccggccuaagguccgcgaucaagaagggagaaugaauuacuauuggacacugguugagccgggagacaaaauuaccuucgaagccacgggcaaccugguggugccccgguacgcguuugccauggagcgcaacgcuggguccggaaucauuaucagcgauacaccuguccaugacugcaauaccacaugucagacccccaagggcgccaucaacaccucucucccuuuccacaauauucaucccaucacaauuggcaaaugcccgaaguauguuaagagcacgaaacugagacuugcuaccgggcugcggaacgugccuuccauccagucucgcggacucuuuggcgccauugccggguucaucgaaggaggcuggacagggaugguggacggaugguacggcuaucaccaccagaaugagcaaggcagcggguacgcugcggaucugaaguccacccagaacgccaucgacgagauuacaaauaaagucaacagcgugaucgaaaagaugaauacccaguuuacggcuguuggaaaagaguucaaccaucuugaaaagagaauugagaaucugaacaagaaaguggaugacggcuuccucgauaucuggacauacaaugccgaacugcugguccuccuggagaacgagcggacccuugacuaucacgauucuaaugugaagaaccuguacgaaaaaguccgcucccagcucaagaacaaugccaaagagauugggaacggauguuuugaguucuaucauaagugcgacaauaccuguauggaaagcgugaagaacggcacauacgauuaucccaaauacucugaagaggcuaagcugaauagagagaaaaucgacgggguuaaacuugaauccacccggaucuaucaaauucuggccaucuacagcacaguggcguccucucucguccuggugguuagccugggcgcuauuuccuuuuggaugugcucuaacggaagccuccagugccgcaucuguauuuga

SEQ ID NO: 197719 - RNA, 1701 nt, Artificial Sequence
  derived and/or modified CDS sequence (opt5) from hemagglutinin__InfluenzaA__ADM23852
auggaggccauccuggugguccuccuguacaccuucgcuacagccaacgcggacacgcuuugcauuggcuaucacgcuaauaacagcaccgauacaguugacaccgugcuggaaaagaaugugacagucacccauuccgugaaccuccuggaggauaagcacaaugggaaacuuuguaagcugagaggaguugcgccccuccaucugggcaagugcaacaucgccggguggauucugggaaauccugaaugugagucucucagcacagcuuccucuuggagcuacaucguggaaaccuccucuagcgacaacggcacgugcuauccgggggauuuuauugacuacgaggagcugcgggaacagcuuuccagcgucucuuccuucgagcgcuuugaaaucuuccccaaaaccagcucuuggccuaaucacgauuccaacaagggagugacagccgcuuguccccaugccggcgccaagagcuuuuauaaaaaucugaucuggcucguuaagaaaggcaacucuuacccuaagcuguccaaaagcuauauuaaugacaaggggaaggaggugcuuguccuguggggaauccaccaccccuccaccucugccgaucaacagagccucuaccagaacgcugacgccuacguguucgugggcuccagcagauauucuaaaaaguuuaaaccugagauugcuauccggccgaagguccgcgaucaggaagggagaaugaauuacuauuggacacugguugagcccggagacaaaauuaccuucgaagccacgggcaaccugguggugccucgguacgcguuugccauggagcgcaacgcuggguccggaaucauuaucagcgauacacccguccaugacugcaauaccacaugucaaaccccuaagggcgccaucaacaccucucuccccuuccacaauauucauccgaucacaauuggcaaaugcccuaaguauguuaagagcacgaaacugagacuugcuaccgggcugcggaacgugcccuccauccagucucgcggacucuuuggcgccauugccggguucaucgaaggaggcuggacagggaugguggacggaugguacggcuaucaccaccagaaugagcagggcagcggguacgcugcggaucugaaguccacccaaaacgccaucgacgagauuacaaauaaagucaacagcgugaucgaaaagaugaauacccaguuuacggcuguuggaaaagaguucaaccaucuugaaaagagaauugagaaucugaacaagaaaguggaugacggcuuccucgauaucuggacauacaaugccgaacugcugguccuccuggagaacgagcggacccuugacuaucacgauucuaaugugaagaaccuguacgaaaaaguccgcucccagcucaagaacaaugccaaagagauugggaacggauguuuugaguucuaucauaagugcgacaauaccuguauggaaagcgugaagaacggcacauacgauuauccuaaauacucugaagaggcuaagcugaauagagagaaaaucgacgggguuaaacuugaauccacccggaucuaucagauucuggccaucuacagcacaguggcguccucucucguccuggugguuagccugggcgcuauuuccuuuuggaugugcucuaacggaagccuccaaugccgcaucuguauuuga

SEQ ID NO: 197720 - RNA, 1701 nt, Artificial Sequence; identical to SEQ ID NO: 197719
  derived and/or modified CDS sequence (opt5) from hemagglutinin__InfluenzaA__ADM23853

SEQ ID NO: 197721 - RNA, 1701 nt, Artificial Sequence; identical to SEQ ID NO: 194983
  derived and/or modified CDS sequence (opt5) from hemagglutinin__InfluenzaA__ADM23855

SEQ ID NO: 197722 - RNA, 1701 nt, Artificial Sequence
  derived and/or modified CDS sequence (opt5) from hemagglutinin__InfluenzaA__ADM23856
augaaggccauccuggugguccuccuguacaccuucgcuacaguuaacgccgacacgcuuugcauuggcuaucacgcgaauaacagcaccgauacaguggacaccgugcuggagaaaaaugucacagugacccauuccguuaaccuccuggaagauaagcacaaugggaaacuuuguaagcugagaggaguggcuccccuccaucugggcaaaugcaacaucgccggguggauucugggaaauccugagugugaaucucucagcacagccuccucuuggagcuacaucgucgagaccuccucuagcgacaacggcacgugcuauccgggggauuuuauugacuacgaggagcugcgggagcagcuuuccagcgugucuuccuucgaacgcuuugagaucuuccccaagaccagcucuuggccuaaucacgauuccaacaagggaguuacagcugccuguccccaugcuggcgccaagagcuuuuauaaaaaucugaucuggcucgugaaaaagggcaacucuuacccuaaacuguccaagagcuauauuaaugacaagagaaaagaaguccuugugcugugggggauccaccaccaauccaccucugcggaucagcagagccucuaccagaacgccgacgcuuacguguucgucggaacaucccgguauagcaagaaauuuaagcccgagauugccauccgcccuaaaguuagagaucaagagggccggaugaauuacuauuggacccugguggaaccgggggacaagauuacguucgaggcuacaggaaaccugguggucccccgcuacgccuuugcgauggaaagaaacgccggcucugggaucauuaucuccgauaccccugugcaugacugcaauacaaccugucagacccccaaaggagcuaucaacacaagccucccuuuccagaauauucaccccaucacgauuggcaagugcccgaaguauguuaaaucuaccaagcugcggcuugccacaggccugcgcaacgugccuagcauccaguccagagggcucuuuggagcuauugccggcuucaucgaagggggauggaccggcauggucgacgggugguacggauaucaucaccaaaaugaacagggcucuggcuacgccgcugaucugaaaagcacacagaacgcgaucgacaagauuaccaauaaagugaacuccguuaucgagaagaugaauacgcaguuuacagccguggggaaggaguucaaccaccuugaaaaacggauugagaaucugaacaagaaagucgaugacggauuccucgauaucuggaccuacaaugcugaacugcuggugcuccuggagaacgaacgcacccuugacuaucaugauagcaaugucaagaaccuguacgagaaagugagaucucaacucaagaacaaugccaaggagauuggcaacggguguuuugaguucuaucacaaaugcgacaauacauguauggaauccguuaagaacggaaccuacgauuaucccaaauacagcgaagaggccaagcugaaucgggaagagaucgacggcgugaaacuugagucuacacgcaucuaucagauucuggcuaucuacuccacggucgccagcucccucgugcugguugugucucugggggcgauuagcuuuuggaugugcuccaacggcucucuccagugcagaaucuguauuuga

SEQ ID NO: 197723 - RNA, 1701 nt, Artificial Sequence; identical to SEQ ID NO: 194741
  derived and/or modified CDS sequence (opt5) from hemagglutinin__InfluenzaA__ADM25945

SEQ ID NO: 197724 - RNA, 1701 nt, Artificial Sequence; identical to SEQ ID NO: 194983
  derived and/or modified CDS sequence (opt5) from hemagglutinin__InfluenzaA__ADM25948

SEQ ID NO: 197725 - RNA, 1701 nt, Artificial Sequence; identical to SEQ ID NO: 196770
  derived and/or modified CDS sequence (opt5) from hemagglutinin__InfluenzaA__ADM26264

SEQ ID NO: 197726 - RNA, 1701 nt, Artificial Sequence; identical to SEQ ID NO: 196770
  derived and/or modified CDS sequence (opt5) from hemagglutinin__InfluenzaA__ADM26265

SEQ ID NO: 197727 - RNA, 1701 nt, Artificial Sequence; identical to SEQ ID NO: 196770
  derived and/or modified CDS sequence (opt5) from hemagglutinin__InfluenzaA__ADM26266

SEQ ID NO: 197728 - RNA, 1701 nt, Artificial Sequence; identical to SEQ ID NO: 196770
  derived and/or modified CDS sequence (opt5) from hemagglutinin__InfluenzaA__ADM26267

SEQ ID NO: 197729 - RNA, 1701 nt, Artificial Sequence
  derived and/or modified CDS sequence (opt5) from hemagglutinin__InfluenzaA__ADM26268
augaaggccauccuggugguccuccuguacaccuucacaacggcuaacgccgacacccuuugcauuggcuaucacgcgaauaacagcacagauaccguugacacagugcuggagaaaaaugugaccgucacacauuccgugaaccuccuggaagauaagcacaaugggaaacuuuguaagcugagaggaguugcuccccuccaucugggcaaaugcaacaucgccggguggauucugggaaauccugagugugaaucucucagcaccgccuccucuuggagcuacaucguggagacguccucuagcgacaacgggaccugcuauccgggcgauuuuauugacuacgaagaacugcgggagcagcuuuccagcgucucuuccuucgaacgcuuugagaucuuccccaagacaagcucuuggccuaaucacgauuccaacaagggagugaccgcugccuguccccaugcuggcgccaagagcuuuuauaaaaaucugaucuggcucguuaaaaagggcaacucuuacccuaaacuguccaagagcuauauuaaugacaaggggaaagaagugcuuguccuguggggaauccaccaccccuccacaucugcggaucaacagagccucuaccagaacgccgacgcuuacguguucgugggcaccuccagauauagcaagaaauuuaagccugagauugccauccggccgaaaguccgcgagcaggaagggagaaugaauuacuauuggacgcugguugagcccggagauaagauuacauucgaagcuaccggcaaccugguggugccucgguacgccuuugcgauggagcgcaacgccgggucuggaaucauuaucuccgacacacccguccaugauugcaauaccaccugucaaacaccuaaaggcgcuaucaacacgagccuccccuuccagaauauucacucuaucaccauuggcaagugcccgaaguaugugaaaagcacaaagcugagacuugccaccgggcugcggaacguuccuuccauccagucucgcggacucuuuggcgcuauugccggguucaucgaaggaggcuggacagggaugguggacggaugguacggcuaucaucaccagaaugagcaaggcagcggguacgccgcugaccugaaauccacccagaacgcgaucgaugagauuacgaauaaggucaacagcgugaucgagaaaaugaauacacaguuuaccgccguuggaaaggaguucaaccaccuugaaaagagaauugagaaucugaacaaaaagguggacgauggcuuccucgacaucuggaccuacaaugcugaacugcugguccuccuggagaacgagcggacacuugauuaucaugacucuaaugugaaaaaccuguacgaaaagguccgcucccagcucaaaaacaaugccaaggagauugggaacggauguuuugaguucuaucacaagugcgauaauaccuguauggaaagcgugaaaaacggcacauacgacuaucccaaguacucugaagaggccaaacugaagagagaggaaaucgaugggguuaaacuugaguccacgcggaucuaucaaauucuggcuaucuacagcaccguggccuccucucucguccuggugguuagccugggcgcgauuuccuuuuggaugugcucuaauggaagccuccagugccgcaucuguauuuga

SEQ ID NO: 197730 - RNA, 1701 nt, Artificial Sequence
  derived and/or modified CDS sequence (opt5) from hemagglutinin__InfluenzaA__ADM26269
augaagaccauccuggugguccuccuguacacauucacgaccgccaacgcugacacacuuugcauuggcuaucacgccaauaacagcaccgauacaguugacaccgugcuggagaaaaaugugacagucacccauuccgugaaccuccuggaagauaagcacaaugggaaacuuuguaagcugagaggaguugcgccccuccaucugggcaaaugcaacaucgcuggguggauucugggaaauccugagugugaaucucucagcacggccuccucuuggagcuacaucguggagaccuccucuagcgacaacggcacaugcuauccgggggauuuuauugacuacgaagaacugcgggagcagcuuuccagcgucucuuccuucgaacgcuuugagaucuuccccaagaccagcucuuggccuaaucacgauuccaacaagggagugacagccgcuuguccccaugccggcgcuaagagcuuuuauaaaaaucugaucuggcucguuaaaaagggcaacucuuacccuaaacuguccaagagcuauauuaaugacaaggggaaagaagugcuuguccuguggggaauccaccaccccuccaccucugccgaucaacagagccucuaccagaacgcggacgccuacguguucgugggcacguccagauauagcaagaaauuuaagccugagauugcuauccggccgaaaguccgcgagcaggaagggagaaugaauuacuauuggacacugguugagcccggagauaagauuaccuucgaagccacaggcaaccugguggugccucgguacgcuuuugccauggagcgcaacgcggggucuggaaucauuaucuccgacacccccguccaugauugcaauaccacaugucaaacgccuaaaggcgccaucaacaccagccuccccuuccagaauauucacucuaucacaauuggcaagugcccgaaguaugugaaaagcaccaagcugagacuugcuacagggcugcggaacguuccuuccauccagucucgcggacucuuuggcgccauugcuggguucaucgaaggaggcuggaccgggaugguggacggaugguacggcuaucaucaccagaaugagcaaggcagcggguacgccgccgaccugaaauccacgcagaacgcuaucgaugagauuacaaauaaggucaacagcgugaucgagaaaaugaauacccaguuuaccgcgguuggaaaggaguucaaccaccuugaaaagagaauugagaaucugaacaaaaagguggacgauggcuuccucgacaucuggacauacaaugccgaacugcugguccuccuggagaacgagcggacccuugauuaucaugacucuaaugugaaaaaccuguacgaaaagguccgcucccagcucaaaaacaaugcuaaggagauugggaacggauguuuugaguucuaucacaagugcgauaauacauguauggaaagcgugaaaaacggcacguacgacuaucccaaguacucugaagaggccaaacugaagagagaggaaaucgaugggguuaaacuugaguccacccggaucuaucaaauucuggccaucuacagcacaguggcuuccucucucguccuggugguuagccugggcgccauuuccuuuuggaugugcucuaauggaagccuccagugccgcaucuguauuuga

SEQ ID NO: 197731 - RNA, 1701 nt, Artificial Sequence
  derived and/or modified CDS sequence (opt5) from hemagglutinin__InfluenzaA__ADM26270
augaaggccauccuggugguccuccuguacaccuucacaacggcuaacgccgacacccuuugcauuggcuaucacgcgaauaacagcacagauaccguugacacagugcuggagaaaaaugugaccgucacacauuccgugaaccuccuggaagauaagcacaaugggaaacuuuguaagcugagaggaguugcuccccuccaucugggcaaaugcaacaucgccggguggauucugggaaauccugagugugaaucucucagcaccgccuccucuuggagcuacaucguggagacguccucuagcgacaacgggaccugcuauccgggcgauuuuauugacuacgaagaacugcgggagcagcuuuccagcgucucuuccuucgaacgcuuugagaucuuccccaagacaagcucuuggccuaaucacgauuccaacaagggagugaccgcugccuguccccaugcuggcgccaagagcuuuuauaagaaucugaucuggcucguuaaaaagggcaacucuuacccuaaacuguccaagagcuauauuaaugacaaggggaaagaagugcuuguccuguggggaauccaccaccccuccacaucugcggaucaacagagccucuaccagaacgccgacgcuuacguguucgugggcaccuccagauauagcaagaaauuuaagccugagauugccauccggccgaaaguccgcgagcaggaagggagaaugaauuacuauuggacgcugguugagcccggagauaagauuacauucgaagcuaccggcaaccugguggugccucgguacgccuuugcgauggagcgcaacgccgggucuggaaucauuaucuccgacacacccguccaugauugcaauaccaccugucaaacaccuaaaggcgcuaucaacacgagccuccccuuccagaauauucacucuaucaccauuggcagaugcccgaaguaugugaaaagcacaaaacugcggcuugccaccgggcugcgcaacguuccuuccauccagucuagaggacucuuuggcgcuauugccggguucaucgaaggaggcuggacagggaugguggacggaugguacggcuaucaucaccagaaugagcaaggcagcggguacgccgcugaccugaaguccacccagaacgcgaucgaugagauuacgaauaaagucaacagcgugaucgaaaagaugaauacacaguuuaccgccguuggaaaagaguucaaccaccuugaaaagcggauugagaaucugaacaagaaaguggacgauggcuuccucgacaucuggaccuacaaugcugaacugcugguccuccuggagaacgagcgcacacuugaucaucacgacucuaaugugaagaaccuguaugaaaaagucagaucccagcucaagaacaaugccaaagagauugggaacggauguuuugaguucuaccauaagugcgauaauaccuguauggagagcgugaagaacggcacauaugacuaccccaaauauucugaagaggccaagcugaaucgggaggaaaucgaugggguuaaacuugaguccacgcgcaucuaccaaauucuggcuaucuauagcaccguggccuccucucucguccuggugguuagccugggcgcgauuuccuuuuggaugugcucuaacggaagccuccagugcagaaucuguauuuga

SEQ ID NO: 197732 - RNA, 1701 nt, Artificial Sequence; identical to SEQ ID NO: 196770
  derived and/or modified CDS sequence (opt5) from hemagglutinin__InfluenzaA__ADM26271

SEQ ID NO: 197733 - RNA, 1701 nt, Artificial Sequence
  derived and/or modified CDS sequence (opt5) from hemagglutinin__InfluenzaA__ADM26272
augaaggccauccuggugguccuccuguacaccuucacaacggcuaacgccgacacccuuugcauuggcuaucacgcgaauaacagcacagauaccguugacacagugcuggagaaaaaugugaccgucacacauuccgugaaccuccuggaagauaagcacaaugggaaacuuuguaagcugagaggaguugcuccccuccaucugggcaaaugcaacaucgccggguggauucugggaaauccugagugugaaucucucagcaccgccuccucuuggagcuacaucguggagacguccucuagcgacaacgggaccugcuauccgggcgauuuuauugacuacgaagaacugcgggagcagcuuuccagcgucucuuccuucgaacgcuuugagaucuuccccaagacaagcucuuggccuaaucacgauuccaacaagggagugaccgcugccuguccccaugcuggcgccaagagcuuuuauaagaaucugaucuggcucguuaaaaagggcaacucuuacccuaaacuguccaagagcuauauuaaugacaaggggaaagaagugcuuguccuguggggaauccaccaccccuccacaucugcggaucaacagagccucuaccagaacgccgacgcuuacguguucgugggcaccuccagauauagcaagaaauuuaagccugagauugccauccggccgaaaguccgcgagcaggaagggagaaugaauuacuauuggacgcugguugagcccggagauaagauuacauucgaagcuaccggcaaccugguggugccucgguacgccuuugcgauggagcgcaacgccgggucuggaaucauuaucuccgacacacccguccaugauugcaauaccaccugucaaacaccuaaaggcgcuaucaacacgagccuccccuuccagaauauucacucuaucaccauuggcagaugcccgaaguaugugaaaagcacaaaacugcggcuugccaccgggcugcgcaacguuccuuccauccagucuagaggacucuuuggcgcuauugccggguucaucgaaggaggcuggacagggaugguggacggaugguacggcuaucaucaccagaaugagcaaggcagcggguacgccgcugaccugaaguccacccagaacgcgaucgaugagauuacgaauaaagucaacagcgugaucgaaaagaugaauacacaguuuaccgccguuggaaaagaguucaaccaccuugaaaagcggauugagaaucugaacaagaaaguggacgauggcuuccucgacaucuggaccuacaaugcugaacugcugguccuccuggagaacgagcgcacacuugauuaucaugacucuaaugugaagaaccuguacgaaaaagucagaucccagcucaagaacaaugccaaagagauugggaacggauguuuugaguucuaucacaagugcgauaauaccuguauggagagcgugaagaacggcacauacgacuaucccaaauacucugaagaggccaagcugaaucgggaggaaaucgaugggguuaaacuugaguccacgcgcaucuaucaaauucuggcuaucuacagcaccguggccuccucucucguccuggugguuagccugggcgcgauuuccuuuuggaugugcucuaacggaagccuccagugcagaaucuguauuuga

SEQ ID NO: 197734 - RNA, 1701 nt, Artificial Sequence
  derived and/or modified CDS sequence (opt5) from hemagglutinin__InfluenzaA__ADM26274
augaaggccauccuggugguccuccuguacaccuucacaacggcuaacgccgacacccuuugcauuggcuaucacgcgaauaacagcacagauaccguugacacagugcuggagaaaaaugugaccgucacacauuccgugaaccuccuggaagauaagcacaaugggaaacuuuguaagcugagaggaguugcuccccuccaucugggcaaaugcaacaucgccggguggauucugggaaauccugagugugaaucucucagcaccgccuccucuuggagcuacaucguggagacguccucuagcgacaacgggaccugcuauccgggcgauuuuauugacuacgaagaacugcgggagcagcuuuccagcgucucuuccuucgaacgcuuugagaucuuccccaagacaagcucuuggccuaaucacgauuccaacaagggagugaccgcugccuguccccaugcuggcgccaagagcuuuuauaagaaucugaucuggcucguuaaaaagggcaacucuuacccuaaacuguccaagagcuauauuaaugacaaggggaaagaagugcuuguccuguggggaauccaccaccccuccacaucugcggaucaacagagccucuaccagaacgccgacgcuuacguguucgugggcaccuccagauauagcaagaaauuuaagccugagauugccauccggccgaaaguccgcgagcaggaagggagaaugaauuacuauuggacgcugguugagcccggagauaagauuacauucgaagcuaccggcaaccugguggugccucgguacgccuuugcgauggagcgcaacgccgggucuggaaucauuaucuccgacacacccguccaugauugcaauaccaccugucaaacaccuaaaggcgcuaucaacacgagccuccccuuccagaauauucacucuaucaccauuggcaagugcccgaaguaugugaaaagcacaaagcugagacuugccaccgggcugcggaacguuccuuccauccagucucgcggacucuuuggcgcuauugccggguucaucgaaggaggcuggacagggaugguggacggaugguacggcuaucaucaccagaaugagcaaggcagcggguacgccgcugaccugaaauccacccagaacgcgaucgaugagauuacgaauaaggucaacagcgugaucgagaaaaugaauacacaguuuaccgccguuggaaaggaguucaaccaccuugaaaagagaauugagaaucugaacaaaaagguggacgauggcuuccucgacaucuggaccuacaaugcugaacugcugguccuccuggagaacgagcggacacuugauuaucaugacucuaaugugaaagaucuguacgaaaagguccgcucccagcucaaaaacaacgccaaggagauugggaauggauguuuugaguucuaucacaagugcgacaacaccuguauggaaagcgugaaaaauggcacauacgauuaucccaaguacucugaagaggccaaacugaacagagaggaaaucgacgggguuaaacuugaguccacgcggaucuaucaaauucuggcuaucuacagcaccguggccuccucucucguccuggugguuagccugggcgcgauuuccuuuuggaugugcucuaauggaagccuccagugccgcaucuguauuuga

SEQ ID NO: 197735 - RNA, 1701 nt, Artificial Sequence; identical to SEQ ID NO: 196770
  derived and/or modified CDS sequence (opt5) from hemagglutinin__InfluenzaA__ADM26276

SEQ ID NO: 197736 - RNA, 1701 nt, Artificial Sequence
  derived and/or modified CDS sequence (opt5) from hemagglutinin__InfluenzaA__ADM26277
augaaggccauccuggugguccuccuguacaccuucacaacggcuaacgccgacacccuuugcauuggcuaucacgcgaauaacagcacagauaccguugacacagugcuggagaaaaaugugaccgucacacauuccgugaaccuccuggaagauaagcacaaugggaaacuuuguaagcugagaggaguugcuccccuccaucugggcaaaugcaacaucgccggguggauucugggaaauccugagugugaaucucucagcaccgccuccucuuggagcuacaucguggagacguccucuagcgacaacgggaccugcuauccgggcgauuuuauugacuacgaagaacugcgggagcagcuuuccagcgucucuuccuucgaacgcuuugagaucuuccccaagacaagcucuuggccuaaucacgauuccaacaagggagugaccgcugccuguccccaugcuggcgccaagagcuuuuauaagaaucugaucuggcucguuaaaaagggcaacucuuacccuaaacuguccaagagcuauauuaaugacaaggggaaagaagugcuuguccuguggggaauccaccaccccuccacaucugcggaucaacagagccucuaccagaacgccgacgcuuacguguucgugggcaccuccagauauagcaagaaauuuaagccugagauugccauccggccgaaaguccgcgagcaggaagggagaaugaauuacuauuggacgcugguugagcccggagauaagauuacauucgaagcuaccggcaaccugguggugccucgguacgccuuugcgauggagcgcaacgccgggucuggaaucauuaucuccgacacacccguccaugauugcaauaccaccugucaaacaccuaaaggcgcuaucaacacgagccuccccuuccagaauauucacucuaucaccauuggcaagugcccgaaguaugugaaaagcacaaagcugagacuugccaccgggcugcggaacguuccuuccauccagucucgcggacucuuuggcgcuauugccggguucaucgaaggaggcuggacagggaugguggacggaugguacggcuaucaucaccagaaugagcaaggcagcggguacgccgcugaccugaaauccacccagaacgcgaucgaugagauuacgaauaaggucaacagcgugaucgagaaaaugaauacacaguuuaccgccguuggaaaggaguucaaccaccuugaaaagagaauugagaaucugaacaaaaagguggacgauggcuuccucgacaucuggaccuacaaugcugaacugcugguccuccuggagaacgagcggacacuugauuaucaugacucuaaugugaaaaaccuguacgaaaagguccgcucccagcucaaaaacaaugccaaggagauugggaacggauguuuugaguucuaucacaagugcgauaauaccuguauggaaagcgugaaaaacggcacauacgacuaucccaaguacucugaagaggccaaacugaauagagaggaaaucgaugggguuaaacuugaguccacgcggaucuaucaaauucuggcuaucuacagcaccguggccuccucucucguccugauugugagccugggcgcgaucuccuuuuggaugugcucuaacggaagccuccagugccgcauuuguaucuga

SEQ ID NO: 197737 - RNA, 1701 nt, Artificial Sequence
  derived and/or modified CDS sequence (opt5) from hemagglutinin__InfluenzaA__ADM26278
augaaggccauccuggugguccuccuguacaccuucacaacggcuaacgccgacacccuuugcauuggcuaucacgcgaauaacagcacagauaccguugacacagugcuggagaaaaaugugaccgucacacauuccgugaaccuccuggaagauaagcacaaugggaaacuuuguaagcugagaggaguugcuccccuccaucugggcaaaugcaacaucgccggguggauucugggaaauccugagugugaaucucucagcaccgccuccucuuggagcuacaucguggagacguccucuagcgacaacgggaccugcuauccgggcgauuuuauugacuacgaagaacugcgggagcagcuuuccagcgucucuuccuucgaacgcuuugagaucuuccccaagacaagcucuuggccuaaucacgauuccaacaagggagugaccgcugccuguccccaugcuggcgccaagagcuuuuauaaaaaucugaucuggcucguuaaaaagggcaacucuuacccuaaacuguccaagagcuauauuaaugacaaggggaaagaagugcuuguccuguggggaauccaccaccccuccacaucugcggaucaacagagccucuaccagaacgccgacgcuuacguguccgugggcaccagcagauauucuaagaaauucaagccugagauugccauccggccgaaaguccgcgagcaggaagggagaaugaauuacuauuggacgcugguugagcccggagauaagauuacauuugaagcuaccggcaaccugguggugccucgguucgccuuugcgauggagcgcaacgccggguccggaaucauuaucagcgacacacccguccaugauugcaauaccaccugucaaacaccuaaaggcgcuaucaacacgucucuccccuuccagaauauucacagcaucaccauuggcaagugcccgaaguacgugaaauccacaaagcugagacuugccaccgggcugcggaacguuccuucuauccagagccgcggacucuuuggcgcuauugccggguucaucgaaggaggcuggacagggaugguggacggaugguauggcuaccaucaccagaaugagcaaggcuccggguaugccgcugaccugaaaagcacccagaacgcgaucgaugagauuacgaauaaggucaacucugugaucgagaaaaugaauacacaguuuaccgccguuggaaaggaguucaaccaccuugaaaagagaauugagaaucugaacaaaaagguggacgauggcuuccucgacaucuggaccuacaaugcugaacugcugguccuccuggagaacgagcggacacuugauuaccaugacuccaaugugaaaaaccuguaugaaaagguccgcagccagcucaaaaacaaugccaaggagauugggaacggauguuuugaguucuaccacaagugcgauaauaccuguauggaaucugugaaaaacggcacauaugacuaccccaaguauuccgaagaggccaaacugaagagagaggaaaucgaugggguuaaacuugagagcacgcggaucuaccaaauucuggcuaucuauuccaccguggccucuagccucguccuggugguuucccugggcgcgauuucuuuuuggaugugcagcaauggaucccuccagugccgcaucuguauuuga

SEQ ID NO: 197738 - RNA, 1701 nt, Artificial Sequence
  derived and/or modified CDS sequence (opt5) from hemagglutinin__InfluenzaA__ADM26279
augaaggccauccuggugguccuccuguacaccuucacaacggcuaacgccgacacccuuugcauuggcuaucacgcgaauaacagcacagauaccguugacacagugcuggagaaaaaugugaccgucacacauuccgugaaccuccuggaagauaagcacaaugggaaacuuuguaagcugagaggaguugcuccccuccaucugggcaaaugcaacaucgccggguggauucugggaaauccugagugugaaucucucagcaccgccuccucuuggagcuacaucguggagacguccucuagcgacaacgggaccugcuauccgggcgauuuuauugacuacgaagaacugcgggagcagcuuuccagcgucucuuccuucgaacgcuuugagaucuuccccaagacaagcucuuggccuaaucacgauuccaacaagggagugaccgcugccuguccccaugcuggcgccaagagcuuuuauaagaaucugaucuggcucguuaaaaagggcaacucuuacccuaaacuguccaagagcuauauuaaugacaaggggaaagaagugcuuguccuguggggaauccaccaccccuccacaucugcggaucaacagagccucuaccagaacgccgacgcuuacguguucgugggcaccuccagauauagcaagaaauuuaagccugagauugccauccggccgaaaguccgcgggcaggagggaagaaugaauuacuauuggacgcugguugaacccggcgauaagauuacauucgaggcuaccgggaaccugguggugccucgguacgccuuugcgauggaacgcaacgccggaucuggcaucauuaucuccgacacacccguccaugauugcaauaccaccugucaaacaccuaaaggcgcuaucaacacgagccuccccuuccagaauauucacucuaucaccauugggaagugcccgaaguaugugaaaagcacaaagcugagacuugccaccggacugcggaacguuccuuccauccagucucgcggccucuuuggggcuauugccggauucaucgagggcggguggacaggaaugguggacggcugguacggcuaucaucaccagaaugaacaagggagcggauacgccgcugaccugaaauccacccagaacgcgaucgaugagauuacgaauaaggucaacagcgugaucgagaaaaugaauacacaguuuaccgccguuggcaaggaguucaaccaccuugagaagagaauugaaaaucugaacaaaaagguggacgauggguuccucgacaucuggaccuacaaugcugagcugcugguccuccuggaaaacgagcggacacuugauuaucaugacucuaaugugaaaaaccuguacgagaagguccgcucccagcucaaaaacaaugccaaggaaauuggaaacggcuguuuugaguucuaucacaagugcgauaauaccuguauggaaagcgugaaaaacgggacauacgacuaucccaaguacucugaggaagccaaacugaauagagaggagaucgauggcguuaaacuugaauccacgcggaucuaucaaauucuggcuaucuacagcaccguggccuccucucucguccuggugguuagccugggagcgauuuccuuuuggaugugcucuaacggcagccuccagugccgcaucuguauuuga

SEQ ID NO: 197739 - RNA, 1701 nt, Artificial Sequence; identical to SEQ ID NO: 196770
  derived and/or modified CDS sequence (opt5) from hemagglutinin__InfluenzaA__ADM26280

SEQ ID NO: 197740 - RNA, 1701 nt, Artificial Sequence
  derived and/or modified CDS sequence (opt5) from hemagglutinin__InfluenzaA__ADM26281
augaaggccauccuggugguccuccuguacaccuucgcuacagccaacgcggacacgcuuugcauuggcuaucacgcuaauaacagcaccgauacaguugacaccgugcuggagaagaaugugacagucacccauuccgugaaccuccuggaagauaagcacaaugggaaacuuuguaagcugagaggaguugcuccccuccaucugggcaaaugcaacaucgccggguggauucugggaaauccugagugugaaucucucagcacagccuccucuuggagcuacaucguggagaccuccucuagcgacaacggcacgugcuauccgggggauuuuauugacuacgaagaacugcgggagcagcuuuccagcgucucuuccuucgaacgcuuugagaucuuccccaagaccagcucuuggccuaaucacgauuccaacaagggagugacagccgcuuguccccaugccggcgcgaaaucuuuuuauaagaaucugaucuggcucguuaaaaagggcaacagcuacccuaaacuguccaagagcuauauuaaugacaaggggaaagaagugcuuguccuguggggaauccaccaccccuccaccucugccgaucaacagagccucuaccagaacgcugacgccuacguguucgugggcacauccagauauagcaagaaauuuaagccugagauugcuauccggccgaaaguccgcgaucaggaggggagaaugaauuacuauuggacccugguugaacccggagacaagauuacguucgaggccacaggcaaccugguggugccucgguacgcguuugccauggaacgcaacgcugggucuggaaucauuaucuccgauacccccguccaugacugcaauacaaccugucaaaccccuaaaggcgccaucaacacaagccuccccuuccagucuauucacccgaucacgauuggcaagugcccuaaguaugugaaaagcaccaagcugagacuugcuacagggcugcggaauguucccuccauccagucucgcggacucuuuggcgccauugccggguucaucgagggaggcuggaccgggaugguggacggaugguacggcuaucaucaccagaacgaacaaggcagcggguacgcugcggaucugaaauccacacagaaugccaucgacaagauuaccaacaaagucaauagcgugaucgagaagaugaacacgcaguuuacagcuguuggaaaggaguucaaucaccuugaaagacggauugagaaccugaauaaaaagguggaugacggcuuccucgauaucuggaccuacaacgccgaacugcugguccuccuggagaaugaacgcacccuugacuaucaugauucuaacgugaaaaaucuguacgagaaggucagaucccagcucaaaaacaacgccaaggagauugggaauggauguuuugaguucuaucacaagugcgacaacacauguauggagagcgugaaaaauggcaccuacgauuauccuaaguacucugaagaggcuaaacugaaccgggaagagaucgacgggguuaaacuugaguccacacgcguguaucaaauccuggccauuuacagcacggucgcguccucucucgugcugguugugagccugggcgcuaucuccuuuuggaugugcucuaauggaagccuccagugcagaauuuguaucuga

SEQ ID NO: 197741 - RNA, 1701 nt, Artificial Sequence
  derived and/or modified CDS sequence (opt5) from hemagglutinin__InfluenzaA__ADM26282
augaaggccauccuggugguccuccuguacaccuucacaacggcuaacgccgacacccuuugcauuggcuaucacgcgaauaacagcacagauaccguugacacagugcuggagaaaaaugugaccgucacacauuccgugaaccuccuggaagauaagcacaaugggaaacuuuguaagcugagaggaguugcuccccuccaucugggcaaaugcaacaucgccggguggauucugggaaauccugagugugaaucucucagcaccgccuccucuuggagcuacaucguggagacguccucuagcgacaacgggaccugcuauccgggcgauuuuauugacuacgaagaacugcgggagcagcuuuccagcgucucuuccuucgaacgcuuugagaucuuccccaagacaagcucuuggccuaaucacgauuccaacaagggagugaccgcugccuguccccaugcuggcgccaagagcuuuuauaaaaaucugaucuggcucguuaaaaagggcaacucuuacccuaaacuguccaagagcuauauuaaugacaaggggaaagaagugcuuguccuguggggaauccaccaccccuccacaucugcggaucaacagagccucuaccagaacgccgacgcuuacguguucgugggcaccuccagauauagcaagaaauuuaagccugagauugccauccggccgaaaguccgcgagcaggaagggagaaugaauuacuauuggacgcugguugagcccggagauaagauuacauucgaagcuaccggcaaccugguggugccucgguacgccuuugcgauggagcgcaacgccgggucuggaaucauuaucuccgacacacccguccaugauugcaauaccaccugucaaacaccuaaaggcgcuaucaacacgagccuccccuuccagaauauucacucuaucaccauuggcaagugcccgaaguaugugaaaagcacaaagcugagacuugccaccgggcugcggaacguuccuuccauccagucucgcggacucuuuggcgcuauugccggguucaucgaaggaggcuggacagggaugguggacggaugguacggcuaucaucaccagaaugagcaaggcagcggguacgccgcugaccugaaauccacccagaacgcgaucgaugagauuacgaauaaggucaacagcgugaucgagaaaaugaauacacaguuuaccgccguuggaaaggaguucaaccaccuugaaagacggauugagaaucugaacaagaaaguggacgauggcuuccucgacaucuggaccuacaaugcugaacugcugguccuccuggagaacgagcgcacacuugauuaucaugacucuaaugugaagaaccuguacgaaaaagucagaucccagcucaagaacaaugccaaagagauugggaacggauguuuugaguucuaucacaagugcgauaauaccuguauggaaagcgugaagaacggcacauacgacuaucccaaauacucugaagaggccaagcugaaucgggaggaaaucgaugggguuaaacuugaguccacgcgcaucuaucaaauucuggcuaucuacagcaccguggccuccucucucguccuggugguuagccugggcgcgauuuccuuuuggaugugcucuaacggaagccuccagugcagaaucuguauuuga

SEQ ID NO: 197742 - RNA, 1701 nt, Artificial Sequence
  derived and/or modified CDS sequence (opt5) from hemagglutinin__InfluenzaA__ADM26283
augaaggccauccuggugguccuccuguacaccuucacaacggcuaacgccgacacccuuugcauuggcuaucacgcgaauaacagcacagauaccguugacacagugcuggagaaaaaugugaccgucacacauuccgugaaccuccuggaagauaagcacaaugggaaacuuuguaagcugagaggaguugcuccccuccaucugggcaaaugcaacaucgccggguggauucugggaaauccugagugugaaucucucagcaccgccuccucuuggagcuacaucguggagacguccucuagcgacaacgggaccugcuauccgggcgauuuuauugacuacgaagaacugcgggagcagcuuuccagcgucucuuccuucgaacgcuuugagaucuuccccaagacaagcucuuggccuaaucacgauuccaacaagggagugaccgcugccuguccccaugcuggcgccaagagcuuuuauaaaaaucugaucuggcucguuaaaaagggcaacucuuacccuaaacuguccaagagcuauauuaaugacaaggggaaagaagugcuuguccuguggggaauccaccaccccuccacaucugcggaucaacagagccucuaccagaacgccgacgcuuacguguucgugggcaccuccagauauagcaagaaauuuaagccugagauugccauccggccgaaaguccgcgagcaggaagggagaaugaauuacuauuggacgcugguugagcccggagauaagauuacauucgaagcuaccggcaaccugguggugccucgguacgccuuugcgauggagcgcaacgccgggucuggaaucauuaucuccgacacacccguccaugauugcaauaccaccugucaaacaccuaaaggcgcuaucaacacgagccuccccuuccagaauauucacucuaucaccauuggcaagugcccgaaguaugugaaaagcacaaagcugagacuugccaccgggcugcggaacguuccuuccauccagucucgcggacucuuuggcgcuauugccggguucaucgaaggaggcuggacagggaugguggacggaugguacggcuaucaucaccagaaugagcaaggcagcggguacgccgcugaccugaaauccacccagaacgcgaucgaugagauuacgaauaaggucaacagcgugaucgagaaaaugaauacacaguuuaccgccguuggaaaggaguucaaccaccuugaaaagagaauugagaaucugaacaaaaagguggacgauggcuuccucgacaucuggaccuacaaugcugaacugcugguccuccuggagaacgagcggacacuugauuaucaugacucuaaugugaaaaaccuguacgaaaagguccgcucccagcucaaaaacaaugccaaggagauugggaacggauguuuugaguucuaucacaagugcgauaauaccuguauggaaagcgugaaaaacggcacauacgacuaucccaaguacucugaagaggccaaacugaauagagagaagaucgaugggguuaaacuugaauccacgcggaucuaucaaauucuggcuaucuacagcaccguggccuccucucucguccuggugguuagccugggcgcgauuuccuuuuggaugugcucuaacggaagccuccagugccgcaucuguauuuga

SEQ ID NO: 197743 - RNA, 1701 nt, Artificial Sequence; identical to SEQ ID NO: 196770
  derived and/or modified CDS sequence (opt5) from hemagglutinin__InfluenzaA__ADM26284

SEQ ID NO: 197744 - RNA, 1701 nt, Artificial Sequence; identical to SEQ ID NO: 196770
  derived and/or modified CDS sequence (opt5) from hemagglutinin__InfluenzaA__ADM26285

SEQ ID NO: 197745 - RNA, 1701 nt, Artificial Sequence
  derived and/or modified CDS sequence (opt5) from hemagglutinin__InfluenzaA__ADM26784
augaagaccaucauugcccugagcuacauccucugccugguguucgcucagaaacuucccggcaacgacaauuccacagccacgcugugucucgggcaccaugcggucccuaacggaaccauuguuaagacaaucaccaaugaucaaauugaggugacaaacgcuaccgaacuggugcagucuagcuccacaggcgagaucugcgacucuccgcaccagauccuugauggggaaaauuguacccugauugacgcccuccugggagauccccagugcgacggcuuucaaaacaaaaagugggaucuguucgucgagagaagcaaagccuauuccaauuguuacccuuaugacgugcccgauuacgcuucucuccggagccugguugccuccagcgggacgcuugaauuuaacaaugagucuuucaacuggaccggagugacacagaauggcaccuccagcgcuugcaugcgcagaucuaacaauuccuuuuucagccggcugaacuggcucacacaucugaaguuuaaguauccugcccuuaaugucaccaugcccaacaacgagcaguucgacaaacuguacaucuggggcgugcaccauccugggacggauaaugaccagauuuuucucuaugcgcaagccucuggacgcaucacaguuuccaccaagagaagccagcagacagugauuccgaacaucggcucccggccccgcgucagaaauauuccuucucggaucagcaucuacuggaccauugugaaacccggggauauccugcugauuaacuccaccggaaaucucaucgcuccucgcggcuacuucaagauuagaagcgggaaaucuuccaucaugcggagcgacgcccccaucggaaaguguaacucugaaugcauuacaccgaauggcagcaucccuaacgacaagcccuuucagaaugugaaccgcauuacguauggcgcuuguccuagauacgucaaacaaaauacccugaaacuugccacagggaugcggaacguucccgagaagcagacccgcggaaucuucggcgcgauugccggguuuaucgaaaauggaugggagggcaugguggaugggugguauggauucagacaccagaacuccgagggccggggccaagcugccgaccugaagucuacacaggcugccaucgaucagauuaaugggaaacucaacagacugaucggaaagaccaacgaaaaauuccaccagauugagaaggaauuuagcgagguggaaggccgcauccaagaccuugagaaguacgucgaggauacgaaaauugaccugugguccuauaaugccgaacuccugguggcucuggagaaccagcauacaaucgaucucaccgacagcgaaaugaauaagcuguucgagaaaaccaagaaacagcuucgggaaaacgcggaggauauggggaauggaugcuuuaagauuuaccacaagugugacaacgccugcaucggcucuaucagaaaugggacauaugaucaugacguuuaccgcgacgaggcucugaacaaucgguuccagauuaaaggcguggaacucaaguccggauacaaagauuggauccuguggauuagcuuugccaucucuugcuuccuucugugugucgcccuccugggcuuuauuaugugggcuugccaaaaggggaacaucagauguaauaucugcauuuga

SEQ ID NO: 197746 - RNA, 1701 nt, Artificial Sequence; identical to SEQ ID NO: 194506
  derived and/or modified CDS sequence (opt5) from hemagglutinin__InfluenzaA__ADM26795

SEQ ID NO: 197747 - RNA, 1701 nt, Artificial Sequence
  derived and/or modified CDS sequence (opt5) from hemagglutinin__InfluenzaA__ADM26817
augaagaccacaaucgcccugagccacauucucugccugguguucgcucagaaacuucccggcaacgacaauuccacggccacccugugucucgggcaucacgcggucccuaacggaacaaucguuaagaccauuacaaaugaucaaaucgaggugaccaacgcuacagaacuggugcagucuagcuccgccggcgagauuugcgacucuccgcaucagauccuugauggggaaaauuguacccugaucgacgcccuccugggagauccccagugcgacggcuuucaaaacaaaaagugggaucuguucgucgagagacggcgcgcuuacagcaauuguuauccuuacgacgugcccgauuaugccucccucagaucucugguugcuagcuccgggacgcuugaauuuaacaaugagagcuucaacuggaccggagugacacagaauggcaccucuuccgccugcauucggcgcagcaacaauagcuuuuucuccagacugaacuggcucacacaccugaauuuuaaauacccugcgcuuaacgucaccaugcccaacaaugagcaguucgacaagcuguauaucuggggcgugcaucacccugggacggauaaggaccagauuuuucucuacgcccaagcuagcggacggaucacaguuucuaccaaacgcucccagcaggccgugauuccgaacaucggcagcagaccccggguccgcaauauuccuuccagaaucucuaucuauuggacaauugugaagcccggggauauccugcugauuaacagcaccggaaaucucaucgcuccucggggcuacuucaaaauucgcuccgggaagucuucuaucaugagauccgacgcccccaucggaaaauguaacagcgaaugcauuaccccgaauggcucuaucccuaacgacaagcccuuucagaaugugaaccggauuacauacggcgcguguccucgcuaugucaagcaaagcacgcugaaacuugccaccgggaugagaaauguucccgagaagcagacacggggaaucuucggcgcuauugccggguuuaucgaaaacggaugggagggcaugguggaugggugguacggauucagacaccaaaauuccgagggccgcggccaggcugccgaccugaaaucuacccaggccgcuaucgaucagauuaacgggaagcucaaucggcugaucggaaaaacaaacgaaaaguuccaucagauugagaaagaauuuagcgagguggaaggcagaauccaagaccuugagaaguaugucgaggauaccaagauugaccugugguccuacaacgcggaacuccugguggcccuggagaaucagcacacgaucgaucucacagacagcgaaaugaacaaacuguucgagaagaccaaaaagcagcuucgcgaaaaugcugaggauauggggaacggaugcuuuaaaauuuaucauaagugugacaaugccugcaucggcucuauccggaacgggaccuacgaucacgacguuuauagagacgaggcccugaauaaccgcuuccagauuaagggcguggaacucaaauccggauacaaggauuggauccuguggauuagcuuugcuaucucuugcuuccuucugugugucgcccuccugggcuuuauuaugugggcgugccaaaaagggaauauccgguguaacaucugcauuuga

SEQ ID NO: 197748 - RNA, 1704 nt, Artificial Sequence
  derived and/or modified CDS sequence (opt5) from hemagglutinin__InfluenzaA__ADM31424
auggagaagaucgugcugcuguucaccacaauuagccuggucaaauccgaccacaucugcauuggcuaccaugccaacaauucuacggaacagguugauaccaucauggagaagaacgugacagugacccacgcucaagacauucuugagaaaacacauaaugggaagcugugugaucucaacggagucaaaccccugauccuuaaggacugcagcguggccggcuggcugcucgggaauccucugugugaugaauuuaucaacguuccggaaugguccuauauuguggagaaggcgaaucccgcuaacgaccugugcuacccuggaaauuucaacgauuaugaggaacucaaacaccuccuuucuagaaucaaucauuuugagaagauucagaucauucccaaagacagcugguccgaucacgaagccucucugggcgucagcgccgcuuguuccuaccaggggaacagcucuuucuuucggaaugugguuuggcucaucaagaaagacaacgccuauccuaccauuaagaaggauuacaauaacacaaaccaggaggaccugcuugugcuguggggaauccaccaucccaaugaugaggcugaacaaacccgccucuaucagaacccuacgaccuacaucuccauuggcacaagcacccugaaucagagacuggucccgaaaaucgccacacggucuaagauuaacggccaguccgggcgcaucgacuucuuuuggaccauucucaaacccaaugacgcgauccacuucgagagcaacggaaauuuuaucgccccugaauacgcuuauaagauugugaaaaagggcgauucuacgaucaugaaauccgagguggaauacgggaacugcaauacaagaugucaaacccccauuggagccaucaacagcuccaugccuuuccauaauauucacccccugacaaucggcgagugcccgaaguaugucaagucuaacaaacuuguucuggcuaccgggcuccggaauagcccucagcgcgagagacggcgcaagagaggacuguuuggcgccaucgcgggcuucauugaagggggauggcagggcaugguggacgggugguacggauaucaccauuccaacgagcagggcagcggguacgccgcugauaaagaaucuacccaaaaggccaucgacggagugacaaauaaagucaacuccauuaucgauaagaugaacacgcaguuugaggcugugggccgggaguucaauaaccuugaacgcagaauugagaaucugaacaagaaaauggaagacggcuuccucgauguuuggaccuauaaugccgagcugcuggugcucauggaaaacgagcggacacuggacuuucacgauagcaaugucaagaaccuuuacgacaaagugcgccugcagcucaaggauaaugccaaagaacuggggaacggauguuucgaguuuuaccauaagugcaauaacgaguguauggaaucuguuagaaauggcaccuaugacuacccccaauauagcgaggaagcucggcuuaagagagaggagaucuccggggugaaacuggaaucuauuggaaucuaccagauccucagcauuuauuccacagucgcgagcucucuggugcuggccaucaugauggcuggccucucccuguggaugugcagcaacgggucucuucagugccgcauuuguaucuga

SEQ ID NO: 197749 - RNA, 1701 nt, Artificial Sequence; identical to SEQ ID NO: 197342
  derived and/or modified CDS sequence (opt5) from hemagglutinin__InfluenzaA__ADM31478

SEQ ID NO: 197750 - RNA, 1701 nt, Artificial Sequence
  derived and/or modified CDS sequence (opt5) from hemagglutinin__InfluenzaA__ADM31488
augaaggccauccuggugguccuccuguacaccuucgcuacagccaacgcggacacgcuuugcauuggcuaucacgcuaauaacagcaccgauacaguugacaccgugcuggagaaaaaugugacagucacccauuccgugaacauccucgaagauaagcacaaugggaaacuguguaaacuuagaggaguugcuccccugcaucucggcaagugcaacauugccggguggauccugggaaauccugagugugaaucucugagcacagccuccucuuggagcuacauuguggagaccuccucuagcgacaacggcacgugcuauccgggggauuuuaucgacuacgaagaacuccgggagcagcuguccagcgucucuuccuucgaacgcuuugagaucuuccccaagaccagcucuuggccuaaucacgauuccaacaagggagugacagccgcuuguccccaugccggcgcgaaaucuuuuuauaagaaucuuauuuggcugguuaaaaagggcaacagcuacccuaaacucuccaagagcuauaucaaugacaaggggaaagaagugcugguccuuuggggcauucaccaccccuccaccucugccgaucaacagagccuguaccagaacgcugacgccuacguguucgugggauccagcaaguauucuaaaaaguuuaaaccugagaucgcuauuagaccgaagguccgggaucaggaggggcgcaugaauuacuauuggacacucguugaacccggagacaaaaucaccuucgaggccacgggcaaccugguggugccuagauacgcguuugccauggaacggaacgcuggguccggaauuaucaucagcgauacacccguccaugacugcaauaccacaugucaaaccccuaagggcgccauuaacaccucucugcccuuccagaauauccacccgauuacaaucggcaagugcccuaaauauguuaagagcacgaaacuccgccuggcuaccgggcuuagaaacgugcccuccauucagucucggggacuguuuggcgccaucgccggguucaucgagggaggcuggacagggaugguggacggaugguacggcuaucaucaccagaaugaacaaggcagcggguacgcugcggaucucaaguccacccagaacgccauugacgagaucacaaauaaagucaacagcgugauugagaagaugaauacccaguuuacggcuguuggaaaggaguucaaccaccuggagaaacgcaucgaaaaucuuaacaagaaaguggaugacggcuuccuggauauuuggacauacaaugccgagcuccugguccugcucgaaaacgagagaacccuggacuaucaugauucuaaugugaagaaccuuuacgagaaaguccggucccagcugaagaacaaugccaaggaaguggggaacggauguuuugaguucuaucacaaaugcgacaauaccuguauggaaagcguuaagaacggcacauacgauuauccuaaauacucugaggaagcuaagcucaaucgcgaggagaucgacggggugaaacuggaauccaccagaaucuaucaaauucuugccaucuacagcacagcggcuuccucucugguccucgugguuagccugggcgccauuuccuuuuggaugugcucuaacggaagccugcagugccggaucuguauuuga

SEQ ID NO: 197751 - RNA, 1701 nt, Artificial Sequence
  derived and/or modified CDS sequence (opt5) from hemagglutinin__InfluenzaA__ADM31498
augaaggccauccuggugguccuccuguacaccuucgcuacagccaacgcggacacgcuuugcauuggcuaucacgcuaauaacagcaccgauacaguugacaccgugcuggagaaaaaugugacagucacccauuccgugaaccuccuggaagauaagcacaaugggaaacuuuguaagcugagaggaguugcuccccuccaucugggcaaaugcaacaucgccggguggauucugggaaauccugagugugaaucucucagcacagccuccucuuggagcuacaucguggagaccuccucuagcgacaacggcacgugcuauccgggggauuuuauugacuacgaagaacugcgggagcagcuuuccagcgucucuuccuucgaacgcuuugagaucuuccccaagaccagcucuuggccuaaucacgauuccaacaagggagugacagccgcuuguccccaugccggcgcgaaaucuuuuuauaagaaucugaucuggcucguuaaaaagggcaacagcuacccuaaacuguccaagagcuauauuaaugacaaggggaaagaagugcuuguccuguggggaauccaccaccccuccaccucugccgaucaacagagccucuaccagaacgcugacgccuacguguucgugggcacauccagauauagcaagaaauuuaagccugagauugcuauccggccgaaaguccgcgaucaggaggggagaaugaauuacuauuggacccugguuaagcccggagacaaaauuacguucgaagccacaggcaaccugguggugccucgguacgcguuugccauggagcgcaacgcugggucuggaaucauuaucuccgauacccccguccaugacugcaauacaaccugucaaaccccuaagggcgccaucaacacaagccuccccuuccagaauauucacccgaucacgauuggcaagugcccuaaauaugugaagucuaccaaacugagacuugcuacagggcugcggaacguucccagcauccagucccgcggacucuuuggcgccauugccggguucaucgaaggaggcuggaccgggaugguggacggaugguacggcuaucaucaccagaaugagcaaggcucuggguacgcugcggaucugaaaagcacacagcacgccaucgacgaaauuaccaacaaagucaauuccgugaucgagaagaugaacacgcaguuuacagcuguuggaaaggaguucaaucaucuugaaaagagaauugagaaccugaauaagaaaguggaugacggcuuccucgauaucuggaccuacaacgccgaacugcugguccuccuggagaaugaacggacccuugacuaucacgauagcaacgugaagaaucuguacgagaaaguccgcucucagcucaagaacaacgccaaggagauugggaauggauguuuugaguucuaucauaaaugcgacaacacauguauggaguccgugaagaauggcaccuacgauuauccuaaauacagcgaagaggcuaagcugaacagagaagagaucgacgggguuaaacuugagucuacacggaucuaucaaauucuggccaucuacuccacgguggcgagcucccucguccuggugguuucucugggcgcuauuagcuuuuggaugugcuccaauggaucucuccagugccgcaucuguauuuga

SEQ ID NO: 197752 - RNA, 1701 nt, Artificial Sequence
  derived and/or modified CDS sequence (opt5) from hemagglutinin__InfluenzaA__ADM31508
augaaggccauccuggugguccuccuguacaccuucgcuacagccaacgcggacacgcuuugcauuggcuaucacgcuaauaacagcaccgauacaguugacaccgugcuggagaagaaugugacagucacccauuccgugaaccuccuggaagauaagcacaaugggaaacuuuguaagcugagaggaguugcuccccuccaucugggcaaaugcaacaucgccggguggauucugggaaauccugagugugaaucucucagcacagccuccucuuggagcuacaucguggagaccuccucuagcgacaacggcacgugcuauccgggggauuuuauugacuacgaagaacugcgggagcagcuuuccagcgucucuuccuucgaacgcuuugagaucuuccccaagaccagaagcuggccuaaucacgauucuaacaagggagugacagccgcuuguccccaugccggcgcgaaauccuuuuauaagagccugaucuggcucguuaaaaagggcaauucuuacccuaaacuguccaagagcuauauuaacgacaaggggaaagaagugcuuguccuguggggaauccaccaccccuccaccucugccgaucaacagagccucuaccagaaugcugacgccuacguguucgugggcacaucccgguauagcaagaaauuuaagccugagauugcuauccgcccgaaagucagagaucaggaggggcggaugaacuacuauuggacccugguugaacccggagacaagauuacguucgaggccacaggcaaucugguggugccucgcuacgcguuugccauggaaagaaacgcugggucuggaaucauuaucuccgauacccccguccaugacugcaacacaaccugucaaaccccuaaaggcgccaucaauacaagccuccccuuccagaacauucacccgaucacgauuggcaagugcccuaaguaugugaaaucuaccaagcugcggcuugcuacagggcugcgcaauguucccagcauccaguccagaggacucuuuggcgccauugccggguucaucgagggaggcuggaccgggaugguggacggaugguacggcuaucaucaccagaacgaacaaggcucuggguacgcugcggaucugaaaagcacacagcacgccaucgacgagauuaccaauaaggucaacuccgugaucgagaaaaugaauacgcaguuuacagcuguuggaaaggaguucaaccaucuugagaagcggauugaaaaucugaacaaaaagguggaugacggcuuccucgauaucuggaccuacaaugccgagcugcugguccuccuggaaaacgagcgcacccuugacuaucacgauagcaaugugaaaaaccuguacgagaaggucagaucucagcucaaaaauaacgccaaggaaauugggaacggauguuuugaguucuaucauaagugcgacaauacauguauggaauccgugaaaaacggcaccuacgauuauccuaaguacagcgaggaagcuaaacugaaucgggaggagaucgacgggguuaaacuugaaucuacacgcaucuaucaaauucuggccaucuacuccacgguggcgagcucccucguccuggugguuucucugggcgcuauuagcuuuuggaugugcuccaacggaucucuccagugcagaaucuguauuuga

SEQ ID NO: 197753 - RNA, 1701 nt, Artificial Sequence
  derived and/or modified CDS sequence (opt5) from hemagglutinin__InfluenzaA__ADM31518
augaaggccauccuggugguccuccuguacaccuucgcuacagccaacgcggacacgcuuugcauuggcuaucacgcuaauaacagcaccgauacaguugacaccgugcuggagaagaaugugacagucacccauuccgugaaccuccuggaagauaagcacaaugggaaacuuuguaagcugagaggaguugcuccccuccaucugggcaaaugcaacaucgccggguggauucugggaaauccugagugugaaucucucagcacagccuccucuuggagcuacaucguggagaccuccucuagcgacaacggcacgugcuauccgggggauuuuauugacuacgaagaacugcgggagcagcuuuccagcgucucuuccuucgaacgcuuugagaucuuccccaagaccagcucuuggccuaaucacgauuccaacaagggagugacagccgcuuguccccaugccggcgcgaaaucuuuuuauaagaaucugaucuggcucguuaaaaagggcaacagcuacccuaaacuguccaagagcuaugugaaugacaaggggaaagaaguccuugugcuguggggcauucaccaccccuccaccucugccgaucaacagagccucuaccagaacgcugacgccuacguguucgucggaacauccagauauagcaagaaauuuaagccugagaucgcuauucggccgaaaguucgcgaucaggaggggagaaugaauuacuauuggacccugguggaacccggagacaagaucacguucgaggccacaggcaaccugguggucccucgguacgcguuugccauggaacgcaacgcugggucuggaauuaucauuuccgauacccccgugcaugacugcaauacaaccugucaaaccccuaaaggcgccaucaacacaagccuccccuuccagaauauccacccgauuacgaucggcaagugcccuaaguauguuaaaucuaccaagcugagacuugcuacagggcugcggaacauucccagcauccagucccgcggacucuuuggcgccauugccggguucaucgagggaggcuggaccgggaugguggacggaugguacggcuaucaucaccagaaugaacaaggcucuggguacgcugcggaucugaaaagcacacagaacgccaucgacgagauuaccaauaaggucaacuccgugaucgagaaaaugaauacgcaguuuacagcuguuggaaaggaguucaaccaccuugagaagagaauugaaaaucugaacaaaaagguggaugacggcuuccucgauaucuggaccuacaaugccgagcugcugguccuccuggaaaacgagcggacccuugacuaucaugauagcaaugugaaaaaccuguacgagaagguccgcucucagcucaaaaacaaugccaaggaaauugggaacggauguuuugaguucuaucacaagugcgacaauacauguauggaauccgugaaaaacggcaccuacgauuauccuaaguacagcgaggaagcuaaacugaauagagaggagaucgacgggguuaaacuugaaucuacacggaucuaucaaauucuggccaucuacuccacgguggcgagcucccucguccuggugguuucucugggcgcuauuagcuuuuggaugugcuccaacggaucucuccagugccgcaucuguauuuga

SEQ ID NO: 197754 - RNA, 1701 nt, Artificial Sequence
  derived and/or modified CDS sequence (opt5) from hemagglutinin__InfluenzaA__ADM31528
augaaggccauccuggugguccuccuguacaccuucgcuacagccaacgcggacacgcuuugcauuggcuaucacgcuaauaacagcaccgauacaguugacaccgugcuggagaaaaaugugacagucacccauuccgugaaccuccuggaagauaagcacaaugggaaacuuuguaagcugagaggaguugcuccccuccaucugggcaaaugcaacaucgccggguggauucugggaaauccugagugugaaucucucagcacagccuccucuuggagcuacaucguggagaccuccucuagcgacaacggcacgugcuauccgggggauuuuauugacuacgaagaacugcgggagcagcuuuccagcgucucuuccuucgaacgcuuugagauguuccccaagaccagcucuuggccuaaucacgauuccaacaagggagugacagccgcuuguccccaugccggcgcgaaaucuuuuuauaagaaucugaucuggcucguuaaaaagggcaacagcuacccuaaacuguccaagagcuauaucaaugacaaggggaaagaagugcuuguccuguggggcauucaccaccccuccaccucugccgaucaacagagccucuaccagaacgcugacgccuacguguucgugggaacauccagauauagcaagaaauuuaagccugagaucgcuauucggccgaaaguccgcgaucaggaggggagaaugaauuacuauuggacccugguugaacccggagacaagaucacguucgaggccacaggcaaccugguggugccucgguacgcguuugccauggaacgcaacgcugggucuggaauuaucauuuccgauacccccguccaugacugcaauacaaccugucaaaccccuaaaggcgccaucaacacaagccuccccuuccagaauauccacccgauuacgaucggcaagugcccuaaguaugugaaaucuaccaagcugagacuugcuacagggcugcggaacguucccagcauucagucccgcggacucuuuggcgccaucgccggguucauugagggaggcuggaccgggaugguggacggaugguacggcuaucaucaccagaaugaacaaggcucuggguacgcugcggaucugaaaagcacacagaacgccaucgacaagaucaccaauaaagucaacuccgugauugagaagaugaauacgcaguuuacagcuguuggaaaggaguucaaccaccuugagaaaagaaucgagaaucugaacaagaaaguggaugacggcuuccucgauauuuggaccuacaaugccgaacugcugguccuccuggagaacgaacggacccuugacuaucaugauagcaaugugaagaaccuguacgagaaaguccgcucucagcucaagaacaaugccaaggagguggggaacggauguuuugaguucuaucacaaaugcgacaauacauguauggaauccguuaagaacggcaccuacgauuauccuaaauacagcgaagaggcuaagcugaauagagaagagaucgacggggugaaacuugagucuacacggauuuaucaaauccuggccaucuacuccacggucgcgagcucccucgugcugguugugucucugggcgcuauuagcuuuuggaugugcuccaacggaucucuccagugccgcaucuguauuuga

SEQ ID NO: 197755 - RNA, 1701 nt, Artificial Sequence
  derived and/or modified CDS sequence (opt5) from hemagglutinin__InfluenzaA__ADM31538
augaaggccauccuggugguccuccuguacaccuucgcuacagccaacgcggacacgcuuugcauuggcuaucacgcuaauaacagcaccgauacaguugacaccgugcuggagaaaaaugugacagucacccauuccgugaaccuccuggaagauaagcacgacgggaaacuuuguaagcugagaggaguugcuccccuccaucugggcaaaugcaauaucgccggguggauucugggaaacccugagugugaaucucucagcacagccuccucuuggagcuacaucguggagaccuccucuagcgauaauggcacgugcuauccgggggacuuuauugauuacgaagaacugcgggagcagcuuuccagcgucucuuccuucgaacgcuuugagaucuuccccaagaccagcucuuggccuaaccacgacuccaauaagggagugacagccgcuuguccccaugccggcgcgaaauccuuuuauaagaaccugaucuggcucguuaaaaagggcaauucuuacccuaaacuguccaagagcuauauuaacgauaaggggaaagaagugcuuguccuguggggaauccaccaccccuccaccucugccgaccaacagagccucuaccagaaugcugaugccuacguguucgugggcacauccagauauagcaagaaauuuaagccugagauugcuauccggccgaaaguccgcgaccaggaggggagaaugaacuacuauuggacccugguugaacccggagauaagauuacguucgaggccacaggcaaucugguggugccucgguacgcguuugccauggaacgcaacgcugggucuggaaucauuaucuccgacacccccguccaugacugcaacacaaccugucaaaccccuaaaggcgccaucaauacaagccuccccuuccagaacauucacccgaucacgauuggcaagugcccuaaguaugugaaaucuaccaagcugagacuugcuacagggcugcggaauauccccagcauucagucccgcggacucuuuggcgccaucgccggguucaucgagggaggcuggaccgggaugguugauggaugguacggcuaucaucaccagaacgaacaaggcucuggguacgcugcggaccugaaaagcacacagaaugccauugauaagaucaccaacaaagugaauagcgucauugagaagaugaacacgcaguuuacagcugugggaaaggaguucaaucaccuugagaaaagaaucgagaaccugaauaagaaaguugacgauggcuuccucgacauuuggaccuacaacgccgaacugcuggugcuccuggagaaugaacggacccuugauuaucaugacagcaacgucaagaaucuguacgagaaagugcgcucucagcucaagaacaacgccaaggagaucgggaauggauguuuugaguucuaucacaaaugcgauaacacauguauggaauccgucaagaauggcaccuacgacuauccuaaauacagcgaagaggcuaagcugaacagagaagagaucgauggggugaaacuugagucuacacggauuuaucaaauccuggccauuuacuccacgguugcgagcucccucgugcuggucgugucucugggcgcuaucagcuuuuggaugugcuccaauggaucucuccagugccgcauuuguaucuga

SEQ ID NO: 197756 - RNA, 1701 nt, Artificial Sequence
  derived and/or modified CDS sequence (opt5) from hemagglutinin__InfluenzaA__ADM31548
augaaggccauccuggugguccuccuguacaccuucgcuacagccaacgcggacacgcuuugcauuggcuaucacgcuaauaacagcaccgauacaguugacaccgugcuggagaagaaugugacagucacccauuccgugaaccuccuggaagauaagcacaaugggaaacuuuguaagcugagaggaguugcuccccuccaucugggcaaaugcaacaucgccggguggauucugggaaauccugagugugaaucucucagcacagccuccucuuggagcuacaucguggagaccuccucuagcgacaacggcacgugcuauccgggggauuuuauugacuacgaagaacugcgggagcagcuuuccagcgucucuuccuucgaacgcuuugagaucuuccccaagaccagcucuuggccuaaucacgauuccaacaagggagugacagccgcuuguccccaugccggcgcgaaaucuuuuuauaagaaucugaucuggcucguuaaaaagggcaacagcuacccuaaacuguccaagagcuauauuaaugacaaggggaaagaagugcuuguccuguggggaauccaccaccccuccaccucugccgaucaacagagccucuaccagaacgcugacgccuacguguucgugggcacauccagauauagcaagaaauuuaagccugaggucgcuauucggccgaaaguucgcgaucaggaggggagaaugaauuacuauuggacccugguggaacccggagacaagaucacguucgaggccacaggcaaccugguggucccucgguacgcguuugccauggaacgcaacgcugggucuggaauuaucauuuccgauacccccgugcaugacugcaauacaaccugucaaaccccuaaaggcgccaucaacacaagccuccccuuccagaauauccacccgauuacgaucggcaagugcccuaaguauguuaaaucuaccaagcugagacuugcuacagggcugcggaacauucccagcauccagucccgcggacucuuuggcgccauugccggguucaucgagggaggcuggaccgggaugguggacggaugguacggcuaucaucaccagaaugaacaaggcucuggguacgcugcggaucugaaaagcacacagaacgccaucgacgagauuaccaauaaggucaacuccgugaucgagaaaaugaauacgcaguuuacagcuguuggaaaggaguucaaccaccuugagaagagaauugaaaaucugaacaaaaagguggaugacggcuuccucgauaucuggaccuacaaugccgagcugcugguccuccuggaaaacgagcggacccuugacuaucaugauagcaaugugaaaaaccuguacgagaagguccgcucucagcucaaaaacaaugccaaggaaauugggaacggauguuuugaguucuaucacaagugcgacaauacauguauggaauccgugaaaaacggcaccuacgauuauccuaaguacagcgaggaagcuaaacugaauagagaggagaucgacgggguuaaacuugaaucuacacggaucuaucaaauucuggccaucuacuccacgguggcgagcucccucguccuggugguuucucugggcgcuauuagcuuuuggaugugcuccaacggaucucuccagugccgcaucuguauuuga

SEQ ID NO: 197757 - RNA, 1701 nt, Artificial Sequence
  derived and/or modified CDS sequence (opt5) from hemagglutinin__InfluenzaA__ADM31558
augaaggccauccuggugguccuccuguacaccuucgcuacagccaacgcggacacgcuuugcauuggcuaucacgcuaauaacagcaccgauacaguugacaccgugcuggagaaaaaugugacagucacccauuccgugaaccuccuggaagauaagcacaaugggaaacuuuguaagcugagaggaguugcuccccuccaucugggcaaaugcaacaucgccggguggauucugggaaauccugagugugaaucucucagcacagccuccucuuggagcuacaucguggagaccuccucuagcgacaacggcacgugcuauccgggggauuuuauugacuacgaagaacugcgggagcagcuuuccagcgucucuuccuucgaacgcuuugagaucuuccccaagaccagcucuuggccuaaucacgauuccaacaagggagugacagccgcuuguccccaugccggcgcgaaaucuuuuuauaagaaucugaucuggcucguuaaaaagggcaacagcuacccuaaacuguccaagagcuauauuaaugacaaggggaaagaagugcuuguccuguggggaauccaccaccccuccaccucugccgaucaacagagccucuaccagaacgcugacgccuacguguucgugggcacauccagauauagcaagaaauuuaagccugagauugcuauccggccgaaaguccgcgaucaggaggggagaaugaauuacuauuggacccugguugaacccggagacaagauuacguucgaggccacaggcaaccugguggugccucgguacgcguuugccauggaacgcaacgcugggucuggaaucauuaucuccgauacccccguccaugacugcaauacaaccugucaaaccccuaaaggcgccaucaacacaagccuccccuuccagaauauucacccgaucacgauuggcaagugcccuaaguaugugaaaucuaccaagcugagacuugcuacagggcugcggaacauccccagcauucagucccgcggacucuuuggcgccaucgccggguucaucgagggaggcuggaccgggaugguugacggaugguacggcuaucaucaccagaaugaacaaggcucuggguacgcugcggaucugaaaagcacacagaacgccauugacaagaucaccaauaaagugaacuccgucauugagaagaugaauacgcaguuuacagcugugggaaaggaguucaaccaccuugagaaaagaaucgagaaucugaacaagaaaguugaugacggcuuccucgauauuuggaccuacaaugccgaacugcuggugcuccuggagaacgaacggacccuugacuaucaugauagcaaugucaagaaccuguacgagaaagugcgcucucagcucaagaacaaugccaaggagaucagaaacggguguuuugaguucuaucacaaaugcgacaauacauguauggaauccgucaagaacggaaccuacgauuauccuaaauacagcgaagaggcuaagcugaaucgggaagagaucgacggcgugaaacuugagucuacacgcauuuaucaaauccuggccauuuacuccacgguugcgagcucccucgugcuggucgugucucugggggcuaucagcuuuuggaugugcuccaacggcucucuccagugcagaauuuguaucuga

SEQ ID NO: 197758 - RNA, 1701 nt, Artificial Sequence; identical to SEQ ID NO: 196338
  derived and/or modified CDS sequence (opt5) from hemagglutinin__InfluenzaA__ADM31568

SEQ ID NO: 197759 - RNA, 1701 nt, Artificial Sequence; identical to SEQ ID NO: 194741
  derived and/or modified CDS sequence (opt5) from hemagglutinin__InfluenzaA__ADM31578

SEQ ID NO: 197760 - RNA, 1701 nt, Artificial Sequence
  derived and/or modified CDS sequence (opt5) from hemagglutinin__InfluenzaA__ADM31588
augaaggccauccuggugguccuccuguacaccuucgcuacagccaacgcggacacgcuuugcauuggcuaucacgcuaauaacagcaccgauacaguugacaccauccuggagaagaaugugacagugacccauuccgucaaccuccuggaagauaagcacaaugggaaacuuuguaagcugagaggaguggcuccccuccaucugggcaaaugcaacauugccggguggauccugggaaauccugagugugaaucucucagcacagccuccucuuggagcuacauuguugagaccuccucuagcgacaacggcacgugcuauccgggggauuuuaucgacuacgaagaacugcgggagcagcuuuccagcgugucuuccuucgaacgcuuugagauguuccccaagaccagcucuuggccuaaucacgauuccaacaagggagucacagccgcuuguccccaugccggcgcgaaaucuuuuuauaagaaucugaucuggcucgugaaaaagggcaacagcuacccuaaacugaauaaguccuauauuaacgacaaggggaaagaaguucuugugcuguggggaauccaccaccccagcaccuccgccgaucaacagucucucuaccagaaugcugacgccuacgucuucgugggcacaagcagauauuccaagaaauuuaagaccgagauugcuauccggccuaaagugcgcgaucaggaggggagaaugaacuacuauuggacgcuggucgaaccgggagacaagauuacauucgaggccaccggcaaccugguugugccccgguacgcguuugccauggaacgcaaugcugggagcggaaucauuaucucugauacaccugugcaugacugcaacaccaccugucaaacacccaaaggcgccaucaauacgucccucccuuuccagaacauucaccccaucaccauuggcaagugcccgaaguaugucaaaagcacaaagcugagacuugcuaccgggcugcggaaugugccuucuauccagagccgcggacucuuuggcgccauugccggguucaucgagggaggcuggacagggaugguugacggaugguacggcuaucaucaccagaacgaacaaggcuccggguacgcugcggaucugaaaucuacccagaaugccaucgacgagauuacgaacaaggugaauagcgucaucgagaaaaugaacacacaguuuaccgcugugggaaaggaguucaaucaccuugagaagagaauugaaaaccugaauaaaaagguugaugacggcuuccucgauaucuggaccuacaacgccgagcugcuggugcuccuggaaaaugagcggacacuugacuaucaugauuccaacgucaaaaaccuguacgagaaggugcgcagccagcucaaaaauaacgccaaggaagucgggaauggauguuuugaguucuaucacaagugcgacaacaccuguauggaaucugugaaaaauggcacauacgauuaucccaaguacuccgaggaagcuaaacugaacagagaggagauugacgggguuaaacuugaaagcacgcggaucuaucaaauccuggccauuuacucuaccguggcguccagccucguccuggugguuucccugggcgcuaucucuuuuuggaugugcagcaauggaucccuccagugccgcauuuguaucuga

SEQ ID NO: 197761 - RNA, 1701 nt, Artificial Sequence
  derived and/or modified CDS sequence (opt5) from hemagglutinin__InfluenzaA__ADM31598
augaacgccauccuggugguccuccuguacaccuucgcuacagccaaugcggacacgcuuugcauuggcuaucacgcuaacaauagcaccgauacaguugacacccugcucgagaagaacgugacagugacccauuccgucaaucugcuugaagauaaacacaacgggaagcuguguaaacucagaggaguggcgccccugcaucugggcaagugcgacaucgccggguggauucucggaaauccugagugugaaucucugagcacagcuuccucuuggagcuacaucguugagaccuccucuagcgauaacggcacgugcuauccgggggacuuuauugauuacgaagaacuucgggagcagcuguccagcgugucuuccuucgaacgcuuugagaucuuccccaaaaccagcucuuggccugaccacgauuccaauaagggagucacagccgcuuguccccaugccggcgccaagagcuuuuauaaaaaccucaucuggcuggugaagaaaggcaauucuuacccuaaacuuuccaagagcuauauuaacgacaaggggaaggaaguucuggugcucuggggaauccaccaccccuccaccucugccgaucaacagagccuguaccagaaugcugacgccuacgucuucgugggcacauccagauauagcaaaaaguuuaaaccugagauugcuauccggccgaaggugcgcgaucaggaggggagaaugaacuaccauuggacccuggucgaacccggagacaaaauuacguucgaggccacaggcaaucucguugugccucgguaugcguuugccauggaacgcaacgcugggucuggaaucauuaucuccgacgcccccgugcacgauugcaacaccacaugucaaaccccuaagggcgcuaucaauaccagccugcccuuccagaacauucauccgaucacaauuggcaaaugcccuaaguacgucaagucuacgaaacuuagacuggccaccgggcuccggaaugugcccagcauccagucccgcggacuguuuggcgccauugcuggguucaucgagggaggcuggacagggaugguugacggaugguauggcuaccaccaccagaacgaacaaggcucuggguaugcggccgaucuuaagagcacccagaaugcuaucgacgagauuacaaacaaaaucaauuccgugauugagaagaugaacacccaguuuacggccgucggaaaagaguucaaucaucuggagaagagaaucgaaaaccucaauaagaaaguggaugacggcuuccuggauauuuggacauacaacgccgagcugcucguucugcuugaaaaugagcggacccuggacuaccacgauagcaacgugaagaaucucuaugagaaaguccgcucucagcugaagaacaacgcuaaagaaaucgggaauggauguuuugaguucuaccauaagugcgacaacaccuguauggaauccgugaagaauggcacauaugauuacccuaaauauagcgaggaagccaaacuuaacagagaggagaucgacggggucaagcuggaaucuacccggauuuaccaaauccucgcgauuuauuccacaguggcuagcucccugguucugguggucucucucggcgccaucagcuuuuggaugugcuccaauggaucucugcagugccgcauuuguaucuga

SEQ ID NO: 197762 - RNA, 1701 nt, Artificial Sequence
  derived and/or modified CDS sequence (opt5) from hemagglutinin__InfluenzaA__ADM31608
augaaggccauccuggugguccuccuguacaccuucgcuacaguuaacgccgacacgcuuugcauuggcuaucacgcgaauaacagcaccgauacaguggacaccgugcuggagaaaaaugucacagugacccauuccguuaaccuccuggaagauaagcacaaugggaaacuuuguaagcugagaggaguggcuccccuccaucugggcaaaugcaacaucgccggguggauucugggaaauccugagugugaaucucucagcacagccuccucuuggagcuacaucgucgagaccuccucuagcgacaacggcacgugcuauccgggggauuuuauugacuacgaagaacugcgggagcagcuuuccagcgugucuuccuucgaacgcuuugagaucuuccccaagaccagcucuuggccuaaucacgauuccaacaagggaguuacagcugccuguccccaugcuggcgccaagagcuuuuauaaaaaucugaucuggcucgugaaaaagggcaacucuuacccuaaacuguccaagagcuauauuaaugacaaggggaaagaaguccuugugcuguggggaauccaccaccccuccaccucugcggaucaacagagccucuaccagaacgccgacgcuuacguguucgucggcacauccagauauagcaagaaauuuaagccugagauugccauccggccgaaaguucgcgaucaggaggggagaaugaauuacuauuggacccugguggaacccggagacaagauuacguucgaggcuacaggcaaccugguggucccucgguacgccuuugcgauggaacgcaacgccgggucuggaaucauuaucuccgauacccccgugcaugacugcaauacaaccugucaaaccccuaaaggcgcuaucaacacaagccuccccuuccagaauauucacccgaucacgauuggcaagugcccuaaguauguuaaaucuaccaagcugagacuugccacagggcugcggaacgugcccagcauccagucccgcggacucuuuggcgcuauugccggguucaucgagggaggcuggaccgggauggucgacggaugguacggcuaucaucaccagaaugaacaaggcucuggguacgccgcugaucugaaaagcacacagaacgcgaucgacaagauuaccaauaaagugaacuccguuaucgagaagaugaauacgcaguuuacagccgugggaaaggaguucaaccaccuugagaaaagaauugagaaucugaacaagaaagucgaugacggcuuccucgauaucuggaccuacaaugcugaacugcuggugcuccuggagaacgaacggacccuugacuaucaugauagcaaugucaagaaccuguacgagaaagugcgcucucagcucaagaacaaugccaaggagauugggaacggauguuuugaguucuaucacaaaugcgacaauacauguauggaauccguuaagaacggcaccuacgauuauccuaaauacagcgaagaggccaagcugaauagagaagagaucgacggggugaaacuugagucuacacggaucuaucaaauucuggcuaucuacuccacggucgccagcucccucgugcugguugugucucugggcgcgauuagcuuuuggaugugcuccaacggaucucuccagugccgcaucuguauuuga

SEQ ID NO: 197763 - RNA, 1701 nt, Artificial Sequence; identical to SEQ ID NO: 196293
  derived and/or modified CDS sequence (opt5) from hemagglutinin__InfluenzaA__ADM31618

SEQ ID NO: 197764 - RNA, 1701 nt, Artificial Sequence; identical to SEQ ID NO: 195905
  derived and/or modified CDS sequence (opt5) from hemagglutinin__InfluenzaA__ADM31628

SEQ ID NO: 197765 - RNA, 1701 nt, Artificial Sequence; identical to SEQ ID NO: 197644
  derived and/or modified CDS sequence (opt5) from hemagglutinin__InfluenzaA__ADM31638

SEQ ID NO: 197766 - RNA, 1701 nt, Artificial Sequence; identical to SEQ ID NO: 196161
  derived and/or modified CDS sequence (opt5) from hemagglutinin__InfluenzaA__ADM31648

SEQ ID NO: 197767 - RNA, 1701 nt, Artificial Sequence; identical to SEQ ID NO: 196908
  derived and/or modified CDS sequence (opt5) from hemagglutinin__InfluenzaA__ADM31658

SEQ ID NO: 197768 - RNA, 1701 nt, Artificial Sequence; identical to SEQ ID NO: 196161
  derived and/or modified CDS sequence (opt5) from hemagglutinin__InfluenzaA__ADM31668

SEQ ID NO: 197769 - RNA, 1701 nt, Artificial Sequence; identical to SEQ ID NO: 194741
  derived and/or modified CDS sequence (opt5) from hemagglutinin__InfluenzaA__ADM31688

SEQ ID NO: 197770 - RNA, 1701 nt, Artificial Sequence
  derived and/or modified CDS sequence (opt5) from hemagglutinin__InfluenzaA__ADM31698
augaaggccauccuggugguccuccuguacaccuucgcuacagccaacgcggacacgcuuugcauuggcuaucacgcuaauaacagcaccgauacaguugacaccgugcuggagaaaaaugugacagucacccauuccgugaaccuccuggaagauaagcacaaugggaaacuuuguaagcugagaggaguugcuccccuccaucugggcaaaugcaacaucgccggguggauucugggaaauccugagugugaaucucucagcacagccuccucuuggagcuacaucguggagaccuccucuagcgacaacggcacgugcuauccgggggauuuuauugacuacgaagaacugcgggagcagcuuuccagcgucucuuccuucgaacgcuuugagaucuuccccaagaccagcucuuggccuaaucacgauuccaacaagggagugacagccgcuuguccccaugccggcgcgaaaucuuuuuauaagaaucugaucuggcucguuaaaaagggcaacagcuacccuaaacuguccaagagcuauauuaaugacaaggggaaagaagugcuuguccuguggggaauccaccaccccuccaccucugccgaucaacagagccucuaccagaacgcugacgccuacguguucgugggcacauccagauauagcaagaaauuuaagccugagauugcuauccggccgaaaguccgcgaucaggaggggagaaugaauuacuauuggacccugguugaacccggagacaagauuacguucgaggccacaggcaaccugguggugccucgguacgcguuugccauggaacgcaacgcugggucuggaaucauuaucuccgauacccccguccaugacugcaauacaaccugucaaaccccuaaaggcgccaucaacacaagccuccccuuccagaauauucacccgaucacgauuggcaagugcccuaaguaugugaaaucuaccaagcugagacuugcuacagggcugcggaacauccccagcauucagucccgcggacucuuuggcgccaucgccggguucaucgagggaggcuggaccgggaugguugacggaugguacggcuaucaucaccagaaugaacaaggcucuggguacgcugcggaucugaaaagcacacagaacgccauugacaagaucaccaauaaagugaacuccgucauugagaagaugaauacgcaguuuacagcugugggaaaggaguucaaccaccuugagaaaagaaucgagaaucugaacaagaaaguugaugacggcuuccucgauauuuggaccuacaaugccgaacugcuggugcuccuggagaacgaacggacccuugacuaucaugauagcaaugucaagaaccuguacgagaaagugcgcucucagcucaagaacaaugccaaggagaucgggaacggauguuuugaguucuaucacaaaugcgacaauacauguauggaauccgucaagaacggcaccuacgauuauccuaaauacagcgaagaggcuaagcugaauagagaagagaucgacggggugaaacuugagucuacacggauuuaucaaauccuggccauuuacuccacgguugcgagcucccucauccugguggucucucugggcgcuauuagcuuuuggaugugcuccaacggaucucuccagugccgcaucuguauuuga

SEQ ID NO: 197771 - RNA, 1701 nt, Artificial Sequence; identical to SEQ ID NO: 197646
  derived and/or modified CDS sequence (opt5) from hemagglutinin__InfluenzaA__ADM31708

SEQ ID NO: 197772 - RNA, 1701 nt, Artificial Sequence
  derived and/or modified CDS sequence (opt5) from hemagglutinin__InfluenzaA__ADM31718
augaaggccauccuggugguccuccuguacaccuucgcuacagccaacgcggacacgcuuugcauuggcuaucacgcuaauaacagcaccgauacaguugacaccgugcuggagaaaaaugugacagucacccauuccgugaaccuccuggaagauaagcacaaugggaaacuuuguaagcugagaggaguugcuccccuccaucugggcaaaugcaacaucgccggguggauucugggaaauccugagugugaaucucucagcacagccuccucuuggagcuacaucguggagaccuccucuagcgacaacggcacgugcuauccgggggauuuuauugacuacgaagaacugcgggagcagcuuuccagcgucucuuccuucgaacgcuuugagaucuuccccaagaccagcucuuggccuaaucacgauuccaacaagggagugacagccgcuuguccccaugccggcgcgaaaucuuuuuauaagaaucugaucuggcucguuaaaaagggcaacagcuacccuaaacuguccaagagcuauauuaaugacaaggggaaagaagugcuuguccuguggggaauccaccaccccuccaccucugccgaucaacagagccucuaccagaacgcugacacauacguguucgugggcaccuccagauauagcaagaaauuuaagccugagauugccauccggccgaaaguccgcgaucaggaggggagaaugaauuacuauuggacgcugguugaacccggagacaagauuacauucgaggcuaccggcaaccugguggugccucgguacgccuuugcgauggaacgcaacgccgggucuggaaucauuaucuccgauacacccguccaugacugcaauaccaccugucaaacaccuaaaggcgcuaucaacacgagccuccccuuccagaauauucacccgaucaccauuggcaagugcccuaaguaugugaaaucuacaaagcugagacuugccaccgggcugcggaacguucccagcauccagucccgcggacucuuuggcgcuauugccggguucaucgagggaggcuggacagggaugguggacggaugguacggcuaucaucaccagaaugaacaaggcucuggguacgccgcugaucugaaaagcacccagaacgcgaucgacaagauuacgaauaaagucaacuccgugaucgagaagaugaauacacaguuuaccgccguuggaaaggaguucaaccaccuugagaaaagaauugagaaucugaacaagaaaguggaugacggcuuccucgauaucuggaccuacaaugcugaacugcugguccuccuggagaacgaacggacacuugacuaucaugauagcaaugugaagaaccuguacgagaaaguccgcucucagcucaagaacaaugccaaggagauugggaacggauguuuugaguucuaucacaaaugcgacaauaccuguauggaauccgugaagaacggcacauacgauuauccuaaauacagcgaagaggccaagcugaauagagaagagaucgacgggguuaaacuugagucuacgcggaucuaucaaauucuggcuaucuacuccaccguggccagcucccucguccuggugguuucucugggcgcgauuagcuuuuggaugugcuccaacggaucucuccagugccgcaucuguauuuga

SEQ ID NO: 197773 - RNA, 1701 nt, Artificial Sequence
  derived and/or modified CDS sequence (opt5) from hemagglutinin__InfluenzaA__ADM31728
augaaggccauccugauugugcuccuguacaccuucgcuacagccaacgcggacacgcuuugcaucggcuaucacgcuaauaacagcaccgauacagucgacaccguucuggagaagaaugugacagugacccauuccgucaaccuccuggaagauaagcacaaugggaaacuuuguaagcugagaggaguggcuccccuccaucugggcaaaugcaacauugccggguggauccugggaaauccugagugugaaucucucagcacagccuccucuuggagcuacauuguugagaccuccucuagcggcaacgggacgugcuauccgggagacuuuaucgauuacgaagaacugcgggagcagcuuuccagcgugucuuccuucgaacgcuuugagaucuuccccaagaccagcucuuggccuaaucacgacuccaacaagggcgucacagccgcuuguccccaugccggcgcgaaaucuuuuuauaagaaucugauuuggcucgugaaaaaggggaacagcuacccuaaacuguccaagagcuauaucaaugauaagggaaaagaaguucuugugcuguggggcauucaccaccccuccaccucugccgaccaacagagccucuaccagaacgcugaugccuacgucuucguggggacauccagauauagcaagaaauuuaagccugagaucgcuauucggccgaaagugcgcgaccaggagggaagaaugaauuacuauuggacccuggucgaacccggcgauaagaucacguucgaggccacagggaaccugguugugccucgguacgcguuugccauggaacgcaacgcuggaucuggcauuaucaccuccgacacacccgugcaugauugcaauaccaccugucaaacaccuaaaggcgccaucaacacgagccuccccuuccagaauauucacccgaucaccauugggaagugcccuaaguaugucaaaucuacaaagcugagacuugcuaccggacugcggaacgugcccagcauccagucccgcggccucuuuggggccauugccggauucaucgagggcggguggacaggaaugguugacggcugguacggcuaucaucaccagaaugaacaagggucuggauacgcugcggaccugaaaagcacccagaacgccaucgaugagauuacgaauaaggugaacuccgucaucgagaaaaugaauacacaguuuaccgcugugggcaaggaguucaaccaccuugagaagagaauugaaaaucugaacaaaaagguugacgauggguuccucgacaucuggaccuacaaugccgagcugcuggugcuccuggaaaacgagcggacacuugauuaucaugacagcaaugucaaaaaccuguacgagaaggugcgcucucagcucaaaaacaaugccaaggaaauuggaaacggcuguuuugaguucuaucacaagugcgauaauaccuguauggaauccgucaaaaacgggacauacgacuauccuaaguacagcgaggaagcuaaacugaauagagaggagaucgauggcgugaaacuugaaucuacgcggaucuaucaaauucuggccaucuacuccaccguugcgagcucccucgugcuggucgugucucugggagcuauuagcuuuuggaugugcuccaacggcucucuccagugccgcaucuguauuuga

SEQ ID NO: 197774 - RNA, 1701 nt, Artificial Sequence
  derived and/or modified CDS sequence (opt5) from hemagglutinin__InfluenzaA__ADM31738
augaaggccauccuggugguccuccuguacaccuucgcuacagccaacgcggacacgcuuugcauuggcuaucacgcuaauaacagcaccgauacaguugacaccgugcuggagaaaaaugugacagucacccauuccgugaacauccucgaagauaagcacaaugggaaacuguguaaacuuagaggaguugcuccccugcaucucggcaagugcaacauugccggguggauccugggaaauccugagugugaaucucugagcacagccuccucuuggagcuacauuguggagaccuccucuagcgacaacggcacgugcuauccgggggauuuuaucgacuacgaagaacuccgggagcagcuguccagcgucucuuccuucgaacgcuuugagaucuuccccaagaccagcucuuggccuaaucacgauuccaacaagggagugacagccgcuuguccccaugccggcgcgcggagcuuuuauaaaaaucuuauuuggcugguuaagaaaggcaacucuuacccuaagcucuccaaaagcuauaucaaugacaaggggaaggaagugcugguccuuuggggcauucaccaccccuccaccucugccgaucaacagagccuguaccagaacgcugacgccuacguguucgugggaacauccagauauagcaaaaaguuuaaaccugagaucgcuauucgcccgaaggucagagaucaggaggggcggaugaauuacuauuggacccucguugaacccggagacaaaaucacguucgaggccacaggcaaccugguggugccucgcuacgcguuugccauggaaagaaacgcugggucuggaauuaucaucuccgauacccccguccaugacugcaauacaaccugucaaaccccuaagggcgccauuaacacaagccugcccuuccagaauauccacccgauuacgaucggcaaaugcccuaaguaugugaagucuaccaaacuccggcuggcuacagggcuucgcaacguucccagcauucaguccagaggacuguuuggcgccaucgccggguucaucgagggaggcuggaccgggaugguggacggaugguacggcuaucaucaccagaaugaacaaggcucuggguacgcugcggaucucaagagcacacagaacgccauugacgagaucaccaauaaagucaacuccgugauugagaagaugaauacgcaguuuacagcuguuggaaaagaguucaaccaccuggagaagcggaucgaaaaucuuaacaagaaaguggaugacggcuuccuggauauuuggaccuacaaugccgagcuccugguccugcucgaaaacgagcgcacccuggacuaucaugauagcaaugugaagaaccuuuacgagaaagucagaucucagcugaagaacaaugccaaagaaaucgggaacggauguuuugaguucuaucacaagugcgacaauacauguauggaauccgugaagaacggcaccuacgauuauccuaaauacagcgaggaagcuaagcucaaucgggaggagaucgacgggguuaaacuggaaucuacacgcauuuaucaaauccuugccauuuacuccacgguggcgagcucccugguccucgugguuucucugggcgcuaucagcuuuuggaugugcuccaacggaucucugcagugcagaauuuguaucuga

SEQ ID NO: 197775 - RNA, 1701 nt, Artificial Sequence; identical to SEQ ID NO: 196390
  derived and/or modified CDS sequence (opt5) from hemagglutinin__InfluenzaA__ADM31748

SEQ ID NO: 197776 - RNA, 1701 nt, Artificial Sequence
  derived and/or modified CDS sequence (opt5) from hemagglutinin__InfluenzaA__ADM31758
augaaggccauccuggugguccuccuguacaccuucgcuacagccaacgcggacacgcuuugcauuggcuaucacgcuaauaacagcaccgauacaguugacaccgugcuggagaaaaaugugacagucacccauuccgugaaccuccuggaagauaagcacaaugggaaacuuuguaagcugagaggaaucgcuccccuccaucugggcaaaugcaacauugccggguggauccugggaaauccugagugugaaucucucagcacagccuccucuuggagcuacauuguugagaccuccucuagcgacaacggcacgugcuauccgggggauuuuaucgacuacgaagaacugcgggagcagcuuuccagcgugucuuccuucgaacgcuuugagaucuuccccaagaccagcucuuggccuaaucacgauuccaacaagggagucacagccgcuuguccccaugccggcgcgaaaucuuuuuauaagaaucugauuuggcucgugaaaaagggcaacagcuacccuaaacuguccaagagcuauaucaaugacaaggggaaagaaguucuugugcuguggggcauucaccaccccuccaccucugccgaucaacagagccucuaccagaacgcugacgccuacgucuucgugggaacauccagauauagcaagaaauuuaagccugagaucgcuauucggccgaaagugcgcgaucaggaggggagaaugaauuacuauuggacccugaucgaccccggagauaagauuacguucgaagccacaggcaaccuggucguuccucgguacgcguuugccauggagcgcaacgcugggucuggaaucaucauuuccgacacccccgugcaugacugcaauacaaccugucaaaccccuaaaggcgccaucaacacaagccuccccuuccagaauauucacccgaucacgauuggcaagugcccuaaguaugugaaaucuaccaagcugagaauggcuacagggcuucggaacguccccagcauccagucccgcggacuguuuggcgccaucgccggguucauugaaggaggcuggaccgggaugguggauggaugguacggcuaucaucaccagaaugagcaaggcucuggguacgcugcggaccucaaaagcacacagaacgccaucgaugaaauuaccaauaagguuaacuccgugaucgagaaaaugaauacgcaguuuacagcugucggaaaggaguucaaccaccuggaaaagagaauugagaaucuuaacaaaaagguggacgauggcuuccuggacaucuggaccuacaaugccgaacuccugguucugcucgagaacgaacggacccuggauuaucaugacagcaaugugaaaaaccuuuacgagaagguccgcucucagcugaaaaacaaugccaaggagaucgggaacggauguuuugaguucuaucacaagugcgauaauacauguauggaguccgugaaaaacggcaccuacgacuauccuaaguacagcgaagaggcuaaacucaauagagaagagauugauggggucaagcuggagucuacacggaucuaucaaauucuugccaucuacuccacgguggcgagcucccugguucucguggucucucugggcgcuauuagcuuuuggaugugcuccaacggaucucugcagugccgcaucuguauuuga

SEQ ID NO: 197777 - RNA, 1701 nt, Artificial Sequence; identical to SEQ ID NO: 195101
  derived and/or modified CDS sequence (opt5) from hemagglutinin__InfluenzaA__ADM31768

SEQ ID NO: 197778 - RNA, 1701 nt, Artificial Sequence; identical to SEQ ID NO: 194741
  derived and/or modified CDS sequence (opt5) from hemagglutinin__InfluenzaA__ADM31778

SEQ ID NO: 197779 - RNA, 1701 nt, Artificial Sequence; identical to SEQ ID NO: 196908
  derived and/or modified CDS sequence (opt5) from hemagglutinin__InfluenzaA__ADM31798

SEQ ID NO: 197780 - RNA, 1701 nt, Artificial Sequence
  derived and/or modified CDS sequence (opt5) from hemagglutinin__InfluenzaA__ADM31808
augaaggccauccuggugguccuccuguacaccuucgcuacagccaacgcggacacgcuuugcauuggcuaucacgcuaauaacagcaccgauacaguugacaccgugcuggagaaaaaugugacagucacccauuccgugaaccuccuggaagauaagcacaaugggaaacuuuguaagcugagaggaguugcuccccuccaucugggcaaaugcaacaucgccggguggauucugggaaauccugagugugaaucucucagcacagccuccucuuggagcuacaucguggagaccuccucuagcggcaacgggacgugcuauccgggagacuuuauugauuacgaagaacugcgggagcagcuuuccagcgucucuuccuucgaacgcuuugagaucuuccccaagaccagcucuuggccuaaucacgacuccaacaagggcgugacagccgcuuguccccaugccggcgcgaaaucuuuuuauaagaaucugcucuggcugguuaaaaaggggaacagcuacccuaaacuuuccaagagcuauaucaaugauaagggaaaagaagugcugguccucuggggcauucaccaccccuccaccucugccgaccaacagagccuguaccagaacgcugaugccuacguguucguggggacauccagauauagcaagaaauuuaagccugagaucgcuauucggccgaaaguccgcgaccaggagggaagaaugaauuacuauuggacccugguuggccccggggauaagaucacguucgaagccacaggaaaccucguggugccucgguacgcguuugccauggagcgcaacgcuggcucuggcauuaucauuuccgacacccccguccaugauugcaauacaaccugucaaaccccuaaaggggccaucaacacaagccugcccuuccagaauauccacccgauuacgaucggaaagugcccuaaguaugugaaaucuaccaaacuuagacuggcuacaggccuccggaacguucccagcauucagucccgcgggcuguuuggagccaucgccggcuucauugaagggggauggaccggcaugguggacggcugguacggguaucaucaccagaaugagcaaggaucuggcuacgcugcggaccuuaagagcacacagaacgccaucgaugaaaucaccaauaaggucaacuccgugauugagaaaaugaauacgcaguuuacagcuguugggaaggaguucaaccaccuggaaaagagaaucgagaaucucaacaaaaagguggacgauggauuccuggacauuuggaccuacaaugccgaacugcucguccugcuugagaacgaacggacccuggauuaucaugacagcaaugugaaaaaccucuacgagaagguccgcucucagcugaaaaacaaugccaaggagaucggcaacggguguuuugaguucuaucacaagugcgauaauacauguauggaguccgugaaaaacggcaccuacgacuauccuaaguacagcgaagaggcuaaacuuaauagagaagagauugauggaguuaagcuggagucuacacggaucuaucaaauccucgccauuuacuccacgguggcgagcucccugguccuggugguuucucucggcgcuaucagcuuuuggaugugcuccaacgggucucugcagugccgcauuuguaucuga

SEQ ID NO: 197781 - RNA, 1701 nt, Artificial Sequence; identical to SEQ ID NO: 196908
  derived and/or modified CDS sequence (opt5) from hemagglutinin__InfluenzaA__ADM31818

SEQ ID NO: 197782 - RNA, 1701 nt, Artificial Sequence
  derived and/or modified CDS sequence (opt5) from hemagglutinin__InfluenzaA__ADM31828
augaaggccauccuggugguccuccuguacaccuucgcuacagccaacgcggacacgcuuugcauuggcuaucacgcuaauaacagcaccgauacaguugacaccgugcuggagagaaaugugacagucacccauuccgugaaccuccuggaagauaagcacaaugggaaacuuuguaaacugcggggaguugcgccccuccaucugggcaagugcaacaucgccggguggauucugggaaauccugagugugaaucucucagcacagcuuccucuuggagcuacaucguggagaccuccucuagcgacaacggcacgugcuauccgggggauuuuauugacuacgaagaacugcgcgagcagcuuuccagcgucucuuccuucgaaagauuugagaucuuccccaaaaccagcucuuggccuaaucacgauuccaacaagggagugacagccgcuuguccccaugccggcgccaagagcuuuuauaaaaaucugaucuggcucguuaagaaaggcaagucuuacccuaaacuguccaagagcuauauuaacgacaaggggaaagaagugcuuguccuguggggaauccaccaccccuccaccucugccgaucaacagagccucuaccagaaugcugacgccuacguguucgugggcacaucccgguauagcaagaaauuuaagccugagauugcuauccgcccgaaagucagagagcaggaagggcggaugaacuacuauuggacccugguugagcccggagauaagauuacguucgaagccacaggcaaucugguggugccucgcuacgcguuugccauggagagaaacgcugggucuggaaucauuaucuccgacacccccguccaugauugcaacacaaccugucaaaccccuaaaggcgccaucaauacaagccuccccuuccagaacauucacccgaucacgauuggcaagugcccuaaguaugugaaaucuaccaagcugcggcuugcuacagggcugcgcaauguucccagcauccaguccagaggacucuuuggcgccauugccggguucaucgaaggaggcuggaccgggaugguggacggaugguacggcuaucaucaccagaacgagcaaggcucuggguacgcugcggaccugaaaagcacacagaaugccaucgaugagauuaccaacaaggucaauuccgugaucgaaaagaugaacacgcaguuuacagcuguuggaaaggaguucaaucaccuugaaaagcggauugagaaccugaauaaaaagguggacgauggcuuccucgacaucuggaccuacaacgccgaacugcugguccuccuggagaaugagcgcacccuugauuaucaugacagcaacgugaaaaaucuguacgaaaaggucagaucucagcucaaaaacaacgccaaggagauugggaauggauguuuugaguucuaucacaagugcgauaacacauguauggaguccgugaaaaauggcaccuacgacuauccuaaguacagcgaagaggcuaaacugaaccgggaggaaaucgaugggguuaaacuugagucuacacgcaucuaucaaauucuggccaucuacuccacgguggcgagcucccucguccugcuggugucucucggcgcuauuagcuuuuggaugugcuccaauggaucucugcagugcagaaucuguauuuga

SEQ ID NO: 197783 - RNA, 1701 nt, Artificial Sequence; identical to SEQ ID NO: 197782
  derived and/or modified CDS sequence (opt5) from hemagglutinin__InfluenzaA__ADM31838

SEQ ID NO: 197784 - RNA, 1701 nt, Artificial Sequence; identical to SEQ ID NO: 194741
  derived and/or modified CDS sequence (opt5) from hemagglutinin__InfluenzaA__ADM31848

SEQ ID NO: 197785 - RNA, 1701 nt, Artificial Sequence
  derived and/or modified CDS sequence (opt5) from hemagglutinin__InfluenzaA__ADM31858
augaaggccauccuggugguccuccuguacaccuucgcuacagccaacgcggacacgcuuugcauuggcuaucacgcuaauaacagcaccgauacaguugacaccgugcuggagaaaaaugugacagucacccauuccgugaaccuccuggaagauaagcacaaugggaaacuuuguaagcugagaggaguugcuccccuccaucugggcaaaugcaacaucgccggguggauucugggaaauccugagugugaaucucucagcacagccuccucuuggagcuacaucguggagaccuccucuagcgacaacggcacgugcuauccgggggauuuuauugacuacgaagaacugcgggagcagcuuuccagcgucucuuccuucgaacgcuuugagaucuuccccaagaccagcucuuggccuaaucacgauuccaacaagggagugacagccgcuuguagccaugccggcgcgaaaucuuuuuauaagaaucugaucuggcucguuaaaaagggcaacuccuaccccaaacugaauaagagcuauauuaacgacaaggggaaagaagugcuuguccuguggggaauccaccacccuuccaccucugccgaucaacagagccucuaccagaaugcugacgccuacguguucgugggcacauccagauauagcaagaaauuuaagcccgagauugcuauccggccuaaaguccgcgagcaggaagggagaaugaacuacuauuggacccugguugagccgggagauaagauuacguucgaagccacaggcaaccugguggugccccgguacgcguuugccauggagcgcaaugcugggucuggaaucauuaucuccgacaccccuguccaugauugcaacacaaccugucaaacccccaaaggcgccaucaauacaagccucccuuuccagaacauucaccccaucacgauuggcaagugcccgaaguaugugaaaucuaccaagcugagacuugcuacagggcugcggaauguuccuagcauccagucccgcggacucuuuggcgccauugccggguucaucgaaggaggcuggaccgggaugguggacggaugguacggcuaucaucaccagaacgagcaaggcucuggguacgcugcggaccugaaaagcacacagaaugccaucgaugagauuaccaacaaggucaauuccgugaucgagaaaaugaacacgcaguuuacagcuguuggaaaggaguucaaucaccuugaaaagagaauugagaaccugaauaaaaagguggacgauggcuuccucgacaucuggaccuacaacgccgaacugcugguccuccuggagaaugagcggacccuugauuaucaugacagcaacgugaaaaaccuguacgaaaagguccgcucucagcucaaaaauaacgccaaggagauugggaauggauguuuugaguucuaucacaagugcgauaacacauguauggaauccgugaaaaauggcaccuacgacuaucccaaguacagcgaagaggcuaaacugaacagagaggaaaucgaugggguugagcuugaaucuacacggaucuaucaaauucuggccaucuacuccacgguggcgagcucccucguccuggugguuucucugggcgcuauuagcuuuuggaugugcuccaauggaucucuccagugccgcaucuguauuuga

SEQ ID NO: 197786 - RNA, 1701 nt, Artificial Sequence
  derived and/or modified CDS sequence (opt5) from hemagglutinin__InfluenzaA__ADM31868
augaaggccauccuggugguccuccuguacaccuucgcuacagccaacgcggacacgcuuugcauuggcuaucacgcuaauaacagcaccgauacaguugacaccgugcuggagaaaaaugugacagucacccauuccgugaaccuccuggaagauaagcacaaugggaaacuuuguaagcugagaggaguugcuccccuccaucugggcaaaugcaacaucgccggguggauucugggaaauccugagugugaacuccugucuacagccagcuccuggucuuacaucguggagaccagcuccucugacaacggcacgugcuauccgggggauuuuauuaauuacgaggaacuucgggagcagcugagcuccgucagcucuuucgaacgcuuugagaucuuccccaagaccuccagcuggccuaaccacgacucuaauaagggagugacagccgcuuguccccaugccggcgcgaaauccuuuuauaagaaccucaucuggcugguuaaaaagggcaauagcuacccuaaacuuucuaaguccuauauuaacgauaaggggaaagaagugcugguccucuggggagugcaccaccccagcaccuccgccgaccaacagucucuguaccagaaugcugaugccuacguguucgucggcacaagcagauauuccaagaaauuuaagccugagaucgcuauucggccgaaaguucgcgaccaggaggggagaaugaacuacuauuggacccugguggaacccggagauaagaucacguucgaggccacaggcaaccucguggucccucgguacgcguuuagcauggaacgcaaugccgggucuggaauuaucauuuccgacacccccgugcaugauugcaacacaaccugucaaaccccuaaaggcgcuaucaauacaagccugcccuuccagaacauccacccgauuacgaucggcaagugcccuaaguauguuaaaucuaccaaacuuagacuggccacagggcuccggaaugugcccagcauucagucccgcggacuguuuggcgcuaucgccggguucauugagggaggcuggaccgggauggucgacggaugguacggcuaucaucaccagaacgaacaaggcucuggguacgccgcugaccuuaaaagcacacagaaugcgaucgauaagaucaccaacaaaguuaauuccgugauugagaagaugaacacgcaguuuacagccgugggaaaggaguucaaucaccuggaaaagagaaucgagaaccucaauaagaaagucgacgauggcuuccuggacauuuggaccuacaacgcugaacugcucgugcugcuugagaaugaacggacccuggauuaucaugacagcaacgucaagaaccucuacgagaaagugcgcucucagcugaagaauaacgccaaggagaucgggaauggauguuuugaguucuaucacaaaugcgauaacacauguauggaauccguuaagaauggcaccuacgacuauccuaaauacagcgaagaggccaaacuuaacagagaaaagauugauggggugaagcuggagucuacacggaucuaucaaauccucgcuauuuacuccacggucgccagcucccuggugcugguugugucucucggcgcgaucagcuuuuggaugugcuccaauggaucucugcagugccgcauuuguaucuga

SEQ ID NO: 197787 - RNA, 1701 nt, Artificial Sequence
  derived and/or modified CDS sequence (opt5) from hemagglutinin__InfluenzaA__ADM31878
augaaggccauccuggugguccuccuguacaccuucgcuacagccaacgcggacacgcuuugcauuggcuaucacgcuaauaacagcaccgauacaguugacaccgugcuggagaaaaaugugacagucacccauuccgugaacauccucgaagauaagcacaaugggaaacuguguaaacuuagaggaguugcuccccugcaucucggcaaaugcaacauugccggguggauccugggaaauccugagugugaaucucugagcacagccuccucuuggagcuacauuguggagaccuccucuagcgacaacggcacgugcuauccgggggauuuuaucgacuacgaagaacuccgggagcagcuguccagcgucucuuccuucgaacgcuuugagaucuuccccaaggccagcucuuggccuaaucacgauuccaacaagggagugaccgcugccuguccccaugcgggcgccaagagcuuuuauaagaaucuuauuuggcugguuaaaaagggcaacucuuacccuaaacucuccaagagcuauaucaaugacaaggggaaagaagugcugguccuuuggggcauucaccaccccuccacaucugcugaucaacagagccuguaccagaacgccgacgcuuacguguucgugggaaccuccagauauagcaagaaauuuaagccugagaucgccauucggccgaaaguccgcgaucaggaggggagaaugaauuacuauuggacacucguugaacccggagacaagaucaccuucgaggcgacgggcaaccugguggugccucgguacgccuuugcuauggaacgcaacgccgggucuggaauuaucaucuccgauacacccguccaugacugcaauaccacaugucaaaccccuaaaggcgcuauuaacaccagccugcccuuccagaauauccacccgauuacaaucggcaagugcccuaaguaugugaaaucuacgaagcucagacuggccaccgggcuucggaacguucccagcauucagucccgcggacuguuuggcgccaucgcuggguucaucgagggaggcuggacagggaugguggacggaugguacggcuaucaucaccagaaugaacaaggcucuggguacgcggccgaucucaaaagcacccagaacgcuauugacgagaucacaaauaaggucaacuccgugauugagaaaaugaauacccaguuuacggccguuggaaaggaguucaaccaccuggagaagagaaucgaaaaucuuaacaaaaagguggaugacggcuuccuggauauuuggacauacaaugccgagcuccugguccugcucgaaaacgagcggacccuggacuaucaugauagcaaugugaaaaaccuuuacgagaagguccgcucucagcugaaaaacaaugcuaaggaaaucgggaacggauguuuugaguucuaucacaagugcgacaauaccuguauggaauccgugaaaaacggcacauacgauuauccuaaguacagcgaggaagccaaacucaauagagaggagaucgacgggguuaagcuggaaucuacccggauuuaucaaauccuugcgauuuacuccacaguggcuagcucccugguccucgugguuucucugggcgccaucagcuuuuggaugugcuccaacggaucucugcagugccgcauuuguaucuga

SEQ ID NO: 197788 - RNA, 1701 nt, Artificial Sequence; identical to SEQ ID NO: 196390
  derived and/or modified CDS sequence (opt5) from hemagglutinin__InfluenzaA__ADM31888

SEQ ID NO: 197789 - RNA, 1701 nt, Artificial Sequence; identical to SEQ ID NO: 194921
  derived and/or modified CDS sequence (opt5) from hemagglutinin__InfluenzaA__ADM31898

SEQ ID NO: 197790 - RNA, 1701 nt, Artificial Sequence
  derived and/or modified CDS sequence (opt5) from hemagglutinin__InfluenzaA__ADM31908
augaaggccauccuggugguccuccuguacaccuucgcuacagccaacgcggacacgcuuugcauuggcuaucacgcuaauaacagcaccgauacaguugacaccgugcuggagaaaaaugugacagucacccauuccgugaacauccucgaagauaagcacaaugggaaacuguguaaacuuagaggaguugcuccccugcaucucggcaagugcaacauugccggguggauccugggaaauccugagugugaaucucugagcacagccuccucuuggagcuacauuguggagaccuccucuagcgacaacggcacgugcuauccgggggauuuuaucgaccacgaagaacuccgggagcagcuguccagcgucucuuccuucgaacgcuuugagaucuuccccaagaccagcucuuggccuaaucaugauuccaacaagggagugacagccgcuuguccccacgccggcgcgaaaucuuuuuacaagaaucuuauuuggcugguuaaaaagggcaacagcuauccuaaacucuccaagagcuacaucaaugacaaggggaaagaagugcugguccuuuggggcauucaccaucccuccaccucugccgaucaacagagccuguaucagaacgcugacgccuacguguucgugggauccagcagauacucuaagaaauuuaagccugagaucgcuauucggccgaaaguccgcgaucaggaggggagaaugaauuauuacuggacacucguugaacccggagacaagaucaccuucgaggccacgggcaaccugguggugccucgguaugcguuugccauggaacgcaacgcuggguccggaauuaucaucagcgauacacccguccacgacugcaauaccacaugucaaaccccuaaaggcgccauuaacaccucucugcccuuccagaauauccauccgauuacaaucggcaagugcccuaaguacgugaaaagcacgaagcucagacuggcuaccgggcuucggaacguucccuccauucagucucgcggacuguuuggcgccaucgccggguucaucgagggaggcuggacagggaugguggacggaugguauggcuaccaccaccagaaugaacaaggcagcggguaugcugcggaucucaaauccacccagaacgccauugacgagaucacaaauaaggucaacagcgugauugagaaaaugaauacccaguuuacggcuguuggaaaggaguucaaccaucuggagaagagaaucgaaaaucuuaacaaaaagguggaugacggcuuccuggauauuuggacauacaaugccgagcuccugguccugcucgaaaacgagcggacccuggacuaccacgauucuaaugugaaaaaccuuuaugagaagguccgcucccagcugaaaaacaaugccaaggaaaucgggaacggauguuuugaguucuaccauaagugcgacaauaccuguauggaaagcgugaaaaacggcacauaugauuacccuaaguauucugaggaagcuaaacucaauagagaggagaucgacgggguuaagcuggaauccacccggauuuaccaaauccuugccauuuauagcacaguggcguccucucugguccucgugguuagccugggcgcuaucuccuuuuggaugugcucuaacggaagccugcagugccgcauuuguaucuga

SEQ ID NO: 197791 - RNA, 1701 nt, Artificial Sequence; identical to SEQ ID NO: 194921
  derived and/or modified CDS sequence (opt5) from hemagglutinin__InfluenzaA__ADM31918

SEQ ID NO: 197792 - RNA, 1701 nt, Artificial Sequence; identical to SEQ ID NO: 196513
  derived and/or modified CDS sequence (opt5) from hemagglutinin__InfluenzaA__ADM31928

SEQ ID NO: 197793 - RNA, 1701 nt, Artificial Sequence; identical to SEQ ID NO: 196513
  derived and/or modified CDS sequence (opt5) from hemagglutinin__InfluenzaA__ADM31948

SEQ ID NO: 197794 - RNA, 1701 nt, Artificial Sequence; identical to SEQ ID NO: 194741
  derived and/or modified CDS sequence (opt5) from hemagglutinin__InfluenzaA__ADM31958

SEQ ID NO: 197795 - RNA, 1701 nt, Artificial Sequence; identical to SEQ ID NO: 196513
  derived and/or modified CDS sequence (opt5) from hemagglutinin__InfluenzaA__ADM31968

SEQ ID NO: 197796 - RNA, 1701 nt, Artificial Sequence; identical to SEQ ID NO: 196329
  derived and/or modified CDS sequence (opt5) from hemagglutinin__InfluenzaA__ADM31978

SEQ ID NO: 197797 - RNA, 1701 nt, Artificial Sequence; identical to SEQ ID NO: 194921
  derived and/or modified CDS sequence (opt5) from hemagglutinin__InfluenzaA__ADM31998

SEQ ID NO: 197798 - RNA, 1701 nt, Artificial Sequence; identical to SEQ ID NO: 194921
  derived and/or modified CDS sequence (opt5) from hemagglutinin__InfluenzaA__ADM32008

SEQ ID NO: 197799 - RNA, 1701 nt, Artificial Sequence
  derived and/or modified CDS sequence (opt5) from hemagglutinin__InfluenzaA__ADM32018
augaaggccauccuggugguccuccuguacaccuucgcuauugccaacgcggacacacuuugcaucggcuaucacgcuaauaacagcacggauaccguugacacagugcuggagaagaaugugaccgucacacauuccgugaaccuccuggaagauaagcacaaugggaaacuuuguaagcugagaggaguugcuccccuccaucugggcaaaugcgacauugccggguggauccugggaaacccugagugugaaucucucagcaccgccuccucuuggagcuacauuguggagacauccucuagcgauaauggaaccugcuauccgggggacuuuaucgauuacgaagaacugcgggagcagcuuuccagcgucucuuccuucgaacgcuuugagaucuuccccaagacgagcucuuggccuaaccacgacuccaauaagggagugaccgccgcuuguccccaugccggcgcgaaaucuuuuuauaagaaccugauuuggcucguuaaaaagggcaauagcuacccuaaacuguccaagagcuauaucaacgauaaggggaaagaagugcuuguccuguggggcauucaccaccccuccacaucugccgaccaacagagccucuaccagaaugcugaugccuacguguucgugggcaccuccagauauagcaagaaauuuaagccugagaucgcuauucggccgaaaguccgcgaccaggaggggagaaugaacuacuauuggacacugguugaacccggagauaagaucaccuucgaggccacgggcaaucugguggugccucgguacgcguuugccauggaacgcaacgcugggucuggaauuaucaucuccgacacacccguccaugacugcaacaccacaugucaaaccccuaaaggcgccauuaauaccagccuccccuuccagaacauccacccgauuacaaucggcaagugcccuaaguaugugaaaucuacgaagcugagacuugcuaccgggcugcggaauguucccagcauucagucccgcggacucuuuggcgccaucgccggguucaucgagggaggcuggacagggaugguggauggaugguacggcuaucaucaccagaacgaacaaggcucuggguacgcugcggaccugaaaagcacccagaaugccauugaugagaucacaaacaaggucaauuccgugauugagaaaaugaacacccaguuuacggcuguuggaaaggaguucaaucaccuugagaagagaaucgaaaaccugaauaaaaagguggacgauggcuuccucgacauuuggacauacaacgccgagcugcugguccuccuggaaaaugagcggacccuugauuaucaugacagcaacgugaaaaaucuguacgagaagguccgcucucagcucaaaaacaacgccaaggaaaucgggaauggauguuuugaguucuaucacaagugcgauaacaccuguauggaauccgugaaaaauggcacauacgacuauccuaaguacagcgaggaagcuaaacugaacagagaggagaucgaugggguuaaacuugaaucuacccggauuuaucaaauccuggccauuuacuccacaguggcgagcucccucguccuggugguuucucugggcgcuaucagcuuuuggaugugcuccaauggaucucuccagugccgcauuuguaucuga

SEQ ID NO: 197800 - RNA, 1701 nt, Artificial Sequence
  derived and/or modified CDS sequence (opt5) from hemagglutinin__InfluenzaA__ADM32028
augaaggccauccuggugguccuccuguacaccuucgcuacagccaacgcggacacgcuuugcauuggcuaucacgcuaauaacagcaccgauacaguugacaccgugcuggagaagaaugugacagucacccauuccguggaucuccuggaagacaagcacaacgggaaacuuuguaagcugagaggaguugcuccccuccaucugggcaaaugcaauaucgccggguggauucugggaaacccugagugugaaucucucagcacagccuccucuuggagcuacaucguggagaccuccucuagcgauaauggcacgugcuauccgggggacuuuauugauuacgaagaacugcgggagcagcuuuccagcgucucuuccuucgaacgcuuugagaucuuccccaagaccagcucuuggccuaaccacgacuccaauaagggagugacagccgcuuguccccaugccggcgcgaaauccuuuuauaagaaccugaucuggcucguuaaaaagggcaauucuuacccuaaacuguccaagagcuauauuaacgauaaggggaaagaagugcuuguccuguggggaauccaccaccccuccaccucugccgaccaacagagccucuaccagaaugcugaugccuacguguucgugggcacauccagauauagcaagaaauuuaagccugagauugcuauccggccgaaaguccgcgaccaggaggggagaaugaacuacuauuggacccugguugaacccggagauaagauuacguucgaggccacaggcaaucugguggugccucgguacgcguuugccauggaacgcaacgcugggucuggaaucauuaucuccgacacccccguccaugacugcaacacaaccugucaaaccccuaaaggcgccaucaauacaagccuccccuuccagaacgugcacccgauuacgaucggcaagugcccuaaguauguuaaaucuaccaagcugagacuugcuacagggcugcggaaugugcccagcauucagucccgcggacucuuuggcgccaucgccggguucauugagggaggcuggaccgggauggucgauggaugguacggcuaucaucaccagaacgaacaaggcucuggguacgcugcggaccugaaaagcacacagaaugccaucgaugagaucaccaacaaggugaauagcguuauugagaaaaugaacacgcaguuuacagcugugggaaaggaguucaaucaccuugagaagagaaucgaaaaccugaauaaaaaggucgacgauggcuuccucgacauuuggaccuacaacgccgagcugcuggugcuccuggaaaaugagcggacccuugauuaucaugacagcaacgucaaaaaucuguacgagaaggugcgcucucagcucaaaaacaacgccaaggaaaucgggaauggauguuuugaguucuaucacaagugcgauaacacauguauggaauccguuaaaaauggcaccuacgacuauccuaaguacagcgaggaagcuaaacugaacagagaggagauugauggggugaaacuugaaucuacacggaucuaucaaauccuggccauuuacuccacggucgcgagcucccucgugcugguugugucucugggcgcuaucagcuuuuggaugugcuccaauggaucucuccagugccgcauuuguaucuga

SEQ ID NO: 197801 - RNA, 1701 nt, Artificial Sequence; identical to SEQ ID NO: 196513
  derived and/or modified CDS sequence (opt5) from hemagglutinin__InfluenzaA__ADM32038

SEQ ID NO: 197802 - RNA, 1701 nt, Artificial Sequence; identical to SEQ ID NO: 194921
  derived and/or modified CDS sequence (opt5) from hemagglutinin__InfluenzaA__ADM32048

SEQ ID NO: 197803 - RNA, 1701 nt, Artificial Sequence; identical to SEQ ID NO: 195905
  derived and/or modified CDS sequence (opt5) from hemagglutinin__InfluenzaA__ADM32058

SEQ ID NO: 197804 - RNA, 1701 nt, Artificial Sequence; identical to SEQ ID NO: 195905
  derived and/or modified CDS sequence (opt5) from hemagglutinin__InfluenzaA__ADM32068

SEQ ID NO: 197805 - RNA, 1701 nt, Artificial Sequence; identical to SEQ ID NO: 194741
  derived and/or modified CDS sequence (opt5) from hemagglutinin__InfluenzaA__ADM32078

SEQ ID NO: 197806 - RNA, 1701 nt, Artificial Sequence; identical to SEQ ID NO: 196329
  derived and/or modified CDS sequence (opt5) from hemagglutinin__InfluenzaA__ADM32088

SEQ ID NO: 197807 - RNA, 1701 nt, Artificial Sequence
  derived and/or modified CDS sequence (opt5) from hemagglutinin__InfluenzaA__ADM32098
augaaggccauccuggugguccuccuguacaccuucgcuauugccaacgcggacacacuuugcaucggcuaucacgcuaauaacagcacggauaccguugacacagugcuggagaagaaugugaccgucacacauuccgugaaccuccuggaagauaagcacaaugggaaacuuuguaagcugagaggaguugcuccccuccaucugggcaaaugcaacauugccggguggauccugggaaauccugagugugaaucucucagcaccgccuccucuuggagcuacauuguggagacauccucuagcgacaacggaaccugcuauccgggggauuuuaucgacuacgaagaacugcgggagcagcuuuccagcgucucuuccuucgaacgcuuugagaucuuccccaagacgagcucuuggccuaaucacgauuccaacaagggagugaccgccgcuuguccccaugccggcgcgaaaucuuuuuauaagaaucugauuuggcucguuaaaaagggcaacagcuacccuaaacuguccaagagcuauaucaaugacaaggggaaagaagugcuuguccuguggggcauucaccaccccuccacaucugccgaucaacagagccucuaccagaacgcugacgccuacguguucgugggcaccuccagauauagcaagaaauuuaagccugagaucgcuauucggccgaaaguccgcgaucaggaggggagaaugaauuacuauuggacacugguugaacccggagacaagaucaccuucgaggccacgggcaaccugguggugccucgguacgcguuugccauggaacgcaacgcugggucuggaauuaucaucuccgauacacccguccaugacugcaauaccacaugucaaaccccuaaaggcgccauuaacaccagccuccccuuccagaauauccacccgauuacaaucggcaagugcccuaaguaugugaaaucuacgaagcugagacuugcuaccgggcugcggaacguucccagcauucagucccgcggacucuuuggcgccaucgccggguucaucgagggaggcuggacagggaugguggacggaugguacggcuaucaucaccagaaugaacaaggcucuggguacgcugcggaucugaaaagcacccagaacgccauugacgagaucacaaauaaggucaacuccgugauugagaaaaugaauacccaguuuacggcuguuggaaaggaguucaaccaccuugagaagagaaucgaaaaucugaacaaaaagguggaugacggcuuccucgauauuuggacauacaaugccgagcugcugguccuccuggaaaacgagcggacccuugacuaucaugauagcaaugugaaaaaccuguacgagaagguccgcucucagcucaaaaacaaugccaaggaaaucgggaacggauguuuugaguucuaucacaagugcgacaauaccuguauggaauccgugaaaaacggcacauacgauuauccuaaguacagcgaggaagcuaaacugaauagagaggagaucgacgggguuaaacuugaaucuacccggauuuaucaaauccuggccauuuacuccacaguggcgagcucccucguccuggugguuucucugggcgcuaucagcuuuuggaugugcuccaacggaucucuccagugccgcauuuguaucuga

SEQ ID NO: 197808 - RNA, 1701 nt, Artificial Sequence; identical to SEQ ID NO: 194741
  derived and/or modified CDS sequence (opt5) from hemagglutinin__InfluenzaA__ADM32108

SEQ ID NO: 197809 - RNA, 1701 nt, Artificial Sequence; identical to SEQ ID NO: 196513
  derived and/or modified CDS sequence (opt5) from hemagglutinin__InfluenzaA__ADM32551

SEQ ID NO: 197810 - RNA, 1701 nt, Artificial Sequence; identical to SEQ ID NO: 194921
  derived and/or modified CDS sequence (opt5) from hemagglutinin__InfluenzaA__ADM32561

SEQ ID NO: 197811 - RNA, 1701 nt, Artificial Sequence; identical to SEQ ID NO: 194921
  derived and/or modified CDS sequence (opt5) from hemagglutinin__InfluenzaA__ADM32571

SEQ ID NO: 197812 - RNA, 1701 nt, Artificial Sequence; identical to SEQ ID NO: 194741
  derived and/or modified CDS sequence (opt5) from hemagglutinin__InfluenzaA__ADM32581

SEQ ID NO: 197813 - RNA, 1701 nt, Artificial Sequence; identical to SEQ ID NO: 196513
  derived and/or modified CDS sequence (opt5) from hemagglutinin__InfluenzaA__ADM32591

SEQ ID NO: 197814 - RNA, 1701 nt, Artificial Sequence; identical to SEQ ID NO: 194741
  derived and/or modified CDS sequence (opt5) from hemagglutinin__InfluenzaA__ADM32601

SEQ ID NO: 197815 - RNA, 1701 nt, Artificial Sequence; identical to SEQ ID NO: 194741
  derived and/or modified CDS sequence (opt5) from hemagglutinin__InfluenzaA__ADM32611

SEQ ID NO: 197816 - RNA, 1701 nt, Artificial Sequence; identical to SEQ ID NO: 195905
  derived and/or modified CDS sequence (opt5) from hemagglutinin__InfluenzaA__ADM32621

SEQ ID NO: 197817 - RNA, 1701 nt, Artificial Sequence
  derived and/or modified CDS sequence (opt5) from hemagglutinin__InfluenzaA__ADM32631
augaaggccauccuggugguccuccuguacaccuucgcuacagccaacgcggacacgcuuugcauuggcuaucacgcuaauaacagcaccgauacaguugacaccgugcuggagaagaaugugacagucacccauuccgugaacauccucgaagauaagcacaaugggaaacuguguaaacuuaagggaguugcgccccugcaucucggcaagugcaacauugccggguggauccugggaaauccugagugugaaucucugagcacagcuuccucuuggagcuacauuguggagaccuccucuagcgacaacggcacgugcuauccgggggauuuuaucgacuacgaagaacucagagagcagcuguccagcgucucuuccuucgaacgguuugagaucuuccccaagaccagcucuuggccuaaucacgauuccaacaaaggagugacagccgcuuguccccaugccggcgccaagagcuuuuauaaaaaucuuauuuggcugguuaagaaaggcaaccucuacccuaagcugucuaaguccuauaucaaugacaaagggaaggaagugcuuguccuguggggcauucaccaccccagcaccuccgccgaucaacagucucucuaccagaacgcugacgccuacguguucgugggaagcuccaaauauagcaagaaauuuaagccugagaucgcuauucgcccgaaagucagagaucaggaggggcggaugaauuacuauuggacacugguugaacccggagacaagaucaccuucgaggccacgggcaaccugguggugccucgcuacgcguuugccauggaaagaaacgcugggucuggaauuaucaucuccgauacacccguccauaauugcaacaccacaugucaaaccccuaagggcgccauuaauaccagccuccccuuccagaacauccacccgauuacaaucggcaaaugcccuaaguaugugaaaucuacgaagcugcggcuugcuaccgggcugcgcaauguucccagcauucaguccagaggacucuuuggcgccaucgccggguucaucgagggaggcuggacagggaugguggacggaugguacggcuaucaucaccagaacgaacaaggcucuggguacgcugcggaccugaaaagcacccagaaugccauugaugagaucacaaacaaggucaauuccgugauugagaagaugaacacccaguuuacggcuguuggaaaagaguucaaucaccuugagaagcggaucgaaaaccugaauaaaaagguggacgauggcuuccucgacauuuggacauacaacgccgagcugcugguccuccuggaaaaugagcgcacccuugauuaucaugacagcaacgugaaaaaccuguacgagaaggucagaucucagcucaagaauaacgccaaagaaaucgggaauggauguuuugaguucuaucacaagugcgauaacaccuguauggaauccgugaaaaauggcacauacgacuauccuaaguacagcgaggaagcuaaacugaaccgggaggagaucgaugggguuaaacuugaaucuacccgcauuuaucaaauccuggccauuuacuccacaguggcgagcucccucguccuggugguuucucugggcgcuaucagcuuuuggaugugcuccaauggaucucuccagugcagaauuuguaucuga

SEQ ID NO: 197818 - RNA, 1701 nt, Artificial Sequence; identical to SEQ ID NO: 195905
  derived and/or modified CDS sequence (opt5) from hemagglutinin__InfluenzaA__ADM32641

SEQ ID NO: 197819 - RNA, 1701 nt, Artificial Sequence; identical to SEQ ID NO: 194741
  derived and/or modified CDS sequence (opt5) from hemagglutinin__InfluenzaA__ADM32651

SEQ ID NO: 197820 - RNA, 1701 nt, Artificial Sequence
  derived and/or modified CDS sequence (opt5) from hemagglutinin__InfluenzaA__ADM32661
augaaggccauccuggugguccuccuguacaccuucgcuauugccaacgcggacacacuuugcaucggcuaucacgcuaauaacagcacggauaccguugacacagugcuggagaagaaugugaccgucacacauuccgugaaccuccuggaagauaagcacaaugggaaacuuuguaagcugagaggaguugcuccccuccaucugggcaaaugcaacauugccggguggauccugggaaauccugagugugaaucucucagcaccgccuccucuuggagcuacauuguggagacauccucuagcgacaacgggaccugcuauccgggcgauuuuaaugacuacgaagaacugcgggagcagcuuuccagcgucucuuccuucgaacgcuuugagaucuuccccaagacgagcucuuggccuaaccacgauuccaauaagggagugaccgccgcuuguccccaugccggcgcgaaaucuuuuuauaagaaccugaucuggcucguuaaaaagggcaauagcuacccuaaacuguccaagagcuauauuaacgacaaggggaaagaagugcuuguccuguggggaauccaccaccccuccacaucugccgaucaacagagccucuaccagaaugcugacgccuacguguucgugggcaccuccagauauagcaagaaauuuaagccugagauugcuauccggccgaaaguccgcgaucaggaggggagaaugaacuacuauuggacacugguugaacccggagacaagauuaccuucgaggccacgggcaaccugguggugccucgguacgcguuugccauggaacgcaaugcugggucuggaaucauuaucuccgauacacccguccaugacugcaacaccacaugucaaaccccuaaaggcgccaucaauaccagccuccccuuccagaacauucacccgaucacaauuggcaagugcccuaaguaugugaaaucuacgaagcugagacuugcuaccgggcugcggaauguucccagcauccagucccgcggacucuuuggcgccauugccggguucaucgagggaggcuggacagggaugguggacggaugguacggcuaucaucaccagaacgaacaaggcucuggguacgcugcggaucugaaaagcacccagaaugccaucgacgagauuacaaacaaggucaauuccgugaucgagaaaaugaacacccaguuuacggcuguuggaaaggaguucaaucaccuugagaagagaauugaaaaccugaauaaaaagguggaugacggcuuccucgauaucuggacauacaacgccgagcugcugguccuccuggaaaaugagcggacccuugacuaucaugauagcaacgugaaaaaccuguacgagaagguccgcucucagcucaaaaauaacgccaaggaaauugggaauggauguuuugaguucuaucacaagugcgacaacaccuguauggaauccgugaaaaauggcacauacgauuauccuaaguacagcgaggaagcuaaacugaacagagaggagaucgacgggguuaaacuugaaucuacccggaucuaucaaauucuggccaucuacuccacaguggcgagcucccucguccuggugguuucucugggcgcuauuagcuuuuggaugugcuccaauggaucucuccagugccgcaucuguauuuga

SEQ ID NO: 197821 - RNA, 1701 nt, Artificial Sequence; identical to SEQ ID NO: 196329
  derived and/or modified CDS sequence (opt5) from hemagglutinin__InfluenzaA__ADM32671

SEQ ID NO: 197822 - RNA, 1701 nt, Artificial Sequence; identical to SEQ ID NO: 194741
  derived and/or modified CDS sequence (opt5) from hemagglutinin__InfluenzaA__ADM32681

SEQ ID NO: 197823 - RNA, 1701 nt, Artificial Sequence; identical to SEQ ID NO: 194921
  derived and/or modified CDS sequence (opt5) from hemagglutinin__InfluenzaA__ADM32691

SEQ ID NO: 197824 - RNA, 1701 nt, Artificial Sequence; identical to SEQ ID NO: 194741
  derived and/or modified CDS sequence (opt5) from hemagglutinin__InfluenzaA__ADM32701

SEQ ID NO: 197825 - RNA, 1701 nt, Artificial Sequence; identical to SEQ ID NO: 194921
  derived and/or modified CDS sequence (opt5) from hemagglutinin__InfluenzaA__ADM32711

SEQ ID NO: 197826 - RNA, 1701 nt, Artificial Sequence; identical to SEQ ID NO: 194921
  derived and/or modified CDS sequence (opt5) from hemagglutinin__InfluenzaA__ADM32721

SEQ ID NO: 197827 - RNA, 1701 nt, Artificial Sequence; identical to SEQ ID NO: 194921
  derived and/or modified CDS sequence (opt5) from hemagglutinin__InfluenzaA__ADM32741

SEQ ID NO: 197828 - RNA, 1701 nt, Artificial Sequence; identical to SEQ ID NO: 194921
  derived and/or modified CDS sequence (opt5) from hemagglutinin__InfluenzaA__ADM32751

SEQ ID NO: 197829 - RNA, 1701 nt, Artificial Sequence; identical to SEQ ID NO: 196329
  derived and/or modified CDS sequence (opt5) from hemagglutinin__InfluenzaA__ADM32761

SEQ ID NO: 197830 - RNA, 1701 nt, Artificial Sequence
  derived and/or modified CDS sequence (opt5) from hemagglutinin__InfluenzaA__ADM32771
augaaggccauccuggugguccuccuguacaccuucgcuacagccaacgcggacacgcuuugcauuggcuaucacgcuaauaacagcaccgauacaguugacaccgugcuggagaaaaaugugacagucacccauuccgugaaccuccuggaagauaagcacaaugggaaacuuuguaagcugagaggaguugcuccccuccaucugggcaaaugcaacaucgccggguggauucugggaaauccugagugugaaucucucagcacagccuccucuuggagcuacaucguggagaccuccucuagcgacaacggcacgugcuauccgggggauuuuauugacuacgaagaacugcgggagcagcuuuccagcgucucuuccuucgaacgcuuugagaucuuccccaagaccagcucuuggccuaaucacgauuccaacaagggagugacagccgcuuguccccaugccggcgcgaaaucuuuuuauaagaaucugaucuggcucguuaaaaagggcaacagcuacccuaaacuguccgaaagcuauauuaaugacaaggggaaggaggugcuuguccuguggggaauccaccaccccuccaccucugccgaucaacagagccucuaccagaacgcugacgccuacguguucgugggcacauccagauauagcaaaaaguuuaaaccugagauugcuauccggccgaagguccgcgaucaggaagggagaaugaauuacuauuggacccugguugagcccggagacaaaauuacguucgaagccacaggcaaccugguggugccucgguacgcguuugccauggagcgcaacgcugggucuggaaucauuaucuccgauacccccguccaugacugcaauacaaccugucaaaccccuaagggcgccaucaacacaagccuccccuuccagaauauucacccgaucacgauuggcaaaugcccuaaguaugugaagucuaccaaacugagacuugcuacagggcugcggaacguucccagcauccaguccaagggacucuuuggcgccauugccggguucaucgaaggaggcuggaccgggaugguggacggaugguacggcuaucaucaccagaaugagcaaggcucuggguacgcugcggaucugaaaagcacacagaacgccaucgacgagauuaccaauaaggucaacuccgugaucgaaaagaugaauacgcaguuuacagcuguuggaaaggaguucaaccaccuugaaaagcgcauugagaaucugaacaaaaagguggaugacggcuuccucgauaucuggaccuacaaugccgaacugcugguccuccuggagaacgagagaacccuugacuaucaugauagcaaugugaaaaaccuguacgaaaagguccggucucagcucaaaaacaaugccaaggagauugggaacggauguuuugaguucuaucacaagugcgacaauacauguauggaguccgugaaaaacggcaccuacgauuauccuaaguacagcgaagaggcuaaacugaaucgcgaggaaaucgacgggguuaaacuugagucuacaagaaucuaucaaauucuggccaucuacuccacgguggcgagcucccucguccuggugguuucucugggcgcuauuagcuuuuggaugugcuccaacggaucucuccagugccggaucuguauuuga

SEQ ID NO: 197831 - RNA, 1701 nt, Artificial Sequence
  derived and/or modified CDS sequence (opt5) from hemagglutinin__InfluenzaA__ADM32781
augaaggccauccuggugguccuccuguacaccuucgcuacagccaacgcggacacgcuuugcauuggcuaucacgcuaauaacagcaccgauacaguugacaccgugcuggagaaaaaugugacagucacccauuccguggaucuccuggaagacaagcacaacgggaaacuuuguaagcugagaggaguugcuccccuccaucugggcaaaugcaauaucgccggguggauucugggaaacccugagugugaaucucucagcacagccuccucuuggagcuacaucguggagaccuccucuagcgauaauggcacgugcuauccgggggacuuuauugauuacgaagaacugcgggagcagcuuuccagcgucucuuccuucgaacgcuuugagaucuuccccaagaccagcucuuggccuaaccacgacuccaauaagggagugacagccgcuuguccccaugccggcgcgaaaucuuuuuauaagaaccugaucuggcucguuaaaaagggcaauagcuacccuaaacuguccaagagcuauauuaacgauaaggggaaagaagugcuuguccuguggggaauccaccaccccuccaccucugccgaccaacagagccucuaccagaaugcugaugccuacguguucgugggcacauccagauauagcaagaaauuuaagccugagauugcuauccggccgaaaguccgcgaccaggaggggagaaugaacuacuauuggacccugguugaacccggagauaagauuacguucgaggccacaggcaaucugguggugccucgguacgcguuugccauggaacgcaacgcugggucuggaaucauuaucuccgacacccccguccaugacugcaacacaaccugucaaaccccuaaaggcgccaucaauacgagcuuccccuuucagaacauucacccgaucacaauuggcaagugcccuaaguaugugaaaucuaccaagcucagacuggcuacagggcuucggaauguucccagcauccagucccgcggacuguucggcgccauugccggguuuaucgagggaggcuggaccgggaugguggauggaugguacggcuaucaucaccagaacgaacaaggcucuggguacgcugcggaccucaaaagcacacagaaugccaucgaugagauuaccaacaaggucaauuccgugaucgagaaaaugaacacgcaguucacagcuguuggaaaggaguucaaucaccuggagaagagaauugaaaaccuuaauaaaaagguggacgauggcuuucuggacaucuggaccuacaacgccgagcuccugguccugcucgaaaaugagcggacccuggauuaucaugacagcaacgugaaaaaucuuuacgagaagguccgcucucagcugaaaaacaacgccaaggaaauugggaauggauguuucgaguuuuaucacaagugcgauaacacauguauggaauccgugaaaaauggcaccuacgacuauccuaaguacagcgaggaagcuaaacucaacagagaggagaucgaugggguuaagcuggaaucuacacggaucuaucaaauucuugccaucuacuccacgguggcgagcucccugguccucgugguuucucugggcgcuauuagcuucuggaugugcuccaauggaucucugcagugccgcaucuguauuuga

SEQ ID NO: 197832 - RNA, 1701 nt, Artificial Sequence; identical to SEQ ID NO: 194921
  derived and/or modified CDS sequence (opt5) from hemagglutinin__InfluenzaA__ADM32791

SEQ ID NO: 197833 - RNA, 1701 nt, Artificial Sequence
  derived and/or modified CDS sequence (opt5) from hemagglutinin__InfluenzaA__ADM32801
augaaggccauccuggugguccuccuguacaccuucgcuacagccaacgcggacacgcuuugcauuggcuaucacgcuaauaacagcaccgauacaguugacaccgugcuggagaaaaaugugacagucacccauuccgugaacauccucgaaaauaagcacaacgggaaacuguguaaacuuagaggaguugcuccccugcaucucggcaagugcaauauugccggguggauccugggaaacccugagugugaaucucugagcacagccuccucuuggagcuacauuguggagaccuccucuagcgauaauggcacgugcuauccgggggacuuuaucgauuacgaagaacuccgggagcagcuguccagcgucucuuccuucgaacgcuuugagaucuuccccaagaccagcucuuggccuaaccacgacuccaauaagggagugacagccgcuuguccccaugccggcgcgaaaucuuuuuauaagaaccuuauuuggcugguuaaaaagggcaauagcuacccuaaacucuccaagagcuauaucaacgauaaggggaaagaagugcugguccuuuggggcauucaccaccccuccaccucugccgaccaacagagccuguaccagaaugcugaugccuacguguucgugggauccagcagauauucuaagaaauuuaagccugagaucgcuauucggccgaaaguccgcgaccaggaggggagaaugaacuacuauuggacacucguugaacccggagauaagaucaccuucgaggccacgggcaaccugguggugccucgguacgcguuugccauggaacgcaaugcuggguccggaauuaucaucagcgacacacccguccaugauugcaacaccacaugucaaaccccuaaaggcgccauuaauaccucucugcccuuccagaacauccacccgauuacaaucggcaagugcccuaaguaugugaaaagcacgaagcucagacuggcuaccgggcuucggaauguucccuccauucagucucgcggacuguuuggcgccaucgccggguucaucgagggaggcuggacagggaugguggacggaugguacggcuaucaucaccagaacgaacaaggcagcggguacgcugcggaccucaaauccacccagaaugccauugaugagaucacaaacaaggucaauagcgugauugagaaaaugaacacccaguuuacggcuguuggaaaggaguucaaucaccuggagaagagaaucgaaaaccuuaauaaaaagguggacgauggcuuccuggacauuuggacauacaacgccgagcuccugguccugcucgaaaaugagcggacccuggauuaucaugacucuaacgugaaaaaccuuuacgagaagguccgcucccagcugaaaaauaacgccaaggaaaucgggaauggauguuuugaguucuaucacaagugcgauaacaccuguauggaaagcgugaaaaauggcacauacgacuauccuaaguacucugaggaagcuaaacucaacagagaggagaucgaugggguuaagcuggaauccacccggauuuaucaaauccuugccauuuacagcacaguggcguccucucugguccucgugguuagccugggcgcuaucuccuuuuggaugugcucuaauggaagccugcagugccgcauuuguaucuga

SEQ ID NO: 197834 - RNA, 1701 nt, Artificial Sequence
  derived and/or modified CDS sequence (opt5) from hemagglutinin__InfluenzaA__ADM32811
augaaggccauccuggugguccuccuguacaccuucgcuacagccaacgcggacacgcuuugcauuggcuaucacgcuaauaacagcaccgauacaguugacaccgugcuggagaagaaugugacagucacccauuccgugaaccuccuggaagauaagcacaaugggaaacuuuguaagcugagaggaguugcuccccuccaucugggcaaaugcaacaucgccggguggauucugggaaauccugagugugaaucucucagcacagccuccucuuggagcuacaucguggagaccuccucuagcgacaacggcacgugcuauccgggggauuuuauugacuacgaagaacugcgggagcagcuuuccagcgucucuuccuucgaacgcuuugagaucuuccccaagaccagcucuuggccuaaucacgauuccaacaagggagugacagccgcuuguccccaugccggcgcgaaaucuuuuuauaagaaucugaucuggcucguuaaaaagggcaacagcuacccuaaacuguccaagagcuauauuaaugacaaggggaaagaagugcuuguccuguggggaauccaccaccccuccaccucugccgaucaacagagccucuaccagaacgcugacgccuacguguucgugggcacauccagauauagcaagaaauuuaagccugagauugcuauccggccgaaaguccgcgaucaggaggggagaaugaauuacuauuggacccugguugaacccggagacaagauuacguucgaggccacaggcaaccugguggugccucgguacgcguuugccauggaacgcaacgcugggucuggaaucauuaucuccgauacccccguccaugacugcaauacaaccugucaaaccccuaaaggcgccaucaacacaagccuccccuuccacaauauucauccgaucacgauuggcaagugcccuaaguaugugaaaucuaccaagcugagacuugcuacagggcugcggaacguucccagcauccagucccgcggacucuuuggcgccauugccggguucaucgagggaggcuggaccgggaugguggacggaugguacggcuaucaccaccagaaugaacagggcucuggguacgcugcggaucugaaaagcacacaaaacgccaucgacgagauuaccaauaaggucaacuccgugaucgagaaaaugaauacgcaguuuacagcuguuggaaaggaguucaaccaucuugagaagagaauugaaaaucugaacaaaaagguggaugacggcuuccucgauaucuggaccuacaaugccgagcugcugguccuccuggaaaacgagcggacccuugacuaucacgauagcaaugugaaaaaccuguacgagaagguccgcucucagcucaaaaacaaugccaaggaaauugggaacggauguuuugaguucuaucauaagugcgacaauacauguauggaauccgugaaaaacggcaccuacgauuauccuaaguacagcgaggaagcuaaacugaauagagaggagaucgacgggguuaaacuugaaucuacacggaucuaucagauucuggccaucuacuccacgguggcgagcucccucguccuggugguuucucugggcgcuauuagcuuuuggaugugcuccaacggaucucuccaaugccgcaucuguauuuga

SEQ ID NO: 197835 - RNA, 1701 nt, Artificial Sequence; identical to SEQ ID NO: 194741
  derived and/or modified CDS sequence (opt5) from hemagglutinin__InfluenzaA__ADM32821

SEQ ID NO: 197836 - RNA, 1701 nt, Artificial Sequence; identical to SEQ ID NO: 196329
  derived and/or modified CDS sequence (opt5) from hemagglutinin__InfluenzaA__ADM32831

SEQ ID NO: 197837 - RNA, 1701 nt, Artificial Sequence; identical to SEQ ID NO: 194921
  derived and/or modified CDS sequence (opt5) from hemagglutinin__InfluenzaA__ADM32841

SEQ ID NO: 197838 - RNA, 1701 nt, Artificial Sequence; identical to SEQ ID NO: 196329
  derived and/or modified CDS sequence (opt5) from hemagglutinin__InfluenzaA__ADM32851

SEQ ID NO: 197839 - RNA, 1701 nt, Artificial Sequence; identical to SEQ ID NO: 194921
  derived and/or modified CDS sequence (opt5) from hemagglutinin__InfluenzaA__ADM32861

SEQ ID NO: 197840 - RNA, 1701 nt, Artificial Sequence; identical to SEQ ID NO: 195905
  derived and/or modified CDS sequence (opt5) from hemagglutinin__InfluenzaA__ADM32871

SEQ ID NO: 197841 - RNA, 1701 nt, Artificial Sequence; identical to SEQ ID NO: 196908
  derived and/or modified CDS sequence (opt5) from hemagglutinin__InfluenzaA__ADM32881

SEQ ID NO: 197842 - RNA, 1701 nt, Artificial Sequence
  derived and/or modified CDS sequence (opt5) from hemagglutinin__InfluenzaA__ADM32929
augaaggccauccuggugguccuccuguacaccuucgcuacagccaacgcggacacgcuuugcauuggcuaucacgcuaauaacagcaccgauacaguugacaccgugcuggagaaaaaugugacagucacccauuccgugaaccuccuggaagauaagcacaaugggaaacuuuguaagcugagaggaguugcuccccuccaucugggcaaaugcaacaucgccggguggauucugggaaauccugagugugaaucucucagcacagccuccucuuggagcuacaucguggagaccuccucuagcgacaacggcacgugcuauccgggggauuuuauugacuacgaagaacugcgggagcagcuuuccagcgucucuuccuucgaacgcuuugagaucuuccccaagaccagcucuuggccuaaucacgauuccaacaagggagugacagccgcuuguccccaugccggcgcgaaaucuuuuuauaagaaucugaucuggcucguuaaaaagggcaacagcuacccuaaacuguccaagagcuauauuaaugacaaggggaaagaagugcuuguccuguggggaauccaccaccccuccaccucugccgaucaacagagccucuaccagaacgcugacgccuacguguucgugggcacauccagauauagcaagaaauuuaagccugagauugcuauccggccgaaaguccgcgaucaggaggggagaaugaauuacuauuggacccugguugaacccggagacaagauuacguucgaggccacaggcaaccugguggugccucgguacgcguuugccauggaacgcaacgcugggucuggaaucauuaucuccgauacccccguccaugacugcaauacaaccugucaaaccccuaaaggcgccaucaacacaagccuccccuuccagaauauucacccgaucacgauuggcaagugcccuaaguaugugaaaucuaccaagcugagacuugcuacagggcugcggaacguucccagcauccagucccgcggacucuuuggcgccauugccggguucaucgagggaggcuggaccgggaugguggacggaugguacggcuaucaucaccagaaugaacaaggcucuggguacgcugcggaucugaaaagcacacagaacgccaucgacaagauuaccaauaaagucaacuccgugaucgagaagaugaauacgcaguuuacagcuguuggaaaggaguucaaccaccuugagaaaagaauugagaaucugaacaagaaaguggaugacggcuuccucgauaucuggaccuacaaugccgaacugcugguccuccuggagaacgaacggacccuugacuaucaugauagcaaugugaagaaccuguacgagaaaguccgcucucagcucaagaacaaugccaaggagauugggaacggauguuuugaguucuaucacaaaugcgacaauacauguauggaauccgugaagaacggcaccuacgauuauccuaaauacagcgaagaggcuaagcugaauagagaagagaucgacgggguuaaacuugagucuacacggaucuaucaaauucuggccaucuacuccacgguggcgagcucccucguccuggugguuucucugggcgcuauuagcuuuuggaugugcuccaacggaucucuccgcugcagaaucuguauuuga

SEQ ID NO: 197843 - RNA, 1701 nt, Artificial Sequence
  derived and/or modified CDS sequence (opt5) from hemagglutinin__InfluenzaA__ADM32939
auggaggccauccuggugguccuccuguacaccuucgcuacagccaacgcggacacgcuuugcauuggcuaucacgcuaauaacagcaccgauacaguugacaccgugcuggaaaagaaugugacagucacccauuccgugaaccuccuggaggauaaacacaaugggaaacuuuguaagcugagaggaguugcgccccuccaucugggcaagugcaacaucgccggguggauucugggaaauccugaaugugagucucucagcacagcuuccucuuggagcuacaucguggaaaccuccucuagcgacaacggcacgugcuauccgggggauuuuauugacuacgaggagcugcgggaacagcuuuccagcgucucuuccuucgagcgcuuugaaaucuuccccaaaaccagcucuuggccuaaucacgauuccaacaagggagugacagccgcuuguccccaugccggcgccaagagcuuuuauaaaaaucugaucuggcucguuaagaaaggcaacucuuacccuaagcuguccaaaagcuauauuaaugacaaggggaaggaggugcuuguccuguggggaauccaccaccccuccaccucugccgaucaacagagccucuaccagaacgcugacgccuacguguucgugggcuccagcagauauucuaaaaaguuuaaaccugagauugcuauccggccgaagguccgcgaucaggaagggagaaugaauuacuauuggacacugguugagcccggagacaaaauuaccuucgaagccacgggcaaccugguggugccucgguacgcguuugccauggagcgcaacgcuggguccggaaucauuaucagcgauacacccguccaugacugcaauaccacaugucaaaccccuaagggcgccaucaacaccucucuccccuuccacaauauucauccgaucacaauuggcaaaugcccuaaguauguuaagagcacgaaacugagacuugcuaccgggcugcggaacauccccuccauucagucucgcggacucuuuggcgccaucgccggguucaucgaaggaggcuggacagggaugguggacggaugguacggcuaucaccaccagaaugagcagggcagcggguacgcugcggaucugaaguccacccaaaacgccauugacgagaucacaaauaaagugaacagcgucauugaaaagaugaauacccaguuuacggcugugggaaaagaguucaaccaucuugaaaagagaaucgagaaucugaacaagaaaguugaugacggcuuccucgauauuuggacauacaaugccgaacugcuggugcuccuggagaacgagcggacccuugacuaucacgauucuaaugucaagaaccuguacgaaaaagugcgcucccagcucaagaacaaugccaaagagaucgggaacggauguuuugaguucuaucauaagugcgacaauaccuguauggaaagcgucaagaacggcacauacgauuauccuaaauacucugaagaggcuaagcugaauagagaggaaaucgacggggugaaacuugaguccacccggauuuaucagauccuggccauuuacagcacaguugcguccucucucgugcuggucgugagccugggcgcuaucuccuuuuggaugugcucuaacggaagccuccgcugcagaauuuguaucuga

SEQ ID NO: 197844 - RNA, 1701 nt, Artificial Sequence
  derived and/or modified CDS sequence (opt5) from hemagglutinin__InfluenzaA__ADM32949
augaaggccauccuggugguccuccuguacaccuucgcuacagccaacgcggacacgcuuugcauuggcuaucacgcuaauaacagcaccgauacaguugacaccgugcuggagaaaaaugugacagucacccauuccgugaaccuccuggaagauaagcacaaugggaaacuuuguaagcugagaggaguugcuccccuccaucugggcaaaugcaacaucgccggguggauucugggaaauccugagugugaaucucucagcacagccuccucuuggagcuacaucguggagaccuccucuagcgacaacggcacgugcuauccgggggauuuuauugacuacgaagaacugcgggagcagcuuuccagcgucucuuccuucgaacgcuuugagaucuuccccaagaccagcucuuggccuaaucacgauuccaacaagggagugacagccgcuuguccccaugccggcgcgaaauccuuuuauaagaaucugaucuggcucguuaaaaagggcaacucuuacccuaaacuguccaagagcuauauuaaugacaaggggaaagaagugcuuguccuguggggaauccaccaccccuccaccucugccgaucaacagagccucuaccagaacgcugacgccuacguguucgugggcacauccagauauagcaagaaauuuaagccugagauugcuauccggccgaaaguccgcgaucaggaggggagaaugaauuacuauuggacccugguugaacccggagacaagauuacguucgaggccacaggcaaccugguggugccucgguacgcguuugccauggaacgcaacgcugggucuggaaucauuaucuccgauacccccguccaugacugcaauacaaccugucaaaccccuaacggcgccaucaauacaagccuccccuuccagaacauucacccgaucacgauuggcaaaugcccuaaguaugugaagucuaccaaacugagacuugcuacagggcugcggaauauccccagcauucagucccgcggacucuuuggcgccaucgccggguucaucgagggaggcuggaccgggaugguugacggaugguacggcuaucaucaccagaacgaacaaggcucuggguacgcugcggaucuuaagagcacacagaaugccauugacgagaucaccaacaaagugaauagcgucauugagaagaugaacacgcaguuuacagcugugggaaaagaguucaaucaccuggagaagagaaucgaaaaccugaauaagaaaguugaugacggcuuccucgauauuuggaccuacaacgccgagcugcuggugcuccuggaaaaugagcggacccuugacuaucaugauagcaacgucaagaaccuguacgagaaagugcgcucucagcucaagaauaacgccaaagaaaucgggaauggauguuuugaguucuaucacaagugcgacaacacauguauggaauccgucaagaauggcaccuacgauuauccuaaauacagcgaggaagcuaagcugaacagagaggagaucgacggggugaaacuugaaucuacacggauuuaucaaauccuggccauuuacuccacgguugcgagcucccucgugcuggucgugucucugggcgcuaucagcuuuuggaugugcuccaauggaucucuccgcugcagaauuuguaucuga

SEQ ID NO: 197845 - RNA, 1701 nt, Artificial Sequence
  derived and/or modified CDS sequence (opt5) from hemagglutinin__InfluenzaA__ADM32958
augaaggccauccugguguuccuccuguacaccuuugcuacagccaacgcggacacgcuuugcauuggcuaucacgcuaauaacagcaccgauacagucgacaccguucuggagaagaaugugacagugacccauuccgucaacauccucgaagauaagcacaaugggaaacuguguaaacuuagaggaguggcuccccugcaucucggcaaaugcaacauugccggguggauccugggaaauccugagugugaaucucugagcacagccuccucuuggagcuacauuguugagaccuccucuagcgacaacggcacgugcuauccgggggauuucaucgacuacgaggaacuccgggagcagcuguccagcgugucuuccuuugaacgcuucgagaucuuucccaagaccagcucuuggccuaaucacgauuccaacaagggagucacagccgcuuguccccaugccggcgcgaaaucuuucuauaagaaucuuauuuggcuggugaaaaagggcaacagcuacccuaaacucuccaagagcuauaucaaugacaaggggaaagaaguucuggugcuuuggggcauucaccaccccuccaccucugccgaucaacagagccuguaccagaacgcugacgccuacgucuuuguggaguccagcagauauucuaagaaauucaagccugagaucgcuauucggccgaaagugcgcgaucaggaaggaagaaugaauuacuauuggacacucgucgagcccggggacaagaucaccuuugaagccacgggaaaccugguugugccucgguacgcguucgccauggagcgcaacgcuggcuccgggauuaucaucagcgauacacccgugcaugacugcaauaccacaugucaaaccccuaaaggagccauuaacaccucucugcccuuucagaauauccacccgauuacaaucggcaagugcccuaaguaugucaaaagcacgaagcucagacuggcuaccggccuucggaacgugcccuccauucagucucgcgggcuguucggagccaucgccggcuuuaucgaagggggauggacaggcaugguugacgggugguacggauaucaucaccagaaugagcaaggcagcggcuacgcugcggaucucaaauccacccagaacgccauugacgagaucacaaauaaggugaacagcgucauugaaaagaugaauacccaguucacggcuguggggaaggaguucaaccaccuggaaaagagacuugagaaucugaacaaaaagguugaugacggauuucucgauaucuggacauacaaugccgaacugcuggugcuccuggagaacgagcggacccuugacuaucaugauucuaaugucaaaaaccuguacgaaaaggugcgcucccagcucaaaaacaaugccaaggaggucggcaacggguguuucgaauuuuaucacaagugcgacaauaccuguauggagagcgugaaaaacggaacauacgauuauccuaaguacucugaagaggcuaaacugaauagagaggaaauugacggcguuaaacuugaguccacccggaucuaucaaauccuggccauuuacagcacagcggcuuccucucucgugcuggucgugagccugggggccaucuccuucuggaugugcucuaacggcagccuccgcugcagaauuuguaucuga

SEQ ID NO: 197846 - RNA, 1701 nt, Artificial Sequence
  derived and/or modified CDS sequence (opt5) from hemagglutinin__InfluenzaA__ADM32977
augaaggccauccuggugguccuccugugcaccuucgcuacagccaacgcggacacgcuuuguauuggcuaccacgcuaauaacagcaccgauacaguugacaccgugcuggagaaaaaugugacagucacccauuccgugaaccuccuggaagauaagcacaaugggaaacuuugcaagcugagaggaguugcuccccuccaucugggcaaauguaacaucgccggguggauucugggaaauccugagugcgaaucucucagcacagccuccucuuggagcuauaucguggagaccuccucuagcgacaacggcacguguuacccgggggauuuuauugacuaugaagaacugcgggagcagcuuuccagcgucucuuccuucgaacgcuuugagaucuuccccaagaccagcucuuggccuaaucacgauuccaacaagggagugacagccgcuugcccccaugccggcgcgaaaucuuuuuacaagaaucugaucuggcucguuaaaaagggcaacagcuauccuaaacuguccaagagcuacauuaaugacaaggggaaagaagugcuuguccuguggggaauccaccaccccuccaccucugccgaucaacagagccucuaucagaacgcugacgccuacguguucgugggcacauccaaguacagcaaaaaguuuaaaccugagauugcuaucagaccgaagguccgggaucaggaggggcgcaugaauuauuacuggacccugguugaacccggagacaaaauuacguucgaggccacaggcaaccugguggugccuagauaugcguuugccauggaacggaacgcugggucuggaaucauuaucuccgauacccccguccaugacuguaauacaaccugccaaaccccuaagggcgccaucaacacaagccuccccuuccagaauauucacccgaucacgauuggcaaguguccuaaauacgugaagucuaccaaacugcgccuugcuacagggcugagaaacguucccagcauccagucccggggacucuuuggcgccauugccggguucaucgagggaggcuggaccgggaugguggacggaugguauggcuaccaucaccagaaugaacaaggcucuggguaugcugcggaucuuaagagcacacagaacgccaucgacggaauuaccaauaaaaucaacuccgucauugagaagaugaauacgcaguuuacagcugugggcaaggaguucaaccaccuggaaaaacgcaucgagaaucugaacaagaaaguugaugacggguuccucgauauuuggaccuacaaugccgaacugcuggugcuccuggagaacgaaagaacccuugacuaccaugauagcaaugucaagaaccuguaugagaaagugcggucucagcucaagaacaaugccaaggagaucggaaacggcugcuuugaguucuaccacaaaugugacaauacaugcauggaguccgucaagaacgggaccuaugauuacccuaaauauagcgaagaggcuaagcugaaucgcgaagagaucgacggcgugaaacuugagucuacaagaauuuaccaaauccuggccauuuauuccacgguugcgagcucccucgugcuggucgugucucugggagcuaucagcuuuuggaugugcuccaacggcucucuccggugucgcauuugcaucuga

SEQ ID NO: 197847 - RNA, 1701 nt, Artificial Sequence
  derived and/or modified CDS sequence (opt5) from hemagglutinin__InfluenzaA__ADM32986
augaaggccauccuggugguccuccuguacaccuucgcuacagccaacgcggacacgcuuugcauuggcuaucacgcuaauaacagcaccgauacaguugacaccgugcuggagaaaaaugugacagucacccauuccgugaaccuccuggaagauaagcacaaugggaaacuuuguaagcugagaggaguugcuccccuccaucugggcaaaugcaacaucgccggguggauucugggaaauccugagugugaaucucucagcacagccuccucuuggagcuacaucguggagaccuccucuagcgacaacggcacgugcuauccgggggauuuuauugacuacgaagaacugcgggagcagcuuuccagcgucucuuccuucgaacgcuuugagaucuuccccaagaccaauagcuggccuaaccacgauucuaauaagggagugacagccgcuuguccccaugccggcgcgaaauccuuuuauaagaaccugaucuggcucguuaaaaagggcaauagcuacccuaaacugucuaaguccuauauuaacgacaaggggaaagaagugcuuguccuguggggaauccaccaccccagcaccuccgccgaucaacagucucucuaccagaaugcugacgccuacguguucgugggcacaagcaaguauuccaaaaaguuuaaaccugagauugcuaucagaccgaagguccgggaucaggaggggcgcaugaacuacuauuggacccugguugaacccggagacaaaauuacguucgaggccacaggcaaccugguggugccuagauacgcguuugccauggaacggaaugcugggagcggaaucauuaucucugauacccccguccaugacugcaacacaaccugucaaaccccuaagggcgccaucaauacaucccuccccuuccagaacauucacccgaucacgauuggcaagugcccuaaauauguuaagagcaccaaacugcgccuugcuacagggcugagaaaugugcccucuauccagagccggggacucuuuggcgccauugccggguucaucgagggaggcuggaccgggaugguggacggaugguacggcuaucaucaccagaacgaacaaggcuccggguacgcugcggaucugaagucuacacagaaugccaucgacggaauuaccaacaaaaucaauagcgucauugagaagaugaacacgcaguuuacagcugugggcaaggaguucaaucaccuugaaaaacgcaucgagaaccugaauaagaaaguugaugacggguuccucgauauuuggaccuacaacgccgaacugcuggugcuccuggagaaugaaagaacccuuaacuaucaugacuccaacgucaagaaucuguacgagaaagugcggagccagcucaagaacaaugccaaggagaucggaaacggcuguuuugaguucuaucacaaaugcgauaauacauguauggagucugucaagaacgggaccuacgacuauccuaaauacuccgaagaggcuaagcugaaucgcgaagagaucgauggcgugaaacuugagagcacaagaauuuaucaaauccuggccauuuacucuacgguugcguccagccucgugcuggucgugucccugggagcuaucucuuuuuggaugugcagcaacggcucccuccggugccgcauuuguaucuga

SEQ ID NO: 197848 - RNA, 1701 nt, Artificial Sequence
  derived and/or modified CDS sequence (opt5) from hemagglutinin__InfluenzaA__ADM32995
augaaggccauccuggugguccuccuguacaccuucgcuacagccaacgcggacacgcuuugcauuggcuaucacgcuaauaacagcaccgauacaguugacaccgugcuggagaaaaaugugacagucacccauuccgugaaccuccuggaagauaagcacaaugggaaacuuuguaagcugagaggaguugcuccccuccaucugggcaaaugcaacaucgccggguggauucugggaaauccugagugugaaucucucagcacagccuccucuuggagcuacaucguggagaccuccucuagcgacaacggcacgugcuauccgggggauuuuauugacuacgaagaacugcgggagcagcuuuccagcgucucuuccuucgaacgcuuugagaucuuccccaagaccaauagcuggccuaaccacgauucuaauaagggagugacagccgcuuguccccaugccggcgcgaaauccuuuuauaagaaccugaucuggcucguuaaaaagggcaauagcuacccuaaacugucuaaguccuauauuaacgacaaggggaaagaagugcuuguccuguggggaauccaccaccccagcaccuccgccgaucaacagucucucuaccagaaugcugacgccuacguguucgugggcacaagcaaguauuccaaaaaguuuaaaccugagauugcuaucagaccgaagguccgggaucaggaggggcgcaugaacuacuauuggacccugguugaacccggagacaaaauuacguucgaggccacaggcaaccugguggugccuagauacgcguuugccauggaacggaaugcugggagcggaaucauuaucucugauacccccguccaugacugcaacacaaccugucaaaccccuaagggcgccaucaauacaucccuccccuuccagaacauucacccgaucacgauuggcaagugcccuaaauauguuaagagcaccaaacugcgccuugcuacagggcugagaaaugugcccucuauccagagccggggacucuuuggcgccauugccggguucaucgagggaggcuggaccgggaugguggacggaugguacggcuaucaucaccagaacgaacaaggcuccggguacgcugcggaucugaagucuacacagaaugccaucgacggaauuaccaacaaaaucaauagcgucauugagaagaugaacacgcaguuuacagcugugggcaaggaguucaaucaccuugaaaaacgcaucgagaaccugaauaagaaaguugaugacggguuccucgauauuuggaccuacaacgccgaacugcuggugcuccuggagaaugaaagaacccuugacuaucaugauuccaacgucaagaaccuguacgagaaagugcggagccagcucaagaauaacgccaaggagaucggaaauggcuguuuugaguucuaucacaaaugcgacaacacauguauggagucugucaagaaugggaccuacgauuauccuaaauacuccgaagaggcuaagcugaaccgcgaagagaucgacggcgugaaacuugagagcacaagaauuuaucaaauccuggccauuuacucuacgguugcguccagccucgugcuggucgugucccugggagcuaucucuuuuuggaugugcagcaauggcucccuccggugccgcauuuguaucuga

SEQ ID NO: 197849 - RNA, 1701 nt, Artificial Sequence; identical to SEQ ID NO: 195842
  derived and/or modified CDS sequence (opt5) from hemagglutinin__InfluenzaA__ADM33004

SEQ ID NO: 197850 - RNA, 1701 nt, Artificial Sequence; identical to SEQ ID NO: 194741
  derived and/or modified CDS sequence (opt5) from hemagglutinin__InfluenzaA__ADM33023

SEQ ID NO: 197851 - RNA, 1701 nt, Artificial Sequence
  derived and/or modified CDS sequence (opt5) from hemagglutinin__InfluenzaA__ADM33040
augaaggccauccuggugguccuccuguacaccuucgcuacagccaacgcggacacgcuuugcauuggcuaucacgcuaauaacagcaccgauacaguugacaccgugcuggagaagaaugugacagucacccauuccgugaaccuccuggaagauaagcacaaugggaaacuuuguaagcugagaggaguugcuccccuccaucugggcaaaugcaacaucgccggguggauucugggaaauccugagugugaaucucucagcacagccuccucuuggagcuacaucguggagaccuccucuagcgacaacggcacgugcuauccgggggauuuuauugacuacgaagaacugcgggagcagcuuuccagcgucucuuccuucgaacgcuuugagaucuuccccaagaccagcucuuggccuaaucacgauuccaacaagggagugacagccgcuuguccccaugccggcgcgaaaucuuuuuauaagaaucugaucuggcucguuaaaaagggcaacagcuacccuaaacuguccaagagcuauauuaaugacaaggggaaagaagugcuuguccuguggggaauccaccaccccuccaccucugccgaucaacagagccucuaccagaacgcugacgccuacguguucgugggcuccagcagauauucuaagaaauuuaagccugagauugcuauccggccgaaaguccgcgaucaggaggggagaaugaauuacuauuggacacugguugaacccggagacaagauuaccuucgaggccacgggcaaccugguggugccucgguacgcguuugccauggaacgcaacgcuggguccggaaucauuaucagcgauacacccguccaugacugcaauaccacaugucaaaccccuaaaggcgccaucaacaccucucuccccuuccagaauauucacccgaucacaauuggcaagugcccuaaguaugugaaaagcacgaagcugagacuugcuaccgggcugcggaacguucccuccauccagucucgcggacucuuuggcgccauugccggguucaucgagggaggcuggacagggaugguggacggaugguacggcuaucaucaccagaaugaacaaggcagcggguacgcugcggaucugaaauccacccagaacgccaucgacgagauuacaaauaaggucaacagcgugaucgagaaaaugaauacccaguuuacggcuguuggaaaggaguucaaccaccuugagaagagaauugaaaaucugaacaaaaagguggaugacggcuuccucgauaucuggacauacaaugccgagcugcugguccuccuggaaaacgagcggacccuugacuaucaugauucuaaugugaaaaaccuguacgagaagguccgcucccagcucaaaaacaaugccaaggaaauugggaacggauguuuugaguucuaucacaagugcgacaauaccuguauggaaagcgugaaaaacggcacauacgauuauccuaaguacucugaggaagcuaaacugaauagagaggagaucgacgggguuaaacuugaauccacccggaucuaucaaauucuggccaucuacagcacaguggcguccucucucguccuggugguuagccugggcgcuauuuccuuuuggaugugcucuaacggaagccuccgcugcagaaucuguauuuga

SEQ ID NO: 197852 - RNA, 1701 nt, Artificial Sequence
  derived and/or modified CDS sequence (opt5) from hemagglutinin__InfluenzaA__ADM33050
augaaggccauccuggugguccuccuguacaccuucgcuacagccaacgcggacacgcuuugcauuggcuaucacgcuaauaacagcaccgauacaguugacaccgugcuggagaaaaaugugacagucacccauuccgugaaccuccuggaagauaagcacaaugggaaacuuuguaagcugagaggaguugcuccccuccaucugggcaaaugcaacaucgccggguggauucugggaaauccugagugugaaucucucagcacagccuccucuuggagcuacaucguggagaccuccucuagcgacaacggcacgugcuauccgggggauuuuauugacuacgaagaacugcgggagcagcuuuccagcgucucuuccuucgaacgcuuugagaucuuccccaagaccagcucuuggccuaaucacgauuccaacaagggagugacagccgcuuguccccaugccggcgcgaaaucuuuuuauaagaaucugaucuggcucguuaaaaagggcaacagcuacccuaaacugaauaaguccuauauuaacgacaaggggaaagaagugcuuguccuguggggaauccaccaccccagcaccuccgccgaucaacagucucucuaccagaaugcugacgccuacguguucgugggcacaagcagauauuccaagaaauuuaagccugagauugcuauccggccgaaaguccgcgaucaggaggggagaaugaacuacuauuggacccugguugaacccggagacaagauuacguucgaggccacaggcaaccugcucgugccucgguacgcguuugccauggaacgcaaugcugggagcggaaucauuaucucugauacccccgugcaugacugcaacacaaccugucaaaccccuaaaggcgccaucaauacaucccugcccuuccagaacauucacccgaucacgauuggcaagugcccuaaguaugucaaaagcaccaaacuuagacuggcuacagggcuccggaaugugcccucuauccagagccgcggacuguuuggcgccauugccggguucaucgagggaggcuggaccgggaugguugacggaugguacggcuaucaucaccagaacgaacaaggcuccggguacgcugcggaucuuaagucuacacagaaugccaucgacgagauuaccaacaaggugaauagcgucaucgagaaaaugaacacgcaguuuacagcugugggaaaggaguucaaucaccuggagaagagaauugaaaaccucaauaaaaagguugaugacggcuuccuggauaucuggaccuacaacgccgagcugcucgugcugcuugaaaaugagcggacccuggacuaucaugauuccaacgucaaaaaccucuacgagaaggugcgcagccagcugaaaaauaacgccaaggaaauugggaauggauguuuugaguucuaucacaagugcgacaacacauguauggaaucugucaaaaauggcaccuacgauuauccuaaguacuccgaggaagcuaaacuuaacagagaggagaucgacggggugaagcuggaaagcacacggaucuaucaaauucucgccaucuacucuacgguugcguccagccuggugcuggucgugucccucggcgcuauuucuuuuuggaugugcagcaauggaucccugcgcugcagaaucuguauuuga

SEQ ID NO: 197853 - RNA, 1701 nt, Artificial Sequence
  derived and/or modified CDS sequence (opt5) from hemagglutinin__InfluenzaA__ADM33069
augaaggccauccuggugguccuccuguacaccuucgcuacagccaacgcggacacgcuuugcauuggcuaucacgcuaauaacagcaccgauacaguugacaccgugcuggagaaaaaugugacagucacccauuccgugaaccuccuggaagauaagcacaaugggaaacuuuguaagcugagaggaguugcuccccuccaucugggcaaaugcaacaucgccggguggauucugggaaauccugagugugaaucucucagcacagccuccucuuggagcuacaucguggagaccuccucuagcgacaacggcacgugcuauccgggggauuuuauugacuacgaagaacugcgggagcagcuuuccagcgucucuuccuucgaacgcuuugagaucuuccccaagaccagcucuuggccuaaucacgauuccaacaagggagugacagccgcuuguccccaugccggcgcgaaaucuuuuuauaagaaucugaucuggcucguuaaaaagggcaacagcuacccuaaacuguccaagagcuauauuaaugacaaggggaaagaagugcuuguccuguggggaauccaccaccccuccaccucugccgaucaacagagccucuaccagaacgcugacgccuacguguucgugggcacauccagauauagcaagaaauuuaagccugagauugcuauccggccgaaaguccgcgaucaggaggggagaaugaauuacuauuggacccugguugaacccggagacaagauuacguucgaggccacaggcaaccugguggugccucgguacgcguuugccauggaacgcaacgcugggucuggaaucauuaucuccgauacccccguccaugacugcaauacaaccugucaaaccccugagggcgccaucaacacaagccuccccuuccagaauauucacccgaucacgauuggcaaaugcccuaaguaugugaagucuaccaaacugagacuugcuacagggcugcggaacguucccagcauccagucccgcggacucuuuggcgccauugccggguucaucgaaggaggcuggaccgggaugguggacggaugguacggcuaucaucaccagaaugagcaaggcucuggguacgcugcggaucuuaagagcacacagaacgccaucgacgagauuaccaauaaagucaacuccgugaucgaaaagaugaauacgcaguuuacagcuguuggaaaagaguucaaccaccuggaaaagagaauugagaaucugaacaagaaaguggaugacggcuuccucgauaucuggaccuacaaugccgaacugcugguccuccuggagaacgagcggacccuugacuaucaugauagcaaugugaagaaccuguacgaaaaaguccgcucucagcucaagaacaaugccaaagagauugggaacggauguuuugaguucuaucacaagugcgacaauacauguauggaguccgugaagaacggcaccuacgauuauccuaaauacagcgaagaggcuaagcugaauagagaggaaaucgacgggguuaaacuugagucuacacggaucuaucaaauucuggccaucuacuccacgguggcgagcucccucguccuggugguuucucugggcgcuauuagcuuuuggaugugcuccaacggaucucuccgcugcagaaucuguauuuga

SEQ ID NO: 197854 - RNA, 1701 nt, Artificial Sequence
  derived and/or modified CDS sequence (opt5) from hemagglutinin__InfluenzaA__ADM33079
augaaggccauccuggugguccuccuguacaccuucgcuacagccaacgcggacacgcuuugcauuggcuaucacgcuaauaacagcaccgauacaguugacaccgugcuggagaagaaugugacagucacccauuccgugaaccuccuggaagauaagcacaaugggaaacuuuguaagcugagaggaguugcuccccuccaucugggcaaaugcaacaucgccggguggauucugggaaauccugagugugaaucucucagcacagccuccucuuggagcuacaucguggagaccuccucuagcgacaacggcacgugcuauccgggggauuuuauugacuacgaagaacugcgggagcagcuuuccagcgucucuuccuucgaacgcuuugagaucuuccccaagaccagcucuuggccuaaucacgauuccaacaagggagugacagccgcuuguccccaugccggcgcgaaaucuuuuuauaagaaucugaucuggcucguuaaaaagggcaacagcuacccuaaacuguccaagagcuauauuaaugacaaggggaaagaagugcuuguccuguggggaauccaccaccccuccaccucugccgaucaacagagccucuaccagaacgcugacgccuacguguucgugggcacauccagauauagcaagaaauuuaagccugagauugcuauccggccgaaaguccgcgaucaggaggggagaaugaauuacuauuggacccugguugaacccggagacaagauuacguucgaggccacaggcaaccugguggugccucgguacgcguuugccauggaacgcaacgcugggucuggaaucauuaucuccgauacccccguccaugacugcaauacaaccugucaaaccccuaaaggcgccaucaacacaagccuccccuuccagaauauucacccgaucacgauuggcaagugcccuaaguaugugaaaucuaccaagcugagacuugcuacagggcugcggaacguucccagcauccagucccgcggacucuuuggcgccauugccggguucaucgagggaggcuggaccgggaugguggacggaugguacggcuaucaucaccagaaugaacaaggcucuggguacgcugcggaucugaaaagcacacagaacgccaucgacgagauuaccaauaaggucaacuccgugaucgagaaaaugaauacgcaguuuacagcuguuggaaaggaguucaaccaccuugagaagagaauugaaaaucugaacaaaaagguggaugacggcuuccucgauaucuggaccuacaaugccgagcugcugguccuccuggaaaacgagcggacccuugacuaucaugauagcaaugugaaaaaccuguacgagaagguccgcucucagcucaaaaacaaugccaaggaaauugggaacggauguuuugaguucuaucacaagugcgacaauacauguauggaauccgugaaaaacggcaccuacgauuauccuaaguacagcgaggaagcuaaacugaauagagaggagaucgacgggguuaaacuugaaucuacacggaucuaucaaauucuggccaucuacuccacgguggcgagcucccucguccuggugguuucucugggcgcuauuagcuuuuggaugugcuccaacggaucucuccgcugcagaaucuguauuuga

SEQ ID NO: 197855 - RNA, 1701 nt, Artificial Sequence
  derived and/or modified CDS sequence (opt5) from hemagglutinin__InfluenzaA__ADM33099
augaaggccauccuggugguccuccuguacaccuucgcuacagccaacgcggacacgcuuugcauuggcuaucacgcuaauaacagcaccgauacaguugacaccgugcuggagaagaaugugacagucacccauuccgugaaccuccuggaagauaagcacaaugggaaacuuuguaagcugagaggaguugcuccccuccaucugggcaaaugcaacaucgccggguggauucugggaaauccugagugugaaucucucagcacagccuccucuuggagcuacaucguggagaccuccucuagcgacaacggcacgugcuauccgggggauuuuauugacuacgaagaacugcgggagcagcuuuccagcgucucuuccuucgaacgcuuugagaucuuccccaagaccagcucuuggccuaaucacgauuccaacaagggagugacagccgcuuguccccaugccggcgcgaaaucuuuuuauaagaaucugaucuggcucguuaaaaagggcaacagcuacccuaaacuguccaagagcuauauuaaugacaaggggaaagaagugcuuguccuguggggaauccaccaccccuccaccucugccgaucaacagagccucuaccagaacgcugacgccuacguguucgugggcacauccagauauagcaagaaauuuaagccugagauugcuauccggccgaaaguccgcgaucaggaggggagaaugaauuacuauuggacccugguugaacccggagacaagauuacguucgaggccacaggcaaccugauggugccucgguacgcguuugccauggaacgcaacgcugggucuggaaucauuaucuccgauacccccgugcaugacugcaauacaaccugucaaaccccuaaaggcgccaucaacacaagccuccccuuccagaauauucacccgaucacgauuggcaagugcccuaaguaugucaaaucuaccaagcugagacuugcuacagggcugcggaacgugcccagcauccagucccgcggacucuuuggcgccauugccggguucaucgagggaggcuggaccgggaugguugacggaugguacggcuaucaucaccagaaugaacaaggcucuggguacgcugcggaucugaaaagcacacagaacgccaucgacgagauuaccaauaaggugaacuccgucaucgagaaaaugaauacgcaguuuacagcugugggaaaggaguucaaccaccuugagaagagaauugaaaaucugaacaaaaagguugaugacggcuuccucgauaucuggaccuacaaugccgagcugcuggugcuccuggaaaacgagcggacccuugacuaucaugauagcaaugucaaaaaccuguacgagaaggugcgcucucagcucaaaaacaaugccaaggaaauugggaacggauguuuugaguucuaucacaagugcgacaauacauguauggaauccgucaaaaacggcaccuacgauuauccuaaguacagcgaggaagcuaaacugaauagagaggagaucgacggggugaaacuugaaucuacacggaucuaucaaauucuggccaucuacuccacgguugcgagcucccucgugcuggucgugucucugggcgcuauuagcuuuuggaugugcuccaacggaucucuccgcugcagaaucuguauuuga

SEQ ID NO: 197856 - RNA, 1701 nt, Artificial Sequence; identical to SEQ ID NO: 197855
  derived and/or modified CDS sequence (opt5) from hemagglutinin__InfluenzaA__ADM33109

SEQ ID NO: 197857 - RNA, 1701 nt, Artificial Sequence
  derived and/or modified CDS sequence (opt5) from hemagglutinin__InfluenzaA__ADM33128
augaaggccauccuggugguccuccuguacaccuucgcuacagccaacgcggacacgcuuugcauuggcuaucacgcuaauaacagcaccgauacaguugacaccgugcuggagaaaaaugugacagucacccauuccgugaaccuccuggaagauaagcacaaugggaaacuuuguaagcugagaggaguugcuccccuccaucugggcaaaugcaacaucgccggguggauucugggaaauccugagugugaaucucucagcacagccuccucuuggagcuacaucguggagaccuccucuagcgacaacggcacgugcuauccgggggauuuuauugacuacgaagaacugcgggagcagcuuuccagcgucucuuccuucgaacgcuuugagaucuuccccaagaccagcucuuggccuaaucacgauuccaacaagggagugacagccgcuuguccccaugccggcgcgaaaucuuuuuauaagaaucugaucuggcucguuaaaaagggcaacagcuacccuaaacuguccaagagcuauauuaaugacaaggggaaagaagugcuuguccuguggggaauccaccaccccuccaccucugccgaucaacagagccucuaccagaacgcugacgccuacguguucgugggcacauccagauauagcaagaaauuuaagccugagauugcuauccggccgaaaguccgcgagcaggaagggagaaugaauuacuauuggacccugguugagcccggagauaagauuacguucgaagccacaggcaaccugguggugccucgguacgcguuugccauggagcgcaacgcugggucuggaaucauuaucuccgacacccccguccaugauugcaauacaaccugucaaaccccuaaaggcgccaucaacacaagccuccccuuccagaauauucacccgaucacgauuggcaagugcccuaaguaugugaaaucuaccaagcugagacuugcuacagggcugcggaacguucccagcauccagucccgcggacucuuuggcgccauugccggguucaucgaaggaggcuggaccgggaugguggacggaugguacggcuaucaucaccagaaugagcaaggcucuggguacgcugcggaccugaaaagcacacagaacgccaucgaugagauuaccaauaaggucaacuccgugaucgaaaagaugaauacgcaguuuacagcuguuggaaaggaguucaaccaccuugaaaagagaauugagaaucugaacaaaaagguggacgauggcuuccucgacaucuggaccuacaaugccgaacugcugguccuccuggagaacgagcggacccuugauuaucaugacagcaaugugaaaaaccuguacgaaaagguccgcucucagcucaaaaacaaugccaaggagauugggaacggauguuuugaguucuaucacaagugcgauaauacauguauggaguccgugaaaaacggcaccuacgacuauccuaaguacagcgaagaggcuaaacugaauagagaggaaaucgaugggguuaaacuugagucuacacggaucuaucaaauucuggccaucuacuccacgguggcgagcucccucguccuggugguuucucugggcgcuauuagcuuuuggaugugcuccaacggaucucuccgcugcagaaucuguauuuga

SEQ ID NO: 197858 - RNA, 1701 nt, Artificial Sequence; identical to SEQ ID NO: 197857
  derived and/or modified CDS sequence (opt5) from hemagglutinin__InfluenzaA__ADM33137

SEQ ID NO: 197859 - RNA, 1701 nt, Artificial Sequence; identical to SEQ ID NO: 197857
  derived and/or modified CDS sequence (opt5) from hemagglutinin__InfluenzaA__ADM33147

SEQ ID NO: 197860 - RNA, 1701 nt, Artificial Sequence; identical to SEQ ID NO: 197857
  derived and/or modified CDS sequence (opt5) from hemagglutinin__InfluenzaA__ADM33157

SEQ ID NO: 197861 - RNA, 1701 nt, Artificial Sequence
  derived and/or modified CDS sequence (opt5) from hemagglutinin__InfluenzaA__ADM33167
augaaggccauccuggugguccuccuguacaccuucgcuacagccaacgcggacacgcuuugcauuggcuaucacgcuaauaacagcaccgauacaguugacaccgugcuggagaaaaaugugacagucacccauuccgugaacauccucgaagauaagcacaaugggaaacuguguaaacuuagaggaguugcuccccugcaucucggcaagugcaacauugccggguggauccugggaaauccugagugugaaucucugagcacagccuccucuuggagcuacauuguggagaccuccucuagcgacaacggcacgugcuauccgggggauuuuaucgacuacgaagaacuccgggagcagcuguccagcgucucuuccuucgaacgcuuugagaucuuccccaagaccagcucuuggccuaaucacgauuccaacaagggagugacagccgcuuguccccaugccggcgcgaaaucuuuuuauaagaaucuuauuuggcugguuaaaaagggcaacagcuacccuaaacucuccaagagcuauaucaaugacaaggggaaagaagugcugguccuuuggggcauucaccaccccuccaccucugccgaucaacagagccuguaccagaacgcugacgccuacguguucgugggaacauccagauauagcaagaaauuuaagccugagaucgcuauucggccgaaaguccgcgaucaggaggggagaaugaauuacuauuggacccucguugaacccggagacaagaucacguucgaggccacaggcaaccugguggugccucgguacgcguuugccauggaacgcaacgcugggucuggaauuaucaucuccgauacccccguccaugacugcaauacaaccugucaaaccccuaaaggcgccauuaacacaagccugcccuuccagaauauccacccgauuacgaucggcaagugcccuaaguaugugaaaucuaccaagcucagacuggcuacagggcuucggaacguucccagcauucagucccgcggacuguuuggcgccaucgccggguucaucgagggaggcuggaccgggaugguggacggaugguacggcuaucaucaccagaaugaacaaggcucuggguacgcugcggaucucaaaagcacacagaacgccauugacgagaucaccaauaaggucaacuccgugauugagaaaaugaauacgcaguuuacagcuguuggaaaggaguucaaccaccuggagaagagaaucgaaaaucuuaacaaaaagguggaugacggcuuccuggauauuuggaccuacaaugccgagcuccugguccugcucgaaaacgagcggacccuggacuaucaugauagcaaugugaaaaaccuuuacgagaagguccgcucucagcugaaaaacaaugccaaggaaaucgggaacggauguuuugaguucuaucacaagugcgacaauacauguauggaauccgugaaaaacggcaccuacgauuauccuaaguacagcgaggaagcuaaacucaauagagagaagaucgacgggguuaaacuggagucuacacggauuuaucaaauccuugccauuuacuccacgguggcgagcucccugguccucgugguuucucugggcgcuaucagcuuuuggaugugcuccaacggaucucugcgcugcagaauuuguaucuga

SEQ ID NO: 197862 - RNA, 1701 nt, Artificial Sequence; identical to SEQ ID NO: 196928
  derived and/or modified CDS sequence (opt5) from hemagglutinin__InfluenzaA__ADM33177

SEQ ID NO: 197863 - RNA, 1701 nt, Artificial Sequence; identical to SEQ ID NO: 197857
  derived and/or modified CDS sequence (opt5) from hemagglutinin__InfluenzaA__ADM33186

SEQ ID NO: 197864 - RNA, 1701 nt, Artificial Sequence; identical to SEQ ID NO: 197857
  derived and/or modified CDS sequence (opt5) from hemagglutinin__InfluenzaA__ADM33195

SEQ ID NO: 197865 - RNA, 1701 nt, Artificial Sequence; identical to SEQ ID NO: 197854
  derived and/or modified CDS sequence (opt5) from hemagglutinin__InfluenzaA__ADM33204

SEQ ID NO: 197866 - RNA, 1701 nt, Artificial Sequence
  derived and/or modified CDS sequence (opt5) from hemagglutinin__InfluenzaA__ADM33222
auggaggccauccuggugguccuccuguacaccuucgcuacagccaacgcggacacgcuuugcauuggcuaucacgcuaauaacagcaccgauacaguugacaccgugcuggaaaagaaugugacagucacccauuccgugaaccuccuggaggauaaacacaaugggaaacuuuguaagcugagaggaguugcgccccuccaucugggcaagugcaacaucgccggguggauucugggaaauccugaaugugagucucucagcacagcuuccucuuggagcuacaucguggaaaccuccucuagcgacaacggcacgugcuauccgggggauuuuauugacuacgaggagcugcgggaacagcuuuccagcgucucuuccuucgagcgcuuugaaaucuuccccaaaaccagcucuuggccuaaucacgauuccaacaagggagugacagccgcuuguccccaugccggcgccaagagcuuuuauaaaaaucugaucuggcucguuaagaaaggcaacucuuacccuaagcuguccaaaagcuauauuaaugacaaggggaaggaggugcuuguccuguggggaauccaccaccccuccaccucugccgaucaacagagccucuaccagaacgcugacgccuacguguucgugggcuccagcagauauucuaaaaaguuuaaaccugagauugcuauccggccgaagguccgcgaucaggaagggagaaugaauuacuauuggacacugguugagcccggagacaaaauuaccuucgaagccacgggcaaccugguggugccucgguacgcguuugccauggagcgcaacgcuggguccggaaucauuaucagcgauacacccguccaugacugcaauaccacaugucaaaccccuaagggcgccaucaacaccucucuccccuuccacaauauucauccgaucacaauuggcaaaugcccuaaguauguuaagagcacgaaacugagacuugcuaccgggcugcggaacgugcccuccauccagucucgcggacucuuuggcgccauugccggguucaucgaaggaggcuggacagggaugguggacggaugguacggcuaucaccaccagaaugagcagggcagcggguacgcugcggaucugaaguccacccaaaacgccaucgacgagauuacaaauaaagucaacagcgugaucgaaaagaugaauacccaguuuacggcuguuggaaaagaguucaaccaucuugaaaagagaauugagaaucugaacaagaaaguggaugacggcuuccucgauaucuggacauacaaugccgaacugcugguccuccuggagaacgagcggacccuugacuaucacgauucuaaugugaagaaccuguacgaaaaaguccgcaaccagcucaagaauaacgccaaagagauugggaauggauguuuugaguucuaucauaagugcgacaacaccuguauggaauccgugaagaauggcacauacgauuauccuaaauacagcgaagaggcuaagcugaacagagaggaaaucgacgggguuaaacuugagucuacccggaucuaucagauucuggccaucuacuccacaguggcgagcucccucguccuggugguuucucugggcgcuauuagcuuuuggaugugcuccaauggaucucuccgcugcagaaucuguauuuga

SEQ ID NO: 197867 - RNA, 1701 nt, Artificial Sequence
  derived and/or modified CDS sequence (opt5) from hemagglutinin__InfluenzaA__ADM33232
auggaggccauccuggugguccuccuguacaccuucgcuacagccaacgcggacacgcuuugcauuggcuaucacgcuaauaacagcaccgauacaguugacaccgugcuggaaaagaaugugacagucacccauuccgugaaccuccuggaggauaaacacaaugggaaacuuuguaagcugagaggaguugcgccccuccaucugggcaagugcaacaucgccggguggauucugggaaauccugaaugugagucucucagcacagcuuccucuuggagcuacaucguggaaaccuccucuagcgacaacggcacgugcuauccgggggauuuuauugacuacgaggagcugcgggaacagcuuuccagcgucucuuccuucgagcgcuuugaaaucuuccccaaaaccagcucuuggccuaaucacgauuccaacaagggagugacagccgcuuguccccaugccggcgccaagagcuuuuauaaaaaucugaucuggcucguuaagaaaggcaacucuuacccuaagcuguccaaaagcuauauuaaugacaaggggaaggaggugcuuguccuguggggaauccaccaccccuccaccucugccgaucaacagagccucuaccagaacgcugacgccuacguguucgugggcuccagcagauauucuaaaaaguuuaaaccugagauugcuauccggccgaagguccgcgaucaggaagggagaaugaauuacuauuggacacugguugagcccggagacaaaauuaccuucgaagccacgggcaaccugguggugccucgguacgcguuugccauggagcgcaacgcuggguccggaaucauuaucagcgauacacccguccaugacugcaauaccacaugucaaaccccuaagggcgccaucaacaccucucuccccuuccacaauauucauccgaucacaauuggcaaaugcccuaaguauguuaagagcacgaaacugagacuugcuaccgggcugcggaacgugcccuccauccagucucgcggacucuuuggcgccauugccggguucaucgaaggaggcuggacagggaugguggacggaugguacggcuaucaccaccagaaugagcagggcagcggguacgcugcggaucugaaguccacccaaaacgccaucgacgagauuacaaauaaagucaacagcgugaucgaaaagaccaauacgcaguuuacagcuguuggaaaagaguucaaccaucuugaaaagagaauugagaaucugaacaagaaaguggaugacggcuuccucgauaucuggaccuacaaugccgaacugcugguccuccuggagaacgagcggacccuugacuaucacgauucuaaugugaagaaccuguacgaaaaaguccgcaaccagcucaagaauaacgccaaagagauugggaauggauguuuugaguucuaucauaagugcgacaacacauguauggaauccgugaagaauggcaccuacgauuauccuaaauacagcgaagaggcuaagcugaacagagaggaaaucgacgggguuaaacuugagucuacacggaucuaucagauucuggccaucuacuccacgguggcgagcucccucguccuggugguuucucugggcgcuauuagcuuuuggaugugcuccaauggaucucuccaaugccgcaucuguauuuga

SEQ ID NO: 197868 - RNA, 1701 nt, Artificial Sequence
  derived and/or modified CDS sequence (opt5) from hemagglutinin__InfluenzaA__ADM33241
augaaggccauccuggugguccuccuguacaccuucgcuacagccaacgcggacacgcuuugcauuggcuaucacgcuaauaacagcaccgauacaguugacaccgugcuggagaaaaaugugacagucacccauuccgugaacauccucgaagauaagcacaaugggaaacuguguaaacuuagaggaguugcuccccugcaucucggcaaaugcaacauugccggguggauccugggaaauccugagugugaaucucugagcacagccuccucuuggagcuacauuguggagaccuccucuagcgacaacggcacgugcuauccgggggauuuuaucgacuacgaagaacuccgggagcagcuguccagcgucucuuccuucgaacgcuuugagaucuuccccaagaccagcucuuggccuaaucacgauuccaacaagggagugacagccgcuuguccccaugccggcgcgaaaucuuuuuauaagaaucuuauuuggcugguuaaaaaggaaaacagcuacccuaaacucuccaagagcuauaucaaugacaagggcaaagaggugcugguccuuugggggauucaccaccccuccaccucugccgaucaacagagccuguaccagaacgcugacgccuacguguucgugggauccagcagauauucuaagaaauuuaagccugagaucacaauucggccgaaaguccgcgaucaggaaggcagaaugaauuacuauuggacccucguugagcccggggacaagaucacguucgaagcuacaggaaaccugguggugccucgguacgccuuugcgauggagcgcaacgccggcuccgggauuaucaucagcgauacccccguccaugacugcaauacaaccugucaaaccccuaaaggagcuauuaacacaucucugcccuuccagaauauccacccgauuacgaucggcaagugcccuaaguaugugaaaagcaccaagcucagacuggccacaggccuucggaacguucccuccauucagucucgcgggcuguuuggagcuaucgccggcuucaucgaagggggauggaccggcaugguggacgggugguacggauaucaucaccagaaugagcaaggcagcggcuacgccgcugaucucaaauccacacagaacgcgauugacgagaucaccaauaaggucaacagcgugauugaaaagaugaauacgcaguuuacagccguugggaaggaguucaaccaccuggaaaagagaaucgagaaucuuaacaaaaagguggaugacggauuccuggauauuuggaccuacaaugcugaacuccugguccugcucgagaacgagcggacccuggacuaucaugauucuaaugugaaaaaccuuuacgaaaagguccgcucccagcugaaaaacaaugccaaggagaucggcaacggguguuuugaguucuaucacaagugcgacaauacauguauggagagcgugaaaaacggaaccuacgauuauccuaaguacucugaagaggccaaacucaauagagaggaaaucgacggcguuaagcuggaguccacacggauuuaucaaauccuugcuauuuacagcacgguggccuccucucugguccucgugguuagccugggggcgaucuccuuuuggaugugcucuaacggcagccugcgcugcagaauuuguaucuga

SEQ ID NO: 197869 - RNA, 1701 nt, Artificial Sequence; identical to SEQ ID NO: 197866
  derived and/or modified CDS sequence (opt5) from hemagglutinin__InfluenzaA__ADM33251

SEQ ID NO: 197870 - RNA, 1701 nt, Artificial Sequence
  derived and/or modified CDS sequence (opt5) from hemagglutinin__InfluenzaA__ADM33260
augaaggccauccuggugguccuccuguacaccuucgcuacagccaacgcggacacgcuuugcauuggcuaucacgcuaauaacagcaccgauacaguugacaccgugcuggagaaaaaugugacagucacccauuccgugaacauccucgaagauaagcacaaugggaaacuguguaaacuuagaggaguugcuccccugcaucucggcaagugcaacauugccggguggauccugggaaauccugagugugaaucucugagcacagccuccucuuggagcuacauuguggagaccuccucuagcgacaacggcacgugcuauccgggggauuuuaucgacuacgaagaacuccgggagcagcuguccagcgucucuuccuucgaacgcuuugagaucuuccccaagaccagcucuuggccuaaucacgauuccaacaagggagugacagccgcuuguccccaugccggcgcgaaaucuuuuuauaagaaucuuauuuggcugguuaaaaagggcgacagcuacccuaaacucuccaagagcuauaucaacgauaaggggaaagaagugcugguccuuuggggcauucaccaccccuccaccucugccgaccaacagagccuguaccagaaugcugaugccuacguguucgugggauccagcagauauucuaagaaauuuaagccugagaucgcuauucggccgaaaguccgcgaccaggaggggagaaugaacuacuauuggacacucguugaacccggagauaagaucaccuucgaggccacgggcaaucugguggugccucgguacgcguuugccauggaacgcaacgcuggguccggaauuaucaucagcgacacacccguccaugacugcaacaccacaugucaaaccccuaaaggcgccauuaauaccucucugcccuuccagaacauccacccgauuacaaucggcaagugcccuaaguaugugaaaagcacgaagcucagacuggcuaccgggcuucggaauguucccuccauucagucucgcggacuguuuggcgccaucgccggguucaucgagggaggcuggacagggaugguggauggaugguacggcuaucaucaccagaacgaacaaggcagcggguacgcugcggaccucaaauccacccagaaugccauugaugagaucacaaacaaggucaauagcgugauugagaaaaugaacacccaguuuacggcuguuggaaaggaguucaaucaccuggagaagagaaucgaaaaccuuaauaaaaagguggacgauggcuuccuggacauuuggacauacaacaccgagcuccugguccugcucgaaaaugagcggacccuggauuaucaugacucuaacgugaaaaaucuuuacgagaagguccgcucccagcugaaaaacaacgccaaggaaaucgggaauggauguuuugaguucuaucacaagugcgauaacacauguauggaaagcgugaaaaauggcaccuacgacuauccuaaguacucugaggaagccaaacucaacagagaggagaucgaugggguuaagcuggaauccacacggauuuaucaaauccuugcuauuuacagcacgguggccuccucucugguccucgugguuagccugggcgcgaucuccuuuuggaugugcucuaauggaagccugcgcugcagaauuuguaucuga

SEQ ID NO: 197871 - RNA, 1701 nt, Artificial Sequence
  derived and/or modified CDS sequence (opt5) from hemagglutinin__InfluenzaA__ADM33280
augaaggccauccuggugguccuccuguacaccuucgcuacagccaacgcggacacgcuuugcauuggcuaucacgcuaauaacagcaccgauacaguugacaccgugcuggagaaaaaugugacagucacccauuccgugaacauccucgaagauaagcacaaugggaaacuguguaaacuuagaggaguugcuccccugcaucucggcaaaugcaacauugccggguggauccugggaaauccugagugugaaucucugagcacaguguccucuuggagcuacauugucgagaccuccucuagcgacaacggcacgugcuauccgggggauuuuaucgacuacgaagaacuccgggagcagcuguccagcgugucuuccuucgaacgcuuugagaucuuccccaagaccagcucuuggccuaaucacgauuccaacaagggaguuacagccgccuguccccaugcuggcgccaagagcuuuuauaagaaucuuauuuggcuggugaaaaagggcaacucuuacccuaaacucuccaagagcuauaucaaugacaaggggaaagaaguccuggugcuuuggggcauucaccaccccuccaccucugcggaucaacagagccuguaccagaacgccgacgcuuacguguucgucggauccagcagauauucuaagaaauuuaagccugagaucgccauucggccgaaaguucgcgaucaggaggggagaaugaauuacuauuggacacucguggaacccggagacaagaucaccuucgaggcuacgggcaaccugguggucccucgguacgccuuugcgauggaacgcaacgccggguccggaauuaucaucagcgauacacccgugcaugacugcaauaccacaugucaaaccccuagaggcgcuauuaacaccucucugcccuuccagaauauccacccgauuacaaucggcaaaugcccuaaguauguuaagagcacgaaacuccggcuggccaccgggcuucgcaacgugcccuccauucagucuagaggacuguuuggcgcuaucgccggguucaucgagggaggcuggacagggauggucgacggaugguacggcuaucaucaccagaaugaacaaggcagcggguacgccgcugaucucaaguccacccagaacgcgauugacgagaucacaaauaaagugaacagcguuauugagaagaugaauacccaguuuacggccgugggaaaagaguucaaccaccuggagaagcggaucgaaaaucuuaacaagaaagucgaugacggcuuccuggauauuuggacauacaaugcugagcuccuggugcugcucgaaaacgagcgcacccuggacuaucaugauucuaaugucaagaaccuuuacgagaaagugagaucccagcugaagaacaaugccaaagaaaucgggaacggauguuuugaguucuaucacaagugcgacaauaccuguauggaaagcguuaagaacggcacauacgauuauccuaaauacucugaggaagccaagcucaaucgggaggagaucgacggggugaaacuggaauccacccgcauuuaucaaauccuugcuauuuacagcacagucgccuccucucuggugcucguugugagccugggcgcgaucuccuuuuggaugugcucuaacggaagccugcagugcagaauuuguaucuga

SEQ ID NO: 197872 - RNA, 1701 nt, Artificial Sequence; identical to SEQ ID NO: 195188
  derived and/or modified CDS sequence (opt5) from hemagglutinin__InfluenzaA__ADM33290

SEQ ID NO: 197873 - RNA, 1701 nt, Artificial Sequence; identical to SEQ ID NO: 194741
  derived and/or modified CDS sequence (opt5) from hemagglutinin__InfluenzaA__ADM33300

SEQ ID NO: 197874 - RNA, 1701 nt, Artificial Sequence; identical to SEQ ID NO: 194728
  derived and/or modified CDS sequence (opt5) from hemagglutinin__InfluenzaA__ADM33310

SEQ ID NO: 197875 - RNA, 1701 nt, Artificial Sequence
  derived and/or modified CDS sequence (opt5) from hemagglutinin__InfluenzaA__ADM33320
augaaggccauccugguggucaugcucuacaccuucgcuacagccaacgcggacacgcugugcauuggcuaucacgcuaauaacagcaccgauacaguugacaccgugcuugagaaaaaugugacagucacccauuccgugaaccugcucgaagauaagcacaaugggaaacuguguaaacuuagaggaguugcuccccugcaucucggcaagugcaacaucgccggguggauucugggaaauccugagugugaaucucugagcacagccuccucuuggagcuacaucguggagaccuuuuccucugacaacggcacgugcuauccgggggauuucauugacuacgaagaacuccgggagcagcugagcuccgucagcucuuuugaacgcuucgagaucuuucccaagaccuccagcuggccuaaucacgauucuaacaagggagugacagccgcuuguccccaugccggcgcgaaauccuucuauaagaaucuuaucuggcugguuaaaaagggcaacagcuacccuaaacucucuaaguccuauauuaaugacaaggggaaagaagugcugguccuuuggggaauccaccaccccagcaccuccgccgaucaacagucucuguaccagaacgcugacgccuacguguuugugggcagcuccagauauagcaagaaauucaagccugagauugcuauccggccgaaaguccgcgaucaggaggggagaaugaauuacuauuggacacucguugaacccggagacaagauuaccuuugaggccacgggcaaccugguggugccucgguacgcguucgccauggaacgcaacgcugggucuggaaucauuaucuccgauacacccguccaugacugcaauaccacaugucaaaccccuaaaggcgccaucaacaccagccugcccuuucagaauauucacccgaucacaauuggcaagugcccuaaguaugugaaaucuacgaagcucagacuggcuaccgggcuucggaacguucccagcauccagucccgcggacuguucggcgccauugccggguuuaucgagggaggcuggacagggaugguggacggaugguacggcuaucaucaccagaaugaacaaggcucuggguacgcugcggaucucaaaagcacccagaacgccaucgacgagauuacaaauaaggucaacuccgugaucgagaaaaugaauacccaguucacggcuguuggaaaggaguucaaccaccuggagaagagaauugaaaaucuuaacaaaaagguggaugacggcuuucuggauaucuggacauacaaugccgagcuccugguccugcucgaaaacgagcggacccuggacuaucaugauagcaaugugaaaaaccuuuacgagaagguccgcucucagcugaaaaacaaugccaaggaaauugggaacggauguuucgaguuuuaucacaagugcgacaauaccuguauggaauccgugaaaaacggcacauacgauuauccuaaguacagcgaggaagcuaaacucaauagagaggagaucgacgggguuaagcuggaaucuacccggaucuaucaaauucuugccaucuacuccacaguggcgagcucccugguccucgugguuucucugggcgcuauuagcuucuggaugugcuccaacggaucucugcagugccgcaucuguauuuga

SEQ ID NO: 197876 - RNA, 1701 nt, Artificial Sequence; identical to SEQ ID NO: 194767
  derived and/or modified CDS sequence (opt5) from hemagglutinin__InfluenzaA__ADM33340

SEQ ID NO: 197877 - RNA, 1701 nt, Artificial Sequence
  derived and/or modified CDS sequence (opt5) from hemagglutinin__InfluenzaA__ADM33355
augaaggccauccugguggucaugcucuacaccuucgcuacagccaacgcggacacgcugugcauuggcuaucacgcuaauaacagcaccgauacaguugacaccgugcuugagaaaaaugugacagucacccauuccgugaaccugcucgaagauaagcacaaugggaaacuguguaaacuuagaggaguugcuccccugcaucucggcaagugcaacaucgccggguggauucugggaaauccugagugugaaucucugagcacagccuccucuuggagcuacaucguggagaccuccucuagcgacaacggcacgugcuauccgggggauuuuauugacuacgaagaacuccgggagcagcuguccagcgucucuuccuucgaacgcuuugagaucuuccccaagaccagcucuuggccuaaucacgauuccaacaagggagugacagccgcuuguccccaugccggcgcgaaaucuuuuuauaagaaucuuaucuggcugguuaaaaagggcaacagcuacccuaaacucuccaagagcuauauuaaugacaaggggaaagaagugcugguccuuuggggaauccaccaccccuccaccucugccgaucaacagagccuguaccagaacgcugacgccuacguguucgugggcuccagcagauauucuaagaaauuuaagccugagauugcuauccggccgaaaguccgcgaucaggaggggagaaugaauuacuauuggacacucguugaacccggagacaagauuaccuucgaggccacgggcaaccugguggugccucgguacgcguuugccauggaacgcaacgcuggguccggaaucauuaucagcgauacacccguccauaauugcaacaccacaugucaaaccccuaaaggcgccaucaauaccucucugcccuuccagaacauucacccgaucacaauuggcaagugcccuaaguaugugaaaagcacgaagcucagacuggcuaccgggcuucggaauguucccuccauccagucucgcggacuguuuggcgccauugccggguucaucgagggaggcuggacagggaugguggacggaugguacggcuaucaucaccagaacgaacaaggcagcggguacgcugcggaccucaaauccacccagaaugccaucgaugagauuacaaacaaggucaauagcgugaucgagaaaaugaacacccaguuuacggcuguuggaaaggaguucaaucaccuggagaagagaauugaaaaccuuaauaaaaagguggacgauggcuuccuggacaucuggacauacaacgccgagcuccugguccugcucgaaaaugagcggacccuggauuaucaugacucuaacgugaaaaaccuuuacgagaagguccgcucccagcugaaaaauaacgccaaggaaauugggaauggauguuuugaguucuaucacaagugcgauaacaccuguauggaaagcgugaaaaauggcacauacgacuauccuaaguacucugaggaagcuaaacucaacagagaggagaucgaugggguuaagcuggaauccacccggaucuaucaaauucuugccaucuacagcacaguggcguccucucugguccucgugguuagccugggcgcuauuuccuuuuggaugugcucuaauggaagccugcagugccgcaucuguauuuga

SEQ ID NO: 197878 - RNA, 1701 nt, Artificial Sequence; identical to SEQ ID NO: 197877
  derived and/or modified CDS sequence (opt5) from hemagglutinin__InfluenzaA__ADM33365

SEQ ID NO: 197879 - RNA, 1701 nt, Artificial Sequence; identical to SEQ ID NO: 194767
  derived and/or modified CDS sequence (opt5) from hemagglutinin__InfluenzaA__ADM33375

SEQ ID NO: 197880 - RNA, 1701 nt, Artificial Sequence
  derived and/or modified CDS sequence (opt5) from hemagglutinin__InfluenzaA__ADM33385
augaaggccauccugguggucaugcucuacaccuucgcuacagccaacgcggacacgcugugcauuggcuaucacgcuaauaacagcaccgauacaguugacaccgugcuugagaaaaaugugacagucacccauuccgugaaccugcucgaagauaagcacaaugggaaacuguguaaacuuagaggaguugcuccccugcaucucggcaagugcaacaucgccggguggauucugggaaauccugagugugaaucucugagcacagccuccucuuggagcuacaucguggagaccuccucuagcgacaacggcacgugcuauccgggggauuuuauugacuacgaagaacuccgggagcagcuguccagcgucucuuccuucgaacgcuuugagaucuuccccaagaccagcucuuggccuaaucacgauuccaacaagggagugacagccgcuuguccccaugccggcgcgaaaucuuuuuauaagaaucuuaucuggcugguuaaaaagggcaacagcuacccuaaacucuccaagagcuauauuaaugacaaggggaaagaagugcugguccuuuggggaauccaccaccccuccaccucugccgaucaacagagccuguaccagaacgcugacgccuacguguucgugggcuccagcagauauucuaagaaauuuaagccugagauugcuauccggccgaaaguccgcgaucaggaggggagaaugaauuacuauuggacacucguugaacccggagacaagauuaccuucgaggccacgggcaaccugguggugccucgguacgcguuugccauggaacgcaacgcuggguccggaaucauuaucagcgauacacccguccaugacugcaauaccacaugucaaaccucuaaaggcgccaucaacaccagccugccuuuccagaauauucaccccaucacaauuggcaagugcccgaaguaugugaaauccacgaagcucagacuggcuaccgggcuucggaacguuccuucuauccagagccgcggacuguuuggcgccauugccggguucaucgagggaggcuggacagggaugguggacggaugguacggcuaucaucaccagaaugaacaaggcuccggguacgcugcggaucucaaaagcacccagaacgccaucgacgagauuacaaauaaggucaacucugugaucgagaaaaugaauacccaguuuacggcuguuggaaaggaguucaaccaccuggagaagagaauugaaaaucuuaacaaaaagguggaugacggcuuccuggauaucuggacauacaaugccgagcuccugguccugcucgaaaacgagcggacccuggacuaucaugauuccaaugugaaaaaccuuuacgagaagguccgcagccagcugaaaaacaaugccaaggaaauugggaacggauguuuugaguucuaucacaagugcgacaauaccuguauggaaucugugaaaaacggcacauacgauuaucccaaguacuccgaggaagcuaaacucaauagagaggagaucgacgggguuaagcuggaaagcacccggaucuaucaaauucuugccaucuacuccacaguggcgucuagccugguccucgugguuucccugggcgcuauuucuuuuuggaugugcagcaacggaucccugcagugccgcaucuguauuuga

SEQ ID NO: 197881 - RNA, 1701 nt, Artificial Sequence; identical to SEQ ID NO: 195188
  derived and/or modified CDS sequence (opt5) from hemagglutinin__InfluenzaA__ADM33395

SEQ ID NO: 197882 - RNA, 1701 nt, Artificial Sequence; identical to SEQ ID NO: 195188
  derived and/or modified CDS sequence (opt5) from hemagglutinin__InfluenzaA__ADM33405

SEQ ID NO: 197883 - RNA, 1701 nt, Artificial Sequence; identical to SEQ ID NO: 197877
  derived and/or modified CDS sequence (opt5) from hemagglutinin__InfluenzaA__ADM33415

SEQ ID NO: 197884 - RNA, 1701 nt, Artificial Sequence; identical to SEQ ID NO: 195584
  derived and/or modified CDS sequence (opt5) from hemagglutinin__InfluenzaA__ADM33425

SEQ ID NO: 197885 - RNA, 1701 nt, Artificial Sequence
  derived and/or modified CDS sequence (opt5) from hemagglutinin__InfluenzaA__ADM34007
augaaggccauccuggugguccuccuguacaccuucgcuacagccaacgcggacacgcuuugcauuggcuaucacgcuaauaacagcaccgauacaguugacaccgugcuggagaaaaaugugacagucacccauuccgugaaccuccuggaagauaagcacaaugggaaacuuuguaagcugagaggaguugcuccccuccaucugggcaaaugcaacaucgccggguggauucugggaaauccugagugugaaucucucagcacagccuccucuuggagcuacaucguggagaccuccucuagcgacaacggcacgugcuauccgggggauuuuauugacuacgaagaacugcgggagcagcuuuccagcgucucuuccuucgaacgcuuugagaucuuccccaagaccagcucuuggccuaaucacgauuccaacaagggagugacagccgcuuguccccaugccggcgcgaaaucuuuuuauaagaaucugaucuggcucguuaaaaagggcaacagcuacccuaaacuguccaagagcuauauuaaugacaaggggaaagaagugcuuguccuguggggaauccaccaccccuccaccucugccgaucaacagagccucuaccagaacgcugacgccuacguguucgugggcacauccagauauagcaagaaauuuaagccugagauugcuauccggccgaaaguccgcgaucaggaggggagaaugaauuacuauuggacccuggaggagcccggagacaagauuacguucgaagccacaggcaaccugguugugccucgguacgcguuugccauggagcgcaacgcugggucuggaaucauuaucuccgauacccccgugcaugacugcaauacaaccugucaaaccccuaaaggcgccaucaacacaagccuccccuuccagaauauucacccgaucacgauuggcaagugcccuaaguaugucaaaucuaccaagcugagacuugcuacagggcugcggaacgugcccagcauccagucccgcggacucuuuggcgccauugccggguucaucgaaggaggcuggaccgggaugguugacggaugguacggcuaucaucaccagaaugagcaaggcucuggguacgcugcggaucugaaaagcacacagaacgccaucgacgagauuaccaauaaggugaacuccgucaucgaaaagaugaauacgcaguuuacagcugugggaaaggaguucaaccaccuugaaaagagaauugagaaucugaacaaaaagguugaugacggcuuccucgauaucuggaccuacaaugccgaacugcuggugcuccuggagaacgagcggacccuugacuaucaugauagcaaugucaaaaaccuguacgaaaaggugcgcucucagcucaaaaacaaugccaaggagauugggaacggauguuuugaguucuaucacaagugcgacaauacauguauggaauccgucaaaaacggcaccuacgauuauccuaaguacagcgaagaggcuaaacugaauagagaggaaaucgacggggugaaacuugagucuacacggaucuaucaaauucuggccaucuacuccacgguugcgagcucccucgugcuggucgugucucugggcgcuauuagcuuuuggaugugcuccaacggaucucuccagugccgcaucuguauuuga

SEQ ID NO: 197886 - RNA, 1701 nt, Artificial Sequence; identical to SEQ ID NO: 194741
  derived and/or modified CDS sequence (opt5) from hemagglutinin__InfluenzaA__ADM52443

SEQ ID NO: 197887 - RNA, 1701 nt, Artificial Sequence
  derived and/or modified CDS sequence (opt5) from hemagglutinin__InfluenzaA__ADM52453
augaaggccauccuggugguccuccuguacaccuucgcuacagccaacgcggacacgcuuugcauuggcuaucacgcuaauaacagcaccgauacaguugacaccgugcuggagaaaaaugugacagucacccauuccgugaacauccucgaagauaagcacaaugggaaacuguguaaacuuagaggaguugcuccccugcaucucggcaagugcaacauugccggguggauccugggaaauccugagugugaaucucugagcacagccuccucuuggagcuacauuguggagaccuccucuagcgacaacggcacgugcuauccgggggauuuuaucgacuacgaagaacuccgggagcagcuguccagcgucucuuccuucgaacgcuuugagaucuuccccaagaccagcucuuggccuaaucacgauuccaacaagggagugacagccgcuuguccccaugccggcgcgaaaucuuuuuauaagaaucuuauuuggcugguuaaaaagggcaacagcuacccuaaacucuccaagagcuauaucaaugacaaggggaaagaagugcugguccuuuggggcauucaccaccccuccaccucugccgaucaacagagccuguaccagaacgcugacgccuacguguucgugggauccagcagauauucuaagaaauuuaagccugagaucgcuauucggccgaaaguccgcgaucaggaggggagaaugaauuacuauuggacacucguugaacccggagacaagaucaccuucgaggccacgggcaaccugguggugccucgguacgcguuugccauggaacgcaacgcuggguccggaauuaucaucagcgauacacccauucaugacugcaauaccacaugucaaaccccuaaaggcgccaucaacaccucucugcccuuccagaauguccacccgauuacaaucggcaagugcccuaaguaugugaaaagcacgaagcucagacuggcuaccgggcuucggaacguucccuccauucagucucgcggacuguuuggcgccaucgccggguucaucgagggaggcuggacagggaugguggacggaugguacggcuaucaucaccagaaugaacaaggcagcggguacgcugcggaucucaaauccacccagaacgccauugacgagaucacaaauaaggucaacagcgugauugagaaaaugaauacccaguuuacggcuguuggaaaggaguucaaccaccuggagaagagaaucgaaaaucuuaacaaaaagguggaugacggcuuccuggauauuuggacauacaaugccgagcuccugguccugcucgaaaacgagcggacccuggacuaucaugauucuaaugugaaaaaccuuuacgagaagguccgcucccagcugaaaaacaaugccaaggaaaucgggaacggauguuuugaguucuaucacaagugcgacaauaccuguauggaaagcgugaaaaacggcacauacgauuauccuaaguacucugaggaagcuaaacucaauagagaggagaucgacgggguuaagcuggaauccacccggauuuaucaaauccuugccauuuacagcacaguggcguccucucugguccucgugguuagccugggcgcuaucuccuuuuggaugugcucuaacggaagccugcagugccgcauuuguaucuga

SEQ ID NO: 197888 - RNA, 1701 nt, Artificial Sequence
  derived and/or modified CDS sequence (opt5) from hemagglutinin__InfluenzaA__ADM52473
augaaggccauccuggcugugcuccuguacaccuucgccacagcgaacgcugacacgcuuugcauuggcuaucacgccaauaacagcaccgauacagucgacaccguucuggagaaaaaugugacagugacccauuccgucaaccuccuggaagauaagcacaaugggaaacuuuguaagcugagaggaguggcuccccuccaucugggcaaaugcaacaucgccggguggauucugggaaauccugagugugaaucucucagcacagccuccucuuggagcuacaucguugagaccuccucuagcggcaacgggacgugcuauccgggagacuuuauugauuacgaagaacugcgggagcagcuuuccagcgugucuuccuucgaacgcuuugagaucuuccccaagaccagcucuuggccuaaucacgacuccaacaagggcgucacagcugccuguccccaugcgggcgccaagagcuuuuauaagaaucugcucuggcuggugaaaaaggggaacucuuacccuaaacuuuccaagagcuauaucaaugauaagggaaaagaaguucuggugcucuggggcauucaccaccccuccaccucugcugaccaacagagccuguaccagaacgccgaugcuuacgucuucguggggacauccagauauagcaagaaauuuaagccugagaucgccauucggccgaaagugcgcgaccaggagggaagaaugaauuacuauuggacccuggucggccccggggauaagaucacguucgaagcgacaggaaaccucguugugccucgguacgccuuugcuauggagcgcaacgccggcucuggcauuaucauuuccgacacccccgugcaugauugcaauacaaccugucaaaccccuaaaggggcuaucaacacaagccugcccuuccagaauauccacccgauuacgaucggaaagugcccuaaguaugucaaaucuaccaaacuuagacuggccacaggccuccggaacgugcccagcauucagucccgcgggcuguuuggagccaucgcuggcuucauugaagggggauggaccggcaugguugacggcugguacggguaucaucaccagaaugagcaaggaucuggcuacgcggccgaccuuaaaagcacacagaacgcuaucgaugaaaucaccaauaaggugaacuccgucauugagaaaaugaauacgcaguuuacagccguggggaaggaguucaaccaccuggaaaagagaaucgagaaucucaacaaaaagguugacgauggauuccuggacauuuggaccuacaaugccgaacugcucgugcugcuugagaacgaacggacccuggauuaucaugacagcaaugucaaaaaccucuacgagaaggugcgcucucagcugaaaaacaaugcuaaggagaucggcaacggguguuuugaguucuaucacaagugcgauaauacauguauggaguccgucaaaaacggcaccuacgacuauccuaaguacagcgaagaggccaaacuuaauagagaagagauugauggagugaagcuggagucuacacggaucuaucaaauccucgcgauuuacuccacgguugcuagcucccuggugcuggucgugucucucggcgccaucagcuuuuggaugugcuccaacgggucucugcagugccgcauuuguaucuga

SEQ ID NO: 197889 - RNA, 1701 nt, Artificial Sequence; identical to SEQ ID NO: 195905
  derived and/or modified CDS sequence (opt5) from hemagglutinin__InfluenzaA__ADM52483

SEQ ID NO: 197890 - RNA, 1701 nt, Artificial Sequence; identical to SEQ ID NO: 194921
  derived and/or modified CDS sequence (opt5) from hemagglutinin__InfluenzaA__ADM52493

SEQ ID NO: 197891 - RNA, 1701 nt, Artificial Sequence; identical to SEQ ID NO: 194921
  derived and/or modified CDS sequence (opt5) from hemagglutinin__InfluenzaA__ADM52513

SEQ ID NO: 197892 - RNA, 1701 nt, Artificial Sequence; identical to SEQ ID NO: 194921
  derived and/or modified CDS sequence (opt5) from hemagglutinin__InfluenzaA__ADM52524

SEQ ID NO: 197893 - RNA, 1701 nt, Artificial Sequence; identical to SEQ ID NO: 194921
  derived and/or modified CDS sequence (opt5) from hemagglutinin__InfluenzaA__ADM52534

SEQ ID NO: 197894 - RNA, 1701 nt, Artificial Sequence; identical to SEQ ID NO: 194921
  derived and/or modified CDS sequence (opt5) from hemagglutinin__InfluenzaA__ADM52554

SEQ ID NO: 197895 - RNA, 1701 nt, Artificial Sequence; identical to SEQ ID NO: 194921
  derived and/or modified CDS sequence (opt5) from hemagglutinin__InfluenzaA__ADM52564

SEQ ID NO: 197896 - RNA, 1701 nt, Artificial Sequence; identical to SEQ ID NO: 194728
  derived and/or modified CDS sequence (opt5) from hemagglutinin__InfluenzaA__ADM52574

SEQ ID NO: 197897 - RNA, 1701 nt, Artificial Sequence; identical to SEQ ID NO: 194741
  derived and/or modified CDS sequence (opt5) from hemagglutinin__InfluenzaA__ADM52584

SEQ ID NO: 197898 - RNA, 1701 nt, Artificial Sequence
  derived and/or modified CDS sequence (opt5) from hemagglutinin__InfluenzaA__ADM52594
augaaggccauccuggugguccuccuguacaccuucgcuacagccaacgcggacacgcuuugcauuggcuaucacgcuaauaacagcaccgauacaguugacaccgugcuggagaaaaaugugacagucacccauuccgugaaccuccuggaagauaagcacaaugggaaacuuuguaagcugagaggaguugcuccccuccaucugggcaaaugcaacaucgccggguggauucugggaaauccugagugugaaucucucagcacagccuccucuuggagcuacaucguggagaccuccucuagcgacaacggcacgugcuauccgggggauuuuauugacuacgaagaacugcgggagcagcuuuccagcgucucuuccuucgaacgcuuugagaucuuccccaagaccagcucuuggccuaaucacgauuccaacaagggagugacagccgcuuguccccaugccggcgcgaaaucuuuuuauaagaaucugaucuggcucguuaaaaagggcaacagcuacccuaaacuguccaagagcuauauuaaugacaaggggaaagaagugcuuguccuguggggaauccaccaccccuccaccucugccgaucaacagagccucuaccagaacgcugacgccuacguguucgugggcacauccaaguauagcaaaaaguuuaaaccugagauugcuaucagaccgaagguccgggaucaggaggggcgcaugaauuacuauuggacccugguugaacccggagacaaaauuacguucgaggccacaggcaaccugguggugccuagauacgcguuugccauggaacggaacgcugggucuggaaucauuaucuccgauacccccguccaugacugcaauacaaccugucaaaccccuaagggcgccaucaacacaagccuccccuuccagaauauucacccgaucacgauuggcaagugcccuaaauaugugaagucuaccaaacugcgccuugcuacagggcugagaaacguucccagcauccagucccggggacucuuuggcgccauugccggguucaucgagggaggcuggaccgggaugguggacggaugguacggcuaucaucaccagaaugaacaaggcucuggguacgcugcggaucuuaagagcacacagaacgccaucgacaaaauuaccaauaaggucaacuccgugaucgagaagaugaauacgcaguuuacagcuguuggaaaagaguucaaccaccuugaaaagcgcauugagaaucugaacaaaaagguggaugacggcuuccucgauaucuggaccuacaaugccgaacugcugguccuccuggagaacgaaagaacccuugacuaucaugauagcaaugugaaaaaccuguacgagaagguccggucucagcucaagaacaaugccaaagagauugggaacggauguuuugaguucuaucacaagugcgacaauacauguauggaguccgugaaaaacggcaccuacgauuauccuaaguacagcgaagaggcuaaacugaaucgcgaagagaucgacgggguuaagcuggagucuacaagaaucuaucaaauucuggccaucuacuccacgguggcgagcucccucguccuggugguuucucugggcgcuauuagcuuuuggaugugcuccaacggaucucuccagugccggaucuguauuuga

SEQ ID NO: 197899 - RNA, 1701 nt, Artificial Sequence; identical to SEQ ID NO: 194921
  derived and/or modified CDS sequence (opt5) from hemagglutinin__InfluenzaA__ADM52604

SEQ ID NO: 197900 - RNA, 1701 nt, Artificial Sequence; identical to SEQ ID NO: 194921
  derived and/or modified CDS sequence (opt5) from hemagglutinin__InfluenzaA__ADM52614

SEQ ID NO: 197901 - RNA, 1701 nt, Artificial Sequence; identical to SEQ ID NO: 196513
  derived and/or modified CDS sequence (opt5) from hemagglutinin__InfluenzaA__ADM52624

SEQ ID NO: 197902 - RNA, 1701 nt, Artificial Sequence; identical to SEQ ID NO: 194921
  derived and/or modified CDS sequence (opt5) from hemagglutinin__InfluenzaA__ADM52634

SEQ ID NO: 197903 - RNA, 1701 nt, Artificial Sequence; identical to SEQ ID NO: 194921
  derived and/or modified CDS sequence (opt5) from hemagglutinin__InfluenzaA__ADM52644

SEQ ID NO: 197904 - RNA, 1701 nt, Artificial Sequence; identical to SEQ ID NO: 194921
  derived and/or modified CDS sequence (opt5) from hemagglutinin__InfluenzaA__ADM52654

SEQ ID NO: 197905 - RNA, 1701 nt, Artificial Sequence; identical to SEQ ID NO: 196329
  derived and/or modified CDS sequence (opt5) from hemagglutinin__InfluenzaA__ADM52664

SEQ ID NO: 197906 - RNA, 1701 nt, Artificial Sequence; identical to SEQ ID NO: 196513
  derived and/or modified CDS sequence (opt5) from hemagglutinin__InfluenzaA__ADM52674

SEQ ID NO: 197907 - RNA, 1701 nt, Artificial Sequence; identical to SEQ ID NO: 194921
  derived and/or modified CDS sequence (opt5) from hemagglutinin__InfluenzaA__ADM52684

SEQ ID NO: 197908 - RNA, 1701 nt, Artificial Sequence; identical to SEQ ID NO: 196513
  derived and/or modified CDS sequence (opt5) from hemagglutinin__InfluenzaA__ADM52704

SEQ ID NO: 197909 - RNA, 1701 nt, Artificial Sequence; identical to SEQ ID NO: 196329
  derived and/or modified CDS sequence (opt5) from hemagglutinin__InfluenzaA__ADM52714

SEQ ID NO: 197910 - RNA, 1701 nt, Artificial Sequence
  derived and/or modified CDS sequence (opt5) from hemagglutinin__InfluenzaA__ADM86399
augaaggccauccuggugguccuccuguacaccuucgcuacagccaacgcggacacgcuuugcauuggcuaucacgcuaauaacagcaccgauacaguugacaccgugcuggagaaaaaugugacagucacccauuccgugaacauccucgaagauaagcacaaugggaaacuguguaaacuuagaggaguugcuccccugcaucucggcaagugcaacauugccggguggauccugggaaauccugagugugaaucucugagcacagccuccucuuggagcuacauuguggagaccuccucuagcgacaacggcacgugcuauccgggggauuuuaucgacuacgaagaacuccgggagcagcuguccagcgucucuuccuucgaacgcuuugagaucuuccccaagaccagcucuuggccuaaucacgauuccaacaagggagugacagccgcuuguccccaugccggcgcgaaaucuuuuuauaagaaucuuauuuggcugguuaaaaagggcaacagcuacccuaaacucuccaagagcuauaucaaugacaaggggaaagaagugcugguccuuuggggcauucaccaccccuccaccucugccgaucaacagagccuguaccagaacgcugacgccuacguguucgugggauccagcagauauucuaagaaauuuaagccugagaucgcuauucggccgaaaguccgcgaucaggaggggagaaugaauuacuauuggacacucguugaacccggagacaagaucaccuucgaggccacgggcaaccugguggugccucgguacgcguuugccauggaacgcaacgcuggguccggaauuaucaucagcgauacacccguccaugacugcaauaccacaugucaaaccccuaaaggcgccgugaacaccucucugcccuuccagaauauucacccgaucacaauuggcaagugcccuaaguauguuaaaagcacgaagcucagacuggcuaccgggcuucggaacgugcccuccauccagucucgcggacuguuuggcgccauugccggguucaucgagggaggcuggacagggauggucgacggaugguacggcuaucaucaccagaaugaacaaggcagcggguacgcugcggaucucaaauccacccagaacgccaucgacgagauuacaaauaaggugaacagcguuaucgagaaaaugaauacccaguuuacggcugugggaaaggaguucaaccaccuggagaagagaauugaaaaucuuaacaaaaaggucgaugacggcuuccuggauaucuggacauacaaugccgagcuccuggugcugcucgaaaacgagcggacccuggacuaucaugauucuaaugucaaaaaccuuuacgagaaggugcgcucccagcugaaaaacaaugccaaggaaguugggaacggauguuuugaguucuaucacaagugcgacaauaccuguauggaaagcgugaaaaacggcacauacgauuauccuaaguacucugaggaagcuaaacucaauagagaggagauugacggggucaagcuggaauccacccggaucuaucaaauccuugccauuuacagcacagcggcuuccucucuggugcucguugugagccugggcgccaucuccuuuuggaugugcucuaacggaagccugcagugccgcauuuguaucuga

SEQ ID NO: 197911 - RNA, 1701 nt, Artificial Sequence; identical to SEQ ID NO: 194741
  derived and/or modified CDS sequence (opt5) from hemagglutinin__InfluenzaA__ADM86409

SEQ ID NO: 197912 - RNA, 1701 nt, Artificial Sequence; identical to SEQ ID NO: 194741
  derived and/or modified CDS sequence (opt5) from hemagglutinin__InfluenzaA__ADM86419

SEQ ID NO: 197913 - RNA, 1701 nt, Artificial Sequence; identical to SEQ ID NO: 196390
  derived and/or modified CDS sequence (opt5) from hemagglutinin__InfluenzaA__ADM86440

SEQ ID NO: 197914 - RNA, 1701 nt, Artificial Sequence; identical to SEQ ID NO: 194741
  derived and/or modified CDS sequence (opt5) from hemagglutinin__InfluenzaA__ADM86450

SEQ ID NO: 197915 - RNA, 1707 nt, Artificial Sequence
  derived and/or modified CDS sequence (opt5) from hemagglutinin__InfluenzaA__ADM95450
auggagaagaucgugcuucucuucgccauugucagccugguuaaauccgaccagaucugcauuggcuaccacgcuaacaauucuaccgaacaaguggauacaaucauggagaagaacgugacggucacccaugcccaggacauucuugaaaagacacacaaugggaagcugugugaucucgacggagugaaaccccugauccuuagagauugcagcguugcgggcuggcugcucgggaacccuaugugugacgaguuuaucaaugugccggaaugguccuauauugucgagaaggcuaaccccgugaaugaucugugcuacccuggagacuucaacgauuaugaggaacugaagcaucuccugucucggaucaaucacuuugagaaaauucagaucauucccaagagcuccuggccuucucaugaagccagccuuggcguuuccgccgcuugucccuaccaggggaaaagcucuuucuuucgcaacguggucuggcugaucaagaaaaauaacaccuauccuacaauuaagagauccuacaauaacaccaaucaagaggaccuccuggugauguggggaauccaccacccgaacgaugccgcugagcagacaaaccuuuaucagaaucccaccacguacaucagcgugggcaccucuacacugaaccagcggcucaccccucgcauugccacaagauccaaggucaauggccaaagcgggcggauggaguucuuuuggaccauccugaaacccaacgacgcgauuaauuucgaaucuaacggaaauuuuaucgccccugaauacgcuuauaagauuguuaaaaagggcgauuccacgaucaugaaaagcgagcuggaauacgggaacugcaauacaaagugucagacccccaugggagccaucaacuccucuaugccguuccauaauauucacccucucacaaucggcgagugccccaaauaugugaaaagcaaccgccuggugcuugcuaccgggcugagaaauuccccucagcgggagggacgcagaaagaaacggggccucuuuggcgccauugcgggguucaucgaaggaggcuggcaggggauggucgacggaugguacggcuaucaucacagcaacgagcaagggucuggauacgccgcugacaaggaauccacccagaaagccauugauggcgugacaaauaagguuaacagcaucaucgacaaaaugaacacgcaguuugaggcugugggccgcgaguucaauaaccuggaaagacggauugagaaucuuaacaagaagauggaagauggguuccuggacgucuggaccuauaaugccgagcuccuggugcugauggaaaacgagcgcacacucgauuuucacgacucuaauguuaaaaaccuguacgauaaggugagacuucaacugcgggacaaugccaaagaacucggaaacggcuguuucgaguuuuaccauaagugcgauaaugaguguauggaaagcgucagaaacgggaccuaugacuacccccaguauuccgaggaagcucgccugaaacgggaggagaucucuggagugaagcuggaaagcauuggcaucuaccagauucuguccaucuauagcacagucgcgucuucccucgcccuggcuauuaugguggccgggcugagccucuggaugugcucuaauggcucccugcagugcagaaucuguaucuga

SEQ ID NO: 197916 - RNA, 1701 nt, Artificial Sequence; identical to SEQ ID NO: 194741
  derived and/or modified CDS sequence (opt5) from hemagglutinin__InfluenzaA__ADM95745

SEQ ID NO: 197917 - RNA, 1701 nt, Artificial Sequence; identical to SEQ ID NO: 194741
  derived and/or modified CDS sequence (opt5) from hemagglutinin__InfluenzaA__ADM95746

SEQ ID NO: 197918 - RNA, 1701 nt, Artificial Sequence; identical to SEQ ID NO: 194741
  derived and/or modified CDS sequence (opt5) from hemagglutinin__InfluenzaA__ADM95747

SEQ ID NO: 197919 - RNA, 1701 nt, Artificial Sequence; identical to SEQ ID NO: 194741
  derived and/or modified CDS sequence (opt5) from hemagglutinin__InfluenzaA__ADM95749

SEQ ID NO: 197920 - RNA, 1701 nt, Artificial Sequence
  derived and/or modified CDS sequence (opt5) from hemagglutinin__InfluenzaA__ADM95750
augaaggccauccuggugguccuccuguacaccuucgcuacagccaacgcggacacgcuuugcauuggcuaucacgcuaauaacagcaccgauacaguugacaccgugcuggagaagaaugugacagucacccauuccuuuaaccuccuggaagauaagcacaaugggaaacuuuguaagcugagaggaguggcuccccuccaucugggcaaaugcaacaucgccggguggauucugggaaauccugagugugaaucucucagcacagccuccucuuggagcuacaucguugagaccuccucuagcgacaacggcacgugcuauccgggggauuucauugacuacgaagaacugcgggagcagcuuuccagcgugucuuccuuugaacgcuucgagaucuuucccaagaccagcucuuggccuaaucacgauuccaacaagggagucacagccgcuuguccccaugccggcgcgaaaucuuucuauaagaaucugaucuggcucgugaaaaaggggucuuccuacccuaaacugagcaaguccuauauuaacgacaagggcaaagaaguucuugugcuguggggaauccaccaccccucuaccagcgccgaucaacagucccucuaccagaaugcugacgccuacgucuuugugggcagcucuagauauuccaagaaauucaagccugagauugcuauccggccgaaagugcgcgaucaggaggggagaaugaacuacuauuggacacuggucgaacccggagacaagauuaccuuugaggccacgggcaaucugguugugccucgguacgcguucgccauggaacgcaacgcugggagcggaaucauuaucucugauacacccgugcaugacugcaacaccacaugucaaaccccuaaaggcgccaucaauaccagccuccccuuucagaacauucacccgaucacaauuggcaagugcccuaaguaugucaaauccacgaagcugagacuugcuaccgggcugcggaaugugcccucuauccagagccgcggacucuucggcgccauugccggguuuaucgagggaggcuggacagggaugguugacggaugguacggcuaucaucaccagaacgaacaaggcuccggguacgcugcggaucugaaaagcacccagaaugccaucgacgagauuacaaacaaggugaauagcgucaucgagaaaaugaacacccaguucacggcugugggaaaggaguucaaucaccuugagaagagaauugaaaaccugaauaaaaagguugaugacggcuuucucgauaucuggacauacaacgccgagcugcuggugcuccuggaaaaugagcggacccuugacuaucaugauuccaacgucaaaaaucuguacgagaaggugcgcagccagcucaaaaacaacgccaaggaaauugggaauggauguuucgaguuuuaucacaagugcgacaacaccuguauggaaucugucaaaaauggcacauacgauuauccuaaguacuccgaggaagcuaaacugaacagagaggagaucgacggggugaaacuugaaagcacccggaucuaucaaauucuggccaucuacuccacaguugcgucuagccucgugcuggucgugucccugggcgcuauuucuuucuggaugugcagcaauggaucccuccagugccgcaucuguauuuga

SEQ ID NO: 197921 - RNA, 1701 nt, Artificial Sequence; identical to SEQ ID NO: 194741
  derived and/or modified CDS sequence (opt5) from hemagglutinin__InfluenzaA__ADM95751

SEQ ID NO: 197922 - RNA, 1701 nt, Artificial Sequence; identical to SEQ ID NO: 194741
  derived and/or modified CDS sequence (opt5) from hemagglutinin__InfluenzaA__ADM95752

SEQ ID NO: 197923 - RNA, 1701 nt, Artificial Sequence; identical to SEQ ID NO: 194741
  derived and/or modified CDS sequence (opt5) from hemagglutinin__InfluenzaA__ADM95753

SEQ ID NO: 197924 - RNA, 1701 nt, Artificial Sequence; identical to SEQ ID NO: 194741
  derived and/or modified CDS sequence (opt5) from hemagglutinin__InfluenzaA__ADM95754

SEQ ID NO: 197925 - RNA, 1701 nt, Artificial Sequence; identical to SEQ ID NO: 194741
  derived and/or modified CDS sequence (opt5) from hemagglutinin__InfluenzaA__ADM95755

SEQ ID NO: 197926 - RNA, 1701 nt, Artificial Sequence; identical to SEQ ID NO: 194921
  derived and/or modified CDS sequence (opt5) from hemagglutinin__InfluenzaA__ADM95757

SEQ ID NO: 197927 - RNA, 1701 nt, Artificial Sequence; identical to SEQ ID NO: 194741
  derived and/or modified CDS sequence (opt5) from hemagglutinin__InfluenzaA__ADM95758

SEQ ID NO: 197928 - RNA, 1701 nt, Artificial Sequence
  derived and/or modified CDS sequence (opt5) from hemagglutinin__InfluenzaA__ADM95759
augaaggccauccuggugguccuccuguacaccuucgcuacagccaacgcggacacgcuuugcauuggcuaucacgcuaauaacagcaccgauacaguugacaccgugcuggagaagaaugugacagucacccauuccgugaaccuccuggaagauaagcacaaugggaaacuuuguaagcugagaggaguugcuccccuccaucugggcaaaugcaacaucgccggguggauucugggaaauccugagugugaaucucucagcacagccuccucuuggagcuacaucguggagaccuccucuagcgacuauggcacgugcuacccgggggauuuuauugacuaugaagaacugcgggagcagcuuuccagcgucucuuccuucgaacgcuuugagaucuuccccaagaccagcucuuggccuaaccacgauuccaauaagggagugacagccgcuuguccccaugccggcgcgaaaucuuuuuacaagaaccugaucuggcucguuaaaaagggcaauagcuauccuaaacuguccaagagcuacauuaacgacaaggggaaagaagugcuuguccuguggggaauccaccaccccuccaccucugccgaucaacagagccucuaccagaaugcugacgccuauguguucgugggcacauccagauacagcaagaaauuuaagccugagauugcuauccggccgaaaguccgcgaucaggaggggagaaugaacuauuacuggacccugguugaacccggagacaagauuacguucgaggccacaggcaaucugguggugccucgguaugcguuugccauggaacgcaacgcugggucuggaaucauuaucuccgauacccccguccaugacugcaacacaaccugucaaaccccuaaaggcgccaucaauacaagccuccccuuccagaacauucacccgaucacgauuggcaagugcccuaaguacgugaaaucuaccaagcugagacuugcuacagggcugcggaauguucccagcauccagucccgcggacucuuuggcgccauugccggguucaucgagggaggcuggaccgggaugguggacggaugguauggcuaccaucaccagaacgaacaaggcucuggguacgcugcggaucugaaaagcacacagaaugccaucgacgagauuaccaacaaggucaauuccgugaucgagaaaaugaacacgcaguuuacagcuguuggaaaggaguucaaucaccuugagaagagaauugaaaaccugaauaaaaagguggaugacggcuuccucgauaucuggaccuauaacgccgagcugcugguccuccuggaaaaugagcggacccuugacuaccaugauagcaacgugaaaaaucuguaugagaagguccgcucucagcucaaaaacaacgccaaggaaauugggaauggauguuuugaguucuaccacaagugcgacaacacauguauggaauccgugaaaaauggcaccuaugauuacccuaaguauagcgaggaagcuaaacugaacagagaggagaucgacgggguuaaacuugaaucuacacggaucuaccaaauucuggccaucuacuccacgguggcgagcucccucguccuggugguuucucugggcgcuauuagcuuuuggaugugcuccaauggaucucuccagugccgcaucuguauuuga

SEQ ID NO: 197929 - RNA, 1701 nt, Artificial Sequence; identical to SEQ ID NO: 194728
  derived and/or modified CDS sequence (opt5) from hemagglutinin__InfluenzaA__ADM95760

SEQ ID NO: 197930 - RNA, 1701 nt, Artificial Sequence; identical to SEQ ID NO: 194741
  derived and/or modified CDS sequence (opt5) from hemagglutinin__InfluenzaA__ADM95761

SEQ ID NO: 197931 - RNA, 1701 nt, Artificial Sequence
  derived and/or modified CDS sequence (opt5) from hemagglutinin__InfluenzaA__ADM95763
augaaggccauccuggugguccuccuguacaccuucgcuacagccaacgcggacacgcuuugcauuggcuaucacgcuaauaacagcaccgauacaguugacaccgugcuggagaagaaugugacagucacccauuccgugaaccuccuggaagauaagaauaacgggaaacuuuguaagcugagaggaguugcuccccuccaccugggcaaaugcaauaucgccggguggauucugggaaacccugagugugaaucucucagcacagccuccucuuggagcuacaucguggagaccuccucuagcgacaauggcacgugcuauccgggggauuuuauugacuacgaagaacugcgggagcagcuuuccagcgucucuuccuucgaacgcuuugagaucuuccccaagaccagcucuuggccuaaccaugauuccaauaagggagugacagccgcuuguccccacgccggcgcgaaaucuuuuuauaagaaccugaucuggcucguuaaaaagggcaauagcuacccuaaacuguccaagagcuauauuaacgacaaggggaaagaagugcuuguccuguggggaauccaucaccccuccaccucugccgaucaacagagccucuaccagaaugcugacgccuacguguucgugggcuccagcagauauucuaagaaauuuaagccugagauugcuauccggccgaaaguccgcgaucaggaggggagaaugaacuacuauuggacacugguugaacccggagacaagauuaccuucgaggccacgggcaaccugguggugccucgguacgcguuugccauggaacgcaaugcuggguccggaaucauuaucagcgauacacccguccacgacugcaacaccacaugucaaaccccuaaaggcgccaucaauaccucucuccccuuccagaacauucauccgaucacaauuggcaagugcccuaaguaugugaaaagcacgaagcugagacuugcuaccgggcugcggaauguucccuccauccagucucgcggacucuuuggcgccauugccggguucaucgagggaggcuggacagggaugguggacggaugguacggcuaucaccaucagaacgaacaaggcagcggguacgcugcggaucugaaauccacccagaaugccaucgacgagauuacaaacaaggucaauagcgugaucgagaaaaugaacacccaguuuacggcuguuggaaaggaguucaaucaccuugagaagagaauugaaaaccugaauaaaaagguggaugacggcuuccucgauaucuggacauacaacgccgagcugcugguccuccuggaaaaugagcggacccuugacuaucacgauucuaacgugaaaaaccuguacgagaagguccgcucccagcucaaaaauaacgccaaggaaauugggaauggauguuuugaguucuaucauaagugcgacaacaccuguauggaaagcgugaaaaauggcacauacgauuauccuaaguacucugaggaagcuaaacugaacagagaggagaucgacgggguuaaacuugaauccacccggaucuaucaaauucuggccaucuacagcacaguggcguccucucucguccuggugguuagccugggcgcuauuuccuuuuggaugugcucuaauggaagccuccagugccgcaucuguauuuga

SEQ ID NO: 197932 - RNA, 1701 nt, Artificial Sequence; identical to SEQ ID NO: 194741
  derived and/or modified CDS sequence (opt5) from hemagglutinin__InfluenzaA__ADM95764

SEQ ID NO: 197933 - RNA, 1701 nt, Artificial Sequence; identical to SEQ ID NO: 194741
  derived and/or modified CDS sequence (opt5) from hemagglutinin__InfluenzaA__ADM95765

SEQ ID NO: 197934 - RNA, 1701 nt, Artificial Sequence; identical to SEQ ID NO: 194741
  derived and/or modified CDS sequence (opt5) from hemagglutinin__InfluenzaA__ADM95767

SEQ ID NO: 197935 - RNA, 1701 nt, Artificial Sequence; identical to SEQ ID NO: 195584
  derived and/or modified CDS sequence (opt5) from hemagglutinin__InfluenzaA__ADM95768

SEQ ID NO: 197936 - RNA, 1701 nt, Artificial Sequence; identical to SEQ ID NO: 195094
  derived and/or modified CDS sequence (opt5) from hemagglutinin__InfluenzaA__ADM95769

SEQ ID NO: 197937 - RNA, 1701 nt, Artificial Sequence; identical to SEQ ID NO: 196857
  derived and/or modified CDS sequence (opt5) from hemagglutinin__InfluenzaA__ADM95771

SEQ ID NO: 197938 - RNA, 1701 nt, Artificial Sequence; identical to SEQ ID NO: 194741
  derived and/or modified CDS sequence (opt5) from hemagglutinin__InfluenzaA__ADM95772

SEQ ID NO: 197939 - RNA, 1701 nt, Artificial Sequence; identical to SEQ ID NO: 194741
  derived and/or modified CDS sequence (opt5) from hemagglutinin__InfluenzaA__ADM95774

SEQ ID NO: 197940 - RNA, 1701 nt, Artificial Sequence; identical to SEQ ID NO: 194741
  derived and/or modified CDS sequence (opt5) from hemagglutinin__InfluenzaA__ADM95775

SEQ ID NO: 197941 - RNA, 1701 nt, Artificial Sequence; identical to SEQ ID NO: 195094
  derived and/or modified CDS sequence (opt5) from hemagglutinin__InfluenzaA__ADM95776

SEQ ID NO: 197942 - RNA, 1701 nt, Artificial Sequence; identical to SEQ ID NO: 195094
  derived and/or modified CDS sequence (opt5) from hemagglutinin__InfluenzaA__ADM95778

SEQ ID NO: 197943 - RNA, 1701 nt, Artificial Sequence
  derived and/or modified CDS sequence (opt5) from hemagglutinin__InfluenzaA__ADM95779
augaaggccauccuggugguccuccuguacaccuucgcuacagccaacgcggacacgcuuugcauuggcuaucacgcuaauaacagcaccgauacaguugacaccgugcuggagaagaaugugacagucacccauuccgugaaccuccuggaagauaagcacaaugggaaacuuuguaagcugagaggaguugcuccccuccaucugggcaaaugcaacaucgccggguggauucugggaaauccugagugugaaucucucagcacagccuccucuuggagcuacaucguggagaccuccucuagcgacaacggcacgugcuauccgggggauuuuauugacuacgaagaacugcgggagcagcuuuccagcgucucuuccuucgaacgcuuugagaucuuccccaagaccagcucuuggccuaaucacgauuccaacaagggagugacagccgcuuguccccaugccggcgcgaaaucuuuuuauaagaaucugaucuggcucguuaaaaagggcaacagcuacccuaaacuguccaagagcuauauuaaugacaaggggaaagaagugcuuguccuguggggaauccaccaccccuccaccucugccgaucaacagagccucuaccagaacgcugacgccuacguguucgugggcacauccagauauagcaagaaauuuaagccugagauugcuauccggccgaaaguccgcgaucaggaggggagaaugaauuacuauuggacccugguugaacccggagacaagauuacguucgaggccacaggcaaccugguggugccucgguacgcguuugccauggaacgcaacgcugggucuggaaucauuaucuccgauacccccguccaugacugcaauacaaccugucaaaccccuaaaggcgccaucaacacaagccuccccuuccagaauauucacccgaucacgauuggcaagugcccuaaguaugugaaaucuaccaagcugagacuugcuacagggcugcggaacauccccagcauucagucccgcggacucuuuggcgccaucgccggguucaucgagggaggcuggaccgggaugguugacggaugguacggcuaucaucaccagaaugaacaaggcucuggguacgcugcggaucugaaaagcacacagaacgccauugacgagaucaccaauaaggugaacuccgucauugagaaaaugaauacgcaguuuacagcugugggaaaggaguucaaccaccuugagaagagaaucgaaaaucugaacaaaaagguugaugacggcuuccucgauauuuggaccuacaaugccgagcugcuggugcuccuggaaaacgagcggacccuugacuaucaugauagcaaugucaaaaaccuguacgagaaggugcgcucucagcucaaaaacaaugccaaggaaaucgggaacggauguuuugaguucuaucacaagugcgacaauacauguauggaauccgucaaaaacggcaccuacgauuauccuaaguacagcgaggaagcuaaacugaauagagaggagaucgacggggugaaacuugaacccacacggauuuaucaaauccuggccauuuacucuacgguugcguccagccucgugcuggucgugucccugggcgcuaucucuuuuuggaugugcagcaacggaucccuccagugccgcauuuguaucuga

SEQ ID NO: 197944 - RNA, 1701 nt, Artificial Sequence; identical to SEQ ID NO: 195094
  derived and/or modified CDS sequence (opt5) from hemagglutinin__InfluenzaA__ADM95780

SEQ ID NO: 197945 - RNA, 1701 nt, Artificial Sequence; identical to SEQ ID NO: 195584
  derived and/or modified CDS sequence (opt5) from hemagglutinin__InfluenzaA__ADM95783

SEQ ID NO: 197946 - RNA, 1701 nt, Artificial Sequence; identical to SEQ ID NO: 194741
  derived and/or modified CDS sequence (opt5) from hemagglutinin__InfluenzaA__ADM95784

SEQ ID NO: 197947 - RNA, 1701 nt, Artificial Sequence; identical to SEQ ID NO: 194741
  derived and/or modified CDS sequence (opt5) from hemagglutinin__InfluenzaA__ADM95785

SEQ ID NO: 197948 - RNA, 1701 nt, Artificial Sequence
  derived and/or modified CDS sequence (opt5) from hemagglutinin__InfluenzaA__ADM95786
augaaggccauccuggugguccuccuguacaccuucgcuacagccaacgcggacacgcuuugcauuggcuaucacgcuaauaacagcaccgauacaguugacaccgugcuggagaaaaaugugacagucacccauuccgugaaccuccuggaagauaagcacaaugggaaacuuuguaagcugagaggaguugcuccccuccaucugggcaaaugcaacaucgccggguggauucugggaaauccugagugugaaucucucagcacagccuccucuuggagcuacaucguggagaccuccucuagcgacaacggcacgugcuauccgggggauuuuauugacuacgaagaacugcgggagcagcuuuccagcgucucuuccuucgaacgcuuugagaucuuccccaagaccagcucuuggccuaaucacgauuccaacaagggagugacagccgcuuguagccaugccggcgcgaaaucuuuuuauaagaaucugaucuggcucguuaaaaagggcaacuccuaccccaaacugagcaaguccuauauuaaugacaaggggaaagaagugcuuguccuguggggaauccaccacccuucuaccagcgccgaucaacagucccucuaccagaacgcugacgccuacguguucgugggcacaagcagauauucuaagaaauuuaagcccgagauugcuauccggccuaaaguccgcgagcaggaagggagaaugaauuacuauuggacccugguugagccgggagauaagauuacguucgaagccacaggcaaccugguggugccccgguacgcguuugccauggagcgcaacgcuggguccggaaucauuaucagcgacaccccuguccaugauugcaauacaaccugucaaacccccaaaggcgccaucaacacaucucucccuuuccagaauauucaccccaucacgauuggcaagugcccgaaguaugugaaaagcaccaagcugagacuugcuacagggcugcggaacguuccuuccauccagucucgcggacucuuuggcgccauugccggguucaucgaaggaggcuggaccgggaugguggacggaugguacggcuaucaucaccagaaugagcaaggcagcggguacgcugcggaccugaaauccacacagaacgccaucgaugagauuaccaauaaggucaacagcgugaucgaaaagaugaauacgcaguuuacagcuguuggaaaggaguucaaccaccuugaaaagagaauugagaaucugaacaaaaagguggacgauggcuuccucgacaucuggaccuacaaugccgaacugcugguccuccuggagaacgagcggacccuugauuaucaugacucuaaugugaaaaaccuguacgaaaagguccgcucccagcucaaaaacaaugccaaggagauugggaacggauguuuugaguucuaucacaagugcgauaauacauguauggagagcgugaaaaacggcaccuacgacuaucccaaguacucugaagaggcuaaacugaauagagaggaaaucgaugggguuaaacuugaguccacacggaucuaucaaauucuggccaucuacagcacgguggcguccucucucguccuggugguuagccugggcgcuauuuccuuuuggaugugcucuaacggaagccuccagugccgcaucuguauuuga

SEQ ID NO: 197949 - RNA, 1701 nt, Artificial Sequence; identical to SEQ ID NO: 195094
  derived and/or modified CDS sequence (opt5) from hemagglutinin__InfluenzaA__ADM95788

SEQ ID NO: 197950 - RNA, 1701 nt, Artificial Sequence; identical to SEQ ID NO: 195094
  derived and/or modified CDS sequence (opt5) from hemagglutinin__InfluenzaA__ADM95789

SEQ ID NO: 197951 - RNA, 1701 nt, Artificial Sequence
  derived and/or modified CDS sequence (opt5) from hemagglutinin__InfluenzaA__ADM95790
augaaggccauccuggugguccuccuguacaccuucgcuacagccaacgcggacacgcuuugcauuggcuaucacgcuaauaacagcaccgauacaguugacaccgugcuggagaagaaugugacagucacccauuccgugaaccuccuggaagauaagcacaaugggaaacuuuguaagcugagaggaguugcuccccuccaucugggcaaaugcaacaucgccggguggauucugggaaauccugagugugaaucucucagcacagccuccucuuggagcuacaucguggagaccuccucuagcgacaacggcacgugcuauccgggggauuuuauugacuacgaagaacugcgggagcagcuuuccagcgucucuuccuucgaacgcuuugagaucuuccccaagaccagcucuuggccuaaucacgauuccaacaagggagugacagccgcuuguccccaugccggcgcgaaaucuuuuuauaagaaucugaucuggcucguuaaaaagggcaacagcuacccuaaacugagaaaguccuauauuaaugacaaggggaaagaagugcuuguccuguggggaauccaccaccccagcaccuccgccgaucaacagucucucuaccagaacgcugacgccuacguguucgugggcacaagccgguauuccaagaaauuuaagccugagauugcuauccgcccgaaagucagagaucaggaggggcggaugaauuacuauuggacccugguugaacccggagacaagauuacguucgaggccacaggcaaccugguggugccucgcuacgcguuugccauggaaagaaacgcugggagcggaaucauuaucucugauacccccguccaugacugcaauacaaccugucaaaccccuaaaggcgccaucaacacaucccuccccuuccagaauauucacccgaucacgauuggcaagugcccuaaguaugugaaaagcaccaagcugcggcuugcuacagggcugcgcaacauccccucuauucagagcagaggacucuuuggcgccaucgccggguucaucgagggaggcuggaccgggaugguugacggaugguacggcuaucaucaccagaaugaacaaggcuccggguacgcugcggaucugaaaucuacacagaacgccauugacgagaucaccaauaaggugaacagcgucauugagaaaaugaauacgcaguuuacagcugugggaaaggaguucaaccaccuugagaagcggaucgaaaaucugaacaaaaagguugaugacggcuuccucgauauuuggaccuacaaugccgagcugcuggugcuccuggaaaacgagcgcacccuugacuaucaugauuccaaugucaaaaaccuguacgagaaggugagaagccagcucaaaaacaaugccaaggaaaucgggaacggauguuuugaguucuaucacaagugcgacaauacauguauggaaucugucaaaaacggcaccuacgauuauccuaaguacuccgaggaagcuaaacugaaucgggaggagaucgacggggugaaacuugaaagcacacgcauuuaucaaauccuggccauuuacucuacgguugcguccagccucgugcuggucgugucccugggcgcuaucucuuuuuggaugugcagcaacggaucccuccagugcagaauuuguaucuga

SEQ ID NO: 197952 - RNA, 1701 nt, Artificial Sequence; identical to SEQ ID NO: 197951
  derived and/or modified CDS sequence (opt5) from hemagglutinin__InfluenzaA__ADM95791

SEQ ID NO: 197953 - RNA, 1701 nt, Artificial Sequence; identical to SEQ ID NO: 197951
  derived and/or modified CDS sequence (opt5) from hemagglutinin__InfluenzaA__ADM95792

SEQ ID NO: 197954 - RNA, 1701 nt, Artificial Sequence; identical to SEQ ID NO: 197338
  derived and/or modified CDS sequence (opt5) from hemagglutinin__InfluenzaA__ADM95793

SEQ ID NO: 197955 - RNA, 1701 nt, Artificial Sequence; identical to SEQ ID NO: 195094
  derived and/or modified CDS sequence (opt5) from hemagglutinin__InfluenzaA__ADM95794

SEQ ID NO: 197956 - RNA, 1701 nt, Artificial Sequence; identical to SEQ ID NO: 194741
  derived and/or modified CDS sequence (opt5) from hemagglutinin__InfluenzaA__ADM95795

SEQ ID NO: 197957 - RNA, 1701 nt, Artificial Sequence; identical to SEQ ID NO: 195843
  derived and/or modified CDS sequence (opt5) from hemagglutinin__InfluenzaA__ADM95798

SEQ ID NO: 197958 - RNA, 1701 nt, Artificial Sequence
  derived and/or modified CDS sequence (opt5) from hemagglutinin__InfluenzaA__ADM95799
augaaggccauccuggugguccuccuguacaccuucgcuacagccaacgcggacacgcuuugcauuggcuaucacgcuaauaacagcaccgauacaguugacaccgugcuggagaagaaugugacagucacccauuccgugaaccuccuggaagauaagcacaaugggaaacuuuguaagcugagaggaguugcuccccuccaucugggcaaaugcaacaucgccggguggauucugggaaauccugagugugaaucucucagcacagccuccucuuggagcuacaucguggagaccuccucuagcgacaacggcacgugcuauccgggggauuuuauugacuacgaagaacugcgggagcagcuuuccagcgucucuuccuucgaacgcuuugagaucuuccccaagaccagcucuuggccuaaucacgauuccaacaagggagugacagccgcuuguccccaugccggcgcgaaaucuuuuuauaagaaucugaucuggcucguuaaaaagggcaacagcuacccuaaacuguccaagagcuauauuaaugacaaggggaaagaagugcuuguccuguggggaauccaccaccccuccaccucugccgaucaacagagccucuaccagaacgcugacgccuacguguucgugggcacauccagauauagcaagaaauuuaagccugagauugcuauccggccgaaaguccgcgaucaggaggggagaaugaauuacuauuggacccugguugaacccggagacaagauuacguucgaggccacaggcaaccugguggugccucgguacgcguuugccauggaacgcaacgcugggucuggaaucauuaucuccgauacccccguccaugacugcaauacaaccugucaaaccccuaaaggcgccaucaacacaagccuccccuuccagaauauucacccgaucacgauuggcaagugcccuaaguaugugaaaucuaccaagcugagacuugcuacagggcugcggaacguucccagcauccagucccgcggacucuuuggcgccauugccggguucaucgagggaggcuggaccgggaugguggacggaugguacggcuaucaucaccagaaugaacaaggcucuggguacgcugcggaucugaaaagcacacagaacgccaucgacgagauuaccaauaaggucaacuccgugaucgagaaaaugaauacgcaguuuacagcuguuggaaaggaguucaaccaccuugagaagagaauugaaaaucugaacaaaaagguggaugacggcuuccucgauaucuggaccuacaaugccgagcugcugguccuccuggaaaacgagcggacccuugacuaucaugauagcaaugugaaaaaccuguacgagaagguccgcucucagcucaaaaacaaugccaaggaaauugagaacggguguuuugaguucuaucacaagugcgacaauacauguauggaauccgugaaaaacggaaccuacgauuauccuaaguacagcgaagaggcuaaacugaauagagaggaaaucgacggcguuaaacuugagucuacacggaucuaucaaauucuggccaucuacuccacgguggcgagcucccucguccuggugguuucucugggggcuauuagcuuuuggaugugcuccaacggcucucuccagugccgcaucuguauuuga

SEQ ID NO: 197959 - RNA, 1701 nt, Artificial Sequence
  derived and/or modified CDS sequence (opt5) from hemagglutinin__InfluenzaA__ADM95800
augaaggccauccuggugguccuccuguacaccuucgcuacagccaacgcggacacgcuuugcauuggcuaucacgcuaauaacagcaccgauacaguugacaccgugcuggagaagaaugugacagucacccauuccgugaaccuccuggaagauaagcacaaugggaaacuuuguaagcugagaggaguugcuccccuccaucugggcaaaugcaacaucgccggguggauucugggaaauccugagugugaaucucucagcacagccuccucuuggagcuacaucguggagaccuccucuagcgacaacggcacgugcuauccgggggauuuuauugacuacgaagaacugcgggagcagcuuuccagcgucucuuccuucgaacgcuuugagaucuuccccaagaccagcucuuggccuaaucacgauuccaacaagggagugacagccgcuuguccccaugccggcgcgaaaucuuuuuauaagaaucugaucuggcucguuaaaaagggcaacagcuacccuaaacuguccaagagcuauauuaaugacaaggggaaagaagugcuuguccuguggggaauccaccaccccuccaccucugccgaucaacagagccucuaccagaacgcugacgccuacguguucgugggcacauccagauauagcaagaaauuuaagccugagauugcuauccggccgaaaguccgcgaucaggaggggagaaugaauuacuauuggacccugguugcccccggagacaagauuacguucgaagcgacaggcaaccugguggugccucgguacgccuuugcuauggagcgcaacgccgggucuggaaucauuaucuccgauacccccguccaugacugcaauacaaccugucaaaccccuaaaggcgcuaucaacacaagccuccccuuccagaauauucacccgaucacgauuggcaagugcccuaaguaugugaaaucuaccaagcugagacuugccacagggcugcggaacguucccagcauccagucccgcggacucuuuggcgccauugcuggguucaucgaaggaggcuggaccgggaugguggacggaugguacggcuaucaucaccagaaugagcaaggcucuggguacgcggccgaucugaaaagcacacagaacgcuaucgacgaaauuaccaauaaggucaacuccgugaucgagaaaaugaauacgcaguuuacagccguuggaaaggaguucaaccaccuugaaaagagaauugagaaucugaacaaaaagguggaugacggcuuccucgauaucuggaccuacaaugccgaacugcugguccuccuggagaacgaacggacccuugacuaucaugauagcaaugugaaaaaccuguacgagaagguccgcucucagcucaaaaacaaugcuaaggagauugggaacggauguuuugaguucuaucacaagugcgacaauacauguauggaguccgugaaaaacggcaccuacgauuauccuaaguacagcgaagaggccaaacugaauagagaagagaucgacgggguuaaacuugagucuacacggaucuaucaaauucuggcgaucuacuccacgguggcuagcucccucguccuggugguuucucugggcgccauuagcuuuuggaugugcuccaacggaucucuccagugccgcaucuguauuuga

SEQ ID NO: 197960 - RNA, 1701 nt, Artificial Sequence; identical to SEQ ID NO: 195094
  derived and/or modified CDS sequence (opt5) from hemagglutinin__InfluenzaA__ADM95801

SEQ ID NO: 197961 - RNA, 1701 nt, Artificial Sequence; identical to SEQ ID NO: 195094
  derived and/or modified CDS sequence (opt5) from hemagglutinin__InfluenzaA__ADM95802

SEQ ID NO: 197962 - RNA, 1701 nt, Artificial Sequence; identical to SEQ ID NO: 197948
  derived and/or modified CDS sequence (opt5) from hemagglutinin__InfluenzaA__ADM95803

SEQ ID NO: 197963 - RNA, 1701 nt, Artificial Sequence
  derived and/or modified CDS sequence (opt5) from hemagglutinin__InfluenzaA__ADM95804
augaaggccauccuggugguccuccuguacaccuucgcuacagccaacgcggacacgcuuugcauuggcuaucacgcuaauaacagcaccgauacaguugacaccgugcuggagaaaaaugugacagucacccauuccgugaaccuccuggaagauaagcacaaugggaaacuuuguaagcugagaggaguugcuccccuccaucugggcaaaugcaacaucgccggguggauucugggaaauccugagugugaaucucucagcacagccuccucuuggagcuacaucguggagaccuccucuagcgacaacggcacgugcuauccgggggauuuuauugacuacgaagaacugcgggagcagcuuuccagcgucucuuccuucgaacgcuuugagaucuuccccaagaccagcucuuggccuaaucacgauuccaacaagggagugacagccgcuuguccccaugccggcgcgaaaaauuuuuauaagaaccugaucuggcucguuaaaaagggcaauagcuacccuaaacugucuaaguccuauauuaacgacaaggggaaagaagugcuuguccuguggggaauccaccaccccagcaccuccgccgaucaacagucucucuaccagaaugcugacgccuacguguucgugggcacaagcagauauuccaagaaauuuaagccugagauugcuauccggccgaaaguccgcgaucaggaggggagaaugaacuacuauuggacccugguugaacccggagacaagauuacguucgaggccacaggcaaccugguggugccucgguacgcguuugccauggaacgcaaugcugggagcggaaucauuaucucugauacccccguccaugacugcaacacaaccugucaaaccccuaaaggcgccaucaauacaucccuccccuuccagaacauucacccgaucacgauuggcaagugcccuaaguaugugaaaagcaccaagcugagacuugcuacagggcugcggaauguucccucuauccagagccgcggacucuuuggcgccauugccggguucaucgagggaggcuggaccgggaugguggacggaugguacggcuaucaucaccagaacgaacaaggcuccggguacgcugcggaucugaaaucuacacagaaugccaucgacgagauuaccaacaaggucaauagcgugaucgagaaaaugaacacgcaguuuacagcuguuggaaaggaguucaaucaccuugagaagagaauugaaaaccugaauaaaaagguggaugacggcuuccucgauaucuggaccuacaacgccgagcugcugguccuccuggaaaaugagcggacccuugacuaucaugauuccaacgugaaaaagcuguacgagaaaguccgcagccagcucaagaacaaugccaaggaaauugggaacggauguuuugaguucuaucacaaaugcgacaauacauguauggaaucugugaagaacggcaccuacgauuauccuaaauacuccgaggaagcuaagcugaauagagaggagaucgacgggguuaaacuugaaagcacacggaucuaucaaauucuggccaucuacucuacgguggcguccagccucguccuggugguuucccugggcgcuauuucuuuuuggaugugcagcaacggaucccuccagugccgcaucuguauuuga

SEQ ID NO: 197964 - RNA, 1701 nt, Artificial Sequence; identical to SEQ ID NO: 196423
  derived and/or modified CDS sequence (opt5) from hemagglutinin__InfluenzaA__ADM95805

SEQ ID NO: 197965 - RNA, 1701 nt, Artificial Sequence; identical to SEQ ID NO: 195842
  derived and/or modified CDS sequence (opt5) from hemagglutinin__InfluenzaA__ADM95808

SEQ ID NO: 197966 - RNA, 1701 nt, Artificial Sequence; identical to SEQ ID NO: 195842
  derived and/or modified CDS sequence (opt5) from hemagglutinin__InfluenzaA__ADM95809

SEQ ID NO: 197967 - RNA, 1701 nt, Artificial Sequence; identical to SEQ ID NO: 195842
  derived and/or modified CDS sequence (opt5) from hemagglutinin__InfluenzaA__ADM95810

SEQ ID NO: 197968 - RNA, 1701 nt, Artificial Sequence
  derived and/or modified CDS sequence (opt5) from hemagglutinin__InfluenzaA__ADM95812
augaaggccauccuggugguccuccuguacaccuucgcuacagccaacgcggacacgcuuugcauuggcuaucacgcuaauaacagcaccgauacaguugacaccgugcuggagaaaaaugugacagucacccauuccgugaaccuccuggaagauaagcacaaugggaaacuuuguaagcugagaggaguugcuccccuccaucugggcaaaugcaacaucgccggguggauucugggaaauccugagugugaacuccugucuacagccagcuccuggucuuacaucguggagaccagcuccucugacaacggcacgugcuauccgggggauuuuauugacuacgaagaacuucgggagcagcugagcuccgucagcucuuucgaacgcuuugagaucuuccccaagaccuccagcuggccuaaucacgauucuaacaagggagugacagccgcuuguccccaugccggcgcgaaauccuuuuauaagaaucucaucuggcugguuaaaaagggcaacagcuacccuaaacuuucuaaguccuauauuaaugacaaggggaaagaagugcugguccucuggggaauccaccaccccagcaccuccgccgaucaacagucucuguaccagaacgcugacgccuacguguucgugggcacaagcagauauuccaagaaauuuaagccugagauugcuauccggccgaaaguccgcgaucaggaggggagaaugaauuacuauuggacccugguugaacccggagacaagauuacguucgaggccacaggcaaccucguggugccucgguacgcguuugccauggaacgcaacgcugggagcggaaucauuaucucugauacccccguccaugacugcaauacaaccugucaaaccccuaaaggcgccaucaacacaucccugcccuuccagaauauucacccgaucacgauuggcaagugcccuaaguaugugaaaagcaccaaacuuagacuggcuacagggcuccggaacguucccucuauccagagccgcggacuguuuggcgccauugccggguucaucgagggaggcuggaccgggaugguggacggaugguacggcuaucaucaccagaaugaacaaggcuccggguacgcugcggaucuuaagucuacacagaacgccaucgacgagauuaccaauaaggucaacagcgugaucgagaaaaugaauacgcaguuuacagcuguuggaaaggaguucaaccaccuggagaagagaauugaaaaucucaacaaaaagguggaugacggcuuccuggauaucuggaccuacaaugccgagcugcucguccugcuugaaaacgagcggacccuggacuaucaugauuccaaugugaaaaaccucuacgagaagguccgcagccagcugaaaaacaaugccaaggaaauugggaacggauguuuugaguucuaucacaagugcgacaauacauguauggaaucugugaaaaacggcaccuacgauuauccuaaguacuccgaggaagcuaaacuuaauagagaggagaucgacgggguuaagcuggaaagcacacggaucuaucaaauucucgccaucuacucuacgguggcguccagccugguccuggugguuucccucggcgcuauuucuuuuuggaugugcagcaacggaucccugcagugccgcaucuguauuuga

SEQ ID NO: 197969 - RNA, 1701 nt, Artificial Sequence; identical to SEQ ID NO: 197338
  derived and/or modified CDS sequence (opt5) from hemagglutinin__InfluenzaA__ADM95816

SEQ ID NO: 197970 - RNA, 1701 nt, Artificial Sequence; identical to SEQ ID NO: 197338
  derived and/or modified CDS sequence (opt5) from hemagglutinin__InfluenzaA__ADM95819

SEQ ID NO: 197971 - RNA, 1701 nt, Artificial Sequence; identical to SEQ ID NO: 196423
  derived and/or modified CDS sequence (opt5) from hemagglutinin__InfluenzaA__ADM95820

SEQ ID NO: 197972 - RNA, 1701 nt, Artificial Sequence; identical to SEQ ID NO: 197338
  derived and/or modified CDS sequence (opt5) from hemagglutinin__InfluenzaA__ADM95821

SEQ ID NO: 197973 - RNA, 1701 nt, Artificial Sequence; identical to SEQ ID NO: 195842
  derived and/or modified CDS sequence (opt5) from hemagglutinin__InfluenzaA__ADM95822

SEQ ID NO: 197974 - RNA, 1701 nt, Artificial Sequence; identical to SEQ ID NO: 195842
  derived and/or modified CDS sequence (opt5) from hemagglutinin__InfluenzaA__ADM95823

SEQ ID NO: 197975 - RNA, 1701 nt, Artificial Sequence
  derived and/or modified CDS sequence (opt5) from hemagglutinin__InfluenzaA__ADM95824
augaaggccauccuggugguccuccuguacaccuucgcuacagccaacgcggacacgcuuugcauuggcuaucacgcuaauaacagcaccgauacaguugacaccgugcuggagaaaaaugugacagucacccauuccgugaaccuccuggaagauaagcacaaugggaaacuuuguaagcugagaggaguugcuccccuccaucugggcaaaugcaacaucgccggguggauucugggaaauccugagugugaaucucucagcacagccuccucuuggagcuacaucguggagaccuccucuagcgacaacggcacgugcuauccgggggauuuuauugacuacgaagaacugcgggagcagcuuuccagcgucucuuccuucgaacgcuuugagaucuuccccaagaccagcucuuggccuaaucacgauuccaacaagggagugacagccgcuuguccccaugccggcgcgaaaucuuuuuauaagaaucugaucuggcucguuaaaaagggcaacagcuacccuaaacuguccaagagcuauauuaaugacaaggggaaagaagugcuuguccuguggggaauccaccaccccuccaccucugccgaucaacagagccucuaccagaacgcugacgccuacguguucgugggcacauccagauauagcaagaaauuuaagccugagauugcuauccggccgaaaguccgcgaucaggaggggagaaugaauuaccauuggacccugguugaacccggagacaagauuacguucgaggccacaggcaaccugguggugccucgguaugcguuugccauggaacgcaacgcugggucuggaaucauuaucuccgauacccccguccacgacugcaauacaaccugucaaaccccuaaaggcgccaucaacacaagccuccccuuccagaauauucauccgaucacgauuggcaagugcccuaaguacgugaaaucuaccaagcugagaauggcuacagggcuucggaacguucccagcauccagucccgcggacuguuuggcgccauugccggguucaucgagggaggcuggaccgggaugguggacggaugguauggcuaccaccaccagaaugaacaaggcucuggguaugcugcggaucucaaaagcacacagaacgccaucgacgagauuaccaauaaggucaacuccgugaucgagaaaaugaauacgcaguuuacagcuguuggaaaggaguucaaccaucuggagaagagaauugaaaaucuuaacaaaaagguggaugacggcuuccuggauaucuggaccuacaaugccgagcuccugguccugcucgaaaacgagcggacccuggacuaccacgauagcaaugugaaaaaccuuuaugagaagguccgcucucagcugaaaaacaaugccaaggaaauugggaacggauguuuugaguucuaccauaagugcgacaauacauguauggaauccgugaaaaacggcaccuaugauuacccuaaguauagcgaggaagcuaaacucaauagagaggagaucgacgggguuaagcuggaaucuacacggaucuaccaaauucuugccaucuauuccacgguggcgagcucccugguccucgugguuucucugggcgcuauuagcuuuuggaugugcuccaacggaucucugcagugccgcaucuguauuuga

SEQ ID NO: 197976 - RNA, 1701 nt, Artificial Sequence; identical to SEQ ID NO: 197338
  derived and/or modified CDS sequence (opt5) from hemagglutinin__InfluenzaA__ADM95825

SEQ ID NO: 197977 - RNA, 1701 nt, Artificial Sequence; identical to SEQ ID NO: 197338
  derived and/or modified CDS sequence (opt5) from hemagglutinin__InfluenzaA__ADM95826

SEQ ID NO: 197978 - RNA, 1701 nt, Artificial Sequence
  derived and/or modified CDS sequence (opt5) from hemagglutinin__InfluenzaA__ADM95827
augaaggccauccuggugguccuccuguacaccuucgcuacagccaacgcggacacgcuuugcauuggcuaucacgcuaauaacagcaccgauacaguugacaccgugcuggagaaaaaugugacagucacccauuccgugaaccuccuggaagauaagcacaaugggaaacuuuguaagcugaaaggaguugcgccccuccaucugggcaagugcaacaucgccggguggauucugggaaauccugagugugaaucucucagcacagcuuccucuuggagcuacaucguggagaccuccucuagcgacaacggcacgugcuauccgggggauuuuauugacuacgaagaacugagagagcagcuuuccagcgucucuuccuucgaacgguuugagaucuuccccaagaccagcucuuggccuaaucacgauuccaacaaaggagugacagccgcuuguccccaugccggcgccaagagcuuuuauaaaaaucugaucuggcucguuaagaaaggcaacucuuacccuaagcuguccaagagcuauauuaaugacaaagggaaggaagugcuuguccuguggggaauccaccaccccuccaccucugccgaucaacagagccucuaccagaacgcugacgccuacguguucgugggcacaucccgcuauagcaaaaaguuuaaaccugagauugcuaucagaccgaagguccgggaucaggaggggcgcaugaauuacuauuggacccugguugaacccggagacaaaauuacguucgaggccacaggcaaccugguggugccuagauacgcguuugccauggaacggaacgcugggucuggaaucauuaucuccgauacccccguccaugacugcaauacaaccugucaaaccccuaagggcgccaucaacacaagccuccccuuccagaauauucacccgaucacgauuggcaagugcccuaaauaugugaagucuaccaaacugcgccuugcuacagggcugagaaacguucccagcauccagucccggggacucuuuggcgccauugccggguucaucgagggaggcuggaccgggaugguggacggaugguacggcuaucaucaccagaaugaacaaggcucuggguacgcugcggaucuuaagagcacacagcacgccaucgacgagauuaccaacaaagucaauuccgugaucgagaagaugaacacgcaguuuacagcuguuggaaaggaguucaaucaucuggagaaacgcauugaaaaccugaauaagaaaguggaugacggcuuccucgauaucuggaccuacaacgccgagcugcugguccuccuggaaaaugagagaacccuugacuaucacgauagcaacgugaagaaucuguacgagaaaguccggucucagcucaagaacaacgccaaggaaauugggaauggauguuuugaguucuaucauaaaugcgacaacacauguauggaauccgugaagaauggcaccuacgauuauccuaaauacagcgaggaagcuaagcugaaccgcgaggagaucgacgggguuaaacuugaaucuacaagaaucuaucaaauucuggccaucuacuccacgguggcgagcucccucguccuggugguuucucugggcgcuauuagcuuuuggaugugcuccaauggaucucuccagugccggaucuguauuuga

SEQ ID NO: 197979 - RNA, 1701 nt, Artificial Sequence
  derived and/or modified CDS sequence (opt5) from hemagglutinin__InfluenzaA__ADM95828
augaaggccauccuggugguccuccuguacaccuucgcuacagccaacgcggacacgcuuugcauuggcuaucacgcuaauaacagcaccgauacaguugacaccgugcuggagaaaaaugugacagucacccauuccgugaaccuccuggaagauaagcacaaugggaaacuuuguaagcugagaggaguugcuccccuccaucugggcaaaugcaacaucgccggguggauucugggaaauccugagugugaaucucucagcacagccuccucuuggagcuacaucguggagaccuccucuagcgacaacggcacgugcuauccgggggauuuuauugacuacgaagaacugcgggagcagcuuuccagcgucucuuccuucgaacgcuuugagaucuuccccaagaccagcucuuggccuaaucacgauuccaacaagggagugacagccgcuuguccccaugccggcgcgaaaucuuuuuauaagaaucugaucuggcucguuaaaaagggcaacagcuacccuaaacuguccaagagcuauauuaaugacaaggggaaagaagugcuuguccuguggggaauccaccaccccuccaccucugccgaucaacagagccucuaccagaacgcugacgccuacguguucgugggcacauccagauauagcaagaaauuuaagccugagauugcuauccggccgaaaguccgcgaucaggaggggagaaugaauuacuauuggacccugguugaacccggagacaagauuacguucgaggccacaggcaaccugguggugccucgguacgcguuugccauggaacgcaacgcugggucuggaaucauuaucuccgauacccccgcccaugacugcaauacaaccugucaaaccccuaaaggcgcuaucaacacaagccuccccuuccagaauauucacccgaucacgauuggcaagugcccuaaguaugucaaaucuaccaagcugagaauggccacagggcuucggaacgugcccagcauccagucccgcggacuguuuggcgccauugcuggguucaucgagggaggcuggaccgggaugguugacggaugguacggcuaucaucaccagaaugaacaaggcucuggguacgcggccgaucucaaaagcacacagaacgcuaucgacgagauuaccaauaaggugaacuccgucaucgagaaaaugaauacgcaguuuacagccgugggaaaggaguucaaccaccuggagaagagaauugaaaaucuuaacaaaaagguugaugacggcuuccuggauaucuggaccuacaaugccgagcuccuggugcugcucgaaaacgagcggacccuggacuaucaugauagcaaugucaaaaaccuuuacgagaaggugcgcucucagcugaaaaacaaugcuaaggaaauugggaacggauguuuugaguucuaucacaagugcgacaauacauguauggaauccgucaaaaacggcaccuacgauuauccuaaguacagcgaggaagccaaacucaauagagaggagaucgacggggugaagcuggaaucuacacggaucuaucaaauucuugcgaucuacuccacgguugcuagcucccuggugcucgucgugucucugggcgccauuagcuuuuggaugugcuccaacggaucucugcagugccgcaucuguauuuga

SEQ ID NO: 197980 - RNA, 1701 nt, Artificial Sequence
  derived and/or modified CDS sequence (opt5) from hemagglutinin__InfluenzaA__ADM95829
augaaggccauccuggugguccuccuguacaccuucgcuacagccaacgcggacacgcuuugcauuggcuaucacgcuaauaacagcaccgauacaguugacaccgugcuggagaaaaaugugacagucacccauuccgugaaccuccuggaagauaagcacaaugggaaacuuuguaagcugagaggaguugcuccccuccaucugggcaaaugcaacaucgccggguggauucugggaaauccugagugugaaucucucagcacagccuccucuuggagcuacaucguggagaccuccucuagcgacaacggcacgugcuauccgggggauuuuauugacuacgaagaacugcgggagcagcuuuccagcgucucuuccuucgaacgcuuugagaucuuccccaagaccagcucuuggccuaaucacgauuccaacaagggagugacagccgcuuguccccaugccggcgcgaaaucuuuuuauaagaaucugaucuggcucguuaaaaagggcaacagcuacccuaaacuguccaagagcuauauuaaugacaaggggaaagaagugcuuguccuguggggaauccaccaccccuccaccucugccgaucaacagagccucuaccagaacgcugacgccuacguguucgugggcacauccagauauagcaagaaauuuaagccugagauugcuauccggccgaaaguccgcgaucaggaggggagaaugaauuacuauuggacccugguugaacccggagacaagauuacguucgaggccacaggcaaccugguggugccucgguacgcguuugccauggaacgcaacgcugggucuggaaucauuaucuccgauacccccguccaugacugcaauacaaccugucaaaccccuaaaggcgccaucaacacaagccuccccuuccagaauauucacccgaucacgauuggcaagugcccuaaguaugugaaaucuaccaagcugagacuugcuacagggcugcggaacguucccagcauccagucccgcggacucuuuggcgccauugccggguucaucgagggaggcuggaccgggaugguggacggaugguacggcuaucaucaccagaaugaacaaggcucuggguacgcugcggaucugaaaagcacacagaacgccaucgacgagauuaccaauaaggucaacuccgugaucgagaaaaugaauacgcaguuuacagcuguuggaaaggaguucaaccaccuugagaagagaauugaaaaucugaacaaaaagguggaugacggcuuccucgauaucuggaccuacaaugccgagcugcugguccuccuggaaaacgagcggacccuugacuaucaugauagcaaugugaaaaagcuguacgagaaaguccgcucucagcucaagaacaacgccaaggaaauugggaauggauguuuugaguucuaucacaaaugcgacaacauguguauggaauccgugaagaauggcacauacgauuauccuaaauacagcgaggaagcuaagcugaacagagaggagaucgacgggguuaaacuugaaucuacccggaucuaucaaauucuggccaucuacuccacaguggcgagcucccucguccuggugguuucucugggcgcuauuagcuuuuggaugugcuccaauggaucucuccagugccgcaucuguauuuga

SEQ ID NO: 197981 - RNA, 1701 nt, Artificial Sequence
  derived and/or modified CDS sequence (opt5) from hemagglutinin__InfluenzaA__ADM95831
augaaggccauccuggugguccuccuguacaccuucguuacagcuaacgccgacacgcuuugcauuggcuaucacgcgaauaacagcaccgauacaguggacaccgugcuggagaaaaaugucacagugacccauuccguuaaccuccuggaagauaagcacaaugggaaacuuuguaagcugagaggaguggcuccccuccaucugggcaaaugcaacaucgccggguggauucugggaaauccugagugugaaucucucagcacagccuccucuuggagcuacaucgucgagaccuccucuagcgacaacggcacgugcuauccgggggauuuuauugacuacgaagaacugcgggagcagcuuuccagcgugucuuccuucgaacgcuuugagaucuuccccaagaccagcucuuggccuaaucacgauuccaacaagggaguuacagcugccuguccccaugcuggcgccaaauccuuuuauaagaaucugaucuggcucgugaaaaagggcaacucuuacccuaaacuguccaagagcuauauuaaugacaaggggaaagaaguccuugugcuguggggaauccaccaccccuccaccucugcggaucaacagagccucuaccagaacgccgacgcuuacguguucgucggcacauccagauauagcaagaaauuuaagccugagauugccauccggccgaaaguucgcgaucaggaggggagaaugaauuacuauuggacccugguggaacccggagacaagauuacguucgaggcuacaggcaaccugguggucccucgguacgccuuugcgauggagaaaaacgccgggucuggaaucauuaucuccgauacccccgugcaugacugcaauacaaccugucaaaccccuaagggcgcuaucaacacaagccuccccuuccagaauauucacccgaucacgauuggcaagugcccuaaauauguuaagucuaccaaacugcgccuugccacagggcugagaaacgugcccagcauccagucccggggacucuuuggcgcuauugccggguucaucgagggaggcuggaccgggauggucgacggaugguacggcuaucaucaccagaaugaacaaggcucuggguacgccgcugaucuuaagagcacacagcacgcgaucgacgagauuaccaacaaagugaauagcguuaucgagaagaugaacacgcaguuuacagccgugggaaaggaguucaaucaucuggaaaaacgcauugaaaaccugaauaagaaagucgaugacggcuuccucgauaucuggaccuacaacgcugagcugcuggugcuccuggaaaaugagagaacccuugacuaucacgauagcaacgucaagaaucuguacgagaaagugcggucucagcucaagaacaacgccaaggaaauugggaauggauguuuugaguucuaucauaaaugcgacaacacauguauggaauccguuaagaauggcaccuacgauuauccuaaauacagcgaggaagccaagcugaaccgcgaggagaucgacggggugaaacuugaaucuacaagaaucuaucaaauucuggcuaucuacuccacggucgccagcucccucgugcugguugugucucugggcgcgauuagcuuuuggaugugcuccaauggaucucuccagugccggaucuguauuuga

SEQ ID NO: 197982 - RNA, 1701 nt, Artificial Sequence; identical to SEQ ID NO: 195842
  derived and/or modified CDS sequence (opt5) from hemagglutinin__InfluenzaA__ADM95832

SEQ ID NO: 197983 - RNA, 1701 nt, Artificial Sequence; identical to SEQ ID NO: 196423
  derived and/or modified CDS sequence (opt5) from hemagglutinin__InfluenzaA__ADM95833

SEQ ID NO: 197984 - RNA, 1701 nt, Artificial Sequence; identical to SEQ ID NO: 197968
  derived and/or modified CDS sequence (opt5) from hemagglutinin__InfluenzaA__ADM95834

SEQ ID NO: 197985 - RNA, 1701 nt, Artificial Sequence; identical to SEQ ID NO: 196423
  derived and/or modified CDS sequence (opt5) from hemagglutinin__InfluenzaA__ADM95836

SEQ ID NO: 197986 - RNA, 1701 nt, Artificial Sequence; identical to SEQ ID NO: 197338
  derived and/or modified CDS sequence (opt5) from hemagglutinin__InfluenzaA__ADM95837

SEQ ID NO: 197987 - RNA, 1701 nt, Artificial Sequence
  derived and/or modified CDS sequence (opt5) from hemagglutinin__InfluenzaA__ADM95838
augaaggccauccuggugguccuccuguacaccuucgcuacagccaacgcggacacgcuuugcauuggcuaucacgcuaauaacagcaccgauacaguugacaccgugcuggagaaaaaugugacagucacccauuccgugaaccuccuggaagauaagcacaaugggaaacuuuguaagcugagaggaguugcuccccuccaucugggcaaaugcaacaucgccggguggauucugggaaauccugagugugaaucucucagcacagccuccucuuggagcuacaucguggagaccuccucuagcgacaacggcacgugcuauccgggggauuuuauugacuacgaagaacugcgggagcagcuuuccagcgucucuuccuucgaacgcuuugagaucuuccccaagaccagcucuuggccuaaucacgauuccaacaagggagugacagccgcuugucugcaugccggcgcgaaaucuuuuuauaagaaucucaucuggcugguuaaaaagggcaacagcuaccccaaacuuuccaagagcuauauuaaugacaaggggaaagaagugcugguccucuggggaauccaccacccuuccaccucugccgaucaacagagccuguaccagaacgcugacgccuacguguucgugggcacauccagauauagcaagaaauuuaagcccgagauugcuauccggccuaaaguccgcgaucaggaggggagaaugaauuacuauuggacccugguugaaccgggagacaagauuacguucgaggccacaggcaaccucguggugccccgguacgcguuugccauggaacgcaacgcugggucuggaaucauuaucuccgauaccccuguccaugacugcaauacaaccugucaaacccccaaaggcgccaucaacacaagccugccuuuccagaauauucaccccaucacgauuggcaagugcccgaaguaugugaaaucuaccaaacuuagacuggcuacagggcuccggaacguuccuagcauccagucccgcggacuguuuggcgccauugccggguucaucgagggaggcuggaccgggaugguggacggaugguacggcuaucaucaccagaaugaacaaggcucuggguacgcugcggaucuuaaaagcacacagaacgccaucgacaagauuaccaauaaagucaacuccgugaucgagaagaugaauacgcaguuuacagcuguuggaaaggaguucaaccaccuggaaaagagaauugagaaucucaacaagaaaguggaugacggcuuccuggauaucuggaccuacaaugccgaacugcucguccugcuugagaacgaacggacccuggacuaucaugauagcaaugugaagaaccucuacgagaaaguccgcucucagcugaagaacaaugccaaggagauugggaacggauguuuugaguucuaucacaaaugcgacaauacauguauggaguccgugaagaacggcaccuacgauuaucccaaauacagcgaagaggcuaaacuuaauagagaagagaucgacgggguuaagcuggagucuacacggaucuaucaaauucucgccaucuacuccacgguggcgagcucccugguccuggugguuucucucggcgcuauuagcuuuuggaugugcuccaacggaucucugcagugccgcaucuguauuuga

SEQ ID NO: 197988 - RNA, 1701 nt, Artificial Sequence; identical to SEQ ID NO: 196423
  derived and/or modified CDS sequence (opt5) from hemagglutinin__InfluenzaA__ADM95839

SEQ ID NO: 197989 - RNA, 1701 nt, Artificial Sequence; identical to SEQ ID NO: 197948
  derived and/or modified CDS sequence (opt5) from hemagglutinin__InfluenzaA__ADM95840

SEQ ID NO: 197990 - RNA, 1701 nt, Artificial Sequence; identical to SEQ ID NO: 197948
  derived and/or modified CDS sequence (opt5) from hemagglutinin__InfluenzaA__ADM95842

SEQ ID NO: 197991 - RNA, 1701 nt, Artificial Sequence; identical to SEQ ID NO: 197338
  derived and/or modified CDS sequence (opt5) from hemagglutinin__InfluenzaA__ADM95843

SEQ ID NO: 197992 - RNA, 1701 nt, Artificial Sequence; identical to SEQ ID NO: 197338
  derived and/or modified CDS sequence (opt5) from hemagglutinin__InfluenzaA__ADM95844

SEQ ID NO: 197993 - RNA, 1701 nt, Artificial Sequence
  derived and/or modified CDS sequence (opt5) from hemagglutinin__InfluenzaA__ADM95845
augaaggccauccuggugguccuccuguacaccuucgcuacagccaacgcggacacgcuuugcauuggcuaucacgcuaauaacagcaccgauacaguugacaccgugcuggagaaaaaugugacagucacccauuccgugaaccuccuggaagauaagcacaaugggaaacuuuguaagcugagaggaguugcuccccuccaucugggcaaaugcaacaucgccggguggauucugggaaauccugagugugaaucucucagcacagccuccucuuggagcuacaucguggagaccuccucuagcgacaacggcacgugcuauccgggggauuuuauugacuacgaagaacugcgggagcagcuuuccagcgucucuuccuucgaacgcuuugagaucuuccccaagaccagcucuuggccuaaucacgauuccaacaagggagugacagccgcuuguccccaugccggcgcgaaaucuuuuuauaagaaucugaucuggcucguuaaaaagggcaacagcuacccuaaacuguccaagagcuauauuaaugacaaggggaaagaagugcuuguccuguggggaauccaccaccccuccaccucugccgaucaacagagccucuaccagaacgcugacgccuacguguucgugggcacauccagauauagcaagaaauuuaagccugagauugcuauccggccgaaaguccgcgaucaggaggggagaaugaauuacuauuggacccugguugaacccggagacaagauuacguucgaggccacaggcaaccugguggugccucgguacgcguuugccauggaacgcaacgcugggucuggaaucauuaucuccgauacccccguccaugacugcaauacaaccugucaaaccccuaaaggcgccaucaacacaagccuccccuuccagaauauucacccgaucacgauuggcaagugcccuaaguaugugaaaucuaccaagcugagaauggcuacagggcuucggaacguucccagcauccagucccgcggacuguuuggcgccauugccggguucaucgagggaggcuggaccgggaugguggacggaugguacggcuaucaucaccagaaugaacaaggcucuggguacgcugcggaucucaaaagcacacagaacgccaucgacgagauuaccaauaaggucaacuccgugaucgagaaaaugaauacgcaguuuacagcuguuggaaaggaguucaaccaccuggagaagagaauugaaaaucuuaacaaaaagguggaugacggcuuccuggauaucuggaccuacaaugccgagcuccugguccugcucgaaaacgagcggacccuggacuaucaugauagcaaugugaaaaaccuuuacgagaagguccgcucucagcugaaaaacaaugccaaggaaauugggaacggauguuuugaguucuaucacaagugcgacaauacauguauggaauccgugaaaaacggcaccuacgauuauccuaaguacagcgaggaaacaaaacucaauagagaggagaucgacgggguuaagcuggaaucuacgcggaucuaucaaauucuugcuaucuacuccaccguggccagcucccugguccucgugguuucucugggcgcgauuagcuuuuggaugugcuccaacggaucucugcagugccgcaucuguauuuga

SEQ ID NO: 197994 - RNA, 1701 nt, Artificial Sequence
  derived and/or modified CDS sequence (opt5) from hemagglutinin__InfluenzaA__ADM95846
augaaggccauccuggugguccuccuguacaccuucgcuacagccaacgcggacacgcuuugcauuggcuaucacgcuaauaacagcaccgauacaguugacaccgugcuggagaaaaaugugacagucacccauuccgugaaccuccuggaagauaagcacaaugggaaacuuuguaagcugagaggaguugcuccccuccaucugggcaaaugcaacaucgccggguggauucugggaaauccugagugugaaucucucagcacagccuccucuuggagcuacaucguggaggccuccucuagcgacaacgggaccugcuauccgggcgauuuuauugacuacgaagaacugcgggagcagcuuuccagcgucucuuccuucgaacgcuuugagaucuuccccaagacgagcucuuggccuaaucacgauuccaacaagggagugaccgcugccuguccccaugcgggcgccaagagcuuuuauaagaaucugaucuggcucguuaaaaagggcaacucuuacccuaaacuguccaagagcuauauuaaugacaaggggaaagaagugcuuguccuguggggaauccaccaccccuccacaucugcugaucaacagagccucuaccagaacgccgacgcuuacguguucgugggcaccuccagauauagcaagaaauuuaagccugagauugccauccggccgaaaguccgcgaucaggaggggagaaugaauuacuauuggacacugguugaacccggagacaagauuaccuucgaggcgacgggcaaccugguggugccucgguacgccuuugcuauggaacgcaacgccgggucuggaaucauuaucuccgauacacccguccaugacugcaauaccacaugucaaaccccuaaaggcgcuaucaacaccagccuccccuuccagaauauucacccgaucacaauuggcaagugcccuaaguaugugaaaucuacgaagcugagacuugccaccgggcugcggaacauccccagcauucagucccgcggacucuuuggcgccaucgcuggguucaucgagggaggcuggacagggaugguugacggaugguacggcuaucaucaccagaaugaacaaggcucuggguacgcggccgaucugaaaagcacccagaacgcuauugacgagaucacaaauaaggugaacuccgucauugagaaaaugaauacccaguuuacggccgugggaaaggaguucaaccaccuugagaagagaaucgaaaaucugaacaaaaagguugaugacggcuuccucgauauuuggacauacaaugccgagcugcuggugcuccuggaaaacgagcggacccuugacuaucaugauagcaaugucaaaaaccuguacgagaaggugcgcucucagcucaaaaacaaugcuaaggaaaucgggaacggauguuuugaguucuaucacaagugcgacaauaccuguauggaauccgucaaaaacggcacauacgauuauccuaaguacagcgaggaagccaaacugaauagagaggagaucgacggggugaaacuugaaucuacccggauuuaucaaauccuggcgauuuacuccacaguugcuagcucccucgugcuggucgugucucugggcgccaucagcuuuuggaugugcuccaacggaucucuccagugccgcauuuguaucuga

SEQ ID NO: 197995 - RNA, 1701 nt, Artificial Sequence; identical to SEQ ID NO: 195842
  derived and/or modified CDS sequence (opt5) from hemagglutinin__InfluenzaA__ADM95847

SEQ ID NO: 197996 - RNA, 1701 nt, Artificial Sequence; identical to SEQ ID NO: 195842
  derived and/or modified CDS sequence (opt5) from hemagglutinin__InfluenzaA__ADM95848

SEQ ID NO: 197997 - RNA, 1701 nt, Artificial Sequence
  derived and/or modified CDS sequence (opt5) from hemagglutinin__InfluenzaA__ADM95849
augaaggccauccuggugguccuccuguacaccuucgcuacagccaacgcggacacgcuuugcauuggcuaucacgcuaauaacagcaccgauacaguugacaccgugcuggagaaaaaugugacagucacccauuccgugaaccuccuggaagauaagcacaaugggaaacuuuguaagcugagaggaguugcuccccuccaucugggcaaaugcaacaucgccggguggauucugggaaauccugagugugaaucucucagcacagccuccucuuggagcuacaucguggagaccuccucuagcgacaacggcacgugcuauccgggggauuuuauugacuacgaagaacugcgggagcagcuuuccagcgucucuuccuucgaacgcuuugagaucuuccccaagaccagcucuuggccuaaucacgauuccaacaagggagugacagccgcuuguccccaugccggcgcgaaaucuuuuuauaagaaucugaucuggcucguuaaaaagggcaacagcuacccuaaacuguccaagagcuauauuaaugacaaggggaaagaagugcuuguccuguggggaauccaccaccccuccaccucugccgaucaacagagccucuaccagaacgcugacgccuacguguucgugggcacauccagauauagcaagaaauuuaagccugagauugcuauccggccgaaaguccgcgaucaggaggggagaaugaauuacuauuggacccugguugaacccggagacaagauuacguucgaggccacaggcaaccugguggugccucgguacgcguuugccauggaacgcaacgcugggucuggaaucauuaucuccgauacccccguccaugacugcaauacaaccugucaaaccccuaaaggcgccaucaacacaagccuccccuuccagaauauucacccgaucacgauuggcaagugcccuaaguaugugaaaucuaccaagcugagacuugcuacagggcugcggaacguucccagcauccagucccgcggacucuuuggcgccauugccggguucaucgagggaggcuggaccgggaugguggacggaugguacggcuaucaucaccagaaugaacaaggcucuggguacgcugcggaucugaaaagcacacagaacgccaucgacgagauuaccaauaaggucaacuccgugaucgagaaaaugaauacgcaguuuacagcuguuggaaaggaguucaaccaccuugagaagagaauugaaaaucugaacaaaaagguggaugacggcuuccucgauaucuggaccuacaaugccgagcugcugguccuccuggaaaacgagcggacccuugacuaucaugauagcaaugugaaaaagcuguacgagaaaguccgcucucagcucaagaacaacgccaaggaaauugggaauggauguuuugaguucuaucacaaaugcgacaacacauguauggaauccgugaagaauggcaccuacgauuauccuaaauacagcgaggaagcuaagcugaacagagaggagaucgacgggguuaaacuugaaucuacacggaucuaucaaauucuggccaucuacuccacgguggcgagcucccucguccuggugauuucucugggcgcuaucagcuuuuggaugugcuccaauggaucucuccagugccgcauuuguaucuga

SEQ ID NO: 197998 - RNA, 1701 nt, Artificial Sequence; identical to SEQ ID NO: 197338
  derived and/or modified CDS sequence (opt5) from hemagglutinin__InfluenzaA__ADM95850

SEQ ID NO: 197999 - RNA, 1701 nt, Artificial Sequence
  derived and/or modified CDS sequence (opt5) from hemagglutinin__InfluenzaA__ADM95851
augaaggccauccuggugguccuccuguacaccuucgcuacagccaacgcggacacgcuuugcauuggcuaucacgcuaauaacagcaccgauacaguugacaccgugcuggagaaaaaugugacagucacccauuccgugaaccuccuggaagauaagcacaaugggaaacuuuguaagcugagaggaguugcuccccuccaucugggcaaaugcaacaucgccggguggauucugggaaauccugagugugaaucucucagcacaaccuccucuuggagcuacaucguggagacguccucuagcgacaacgggaccugcuauccgggcgauuuuauugacuacgaagaacugcgggagcagcuuuccagcgucucuuccuucgaacgcuuugagaucuuccccaagacaagcucuuggccuaaucacgauuccaacaagggagugaccgccgccuguccccaugcuggcgccaagagcuuuuauaagaaucugaucuggcucguuaaaaagggcaacucuuacccuaaacuguccaagagcuauauuaaugacaaggggaaagaagugcuuguccuguggggaauccaccaccccuccacaucugcggaucaacagagccucuaccagaacgccgacgcuuacguguucgugggcaccuccagauauagcaagaaauuuaagccugagauugccauccggccgaaaguccgcgaucaggaggggagaaugaauuacuauuggacgcugguugaacccggagacaagauuacauucgaggcuaccggcaaccugguggugccucgguacgccuuugcgauggaacgcaacgccgggucuggaaucauuaucuccgauacacccguccaugacugcaauaccaccugucaaacaccuaaaggcgcuaucaacacgagccuccccuuccagaauauucacccgaucaccauuggcaagugcccuaaguaugugaaaucuacaaagcugagacuugccaccgggcugcggaacauccccagcauucagucccgcggacucuuuggcgcuaucgccggguucaucgagggaggcuggacagggaugguugacggaugguacggcuaucaucaccagaaugaacaaggcucuggguacgccgcugaucugaaaagcacccagaacgcgauugacgagaucacgaauaaggugaacuccgucauugagaaaaugaauacacaguuuaccgccgugggaaaggaguucaaccaccuugagaagagaaucgaaaaucugaacaaaaagguugaugacggcuuccucgauauuuggaccuacaaugcugagcugcuggugcuccuggaaaacgagcggacacuugacuaucaugauagcaaugucaaaaaccuguacgagaaggugcgcucucagcucaaaaacaaugccaaggaaaucgggaacggauguuuugaguucuaucacaagugcgacaauaccuguauggaauccgucaaaaacggcacauacgauuauccuaaguacagcgaggaagccaaacugaauagagaggagaucgacggggugaaacuugaaucuacgcggauuuaucaaauccuggcuauuuacuccaccguugccagcucccucgugcuggucgugucucugggcgcgaucagcuuuuggaugugcuccaacggaucucuccagugccgcauuuguaucuga

SEQ ID NO: 198000 - RNA, 1701 nt, Artificial Sequence
  derived and/or modified CDS sequence (opt5) from hemagglutinin__InfluenzaA__ADM95852
augaaggccauccuggugguccuccuguacaccuucgcuacagccaacgcggacacgcuuugcauuggcuaucacgcuaauaacagcaccgauacaguugacaccgugcuggagaaaaaugugacagucacccauuccgugaaccuccuggaagauaagcacaaugggaaacuuuguaagcugagaggaguugcuccccuccaucugggcaaaugcaacaucgccggguggauucugggaaauccugagugugaaucucucagcacagccuccucuuggagcuacaucguggagaccuccucuagcgacaacggcacgugcuauccgggggauuuuauugacuacgaagaacugcgggagcagcuuuccagcgucucuuccuucgaacgcuuugagaucuuccccaagaccagcucuuggccuaaucacgauuccaacaagggagugacagccgcuuguccccaugccggcgcgaaaucuuuuuauaagaaucugaucuggcucguuaaaaagggcaacagcuacccuaaacuguccaagagcuauauuaaugacaaggggaaagaagugcuuguccuguggggaauccaccaccccuccaccucugccgaucaacagagccucuaccagaacgcugacgccuacguguucgugggcacauccagauauagcaagaaauuuaagccugagauugcuauccggccgaaaguccgcgaucaggaggggagaaugaauuacuauuggacccugguugaacccggagacaagauuacguucgaggccacaggcaaccugguggugccucgguacgcguuugccauggaacgcaacgcugggucuggaaucauuaucuccgauacccccguccaugacugcaauacaaccugucaaaccccuaaaggcgccaucaacacaagccuccccuuccagaauauucacccgaucacgauuggcaagugcccuaaguaugugaaaucuaccaagcugagacuugcuacagggcugcggaacguucccagcauccagucccgcggacucuuuggcgccauugccggguucaucgagggaggcuggaccgggaugguggacggaugguacggcuaucaucaccagaaugaacaaggcucuggguacgcugcggaucugaaaagcacacagaacgccaucgacgagauuaccaauaaggucaacuccgugaucgagaaaaugaauacgcaguuuacagcuguuggaaaggaguucaaccaccuugagaagagaauugaaaaucugaacaaaaagguggaugacggcuuccucgauaucuggaccuacaaugccgagcugcugguccuccuggaaaacgagcggacccuugacuaucaugauagcaaugugaaaaagcuguacgagaaaauucgcucucagcucaagaacaacgccaaggaaaucgggaauggauguuuugaguucuaucacaaaugcgacaacacauguauggaauccgucaagaauggcaccuacgauuauccuaaauacagcgaggaagcuaagcugaacagagaggagaucgacggggugaaacuugaaucuacacggauuuaucaaauccuggccauuuacuccacgguugcgagcucccucgugcuggucgugucucugggcgcuaucagcuuuuggaugugcuccaauggaucucuccagugccgcauuuguaucuga

SEQ ID NO: 198001 - RNA, 1701 nt, Artificial Sequence; identical to SEQ ID NO: 196161
  derived and/or modified CDS sequence (opt5) from hemagglutinin__InfluenzaA__ADM95854

SEQ ID NO: 198002 - RNA, 1701 nt, Artificial Sequence
  derived and/or modified CDS sequence (opt5) from hemagglutinin__InfluenzaA__ADM95855
augaaggccauccuggugguccuccuguacaccuucgcuacaacgaacgccgacacccuuugcauuggcuaucacgcgaauaacagcacagauaccguugacacagugcuggagaaaaaugugaccgucacacauuccgugaaccuccuggaagauaagcacaaugggaaacuuuguaagcugagaggaguugcuccccuccaucugggcaaaugcaacaucgccggguggauucugggaaauccugagugugaaucucucagcaccgccuccucuuggagcuacaucguggagacguccucuagcgacaacgggaccugcuauccgggcgauuuuauugacuacgaagaacugcgggagcagcuuuccagcgucucuuccuucgaacgcuuugagaucuuccccaagacaagcucuuggccuaaucacgauuccaacaagggagugaccgcugccuguccccaugcuggcgccaagagcuuuuauaaaaaucugaucuggcucguuaaaaagggcaacucuuacccuaaacuguccaagagcuauauuaaugacaaggggaaagaagugcuuguccuguggggaauccaccaccccuccacaucugcggaucaacagagccucuaccagaacgccgacgcuuacguguucgugggcaccuccagauauagcaagaaauuuaagccugagauugccauccggccgaaaguccgcgaucaggaggggagaaugaauuacuauuggacgcugguugaacccggagacaagauuacauucgaggcuaccggcaaccugguggugccucgguacgccuuugcgauggaacgcaacgccgggucuggaaucauuaucuccgauacacccguccaugacugcaauaccaccugucaaacaccuaaaggcgcuaucaacacgagccuccccuuccagaauauucacccgaucaccauuggcaagugcccuaaguaugugaaaucuacaaagcugagacuugccaccgggcugcggaacguucccagcauccagucccgcggacucuuuggcgcuauugccggguucaucgagggaggcuggacagggaugguggacggaugguacggcuaucaucaccagaaugaacaaggcucuggguacgccgcugaucugaaaagcacccagaacgcgaucgacgagauuacgaauaaggucaacuccgugaucgagaaaaugaauacacaguuuaccgccguuggaaaggaguucaaccaccuugagaagagaauugaaaaucugaacaaaaagguggaugacggcuuccucgauaucuggaccuacaaugcugagcugcugguccuccuggaaaacgagcggacacuugacuaucaugauagcaaugugaaaaagcuguacgagaaaguccgcucucagcucaagaacaacgccaaggaaauugggaauggauguuuugaguucuaucacaaaugcgacaacaccuguauggaauccgugaagaauggcacauacgauuauccuaaauacagcgaggaagccaagcugaacagagaggagaucgacgggguuaaacuugaaucuacgcggaucuaucaaauucuggcuaucuacuccaccguggccagcucccucguccuggugguuucucugggcgcgauuagcuuuuggaugugcuccaauggaucucuccagugccgcaucuguauuuga

SEQ ID NO: 198003 - RNA, 1701 nt, Artificial Sequence
  derived and/or modified CDS sequence (opt5) from hemagglutinin__InfluenzaA__ADM95857
augaaggccauccuggugguccuccuguacaccuucgcuacagccaacgcggacacgcuuugcauuggcuaucacgcuaauaacagcaccgauacaguugacaccgugcuggagaaaaaugugacagucacccauuccgugaaccuccuggaagauaagcacaaugggaaacuuuguaagcugagaggaguugcuccccuccaucugggcaaaugcaacaucgccggguggauucugggaaauccugagugugaaucucucagcacagccaacuccuggucuuacaucguggagaccagcuccucugacaauggcacgugcuauccgggggauuuuauugacuacgaagaacugcgggagcagcuuagcuccgucagcucuuucgaacgcuuugagaucuuccccaagaccuccagcuggccuaaccacgauucuaauaagggagugacagccgcuuguccccaugccggcgcgaaauccuuuuauaagaaccugaucuggcucguuaaaaagggcaauagcuacccuaaacugucuaaguccuauauuaacgacaaggggaaagaagugcuuguccuguggggaauccaccaccccagcaccuccgccgaucaacagucucucuaccagaaugcugacgccuacguguucgugggcacaagcagauauuccaagaaauuuaagccugagauugcuauccggccgaaaguccgcgaucaggaggggagaaugaacuacuauuggacccugguugaacccggagacaagauuacguucgaggccacaggcaaccugguggugccucgguacgcguuugccauggaacgcaaugcugggagcggaaucauuaucucugauacccccguccaugacugcaacacaaccugucaaaccccuaaaggcgccaucaauacaucccuccccuuccagaacauucacccgaucacgauuggcaagugcccuaaguaugugaaaagcaccaagcugagaauggcuacagggcuucggaauguucccucuauccagagccgcggacuguuuggcgccauugccggguucaucgagggaggcuggaccgggaugguggacggaugguacggcuaucaucaccagaacgaacaaggcuccggguacgcugcggaucucaaaucuacacagaaugccaucgacgagauuaccaacaaggucaauagcgugaucgagaaaaugaacacgcaguuuacagcuguuggaaaggaguucaaucaccuggagaagagaauugaaaaccuuaauaaaaagguggaugacggcuuccuggauaucuggaccuacaacgccgagcuccugguccugcucgaaaaugagcggacccuggacuaucaugauuccaacgugaaaaaccuuuacgagaagguccgcagccagcugaaaaauaacgccaaggaaauugggaauggauguuuugaguucuaucacaagugcgacaacacauguauggaaucugugaaaaauggcaccuacgauuauccuaaguacuccgaggaagcuaaacucaacagagaggagaucgacgggguuaagcuggaaagcacacggaucuaucaaauucuugccaucuacucuacgguggcguccagccugguccucgugguuucccugggcgcuauuucuuuuuggaugugcagcaauggaucccugcagugccgcaucuguauuuga

SEQ ID NO: 198004 - RNA, 1701 nt, Artificial Sequence; identical to SEQ ID NO: 196423
  derived and/or modified CDS sequence (opt5) from hemagglutinin__InfluenzaA__ADM95858

SEQ ID NO: 198005 - RNA, 1701 nt, Artificial Sequence
  derived and/or modified CDS sequence (opt5) from hemagglutinin__InfluenzaA__ADM95859
augaaggccauccuggugguccuccuguacaccuucgcuacagccaacgcggacacgcuuugcauuggcuaucacgcuaauaacagcaccgauacaguugacaccgugcuggagaaaaaugugacagucacccauuccgugaaccuccuggaagauaagcacaaugagaaacuuuguaagcugagagggguugcuccccuccaucugggaaaaugcaacaucgccggcuggauucuggggaauccugaaugugagucucucagcacagccuccucuuggagcuacaucguggaaaccuccucuagcgacaacggaacgugcuauccgggcgauuuuauugacuacgaggagcugcgggaacagcuuuccagcgucucuuccuucgagcgcuuugaaaucuuccccaagaccagcucuuggccuaaucacgauuccaacaagggggugacagccgcuuguccccaugccggagcgaaaucuuuuuauaagaaucugaucuggcucguuaaaaagggcaacagcuacccuaaacuguccaagagcuauauuaaugacaagggcaaagaggugcuuguccugugggggauccaccaccccuccaccucugccgaucaacagagccucuaccagaacgcugacgccuacguguucgugggaacauccagauauagcaagaaauuuaagccugagauugcuauccggccgaaaguccgcgaucaggaaggcagaaugaauuacuauuggacccugguugagcccggggacaagauuacguucgaagccacaggaaaccugguggugccucgguacgcguuugccauggagcgcaacgcuggcucugggaucauuaucuccgauacccccguccaugacugcaauacaaccugucaaaccccuaaaggagccaucaacacaagccuccccuuccagaauauucacccgaucacgauuggcaagugcccuaaguaugugaaaucuaccaagcugagacuugcuacaggccugcggaacguucccagcauccagucccgcgggcucuuuggagccauugccggcuucaucgaagggggauggaccggcaugguggacgggugguacggauaucaucaccagaaugagcaaggcucuggcuacgcugcggaucugaaaagcacacagaacgccaucgacgagauuaccaauaaggucaacuccgugaucgaaaagaugaauacgcaguuuacagcuguugggaaagaguucaaccaccuugaaaagagaauugagaaucugaacaaaaagguggaugacggauuccucgauaucuggaccuacaaugccgaacugcugguccuccuggagaacgagcggacccuugacuaucaugauagcaaugugaaaaagcuguacgaaaaaguccgcucucagcucaagaacaacgccaaggagauuggcaauggguguuuugaguucuaucacaaaugcgacaacacauguauggaauccgugaagaauggaaccuacgauuauccuaaauacagcgaagaggcuaagcugaacagagaggaaaucgacggcguuaaacuugagucuacacggaucuaucaaauucuggccaucuacuccacgguggcgagcucccucguccuggugguuucucugggggcuauuagcuuuuggaugugcuccaauggcucucuccagugccgcaucuguauuuga

SEQ ID NO: 198006 - RNA, 1701 nt, Artificial Sequence; identical to SEQ ID NO: 196368
  derived and/or modified CDS sequence (opt5) from hemagglutinin__InfluenzaA__ADM95860

SEQ ID NO: 198007 - RNA, 1701 nt, Artificial Sequence; identical to SEQ ID NO: 197968
  derived and/or modified CDS sequence (opt5) from hemagglutinin__InfluenzaA__ADM95862

SEQ ID NO: 198008 - RNA, 1701 nt, Artificial Sequence
  derived and/or modified CDS sequence (opt5) from hemagglutinin__InfluenzaA__ADM95864
augaaggccauccuggugguccuccuguacaccuucgcuacagccaacgcggacacgcuuugcauuggcuaucacgcuaauaacagcaccgauacaguugacaccgugcuggagaaaaaugugacagucacccauuccgugaaccuccuggaagauaagcacaaugggaaacuuuguaagcugagaggaguugcuccccuccaucugggcaaaugcaacaucgccggguggauucugggaaauccugagugugaaucucucagcacagccuccucuuggagcuacaucguggagaccuccucuagcgacaacggcacgugcuauccgggggauuuuauugacuacgaagaacugcgggagcagcuuuccagcgucucuuccuucgaacgcuuugagaucuuccccaagaccagcucuuggccuaaucacgauuccaacaagggagugacagccgcuuguccccaugccggcgcgaaaucuuuuuauaagaaucugaucuggcucguuaaaaagggcaacagcuacccuaaacuguccaagagcuauauuaaugacaaggggaaagaagugcuuguccuguggggaauccaccaccccuccaccucugccgaucaacagagccucuaccagaacgcugacgccuacguguucgugggcacauccagauauagcaagaaauuuaagccugagauugcuauccggccgcgcgucagagaucaggaggggcggaugaauuaccauuggacccugguugaacccggagacaaaauuacguucgaggccacaggcaaccugguggugccucgcuaugcguuugccauggaaagaaacgcugggucuggaaucauuaucuccgauacccccguccacgacugcaauacaaccugucaaaccccuaagggcgccaucaacacaagccuccccuuccagaauauucauccgaucacgauuggcaaaugcccuaaguacgugaagucuaccaaacugcggcuugcuacagggcugcgcaacauccccagcauucaguccagaggacucuuuggcgccaucgccggguucaucgagggaggcuggaccgggaugguugacggaugguauggcuaccaccaccagaaugaacaaggcucuggguaugcugcggaucuuaagagcacacagaacgccauugacgagaucaccaauaaagugaacuccgucauugagaagaugaauacgcaguuuacagcugugggaaaagaguucaaccaucuggagaagcggaucgaaaaucugaacaagaaaguugaugacggcuuccucgauauuuggaccuacaaugccgagcugcuggugcuccuggaaaacgagcgcacccuugacuaccacgauagcaaugucaagaaccuguaugagaaagugagaucucagcucaagaacaaugccaaagaaaucgggaacggauguuuugaguucuaccauaagugcgacaauacauguauggaauccgucaagaacggcaccuaugauuacccuaaauauagcgaggaagcuaagcugaaucgggaggagaucgacggggugaaacuugaaucuacacgcauuuaccaaauccuggccauuuauuccacgguugcgagcucccucgugcuggucgugucucugggcgcuaucagcuuuuggaugugcuccaacggaucucuccagugcagaauuuguaucuga

SEQ ID NO: 198009 - RNA, 1701 nt, Artificial Sequence; identical to SEQ ID NO: 196293
  derived and/or modified CDS sequence (opt5) from hemagglutinin__InfluenzaA__ADM95865

SEQ ID NO: 198010 - RNA, 1701 nt, Artificial Sequence
  derived and/or modified CDS sequence (opt5) from hemagglutinin__InfluenzaA__ADM95866
augaaggccauccuggugguccuccuguacaccuucgcuacaacgaacgccgacacccuuugcauuggcuaucacgcgaauaacagcacagauaccguugacacagugcuggagaaaaaugugaccgucacacauuccgugaaccuccuggaagauaagcacaaugggaaacuuuguaagcugagaggaguugcuccccuccaucugggcaaaugcaacaucgccggguggauucugggaaauccugagugugaaucucucagcaccgccuccucuuggagcuacaucguggagauuuccucuagcgacaacggcacgugcuauccgggggauuuuaucgacuacgaagaacugcgggagcagcuuuccagcgucucuuccuucgaacgcuuugagaucuuccccaagaccagcucuuggccuaaucacgauuccaacaagggagugacagcugccuguccccaugcuggcgccaagagcuuuuauaaaaaucugauuuggcucguuaaaaagggcaacucuuacccuaaacuguccaagagcuauaucaaugacaaggggaaagaagugcuuguccuguggggcauucaccaccccuccaccucugcggaucaacagagccucuaccagaacgccgacgcuuacguguucgugggaacauccagauauagcaagaaauuuaagccugagaucgccauucggccgaaaguccgcgaucaggaggggagaaugaauuacuauuggacccugguugaacccggagacaagaucacguucgaggcuacaggcaaccugguggugccucgguacgccuuugcgauggaacgcaacgccgggucuggaauuaucaucuccgauacccccguccaugacugcaauacaaccugucaaaccccuaaaggcgcuauuaacacaagccuccccuuccagaauauccacccgauuacgaucggcaagugcccuaaguaugugaaaucuaccaagcugagacuuguuacagggcugcggaacgugcccagcauucagucccgcggacucuuuggcgccaucgcuggguucaucgagggaggcuggaccgggauggucgacggaugguacggcuaucaucaccagaaugaacaaggcucuggguacgccgccgaucugaaaagcacacagaacgcuauugacaagaucaccaauaaagugaacuccguuauugagaagaugaauacgcaguuuacagcggugggaaaggaguucaaccaccuugagaaaagaaucgagaaucugaacaagaaagucgaugacggcuuccucgauauuuggaccuacaaugccgaacugcuggugcuccuggagaacgaacggacccuugacuaucaugauagcaaugucaagaaccuguacgagaaagugcgcucucagcucaagaacaaugcuaaggagaucgggaacggauguuuugaguucuaucacaaaugcgacaauacauguauggaauccguuaagaacggcaccuacgauuauccuaaauacagcgaagaggccaagcugaauagagaagagaucgacggggugaaacuugagucuacacggauuuaucaaauccuggccauuuacuccacggcugccagcucccucguccuggugguuucucugggcgcgaucagcuuuuggaugugcuccaacggaucucuccagugccgcauuuguaucuga

SEQ ID NO: 198011 - RNA, 1698 nt, Artificial Sequence; identical to SEQ ID NO: 197585
  derived and/or modified CDS sequence (opt5) from hemagglutinin__InfluenzaA__ADN06300

SEQ ID NO: 198012 - RNA, 1698 nt, Artificial Sequence
  derived and/or modified CDS sequence (opt5) from hemagglutinin__InfluenzaA__ADN06311
augaaggugaaacugcucguccugcuuugcacccugacagccacguacgcugacaccaucuguauuggcuaucacgccaacaauagcacagauaccguugacacagugcucgagaagaacgugaccgucacacauuccgugaaucugcuugaaaacucucacaaugggaaacugugccuccugaagggaaucgcgccccugcagcucggcaacuguagcguugcuggguggauucugggaaauccugagugcgaacuucugaucuccaaagagucuuggagcuacauuguggaaaagccgaaccccgagaauggcaccuguuauccugggcauuucgccgauuacgaggaacucagagagcaacuguccucugucagcuccuuugaacgguucgagaucuuucccaagggaagcucuuggccuaaccacacggugaccggcguuuccgccagcugcucucauaauggcgagaacuccuucuaucgcaaucuucuguggcucacagggaaaaacggacuguaccccaaucugagcaagucuuaugcuaacaacaaagaaaaggaggugcucguccuguggggcgugcaccacccuccgaauaucgccgaccagaaaacccuuuaccauacagaaaacgcuuacguguccgucguuagcucccacuauucuagaaaguuuacccccgagauugccaagcggccuaaagugcgcgaucaggaagggagaaucaauuacuauuggacgcugcucgagcccggagacacaauuaucuucgaggcgaacggcaaucugauugccccucgguacgcuuuugcccuuagccgcggguucggauccggcaucauuaacagcaaugcucccauggauaagugugacgccaaaugccagaccccgcaaggcgcgaucaacucuucccugccuuuucagaaugugcaucccgucacaaucggggaauguccuaaguaugugagaagcgccaaacuccggaugguuaccggacugcgcaacauucccucuauccagagcagaggccuguucggggcuauugccggauuuaucgagggcggguggaccggaaugguggauggcugguacggcuaucaccaccagaaugaacaaggguccggauacgcugccgaccagaagucuacacagaacgccauuaauggcaucacgaacaaagucaauagcgugaucgagaagaugaacacccaguucacagcuguugggaaggaauuuaacaaacucgagcggcgcauggagaaucugaacaagaaaguggaugacggauucauugauaucuggaccuacaaugcggaacuucugguccuccuggagaacgaaagaacacuugacuuccaugacuccaaugugaagaaccuguaugagaaagucaagagccaacucaagaauaacgccaaagaaauuggcaaugggugcuuugaguucuaccacaaguguaacgaugagugcauggaaucugugaaaaauggcaccuaugacuaccccaaguauuccgaggaaagcaaacugaaccgggagaagaucgauggaguuaagcuggagucuaugggcguguaccagauucucgcuaucuauuccacggucgccagcucccuggugcuucugguuucucucggggccaucagcuuuuggaugugcuccaauggaucucugcagugucgcauuugcaucuga

SEQ ID NO: 198013 - RNA, 1698 nt, Artificial Sequence
  derived and/or modified CDS sequence (opt5) from hemagglutinin__InfluenzaA__ADN06322
augaaggugaaacugcucguccugcuuugcaccuucacagccacguacgcugacaccaucuguauuggcuaucacgccaacaauagcacagauaccguugacacagugcuggagaagaacgugaccgucacacauuccgugaaucuccuggaaaacucucacaaugggaaacuuugccugcucaagggaaucgcgccccugcagcugggcaacuguagcguugcuggguggauucucggaaauccugagugcgaacugcuuaucuccaaagagucuuggagcuacauuguggaaaagccgaaccccgagaauggcaccuguuauccugggcauuuugccgauuacgaggaacugagagagcaacucuccucugucagcuccuucgaacgguuugagaucuuccccaaggagagcucuuggccuaaccacacggugaccggaguuuccgccagcugcucucauaauggcgaauccagcuuuuaucgcaaccugcuuuggcugacaggcaaaaaugggcucuaccccaaccugucuaaguccuaugcuaauaacaaagagaaggaagugcugguccucuggggagugcaccacccuccgaacaugguggaccagagaacccuguaccggacagagaaugccuacgucagcguuguguccucucauuauagccgcaaauucacccccgaaaucgcuaagagaccuaaggugcgggaucaggagggccgcauuaacuacuauuggacgcuucuggagcccggggacacaaucauuuuugaagccaauggaaaccucaucgcgccuagauacgccuucgcucugucccggggcuuugggagcggaauuaucaauucuaacgcccccaugggcaaaugugaugcuaagugccagaccccgcaaggcgccauuaauuccagccuuccuuuccagaacguccaccccgugacaaucggggaguguccuaaauauguucgcucugcgaagcugagaauggugaccggacuccggaauauccccagcauucagucccgcggccuguuuggggccaucgcuggauucauugaaggcggguggaccggaauggucgacggcugguacggcuaucaucaccagaacgagcaagggucuggauacgccgcugaucagaaaagcacacagaaugccaucaacggcauuacgaauaaggugaacuccguuaucgaaaagaugaauacccaguuuacagccguggggaaagaguucaacaagcuggagagacggauggaaaaccucaauaaaaaggucgacgauggauucaucgacauuuggaccuacaacgcugagcugcuugugcugcucgaaaaugagcgcacacuggauuuucacgacagcaacgucaaaaaucuuuaugaaaaggugaaaucucaacugaagaacaaugcgaaggagaucggcaacgggugcuucgaguuuuaccauaaauguaaugacgaaugcauggaguccguuaagaacggcaccuaugauuaccccaaauauagcgaagagucuaagcucaauagagagaaaauugacggagugaagcuggaauccaugggcgucuaccagauccuggccauuuauagcacgguggcuuccucucucguucugcuugugagccugggggccaucuccuucuggaugugcucuaacggaagccuccagugucggaucugcauuuga

SEQ ID NO: 198014 - RNA, 1698 nt, Artificial Sequence
  derived and/or modified CDS sequence (opt5) from hemagglutinin__InfluenzaA__ADN06344
augaaggugaaacugcucguccugcuuugcaccuucacagccacguacgcugacaccaucuguauuggcuaucacgccaacaauagcacagauaccguugacacagugcuggagaagaacgugaccgucacacauuccgugaaucuccuggaaaacucucacaaugggaaacuuugccugcucaagggaaucgcgccccugcagcugggcaacuguagcguugcuggguggauucucggaaauccugagugcgaacugcuuaucuccaaagagucuuggagcuacauuguggaaaagccgaaccccgagaauggcaccuguuauccugggcauuuugccgauuacgaggaacugagagagcaacucuccucugucagcuccuucgaacgguuugagaucuuccccaaggagagcucuuggccuaaccacacggugaccggaguuuccgccagcugcucucauaauggcgaauccagcuuuuaucgcaaccugcuuuggcugacaggcaaaaaugggcucuaccccaaccugucuaaguccuaugcuaauaacaaagagaaggaagugcugguccucuggggagugcaccacccuccgagcaucuccgaccagaaaacccuguaccauacagagaacgccuacgugucugucguuagcucccacuauagcagaaaguucacccccgaaauugcuaagcggccuaaagugcgcgaucaggagggcagaaucaauuacuauuggacgcuucuggagcccggggacacaauuaucuuugaagccaacggaaaucucauugcgccucgguacgccuucgcucugucucgcggcuuuggguccggaaucauuaacagcaaugcccccauggauaagugugacgcuaaaugccagaccccgcaaggcgccaucaacucuagccuuccuuuccagaaugugcaucccgucacaaucggcgaguguccuaaguaugugagauccgcgaaacugcggaugguuaccgggcuccgcaacauucccucuauccagagcagaggacuguuuggcgccauugcuggguucaucgaaggaggcuggaccgggaugguggauggaugguacggcuaucaccaccagaaugagcaaggcuccggguacgccgcugaccaaaagagcacacagaacgccauuaauggaaucacgaacaaagucaauucugugaucgaaaagaugaacacccaguuuacagccguuggcaaggaguucaauaaacuggagcggcgcauggaaaaccucaacaagaaaguggaugacggguucauugauaucuggaccuacaaugcugagcugcuuguccugcucgaaaacgagagaacacuggacuuucaugacuccaaugugaagaaccuuuaugaaaaagucaagagccagcugaagaauaacgcgaaagagauuggaaauggcugcuucgaguuuuaccacaaguguaacgaugaaugcauggagucugugaaaaaugggaccuaugacuaccccaaguauuccgaagagagcaaacucaaccgggagaagaucgauggcguuaagcuggaauccaugggaguguaccagauucuggccaucuauucuacggucgcuagcucccucgugcugcuuguuucucugggcgccaucagcuucuggaugugcuccaaugggagccuccagugucgcauuugcaucuga

SEQ ID NO: 198015 - RNA, 1701 nt, Artificial Sequence; identical to SEQ ID NO: 197605
  derived and/or modified CDS sequence (opt5) from hemagglutinin__InfluenzaA__ADN06366

SEQ ID NO: 198016 - RNA, 1701 nt, Artificial Sequence
  derived and/or modified CDS sequence (opt5) from hemagglutinin__InfluenzaA__ADN26165
augaaggccauccuggugguccuccuguacaccuucgcuacagccaacgcggacacgcuuugcauuggcuaucacgcuaauaacagcaccgauacaguugacaccgugcuggagaagaaugugacagucacccauuccgugaaccuccuggaagggaagcacaauggaaaacuuuguaagcugagaggcguugcuccccuccaucuggggaaaugcaacaucgccggauggauucugggcaauccugagugugaaucucucagcacagccuccucuuggagcuacaucguggagaccuccucuagcgauaacgggacgugcuauccgggagacuuuauugauuacgaagaacugcgggagcagcuuuccagcgucucuuccuucgaacgcuuugagaucuuccccaagaccagcucuuggccuaaucacgacuccaacaagggcgugacagccgcuuguccccaugccggcgcgaaaucuuuuuauaagaaucugaucuggcucauuaaaaaggggaacagcuacccuaaacuguccaagagcuauaucaaugauaagggaaaagaaguucuugugcuguggggcauucaccaccccuccaccucugccgaccaacagagccucuaccagaacgcugaugccuacgucuucguggggacauccagauauagcaagaaauuuaagccugagaucgcuauucggccgaaagugcgcgaccaggagggaagaaugaauuacuauuggacccuggucgaacccggcgauaagaucacguucgaggccacagggaaccugguugugccucgguacgcguuugccauggaacgcaacgcuggaucuggcauuaucaucuccgacacccccgugcaugauugcaauacaaccugucaaaccccuaaaggcgccauuaacacaagccuccccuuccagaauauccacccgauuacgaucgggaagugcccuaaguaugucaaaucuaccaagcugagacuugcuacaggacugcggaacauucccagcauccagucccgcggccucuuuggggccaucgccggauucauugagggcggguggaccggaaugguggacggcugguacggcuaucaucaccagaaugaacaagggucuggauacgcugcggaccugaaaagcacacagaacgccaucgaugagauuaccaauaagguuaacuccgugaucgagaaaaugaauacgcaguuuacagcugucggcaaggaguucaaccaccuugagaagagaauugaaaaucugaacaaaaagguggacgauggguuccucgacaucuggaccuacaaugccgagcugcugguucuccuggaaaacgagcggacccuugauuaucaugacagcaaugugaaaaaccuguacgagaagguccgcucucagcucaaaaacaaugccaaggaaaucggaaacggcuguuuugaguucuaucacaagugcgauaauacauguauggaauccgugaaaaacgggaccuacgacuauccuaaguacagcgaggaagcuaaacugaauagagaggagauugauggcgucaaacuugaaucugcccggaucuaucaaauucuggcgaucuacuccacaguggcuagcucccucguucugguggucucucugggagccauuagcuuuuggaugugcuccaacggcucucuccagugccgcaucuguauuuga

SEQ ID NO: 198017 - RNA, 1701 nt, Artificial Sequence; identical to SEQ ID NO: 194921
  derived and/or modified CDS sequence (opt5) from hemagglutinin__InfluenzaA__ADN26175

SEQ ID NO: 198018 - RNA, 1701 nt, Artificial Sequence
  derived and/or modified CDS sequence (opt5) from hemagglutinin__InfluenzaA__ADN78194
augaaggccauccuggugguccuccuguacaccuucgcuacaacgaacgccgacacccuuugcauuggcuaucacgcgaauaacagcacagauaccguugacacagugcuggagaaaaaugugaccgucacacauuccgugaaccuccuggaagauaagcacaaugggaaacuuuguaagcugagaggaguugcuccccuccaucugggcaaaugcaacaucgccggguggauucugggaaauccugagugugaaucucucagcaccgccuccucuuggagcuacaucguggagacguccucuagcgacaacgggaccugcuauccgggcgauuuuauugacuacgaagaacugcgggagcagcuuuccagcgucucuuccuucgaacgcuuugagaucuuccccaagacaagcucuuggccuaaucacgauuccaacaagggagugaccgcugccuguccccaugcuggcgccaagagcuuuuauaagaaucugaucuggcucguuaaaaagggcaacucuuacccuaaacuguccaagagcuauauuaaugacaaggggaaagaagugcuuguccuguggggaauccaccaccccuccacaucugcggaucaacagagccucuaccagaacgccgacgcuuacguguucgugggcaccuccagauauagcaagaaauuuaagccugagauugccauccggccgaaaguccgcgaucaggaggggagaaugaauuacuauuggacgcugguugaacccggagacaagauuacauucgaggcuaccggcaaccugguggugccucgguacgccuuugcgauggaacgcaacgccgggucuggaaucauuaucuccgauacacccguccaugacugcaauaccaccugucaaacaccuaaaggcgcuaucaacacgagccuccccuuccagaauauucacccgaucaccauuggcaagugcccuaaguaugugaaaucuacaaagcugagacuugccaccgggcugcggaacguucccagcauccagucccgcggacucuuuggcgcuauugccggguucaucgagggaggcuggacagggaugguggacggaugguacggcuaucaucaccagaaugaacaaggcucuggguacgccgcugaucugaaaagcacccagaacgcgaucgacaagauuacgaauaaagucaacuccgugaucgagaagaugaauacacaguuuaccgccguuggaaaggaguucaaccaccuugagaaaagaauugagaaucugaacaagaaaguggaugacggccuccuggauaucuggaccuacaaugcugaacugcucguccugcuugagaacgaacggacacuggacuaucaugauagcaaugugaagaaccucuacgagaaaguccgcucucagcugaagaacaaugccaaggagauugggaacggauguuucgaauuuuaucacaaaugcgacaauaccuguauggaguccgugaagaacggcacauacgauuauccuaaauacagcgaagaggccaaacuuaauagagaagagaucgacgggguuaaacuggagucuacgcggaucuaucaaauucucgcuaucuacuccaccguggccagcucccugguccuggugguuucucucggcgcgauuagcuucuggaugugcuccaacggaucucugcagugccgcaucuguauuuga

SEQ ID NO: 198019 - RNA, 1701 nt, Artificial Sequence; identical to SEQ ID NO: 195905
  derived and/or modified CDS sequence (opt5) from hemagglutinin__InfluenzaA__ADN78195

SEQ ID NO: 198020 - RNA, 1701 nt, Artificial Sequence; identical to SEQ ID NO: 196293
  derived and/or modified CDS sequence (opt5) from hemagglutinin__InfluenzaA__ADN78212

SEQ ID NO: 198021 - RNA, 1701 nt, Artificial Sequence; identical to SEQ ID NO: 196293
  derived and/or modified CDS sequence (opt5) from hemagglutinin__InfluenzaA__ADN78221

SEQ ID NO: 198022 - RNA, 1698 nt, Artificial Sequence; identical to SEQ ID NO: 198012
  derived and/or modified CDS sequence (opt5) from hemagglutinin__InfluenzaA__ADN89050

SEQ ID NO: 198023 - RNA, 1698 nt, Artificial Sequence
  derived and/or modified CDS sequence (opt5) from hemagglutinin__InfluenzaA__ADN89061
augaaggugaaacugcucguccugcuuugcaccuucacagccacguacgcugacaccaucuguauuggcuaucacgccaacaauagcacagauaccguugacacagugcuggagaagaacgugaccgucacacauuccgugaaucuccuggaaaacucucacaaugggaaacuuugccugcucaagggaaucgcgccccugcagcugggcaacuguagcguugcuggguggauucucggaaauccugagugcgaacugcuuaucuccaaagagucuuggagcuacauuguggaaaagccgaaccccgagaauggcaccuguuauccugggcauuuugccgauuacgaggaacugagagagcaacucuccucugucagcuccuucgaacgguuugagaucuuccccaaggagagcucuuggccuaaccacacggugaccggaguuuccgccagcugcucucauaauggcgaauccagcuuuuaucgcaaccugcuuuggcugacagagaaaaauggccucuaccccaaccugucuaaguccuaugcuaauaacaaagaaaaggaggugcugguccucuggggagugcaccacccuccgagcaucuccgaccagaaaacccuguaccauacagaaaacgccuacgugucugucguuagcucccacuauagcagaaaguucacccccgagauugcuaagcggccuaaagugcgcgaucaggaggggagaaucaauuacuauuggacgcuucuggaacccggcgacacaauuaucuuugaggccaacgggaaucucauugcgccucgguacgccuucgcucugucucgcggauuuggcuccgggaucauuaacagcaaugcccccauggauaagugugacgcuaaaugccagaccccgcaaggagccaucaacucuagccuuccuuuccagaaugugcaucccgucacaaucggcgaauguccuaaguaugugagauccgcgaaacugcggaugguuaccggccuccgcaacauucccucuauccagagcagagggcuguuuggagccauugcuggcuucaucgaagggggauggaccggcaugguggaugggugguacggauaucaccaccagaaugaacaaggcuccggcuacgccgcugaccaaaagagcacacagaacgccauuaaugagaucacgaacaaagucaauucugugaucgagaagaugaacacccaguuuacagccguugggaaggaguucaauaaacuggagcggcgcauggaaaaccucaacaagaaaguggaugacggauucauugauaucuggaccuacaaugcugagcugcuuguccugcucgaaaacgagagaacacuggacuuucaugacuccaaugugaagaaccuuuaugagaaagucaagaaucagcugaagaacaaugcgaaagaaauuggcaacgggugcuucgaguuuuaccacaaguguaaugaugaaugcauggagagcgugaaaaacggaaccuaugacuaccccaaguauucugaggaauccaaacucaaucgggagaagaucgauggcguuaagcuggaaagcauggggguguaccagauucuggccaucuauuccacggucgcuucuagccucgugcugcuuguuucccugggcgccaucucuuucuggaugugcagcaacggaucccuccagugucgcauuugcaucuga

SEQ ID NO: 198024 - RNA, 1698 nt, Artificial Sequence; identical to SEQ ID NO: 198014
  derived and/or modified CDS sequence (opt5) from hemagglutinin__InfluenzaA__ADN89072

SEQ ID NO: 198025 - RNA, 1698 nt, Artificial Sequence
  derived and/or modified CDS sequence (opt5) from hemagglutinin__InfluenzaA__ADN89083
augaaggugaaacugcucguccugcuuugcaccuucacagccacguacgcugacaccaucuguauuggcuaucacgccaacaauagcacagauaccguugacacagugcuggagaagaacgugaccgucacacauuccgugaaucuccuggaaaacucucacaaugggaaacuuugccugcucaagggaaucgcgccccugcagcugggcaacuguagcguugcuggguggauucucggaaauccugagugcgaacugcuuaucuccaaagagucuuggagcuacauuguggaaaagccgaaccccgagaauggcaccuguuauccugggcauuuugccgauuacgaggaacugagagagcaacucuccucugucagcuccuucgaacgguuugagaucuuccccaaggagagcucuuggccuaaccacacggugaccggaguuuccgccagcugcucucauaauggcgaaaacuccuuuuaucgcaaucugcuuuggcugacaggcaaaaacgggcucuaccccaaucugagcaagucuuaugcuaacaacaaagagaaggaagugcugguccucuggggagugcaccacccuccgaauauggccgaccagaaaacccuguaccauacagagaacgcuuacguguccgucguuagcucccacuauucuagaaaguucacccccgaaaucgccaagcggccuaaagugcgcgaucaggagggcagaauuaauuacuauuggacgcuucuggagcccggggacacaaucauuuuugaagcgaacggaaaucucaucgccccucgguacgcuuucgcccugagccgcggcuuuggguccggaauuaucaacagcaaugcucccauggauaagugugacgccaaaugccagaccccgcaaggcgcgauuaacucuucccuuccuuuccagaaugugcaucccgucacaaucggcgaguguccuaaguaugugagaagcgccaaacugcggaugguuaccgggcuccgcaacauccccucuauucagagcagaggacuguuuggcgcuaucgccggguucauugaaggaggcuggaccgggaugguggauggaugguacggcuaucaccaccagaaugagcaaggcuccggguacgcugccgaccagaagucuacacagaacgccaucaauggaauuacgaacaaagucaauagcgugaucgaaaagaugaacacccaguuuacagcuguuggcaaggaguucaacaaacuggagcggcgcauggaaaaucucaacaagaaaguggaugacggguucaucgauauuuggaccuacaaugcggagcugcuuguccugcucgaaaacgagagaacacuggacuuucaugacuccaaugugaagaaccuuuaugaaaaagucaagagccaacugaagaauaacgccaaagagaucggaaauggcugcuucgaguuuuaccacaaguguaacgaugaaugcauggagucugugaaaaaugggaccuaugacuaccccaaguauuccgaagagagcaaacucaaccgggagaagauugauggcguuaagcuggaaucuaugggaguguaccagauccuggcuauuuauuccacggucgccagcucccucgugcugcuuguuucucugggcgccaucagcuucuggaugugcuccaaugggucucuccagugucgcaucugcauuuga

SEQ ID NO: 198026 - RNA, 1698 nt, Artificial Sequence
  derived and/or modified CDS sequence (opt5) from hemagglutinin__InfluenzaA__ADN89094
augaaggugaaacugcucguccugcuuugcaccuucacagccacguacgcugacaccaucuguauuggcuaucacgccaacaauagcacagauaccguugacacagcgcuggagaagaacgugaccgugacacauuccgucaaucuccuggaaaacucucacaaugggaaacuuugccugcucaagggaaucgcuccccugcagcugggcaacuguagcguggccggguggauucucggaaauccugagugcgaacugcuuaucuccaaagagucuuggagcuacauuguugaaaagccgaaccccgagaauggcaccuguuauccugggcauuuugccgauuacgaggaacugagagagcaacucuccucugugagcuccuucgaacgguuugagaucuuccccaaggagagcucuuggccuaaccacacggucaccggaguguccgcuagcugcucucauaauggcgaaaacuccuuuuaucgcaaucugcuuuggcugacaggcaaaaacgggcucuaccccaaucugagcaagucuuaugccaacaacaaaggaaaggagguucuggugcucuggggcguccaccacccuccgaauaucgcugaccagaaaacccuguaccauacagaaaacgccuacguguccguggucagcucccacuauucuagaaaguucacccccgagauugcgaagcggccuaaaguucgcgaucaggaagggagaaucaauuacuauuggacgcuucuggagcccggagacacaauuaucuuugaggccaacggcaaucucauugcuccucgguacgccuucgcucugagccgcggguuuggauccggcaucauuaacagcaaugcccccauggauaagugugacgcgaaaugccagaccccgcaaggcgccaucaacucuucccuuccuuuccagaaugugcaucccgugacaaucggggaauguccuaaguaugucagaagcgcuaaacugcggauggugaccggacuccgcaacauucccucuauccagagcagaggccuguuuggggccauugcuggauucaucgagggcggguggaccggaaugguugauggcugguacggcuaucaccaccagaaugaacaaggguccggauacgccgccgaccagaagucuacacagaacgcuauuaauggcaucacgaacaaagugaauagcgucaucgagaagaugaacacccaguuuacagcgguggggaaggaguucaacaaacuggaacggcgcauggagaaucucaacaagaaaguugaugacggauucauugauaucuggaccuacaaugccgaacugcuugugcugcucgagaacgaaagaacacuggacuuucaugacuccaaugucaagaaccuuuaugagaaagucaagagccaacugaagaauaacgcuaaagaaauuggcaaugggugcuucgaguuuuaccacaaguguaacgaugagugcauggaaucugugaaaaauggcaccuaugacuaccccaaguauuccgaggaaagcaaacucaaccgggagaagaucgauggagugaagcuggagucuaugggcguuuaccagauucuggccaucuauuccacgguggccagcucccucguccugcuugugucucugggggcuaucagcuucuggaugugcuccaauggaucucuccagugucgcauuugcaucuga

SEQ ID NO: 198027 - RNA, 1698 nt, Artificial Sequence
  derived and/or modified CDS sequence (opt5) from hemagglutinin__InfluenzaA__ADN89116
augaaggugaaacugcucauccugcuuugcaccuucacagccacguacgcugacaccauuuguaucggcuaucacgccaacaauagcacagauaccgucgacacaguucuggagaagaacgugaccgugacacauuccgucaaucuccuggaaaacucucacaaugggaaacuuugccugcucaagggaauugcgccccugcagcugggcaacuguagcguggcuggguggauccucggaaauccugagugcgaacugcuuauuuccaaagagucuuggagcuacaucguugaaaagccgaaccccgagaauggcaccuguuauccugggcauuuugccgauuacgaggaacugagagagcaacucuccucugugagcuccuucgaacgguuugagaucuuccccaaggagagcucuuggccuaaccacacggucaccggaguguccgccagcugcucucauaauggcgaauccagcuuuuaucgcaaccugcuuuggcugacaguuaaaaauggccucuaccccaaccugucuaaguccuaugcuaauaacaaagagaaggaagugcugguccucuggggagugcaccacccuccgaacauuguggaccagaaaacccuguacagaacagagaaugccuacgucagcguuguguccucucauuauagccggaaguucacccccgaaaucgcuaagcgcccuaaagugagagaucaggaggggcggauuaacuacuauuggacgcuucuggagcccggcgacacaaucauuuuugaagccaaugggaaccucaucgcgccucgcuacgccuucgcucuguccagaggauuuggcagcgggauuaucaauucuaacgcccccauggauaagugugacgcuaaaugccagaccccgcggggagccaucaauuccagccuuccuuuccaaaacguccaccccgugacaauuggcgaguguccuaaguauguucgcucugcgaaacugagaauggugaccggccuccggaauauccccagcauucagucccgcgggcuguuuggagccaucgcuggcuucauugaagggggauggaccggcauggucgaugggugguacggauaucaucaccagaacgagcagggcucuggcuacgccgcugaccaaaagagcacacagaaugccaucaacgggaucacgaauaaagugaacuccguuauugaaaagaugaauacccaguuuacagccgugggaaaggaguucaacaaccuggagagacggauggaaaaucucaacaaaaaggucgaugacggcuucaucgauauuuggaccuacaaugcugagcugcuugugcugcucgaaaacgagcgcacacuggacuuucacgacagcaaugucaaaaaccuuuaugaaaaggugaaaucucagcugaagaauaacgcgaaggagaucgggaauggaugcuucgaguuuuaccauaaauguaacgaugaaugcauggaguccguuaagaauggcaccuaugacuaccccaaauauagcgaagagucuaagcucaacagagagaaaauugauggggugaagcuggaauccaugggcgucuaccaaauccuggccaucuauagcacgguggcuuccucucucguucugcuugugagccugggagccauuuccuucuggaugugcucuaauggcagccuccagugucggaucugcauuuga

SEQ ID NO: 198028 - RNA, 1698 nt, Artificial Sequence
  derived and/or modified CDS sequence (opt5) from hemagglutinin__InfluenzaA__ADN89127
augaaggugaaacugcucguccugcuuugcacccugacagccacguacgcugacaccaucuguauuggcuaucacgccaacaauagcacagauaccguugacacagugcucgagaagaacgugaccgucacacauuccgugaaucugcuugaaaacucucacaaugggaaacugugccuccugaagggaaucgcgccccugcagcucggcaacuguagcguugcuggguggauucugggaaauccugagugcgaacuucugaucuccaaagagucuuggagcuacauuguggaaaagccgaaccccgagaauggcaccuguuauccugggcauuucgccgauuacgaggaacucagagagcaacuguccucugucagcuccuuugaacgguucgagaucuuucccaagggaagcucuuggccuaaccacacggugaccggcguuuccgccagcugcucucauaauggcgagaacuccuucuaucgcaaucuucuguggcucacagggaaaaacggacuguaccccaaucugagcaagucuuaugcuaacaacaaagaaaaggaggugcucguccuguggggcgugcaccacccuccgaauaucgccgaccagaaaacccuuuaccauacagaaaacgcuuacguguccgucguuagcucccacuauucuagaaaguuuacccccgagauugccaagcggccuaaagugcgcgaucaggaagggagaaucaauuacuauuggacgcugcucgagcccggagacacaauuaucuucgaggcgaacggcaaucugauugccccucgguacgcuuuugcccuuagccgcggguucggauccggcaucauuaacagcaaugcucccauggauaagugugacgccaaaugccagaccccgcaaggcgcgaucaacucuucccugccuuuucagaaugugcaucccgucacaaucggggaauguccuaaguaugugagaagcgccaaacuccggaugguuaccggacugcgcaacauucccucuauccagagcagaggccuguucggggcuauugccggauuuaucgagggcggguggaccggaaugguggauggcugguacggcuaucaccaccagaaugaacaaggguccggauacgcugccgaccagaagucuacacagaacgccauuaauggcaucacgaacaaagucaauagcgugaucgagaagaugaacacccaguucacagcuguugggaaggaauuuaacaaacucgagcggcgcauggagaaucugaacaagaaaguggaugacggauucauugauaucuggaccuacaaugcggaacuucugguccuccuggagaacgaaagaacacuugacuuccaugacuccaaugugaagaaccuguaugagaaagucaagagccaacucaagaauaacgccgaagagauuggcaaugggugcuuugaguucuaccacaaauguaacgaugaaugcauggagucugugaagaauggcaccuaugacuaccccaaauauuccgaagagagcaagcugaaccgggagaaaaucgauggaguuaagcuggaaucuaugggcguguaccagauucucgcuaucuauuccacggucgccagcucccuggugcuucugguuucucucggggccaucagcuuuuggaugugcuccaauggaucucugcagugucgcauuugcaucuga

SEQ ID NO: 198029 - RNA, 1698 nt, Artificial Sequence
  derived and/or modified CDS sequence (opt5) from hemagglutinin__InfluenzaA__ADN89149
augaaggugaaacugcucguccugcuuugcaccuucacagccacguacgcugacaccaucuguauuggcuaucacgccaacaauagcacagauaccguugacacagugcuggagaagaacgugaccgucacacauuccgugaaucuccuggaaaacucucacaaugggaaacuuugccugcucaagggaaucgcgccccugcagcugggcaacuguagcguugcuggguggauucucggaaauccugagugcgaacugcuuaucuccaaagagucuuggagcuacauuguggaaaagccgaaccccgagaauggcaccuguuauccugggcauuuugccgauuacgaggaacugagagagcaacucuccucugucagcuccuucgaacgguuugagaucuuccccaaggagagcucuuggccuaaccacacggugaccggaguuuccgccagcugcucucauaauggcgaauccagcuuuuaucgcaaccugcuuuggcugacagagaaaaauggccucuaccccaaccugucuaaguccuaugcuaauaacaaagaaaaggaggugcugguccucuggggagugcaccacccuccgagcaucuccgaccagaaaacccuguaccauacagaaaacgccuacgugucugucguuagcucccacuauagcagaaaguucacccccgagguggcuaagcggccuaaagugcgcgaucaggaggggagaauuaauuacuauuggacgcuucuggaacccggcgacacaaucauuuuugaggccaacgggaaucucaucgcgccucgguacgccuucgcucugucucgcggauuuggcuccgggauuaucaacagcaaugcccccauggauaagugugacgcuaaaugccagaccccgcaaggagccauuaacucuagccuuccuuuccagaauguccaucccgugacaaucggcgaauguccuaaguauguuagauccgcgaaacugcggauggugaccggccuccgcaacauccccucuauucagagcagagggcuguuuggagccaucgcuggcuucauugaagggggauggaccggcauggucgaugggugguacggauaucaccaccagaaugagcaaggcuccggcuacgccgcugaccagaagucuacacagaacgccaucaaugggauuacgaacaaagugaauagcguuaucgagaagaugaacacccaguuuacagccgugggaaaggaguucaauaaacuggaacggcgcauggagaaccucaacaagaaagucgaugacggcuucaucgauauuuggaccuacaaugcugaacugcuugugcugcucgagaacgaaagaacacuggacuuucaugacuccaaugucaagaaccuuuaugagaaaguuaagagccaacugaagaauaacgcgaaagagaucgggaauggaugcuucgaauuuuaccacaaguguaacgaugagugcauggaaucugugaaaaauggcaccuaugacuaccccaaguauuccgaggagagcaaacucaaccgggaaaagauugauggggugaagcuggaguccaugggcgucuaccagauccuggccauuuauucuacgguggcuagcucccucguucugcuugugucucugggagccaucagcuucuggaugugcuccaauggcagccuccagugucgcaucugcauuuga

SEQ ID NO: 198030 - RNA, 1698 nt, Artificial Sequence; identical to SEQ ID NO: 197585
  derived and/or modified CDS sequence (opt5) from hemagglutinin__InfluenzaA__ADN89171

SEQ ID NO: 198031 - RNA, 1698 nt, Artificial Sequence
  derived and/or modified CDS sequence (opt5) from hemagglutinin__InfluenzaA__ADN89182
augaaggugaaacugcucguccugcuuugcacccugacagccacguacgcugacaccaucuguauuggcuaucacgccaacaauagcacagauaccguugacacagugcucgagaagaacgugaccgucacacauuccgugaaucugcuugaaaacucucacaaugggaaacugugccuccugaagggaaucgcgccccugcagcucggcaacuguagcguugcuggguggauucugggaaauccugagugcgaacuucugaucuccaaagagucuuggagcuacauuguggaaaagccgaaccccgagaauggcaccuguuauccugggcauuucgccgauuacgaggaacucagagagcaacuguccucugucagcuccuuugaacgguucgagaucuuucccaaggagagcucuuggccuaaccacacggugaccggaguuuccgccagcugcucucauaauggcgaauccagcuucuaucgcaaccuucuguggcucacaggcaaaaaugggcuguaccccaaccugucuaaguccuaugcuaauaacaaagagaaggaagugcucguccuguggggagugcaccacccuccgaacaucguggaccagaaaacccuuuacagaacagagaaugccuacgucagcguuguguccucucauuauagccggaaguuuacccccgaaauugcuaagcgcccuaaagugagagaucaggagggccggaucaacuacuauuggacgcugcucgagcccggggacacaauuaucuucgaagccaauggaaaccugauugcgccucgcuacgccuuugcucuuuccagaggcuucgggagcggaaucauuaauucuaacgcccccauggauaagugugacgcuaaaugccagaccccgcaaggcgccaucaauuccagccugccuuuucagaacguccaccccgugacaaucggcgaguguccuaaguauguucggucugcgaaacuccgcauggugaccgggcugagaaauauucccagcauccagucccggggacuguucggcgccauugcuggguuuaucgaaggaggcuggaccgggauggucgauggaugguacggcuaucaucaccagaacgagcaaggcucuggguacgccgcugaccaaaagagcacacagaaugccauuaacggaaucacgaauaaagugaacuccguuaucgaaaagaugaauacccaguucacagccgugggcaaggaguuuaacaaacucgagcgcagaauggaaaaccugaauaagaaagucgaugacggguucauugauaucuggaccuacaacgcugagcuucuggugcuccuggaaaaugagcggacacuugacuuccacgacagcaacgucaagaaucuguaugaaaaagugaagucucagcucaagaacaaugcgaaagagauuggaaacggcugcuuugaguucuaccauaaguguaaugaugaaugcauggaguccguuaaaaacgggaccuaugacuaccccaaguauagcgaagagucuaaacugaaucgcgagaagaucgauggcgugaagcuggaauccaugggagucuaccagauucucgccaucuauagcacgguggcuuccucucugguucuucuggugagccucggcgccaucuccuuuuggaugugcucuaacgggagccugcaguguagaauuugcaucuga

SEQ ID NO: 198032 - RNA, 1698 nt, Artificial Sequence; identical to SEQ ID NO: 197585
  derived and/or modified CDS sequence (opt5) from hemagglutinin__InfluenzaA__ADN89193

SEQ ID NO: 198033 - RNA, 1698 nt, Artificial Sequence; identical to SEQ ID NO: 197585
  derived and/or modified CDS sequence (opt5) from hemagglutinin__InfluenzaA__ADN89204

SEQ ID NO: 198034 - RNA, 1698 nt, Artificial Sequence; identical to SEQ ID NO: 198012
  derived and/or modified CDS sequence (opt5) from hemagglutinin__InfluenzaA__ADN89215

SEQ ID NO: 198035 - RNA, 1698 nt, Artificial Sequence
  derived and/or modified CDS sequence (opt5) from hemagglutinin__InfluenzaA__ADN89226
augaaggugaaacugcucguccugcuuugcaccuucgccgcuacauacgccgacacgaucuguauuggcuaucacgcgaacaauagcaccgauacaguugacaccgugcuggagaagaacgugacagucacccauuccgugaaucuccuggaaaacucucacaaugggaaacuuugccugcucaagggaaucgcuccccugcagcugggcaacuguagcguugccggguggauucucggaaauccugagugcgaacugcuuaucuccaaagagucuuggagcuacauuguggaaaagccgaaccccgagaauggcacauguuauccugggcauuuugccgauuacgaggaacugagagagcaacucuccucugucagcuccuucgaacgguuugagaucuuccccaaggagagcucuuggccuaaccacaccgugacgggaguuuccgcuagcugcucucauaauggcgaauccagcuuuuaucgcaaccugcuuuggcugaccgagaaaaauggccucuaccccaaccugucuaaguccuaugccaauaacaaagaaaaggaggugcugguccucuggggagugcaccacccuccgagcaucuccgaccagaaaacacuguaccauaccgaaaacgcuuacgugucugucguuagcucccacuauagcagaaaguucacacccgagauugccaagcggccuaaagugcgcgaucaggaggggagaaucaauuacuauuggacccuucuggaacccggcgacacgauuaucuuugaggcgaacgggaaucucauugccccucgguacgcuuucgcccugaaccgcggauuuggcucugggaucauuaauuccaacgcucccauggauaagugugacgccaaaugccagacaccgcaaggagcgaucaauagcucucuuccuuuccagaacgugcaucccgucaccaucggcgaauguccuaaguaugugagaagcgccaaacugcggaugguuacaggccuccgcaauauucccuccgugcagucuagagggcuguuuggagcuaucgccggcuucauugaagggggauggaccggcauggucgaugggugguacggauaucaccaccagaacgagcaaggcagcggcuacgcugccgaccagaaguccacccagaaugccaucaacgggauuacaaauaaagugaacagcguuaucgagaagaugaauacgcaguuuaccgcugugggaaaggaguucaacaaacuggaacggcgcauggagaaccucaauaagaaagucgaugacggcuucaucgauauuuggacauacaacgcggaacugcuugugcugcucgagaaugaaagaacccuggacuuucaugacucuaacgucaagaaucuuuaugagaaagugaagaaccaacugaagaauaacgccaaagagaucgggaauggaugcuucgaauuuuaccacaaguguaacgaugagugcauggaauccguuaaaaauggcacauaugacuaccccaaguauagcgaggagucuaaacucaaccgggaaaagauugauggggugaagcuggaguccaugggcgucuaccagauccuggcuauuuauagcaccguggccuccucucucguucugcuugugagccugggagccaucuccuucuggaugugcucuaauggcagccuccagugucgcaucugcauuuga

SEQ ID NO: 198036 - RNA, 1698 nt, Artificial Sequence; identical to SEQ ID NO: 198012
  derived and/or modified CDS sequence (opt5) from hemagglutinin__InfluenzaA__ADN89237

SEQ ID NO: 198037 - RNA, 1698 nt, Artificial Sequence
  derived and/or modified CDS sequence (opt5) from hemagglutinin__InfluenzaA__ADN89248
augaaggugaaacugcucguccugcuuugcaccuucacagccacguacgcugacaccaucuguauuggcuaucacgccaacaauagcacagauaccguugacacagugcuggagaagaacgugaccgucacacauuccgugaaucuccuggaaaacucucacaaugggaaacuuugccugcucaagggaaucgcgccccugcagcugggcaacuguagcauugcuggguggauccucggaaauccugagugcgaacugcuuauuuccaaagagucuuggagcuacaucguugaaaagccgaaccccgagaauggcaccuguuauccugggcauuuugccgauuacgaggaacugagagagcaacucuccucugugagcuccuucgaacgguuugagaucuuccccaaggagagcucuuggccuaaccacacggucaccggaguguccgccagcugcucucauaauggcgaauccagcuuuuaucgcaaccugcuuuggcugacaggcaaaaaugggcucuaccccaaccugucuaaguccuaugcuaauaacaaagagaaggaaguucuggugcucuggggaguccaccacccuccgagcauuuccgaccagaaaacccuguaccauacagagaacgccuacgugucuguggucagcucccacuauagcagaaaguucacccccgaaaucgcuaagcggccuaaaguucgcgaucaggagggcagaauuaauuacuauuggacgcuucuggagcccggggacacaaucauuuuugaagccaacggaaaucucaucgcgccucgguacgccuucgcucugucucgcggcuuuggguccggaauuaucaacagcaaugcccccauggauaagugugacgcuaaaugccagaccccgcaaggcgccaucaacucuagccuuccuuuccagaaugugcaucccgugacaauuggcgaguguccuaaguaugucagauccgcgaaacugcggauggugaccgggcuccgcaacauccccucuauucagagcagaggacuguuuggcgccaucgcuggguucauugaaggaggcuggaccgggaugguugauggaugguacggcuaucaccaccagaaugagcaaggcuccggguacgccgcugaccagaagucuacacagaacgccaucaauggaaucacgaacaaagugaauagcgucauugaaaagaugaacacccaguuuacagccgugggcaaggaguucaauaaacuggagcggcgcauggaaaaccucaacaagaaaguugaugacggguucaucgauauuuggaccuacaaugcugagcugcuugugcugcucgaaaacgagagaacacuggacuuucaugacuccaaugucaagaaccuuuaugaaaaagucaagagccaacugaagaauaacgcgaaagagaucggaaauggcugcuucgaguuuuaccacaaguguaacgaugaaugcauggagucugugaaaaaugggaccuaugacuaccccaaguauuccgaagagagcaaacucaaccgggagaagauugauggcgugaagcuggaauccaugggaguuuaccagauccuggccaucuauucuacgguggcuagcucccucguccugcuugugucucugggcgccauuagcuucuggaugugcuccaaugggagccuccagugucgcaucugcauuuga

SEQ ID NO: 198038 - RNA, 1698 nt, Artificial Sequence; identical to SEQ ID NO: 198025
  derived and/or modified CDS sequence (opt5) from hemagglutinin__InfluenzaA__ADN89259

SEQ ID NO: 198039 - RNA, 1698 nt, Artificial Sequence
  derived and/or modified CDS sequence (opt5) from hemagglutinin__InfluenzaA__ADN89281
augaaggugaaacugcucguccugcuuugcaccuucacagccacguacgcugacaccaucuguauuggcuaucacgccaacaauagcacagauaccguugacacagugcuggagaagaacgugaccgucacacauuccgugaaucuccuggaaaacucucacaaugggaaacuuugccugcucaagggaaucgcgccccugcagcugggcaacuguagcguugcuggguggauucucggaaauccugagugcgaacugcuuaucuccaaagagucuuggagcuacauuguggaaaagccgaaccccgagaauggcaccuguuauccugggcauuuugccgauuacgaggaacugagagagcaacucuccucugucagcuccuucgaacgguuugagaucuuccccaaggagagcucuuggccuaaccacacggugaccggaguuuccgccagcugcucucauaauggcgaauccagcuuuuaucgcaaccugcuuuggcugacagagaaaaauggccucuaccccaaccugucuaaguccuaugcuaauaacaaagaaaaggaggugcugguccucuggggagugcaccacccuccgagcaucuccgaccagaaaacccuguaccauacagaaaacgccuacgugucugucguuagcucccacuauagcagaaaguucacccccgagauugcuaagcggccuaaagugcgcgaucaggaggggagaaucaauuacuauuggacgcuucuggaacccggcgacacaauuaucuuugaggccaacgggaaucucauugcgccucgguacgccuucgcucugucucgcggauuuggcuccgggaucauuaacagcaaugcccccauggauaagugugacgcuaaaugccagaccccgcaaggagccaucaacucuagccuuccuuuccagaaugugcaucccgucacaaucggcgaauguccuaaguaugugagauccgcgaaacugcggaugguuaccggccuccgcaacauucccucuauccagagcagagggcuguuuggagccauugcuggcuucaucgaagggggauggaccggcaugguggaugggugguacggauaucaccaccagaaugagcaaggcuccggcuacgccgcugaccaaaagagcacacagaacgccauuaaugggaucacgaacaaagucaauucugugaucgagaagaugaacacccaguuuacagccguuggaaaggaguucaauaaacuggaacggcgcauggagaaccucaacaagaaaguggaugacggcuucauugauaucuggaccuacaaugcugaacugcuuguccugcucgagaacgaaagaacacuggacuuucaugacuccaaugugaagaaccuuuaugagaaagucaagaaucagcugaagaacaaugcgaaagagauugggaacggaugcuucgaauuuuaccacaaguguaaugaugagugcauggaaagcgugaaaaacggcaccuaugacuaccccaaguauucugaggaguccaaacucaaucgggaaaagaucgaugggguuaagcuggagagcaugggcguguaccagauucuggccaucuauuccacggucgcuucuagccucgugcugcuuguuucccugggagccaucucuuucuggaugugcagcaacggcucccuccagugucgcauuugcaucuga

SEQ ID NO: 198040 - RNA, 1698 nt, Artificial Sequence; identical to SEQ ID NO: 198039
  derived and/or modified CDS sequence (opt5) from hemagglutinin__InfluenzaA__ADN89292

SEQ ID NO: 198041 - RNA, 1698 nt, Artificial Sequence; identical to SEQ ID NO: 198039
  derived and/or modified CDS sequence (opt5) from hemagglutinin__InfluenzaA__ADN89303

SEQ ID NO: 198042 - RNA, 1698 nt, Artificial Sequence; identical to SEQ ID NO: 195698
  derived and/or modified CDS sequence (opt5) from hemagglutinin__InfluenzaA__ADN89314

SEQ ID NO: 198043 - RNA, 1698 nt, Artificial Sequence; identical to SEQ ID NO: 195203
  derived and/or modified CDS sequence (opt5) from hemagglutinin__InfluenzaA__ADN89325

SEQ ID NO: 198044 - RNA, 1698 nt, Artificial Sequence
  derived and/or modified CDS sequence (opt5) from hemagglutinin__InfluenzaA__ADN89336
augaaggugaaacugcucguccugcuuugcaccuucacagccacguacgcugacaccaucuguauuggcuaucacgccaacaauagcacagauaccguugacacagugcuggagaagaacgugaccgucacacauuccgugaaucuccuggaaaacucucacaaugggaaacuuugccugcucaagggaaucgcgccccugcagcugggcaacuguagcguugcuggguggauucucggaaauccugagugcgaacugcuuaucuccaaagagucuuggagcuacauuguggaaaagccgaaccccgagaauggcaccuguuauccugggcauuuugccgauuacgaggaacugagagagcaacucuccucugucagcuccuucgaacgguuugagaucuuccccaaggagagcucuuggccuaaccacacggugaccggaguuuccgccagcugcucucauaauggcgaacgcuccuuuuauagaaaccugcuuuggcugacaggcaaaaaugggcucuaccccaaccugagcaagucuuaugcuaauaacaaagagaaggaagugcugguccucuggggagugcaccacccuccggacaucggcgaucagaaaacccuguaccauacagagaacgccuacguguccgucguuagcucccacuauucucggaaguucacccccgaaauugcuaagcgcccuaaagugagagaccaggaggggcggaucaauuacuauuggacgcuucuggagcccggagauacaauuaucuuugaagccaacggcaaucucauugcgccucgcuacgccuucgcucugagcagaggguuuggauccggcaucauuaacagcaaugcccccauggacaagugugaugcuaaaugccagaccccgcaaggcgccaucaacucuucccuuccuuuccagaaugugcaucccgucacaaucggggaguguccuaaguaugugcggagcgcgaaacugcgcaugguuaccggacucagaaacauucccucuauccagagccggggccuguuuggggccauugcuggauucaucgaaggcggguggaccggaaugguggacggcugguacggcuaucaccaccagaaugagcaaggguccggauacgccgcugaucagaagucuacacagaacgccauuaauggcaucacgaacaaagucaauagcgugaucgaaaagaugaacacccaguuuacagccguugggaaggaguucaauaaacuggagcgcagaauggaaaaccucaacaagaaaguggacgauggauucauugacaucuggaccuacaaugcugagcugcuuguccugcucgaaaacgagcggacacuggacuuucaugauuccaaugugaagaaccuuuaugaaaaagucaagagccaacugaagaauaacgcgaaagagauuggcaaugggugcuucgaguuuuaccacaaguguaacgacgaaugcauggagucugugaaaaauggcaccuaugauuaccccaaguauuccgaagagagcaaacucaaccgcgagaagaucgacggaguuaagcuggaaucuaugggcguguaccagauucuggccaucuauuccacggucgcuagcucccucgugcugcuuguuucucugggggccaucagcuucuggaugugcuccaauggaucucuccaguguagaauuugcaucuga

SEQ ID NO: 198045 - RNA, 1698 nt, Artificial Sequence; identical to SEQ ID NO: 198035
  derived and/or modified CDS sequence (opt5) from hemagglutinin__InfluenzaA__ADN89347

SEQ ID NO: 198046 - RNA, 1698 nt, Artificial Sequence; identical to SEQ ID NO: 195203
  derived and/or modified CDS sequence (opt5) from hemagglutinin__InfluenzaA__ADN89358

SEQ ID NO: 198047 - RNA, 1698 nt, Artificial Sequence
  derived and/or modified CDS sequence (opt5) from hemagglutinin__InfluenzaA__ADN89369
augaaggugaaacugcucguccugcuuugcaccuucacagccacguacgcugacaccaucuguauuggcuaucacgccaacaauagcacagauaccguugacacagugcuggagaagaacgugaccgucacacauuccgugaaucuccuggaaaacucucacaaugggaaacuuugccugcucaagggaaucgcgccccugcagcugggcaacuguagcguugcuggguggauucucggaaauccugagugcgaacugcuuaucuccaaagagucuuggagcuacauuguggaaaagccgaaccccgagaauggcaccuguuauccugggcauuuugccgauuacgaggaacugagagagcaacucuccucugucagcuccuucgaacgguuugagaucuuccccaaggagagcucuuggccuaaccacacggugaccggaguuuccgccagcugcucucauaauggcgaauccagcuuuuaucgcaaccugcuuuggcugacagugaaaaauggccucuaccccaaccugucuaaguccuaugcuaauaacaaagagaaggaaguccuggugcucuggggagugcaccacccuccgaacaucgucgaccagaaaacccuguacagaacagagaaugccuacguuagcgugguguccucucauuauagccggaaguucauucccgaaaucgcuaagcgcccuaaagucagagaucaggaggggcggauuaacuacuauuggacccuucuggagcccggcgacacgaucauuuuugaagccaaugggaaccucaucgcgccucgcuacgccuucgcucuguccagaggauuuggcagcgggauuaucaauucuaacgcccccauggauaagugugacgcuaaaugccagacaccgcggggagccaucaauuccagccuuccuuuccaaaacgugcaccccguuaccauuggcgaguguccuaaguaugugcgcucugcgaaacugagaauggucacaggccuccggaauauccccagcauucagucccgcgggcuguuuggagccaucgcuggcuucauugaagggggauggaccggcaugguggaugggugguacggauaucaucaccagaacgagcagggcucuggcuacgccgcugaccaaaagagcacccagaaugccaucaacgggaucacaaauaaaguuaacuccgugauugaaaagaugaauacgcaguuuaccgccgucggaaaggaguucaacaaacuggagagacggauggaaaaccucaauaagaaaguggaugacggcuucaucgauauuuggacauacaacgcugagcugcuuguccugcucgaaaaugagcgcacccuggacuuucacgacagcaacgugaagaaucuuuaugaaaaaguuaagucucagcugaagaacaaugcgaaagagaucgggaacggaugcuucgaguuuuaccauaaguguaaugaugaaugcauggaguccgugaaaaacggcacauaugacuaccccaaguauagcgaagagucuaaacucaauagagagaagauugauggggucaagcuggaauccaugggcguguaccaaauccuggccaucuauagcaccguugcuuccucucucgugcugcuugucagccugggagccauuuccuucuggaugugcucuaacggcagccuccagugucggaucugcauuuga

SEQ ID NO: 198048 - RNA, 1698 nt, Artificial Sequence
  derived and/or modified CDS sequence (opt5) from hemagglutinin__InfluenzaA__ADN89380
augaaggugaaacugcucguccugcuuugcacccugacagccacguacgcugacaccaucuguauuggcuaucacgccaacaauagcacagauaccguugacacagugcucgagaagaacgugaccgucacacauuccgugaaucugcuugaaaacucucacaaugggaaacugugccuccugaagggaaucgcgccccugcagcucggcaacuguagcguugcuggguggauucugggaaauccugagugcgaacuucugaucuccaaagagucuuggagcuacauuguggaaaagccgaaccccgagaauggcaccuguuauccugggcauuucgccgauuacgaggaacucagagagcaacuguccucugucagcuccuuugaacgguucgagaucuuucccaaggagagcucuuggccuaaccacacggugaccggaguuuccgccagcugcucucauaauggcgaauccagcuucuaucgcaaccuucuguggcucacaggcaaaaaugggcuguaccccaaccugucuaaguccuaugcuaauaacaaagagaaggaagugcucguccuguggggagugcaccacccuccgaacaucguggaccagaaaacccuuuacagaacagagaaugccuacgucagcguuguguccucucauuauagccggaaguuuacccccgaaauugcuaagcgcccuaaagugagagaucaggagggccggaucaacuacuauuggacgcugcucgagcccggggacacaauuaucuucgaagccaauggaaaccugauugcgccucgcuacgccuuugcucuuuccagaggcuucgggagcggaaucauuaauucuaacgcccccauggauaagugugacgcuaaaugccagaccccgcaaggcgccaucaauuccagccugccuuuucagaacguccaccccgugacaaucggcgaguguccuaaguauguucggucugcgaaacuccgcauggugaccgggcugagaaauauucccagcauccagucccggggacuguucggcgccauugcuggguuuaucgaaggaggcuggaccgggauggucgauggaugguacggcuaucaucaccagaacgagcaaggcucuggguacgccgcugaccaaaagagcacacagaaugccauuaacggaaucacgaauaaagugaacuccguuaucgaaaagaugaauacccaguucacagccgugggcaaggaguuuaacaaacucgagcgcagaauggaaaaccugaauaagaaagucgaugacggguucauugauaucuggaccuacaacgcugagcuucuggugcuccuggaaaaugagcggacacuugacuuccacgacagcaacgucaagaaucuguaugaaaaagugaagucucagcucaagaacaaugcgaaagagauuggaaacggcugcuuugaguucuaccauaaguguaauaacgaaugcauggaguccguuaaaaaugggaccuaugauuaccccaaguauagcgaagagucuaaacugaaccgcgagaagaucgacggcgugaagcuggaauccaugggagucuaccagauucucgccaucuauagcacgguggcuuccucucugguucuucuggugagccucggcgccaucuccuuuuggaugugcucuaaugggagccugcaguguagaauuugcaucuga

SEQ ID NO: 198049 - RNA, 1698 nt, Artificial Sequence
  derived and/or modified CDS sequence (opt5) from hemagglutinin__InfluenzaA__ADN89391
augaaggugaaacugcucguccugcuuugcaccuucacagccacguacgcugacaccaucuguauuggcuaucacgccaacaauagcacagauaccguugacacagugcuggagaagaacgugaccgucacacauuccgugaaucuccuggaaaacucucacaaugggaaacuuugccugcucaagggaaucgcgccccugcagcugggcaacuguagcguugcuggguggauucucggaaauccugagugcgaacugcuuaucuccaaagagucuuggagcuacauuguggaaaagccgaaccccgagaauggcaccuguuauccugggcauuuugccgauuacgaggaacugagagagcaacucuccucugucagcuccuucgaacgguuugagaucuuccccaaggagagcucuuggccuaaccacacggugaccggaguuuccgccagcugcucucauaauggcgaacgcuccuuuuauaaaaaccugcuuuggcugacaggcaagaaugggcucuaccccaaccugagcaaaucuuaugcuaauaacaaggagaaagaagugcugguccucuggggagugcaccacccuccggacaucggcgaucagaagacccuguaccauacagagaacgccuacguguccgucguuagcucccacuauucuagaaaguucacccccgaaauugcuaaacggccuaaggugcgcgaccaggaggggagaaucaauuacuauuggacgcuucuggagcccggagauacaauuaucuuugaagccaacggcaaucucauugcgccucgguacgccuucgcucugagccgcggguuuggauccggcaucauuaacagcaaugcccccauggacaaaugugaugcuaagugccagaccccgcaaggcgccaucaacucuucccuuccuuuccagaaugugcaucccgucacaaucggggaguguccuaaauaugugagaagcgcgaagcugcggaugguuaccggacuccgcaacauucccucuauccagagcagaggccuguuuggggccauugcuggauucaucgaaggcggguggaccggaaugguggacggcugguacggcuaucaccaccagaaugagcaaggguccggauacgccgcugaucagaaaucuacacagaacgccauuaauggcaucacgaacaaggucaauagcgugaucgaaaagaugaacacccaguuuacagccguugggaaagaguucaauaagcuggagcggcgcauggaaaaccucaacaaaaagguggacgauggauucauugacaucuggaccuacaaugcugagcugcuuguccugcucgaaaacgagagaacacuggacuuucaugauuccaaugugaaaaaccuuuaugaaaaggucaagagccaacugaaaaauaacgcgaaggagauuggcaaugggugcuucgaguuuuaccacaaauguaacgacgaaugcauggagucugugaagaauggcaccuaugauuaccccaaauauuccgaagagagcaagcucaaccgggagaagaucgacggaguuaaacuggaaucuaugggcguguaccagauucuggccaucuauuccacggucgcuagcucccucgugcugcuuguuucucugggggccaucagcuucuggaugugcuccaauggaucucuccagugucgcauuugcaucuga

SEQ ID NO: 198050 - RNA, 1698 nt, Artificial Sequence
  derived and/or modified CDS sequence (opt5) from hemagglutinin__InfluenzaA__ADN89402
augaaggugaaacugcucguccugcuuugcaccuucacagccacguacgcugacaccaucuguauuggcuaucacgccaacaauagcacagauaccguugacacagugcuggagaagaacgugaccgucacacauuccgugaaucuccuggaaaacucucacaaugggaaacuuugccugcucaagggaaucgcgccccugcagcugggcaacuguagcguugcuggguggauucucggaaauccugagugcgaacugcuuaucuccaaaaagucuuggagcuacauuguggagaagccgaaccccgaaaauggcaccuguuauccugggcauuuugccgauuacgaggagcugaaagaacaacucuccucugucagcuccuucgagagauuugaaaucuuccccaaggagagcucuuggccuaaccacacggugaccggaguuuccgccagcugcucucauaauggcgaguccagcuuuuaucggaaccugcuuuggcugacaggcaaaaaugggcucuaccccaaccugucuaaguccuaugcuaauaacaaagaaaaggaggugcugguccucuggggagugcaccacccuccgaacaucguggaccagaagacccuguaccgcacagaaaaugccuacgucagcguuguguccucucauuauagcagaaaauucacccccgagauugcuaagcggccuaaagugcgcgaucaggaaggcagaaucaacuacuauuggacgcuucuggagcccggggacacaauuaucuuugaggccaauggaaaccucauugcgccucgguacgccuucgcucugucccgcggcuuugggagcggaaucauuaauucuaacgcccccaugggcaagugugaugcuaaaugccagaccccgcaaggcgccaucaauuccagccuuccuuuccagaacguccaccccgugacaaucggggaauguccuaaguauguuagaucugcgaaacugcggauggugaccggacuccgcaauauucccagcauccaguccagaggccuguuuggggccauugcuggauucaucgagggcggguggaccggaauggucgacggcugguacggcuaucaucaccagaacgaacaagggucuggauacgccgcugaucaaaagagcacacagaaugccauuaacggcaucacgaauaaggugaacuccguuaucgagaaaaugaauacccaguuuacagccguggggaaggaguucaacaaacuggaacggcgcauggagaaccucaauaagaaagucgacgauggauucauugacaucuggaccuacaacgcugaacugcuugugcugcucgagaaugaaagaacacuggauuuucacgacagcaacgucaagaaucuuuaugagaaggugaaaucucagcugaagaacaaugcgaaagaaauuggcaacgggugcuucgaguuuuaccauaaguguaaugacgagugcauggaauccguuaaaaacggcaccuaugauuaccccaaguauagcgaggaaucuaagcucaaucgggagaaaaucgacggagugaagcuggaguccaugggcgucuaccagauucuggccaucuauagcacgguggcuuccucucucguucugcuugugagccugggggccaucuccuucuggaugugcucuaacggaagccuccagugucgcauuugcaucuga

SEQ ID NO: 198051 - RNA, 1698 nt, Artificial Sequence; identical to SEQ ID NO: 198012
  derived and/or modified CDS sequence (opt5) from hemagglutinin__InfluenzaA__ADN89413

SEQ ID NO: 198052 - RNA, 1698 nt, Artificial Sequence; identical to SEQ ID NO: 197585
  derived and/or modified CDS sequence (opt5) from hemagglutinin__InfluenzaA__ADN89424

SEQ ID NO: 198053 - RNA, 1698 nt, Artificial Sequence
  derived and/or modified CDS sequence (opt5) from hemagglutinin__InfluenzaA__ADN89435
augaaggugaaacugcucguccugcuuugcaccuucacagccacguacgcugacaccaucuguauuggcuaucacgccaacaauagcacagauaccguugacacagugcuggagaagaacgugaccgucacacauuccgugaaucuccuggaaaacucucacaaugggaaacuuugccugcucaagggaaucgcgccccugcagcugggcaacuguagcguugcuggguggauucucggaaauccugagugcgaacugcuuaucuccaaagagucuuggagcuacauuguggaaaagccgaaccccgagaauggcaccuguuauccugggcauuuugccgauuacgaggaacugagagagcaacucuccucugucagcuccuucgaacgguuugagaucuuccccaaggagagcucuuggccuaaccacacggugaccggaguuuccgccagcugcucucauaauggcgaaaacuccuuuuaucgcaaucugcuuuggcugacaggcaaaaacgggcucuaccccaaucugagcaagucuuaugcuaacaacaaagagaaggaagugcugguccucuggggagugcaccacccuccgaauaucgccgaccagaaaacccuguaccauacagagaacgcuuacguguccgucguuagcucccacuauucuagaaaguucacccccgaaauugccaagcggccuaaagugcgcgaucaggagggcagaaucaauuacuauuggacgcuucuggagcccggggacacaauuaucuuugaagcgaacggaaaucucauugccccucgguacgcuuucgcccugagccgcggcuuuggguccggaaucauuaacagcaaugcucccauggauaagugugacgccaaaugccagaccccgcaaggcgcgaucaacucuucccuuccuuuccagaaugugcaucccgucacaaucggcgaguguccuaaguaugugagaagcgccaaacugcggaugguuaccgggcuccgcaacauucccucuauccagagcagaggacuguuuggcgcuauugccggguucaucgaaggaggcuggaccgggaugguggauggaugguacggcuaucaccaccagaaugagcaaggcuccggguacgcugccgaccagaagucuacacagaacgccauuaauggaaucacgaacaaagucaauagcgugaucgaaaagaugaacacccaguuuacagcuguuggcaaggaguucaacaaacuggagcggcgcauggaaaaucucaacaagaaaguggaugacggguucauugauaucuggaccuacaaugcggagcugcuuguccugcucgaaaacgagagaacacuggacuuucaugacuccaaugugaagaaccuuuaugaaaaagucaagagccaacugaagaauaacgccaaagagauuggaaauggcugcuucgaguuuuaccacaaguguaacgaugaaugcauggagucugugaaaaaugggaccuaugacuaccccaaguauuccgaagagagccggcucaaccgcgagaaaaucgauggcguuaagcuggaaucuaugggaguguaccagauucuggcuaucuauuccacggucgccagcucccucgugcugcuuguuucucugggcgccaucagcuucuggaugugcuccaaugggucucuccaguguagaauuugcaucuga

SEQ ID NO: 198054 - RNA, 1698 nt, Artificial Sequence
  derived and/or modified CDS sequence (opt5) from hemagglutinin__InfluenzaA__ADN89446
augaaggccaaacugcucgugcugcuuugcaccuucacagcuacguacgccgacaccaucuguauuggcuaucacgcgaacaauagcacagauaccgucgacacaguucuggagaagaacgugaccgugacacauuccgucaaucuccuggaaaacucucacaaugggaaacuuugccugcucaagggaaucgcuccccugcagcugggcaacuguagcguggccggguggauucucggaaauccugagugcgaacugcuuaucuccaaagagucuuggagcuacauuguugaaaagccgaaccccgagaauggcaccuguuauccugggcauuuugccgauuacgaggaacugagagagcaacucuccucugugagcuccuucgaacgguuugagaucuuccccaaggagagcucuuggccuaaccacacggucaccggaguguccgcuagcugcucucauaauggcgaaaacuccuuuuaucgcaaucugcuuuggcugacaggcaaaaacgggcucuaccccaaucugagcaagucuuaugccaacaacaaagagaaggaaguucuggugcucuggggaguccaccacccuccgaauaucgcugaccagaaaacccuguaccauacagagaacgccuacguguccguggucagcucccacuauucuagaaaguucacccccgaaauugcgaagcggccuaaaguucgcgaucaggagggcagaaucaauuacuauuggacgcuucuggagcccggggacacaauuaucuuugaagccaacggaaaucucauugcuccucgguacgccuucgcucugagccgcggcuuuggguccggaaucauuaacagcaaugcccccauggauaagugugacgcgaaaugccagaccccgcaaggcgccaucaacucuucccuuccuuuccagaaugugcaucccgugacaaucggcgaguguccuaaguaugucagaagcgcuaaacugcggauggugaccgggcuccgcaacauucccucuauccagagcagaggacuguuuggcgccauugcuggguucaucgaaggaggcuggaccgggaugguugauggaugguacggcuaucaccaccagaaugagcaaggcuccggguacgccgccgaccagaagucuacacagaacgcuauuaauggaaucacgaacaaagugaauagcgucaucgaaaagaugaacacccaguuuacagcggugggcaaggaguucaacaaacuggagcggcgcauggaaaaucucaacaagaaaguugaugacggguucauugauaucuggaccuacaaugccgagcugcuugugcugcucgaaaacgagagaacacuggacuuucaugacuccaaugucaagaaccuuuaugaaaaagucaagagccaacugaagaauaacgcuaaagagauuggaaauggcugcuucgaguuuuaccacaaguguaacgaugaaugcauggagucugugaaaaaugggaccuaugacuaccccaaguauuccgaagagagcaaacucaaccgggagaagaucgauggcgugaagcuggaaucuaugggaguuuaccagauucuggccaucuauuccacgguggccagcucccucguccugcuugugucucugggcgcuaucagcuucuggaugugcuccaaugggucucuccagugucgcauuugcaucuga

SEQ ID NO: 198055 - RNA, 1698 nt, Artificial Sequence; identical to SEQ ID NO: 197585
  derived and/or modified CDS sequence (opt5) from hemagglutinin__InfluenzaA__ADN89457

SEQ ID NO: 198056 - RNA, 1698 nt, Artificial Sequence
  derived and/or modified CDS sequence (opt5) from hemagglutinin__InfluenzaA__ADN89468
augaaggugaaacugcucguccugcuuugcaccuucacagccacguacgcugacaccaucuguauuggcuaucacgccaacaauagcacagauaccguugacacagugcuggagaagaacgugaccgucacacauuccgugaaucuccuggaaaacucucacaaugggaaacuuugccugcucaagggaaucgcgccccugcagcugggcaacuguagcguugcuggguggauucucggaaauccugagugcgaacugcuuaucuccaaagagucuuggagcuacauuguggaaaagccgaaccccgagaauggcaccuguuauccugggcauuuugccgauuacgaggaacugagagagcaacucuccucugucagcuccuucgaacgguuugagaucuuccccaaggacagcucuuggccuaaccacacggugaccggaguuuccgccagcugcucucauaauggcgaguccagcuuuuaucgcaaccugcuuuggcugacaggcaaaaaugggcucuaccccaaccugucuaaguccuaugcuaauaacaaagaaaaggaggugcugguccucuggggagugcaccacccuccgagcaucaacgaucagaaaacccuguaccauacagaaaaugccuacguguccgucguuucuagccacuauuccagaaaguucacccccgagauugcuaagcggccuaaagugcgcgaccaggaaggcagaaucaacuacuauuggacgcuucuggagcccggggauacaauuaucuuugaggccaauggaaaccucauugcgccucgguacgccuucgcucugagccgcggcuuugggucuggaaucauuaauuccaacgcccccauggacaagugugaugcuaaaugccagaccccgcaaggcgccaucaauagcucucuuccuuuccagaacgugcaucccgucacaaucggcgaauguccuaaguaugugagaagcgcgaaacugcggaugguuaccgggcuccgcaauauucccuccauccagucuagaggacuguuuggcgccauugcuggguucaucgagggaggcuggaccgggaugguggacggaugguacggcuaucaccaccagaacgaacaaggcagcggguacgccgcugaucagaaguccacacagaaugccauuaacggaaucacgaauaaagucaacagcgugaucgagaagaugaauacccaguuuacagccguuggcaaggaguucucuaaacuggaacggcgcauggagaaccucaacaagaaaguggacgauggguucauugacaucuggaccuacaaugcugaacugcuuguccugcucgagaacgaaagaacacuggacuuucaugauuccaaugugaagaaccuuuaugagaaagucaagagccaacugaagaauaacgcgaaagaaauuggaaauggcugcuucgaguuuuaccacaaguguaacgacgagugcauggaaucugugaaaaaugggaccuaugauuaccccaaguauuccgaggaaagcaaacucaaccgggagaagaucgacggcguuaagcuggaguccaugggaguguaccagauucugacgaucuauucuacagucgccagcucccucgugcugcuuaucucucugggcgcuauuagcuucuggaugugcuccaaugggagccuccagugucgcaucugcauuuga

SEQ ID NO: 198057 - RNA, 1698 nt, Artificial Sequence; identical to SEQ ID NO: 198014
  derived and/or modified CDS sequence (opt5) from hemagglutinin__InfluenzaA__ADN89479

SEQ ID NO: 198058 - RNA, 1698 nt, Artificial Sequence; identical to SEQ ID NO: 198014
  derived and/or modified CDS sequence (opt5) from hemagglutinin__InfluenzaA__ADN89490

SEQ ID NO: 198059 - RNA, 1698 nt, Artificial Sequence; identical to SEQ ID NO: 198037
  derived and/or modified CDS sequence (opt5) from hemagglutinin__InfluenzaA__ADN89501

SEQ ID NO: 198060 - RNA, 1698 nt, Artificial Sequence; identical to SEQ ID NO: 198025
  derived and/or modified CDS sequence (opt5) from hemagglutinin__InfluenzaA__ADN89512

SEQ ID NO: 198061 - RNA, 1698 nt, Artificial Sequence; identical to SEQ ID NO: 198039
  derived and/or modified CDS sequence (opt5) from hemagglutinin__InfluenzaA__ADN89523

SEQ ID NO: 198062 - RNA, 1698 nt, Artificial Sequence; identical to SEQ ID NO: 198048
  derived and/or modified CDS sequence (opt5) from hemagglutinin__InfluenzaA__ADN89534

SEQ ID NO: 198063 - RNA, 1698 nt, Artificial Sequence; identical to SEQ ID NO: 198053
  derived and/or modified CDS sequence (opt5) from hemagglutinin__InfluenzaA__ADN89545

SEQ ID NO: 198064 - RNA, 1698 nt, Artificial Sequence; identical to SEQ ID NO: 195698
  derived and/or modified CDS sequence (opt5) from hemagglutinin__InfluenzaA__ADN89556

SEQ ID NO: 198065 - RNA, 1698 nt, Artificial Sequence; identical to SEQ ID NO: 198014
  derived and/or modified CDS sequence (opt5) from hemagglutinin__InfluenzaA__ADN89567

SEQ ID NO: 198066 - RNA, 1698 nt, Artificial Sequence
  derived and/or modified CDS sequence (opt5) from hemagglutinin__InfluenzaA__ADN89578
augaaggugaaacugcucguccugcuuugcacccugacagccacguacgcugacaccaucuguauuggcuaucacgccaacaauagcacagauaccguugacacagugcucgagaagaacgugaccgucacacauuccgugaaucugcuugaaaacucucacaaugggaaacugugccuccugaagggaaucgcgccccugcagcucggcaacuguagcguugcuggguggauucugggaaauccugagugcgaacuucugaucuccaaagagucuuggagcuacauuguggaaaagccgaaccccgagaauggcaccuguuauccugggcauuucgccgauuacgaggaacucagagagcaacuguccucugucagcuccuuugaacgguucgagaucuuucccaagggaagcucuuggccuaaccacacggugaccggcguuuccgccagcugcucucauaauggcgagaacuccuucuaucgcaaucuucuguggcucacagggaaaaacggacuguaccccaaucugagcaagucuuaugcuaacaacaaagaaaaggaggugcuccugcuuuggggcguccaccacccuccgaauaucgccgaccagaaaacccuguaccauacagaaaacgcuuacguguccguggucagcucccacuauucuagaaaguuuacccccgagauugccaagcggccuaaaguucgcgaucaggaagggagaaucaauuacuauuggacgcuccuggagcccggagacacaauuaucuucgaggcgaacggcaaucuuauugccccucgguacgcuuuugcccugagccgcggguucggauccggcaucauuaacagcaaugcucccauggauaagugugacgccaaaugccagaccccgcaaggcgcgaucaacucuucccucccuuuucagaaugugcaucccgugacaaucggggaauguccuaaguaugucagaagcgccaaacugcggauggugaccggacugcgcaacauucccucuauccagagcagaggccucuucggggcuauugccggauuuaucgagggcggguggaccggaaugguugauggcugguacggcuaucaccaccagaaugaacaaggguccggauacgcugccgaccagaagucuacacagaacgccauuaauggcaucacgaacaaagugaauagcgucaucgagaagaugaacacccaguucacagcuguggggaaggaauuuaacaaacuggagcggcgcauggagaaucuuaacaagaaaguugaugacggauucauugauaucuggaccuacaaugcggaacugcucgugcugcuugagaacgaaagaacacuggacuuccaugacuccaaugucaagaaccucuaugagaaagucaagagccaacugaagaauaacgccaaagaaauuggcaaugggugcuuugaguucuaccacaaguguaacgaugagugcauggaaucugugaaaaauggcaccuaugacuaccccaaguauuccgaggaaagcaaacugaaccgggagaagaucgauggagugaagcucgagucuaugggcguuuaccagauucuggcuaucuauuccacgguggccagcucccuuguccugcucgugucucugggggccaucagcuuuuggaugugcuccaauggaucucugcagugucgcauuugcaucuga

SEQ ID NO: 198067 - RNA, 1698 nt, Artificial Sequence; identical to SEQ ID NO: 197585
  derived and/or modified CDS sequence (opt5) from hemagglutinin__InfluenzaA__ADN89589

SEQ ID NO: 198068 - RNA, 1698 nt, Artificial Sequence
  derived and/or modified CDS sequence (opt5) from hemagglutinin__InfluenzaA__ADN89600
augaaggugaaacugcucguccugcuuugcaccuucacagccacguacgcugacaccaucuguauuggcuaucacgccaacaauagcacagauaccguugacacagugcuggagaagaacgugaccgucacacauuccgugaaucuccuggaaaacucucacaaugggaaacuuugccugcucaagggaaucgcgccccugcagcugggcaacuguagcguugcuggguggauucucggaaauccugagugcgaacugcuuaucuccaaagagucuuggagcuacauuguggaaaagccgaaccccgagaauggcaccuguuauccugggcauuuugccgauuacgaggaacugagagagcaacucuccucugucagcuccuucgaacgguuugagaucuuccccaaggagagcucuuggccuaaccacacggugaccggaguuuccgccagcugcucucauaauggcgaauccagcuuuuaucgcaaccugcuuuggcugacaagaaagaauggccucuaccccaaccugucuaaguccuaugcuaauaacaaagagaaggaagugcugguccucuggggagugcaccacccuccgaacaugguggaccagaaaacccuguaccggacagagaaugccuacgucagcguuguguccucucauuauagccgcaaguucacccccgaaaucgcuaagagaccuaaagugcgggaucaggaggggcgcauuaacuacuauuggacgcuucuggagcccggcgacacaaucauuuuugaagccaaugggaaccucaucgcgccuagauacgccuucgcucugucccggggauuuggcagcgggauuaucaauucuaacgcccccaugggaaagugugaugcuaaaugccagaccccgcaaggcgccauuaauuccagccuuccuuuccagaacguccaccccgugacaaucggcgaguguccuaaguauguucgcucugcgaaacugagaauggugaccgggcuccggaauauccccagcauucagucccgcggacuguuuggcgccaucgcuggguucauugaaggaggcuggaccgggauggucgacggaugguacggcuaucaucaccagaacgagcaaggcucuggguacgccgcugaucagaaaagcacacagaaugccaucaacggaauuacgaauaaagugaacuccguuaucgaaaagaugaauacccaguuuacagccgugggcaaggaguucaacaaacuggagagacggauggaaaaccucaauaagaaagucgacgauggguucaucgacauuuggaccuacaacgcugagcugcuugugcugcucgaaaaugagcgcacacuggauuuucacgacagcaacgucaagaaucuuuaugaaaaagugaagucucaacugaagaacaaugcgaaagagaucggaaacggcugcuucgaguuuuaccauaaguguaaugacgaaugcauggaguccguuaaaaacgggaccuaugauuaccccaaguauagcgaagagucuaaacucaauagagagaagauugacggcgugaagcuggaauccaugggagucuaccagauccuggccauuuauagcacgguggcuuccucucucguucugcuugugagccugggcgccaucuccuucuggaugugcucuaacgggagccuccagugucggaucugcauuuga

SEQ ID NO: 198069 - RNA, 1698 nt, Artificial Sequence; identical to SEQ ID NO: 197585
  derived and/or modified CDS sequence (opt5) from hemagglutinin__InfluenzaA__ADN89611

SEQ ID NO: 198070 - RNA, 1698 nt, Artificial Sequence; identical to SEQ ID NO: 198012
  derived and/or modified CDS sequence (opt5) from hemagglutinin__InfluenzaA__ADN89622

SEQ ID NO: 198071 - RNA, 1698 nt, Artificial Sequence; identical to SEQ ID NO: 198053
  derived and/or modified CDS sequence (opt5) from hemagglutinin__InfluenzaA__ADN89633

SEQ ID NO: 198072 - RNA, 1698 nt, Artificial Sequence; identical to SEQ ID NO: 198037
  derived and/or modified CDS sequence (opt5) from hemagglutinin__InfluenzaA__ADN89644

SEQ ID NO: 198073 - RNA, 1698 nt, Artificial Sequence; identical to SEQ ID NO: 198053
  derived and/or modified CDS sequence (opt5) from hemagglutinin__InfluenzaA__ADN89655

SEQ ID NO: 198074 - RNA, 1698 nt, Artificial Sequence; identical to SEQ ID NO: 197585
  derived and/or modified CDS sequence (opt5) from hemagglutinin__InfluenzaA__ADN89666

SEQ ID NO: 198075 - RNA, 1698 nt, Artificial Sequence; identical to SEQ ID NO: 198025
  derived and/or modified CDS sequence (opt5) from hemagglutinin__InfluenzaA__ADN89677

SEQ ID NO: 198076 - RNA, 1698 nt, Artificial Sequence; identical to SEQ ID NO: 198025
  derived and/or modified CDS sequence (opt5) from hemagglutinin__InfluenzaA__ADN89688

SEQ ID NO: 198077 - RNA, 1698 nt, Artificial Sequence; identical to SEQ ID NO: 198012
  derived and/or modified CDS sequence (opt5) from hemagglutinin__InfluenzaA__ADN89699

SEQ ID NO: 198078 - RNA, 1698 nt, Artificial Sequence; identical to SEQ ID NO: 198014
  derived and/or modified CDS sequence (opt5) from hemagglutinin__InfluenzaA__ADN89710

SEQ ID NO: 198079 - RNA, 1698 nt, Artificial Sequence; identical to SEQ ID NO: 198037
  derived and/or modified CDS sequence (opt5) from hemagglutinin__InfluenzaA__ADN89721

SEQ ID NO: 198080 - RNA, 1698 nt, Artificial Sequence; identical to SEQ ID NO: 198014
  derived and/or modified CDS sequence (opt5) from hemagglutinin__InfluenzaA__ADN89732

SEQ ID NO: 198081 - RNA, 1698 nt, Artificial Sequence; identical to SEQ ID NO: 198014
  derived and/or modified CDS sequence (opt5) from hemagglutinin__InfluenzaA__ADN89743

SEQ ID NO: 198082 - RNA, 1698 nt, Artificial Sequence; identical to SEQ ID NO: 198039
  derived and/or modified CDS sequence (opt5) from hemagglutinin__InfluenzaA__ADN89765

SEQ ID NO: 198083 - RNA, 1698 nt, Artificial Sequence
  derived and/or modified CDS sequence (opt5) from hemagglutinin__InfluenzaA__ADN89776
augaaggugaaacugcucguccugcuuugcaccuucacagccacguacgcugacaccaucuguauuggcuaucacgccaacaauagcacagauaccguugacacagugcuggagaagaacgugaccgucacacauuccgugaaucuccuggaaaacucucacaaugggaaacuuugccugcucaagggaaucgcgccccugcagcugggcaacuguagcguugcuggguggauucucggaaauccugagugcgaacugcuuaucuccaaagagucuuggagcuacauuguggaaaagccgaaccccgagaauggcaccuguuauccugggcauuuugccgauuacgaggaacugagagagcaacucuccucugucagcuccuucgaacgguuugagaucuuccccaaggagagcucuuggccuaaccacacggugaccggaguuuccgccagcugcucucauaauggcgaauccagcuuuuaucgcaaccugcuuuggcugacaggcaaaaaugggcucuaccccaaccugucuaaguccuaugcuaauaacaaagagaaggaagugcugguccucuggggagugcaccacccuccgagcaucuccgaccagaaaacccuguaccauacagagaacgccuacgugucugucguuagcucccacuauagcagaaaguucacccccgaaguggcuaagcggccuaaagugcgcgaucaggagggcagaauuaauuacuauuggacgcuucuggagcccggggacacaaucauuuuugaagccaacggaaaucucaucgcgccucgguacgccuucgcucugucucgcggcuuuggguccggaauuaucaacagcaaugcccccauggauaagugugacgcuaaaugccagaccccgcaaggcgccauuaacucuagccuuccuuuccagaauguccaucccgugacaaucggcgaguguccuaaguauguuagauccgcgaaacugcggauggugaccgggcuccgcaacauccccucuauucagagcagaggacuguuuggcgccaucgcuggguucauugaaggaggcuggaccgggauggucgauggaugguacggcuaucaccaccagaaugagcaaggcuccggguacgccgcugaccagaagucuacacagaacgccaucaauggaauuacgaacaaagugaauagcguuaucgaaaagaugaacacccaguuuacagccgugggcaaggaguucaauaaacuggagcggcgcauggaaaaccucaacaagaaagucgaugacggguucaucgauauuuggaccuacaaugcugagcugcuugugcugcucgaaaacgagagaacacuggacuuucaugacuccaaugucaagaaccuuuaugaaaaaguuaagagccaacugaagaauaacgcgaaagagaucggaaauggcugcuucgaguuuuaccacaaguguaacgaugaaugcauggagucugugaaaaaugggaccuaugacuaccccaaguauuccgaagagagcaaacucaaccgggagaagauugauggcgugaagcuggaauccaugggagucuaccagauccuggccauuuauucuacgguggcuagcucccucguucugcuugugucucugggcgccaucagcuucuggaugugcuccaaugggagccuccagugucgcaucugcauuuga

SEQ ID NO: 198084 - RNA, 1698 nt, Artificial Sequence; identical to SEQ ID NO: 198025
  derived and/or modified CDS sequence (opt5) from hemagglutinin__InfluenzaA__ADN89787

SEQ ID NO: 198085 - RNA, 1698 nt, Artificial Sequence; identical to SEQ ID NO: 198039
  derived and/or modified CDS sequence (opt5) from hemagglutinin__InfluenzaA__ADN89798

SEQ ID NO: 198086 - RNA, 1698 nt, Artificial Sequence; identical to SEQ ID NO: 197585
  derived and/or modified CDS sequence (opt5) from hemagglutinin__InfluenzaA__ADN89809

SEQ ID NO: 198087 - RNA, 1698 nt, Artificial Sequence; identical to SEQ ID NO: 197585
  derived and/or modified CDS sequence (opt5) from hemagglutinin__InfluenzaA__ADN89820

SEQ ID NO: 198088 - RNA, 1698 nt, Artificial Sequence; identical to SEQ ID NO: 197585
  derived and/or modified CDS sequence (opt5) from hemagglutinin__InfluenzaA__ADN89831

SEQ ID NO: 198089 - RNA, 1698 nt, Artificial Sequence
  derived and/or modified CDS sequence (opt5) from hemagglutinin__InfluenzaA__ADN89842
augaaggugaaacugcucguccugcuuugcaccuucacagccacguacgcugacaccaucuguauuggcuaucacgccaacaauagcacagauaccguugacacagugcuggagaagaacgugaccgucacacauuccgugaaucuccuggaaaacagacacaaugggaaacuuugccugcucaagggaaucgcgccccugcagcugggcaacuguucuguugcuggguggauucucggaaauccugagugcgaacugcuuaucagcaaagaguccuggucuuacauuguggaaaagccgaaccccgagaauggcaccuguuauccugggcauuuugccgauuacgaggaacugcgggagcaacucagcuccgucucuagcuucgaacgcuuugagaucuuccccaaggaguccagcuggccuaaccacacggugaccggaguuucugccuccugcagccauaauggcgaaucuuccuuuuauagaaaccugcuuuggcugacaggcaaaaaugggcucuaccccaaccugagcaagucuuaugcuaauaacaaagagaaggaagugcugguccucuggggagugcaccacccuccgaacaucguggaccagaaaacccuguaccggacagagaaugccuacgucuccguugugagcucccauuauucucgcaaguucacccccgaaauugcuaagagaccuaaagugcgggaucaggagggccgcaucaacuacuauuggacgcuucuggagcccggggacacaauuaucuuugaagccaauggaaaccucauugcgccuagauacgccuucgcucugagccggggcuuuggguccggaaucauuaauagcaacgcccccauggauaagugugacgcuaaaugccagaccccgcaaggcgccaucaauucuucccuuccuuuccagaacguccaccccgugacaaucggcgaguguccuaaguauguucgcagcgcgaaacugagaauggugaccgggcuccggaauauucccucuauccagagccgcggacuguuuggcgccauugcuggguucaucgaaggaggcuggaccgggauggucgauggaugguacggcuaucaucaccagaacgagcaaggcuccggguacgccgcugaccagaagucuacacagaaugccauuaacggaaucacgaauaaagugaacagcguuaucgaaaagaugaauacccaguuuacagccgugggcaaggaguucaacaaacuggagagacggauggaaaaccucaauaagaaagucgaugacggguucauugauaucuggaccuacaacgcugagcugcuugugcugcucgaaaaugagcgcacacuggacuuucacgacuccaacgucaagaaucuuuaugaaaaaguuaagagccaacugaagaacaaugcgaaagagauuggaaacggcugcuucgaguuuuaccauaaguguaaugaugaaugcauggagucugugaaaaacgggaccuaugacuaccccaaguauuccgaagagagcaaacucaauagagagaagaucgauggcgugaagcuggaaucuaugggagucuaccagauucuggccaucuauuccacgguggcuagcucccucguucugcuugugucucugggcgccaucagcuucuggaugugcuccaacgggucucuccagugucggauuugcaucuga

SEQ ID NO: 198090 - RNA, 1701 nt, Artificial Sequence; identical to SEQ ID NO: 197605
  derived and/or modified CDS sequence (opt5) from hemagglutinin__InfluenzaA__ADN89864

SEQ ID NO: 198091 - RNA, 1701 nt, Artificial Sequence; identical to SEQ ID NO: 197605
  derived and/or modified CDS sequence (opt5) from hemagglutinin__InfluenzaA__ADN89875

SEQ ID NO: 198092 - RNA, 1701 nt, Artificial Sequence
  derived and/or modified CDS sequence (opt5) from hemagglutinin__InfluenzaA__ADN89886
augaagaccaucauugcccugagcuacauccucugccugguguucgcucagaaacuucccggcaacgacaauuccacagccacgcugugucucgggcaccaugcggucccuaacggaaccauuguuaagacaaucaccaaugaucaaauugaggugacaaacgcuaccgaacuggugcagucuagcuccacaggcgagaucugcgacucuccgcaccagauccuugauggggaaaauuguacccugauugacgcccuccugggagauccccagugcgacggcuuucaaaacaaaaagugggaucuguucgucgagagaagcaaagccuauuccaauuguuacccuuaugacgugcccgauuacgcuucucuccggagccugguugccuccagcgggacgcuugaauuuaacaaugagucuuucaacuggaccggagugacacagaauggcaccuccagcgcuugcauccgcagaucuaacaauuccuuuuucagccggcugaacuggcucacacaucugaauuuuaaguauccugcccuuaacgucaccaugcccaacaaugagcaguucgacaagcuguacauuuggggcgugcaccauccugggacggauaaagaccagaucuuucucuaugcgcaagccucuggacgcauuacaguuuccaccaagagaagccagcaggcugugaucccgaacauuggcucccggccccgcgucagaaauaucccuucucggaucagcauuuacuggacaaucgugaaacccggggauauucugcugaucaacuccaccggaaaucucauugccccucgcggcuacuucaagaucagaagcgggaaaucuuccaucaugcggagcgacgcucccauuggaaaguguaacucugaaugcaucaccccgaauggcagcauuccuaacgacaagcccuuucagaaugugaaccgcaucacauauggcgccuguccuagauacgucaaacaauccacgcugaagcuggcgaccgggaugcggaauguucccgagaaacagacacgcggaauuuucggcgccaucgcuggguuuaucgaaaacggaugggagggcaugguggaugggugguauggauucagacaccaaaauucugagggccggggccaggccgcugaccuuaagagcacccaggccgccauugaucagaucaacgggaaacucaauagacugauuggaaagacaaacgaaaaauuccaccagaucgagaaggaauuuuccgagguggaaggccgcauucaagaccuugagaaguacgucgaggauaccaaaaucgaccuguggagcuauaacgcugaacuccugguggcgcuggagaaucagcauacgauugaucucacagacucugaaaugaacaagcuguucgagaaaacccggaagcagcuuagagaaaaugccgaggauauggggaacggaugcuuuaccaucuaccacaaaugugacaaugcuugcaucggcuccauucgcaacgggacauaugaucauaauguuuaccgggacgaggcccugaacaauagauuccagaucaagggcguggaacucaagagcggauacaaagacuggauucuguggaucucuuuugccauuuccugcuuccuucugugugucgcucuccugggcuuuaucaugugggccugccaaaaggggaacauccgcuguaauauuugcaucuga

SEQ ID NO: 198093 - RNA, 1701 nt, Artificial Sequence; identical to SEQ ID NO: 197605
  derived and/or modified CDS sequence (opt5) from hemagglutinin__InfluenzaA__ADN89897

SEQ ID NO: 198094 - RNA, 1701 nt, Artificial Sequence; identical to SEQ ID NO: 197605
  derived and/or modified CDS sequence (opt5) from hemagglutinin__InfluenzaA__ADN89908

SEQ ID NO: 198095 - RNA, 1701 nt, Artificial Sequence; identical to SEQ ID NO: 197605
  derived and/or modified CDS sequence (opt5) from hemagglutinin__InfluenzaA__ADN89919

SEQ ID NO: 198096 - RNA, 1701 nt, Artificial Sequence; identical to SEQ ID NO: 197605
  derived and/or modified CDS sequence (opt5) from hemagglutinin__InfluenzaA__ADN89930

SEQ ID NO: 198097 - RNA, 1701 nt, Artificial Sequence; identical to SEQ ID NO: 197605
  derived and/or modified CDS sequence (opt5) from hemagglutinin__InfluenzaA__ADN89941

SEQ ID NO: 198098 - RNA, 1701 nt, Artificial Sequence; identical to SEQ ID NO: 197605
  derived and/or modified CDS sequence (opt5) from hemagglutinin__InfluenzaA__ADN89952

SEQ ID NO: 198099 - RNA, 1701 nt, Artificial Sequence; identical to SEQ ID NO: 197605
  derived and/or modified CDS sequence (opt5) from hemagglutinin__InfluenzaA__ADN89963

SEQ ID NO: 198100 - RNA, 1701 nt, Artificial Sequence
  derived and/or modified CDS sequence (opt5) from hemagglutinin__InfluenzaA__ADN89974
augaagaccaucauugcccugagcuacauccucugccugguguucgcucagaaacuucccggcaacgacaauuccacagccacgcugugucucgggcaccaugcggucccuaacggaaccauuguuaagacaaucaccaaugaucaaauugaggugacaaacgcuaccgaacuggugcagucuagcuccacaggcgagaucugcgacucuccgcaccagauccuugauggggaaaauuguacccugauugacgcccuccugggagauccccagugcgacggcuuucaaaacaaaaagugggaucuguucgucgagagaagcaaagccuauuccaauuguuacccuuaugacgugcccgauuacgcuucucuccggagccugguugccuccagcgggacgcuugaauuuaacaaugagucuuucaacuggaccggagugacacagaauggcaccuccagcgcuugcauccgcagaucuaacaauuccuuuuucagccggcugaacuggcucacacaucugaauuuuaaguauccugcccuuaacgucaccaugcccaacaaugagcaguucgacaagcuguacauuuggggcgugcaccauccugggacggauaaagaccagaucuuucucuaugcgcaagccucuggacgcauuacaguuuccaccaagagaagccagcaggcugugaucccgaacauuggcucccggccccgcgucagaaauaucccuucucggaucagcauuuacuggacaaucgugaaacccggggauauucugcugaucaacuccaccggaaaucucauugccccucgcggcuacuucaagauccagagcgggaaaucuuccaucaugagaagcgacgcucccauuggaaaguguaacucugaaugcaucaccccgaauggcagcauuccuaacgacaagcccuuucaaaaugugaaccggaucacauauggcgccuguccucgcuacgucaaacaguccacgcugaagcuggcgaccgggaugagaaauguucccgagaaacagacacggggaauuuucggcgccaucgcuggguuuaucgaaaacggaugggagggcaugguggaugggugguauggauuccgccaccaaaauucugagggcagaggccaggccgcugaccuuaagagcacccaggccgccauugaucagaucaacgggaaacucaaucggcugauuggaaagacaaacgaaaaauuccaccaaaucgagaaggaauuuuccgagguggaaggccgcauucaggaccuugagaaguacgucgaggauaccaaaaucgaccuguggagcuauaacgcugaacuccugguggcgcuggagaaucagcauacgauugaucucacagacucugaaaugaacaagcuguucgagaaaaccaagaaacagcuuagagaaaaugccgaggauauggggaacggaugcuuuaccaucuaccacaagugugacaaugcuugcaucggcuccauucggaacgggacauaugaucauaauguuuacagagacgaggcccugaacaaucgcuuccaaaucaagggcguggaacucaaaagcggauacaaggacuggauucuguggaucucuuuugccauuuccugcuuccuucugugugucgcucuccugggcuuuaucaugugggccugccagaaagggaacauccgguguaauauuugcaucuga

SEQ ID NO: 198101 - RNA, 1701 nt, Artificial Sequence; identical to SEQ ID NO: 197605
  derived and/or modified CDS sequence (opt5) from hemagglutinin__InfluenzaA__ADN89985

SEQ ID NO: 198102 - RNA, 1701 nt, Artificial Sequence; identical to SEQ ID NO: 197605
  derived and/or modified CDS sequence (opt5) from hemagglutinin__InfluenzaA__ADN89996

SEQ ID NO: 198103 - RNA, 1701 nt, Artificial Sequence; identical to SEQ ID NO: 197605
  derived and/or modified CDS sequence (opt5) from hemagglutinin__InfluenzaA__ADN90007

SEQ ID NO: 198104 - RNA, 1701 nt, Artificial Sequence; identical to SEQ ID NO: 197605
  derived and/or modified CDS sequence (opt5) from hemagglutinin__InfluenzaA__ADN90018

SEQ ID NO: 198105 - RNA, 1701 nt, Artificial Sequence; identical to SEQ ID NO: 197605
  derived and/or modified CDS sequence (opt5) from hemagglutinin__InfluenzaA__ADN90040

SEQ ID NO: 198106 - RNA, 1701 nt, Artificial Sequence; identical to SEQ ID NO: 197605
  derived and/or modified CDS sequence (opt5) from hemagglutinin__InfluenzaA__ADN90051

SEQ ID NO: 198107 - RNA, 1701 nt, Artificial Sequence; identical to SEQ ID NO: 197605
  derived and/or modified CDS sequence (opt5) from hemagglutinin__InfluenzaA__ADN90062

SEQ ID NO: 198108 - RNA, 1701 nt, Artificial Sequence; identical to SEQ ID NO: 197605
  derived and/or modified CDS sequence (opt5) from hemagglutinin__InfluenzaA__ADN90073

SEQ ID NO: 198109 - RNA, 1701 nt, Artificial Sequence; identical to SEQ ID NO: 197605
  derived and/or modified CDS sequence (opt5) from hemagglutinin__InfluenzaA__ADN90084

SEQ ID NO: 198110 - RNA, 1701 nt, Artificial Sequence; identical to SEQ ID NO: 197605
  derived and/or modified CDS sequence (opt5) from hemagglutinin__InfluenzaA__ADN90095

SEQ ID NO: 198111 - RNA, 1701 nt, Artificial Sequence; identical to SEQ ID NO: 197605
  derived and/or modified CDS sequence (opt5) from hemagglutinin__InfluenzaA__ADN90106

SEQ ID NO: 198112 - RNA, 1701 nt, Artificial Sequence; identical to SEQ ID NO: 197605
  derived and/or modified CDS sequence (opt5) from hemagglutinin__InfluenzaA__ADN90117

SEQ ID NO: 198113 - RNA, 1701 nt, Artificial Sequence; identical to SEQ ID NO: 197605
  derived and/or modified CDS sequence (opt5) from hemagglutinin__InfluenzaA__ADN90128

SEQ ID NO: 198114 - RNA, 1701 nt, Artificial Sequence; identical to SEQ ID NO: 197605
  derived and/or modified CDS sequence (opt5) from hemagglutinin__InfluenzaA__ADN90139

SEQ ID NO: 198115 - RNA, 1701 nt, Artificial Sequence; identical to SEQ ID NO: 197605
  derived and/or modified CDS sequence (opt5) from hemagglutinin__InfluenzaA__ADN90150

SEQ ID NO: 198116 - RNA, 1701 nt, Artificial Sequence; identical to SEQ ID NO: 197605
  derived and/or modified CDS sequence (opt5) from hemagglutinin__InfluenzaA__ADN90161

SEQ ID NO: 198117 - RNA, 1701 nt, Artificial Sequence; identical to SEQ ID NO: 197605
  derived and/or modified CDS sequence (opt5) from hemagglutinin__InfluenzaA__ADN90172

SEQ ID NO: 198118 - RNA, 1701 nt, Artificial Sequence; identical to SEQ ID NO: 197605
  derived and/or modified CDS sequence (opt5) from hemagglutinin__InfluenzaA__ADN90183

SEQ ID NO: 198119 - RNA, 1701 nt, Artificial Sequence; identical to SEQ ID NO: 197605
  derived and/or modified CDS sequence (opt5) from hemagglutinin__InfluenzaA__ADN90194

SEQ ID NO: 198120 - RNA, 1701 nt, Artificial Sequence; identical to SEQ ID NO: 197605
  derived and/or modified CDS sequence (opt5) from hemagglutinin__InfluenzaA__ADN90205

SEQ ID NO: 198121 - RNA, 1701 nt, Artificial Sequence; identical to SEQ ID NO: 197605
  derived and/or modified CDS sequence (opt5) from hemagglutinin__InfluenzaA__ADN90216

SEQ ID NO: 198122 - RNA, 1701 nt, Artificial Sequence; identical to SEQ ID NO: 195502
  derived and/or modified CDS sequence (opt5) from hemagglutinin__InfluenzaA__ADN92467

SEQ ID NO: 198123 - RNA, 1701 nt, Artificial Sequence
  derived and/or modified CDS sequence (opt5) from hemagglutinin__InfluenzaA__ADN92478
augaagaccaucauugcccugagccacauccucugccugguguucgcucagaaacuucccggcaacgacaauuccacagccacgcugugucucgggcaucacgcggucccuaacggaaccauuguuaagacaaucaccaaugaucaaauugaggugacaaacgcuaccgaacuggugcagucuagcuccacaggcgagaucugcgacucuccgcaucagauccuugaugggaaaaauuguacccugauugacgcccuccugggagauccccagugcgacggcuuucaaaacaagaaaugggaucuguucgucgaaagaagcaaggccuacuccaauuguuauccuuacgacgugcccgauuaugcuucucuccggagccugguugccuccagcgggacgcuugaguuuaacaaugaaucuuucaacuggaccggagugacacagaauggcaccuccagcgcuugcauccgcagaucuaagaacuccuuuuucagccggcugaauuggcucacacaccugaacuuuaaauaccaggcccuuaaugucaccaugccuaacaacgagcaguucgacaagcuguauauuuggggcgugcaucaccccgggacggauaaagaccaaaucuuucucuacgcgcaggccucuggacgcauuacaguuuccaccaagagaagccagcagacagugaucccuaauauuggcucccggccgcgcgucagaaacauccccucucggaucagcauuuauuggaccaucgugaaaccuggggauauucugcugaucaauuccaccggaaaccucauugcuccccgcggcuacuucaagauccaaagcgggaagucuuccaucaugagaagcgacgccccuauuggaaaauguaauucugagugcaucacacccaacggcagcauuccgaaugacaagccuuuucagaacgugaaucggaucacguacggcgcuuguccccgcuaugucaaacagaacacccugaaacuugccacagggaugagaaauguuccugaaaaacaaacccggggaauuuucggcgcgaucgccggguuuaucgagaacggaugggaaggcaugguggaugggugguacggauuccgccaccaaaauuccgagggcagaggccaggcugccgaccugaagucuacacaggcugccauugaucagaucaacgggaaacucaaucggcugauuggaaagaccaacgagaaguuccaucagaucgaaaaagaguuuagcgaaguggagggccgcauucaggaccuugaaaaguaugucgaggauacgaaaaucgaccugugguccuacaacgccgagcuccugguggcucuggaaaaucagcacacaauugaucucaccgacagcgagaugaacaagcuguucgaaaagaccaagaagcaacuuagagagaaugcggaagauauggggaacggaugcuuuaaaaucuaucauaagugugacaaugccugcaucggcucuauucggaacgggacauacgaucacgacguuuauagagacgaggcucugaauaaccgcuuccagaucaaaggcguggagcucaaguccggauacaaagauuggauucuguggaucagcuuugccauuucuugcuuccuucugugugucgcccuccugggcuuuaucaugugggcuugccagaaggggaauauccgguguaacauuugcaucuga

SEQ ID NO: 198124 - RNA, 1701 nt, Artificial Sequence
  derived and/or modified CDS sequence (opt5) from hemagglutinin__InfluenzaA__ADN92489
augaagaccaucauugcccugagcuacauccucugccugguguucgcucagaaacuucccggcaacgacaauuccacagccacgcugugucucgggcaccaugcggucccuaacggaaccauuguuaagacaaucaccaaugaucaaauugaggugacaaacgcuaccgaacuggugcagucuagcuccacaggcgagaucugcgacucuccgcaccagauccuugaugggaaaaauuguacccugauugacgcccuccugggagauccccagugcgacggcuuucaaaacaagaaaugggaucuguucgucgaaagaagcaaggccuauuccaauuguuacccuuaugacgugcccgauuacgcuucucuccggagccugguugccuccagcgggacgcuugaguuuaacaaugaaaacuucaauuggaccggagugacacagaacggcaccucuuccgcuugcauccgcagaagcaagaauagcuuuuucucccggcugaacuggcucacacaucugaauuuuaaauaucaggcccuuaacgucaccaugccuaacaaugagcaguucgacaagcuguacauuuggggcgugcaccaucccgggacggauaaagaccaaaucuuucucuaugcgcaggccagcggacgcauuacaguuucuaccaagagaucccagcagacagugaucccuaacauuggcagccggccgcgcgucagaaauauccccucccggaucucuauuuacuggaccaucgugaaaccuggggauauucugcugaucaacagcaccggaaaucucauugcuccccgcggcuacuucaagauccaauccgggaagucuucuaucaugagauccgacgccccuauuggaaaauguaacagcgagugcaucacacccaauggcucuauuccgaacgacaagccuuuucagaaugugaaccggaucacguauggcgcuuguccccgcuacgucaaacagaauacccugaaacuugccacagggaugagaaacguuccugaaaaacaaacccggggaauuuucggcgcgaucgccggguuuaucgagaauggaugggaaggcaugguggaugggugguauggauuccgccaccagaacagcgagggcagaggccaggcugccgaccugaaguccacacaggcugccauugaucaaaucaaugggaaacucaaccggcugauuggaaagaccaacgagaaguuccaccagaucgaaaaagaguuuucugaaguggagggccgcauucaggaccuugaaaaguacgucgaggauacgaaaaucgaccuguggagcuauaaugccgagcuccugguggcucuggaaaaccagcauacaauugaucucaccgacuccgagaugaauaagcuguucgaaaagaccaagaagcaacuuagagagaacgcggaagauauggggaauggaugcuuuaaaaucuaccacaagugugacaacgccugcaucggcagcauucggaaugggacauaugaucaugacguuuacagagacgaggcucugaacaaucgcuuccagaucaaaggcguggagcucaagucuggauacaaagauuggauucuguggaucuccuuugccauuagcugcuuccuucugugugucgcccuccugggcuuuaucaugugggcuugccagaaggggaacauccgguguaauauuugcaucuga

SEQ ID NO: 198125 - RNA, 1701 nt, Artificial Sequence; identical to SEQ ID NO: 195502
  derived and/or modified CDS sequence (opt5) from hemagglutinin__InfluenzaA__ADN92500

SEQ ID NO: 198126 - RNA, 1701 nt, Artificial Sequence; identical to SEQ ID NO: 194741
  derived and/or modified CDS sequence (opt5) from hemagglutinin__InfluenzaA__ADN92510

SEQ ID NO: 198127 - RNA, 1701 nt, Artificial Sequence; identical to SEQ ID NO: 194741
  derived and/or modified CDS sequence (opt5) from hemagglutinin__InfluenzaA__ADN92520

SEQ ID NO: 198128 - RNA, 1701 nt, Artificial Sequence; identical to SEQ ID NO: 195843
  derived and/or modified CDS sequence (opt5) from hemagglutinin__InfluenzaA__ADN92530

SEQ ID NO: 198129 - RNA, 1701 nt, Artificial Sequence; identical to SEQ ID NO: 194983
  derived and/or modified CDS sequence (opt5) from hemagglutinin__InfluenzaA__ADN92540

SEQ ID NO: 198130 - RNA, 1701 nt, Artificial Sequence; identical to SEQ ID NO: 194741
  derived and/or modified CDS sequence (opt5) from hemagglutinin__InfluenzaA__ADN92550

SEQ ID NO: 198131 - RNA, 1701 nt, Artificial Sequence; identical to SEQ ID NO: 194741
  derived and/or modified CDS sequence (opt5) from hemagglutinin__InfluenzaA__ADN92560

SEQ ID NO: 198132 - RNA, 1701 nt, Artificial Sequence
  derived and/or modified CDS sequence (opt5) from hemagglutinin__InfluenzaA__ADO00730
augaaggccauccuggugguccuccuguacaccuucgcuacagccaacgcggacacgcuuugcauuggcuaucacgcuaauaacagcaccgauacaguugacaccgugcuggagaaaaaugugacagucacccauuccgugaaccuccuggaagauaagcacaaugggaaacuuuguaagcugagaggaguugcuccccuccaucugggcaaaugcaacaucgccggguggauucugggaaauccugaguguggcucucucagcacagccuccucuuggagcuacaucguggaaaccuccucuagcgacaacgggacgugcuauccgggagauuuuauugacuacgaggaacugcgggagcagcuuuccagcgucucuuccuucgagcgcuuugaaaucuuccccaagaccagcucuuggccuaaucacgauuccaacaagggcgugacagccgcuuguccccaugccggcgcgaaaucuuuuuauaagaaucugaucuggcucguuaaaaaggggaacagcuacccuaaacuguccaagagcuauauuaaugacaagggaaaagaggugcuuguccuguggggcauccaccaccccuccaccucugccgaucaacagagccucuaccagaacgcugacgccuacguguucguggggacauccagauauagcaagaaauuuaagccugaaauugcuauccggccgaaaguccgcgaucaggagggaagaaugaauuacuauuggacccugguugagcccggcgacaagauuacguucgaagccacagggaaccugguggugccucgguacgcguuugccauggagcgcaacgcuggaucuggcaucauuaucuccgauacccccguccaugacugcaauacaaccugucaaaccccuaaaggcgccaucaacacaagccuccccuuccagaauauucacccgaucacgauugggaagugcccuaaguaugugaaaucuaccaagcugagacuugcuacaggacugcggaacguucccagcauccagucccgcggccucuuuggggccauugccggauucaucgaaggcggguggaccggaaugguggacggcugguacggcuaucaucaccagaaugagcaagggucuggauacgcugcggaucugaaaagcacacagaacgccaucgacggcauuaccaauaaggucaacuccgugaucgaaaagaugaauacgcaguuuacagcuguugggaaggaguucaaccaccuugagaagagaauugaaaaucugaacaaaaagguggaugacggauuccucgauaucuggaccuacaaugccgagcugcugguccuccuggaaaacgagcggacccuugacuaucaugauagcaaugugaaaaaccuguacgaaaagguccgcucucagcucaaaaacaaugccaaggagauuggcaacggguguuuugaguucuaucacaagugcgacaauacauguauggaauccgugaaaaacggcaccuacgauuauccuaaguacagcgaggaagcuaaacugaauagagaggaaaucgacggaguuaaacuugagucuacacggaucuaucaaauucuggccaucuacuccacgguggcgagcucccucguccuggugguuucucugggcgcuauuagcuuuuggaugugcuccaacgggucucuccagugccgcaucuguauuuga

SEQ ID NO: 198133 - RNA, 1701 nt, Artificial Sequence; identical to SEQ ID NO: 196161
  derived and/or modified CDS sequence (opt5) from hemagglutinin__InfluenzaA__ADO00740

SEQ ID NO: 198134 - RNA, 1701 nt, Artificial Sequence; identical to SEQ ID NO: 195905
  derived and/or modified CDS sequence (opt5) from hemagglutinin__InfluenzaA__ADO00750

SEQ ID NO: 198135 - RNA, 1701 nt, Artificial Sequence; identical to SEQ ID NO: 194741
  derived and/or modified CDS sequence (opt5) from hemagglutinin__InfluenzaA__ADO12143

SEQ ID NO: 198136 - RNA, 1701 nt, Artificial Sequence; identical to SEQ ID NO: 194741
  derived and/or modified CDS sequence (opt5) from hemagglutinin__InfluenzaA__ADO12153

SEQ ID NO: 198137 - RNA, 1701 nt, Artificial Sequence; identical to SEQ ID NO: 194741
  derived and/or modified CDS sequence (opt5) from hemagglutinin__InfluenzaA__ADO12163

SEQ ID NO: 198138 - RNA, 1701 nt, Artificial Sequence; identical to SEQ ID NO: 194741
  derived and/or modified CDS sequence (opt5) from hemagglutinin__InfluenzaA__ADO12173

SEQ ID NO: 198139 - RNA, 1701 nt, Artificial Sequence; identical to SEQ ID NO: 194741
  derived and/or modified CDS sequence (opt5) from hemagglutinin__InfluenzaA__ADO12183

SEQ ID NO: 198140 - RNA, 1701 nt, Artificial Sequence; identical to SEQ ID NO: 194741
  derived and/or modified CDS sequence (opt5) from hemagglutinin__InfluenzaA__ADO12193

SEQ ID NO: 198141 - RNA, 1701 nt, Artificial Sequence; identical to SEQ ID NO: 194741
  derived and/or modified CDS sequence (opt5) from hemagglutinin__InfluenzaA__ADO12203

SEQ ID NO: 198142 - RNA, 1701 nt, Artificial Sequence; identical to SEQ ID NO: 194741
  derived and/or modified CDS sequence (opt5) from hemagglutinin__InfluenzaA__ADO12213

SEQ ID NO: 198143 - RNA, 1701 nt, Artificial Sequence; identical to SEQ ID NO: 194741
  derived and/or modified CDS sequence (opt5) from hemagglutinin__InfluenzaA__ADO12223

SEQ ID NO: 198144 - RNA, 1701 nt, Artificial Sequence; identical to SEQ ID NO: 194741
  derived and/or modified CDS sequence (opt5) from hemagglutinin__InfluenzaA__ADO12233

SEQ ID NO: 198145 - RNA, 1701 nt, Artificial Sequence; identical to SEQ ID NO: 194741
  derived and/or modified CDS sequence (opt5) from hemagglutinin__InfluenzaA__ADO12243

SEQ ID NO: 198146 - RNA, 1701 nt, Artificial Sequence; identical to SEQ ID NO: 194741
  derived and/or modified CDS sequence (opt5) from hemagglutinin__InfluenzaA__ADO12253

SEQ ID NO: 198147 - RNA, 1701 nt, Artificial Sequence; identical to SEQ ID NO: 194741
  derived and/or modified CDS sequence (opt5) from hemagglutinin__InfluenzaA__ADO12263

SEQ ID NO: 198148 - RNA, 1701 nt, Artificial Sequence; identical to SEQ ID NO: 194741
  derived and/or modified CDS sequence (opt5) from hemagglutinin__InfluenzaA__ADO12273

SEQ ID NO: 198149 - RNA, 1701 nt, Artificial Sequence; identical to SEQ ID NO: 194741
  derived and/or modified CDS sequence (opt5) from hemagglutinin__InfluenzaA__ADO12283

SEQ ID NO: 198150 - RNA, 1701 nt, Artificial Sequence; identical to SEQ ID NO: 194741
  derived and/or modified CDS sequence (opt5) from hemagglutinin__InfluenzaA__ADO12293

SEQ ID NO: 198151 - RNA, 1701 nt, Artificial Sequence; identical to SEQ ID NO: 194741
  derived and/or modified CDS sequence (opt5) from hemagglutinin__InfluenzaA__ADO12303

SEQ ID NO: 198152 - RNA, 1701 nt, Artificial Sequence; identical to SEQ ID NO: 194741
  derived and/or modified CDS sequence (opt5) from hemagglutinin__InfluenzaA__ADO12313

SEQ ID NO: 198153 - RNA, 1701 nt, Artificial Sequence; identical to SEQ ID NO: 194741
  derived and/or modified CDS sequence (opt5) from hemagglutinin__InfluenzaA__ADO12323

SEQ ID NO: 198154 - RNA, 1701 nt, Artificial Sequence; identical to SEQ ID NO: 194741
  derived and/or modified CDS sequence (opt5) from hemagglutinin__InfluenzaA__ADO12333

SEQ ID NO: 198155 - RNA, 1701 nt, Artificial Sequence; identical to SEQ ID NO: 194741
  derived and/or modified CDS sequence (opt5) from hemagglutinin__InfluenzaA__ADO12343

SEQ ID NO: 198156 - RNA, 1701 nt, Artificial Sequence; identical to SEQ ID NO: 194741
  derived and/or modified CDS sequence (opt5) from hemagglutinin__InfluenzaA__ADO12353

SEQ ID NO: 198157 - RNA, 1701 nt, Artificial Sequence; identical to SEQ ID NO: 194741
  derived and/or modified CDS sequence (opt5) from hemagglutinin__InfluenzaA__ADO12363

SEQ ID NO: 198158 - RNA, 1701 nt, Artificial Sequence
  derived and/or modified CDS sequence (opt5) from hemagglutinin__InfluenzaA__ADO12373
augaaggccauccuggugguccuccuguacaccuucgcuacagccaacgcggacacgcuuugcauuggcuaucacgcuaauaacagcaccgauacaguugacaccgugcuggagaagaaugugacagucacccauuccgugaaccuccuggaagauaagcacaaugggaaacuuuguaagcugagaggaguugcuccccuccaucugggcaaaugcaacaucgccggguggauucugggaaauccugagugugaaucucucagcacagccuccucuuggagcuacaucguggagaccuccucuagcgacaacggcacgugcuauccgggggauuuuauugacuacgaagaacugcgggagcagcuuuccagcgucucuuccuucgaacgcuuugagaucuuccccaagaccagcucuuggccuaaucacgauuccaacaagggagugacagccgcuuguccccaugccggcgcgaaaucuuuuuauaagaaucugaucuggcucguuaaaaagggcaacagcuacccuaaacuguccaagagcuauauuaauaacaaggggaaagaagugcuuguccuguggggaauccaccaccccuccaccucugccgaccaacagagccucuaccagaaugcugaugccuacguguucgugggcacauccagauauagcaagaaauuuaagccugagauugcuauccggccgaaaguccgcgaccaggaggggagaaugaacuacuauuggacccugguugaacccggagauaagauuacguucgaggccacaggcaaccugguggugccucgguacgcguuugccauggaacgcaaugcugggucuggaaucauuaucuccgacacccccguccaugauugcaacacaaccugucaaaccccuaaaggcgccaucaauacaagccuccccuuccagaacauucacccgaucacgauuggcaagugcccuaaguaugugaaaucuaccaagcugagacuugcuacagggcugcggaauguucccagcauccagucccgcggacucuuuggcgccauugccggguucaucgagggaggcuggaccgggaugguggacggaugguacggcuaucaucaccagaacgaacaaggcucuggguacgcugcggaccugaaaagcacacagaaugccaucgaugagauuaccaacaaggucaauuccgugaucgagaaaaugaacacgcaguuuacagcuguuggaaaggaguucaaucaccuugagaagagaauugaaaaccugaauaaaaagguggacgauggcuuccucgacaucuggaccuacaacgccgagcugcugguccuccuggaaaaugagcggacccuugauuaucaugacagcaacgugaaaaaccuguacgagaagguccgcucucagcucaaaaauaacgccaaggaaauugggaauggauguuuugaguucuaucacaagugcgauaacacauguauggaauccgugaaaaauggcaccuacgacuauccuaaguacagcgaggaagcuaaacugaacagagaggagaucgaugggguuaaacuugaaucuacacggaucuaucaaauucuggccaucuacuccacgguggcgagcucccucguccuggugguuucucugggcgcuauuagcuuuuggaugugcuccaauggaucucuccagugccgcaucuguauuuga

SEQ ID NO: 198159 - RNA, 1701 nt, Artificial Sequence; identical to SEQ ID NO: 196226
  derived and/or modified CDS sequence (opt5) from hemagglutinin__InfluenzaA__ADO12383

SEQ ID NO: 198160 - RNA, 1701 nt, Artificial Sequence
  derived and/or modified CDS sequence (opt5) from hemagglutinin__InfluenzaA__ADO12403
augaaggccauccuggugguccuccuguacaccuucgcuacagccaacgcggacacgcuuugcauuggcuaucacgcuaauaacagcaccgauacaguugacaccgugcuggagaagaaugugacagucacccauuccgugaaccuccuggaagauaagcacaaugggaaacuuuguaagcugagaggaguugcuccccuccaucugggcaaaugcaacaucgccggguggauucugggaaauccugagugugaaucucucagcacagccuccucuuggagcuacaucguggagaccuccucuagcgacaacggcacgugcuauccgggggauuuuauugacuacgaagaacugcgggagcagcuuuccagcgucucuuccuucgaacgcuuugagaucuuccccaagaccagcucuuggccuaaucacgauuccaacaagggagugacagccgcuuguccccaugccggcgcgaaaucuuuuuauaagaaucugaucuggcucguuaaaaagggcaacagcuacccuaaacuguccaagagcuauauuaaugacaaggggaaagaagugcuuguccuguggggaauccaccaccccuccaccucugccgaucaacagagccucuaccagaacgcugacgccuacguguucgugggcacauccagauauagcaagaaauuuaagccugagauugcuauccggccgaaaguccgcgaucaggaggggagaaugaauuacuauuggacccugguugaacccggagacaagauuacguucgaggccacaggcaaccugguggugccucgguacgcguuugccauggaacgcaacgcugggucuggaaucauuaucuccgauacccccguccaugacugcaauacaaccugucaaaccccuaaaggcgccaucaacacaagccuccccuuccagaaugugcacccgauuacgaucggcaagugcccuaaguauguuaaaucuaccaagcugagacuugcuacagggcugcggaacgugcccagcauucagucccgcggacucuuuggcgccaucgccggguucauugagggaggcuggaccgggauggucgacggaugguacggcuaucaucaccagaaugaacaaggcucuggguacgcugcggaucugaaaagcacacagaacgccaucgacgagaucaccaauaaggugaacuccguuauugagaaaaugaauacgcaguuuacagcugugggaaaggaguucaaccaccuugagaagagaaucgaaaaucugaacaaaaaggucgaugacggcuuccucgauauuuggaccuacaaugccgagcugcuggugcuccuggaaaacgagcggacccuugacuaucaugauagcaaugucaaaaaccuguacgagaaggugcgcucucagcucaaaaacaaugccaaggaaaucgggaacggauguuuugaguucuaucacaagugcgacaauacauguauggaauccguuaaaaacggcaccuacgauuauccuaaguacagcgaggaagcuaaacugaauagagaggagauugacggggugaaacuugaaucuacacggaucuaucaaauccuggccauuuacuccacggucgcgagcucccucgugcugguugugucucugggcgcuaucagcuuuuggaugugcuccaacggaucucuccagugccgcauuuguaucuga

SEQ ID NO: 198161 - RNA, 1701 nt, Artificial Sequence; identical to SEQ ID NO: 196377
  derived and/or modified CDS sequence (opt5) from hemagglutinin__InfluenzaA__ADO12413

SEQ ID NO: 198162 - RNA, 1701 nt, Artificial Sequence; identical to SEQ ID NO: 194741
  derived and/or modified CDS sequence (opt5) from hemagglutinin__InfluenzaA__ADO12423

SEQ ID NO: 198163 - RNA, 1701 nt, Artificial Sequence; identical to SEQ ID NO: 194741
  derived and/or modified CDS sequence (opt5) from hemagglutinin__InfluenzaA__ADO12433

SEQ ID NO: 198164 - RNA, 1701 nt, Artificial Sequence; identical to SEQ ID NO: 194741
  derived and/or modified CDS sequence (opt5) from hemagglutinin__InfluenzaA__ADO12443

SEQ ID NO: 198165 - RNA, 1701 nt, Artificial Sequence; identical to SEQ ID NO: 194741
  derived and/or modified CDS sequence (opt5) from hemagglutinin__InfluenzaA__ADO12453

SEQ ID NO: 198166 - RNA, 1701 nt, Artificial Sequence; identical to SEQ ID NO: 194741
  derived and/or modified CDS sequence (opt5) from hemagglutinin__InfluenzaA__ADO12463

SEQ ID NO: 198167 - RNA, 1701 nt, Artificial Sequence
  derived and/or modified CDS sequence (opt5) from hemagglutinin__InfluenzaA__ADO12473
augaaggccauccuggugguccuccuguacaccuucgcuacagccaacgcggacacgcuuugcauuggcuaucacgcuaauaacagcaccgauacaguugacaccgugcuggagaagaaugugacagucacccauuccgugaaccuccuggaagauaagcagaaugggaaacuuuguaagcugagaggaguugcuccccuccaccugggcaaaugcaacaucgccggguggauucugggaaauccugagugugaaucucucagcacagccuccucuuggagcuacaucguggagaccuccucuagcgacaacggcacgugcuauccgggggauuuuauugacuacgaagaacugcgggagcaacuuuccagcgucucuuccuucgaacgcuuugagaucuuccccaagaccagcucuuggccuaaucaugauuccaacaagggagugacagccgcuuguccccacgccggcgcgaaaucuuuuuauaagaaucugaucuggcucguuaaaaagggcaacagcuacccuaaacuguccaagagcuauauuaaugacaaggggaaagaagugcuuguccuguggggaauccaucaccccuccaccucugccgaucagcagagccucuaccagaacgcugacgccuacguguucgugggcacauccagauauagcaagaaauuuaagccugagauugcuauccggccgaaaguccgcgaucaagaggggagaaugaauuacuauuggacccugguugaacccggagacaagauuacguucgaggccacaggcaaccugguggugccucgguacgcguuugccauggaacgcaacgcugggucuggaaucauuaucuccgauacccccguccacgacugcaauacaaccugucagaccccuaaaggcgccaucaacacaagccuccccuuccagaauauucauccgaucacgauuggcaagugcccuaaguaugugaaaucuaccaagcugagacuugcuacagggcugcggaacguucccagcauccagucccgcggacucuuuggcgccauugccggguucaucgagggaggcuggaccgggaugguggacggaugguacggcuaucaccaucaaaaugaacagggcucuggguacgcugcggaucugaaaagcacacagaacgccaucgacgagauuaccaauaaggucaacuccgugaucgagaaaaugaauacgcaguuuacagcuguuggaaaggaguucaaccaccuugagaagagaauugaaaaucugaacaaaaagguggaugacggcuuccucgauaucuggaccuacaaugccgagcugcugguccuccuggaaaacgagcggacccuugacuaucacgauagcaaugugaaaaaccuguacgagaagguccgcucucaacucaaaaacaaugccaaggaaauugggaacggauguuuugaguucuaucauaagugcgacaauacauguauggaauccgugaaaaacggcaccuacgauuauccuaaguacagcgaggaagcuaaacugaauagagaggagaucgacgggguuaaacuugaaucuacacggaucuaucagauucuggccaucuacuccacgguggcgagcucccucguccuggugguuucucugggcgcuauuagcuuuuggaugugcuccaacggaucucuccagugccgcaucuguauuuga

SEQ ID NO: 198168 - RNA, 1701 nt, Artificial Sequence; identical to SEQ ID NO: 194741
  derived and/or modified CDS sequence (opt5) from hemagglutinin__InfluenzaA__ADO12493

SEQ ID NO: 198169 - RNA, 1701 nt, Artificial Sequence
  derived and/or modified CDS sequence (opt5) from hemagglutinin__InfluenzaA__ADO12503
augaaggccauccuggugguccuccuguacaccuucgcuacagccaacgcggacacgcuuugcauuggcuaucacgcuaauaacagcaccgauacaguugacaccgugcuggagaagaaugugacagucacccauuccgugaaccuccuggaagauaagcacaaugggaaacuuuguaagcugagaggaguugcuccccuccaucugggcaaaugcaacaucgccggguggauucugggaaauccugagugugaaucucucagcacagccuccucuuggagcuacaucguggagaccuccucuagcgacaacggcacgugcuauccgggggauuuuauugacuacgaagaacugcgggagcagcuuuccagcgucucuuccuucgaacgcuuugagaucuuccccaagaccagcucuuggccuaaucacgauuccaacaagggagugacagccgcuuguccccaugccggcgcgaaaucuuuuuauaagaaucugaucuggcucguuaaaaagggcaacagcuacccuaaacuguccaagagcuauauuaaugacaaggggaaagaagugcuuguccuguggggaauccaccaccccuccaccucugccgaucaacagagccucuaccagaacgcugacgccuacguguucgugggcacauccagauauagcaagaaauuuaagccugagauugcuauccggccgaaaguccgcgaucaggaggggagaaugaauuacuauuggacccugguugaacccggagacaagauuacguucgaggccacaggcaaccugguggugccucgguacgcguuugccauggaacgcaacgcugggucuggaaucauuaucuccgauacccccguccaugacugcaauacaaccugucaaaccccuaaaggcgccaucaacacaagccuccccuuccagaauauucacccgaucacgauuggcaagugcccuaaguaugugaaaucuaccaagcugagacuugcuacagggcugcggaacguucccagcauccagucccgcggacucuuuggcgccauugccggguucaucgagggaggcuggaccgggaugguggacggaugguacggcuaucaucaccagaaugaacaaggcucuggguacgcugcggaucugaaaagcacacagaacgccaucgacgagauuaccaauaaggucaacuccgugaucgagaaaaugaauacgcaguuuacagcuguuggaaaggaguucaaccaccuugagaagagaauugaaaaucugaacaaaaagguggaugacggcuuccucgauaucuggaccuacaaugccgagcugcugguccuccuggaaaacgagcggacccuugacuaucaugauagcaaugugaaaaaccuguacgagaagguccgcucucagcucaaaaacaaugccaaggaaauugggaacggauguuuugaguucuaucacaagugcgacaauacauguauggaauccgugaaaaacggcaccuacgauuauccuaaguacagcgaggaagcuaaacugaauagagaggagaucgacgggguuaaacuugaaucuacacggaucuaucaaauucuggccaucuacuccacgguggcgagcucccucguccuggugguuucucugggcgcuauuaacuuuuggaugugcagcaauggaucccuccagugccgcaucuguauuuga

SEQ ID NO: 198170 - RNA, 1701 nt, Artificial Sequence
  derived and/or modified CDS sequence (opt5) from hemagglutinin__InfluenzaA__ADO12513
augaaggccauccuggugguccuccuguacaccuucgcuacagccaacgcggacacgcuuugcauuggcuaucacgcuaauaacagcaccgauacaguugacaccgugcuggagaaaaaugugacagucacccauuccgugaaccuccuggaagauaagcacaaugggaaacuuuguaagcugagagagguugcuccccuccaucugggaaaaugcaacaucgccggcuggauucuggggaauccugaaugugagucucucagcacagccuccucuuggagcuacaucguggaaaccuccucuagcgacaacggaacgugcuauccgggcgauuuuauugacuacgaggagcugcgggaacagcuuuccagcgucucuuccuucgagcgcuuugaaaucuuccccaagaccagcucuuggccuaaucacgauuccaacaagggggugacagccgcuuguccccaugccggagcgaaaucuuuuuauaagaaucugaucuggcucguuaaaaagggcaacagcuacccuaaacuguccaagagcuauauuaaugacaagggcaaagaggugcuuguccugugggggauccaccaccccuccaccucugccgaucaacagagccucuaccagaacgcugacgccuacguguucgugggaacauccagauauagcaagaaauuuaagccugagauugcuauccggccgaaaguccgcgaucaggaaggcagaaugaauuacuauuggacccugguugagcccggggacaagauuacguucgaagccacaggaaaccugguggugccucgguacgcguuugccauggagcgcaacgcuggcucugggaucauuaucuccgauacccccguccaugacugcaauacaaccugucaaaccccuaaaggagccaucaacacaagccuccccuuccagaauauucacccgaucacgauuggcaagugcccuaaguaugugaaaucuaccaagcugagacuugcuacaggccugcggaacguucccagcauccagucccgcgggcucuuuggagccauugccggcuucaucgaagggggauggaccggcaugguggacgggugguacggauaucaucaccagaaugagcaaggcucuggcuacgcugcggaucugaaaagcacacagaacgccaucgacgagauuaccaauaaggucaacuccgugaucgaaaagaugaauacgcaguuuacagcuguugggaaggaguucaaccaccuugaaaagagaauugagaaucugaacaaaaagguggaugacggauuccucgauaucuggaccuacaaugccgaacugcugguccuccuggagaacgagcggacccuugacuaucaugauagcaaugugaaaaaccuguacgaaaagguccgcucucagcucaaaaacaaugccaaggagauuggcaacggguguuuugaguucuaucacaagugcgacaauacauguauggaauccgugaaaaacggaaccuacgauuauccuaaguacagcgaagaggcuaaacugaauagagaggaaaucgacggcguuaaacuugagucuacacggaucuaucaaauucuggccaucuacuccacgguggcgagcucccucguccuggugguuucucugggggcuauuagcuuuuggaugugcuccaacggcucucuccagugccgcaucuguauuuga

SEQ ID NO: 198171 - RNA, 1701 nt, Artificial Sequence; identical to SEQ ID NO: 194741
  derived and/or modified CDS sequence (opt5) from hemagglutinin__InfluenzaA__ADO12523

SEQ ID NO: 198172 - RNA, 1701 nt, Artificial Sequence
  derived and/or modified CDS sequence (opt5) from hemagglutinin__InfluenzaA__ADO12533
augaaggccauccuggugguccuccuguacaccuucgcuacagccaacgcggacacgcuuugcauuggcuaucacgcuaauaacagcaccgauacaguugacaccgugcuggagaaaaaugugacagucacccauuccgugaaccuccuggaagauaagcacaaugggaaacuuuguaagcugagaggaguugcuccccuccaucugggcaaaugcaacaucgccggguggauucugggaaauccugagugugaaucucucagcacagccuccucuuggagcuacaucguggagaccuccucuagcgacaacggcacgugcuauccgggggauuuuauugacuacgaagaacugcgggagcagcuuuccagcgucucuuccuucgaacgcuuugagaucuuccccaagaccagcucuuggccuaaucacgauuccaacaagggagugacagccgcuuguccccaugccggcgcgaaaucuuuuuauaagaaucugaucuggcucguuaaaaagggcaacagcuacccuaaacuguccaagagcuauauuaaugacaaggggaaagaagugcuuguccuguggggaauccaccaccccuccaccucugccgaucaacagagccucuaccagaacgcugacgccuacguguucgugggcacauccagauauagcaagaaauuuaagccugagauugcuauccggccgaaaguccgcgaucaggaggggagaaugaauuacuauuggacccugguugaacccggagacaagauuacguucgaggccacaggcaaccugguggugccucgguacgcguuugccauggaacgcaacgcugggucuggaaucauuaucuccgauacccccguccaugacugcaauacaaccugucaaaccccuaaaggcgccaucaacacaagccuccccuuccagaauauucacccgaucacgauuggcaagugcccuaaguaugugaaaucuaccagacugcggcuugcuacagggcugcgcaacguucccagcauccaguccagaggacucuuuggcgccauugccggguucaucgagggaggcuggaccgggaugguggacggaugguacggcuaucaucaccagaaugaacaaggcucuggguacgcugcggaucuuaagagcacacagaacgccaucgacgagauuaccaauaaagucaacuccgugaucgagaagaugaauacgcaguuuacagcuguuggaaaagaguucaaccaccuggagaagcggauugaaaaucugaacaagaaaguggaugacggcuuccucgauaucuggaccuacaaugccgagcugcugguccuccuggaaaacgagcgcacccuugacuaucaugauagcaaugugaagaaccuguacgagaaagucagaucucagcucaagaacaaugccaaagaaauugggaacggauguuuugaguucuaucacaagugcgacaauacauguauggaauccgugaagaacggcaccuacgauuauccuaaauacagcgaggaagcuaagcugaaucgggaggagaucgacgggguuaaacuugaaucuacacgcaucuaucaaauucuggccaucuacuccacgguggcgagcucccucguccuggugguuucucugggcgcuauuagcuuuuggaugugcuccaacggaucucuccagugcagaaucuguauuuga

SEQ ID NO: 198173 - RNA, 1701 nt, Artificial Sequence; identical to SEQ ID NO: 194741
  derived and/or modified CDS sequence (opt5) from hemagglutinin__InfluenzaA__ADO12543

SEQ ID NO: 198174 - RNA, 1701 nt, Artificial Sequence; identical to SEQ ID NO: 194741
  derived and/or modified CDS sequence (opt5) from hemagglutinin__InfluenzaA__ADO12553

SEQ ID NO: 198175 - RNA, 1701 nt, Artificial Sequence; identical to SEQ ID NO: 194741
  derived and/or modified CDS sequence (opt5) from hemagglutinin__InfluenzaA__ADO12563

SEQ ID NO: 198176 - RNA, 1701 nt, Artificial Sequence; identical to SEQ ID NO: 194741
  derived and/or modified CDS sequence (opt5) from hemagglutinin__InfluenzaA__ADO12573

SEQ ID NO: 198177 - RNA, 1701 nt, Artificial Sequence
  derived and/or modified CDS sequence (opt5) from hemagglutinin__InfluenzaA__ADO12593
augaaggccauccuggugguccuccuguacaccuucgcuacagccaacgcggacacgcuuugcauuggcuaucacgcuaauaacagcaccgauaucguugacacagugcuggagaagaaugugaccgucacacauuccgugaaccuccuggaagauaagcacaaugggaaacuuuguaagcugagaggaguugcuccccuccaucugggcaaaugcaacauugccggguggauccugggaaauccugagugugaaucucucagcaccgccuccucuuggagcuacauuguggagacauccucuagcgacaacggaaccugcuauccgggggauuuuaucgacuacgaagaacugcgggagcagcuuuccagcgucucuuccuucgaacgcuuugagaucuuccccaagacgagcucuuggccuaaucacgauuccaacaagggagugaccgccgcuuguccccaugccggcgcgaaaucuuuuuauaagaaucugauuuggcucguuaaaaagggcaacagcuacccuaaacuguccaagagcuauaucaaugacaaggggaaagaagugcuuguccuguggggcauucaccaccccuccacaucugccgaucaacagagccucuaccagaacgcugacgccuacguguucgugggcaccuccagauauagcaagaaauuuaagccugagaucgcuauucggccgaaaguccgcgaucaggaggggagaaugaauuacuauuggacacugguugaacccggagacaagaucaccuucgaggccacgggcaaccugguggugccucgguacgcguuugccauggaacgcaacgcugggucuggaauuaucaucuccgauacacccguccaugacugcaauaccacaugucaaaccccuaaaggcgccauuaacaccagccuccccuuccagaauauccacccgauuacaaucggcaagugcccuaaguaugugaaaucuacgaagcugagacuugcuaccgggcugcggaacguucccagcauucagucccgcggacucuuuggcgccaucgccggguucaucgagggaggcuggacagggaugguggacggaugguacggcuaucaucaccagaaugaacaaggcucuggguacgcugcggaucugaaaagcacccagaacgccauugacgagaucacaaauaaggucaacuccgugauugagaaaaugaauacccaguuuacggcuguuggaaaggaguucaaccaccuugagaagagaaucgaaaaucugaacaaaaagguggaugacggcuuccucgauauuuggacauacaaugccgagcugcugguccuccuggaaaacgagcggacccuugacuaucaugauagcaaugugaaaaaccuguacgagaagguccgcucucagcucaaaaacaaugccaaggaaaucgggaacggauguuuugaguucuaucacaagugcgacaauaccuguauggaauccgugaaaaacggcacauacgauuauccuaaguacagcgaggaagcuaaacugaauagagaggagaucgacgggguuaaacuugaaucuacccggauuuaucaaauccuggccauuuacuccacaguggcgagcucccucguccuggugguuucucugggcgcuaucagcuuuuggaugugcuccaacggaucucuccagugccgcauuuguaucuga

SEQ ID NO: 198178 - RNA, 1701 nt, Artificial Sequence; identical to SEQ ID NO: 194741
  derived and/or modified CDS sequence (opt5) from hemagglutinin__InfluenzaA__ADO12603

SEQ ID NO: 198179 - RNA, 1701 nt, Artificial Sequence; identical to SEQ ID NO: 194741
  derived and/or modified CDS sequence (opt5) from hemagglutinin__InfluenzaA__ADO12613

SEQ ID NO: 198180 - RNA, 1701 nt, Artificial Sequence; identical to SEQ ID NO: 194741
  derived and/or modified CDS sequence (opt5) from hemagglutinin__InfluenzaA__ADO12623

SEQ ID NO: 198181 - RNA, 1701 nt, Artificial Sequence
  derived and/or modified CDS sequence (opt5) from hemagglutinin__InfluenzaA__ADO14349
augaaggccauccuggugguccuccuguacaccuucgcuacagccaacgcggacacgcuuugcauuggcuaucacgcuaauaacagcaccgauacaguugacaccgugcuggagaagaaugugacagucacccauuccgugaaccuccuggaagauaagcacaaagggaaacuuuguaagcugagaggaguugcuccccuccaucugggcaagugcaauaucgccggguggauucugggaaacccugagugugaaucucucagcacagccuccucuuggagcuacaucguggagaccuccucuagcgacaagggcacgugcuauccgggggauuuuauugacuacgaagaacugcgggagcagcuuuccagcgucucuuccuucgaacgcuuugagaucuuccccaaaaccagcucuuggccuaaucacgauuccaacaagggagugacagccgcuuguccccaugccggcgcgaaaucuuuuuauaagaaucugaucuggcucguuaaaaagggcaacagcuacccuaagcuguccaaaagcuauauuaaugacaaggggaaagaagugcuuguccuguggggaauccaccaccccuccaccucugccgaucaacagagccucuaccagaacgcugacgccuacguguucgugggcacauccagauauagcaagaaauuuaagccugagauugcuauccggccgaaaguccgcgaucaggaggggagaaugaauuacuauuggacccugguugaacccggagacaagauuacguucgaggccacaggcaaccugguggugccucgguacgcguuugccauggaacgcaaugcugggucuggaaucauuaucuccgauacccccguccaugacugcaacacaaccugucaaaccccuaagggcgccaucaacacaagccuccccuuccagaauauucacccgaucacgauuggcaaaugcccuaaguaugugaaaucuaccaagcugagacuugcuacagggcugcggaacauccccagcauucagucccgcggacucuuuggcgccaucgccggguucaucgagggaggcuggaccgggaugguugacggaugguacggcuaucaucaccagaaugaacaaggcucuggguacgcugcggaucugaaaagcacacagaacgccauugacgagaucaccaauaaggugaacuccgucauugagaagaugaauacgcaguuuacagcugugggaaaagaguucaaccaccuugagaagagaaucgaaaaucugaacaaaaagguugaugacggcuuccucgauauuuggaccuacaaugccgagcugcuggugcuccuggaaaacgagcggacccuugacuaucaugauagcaaugucaaaaaccuguacgagaaggugcgcucucagcucaagaauaacgccaaagaaaucgggaacggauguuuugaguucuaucacaagugcgacaauacauguauggaauccgucaaaaacggcaccuacgauuauccuaaguacagcgaggaagcuaaacugaauagagaggagaucgacggggugaaacuugaaucuacacggauuuaucaaauccuggccauuuacuccacgguugcgagcucccucgugcuggucgugucucugggcgcuaucagcuuuuggaugugcuccaacggaucucuccagugccgcauuuguaucuga

SEQ ID NO: 198182 - RNA, 1701 nt, Artificial Sequence; identical to SEQ ID NO: 197005
  derived and/or modified CDS sequence (opt5) from hemagglutinin__InfluenzaA__ADO14351

SEQ ID NO: 198183 - RNA, 1701 nt, Artificial Sequence
  derived and/or modified CDS sequence (opt5) from hemagglutinin__InfluenzaA__ADO14353
augaaggccauccuggugguccuccuguacaccuucgcuacagccaacgcggacacgcuuugcauuggcuaucacgcuaauaacagcaccgauacaguugacaccgugcuggagaaaaaugugacagucacccauuccgugaaccuccuggaagauaagcacaaugggaaacuuuguaagcugagaggaguugcuccccuccaucugggcaaaugcaacaucgccggguggauucugggaaauccugagugugaaucucucagcacagccuccucuuggagcuacaucguggagaccuccucuagcgacaacggcacgugcuauccgggggauuuuauugacuacgaagaacugcgggagcagcuuuccagcgucucuuccuucgaacgcuuugagaucuuccccaagaccagcucuuggccuaaucacgauuccaacaagggagugacagccgcuuguccccaugccgaagcgaaaucuuuuuauaagaaucugaucuggcucguuaaaaagggcaacagcuacccuaaacuguccaagagcuauauuaaugacaagggcaaagaggugcuuguccugugggggauccaccaccccuccaccucugccgaucaacagagccucuaccagaacgcugacgccuacguguucgugggaacauccagauauagcaagaaauuuaagccugagauugcuauccggccgaaaguccgcgaucaggaaggcagaaugaauuacuauuggacccugguugagcccggggacaagauuacguucgaagccacaggaaaccugguggugccucgguacgcguuugccauggagcgcaacgcuggcucugggaucauuaucuccgauacccccguccaugacugcaauacaaccugucaaaccccuaaaggagccaucaacacaagccuccccuuccagaauauucacccgaucacgauuggcaagugcccuaaguaugugaaaucuaccaagcugagacuugcuacaggccugcggaacauccccagcauucagucccgcgggcucuuuggagccaucgccggcuucaucgaagggggauggaccggcaugguugacgggugguacggauaucaucaccagaaugagcaaggcucuggcuacgcugcggaucugaaaagcacacagaacgccauugacgagaucaccaauaaggugaacuccgucauugaaaagaugaauacgcaguuuacagcuguggggaaggaguucaaccaccuugaaaagagaaucgagaaucugaacaaaaagguugaugacggauuccucgauauuuggaccuacaaugccgaacugcuggugcuccuggagaacgagcggacccuugacuaucaugauagcaaugucaaaaaccuguacgaaaaggugcgcucucagcucaaaaacaaugccaaggagaucggcaacggguguuuugaguucuaucacaagugcgacaauacauguauggaguccgucaaaaacggaaccuacgauuauccuaaguacagcgaagaggcuaaacugaauagagaggaaaucgacggcgugaaacuugagucuacacggauuuaucaaauccuggccauuuacuccacgguugcgagcucccucgugcuggucgugucucugggggcuaucagcuuuuggaugugcuccaacggcucucuccagugccgcauuuguaucuga

SEQ ID NO: 198184 - RNA, 1701 nt, Artificial Sequence
  derived and/or modified CDS sequence (opt5) from hemagglutinin__InfluenzaA__ADO14354
augaaggccauccuggugguccuccuguacaccuucgcuacagccaacgcggacacgcuuugcaugggcuaucacgcuaauaacagcaccgauacaguugacaccgugcuggagaaaaaugugacagucacccauuccgugaaccuccuggaagauaagcacaaugggaaacuuuguaagcugagaggaguugcuccccuccaucugggcaaaugcaacauugccggguggauccugggaaauccugagugugaaucucucagcacagccuccucuuggagcuacauuguggagaccuccucuagcgacaacggcacgugcuauccgggggauuuuaucgacuacgaagaacugcgggagcagcuuuccagcgucucuuccuucgaacgcuuugagauuuuccccaagaccagcucuuggccuaaucacgauuccaacaagggagugacagccgcuuguccccaugccggcgcgaaaucuuuuuauaagaaucugaucuggcucguuaaaaagggcaacagcuacccuaaacuguccaagagcuauaucaaugacaaggggaaagaagugcuuguccuguggggcauucaccaccccuccaccucugccgaucaacagagccucuaccagaacgcugacgccuacguguucgugggaacauccagauauagcaagaaauuuaagccugagaucgcuauucggccgaaaguccgcgagcaggaagggagaaugaauuacuauuggacccugguugagcccggagauaagaucacguucgaagccacaggcaaccugguggugccucgguacgcguuugccauggagcgcaacgcugggucuggaauuaucauuuccgacacccccguccaugauugcaauacaaccugucaaaccccuaaaggcgccaucaacacaagccuccccuuccagaauauccacccgauuacgaucggcaagugcccuaaguaugugaaaucuaccaagcugagacuugcuacagggcugcggaacguucccagcauucagucccgcggacucuuuggcgccaucgccggguucauugaaggaggcuggaccgggaugguggacggaugguacggcuaucaucaccagaaugagcaaggcucuggguacgcugcggaccugaaaagcacacagaacgccaucgaugagaucaccaauaaggucaacuccgugauugaaaagaugaauacgcaguuuacagcuguuggaaaggaguucaaccaccuugaaaagagaaucgagaaucugaacaaaaagguggacgauggcuuccucgacauuuggaccuacaaugccgaacugcugguccuccuggagaacgagcggacccuugauuaucaugacagcaaugugaaaaaccuguacgaaaagguccgcucucagcucaaaaacaaugccaaggagaucgggaacggauguuuugaguucuaucacaagugcgauaauacauguauggaguccgugaaaaacggcaccuacgacuauccuaaguacagcgaagaggcuaaacugaauagagaggaaauugaugggguuaaacuugagucuacacggaucuaucaaauccuggccauuuacuccacgguggcgagcucccucguccuggugguuucucugggcgcuaucagcuuuuggaugugcuccaacggaucucuccagugccgcauuuguaucuga

SEQ ID NO: 198185 - RNA, 1701 nt, Artificial Sequence
  derived and/or modified CDS sequence (opt5) from hemagglutinin__InfluenzaA__ADO14356
augaaggccauccuggugguccuccuguacaccuucgcuacagccaacgcggacacgcuuugcauuggcuaucacgcuaauaacagcaccgauacaguugacaccgugcuggagaaaaaugugacagucacccauuccgugaaccuccuggaagauaagcacaaugggaaacuuuguaagcugagaggaguugcuccccuccaucugggcaaaugcaacaucgccggguggauucugggaaauccugagugugaaucucucagcacagccuccucuuggagcuacaucguggagaccuccucuagcgacaacggcacgugcuauccgggggauuuuauugacuacgaagaacugcgggagcagcuuuccagcgucucuuccuucgaacgcuuugagaucuuccccaagaccagcucuuggccuaaucacgauuccaacaagggagugacagccgcuuguccccaugccggcgcgaaaucuuuuuauaagaaucugaucuggcucguuaaaaagggcaacagcuacccuaaacuguccaagagcuauauuaaugacaaggggaaagaagugcuuguccuguggggaauccaccaccccuccaccucugccgaucaacagagccucuaccagaacgcugacgccuacguguucgugggcacauccagauauagcaagaaauuuaagccugagauugcuauccggccgaaaguccgcgggcaggagggaagaaugaauuacuauuggacccugguugaacccggcgauaagauuacguucgaggccacagggaaccugguggugccucgguacgcguuugccauggaacgcaacgcuggaucuggcaucauuaucuccgacacccccguccaugauugcaauacaaccugucaaaccccuaaaggcgccaucaacacaagccuccccuuccagaauauucacccgaucacgauugggaagugcccuaaguaugugaaaucuaccaagcugagacuugcuacaggacugcggaacauccccagcauucagucccgcggccucuuuggggccaucgccggauucaucgagggcggguggaccggaaugguugacggcugguacggcuaucaucaccagaaugaacaagggucuggauacgcugcggaccugaaaagcacacagaacgccauugaugagaucaccaauaaggugaacuccgucauugagaaaaugaauacgcaguuuacagcugugggcaaggaguucaaccaccuugagaagagaaucgaaaaucugaacaaaaagguugacgauggguuccucgacauuuggaccuacaaugccgagcugcuggugcuccuggaaaacgagcggacccuugauuaucaugacagcaaugucaaaaaccuguacgagaaggugcgcucucagcucaaaaacaaugccaaggaaaucggaaacggcuguuuugaguucuaucacaagugcgauaauacauguauggaauccgucaaaaacgggaccuacgacuauccugaguacagcgaagaggcuaagcugaauagagaggaaaucgauggcgugaaacuugagucuacacggauuuaucaaauccuggccauuuacuccacgguugcgagcucccucgugcuggucgugucucugggagcuaucagcuuuuggaugugcuccaacggcucucuccagugccgcauuuguaucuga

SEQ ID NO: 198186 - RNA, 1701 nt, Artificial Sequence; identical to SEQ ID NO: 197005
  derived and/or modified CDS sequence (opt5) from hemagglutinin__InfluenzaA__ADO14357

SEQ ID NO: 198187 - RNA, 1701 nt, Artificial Sequence
  derived and/or modified CDS sequence (opt5) from hemagglutinin__InfluenzaA__ADO14359
augaaggccauccuggugguccuccuguacaccuucgcuacagccaacgcggacacgcuuugcauuggcuaucacgcuaauaacagcaccgauacaguugacaccgugcuggagaaaaaugugacagucacccauuccgugaaccuccuggaagauaagcacaaugggaaacuuuguaagcugagaggaguugcuccccuccaucugggcaaaugcaacaucgccggguggauucugggaaauccugagugugaaucucucagcacagccuccucuuggagcuacaucguggagaccuccucuagcgacaacggcacgugcuauccgggggauuuuauugacuacgaagaacugcgggagcagcuuuccagcgucucuuccuucgaacgcuuugagaucuuccccaagaccagcucuuggccuaaucacgauuccaacaagggagugacagccgcuuguccccaugccggcgcgaaaucuuuuuauaagaaucugaucuggcucguuaaaaagggcaacagcuacccuaaacuguccaagagcuauauuaaugacaaggggaaagaagugcuuguccuguggggaauccaccaucccccuaccuccgccgaucaacagucucucuaccagaacgcugacgccuacguguucgugggcacaagcagauauuccaagaaauuuaagccggagauugcuauccggcccaaaguccgcgaucaggaggggagaaugaauuacuauuggacccugguugaaccuggagacaagauuacguucgaggccacaggcaaccugguggugccccgguacgcguuugccauggaacgcaacgcugggagcggaaucauuaucucugauaccccuguccacgacugcaauacaaccugucaaacccccaaaggcgccaucaacacaucccucccguuccagaauauucacccuaucacgauuggcaagugccccaaguaugugaaaagcaccaagcugagacuugcuacagggcugcggaacguuccuucuauccagagccgcggacucuuuggcgccauugccggguucaucgagggaggcuggaccgggaugguggacggaugguacggcuaucaucaccagaaugaacaaggcuccggguacgcugcggaucugaaaucuacacagaacgccaucgacaagauuaccaauaaagucaacagcgugaucgagaagaugaauacgcaguuuacagcuguuggaaaggaguucaaccaccuugagaaaagaauugagaaucugaacaagaaaguggaugacggcuuccucgauaucuggaccuacaaugccgaacugcugguccuccuggagaacgaacggacccuugacuaucaugauuccaaugugaagaaccuguacgagaaaguccgcagccagcucaagaacaaugccaaggagauugggaacggauguuuugaguucuaucacaaaugcgacaauacauguauggaaucugugaagaacggcaccuacgauuaucccaaauacuccgaagaggcuaagcugaauagagaagagaucgacgggguuaaacuugagagcacacggaucuaucaaauucuggccaucuacucuacgguggcguccagccucguccuggugguuucccugggcgcuauuucuuuuuggaugugcagcaacggaucccuccagugccgcaucuguauuuga

SEQ ID NO: 198188 - RNA, 1701 nt, Artificial Sequence
  derived and/or modified CDS sequence (opt5) from hemagglutinin__InfluenzaA__ADO14361
augaaggccauccuggugguccuccuguacaccuucgcuacagccaacgcggacacgcuuugcauuggcuaucacgcuaauaacagcaccgauacaguugacaccgugcuggagaaaaaugugacagucacccauuccgugaaccuccuggaagauaagcacaaugggaaacuuuguaagcugagaggaguugcgccccuccaucugggcaaaugcaacaucgccggguggauucugggaaauccugagugugaaucucucagcacagcuuccucuuggagcuacaucguggagaccuccucuagcgacaagggcacgugcuauccgggggauuuuauugacuacgaagaacugcgggagcagcuuuccagcgucucuuccuucgaacgcuuugagaucuuccccaagaccagcucuuggccuaaccacgauuccaauaaaggagugacagccgcuuguccccaugccggcgccaagagcuuuuauaaaaaccugaucuggcucguuaagaaaggcaauucuuacccuaagcuguccaagagcuauauuaacgacaaagggaaggaagugcuuguccuguggggaauccaccaccccuccaccucugccgaucaacagagccucuaccagaaugcugacgccuacguguucgugggcacauccagauauagcaaaaaguuuaaaccugagauugcuauccggccgaagguccgcgaucaggaggggagaaugaacuacuauuggacccugguugaacccggagacaaaauuacguucgaggccacaggcaaucugguggugccucgguacgcguuugccauggaacgcaacgcugggucuggaaucauuaucuccgauacccccguccaugacugcaacacaaccugucaaaccccuaagggcgccaucaauacaagccuccccuuccagaacauucacccgaucacgauuggcaagugcccuaaauaugugaagucuaccaaacugagacuugcuacagggcugcggaauauccccagcauucagucccgcggacucuuuggcgccaucgccggguucaucgagggaggcuggaccgggaugguugacggaugguacggcuaucaucaccagaacgaacaaggcucuggguacgcugcggaucugaaguccacacagaaugccauugacgagaucaccaacaaagugaauagcgucauugagaagaugaacacgcaguuuacagcugugggaaaggaguucaaucaccuugagaaaagaaucgaaaaccugaauaagaaaguugaugacggcuuccucgauauuuggaccuacaacgccgagcugcuggugcuccuggaaaaugagcggacccuugacuaucaugauagcaacgucaagaaucuguacgagaaagugcgcucucagcucaagaacaacgccaaggaaaucgggaauggauguuuugaguucuaucacaaaugcgacaacacauguauggaauccgucaagaauggcaccuacgauuauccuaaauacagcgaggaagcuaagcugaacagagaggagaucgacggggugaaacuugaaucuacacggauuuaucaaauccuggccauuuacuccacgguugcgagcucccucgugcuggucgugucucugggcgcuaucagcuuuuggaugugcuccaauggaucucuccagugccgcauuuguaucuga

SEQ ID NO: 198189 - RNA, 1701 nt, Artificial Sequence
  derived and/or modified CDS sequence (opt5) from hemagglutinin__InfluenzaA__ADO14362
augaaggccauccuggugguccuccuguacaccuucgcuacagccaacgcggacacgcuuugcauuggcuaucacgcuaauaacagcaccgauacaguugacaccgugcuggagaagaaugugacagucacccauuccgugaaccuccuggaagauaagcacaaugggaaacuuuguaagcugagaggaguugcuccccuccaucugggcaaaugcaacaucgccggguggauucugggaaauccugagugugaaucucucagcacagccuccucuuggagcuacaucguggagaccuccucuagcgacaacggcacgugcuauccgggggauuuuauugacuacgaagaacugcgggagcagcuuuccagcgucucuuccuucgaacgcuuugagaucuuccccaagaccagcucuuggccuaaucacgauuccaacaagggagugacagccgcuuguccccaugccggcgcgaaaucuuuuuauaagaaucugaucuggcucguuaaaaagggcaacagcuacccuaaacuguccaagagcuauauuaaugacaaggggaaagaagugcuuguccuguggggaauccaccaccccuccaacucugccgaucaacagagccucuaccagaaugcugacgccuacguguucgugggcaccuccagauauagcaagaaauuuaagccugagauugcuauccggccgaaaguccgcgaucaggaggggagaaugaacuacuauuggacacugguugaacccggagacaagauuaccuucgaggccacgggcaaccugguggugccucgguacgcguuugccauggaacgcaaugcugggucuggaaucauuaucuccgauacacccguccaugacugcaacaccacaugucaaaccccuaaaggcgccaucaauaccagccuccccuuccagaacauucacccgaucacaauuggcaagugcccuaaguaugugaaaucuacgaagcugagacuugcuaccgggcugcggaauguucccagcauccagucccgcggacucuuuggcgccauugccggguucaucgagggaggcuggacagggaugguggacggaugguacggcuaucaucaccagaacgaacaaggcucuggguacgcugcggaucugaaaagcacccagaaugccaucgacgagauuacaaacaaggucaauuccgugaucgagaaaaugaacacccaguuuacggcuguuggaaaggaguucaaucaccuugagaagagaauugaaaaccugaauaaaaagguggaugacggcuuccucgauaucuggacauacaacgccgagcugcugguccuccuggaaaaugagcggacccuugacuaucaugauagcaacgugaaaaaccuguacgagaagguccgcucucagcucaaaaauaacgccaaggaaauugggaauggauguuuugaguucuaucacaagugcgacaacaccuguauggaauccgugaaaaauggcacauacgauuauccuaaguacagcgaggaagcuaaacugaacagagaggagaucgacgggguuaaacuugaaucuacccggaucuaucaaauucuggccaucuacuccacaguggcgagcucccucguccuggugguuucucugggcgcuauuagcuuuuggaugugcuccaauggaucucuccagugccgcaucuguauuuga

SEQ ID NO: 198190 - RNA, 1683 nt, Artificial Sequence
  derived and/or modified CDS sequence (opt5) from hemagglutinin__InfluenzaA__ADO21015
auggagguggucagccugaucaccauucuccugcuuguuacaguguccaacgccgacaagaucugcauuggcuaccagucuacgaauagcaccgaaacaguggauacccugacagagaacaauguccccguggcucacgccaaagaacuccugcauaccgagcacaacgggaugcuuugugcgacaaaucugggacauccucucauccuggauaccugcacgauugaaggccugaucuaugggaacccguccugugaccuccugcuuggaggcagagaguggucuuacaucguugagcggcccagcgcugugaaugggcugugcuauccuggaaacgucgaaaaucucgaggaacugcgcucccuuuucucuagcgccuccagcuaccaacggauucagaucuuucccggcaccauuuggaacgugucuuauggcgggacauccaaggccuguagcgacucuuucuacaaauccaugagauggcugacccagaagaauaacgcuuauccuauccaggaugcccaauacacaaauaaccgcgggaaaaauauucucuuuauguggggcaucaaccaucccccuaccgacacgacacagaccaaccuguacacaagaaccgauaccacaacgagcguugcuaccgaggacauuaaucggacauucaagccgcugaucgggccccgcccucucgugaacggacagcagggcagaaucgauuauuacuggucuguccugaagcccgggcaaacccuucgggugcgcuccaauggaaaccugauugccccuugguauggccacauccucagcggcgagucccacgggcggauucugaaaacagaccuuaauucuggaaacugcgugguccagugucagaccgaaagaggcgggcugaauacgacacuccccuuucacaacguuagcaaguacgcguucggaaauugcccgaaauaugugggcgugaagucccugaaacuggccgucgggcuccgcaacgugccugcuagaagcucucggggacuguuuggcgccaucgcuggcuucauugagggaggaugguccggccuuguugccgggugguacggauuucagcauagcaaugaucaaggcguggggauggcggccgaccgcgauucuacccagaaggcuaucgacaagaucaccagcaaagucaacaauauuguggacaagaugaacaaacaguaugaaaucauugaucacgaguucuccgaaguugagacaagacugaauaugaucaacaacaagauugacgaucaaauccaggacaucugggccuacaaugcugagcuccuggugcuucuggaaaaccagaaaacccucgaugagcaugacgccaaugucaacaaucuguacaacaaggugaaacgggcccugggcucuaaugcugucgaagauggaaagggcuguuuugagcucuaucacaagugcgacgaucaguguauggaaacaauuagaaacgggacguacaaucgccggaaauauaaggaggagagcagacuggaacgccaaaagaucgagggagugaaacuugaauccgagggcaccuacaaaauucugacaaucuauagcaccguugcgucuucccucgugauugccaugggguucgcugccuuucuguucugggccaugagcaacggaucuugccggugcaauaucuguauuuga

SEQ ID NO: 198191 - RNA, 1683 nt, Artificial Sequence
  derived and/or modified CDS sequence (opt5) from hemagglutinin__InfluenzaA__ADO21026
auggagguggucagccugaucaccauucuccugcuuguuacaguguccaacgccgacaagaucugcauuggcuaccagucuacgaauagcaccgaaacaguggauacccugacagagaacaauguccccguggcucacgccaaagaacuccugcauaccgagcacaacgggaugcuuugugcgacaaaucugggacauccucucauccuggauaccugcacgauugaaggccugaucuaugggaacccguccugugaccuccugcuuggaggcagagaguggucuuacaucguugagcggcccagcgcugugaaugggcugugcuauccuggaaacgucgaaaaucucgaggaacugcgcucccuuuucucuagcgccuccagcuaccaacggauucagaucuuucccggcaccauuuggaacgugucuuauggcgggacauccaaggccuguagcgacucuuucuacaaauccaugagauggcugacccagaagaauaacgcuuauccuauccaggaugcccaauacacaaauaaccgcgggaaaaauauucucuuuauguggggcaucaaccaucccccuaccgacacgacacagaccaaccuguacacaagaaccgauaccacaacgagcguugcuaccgaggacauuaaucggacauucaacccgcugaucgggccccgcccucucgugaauggacagcagggcagaaucgauuauuacuggucuguccugaagcccgggcaaacccuucgggugcgcuccaacggaaaucugauugccccuugguauggccacauccucagcggcgagucccacgggcggauucugaagacagaccuuaacucuggaaauugcgugguccagugucagaccgaaagaggcgggcugaacacgacacuccccuuucacaauguuagcaaauacgcguucggaaacugcccgaaguaugugggcgugaaaucccugaagcuggccgucgggcuccgcaaugugccugcuagaagcucucggggacuguuuggcgccaucgcuggcuucauugagggaggaugguccggccuuguugccgggugguacggauuucagcauagcaacgaucaaggcguggggauggcggccgaccgcgauucuacccagaaagcuaucgacaagaucaccagcaaggucaauaacauuguggacaaaaugaauaagcaguaugaaaucauugaucacgaguucuccgaaguugagacaagacugaacaucauuaacaauaaaaucgacgaucaaauccaggacauuugggccuacaacgcugagcuccuggugcuucuggaaaaucagaagacccucgaugagcaugacgccaacgucaauaaccuguacaauaaagugaagcgggcccugggcucuaacgcugucgaagauggaaaaggcuguuuugagcucuaucacaagugcgacgaucaguguauggaaacaaucagaaaugggacguacaaccgccggaaguauaaagaggagagcagacuggaacgccaaaagauugagggagugaaacuugaauccgagggcaccuacaagauccugacaauuuauagcaccguugcgucuucccucgugaucgccaugggguucgcugccuuucuguucugggccaugagcaauggaucuugccggugcaacauuuguaucuga

SEQ ID NO: 198192 - RNA, 1683 nt, Artificial Sequence
  derived and/or modified CDS sequence (opt5) from hemagglutinin__InfluenzaA__ADO21037
auggagguggucagccugaucaccauucuccugcuuguuacaguguccaacgccgacaagaucugcauuggcuaccagucuacgaauagcaccgaaacaguggauacccugacagagaacaauguccccguggcucacgccaaagaacuccugcauaccgagcacaacgggaugcuuugugcgacaaaucugggacauccucucauccuggauaccugcacgauugaaggccugaucuaugggaacccguccugugaccuccugcuuggaggcagagaguggucuuacaucguugagcggcccagcgcugugaaugggcugugcuauccuggaaacgucgaaaaucucgaggaacugcgcucccuuuucucuagcgccuccagcuaccaacggauucagaucuuucccggcaccauuuggaacgugucuuauggcgggacauccaaggccuguagcgacucuuucuacaaauccaugagauggcugacccagaagaauaacgcuuauccuauccaggaugcccaauacacaaauaaccgcgggaaaaauauucucuuuauguggggcaucaaccaucccccuaccgacacgacacagaccaaccuguacacaagaaccgauaccacaacgagcguugcuaccgaggacauuaaucggacauucaagccguauaucgggccccgcccucuggugaacggacagcagggcagaaucgauuacuauuggucuguccucaagcccgggcaaacccugcgggugcgcuccaauggaaaccuuauugccccuugguacggccacauccugagcggcgagucccacgggcggauucucaaaacagaccuuaauucuggaaacugcgugguccagugucagaccgaaagaggcgggcugaauacgacacugcccuuucacaacguuagcaaguaugcguucggaaauugcccgaaauacgugggcgugaagucccucaaacuggccgucgggcugcgcaacgugccugcuagaagcucucggggacucuuuggcgccaucgcuggcuucauugagggaggaugguccggccugguugccgggugguauggauuucagcauagcaaugaucaaggcguggggauggcggccgaccgcgaucuuacccagaaggcuaucgacaagaucaccucuaaagucaacaauauuguggacaagaugaacaaacaguacgaaaucauugaucacgaguucagcgaaguugagacaagacugaauaugaucaacaacaagauugacgaucaaauccaggacaucugggccuacaaugcugagcuccuggugcuucuggaaaaccagaaaacccucgaugagcaugacgccaaugucaacaaucuguauaacaaggugaaacgggcccugggcuccaaugcugucgaagauggaaagggcuguuuugagcucuaccacaagugcgacgaucaguguauggaaacaauuagaaacgggacguauaaucgccggaaauacaaggaggagucuagacuggaacgccaaaagaucgagggagugaaacuugaaagcgagggcaccuauaaaauucugacaaucuacuccaccguugcgagcucucucgugauugccaugggguucgcugccuuucuguucugggccauguccaacggaagcugccggugcaauaucuguauuuga

SEQ ID NO: 198193 - RNA, 1683 nt, Artificial Sequence
  derived and/or modified CDS sequence (opt5) from hemagglutinin__InfluenzaA__ADO21048
auggagguggucagccugaucaccauucuccugcuuguuacaguguccaacgccgacaagaucugcauuggcuaccaaucuacgaauagcaccgaaacaguggauacccugacagagaacaauguccccguggcucacgccaaagaacuccugcauaccgagcacaacgggaugcuuugugcgacaaaucugggacauccucucauccuggauaccugcacgauugaaggccugaucuaugggaacccguccugugaccuccugcuuggaggcagagaguggucuuacaucguugagcggcccagcgcugugaaugggcugugcuauccuggaaacgucgaaaaucucgaggaacugcgcucccuuuucucuagcgccuccagcuaccaacggauucagaucuuucccggcaccauuuggaacgugucuuauggcgggacauccaaggccuguagcgacucuuucuacaaauccaugagauggcugacccagaagaauaacgcuuauccuauccaggaugcccaauacacaaauaaccgcgggaaaaauauucacuuuauguggggcaucaaccaucccccuaccgacacgacacagaccaaccucuacacaagaaccgauaccacaacgagcguugcuaccgaggacauuaaucggacauucaagccgcugaucgggccccgcccucuggugaacggacagcagggcagaaucgauuauuacuggucuguccucaagcccgggcaaacccugcgggugcgcuccaauggaaaccuuauugccccuugguauggccacauccugagcggcgagucccacgggcggauucucaaaacagaccuuaauucuggaaacugcgugguccagugucagaccgaaagaggcgggcugaauacgacacugcccuuucauaacguuagcaaguacgcguucggaaauugcccgaaauaugugggcgugaagucccucaaacuggccgucgggcugcgcaacgugccugcuagaagcucucggggacucuuuggcgccaucgcuggcuucauugagggaggaugguccggccugguugccgggugguacggauuucagcacagcaaugaucaaggcguggggauggcggccgaccgcgucucuacccagaaggcuaucgauaagaucaccagcaaagugaacaauauuguugacaagaugaacaaacaguaugaaaucauugaccaugaguucuccgaaguggagacaagacuuaauaugaucaacaacaagauugaugaccaaauccaggauaucugggccuacaaugcugagcugcucguccugcuugaaaaccagaaaacccuggacgagcacgaugccaaugugaacaaucucuacaacaaggucaaacgggcccugggcucuaaugcuguggaagacggaaagggcuguuuugagcuguaucacaagugcgaugaccaguguauggaaacaauuagaaacgggacguacaaucgccggaaauauaaggaggagagcagacucgaacgccagaaaaucgagggaguuaagcuggaauccgagggcaccuacaaaauucuuacaaucuauagcaccguggcgucuucccuggucauugccaugggguucgcugccuuucucuucugggccaugagcaacggaucuugccggugcaauaucuguauuuga

SEQ ID NO: 198194 - RNA, 1701 nt, Artificial Sequence
  derived and/or modified CDS sequence (opt5) from hemagglutinin__InfluenzaA__ADO25092
augaaggccauccuggugguccuccuguacaccuucgcuacagccaacgcggacacgcuuugcauuggcuaucacgcuaauaacagcaccgauacaguugacaccgugcuggagaaaaaugugacagucacccauuccgugaaccuccuggaagauaagcacaaugggaaacuuuguaagcugagaggaguugcuccccuccaucugggcaaaugcaacaucgccggguggauucugggaaauccugagugugaaucucucagcacagccuccucuuggagcuacaucguggagaccuccucuagcgacaacggcacgugcuauccgggggauuuuauugacuacgaagaacugcgggagcagcuuuccagcgucucuuccuucgaacgcuuugagaucuuccccaagaccagcucuuggccuaaucacgauuccaacaagggagugacagccgcuuguccccaugccggcgcgaaauccuuuuauaagaaucugaucuggcucguuaaaaagggcaacucuuacccuaaacuguccaauagcuauauuaacgacaaggggaaggaagugcuuguccuguggggaauccaccaccccuccaccucugccgaucaacagagccucuaccagaaugcugacgccuacguguucgugggcacauccagauauagcaaaaaguuuaaaccugagauugcuauccggccgaagguccgcgaucaggaggggagaaugaacuacuauuggacccugguugaacccggagacaaaauuacguucgaggccacaggcaaccugguggugccucgguacgcguuugccauggaacgcaaugcugggucuggaaucauuaucuccgauacccccgcccaugacugcaacacaaccugucaaaccccuaagggcgcuaucaauacaagccuccccuuccagaacauucacccgaucacgauuggcaaaugcccuaaguaugucaagucuaccaaacugagacuugccacagggcugcggaaugugcccagcauccagucccgcggacucuuuggcgccauugcuggguucaucgagggaggcuggaccgggaugguugacggaugguacggcuaucaucaccagaacgaacaaggcucuggguacgcggccgaucuuaagagcacacagaaugcuaucgacgagauuaccaacaaagugaauagcgucaucgagaagaugaacacgcaguuuacagccgugggaaaagaguucaaucaccuggagaagagaauugaaaaccugaauaagaaaguugaugacggcuuccucgauaucuggaccuacaacgccgagcugcuggugcuccuggaaaaugagcggacccuugacuaucaugauagcaacgucaagaaccuguacgagaaagugcgcucucagcucaagaauaacgcuaaagaaauugggaauggauguuuugaguucuaucacaagugcgacaacacauguauggaauccgucaagaauggcaccuacgauuauccuaaauacagcgaggaagccaagcugaacagagaggagaucgacggggugaaacuugaaucuacacggaucuaucaaauucuggcgaucuacuccacgguugcuagcucccucgugcuggucgugucucugggcgccauuagcuuuuggaugugcuccaauggaucucuccagugccgcaucuguauuuga

SEQ ID NO: 198195 - RNA, 1701 nt, Artificial Sequence; identical to SEQ ID NO: 196613
  derived and/or modified CDS sequence (opt5) from hemagglutinin__InfluenzaA__ADO25112

SEQ ID NO: 198196 - RNA, 1701 nt, Artificial Sequence; identical to SEQ ID NO: 196613
  derived and/or modified CDS sequence (opt5) from hemagglutinin__InfluenzaA__ADO25122

SEQ ID NO: 198197 - RNA, 1701 nt, Artificial Sequence
  derived and/or modified CDS sequence (opt5) from hemagglutinin__InfluenzaA__ADO25132
augaacgccauccuggugguccuccuguacaccuucgcuacagccaaugcggacacgcuuugcauuggcuaucacgcuaacaauagcaccgauacaguugacacccugcucgagaagaacgugacagugacccauuccgucaaucugcuugaagauaaacacaacgggaagcuguguaaacucagaggaguggcgccccugcaucugggcaagugcaauaucgccggguggauucucggaaacccugagugugaaucucugagcacagcuuccucuuggagcuacaucguugagaccuccucuagcgacaauggcacgugcuauccgggggauuuuauugacuacgaggagcuucgggagcagcuguccagcgugucuuccuucgaacgcuuugagaucuuccccaaaaccagcucuuggccuaaccacgauuccaauaagggagucacagccgcuuguccccaugccggcgccaagagcuuuuauaaaaaccucaucuggcuggugaagaaaggcaauucuuacccuaaacuuuccaagagcuauauuaacgacaaggggaaggaaguucuggugcucuggggaauccaccaccccuccaccucugccgaucaacagagccuguaccagaaugcugacgccuacgucuucgugggcacauccagauauagcaaaaaguuuaaaccugagauugcuauccggccgaaggugcgcgaucaggaggggagaaugaacuacuauuggacccuggucgaacccggagacaaaauuacguucgaggccacaggcaaccucguugugccucgguacgcguuugccauggaacgcaaugcugggucugauaucauuaucuccgacacccccgugcaugacugcaacacaaccugucaaaccccuaagggagccaucaauacaagccugcccuuccagaacauucacccgaucacgauuggcaaaugcccuaaguaugucaagucuaccaaacuuagacuggcuacaggccuccggaaugugcccagcauccagucccgcgggcuguuuggagccauugccggcuucaucgaagggggauggaccggcaugguugaugggugguacggauaucaucaccagaacgaacaaggcucuggcuacgcugcggaccuuaagagcacacagaaugccaucgaugagauuaccaacaaaaucaauuccgugauugagaagaugaacacgcaguuuacagcugucgggaaagaguucaaucaccuggaaaagagaaucgaaaaccucaauaagaaaguggacgauggauuccuggacauuuggaccuacaacgccgagcugcucguucugcuugaaaaugagcggacccuggauuaucaugacagcaacgugaagaaccucuacgagaaaguccgcucucagcugaagaauaacgccaaagaaaucggcaauggguguuuugaguucuaucacaagugcgauaacacauguauggaauccgugaagaauggaaccuacgacuauccuaaauacagcgaggaagcuaaacuuaacagagaggagaucgauggcgucaagcuggaaucuacacggauuuaucaaauccucgccauuuacuccacgguggcgagcucccugguucugguggucucucucggggcuaucagcuuuuggaugugcuccaauggcucucugcagugccgcauuuguaucuga

SEQ ID NO: 198198 - RNA, 1701 nt, Artificial Sequence; identical to SEQ ID NO: 196354
  derived and/or modified CDS sequence (opt5) from hemagglutinin__InfluenzaA__ADO25142

SEQ ID NO: 198199 - RNA, 1701 nt, Artificial Sequence
  derived and/or modified CDS sequence (opt5) from hemagglutinin__InfluenzaA__ADO25152
augaaggccauccuggugguccuccuguacaccuucgcugccgcgaacgcugacacacuuugcauuggcuaucacgccaauaacagcacggauaccguugacacagugcuggagaaaaaugugaccgucacacauuccgugaaccuccuggaagauaagcacaaugggaaacuuuguaagcugagaggaguugcuccccuccaucugggcaaaugcaacaucgccggguggauucugggaaauccugagugugaaucucucagcaccgccuccucuuggagcuacaucguggagacauccucuagcgacaacgggaccugcuauccgggcgauuuuauuaauuacgaagaacugcgggagcagcuuuccagcgucucucuguucgaacgcuuugagaucuuccccaagacguccagcuggccuaaccacgacucuaauaagggagugaccgcugccuguccccaugcgggcgccaaauccuuuuauaagaaccucaucuggcugguuaaaaagggcaauagcuacccuaaacuuucuaaguccuauauuaacgauaaggggaaagaagugcugguccucuggggaauccaccaccccagcacauccgcugaccaacagucucuguaccagaaugccgaugcuuacguguucgugggcaccagcagauauuccaagaaauuuaagccugagauugccauccggccgaaaguccgcgaccaggaggggagaaugaacuacuauuggacacugguugaacccggagauaagauuaccuucgaggcgacgggcaaccucguggugccucgguacgccuuugcuauggaacgcaaugccgggagcggaaucauuaucucugacacacccguccaugauugcaacaccacaugucaaaccccuaaaggcgcuaucaauaccucccugcccuuccagaacauucacccgaucacaauuggcaagugcccuaaguaugugaaaagcacgaaacuuagacuggccaccgggcuccggaauguucccucuauccagagccgcggacuguuuggcgccauugcuggguucaucgagggaggcuggacagggaugguggacggaugguacggcuaucaucaccagaacgaacaaggcuccggguacgcggccgaccuuaaaucuacccagaaugcuaucgauaagauuacaaacaaagucaauagcgugaucgagaagaugaacacccaguuuacggccguuggaaaggaguucaaucaccuggaaaagagaauugagaaccucaauaagaaaguggacgauggcuuccuggacaucuggacauacaacgccgaacugcucguccugcuugagaaugaacggacccuggauuaucaugacuccaacgugaagaaccucuacgagaaaguccgcagccagcugaagaauaacgcuaaggagauugggaauggauguuuugaguucuaucacaaaugcgauaacaccuguauggagucugugaagaauggcacauacgacuauccuaaauacuccgaagaggccaaacuuaacagagaagagaucgaugggguuaagcuggagagcacccggaucuaucaaauucucgcgaucuacucuacaguggcuuccagccugguccuggugguuucccucggcgccauuucuuuuuggaugugcagcaauggaucccugcagugccgcaucuguauuuga

SEQ ID NO: 198200 - RNA, 1701 nt, Artificial Sequence; identical to SEQ ID NO: 196293
  derived and/or modified CDS sequence (opt5) from hemagglutinin__InfluenzaA__ADO25162

SEQ ID NO: 198201 - RNA, 1701 nt, Artificial Sequence; identical to SEQ ID NO: 196293
  derived and/or modified CDS sequence (opt5) from hemagglutinin__InfluenzaA__ADO25172

SEQ ID NO: 198202 - RNA, 1701 nt, Artificial Sequence; identical to SEQ ID NO: 196293
  derived and/or modified CDS sequence (opt5) from hemagglutinin__InfluenzaA__ADO25182

SEQ ID NO: 198203 - RNA, 1701 nt, Artificial Sequence; identical to SEQ ID NO: 194741
  derived and/or modified CDS sequence (opt5) from hemagglutinin__InfluenzaA__ADO25192

SEQ ID NO: 198204 - RNA, 1701 nt, Artificial Sequence; identical to SEQ ID NO: 194741
  derived and/or modified CDS sequence (opt5) from hemagglutinin__InfluenzaA__ADO25202

SEQ ID NO: 198205 - RNA, 1701 nt, Artificial Sequence
  derived and/or modified CDS sequence (opt5) from hemagglutinin__InfluenzaA__ADO25212
augaaggccauccuggugguccuccuguacaccuucgcuacagccaacgcggacacgcuuugcauuggcuaucacgcuaauaacagcaccgauacaguugacaccgugcuggagaaaaaugugacagucacccauuccgugaaccuccuggaagauaagcacaaugggaaacuuuguaagcugagaggaguugcuccccuccaucugggcaaaugcaacaucgccggguggauucugggaaauccugagugugaaucucucagcacagccuccucuuggagcuacaucguggagaccuccucuagcgacaacggcacgugcuauccgggggauuuuauugacuacgaagaacugcgggagcagcuuuccagcgucucuuccuucgaacgcuuugagaucuuccccaagaccagcucuuggccuaaucacgauuccaacaagggagugacagccgcuuguccccaugccggcgcgaaaucuuuuuauaagaaucugaucuggcucguuaaaaagggcaacagcuacccuaaacuguccaagagcuauauuaaugacaagagaaaagaagugcuuguccugugggggauccaccaccccuccaccucugccgaucaacagagccucuaccagaacgcugacuccuacguguucgugggaacaagccgguauucuaagaaauuuaagccugagauugccauccgcccgaaagucagagaucaggagggccggaugaauuacuauuggacccugguugaacccggggacaagauuacguucgaggcuacaggaaaccugguggugccucgcuacgccuuugcgauggaaagaaacgccggcuccgggaucauuaucagcgauacccccguccaugacugcaauacaaccugucaaaccccugagggagcuaucaacacaucucuccccuuccagaauauucacccgaucacgauuggcaaaugcccuaaguauguuaagagcaccaaacugcggcuugccacaggccugcgcaacgugcccuccauccagucuagagggcucuuuggagcuauugccggcuucaucgaagggggauggaccggcaugguggacgggugguacggauaucaucaccagaaugagcaaggcagcggcuacgccgcugaucugaaguccacacagaacgcgaucgacgagauuaccaauaaagucaacagcgugaucgaaaagaugaauacgcaguuuacagccguugggaaagaguucaaccaccuugaaaagcggauugagaaucugaacaagaaaguggaugacggauuccucgauaucuggaccuacaaugcugaacugcugguccuccuggagaacgagcgcacccuugacuaucaugauucuaaugugaagaaccuguacgaaaaagucagaucccagcucaagaacaaugccaaagagauuggcaacggguguuuugaguucuaucacaagugcgacaauacauguauggagagcgugaagaacggaaccuacgauuauccuaaauacucugaagaggccaagcugaaucgggaggaaaucgacggcguuaaacuugaguccacacgcaucuaucaaauucuggcuaucuacagcacgguggccuccucucucguccuggugguuagccugggggcgauuuccuuuuggaugugcucuaacggcagccuccagugcagaaucuguauuuga

SEQ ID NO: 198206 - RNA, 1701 nt, Artificial Sequence
  derived and/or modified CDS sequence (opt5) from hemagglutinin__InfluenzaA__ADO25222
augaaggccauccuggugguccuccuguacaccuucgcuacagccaacgcggacacgcuuugcauuggcuaucacgcuaauaacagcaccgauacaguugacaccgugcuggagaaaaaugugacagucacccauuccgugaaccuccuggaagauaagcacaaugggaaacuuuguaagcugagaggaguugcuccccuccaucugggcaaaugcaacaucgccggguggauucugggaaauccugagugugaaucucucagcacagccuccucuuggagcuacaucguggagaccuccucuagcgacaacggcacgugcuauccgggggauuuuauugacuacgaagaacugcgggagcagcuuuccagcgucucuuccuucgaacgcuuugagaucuuccccaagaccagcucuuggccuaaucacgauuccaacaagggagugacagccgcuuguccccaugccggcgcgaaaucuuuuuauaagaaucugaucuggcucguuaaaaagggcaacagcuacccuaaacugaauaaguccuauauuaacgacaaggggaaagaagugcuuguccuguggggaauccaccaccccagcaccuccgccgaucaacagucucucuaccagaaugcugacgccuacguguucgugggcacaagcagauauuccaagaaauuuaagccugagauugcuauccggccgaaaguccgcgaucaggaggggagaaugaacuacuauuggacccugguugaacccggagacaagauuacguucgaggccacaggcaaccugguggugccucgguacgcguuugccauggaacgcaaugcugggagcggaaucauuaucucugauacccccguccaugacugcaacacaaccugucaaaccccuaaaggcgccaucaauacaucccuccccuuccagaacauucacccgaucacgauuggcaagugcccuaaguaugugaaaagcaccaagcugagacuugcuacagggcugcggaauguucccucuauccagagccgcggacucuuuggcgccauugccggguucaucgagggaggcuggaccgggaugguggacggaugguacggcuaucaucaccagaacgaacaaggcuccggguacgcugcggaucugaaaucuacacagaaugccaucgacaagauuaccaacaaagucaauagcgugaucgagaagaugaacacgcaguuuacagcuguuggaaaggaguucaaucaccuugagaaaagaauugagaaccugaauaagaaaguggaugacggcuuccucgauaucuggaccuacaacgccgaacugcugguccuccuggagaaugaacggacccuugacuaucaugauuccaacgugaagaaccuguacgagaaaguccgcagccagcucaagaauaacgccaaggagauugggaauggauguuuugaguucuaucacaaaugcgacaacacauguauggaaucugugaagaauggcaccuacgauuauccuaaauacuccgaagaggcuaagcugaacagagaagagaucgacgggguuaaacuugagagcacacggaucuaucaaauucuggccaucuacucuacgguggcguccagccucguccuggugguuucccugggcgcuauuucuuuuuggaugugcagcaauggaucccuccagugccgcaucuguauuuga

SEQ ID NO: 198207 - RNA, 1701 nt, Artificial Sequence; identical to SEQ ID NO: 196354
  derived and/or modified CDS sequence (opt5) from hemagglutinin__InfluenzaA__ADO25232

SEQ ID NO: 198208 - RNA, 1701 nt, Artificial Sequence; identical to SEQ ID NO: 196293
  derived and/or modified CDS sequence (opt5) from hemagglutinin__InfluenzaA__ADO25242

SEQ ID NO: 198209 - RNA, 1701 nt, Artificial Sequence; identical to SEQ ID NO: 196371
  derived and/or modified CDS sequence (opt5) from hemagglutinin__InfluenzaA__ADO25252

SEQ ID NO: 198210 - RNA, 1701 nt, Artificial Sequence; identical to SEQ ID NO: 196613
  derived and/or modified CDS sequence (opt5) from hemagglutinin__InfluenzaA__ADO25262

SEQ ID NO: 198211 - RNA, 1701 nt, Artificial Sequence
  derived and/or modified CDS sequence (opt5) from hemagglutinin__InfluenzaA__ADO25272
augaaggccauccuggugguccuccuguacaccuucgcuacagccaacgcggacacgcuuugcauuggcuaucacgcuaauaacagcaccgauacaguugacaccgugcuggagaaaaaugugacagucacccauuccgugaaccuccuggaagauaagcacaaugggaaacuuuguaagcugagaggaguugcuccccuccaucugggcaaaugcaacaucgccggguggauucugggaaauccugagugugaaucucucagcacagccuccucuuggagcuacaucguggagaccuccucuagcgacaacggcacgugcuauccgggggauuuuauugacuacgaagaacugcgggagcagcuuuccagcgucucuuccuucgaacgcuuugagauguuccccaagaccagcucuuggccuaaucacgauuccaacaagggagugacagccgcuuguccccaugccggcguuaagagcuuuuauaagaaucugaucuggcucgugaaaaagggcaacucuuacccuaaacuguccaagagcuauaucaaugacaaggggaaagaaguccuugugcuguggggcauucaccaccccuccaccucugcggaucaacagagccucuaccagaacgccgacgcuuacguguucgucggaacauccagauauagcaagaaauuuaagccugagaucgccauucggccgaaaguucgcgaucaggaggggagaaugaauuacuauuggacccugguggaacccggagacaagaucacguucgaggcuacaggcaaccugguggucccucgguacgccuuugcgauggaacgcaacgccgggucuggaauuaucauuuccgauacccccgugcaugacugcaauacaaccugucaaaccccuaaaggcgcuaucaacacaagccuccccuuccagaauauccacccgauuacgaucggcaagugcccuaaguauguuaaaucuaccaagcugagacuugccacagggcugcggaacgugcccagcauucagucccgcggacucuuuggcgcuaucgccggguucauugagggaggcuggaccgggauggucgacggaugguacggcuaucaucaccagaaugaacaaggcucuggguacgccgcugaucugaaaagcacacagaacgcgaucgacgagaucaccaauaaggugaacuccguuauugagaaaaugaauacgcaguuuacagccgugggaaaggaguucaaccaccuugagaagagaaucgaaaaucugaacaaaaaggucgaugacggcuuccucgauauuuggaccuacaaugcugagcugcuggugcuccuggaaaacgagcggacccuugacuaucaugauagcaaugucaaaaaccuguacgagaaggugcgcucucagcucaaaaacaaugccaaggaaaucgggaacggauguuuugaguucuaucacaagugcgacaauacauguauggaauccguuaaaaacggcaccuacgauuauccuaaguacagcgaggaagccaaacugaauagagaggagauugacggggugaaacuugaaucuacacggaucuaucaaauccuggcuauuuacuccacggucgccagcucccucgugcugguugugucucugggcgcgaucagcuuuuggaugugcuccaacggaucucuccagugccgcauuuguaucuga

SEQ ID NO: 198212 - RNA, 1701 nt, Artificial Sequence; identical to SEQ ID NO: 196354
  derived and/or modified CDS sequence (opt5) from hemagglutinin__InfluenzaA__ADO25282

SEQ ID NO: 198213 - RNA, 1698 nt, Artificial Sequence; identical to SEQ ID NO: 194560
  derived and/or modified CDS sequence (opt5) from hemagglutinin__InfluenzaA__ADO27622

SEQ ID NO: 198214 - RNA, 1701 nt, Artificial Sequence; identical to SEQ ID NO: 194741
  derived and/or modified CDS sequence (opt5) from hemagglutinin__InfluenzaA__ADO29887

SEQ ID NO: 198215 - RNA, 1701 nt, Artificial Sequence
  derived and/or modified CDS sequence (opt5) from hemagglutinin__InfluenzaA__ADO29888
augaaggccauccuggugguccuccuguacaccuucgcuacagccaacgcggacacgcuuugcauuggcuaucacgcuaauaacagcaccgauacaguugacaccgugcuggagaaaaaugugacagucacccauuccgugaaccuccuggaagauaagcacaaugggaaacuuuguagacugcggggaguugcuccccuccaucugggcaagugcaacaucgccggguggauucugggaaauccugagugugaaucucucagcacagccuccucuuggagcuacaucguggagaccuccucuagcgacaacggcacgugcuauccgggggauuuuauugacuacgaagaacugcgcgagcagcuuuccagcgucucuuccuucgaaagauuugagaucuuccccaaaaccagcucuuggccuaaucacgaucccaacaagggagugacagccgcuuguccucaugccggcgcgaaguccuuuuauaaaaaucugaucuggcucguuaagaaaggcaacagcuaccccaagcugucuaaauccuauauuaaugacaaggggaaggaagugcuuguccuguggggaauccaccacccuagcaccuccgccgaucaacagucucucuaccagaacgcugacgccuacguguucgugggcacaagccgguauuccaaaaaguuuaaaccggagauugcuauccgccccaaggucagagaucaggaggggcggaugaauuacuauuggacccugguugaaccuggagacaaaauuacguucgaggccacaggcaaccugguggugccccgcuacgcguuugccauggaaagaaacgcugggagcggaaucauuaucucugauaccccuguccaugacugcaauacaaccugucaaacccccaagggcgccaucaacacaucccucccguuccagaauauucacccuaucacgauuggcaaaugccccaaguauguuaagagcaccaaacugcggcuugcuacagggcugcgcaacgugccuucuauccagagcagaggacucuuuggcgccauugccggguucaucgagggaggcuggaccgggaugguggacggaugguacggcuaucaucaccagaaugaacaaggcuccggguacgcugcggaucugaagucuacacagaacgccaucgacgagauuaccaauaaagucaacagcgugaucgagaagaugaauacgcaguuuacagcuguuggaaaagaguucaaccaccuugagaagcggauugaaaaucugaacaagaaaguggaugacggcuuccucgauaucuggaccuacaaugccgagcugcugguccuccuggaaaacgagcgcacccuugacuaucaugauuccaaugugaagaaccuguacgagaaagucagaagccagcucaagaacaaugccaaagaaauugggaacggauguuuugaguucuaucacaagugcgacaauacauguauggaaucugugaagaacggcaccuacgauuaucccaaauacuccgaggaagcuaagcugaaucgggaggagaucgacgggguuaaacuugaaagcacacgcaucuaucaaauucuggccaucuacucuacgguggcguccagccucguccuggugguuucccugggcgcuauuucuuuuuggaugugcagcaacggaucccuccagugcagaaucuguauuuga

SEQ ID NO: 198216 - RNA, 1701 nt, Artificial Sequence
  derived and/or modified CDS sequence (opt5) from hemagglutinin__InfluenzaA__ADO29889
augaaggccauccuggugguccuccuguacaccuucgcuacagccaacgcggacauucuuugcaucggcuaucacgcuaauaacagcacggauaccguugacacagugcuggagaaaaaugugaccgucacacauuccgugaaccuccuggaagauaagcacaaugggaaacuuuguaagcugagaggaguugcuccccuccaucugggcaaaugcaacauugccggguggauccugggaaauccugagugugaaucuuuuagcaccuccucuagcugguccuacauuguggagacaucuagcuccgacaacggaaccugcuauccgggggauuucaucgacuacgaagaacuccgggagcagcugagcucugucuccagcuuugaacgcuucgagaucuuucccaagacgucuuccuggccuaaucacgauagcaacaagggagugaccgccgccuguccccaugcuggcgccaaaucuuucuauaagaaucuuauuuggcugguuaaaaagggcaacuccuacccuaaacucagcaaguccuauaucaaugacaaggggaaagaagugcugguccuuuggggcauucaccaccccucuacaagcgcggaucaacagucccuguaccagaacgccgacgcuuacguguuugugggcaccagcagauauucuaagaaauucaagccugagaucgccauucggccgaaaguccgcgaucaggaggggagaaugaauuacuauuggacacucguugaacccggagacaagaucaccuuugaggcuacgggcaaccugguggugccucgguacgccuucgcgauggaacgcaacgccggguccggaauuaucaucagcgauacacccguccaugacugcaauaccacaugucaaaccccuaaaggcgcuauuaacaccucucugcccuuucagaauauccacccgauuacaaucggcaagugcccuaaguaugugaaaagcacgaagcucagacuggccaccgggcuucggaacguucccuccauucagucucgcggacuguucggcgcuaucgccggguuuaucgagggaggcuggacagggaugguggacggaugguacggcuaucaucaccagaaugaacaaggcagcggguacgccgcugaucucaaauccacccagaacgcgauugacgagaucacaaauaaggucaacagcgugauugagaaaaugaauacccaguucacggccguuggaaaggaguucaaccaccuggagaagagaaucgaaaaucuuaacaaaaagguggaugacggcuuucuggauauuuggacauacaaugcugagcuccugguccugcucgaaaacgagcggacccuggacuaucaugauucuaaugugaaaaaccuuuacgagaagguccgcucccagcugaaaaacaaugccaaggaaaucgggaacggauguuucgaguuuuaucacaagugcgacaauaccuguauggaaagcgugaaaaacggcacauacgauuauccuaaguacucugaggaagccaaacucaauagagaggagaucgacgggguuaagcuggaauccacccggauuuaucaaauccuugcuauuuacagcacaguggccuccucucugguccucgugguuagccugggcgcgaucuccuucuggaugugcucuaacggaagccugcagugccgcauuuguaucuga

SEQ ID NO: 198217 - RNA, 1701 nt, Artificial Sequence
  derived and/or modified CDS sequence (opt5) from hemagglutinin__InfluenzaA__ADO29890
augaaggccauccuggugguccuccuguacaccuucgcuacagccaaagcggacacgcuuugcauuggcuaucacgcuaacaauagcgccgauaccguugacacagugcuggagaagaacgugaccgucacacauuccgugaaucuccuggaagauaaacacaacgggaaacuuuguaagcugagaggaguugcuccccuccaucugggcaagugcaauaucgccggguggauucugggaaacccugagugugaaucucucagcaccgccuccucuuggagcuacaucguggagacauccucuagcgacaaugggaccugcuauccgggcgauuuuauugacuacgaagaacugcgggagcagcuuuccagcgucucuuccuucgaacgcuuugagaucuuccccaagacgagcucuuggccuaaccacgaucccaauaaaggagugaccgcugccuguccucaugcgggcgccaaguccuuuuauaaaaaccugaucuggcucguuaagaaaggcaauagcuaccccaagcugucuaaguccuauauuaacgacaaagggaaggaagugcuuguccuguggggaauccaccacccuagcacauccguggaucaacagucucucuaccagaaugcugacgccuacguguucgucggcaccagcagauauuccaaaaaguuuaaaccggagauugcuauccggcccaagguucgcgaucaggaggggagaaugaacuacuauuggacacugguggaaccuggagacaaaauuaccuucgaggccacgggcaaucugguggucccccgguacgcguuugccauggaacgcaacgcugggagcggaaucauuaucucugauacaccugugcaugacugcaacaccacaugucaaacccccaagggcgccaucaauaccucccucccguuccagaacauucacccuaucacaauuggcaagugccccaaauauguuaagagcacgaaacugagacuugcuaccgggcugcggaaugugccuucuauccagagccgcggacucuuuggcgccauugccggguucaucgagggaggcuggacagggauggucgacggaugguacggcuaucaucaccagaacgaacaaggcuccggguacgcugcggaucugaagucuacccagaaugccaucgacgagauuacaaacaaagugaauagcguuaucgagaagaugaacacccaguuuacggcugugggaaaggaguucaaucaccuugagaaaagaauugaaaaccugaauaagaaagucgaugacggcuuccucgauaucuggacauacaacgccgagcugcuggugcuccuggaaaaugagcggacccuugacuaucaugauuccaacgucaagaaucuguacgagaaagugcgcagccagcucaagaacaacgccaaggaaauugggaauggauguuuugaguucuaucacaaaugcgacaacaccuguauggaaucuguuaagaauggcacauacgauuaucccaaauacuccgaggaagcuaagcugaacagagaggagaucgacggggugaaacuugaaagcacccggaucuaucaaauucuggccaucuacucuacagucgcguccagccucgugcugguugugucccugggcgcuauuucuuuuuggaugugcagcaauggaucccuccagugccgcaucuguauuuga

SEQ ID NO: 198218 - RNA, 1701 nt, Artificial Sequence
  derived and/or modified CDS sequence (opt5) from hemagglutinin__InfluenzaA__ADO29891
augaaggccauccuggugguccuccuguacaccuucgcuacagccaacgcggacacgcuuugcauuggcuaucacgcuaauaacagcaccgauacaguugacaccgugcuggagaaaaaugugacagucacccauuccgugaaccuccuggaagauaagcacaaugggaaacuuuguaagcugagaggaguugcuccccuccaucugggcaaaugcaacaucgccggguggauucugggaaauccugagugugaaucucucagcacagccuccucuuggagcuacaucguggagaccuccucuagcgacaacggcacgugcuauccgggggauuuuauugacuacgaagaacugcgggagcagcuuuccagcgucucuuccuucgaacgcuuugagaucuuccccaagaccagcucuuggccuaaucacgauuccaacaagggagugacagccgcuuguccccaugccggcgcgaaaucuuuuuauaagaaucugaucuggcucguuaaaaagggcaacagcuacccuaaacuguccaagagcuauauuaaugacaaggggaaagaagugcuuguccuguggggaauccaccaccccuccaccucugccgaucaacagagccucuaccagaacgcugacgccuacguguucgugggcacauccagauauagcaagaaauuuaagccugagauugcuauccggccgaaaguccgcgaucaggaggggagaaugaauuacuauuggacccugguugaacccggagacaagacgacauucgaggccaccggcaaccugguggugccucgguacgcguuugccauggaacgcaacgcugggucuggaauuaucauuuccgauacacccguccaugacugcaauaccaccugucaaacaccuaaaggcgccaucaacacgagccuccccuuccagaauauccacccgauuaccaucggcaagugcccuaaguaugugaaaucuacaaagcugagacuugcuaccgggcugcggaacguucccagcauucagucccgcggacucuuuggcgccaucgccggguucauugagggaggcuggacagggaugguggacggaugguacggcuaucaucaccagaaugaacaaggcucuggguacgcugcggaucugaaaagcacccagaacgccaucgacaagaucacgaauaaagucaacuccgugauugagaagaugaauacacaguuuaccgcuguuggaaaggaguucaaccaccuugagaaaagaaucgagaaucugaacaagaaaguggaugacggcuuccucgauauuuggaccuacaaugccgaacugcugguccucagcgagaacgaacggacacuggacuaucaugauucuaaugugaagaaccuuuacgagaaaguccgcucccagcugaagaacaaugccaaggagaucgggaacggauguuuugaguucuaucacaaaugcgacaauaccuguauggaaagcgugaagaacggcacauacgauuauccuaaauacucugaagaggcuaagcucaauagagaagagauugacgggguuaaacuggaguccacgcggaucuaucaaauccuugccauuuacagcaccguggcguccucucugguccucgugguuagccugggcgcuaucuccuuuuggaugugcucuaacggaagccugcagugccgcauuuguaucuga

SEQ ID NO: 198219 - RNA, 1701 nt, Artificial Sequence
  derived and/or modified CDS sequence (opt5) from hemagglutinin__InfluenzaA__ADO29892
augaaggccauccuggugguccuccuguacaccuucgcuacagccaaagcggacacgcuuugcauuggcuaucacgcuaacaauagcaccgauacaguugacaccgugcuggagaagaacgugacagucacccauuccgugaaucuccuggaagauaaacacaacgggaaacuuuguaagcugagaggaguugcuccccuccaucugggcaagugcaauaucgccgggcggauucugggaaacccugagugugaaucucucagcacagccuccucuuggagcuacaucguggagaccuccucuagcgacaauggcacgugcuauccgggggauuuuauugacuacgaagaacugcgcgagcagcuuuccagcgucucuuccuucgaaagauuugagaucuuccccaagaccagcucuuggccuaaccacgaucccaauaaaggagugacagccgcuuguccucaugccggcgcgaaguccuuuuauaaaaaccugaucuggcucguuaagaaaggcaauagcuaccccaagcugucuaaguccuauauuaacgacaaagggaaggaagugcuuguccuguggggaauccaccacccuagcaccuccguggaucaacagucucucuaccagaaugccgacgcuuacguguucgucggcacaagccgguauuccaaaaaguuuaaaccggagauugccauccgccccaagguuagagaucaggaggggcggaugaacuacuauuggacccugguggaaccuggagacaaaauuacguucgaggcuacaggcaaucugguggucccccgcuacgccuuugcgauggaaagaaacgccgggagcggaaucauuaucucugauaccccugugcaugacugcaacacaaccugucaaacccccaagggcgcuaucaauacaucccucccguuccagaacauucacccuaucacgauuggcaagugccccaaauauguuaagagcaccaaacugcggcuugccacagggcugcgcaaugugccuucuauccagagcagaggacucuuuggcgcuauugccggguucaucgagggaggcuggaccgggauggucgacggaugguacggcuaucaucaccagaacgaacaaggcuccggguacgccgcugaucugaagucuacacagaaugcgaucgacgagauuaccaacaaagugaauagcguuaucgagaagaugaacacgcaguuuacagccgugggaaaggaguucaaucaccuugagaaacggauugaaaaccugaauaagaaagucgaugacggcuuccucgauaucuggaccuacaacgcugagcugcuggugcuccuggaaaaugagcgcacccuugacuaucaugauuccaacgucaagaaucuguacgagaaagugagaagccagcucaagaacaacgccaaggaaauugggaauggauguuuugaguucuaucacaaaugcgacaacacauguauggaaucuguuaagaauggcaccuacgauuaucccaaauacuccgaggaagccaagcugaaccgggaggagaucgacggggugaaacuugaaagcacacgcaucuaucaaauucuggcuaucuacucuacggucgccuccagccucgugcugguugugucccugggcgcgauuucuuuuuggaugugcagcaauggaucccuccagugcagaaucuguauuuga

SEQ ID NO: 198220 - RNA, 1701 nt, Artificial Sequence; identical to SEQ ID NO: 195539
  derived and/or modified CDS sequence (opt5) from hemagglutinin__InfluenzaA__ADO29893

SEQ ID NO: 198221 - RNA, 1701 nt, Artificial Sequence
  derived and/or modified CDS sequence (opt5) from hemagglutinin__InfluenzaA__ADO29894
augaaggccauccuggugguccuccuguacaccuucgcuacagccaacgcggacacgcuuugcauuggcuaucacgcuaauaacagcaccgauacaguugacaccgugcuggagaugaaugugacagucacccauuccgugaaccuccuggaagauaaacacaaugggaaacuuuguaagcugagaggaguugcuccccuccaucugggcaagugcaacaucgccggguggauucugggaaauccugagugugaaucuuuuagcacauccucuagcugguccuacaucguggagaccucuagcuccgacaacggcacgugcuauccgggggauuucauugacuacgaagaacuccgggagcagcugagcucugucuccagcuuugaacgcuucgagaucuuucccaaaaccucuuccuggccuaaucacgauagcaacaagggagugacagccgccuguccccaugcuggcgccaagucuuucuauaaaaaucuuaucuggcugguuaagaaaggcuccagcuacccuaagcucuccaaaucuuauauuaacgacaaggggaaggaagugcugguccuuuggggaauccaccaccccagcaccuccgcggaucaacagagccuguaccagaaugccgacgcuuacguguuugugggcacaucuagauauuccaaaaaguucaaaccugagauugccauccggccgaagguccgcgaucaggaggggagaaugaacuacuauuggacccucguugaacccggagacaaaauuacguuugaggcuacaggcaaucugguggugccucgguacgccuucgcgauggaacgcaacgccgggagcggaaucauuaucucugauacccccguccaugacugcaacacaaccugucaaaccccuaagggcgcuaucaauacaagccugcccuuucagaacauucacccgaucacgauuggcaaaugcccuaaguaugugaaguccaccaaacucagacuggccacagggcuucggaauguucccucuauccagagccgcggacuguucggcgcuauugccggguuuaucgagggaggcuggaccgggaugguggacggaugguacggcuaucaucaccagaacgaacaaggcuccggguacgccgcugaucucaagagcacacagaaugcgaucgacgagauuaccaacaaagucaauucugugaucgagaagaugaacacgcaguucacagccguuggaaaagaguucaaucaccuggagaagagaauugaaaaccuuaauaagaaaguggaugacggcuuucuggauaucuggaccuacaacgcugagcuccugguccugcucgaaaaugagcggacccuggacuaucaugauuccaacgugaagaaucuuuacgagaaaguccgcagccagcugaagaacaacgccaaagaaauugggaauggauguuucgaguuuuaucacaagugcgacaacacauguauggaaucugugaagaauggcaccuacgauuauccuaaauacuccgaggaagccaagcucaacagagaggagaucgacgggguuaaacuggaaagcacacggaucuaucaaauucuugcuaucuacuccacgguggccucuagccugguccucgugguuucccugggcgcgauuucuuucuggaugugcagcaauggaucccugcagugccgcaucuguauuuga

SEQ ID NO: 198222 - RNA, 1701 nt, Artificial Sequence
  derived and/or modified CDS sequence (opt5) from hemagglutinin__InfluenzaA__ADO29895
augaaggccauccugguggcucuccuguacaccuucgccacagcgaacgcugacacgcuuugcauuggcuaucacgccaauaacagcaccgauacagucgacaccguucuggagaaaaaugugacagugacccauuccgucaaccuccuggaagauaagcacaaugggaaacuuuguaagcugagaggaguggcuccccuccaucugggcaaaugcaacaucgccggguggauucugggaaauccugagugugaaucuuuuagcacauccucuagcugguccuacaucguugagaccucuagcuccgacaacggcacgugcuauccgggggauuucauugacuacgaagaacuccgggagcagcugagcucuguguccagcuuugaacgcuucgagaucuuucccaagaccucuuccuggccuaaucacgauagcaacaagggagucacagccgcuuguccccaugccggcgcgaaaucuuucuauaagaaucuuaucuggcuggugaaaaagggcuccagcuacccuaaacucuccaagucuuauauuaacgacaaggggaaagaaguucuggugcuuuggggaauccaccaccccagcaccuccgccgaucaacagagccuguaccagaaugcugacgccuacgucuuugugggcacaucuagauauuccaagaaauucaagccugagauugcuauccggccgaaagugcgcgaucaggaggggagaaugaacuacuauuggacccucgucgaacccggagacaagauuacguuugaggccacaggcaaucugguugugccucgguacgcguucgccauggaacgcaacgcugggagcggaaucauuaucucugauacccccgugcaugacugcaacacaaccugucaaaccccuaaaggcgccaucaauacaagccugcccuuucagaacauucacccgaucacgauuggcaagugcccuaaguaugucaaagggaccaagcucagacuggcuacaggacuucggaaugugcccuccauccagucucgcggccuguucggggccauugccggauuuaucgagggcggguggaccggaaugguugacggcugguacggcuaucaucaccagaacgaacaagggagcggauacgcugcggaucucaaauccacacagaaugccaucgacgagauuaccaacaaggugaauagcgucaucgagaaaaugaacacgcaguucacagcugugggcaaggaguucaaucaccuggagaagagaauugaaaaccuuaauaaaaagguugaugacggguuucuggauaucuggaccuacaacgccgagcuccuggugcugcucgaaaaugagcggacccuggacuaucaugauucuaacgucaaaaaucuuuacgagaaggugcgcucccagcugaaaaacaacgccaaggaaauuggaaauggcuguuucgaguuuuaucacaagugcgacaacacauguauggaaagagucaaaaaugggaccuacgauuauccuaaguacagcgaggaagcuaaacucaaccgggaggagaucgacggcgugaagcuggaaucuacacgcaucuaucaaauucuugccaucuacuccacgguugcgagcucccuggugcucgucgugucucugggagcuauuagcuucuggaugugcuccaauggcucucugcagugcagaaucuguauuuga

SEQ ID NO: 198223 - RNA, 1701 nt, Artificial Sequence
  derived and/or modified CDS sequence (opt5) from hemagglutinin__InfluenzaA__ADO29897
augaaggccauccuggugguccuccuguacaccuucgcuacagccaacgcggacauucuuugcaucggcuaucacgcuaauaacagcacggauaccguugacacagugcuggagaaaaaugugaccgucacacauuccgugaaccuccuggaagauaagcacaaugggaaacuuuguaagcugagaggaguugcuccccuccaucugggcaaaugcaacauugccggguggauccugggaaauccugagugugaaucuuuuagcaccuccucuagcugguccuacauuguggagacaucuagcuccgacaacggcaagugcuauccgggggauuucaucgacuacgaagaacuccgggagcagcugagcucugucuccagcuuugaacgcuucgagaucuuucccaagaccucuuccuggccuaaucacgauagcaacaaaggagugacgaccgccuguccccaugccggcgcuaagucuuucuauaaaaaucuuauuuggcugguuaagaaaggcaacuccuacccuagacucagcaaguccuauaucaaugacaaggggaaagaagugcugguccuuuggggcauucaccaccccucuacaagcgccgaucaacagucccuguaccagaacgcggacgccuacguguuugugggaaccagccgguauucuaagaaauucaagccugagaucgcuauucgcccgaaagucagagaucaggaggggcggaugaauuacuauuggacacucguugaacccggagacaagaucaccuuugaggccacgggcaaccugguggugccucgcuacgcuuucgccauggaaagaaacgcgggguccggaauuaucaucagcgauacacccguccauggcugcaauaccacaugucaaaccccuaaaggcgccauuaacaccucucugcccuuucagaauauccacccgauuacaaucgggaagugcccuaaguaugugaaaagcacgaagcuccggcuggcuaccggacuucgcaacguucccuccauucagucuagaggccuguucggggccguggcuggauuuaucgagggcggguggacaggaauggucgacggcugguacggcuaucaucaccagaaugaacaagggagcggauacgccgccgaccucaaauccacccagaacgcuaucgaugagauuacaaauaaggugaacagcguuaucgagaaaaugaauacccaguucacggcggugggcaaggaguucaaccaccuggagaagcggauugaaaaucuuaacaaaaaggucgacgauggguuucuggacaucuggacauacaaugccgagcuccuggugcugcucgaaaacgagcgcacccuggauuaucaugacucuaaugucaaaaaccuuuacgagaaggugagaucccagcugaaaaacaaugcuaaggaaauuggaaacggcuguuucgaguuuuaucacaagugcgauaauaccuguauggaaagcguuaaaaacgggacauacgacuauccuaaguacucugaggaagccaaacucaaucgggaggagaucgauggcgugaagcuggaauccacccgcaucuaucaaauucuugccaucuacagcacagucgcuuccucucuggugcucguugugagccugggagccauuuccuucuggaugugcucuaacggcagccugcagugcagaaucuguauuuga

SEQ ID NO: 198224 - RNA, 1701 nt, Artificial Sequence; identical to SEQ ID NO: 195539
  derived and/or modified CDS sequence (opt5) from hemagglutinin__InfluenzaA__ADO29898

SEQ ID NO: 198225 - RNA, 1701 nt, Artificial Sequence
  derived and/or modified CDS sequence (opt5) from hemagglutinin__InfluenzaA__ADO29899
augaaggccauccuggugguccuccuguacaccuucgcuacagccaacgcggacacgcuuugcauuggcuaucacgcuaauaacagcaccgauacaguugacaccgugcuggagaaaaaugugacagucacccauuccgugaaccuccuggaagauaagcacaaugggaaacuuuguaagcugagaggaguugcuccccuccaucugggcaaaugcaacaucgccggguggauucugggaaauccugagugugaaucucucagcacagccuccucuuggagcuacaucguggagaccuccucuagcgacaacggcacgugcuauccgggggauuuuauugacuacgaagaacugcgggagcagcuuuccagcgucucuuccuucgaacgcuuugagaucuuccccaagaccagcucuuggccuaaucacgauuccaacaagggagugacagccgcuuguccccaugccggcgcgaaaucuuuuuauaagaaucugaucuggcucguuaaaaagggcaacagcuacccuaaacuguccaagagcuauauuaaugacaaggggaaagaagugcuuguccuguggggaauccaccaccccuccaccucugccgaucaacagagccucuaccagaacgcugacgccuacguguucgugggcacauccagauauagcaagaaauuuaagccugagauugcuauccggccgaaaguccgcgaucaggaggggagaaugaauuacuauuggacccugguugaacccggagacaagauuacguucgaggccacaggcaaccugguggugccucgguacgcguuugccauggaacgcaacgcugggucuggaaucauuaucuccgauacccccguccaugacugcaauacaaccugucaaaccccuaaaggcgccaucaacacaagccuccccuuccagaauauucacccgaucacgauuggcaagugcccuaaguaugugaaaucuaccaagcugagacuugcuacagggcugcggaacguucccagcauccagucccgcggacucuuuggcgccauugccggguucaucgagggaggcuggaccgggaugguggacggaugguacggcuaucaucaccagaaugaacaaggcucuggguacgcugcggaucugaaaagcacacagaacgccaucgacaagauuaccaauaaagucaacuccgugaucgagaagaugaauacgcaguuuacagcuguuggaaaggaguucaaccaccuugagaaaagaauugagaaucugaacaagaaaguggaugacggcuuccucgauaucuggaccuacaaugccgaacugcugguccuccuggagaacgaacggacccuugacuaucaugauagcaaugugaagaaccuguacgagaaaguccgcucucagcucaagaacaaugccaaggagauugggaacggauguuuugaguucuaucacaaaugcgacaauacauguauggaauccgugaagaacggcaccuacgauuauccuaaauacagcgaagaggcuaagcugaauagagaagagaucgacgggguuaaacuugagucuacacggaucuaucaaauucuggccaucuacuccacgguggcgagcucccucguccuggugguuucucugggcgcuauuagcuuuuggaugugcuccaacggaucucuccagugccgcaccuguaucuga

SEQ ID NO: 198226 - RNA, 1701 nt, Artificial Sequence
  derived and/or modified CDS sequence (opt5) from hemagglutinin__InfluenzaA__ADO29900
augaaggccauccuggugguccuccuguacaccuucgcuacagccaacgcggacacgcuuugcauuggcuaucacgcuaauaacagcaccgauacaguugacaccgugcuggagaaaaaugugacagucacccauuccgugaaccuccuggaagauaagcacaaugggaaacuuuguaagcugagaggaguugcuccccuccaucugggcaaaugcaacaucgccggguggauucugggaaauccugagugugaaucucucagcacagccuccucuuggagcuacaucguggagaccuccucuagcgacaacggcacgugcuauccgggggaucugauugacuacgaagaacuucgggagcagcuguccagcgucucuuccuuugaacgcuucgagaucuuucccaagaccagcucuuggccuaaucacgaucucaacaagggagugacagccgcuuguccccaugccggcgcgaaauccuucuauaagaaucugaucuggcuuguuaaaaagggcaacagcuacccuaaacugucuaaguccuauauuaaugacaaggggaaagaagugcucguccuguggggaauccaccaccccagcaccuccgccgaucaacagucucuguaccagaacgcugacgccuacguguuugugggcacaagcagauauuccaagaaaagcaagccugagauugcuauccggccgaaaguccgcgaucaggaggggagaaugaauuacuauuggacccucguugaacccggagacaagauuacguucgaggccacaggcaaccugguggugccucgguacgcguuugccauggaacgcaacgcugggucuggaaucauuaucuccgauacccccguccaugacugcaauacaaccugucaaaccccuaaaggcgccaucaacacaagccuucccuuccagaauauucacccgaucacgauuggcaagugcccuaaguaugugagaucuaccaaacugcggcucgcuacagggcugcgcaacguucccagcauccaguccagaggacuuuuuggcgccauugccggguucaucgagggaggcuggaccgggaugguggacggaugguacggcuaucaucaccagaaugaacaaggcucuggguacgcugcggaucucaagagcacacagaacgccaucgacgagauuaccaauaaagucaacuccgugaucgagaagaugaauacgcaguuuacagcuguuggaaaagaguucaaccaccuggagaagcggauugaaaaucugaacaagaaaguggaugacggcuuucuggauaucugggccuacaaugccgagcuccugguccuucuggaaaacgagcgcacccucgacuaucaugauagcaaugugaagaaccuguacgagaaagucagaucucagcuuaagaacaaugcuaaagaaauugggaacggauguuucgaguucuaucacaagugcgacaauaccuguauggaauccgugaagaacggcacauacgauuauccuaaauacagcgaggaagccaagcugaaucgggaggagaucgacgggguuaaacucgaaucuacccgcaucuaucaaauucuggcgaucuacuccacaguggcuagcucccugguccucgugguuucucugggcgccauuagcuuuuggaugugcuccaacggaucucuucagugcagaaucuguauuuga

SEQ ID NO: 198227 - RNA, 1701 nt, Artificial Sequence
  derived and/or modified CDS sequence (opt5) from hemagglutinin__InfluenzaA__ADO29901
augaaggccauccuggugguccuccuguacaccuucgcuacagccaacgcggacacgcuuugcauuggcuaucacgcuaauaacagcaccgauacaguugacaccgugcuggagaaaaaugugacagucacccauuccgugaaccuccuggaagauaagcacaaugagaaacuuuguaagcugagagggguugcuccccuccaucugggaaaaugcaacaucgccggcuggauucuggggaauccugaaugugagucucucagcacagccuccucuuggagcuacaucguggaaaccuccucuagcgacaacggaacgugcuauccgggcgauuuuauugacuacgaggagcugcgggaacagcuuuccagcgucucuuccuucgagcgcuuugaaaucuuccccaagaccagcucuuggccuaaucacgauuccaacaagggggugacagccgcuuguccccaugccggagcgaaaucuuuuuauaagaaucugaucuggcucgccaaaaagggcaacagcuacccuaaaguuuccaagagcuauauuaaugacaagggcaaagaggugcugguccuuugggggauccaccaccccuccaccucugcugaucaacagagccuguaccagaacgccgacgcuuacguguucgugggaacauccagauauagcaagaaauuuaagccugagauugccauccggccgaaaguccgcgaucaggaaggcagaaugaauuacuauuggacccucguugagcccggggacaagauuacguucgaagcgacaggaaaccugguggugccucgguacgccuuugcuauggagcgcaacgccggcucugggaucauuaucuccgauacccccguccaugacugcaauacaaccugucaaaccccuaaaggagcuaucaacacaagccugcccuuccagaauauucacccgaucacgauuggcaagugcccuaaguaugugaaaucuaccaagcucagacuggccacaggccuucggaacguucccagcauccagucccgcgggcuguuuggagccauugcuggcuucaucgaagggggauggaccggcaugguggacgggugguacggauaucaucaccagaaugagcaaggcucuggcuacgcggccgaucucaaaagcacacagaacgcuaucgacgagauuaccaauaaggucaacuccgugaucgaaaagaugaauacgcaguuuacagccguugggaaagaguucaaccaccuggaaaagagaauugagaaucuuaacaaaaagguggaugacggauuccuggauaucuggaccuacaaugccgaacuccugguccugcucgagaacgagcggacccuggacuaucaugauagcaaugugaaaaaccuuuacgaaaagguccgcucucagcugaaaaacaaugcuaaggagauuggcaacggguguuuugaguucuaucacaagugcgacaauacauguauggaauccgugaaaaacggaaccuacgauuauccuaaguacagcgaagaggccaaacucaauagagaggaaaucgacggcguuaagcuggagucuacacggaucuaucaaauucuugcgaucuacuccacgguggcuagcucccugguccucgugguuucucugggggccauuagcuuuuggaugugcuucaacggcucccugcagugccgcaucuguauuuga

SEQ ID NO: 198228 - RNA, 1701 nt, Artificial Sequence
  derived and/or modified CDS sequence (opt5) from hemagglutinin__InfluenzaA__ADO29902
augaaggccauccuggugguccuccuguacaccuucgcuacagccaacgcggacacgcuuugcauuggcuaucacgcuaauaacagcaccgauacaguugacaccgugcuggagaaaaaugugacagucacccauuccgugaaccuccuggaagauaagcacaaugggaaacuuuguaagcugagaggaguugcuccccuccaucugggcaaaugcaacaucgccggguggauucugggaaauccugagugugaaucucucagcacagccuccucuuggagcuacaucguggagaccuccucuagcgacaacggcacgugcuauccgggggauuuuauugacuacgaagaacugcgggagcagcuuuccagcgucucuuccuucgaacgcuuugagaucuuccccaagaccagcucuuggccuaaucacgauuccaacaagggagugacagccgcuuguccccaugccggcgcgaaaucuuuuuauaagaaucugaucuggcucguuaaaaagggcaacagcuacccuaaacuguccaagagcuauauuaaugacaaggggaaagaagugcuuguccuguggggaauccaccaccccuccaccucugccgaucaacagagccucuaccagaacgcugacgccuacguguucgugggcacauccagauauagcaagaaauuuaagccugagauugcuauccggccgaaaguccgcgaucaggaggggagaaugaauuacuauuggacccugguugaacccggagacaagauuacguucgaggccacaggcaaccugguggugccucgguacgcguuugccauggaacgcaacgcugggucuggaaucauuaucuccgauacccccguccaugacugcaauacaaccugucaaaccccuaaaggcgccaucaacacaagccuccccuuccagaauauucacccgaucacgauuggcaagugcccuaaguaugugaaaucuaccaagcugagacuugcuacagggcugcggaacguucccagcauccagucccgcggacucuuuggcgccauugccggguucaucgagggaggcuggaccgggaugguggacggaugguacggcuaucaucaccagaaugaacaaggcucuggguacgcugcggaucugaaaagcacacagaacgccaucgacaagauuaccaauaaagucaacuccgugaucgagaagaugaauacgcaguuuacagcuguuggaaaggaguucaaccaccuugagaaaagaauugagaaucugaacaagaaaguggaugacggcuuccucgauaucuggaccuacaaugccgaacugcugguccuccuggagaacgaacggacccuugacuaucaugauagcaaugugaagaaccuguacgagaaaguccgcucucagcucaagaacaaugccaaggagauugggaacggauguuuugaguucuaucacaaaugcgacaauacauguauggaaggcgugaagaacgggaccuacgauuauccuaaauacuccgaagaggcuaagcugaauagagaagagaucgacggcguuaaacuugagagcacacggaucuaucaaauucuggccaucuacucuacgguggcguccagccucguccuggugguuucccugggagcuauuucuuuuuggaugugcagcaacggcucccuccagugccgcaucuguauuuga

SEQ ID NO: 198229 - RNA, 1701 nt, Artificial Sequence
  derived and/or modified CDS sequence (opt5) from hemagglutinin__InfluenzaA__ADO29903
augaaggccauccuggugguccuccuguacaccuucgcuacagccaacgcggacacgcuuugcauuggcuaucacgcuaauaacagcaccgauacaguugacaccgugcuggagaagaaugugacagucacccauuccgugaaccuccuggaagauaagcacaaugggaaacuuuguaagcugagaggaguugcuccccuccaucugggcaaaugcaacacagccggguggauccugggaaauccugagugugaaucucucagcaccgccuccucuuggagcuacauuguggagacguccucuagcgacaacggaaccugcuauccgggggauuuuaucgacuacgaagaacugcgggagcagcuuuccagcgucucuuccuucgaacgcuuugagauuuuccccaagacaagcucuuggccuaaucacgaucccaacaagggagugaccgccgcuuguccucaugccggcgcgaaauccuuuuauaagaaucugaucuggcucguuaaaaagggcaacagcuaccccaaacugucuaaguccuauaucaaugacaaggggaaagaagugcuuguccuguggggcauucaccacccuagcacauccgccgaucaacagucucucuaccagaacgcugacgccuacguguucgugggcaccagcagauauuccaagaaauuuaagccggagaucgcuauucggcccaaaguccgcgaucaggaggggagaaugaauuacuauuggacgcugguugaaccuggagacaagaucacauucgaggccaccggcaaccugguggugccccgguacgcguuugccauggaacgcaacgcugggagcggaauuaucauuucugauacaccuguccaugacugcaauaccaccugucaaacacccaaaggcgccaucaacacgucccucccguuccagaauauccacccuauuaccaucggcaagugccccaaguaugugaaaagcacaaagcugagacuugcuaccgggcugcggaacguuccuucuauucagagccgcggacucuuuggcgccaucgccggguucauugagggaggcuggacagggaugguggacggaugguacggcuaucaucaccagaaugaacaaggcuccggguacgcugcggaucugaaaucuacccagaacgccaucgacgagaucacgaauaaggucaacagcgugauugagaaaaugaauacacaguuuaccgcuguuggaaaggaguucaaccaccuugagaagagaaucgaaaaucugaacaaaaagguggaugacggcuuccucgauauuuggaccuacaaugccgagcugcugguccuccuggaaaacgagcggacacuugacuaucaugauuccaaugugaaaaaccuguacgagaagguccgcagccagcucaaaaacaaugccaaggaaaucgggaacggauguuuugaguucuaucacaagugcgacaauaccuguauggaaucugugaaaaacggcacauacgauuaucccaaguacuccgaggaagcuaaacugaauagagaggagauugacgggguuaaacuugaaagcacgcggaucuaucaaauccuggccauuuacucuaccguggcguccagccucguccuggugguuucccugggcgcuaucucuuuuuggaugugcagcaacggaucccuccagugccgcauuuguaucuga

SEQ ID NO: 198230 - RNA, 1701 nt, Artificial Sequence
  derived and/or modified CDS sequence (opt5) from hemagglutinin__InfluenzaA__ADO29904
augaaggccauccuggugguccuccuguacaccuucgcuacagccaacgcggacacgcuuugcauuggcuaucacgcuaauaacagcaccgauacaguugacaccgugcuggagaaaaaugugacagucacccauuccgugaaccuccuggaagauaagcacaaugggaaacuuuguaagcugagaggaguugcuccccuccaucugggccggugcaacaucgccggguggauucugggaaauccugagugugaaucucucagcacagccuccucuuggagcuacaucguggagaccuccucuagcgacaacggcacgugcuauccgggggauuuuauugacuacgaagaacugcgcgagcagcuuuccagcgucucuuccuucgaaagauuugagaucuuccccaaaaccagcucuuggccuaaucacgaucccaacaagggagugacagccgcuuguccucaugccggcgcgaaguccuuuuauaaaaaucugaucuggcucguuaagaaaggcaacagcuaccccaagcugucuaaauccuauauuaaugacaaggggaaggaagugcuuguccuguggggaauccaccggccuagcaccuccgccgaucaacagucucucuaccagaacgcugacgccuacguguucgugggcacaagccgcuauuccaaaaaguuuaaaccggagauugcuaucagacccaaggucggggaucaggagggacggaugaauuacuauuggacccugguugaaccuggcgacaaaauuacguucgaggccacagggaaccugguggugccccgcuacgcguuugccauggaaagaaacgcuggaagcggcaucauuaucucuaauaccccuguccacgauugcaacacaaccugucaaacccccaagggcgccaucaauacaucccucccguuccagaacauucauccuaucacgauugggaaaugccccaaguauguuaagagcaccaaacugcggcuugcuacaggacugcgcaaugugccuucuauccagagcagaggccucuuuggggccauugccggauucaucgagggcggguggaccggaaugguggacggcugguacggcuaucaccaucagaacgaacaaggguccggauacgcugcggaccugaagucuacacagaaugccaucgaugagauuaccaacaaagucaauagcgugaucgagaagaugaacacgcaguuuacagcuguuggcaaagaguucaaucaccuugagaagcggauugaaaaccugaauaagaaaguggacgauggguuccucgacaucuggaccuacaacgccgagcugcugguccuccuggaaaaugagcgcacccuugauuaucacgacuccaacgugaagaaccuguacgagaaagucagaagccagcucaagaauaacgccaaagaaauuggaaauggcuguuuugaguucuaucauaagugcgauaacacauguauggaaucugugaagaaugggaccuacgacuaucccaaauacuccgaggaagcuaagcugaaccgggaggagaucgauggcguuaaacuugaaagcacacgcaucuaucaaauucuggccaucuacucuacgguggcguccagccucguccuggugguuucccugggagcuauuucuuuuuggaugugcagcaauggcucccuccagugcagaaucuguauuuga

SEQ ID NO: 198231 - RNA, 1701 nt, Artificial Sequence
  derived and/or modified CDS sequence (opt5) from hemagglutinin__InfluenzaA__ADO29905
augaaggccauccuggugguccuccuguacaccuucgcuacagccaacgcggacacgcuuugcauuggcuaucacgcuaauaacagcaccgauacaguugacaccgugcuggagaagaaugugacagucaccagauccgugaaccuccuggaagauaagcauaaugggaaacuuuguaagcugcggggaguugcuccccuccaccugggcaaaugcaacaucgccggguggauucugggaaauccugagugugaaucucucagcacagccuccucuuggagcuacaucguggagaccuccucuagcgacaacggcacgugcuauccgggggauuuuauugacuacgaagaacugcgcgagcagcuuuccagcgucucuuccuucgaaagauuugagaucuuccccaagaccagcucuuggccuaaucaugaucccaacaagggagugacagccgcuuguccucacgccggcgcgaaauccuuuuauaagaaucugaucuggcucguuaaaaagggcaacagcuaccccaaacugucuaaguccuauauuaaugacaaggggaaagaagugcuuguccuguggggaauccaucacccuagcaccuccgccgaucaacagucucucuaccagaacgcugacgccuacguguucgugggcacaagccgguauuccaagaaauuuaagccggagauugcuauccgccccaaagucagagaucaggaggggcggaugaauuacuauuggacccugguugaaccuggagacaagauuacguucgaggccacaggcaaccugguggugccccgcuacgcguuugccauggaaagaaacgcugggagcggaaucauuaucucuaauaccccuguccacgauugcaacacaaccugucaaacccccaaaggcgccaucaauacaucccucccguuccagaacauucauccuaucacgauuggcaagugccccaaguaugugaaaagcaccaagcugcggcuugcuacagggcugcgcaauguuccuucuauccagagcagaggacucuuuggcgccauugccggguucaucgagggaggcuggaccgggaugguggacggaugguacggcuaucaccaucagaacgaacaaggcuccggguacgcugcggaccugaaaucuacacagaaugccaucgaugagauuaccaacaaggucaauagcgugaucgagaaaaugaacacgcaguuuacagcuguuggaaaggaguucaaucaccuugagaagcggauugaaaaccugaauaaaaagguggacgauggcuuccucgacaucuggaccuacaacgccgagcugcugguccuccuggaaaaugagcgcacccuugauuaucacgacuccaacgugaaaaaccuguacgagaaggucagaagccagcucaaaaauaacgccaaggaaauugggaauggauguuuugaguucuaucauaagugcgauaacacauguauggaaucugugaaaaauggcaccuacgacuaucccaaguacuccgaggaagcuaaacugaaccgggaggagaucgaugggguuaaacuugaaagcacacgcaucuaucaaauucuggccaucuacucuacgguggcguccagccucguccuggugguuucccugggcgcuauuucuuuuuggaugugcagcaauggaucccuccagugcagaaucuguauuuga

SEQ ID NO: 198232 - RNA, 1701 nt, Artificial Sequence
  derived and/or modified CDS sequence (opt5) from hemagglutinin__InfluenzaA__ADO29906
augaaggccauccuggugguccuccuguacaccuucgcuacagccaacgcggacacgcuuugcauuggcuaucacgcuaauaacagcaccgauacaguugacaccgugcuggagaagaaugugacagucacccauuccgugaaccuccuggaagauaagcacaauagaaaacuuuguaagcugcgcgggguugcuccccuccaucugggaaaaugcaacaucgccggcuggauucuggggaauccugagugugaaucucucagcacagccuccucuuggagcuacaucguggagaccuccucuagcgacaacggaacgugcuauccgggcgauuuuauugacuacgaggagcugcgggagcagcuuuccagcgucucuuccuucgaaagauuugagaucuuccccaagaccagcucuuggccuaaucacgaucccaacaagggggugacagccgcuuguccucaugccggagcgaaauccuuuuauaagaaucugaucuggcucguuaaaaagggcaacagcuaccccaaacugucuaaguccuauauuaaugacaagggcaaagaagugcuuguccugugggggauccaccacccuagcaccuccgccgaucaacagucucucuaccagaacgcugacgccuacguguucgugggaacaagccgguauuccaagaaauuuaagccggagauugcuauccgccccaaagucagagaucaggagggccggaugaauuacuauuggacccugguugaaccuggggacaagauuacguucgaggccacaggaaaccugguggugccccgcuacgcguuugccauggaaagaaacgcuggcagcgggaucauuaucucugauaccccuguccaugacugcaauacaaccugucaaacccccaaaggagccaucaacacaucccucccguuccagaauauucacccuaucacgauuggcaagugccccaaguaugugaaaagcaccaagcugcggcuugcuacaggccugcgcaacguuccuucuauccagagcagagggcucuuuggagccauugccggcuucaucgaagggggauggaccggcaugguggacgggugguacggauaucaucaccagaaugaacaaggcuccggcuacgcugcggaucugaaaucuacacagaacgccaucgacgagauuaccaauaaggucaacagcgugaucgagaaaaugaauacgcaguuuacagcuguugggaaggaguucaaccaccuugaaaagcggauugaaaaucugaacaaaaagguggaugacggauuccucgauaucuggaccuacaaugccgagcugcugguccuccuggaaaacgagcgcacccuugacuaucaugauuccaaugugaaaaaccuguacgagaaggucagaagccagcucaaaaacaaugccaaggaaauuggcaacggguguuuugaguucuaucacaagugcgacaauacauguauggaaucugugaaaaacggaaccuacgauuaucccaaguacuccgaggaagcuaaacugaaucgggaggagaucgacggcguuaaacuugaaagcacacgcaucuaucaaauucuggccaucuacucuacgguggcguccagccucguccuggugguuucccugggggcuauuucuuuuuggaugugcagcaacggcucccuccagugcagaaucuguauuuga

SEQ ID NO: 198233 - RNA, 1701 nt, Artificial Sequence
  derived and/or modified CDS sequence (opt5) from hemagglutinin__InfluenzaA__ADO29907
augaaggccauccuggugguccuccuguacaccuucgcuacagccaacgcggacacgcuuugcauuggcuaucacgcuaauaacagcaccgauacaguugacaccgugcuggagaaaaaugugacagucacccauuccgugaaccuccuggaagauaagcacaaugggaaacuuuguaagcugagaggaguugcuccccuccaucugggcaaaugcaacaucgccggguggauucugggaaauccugagugugaaucucucagcacagccuccucuuggagcuacaucguggagaccuccucuagcgacaacggcacgugcuauccgggggauuuuauugacuacgaggaacugcgggagcagcuuuccagcgucucuuccuucgaacgcuuugagaucuuccccaagaccagcucuuggccuaaucacgaucccaacaagggagugacagccgcuuguccucaugccggcgcgaaauccuuuuauaagaaucugaucuggcucguuaaaaagggcaacagcuaccccaaacugucuaaguccuauauuaaugacaaggggaaagaagugcuuguccuguggggaauccaccacccuagcaccuccgccgaucaacagucucucuaccagaacgcugacgccuacguguucgugggcacaagcagauauuccaagaaacugaagccggagauugcuauccggcccaaaguccgcgaucaggaggggagaaugaauuaccauuggacccugguugaaccuggagacaagauuacguuugaggccacaggcaaccucguggugccccgguaugcguucgccauggaacgcaacgcugggagcggaaucauuaucucugauaccccuguccacgacugcaauacaaccugucaaacccccaaaggcgccaucaacacaucccugccguuucagaauauucauccuaucacgauuggcaagugccccaaguacgugaaaagcaccaaacuuagacuggcuacagggcuccggaacguuccuucuauccagagccgcggacuguucggcgccauugccggguuuaucgagggaggcuggaccgggaugguggacggaugguauggcuaccaccaccagaaugaacaaggcuccggguaugcugcggaucuuaagucuacacagaacgccaucgacgagauuaccaauaaggucaacagcgugaucgagaaaaugaauacgcaguucacagcuguuggaaaggaauuuaaccaucuggagaagagaauugaaaaucucaacaaaaagguggaugacggcuuccuggauaucuggaccuacaaugccgagcugcucguccugcuugaaaacgagcggacccuggacuaccacgauuccaaugugaaaaaccucuaugagaagguccgcagccagcugaaaaacaaugccaaggaaauugggaacggauguuucgaguuuuaccauaagugcgacaauacauguauggaaucugugaaaaacggcaccuaugauuaccccaaguauuccgaggaagcuaaacuuaauagagaggagaucgacgggguuaagcuggaaagcacacggaucuaccaaauucucgccaucuauucuacgguggcguccagccugguccuggugguuucccucggcgcuauuucuuucuggaugugcagcaacggaucccugcagugccgcaucuguauuuga

SEQ ID NO: 198234 - RNA, 1701 nt, Artificial Sequence
  derived and/or modified CDS sequence (opt5) from hemagglutinin__InfluenzaA__ADO29908
augaaggccauccuggugguccuccuguacaccuucgcuacagccaacgcggacacgcuuugcauuggcuaucacgcuaauaacagcaccgauacaguugacaccgugcuggagaagaaugugacagucacccauuccgugaaccuccuggaagauaagcacaaugggaaacuuuguaagcugagaggaguugcuccccuccaucugggcaaaugcaacaucgccggguggauucugggaaauccugagugugaaucucucagcacagccuccucuuggagcuacaucguggagaccuccucuagcgacaacggcacgugcuauccgggggauuuuauugacuacgaggagcugcgggagcagcuuuccagcgucucuuccuucgaacgcuuugagaucuuccccaagaccagcucuuggccuaaucacgaucccaacaagggagugacagccgcuuguccucaugccggcgcgaaauccuuuuauaagaaucugaucuggcucguuaaaaagggcaacagcuaccccaaacugucuaaguccuauauuaaugacaaggggaaagaagugcuuguccuguggggaauccaccacccuagcaccuccgccgaucaacagucucucuaccagaacgcugacgccuacguguucgugggcacaagcagauauuccaagaaauuuaagccggagauugcuauccggcccaaaguccgcgaucaggaguggagaaugaauuacuauuggacccugguugaaccuggggacaagauuacguucgaggccacaggaaaccugguggugccccgguacgcguuugccauggaacgcaacgcuggcagcgggaucauuaucucugauaccccuguccaugacugcaauacaaccugucaaacccccaaaggagccaucaacacaucccucccguuccagaauauucacccuaucacgauuggcaagugccccaaguaugugaaaagcaccaagcugagacuugcuacaggccugcggaacguuccuucuauccagagccgcgggcucuuuggagccauugccggcuucaucgaagggggauggaccggcaugguggacgggugguacggauaucaucaccagaaugaacaaggcuccggcuacgcugcggaucugaaaucuacacagaacgccaucgacgagauuaccaauaaggucaacagcgugaucgagaaaaugaauacgcaguuuacagcuguugggaaggaguucaaccaccuugaaaagagaauugaaaaucugaacaaaaagguggaugacggauuccucgauaucuggaccuacaaugccgagcugcugguccuccuggaaaacgagcggacccuugacuaucaugauuccaaugugaaaaaccuguacgagaagguccgcagccagcucaaaaacaaugccaaggaaauuggcaacggguguuuugaguucuaucacaagugcgacaauacauguauggaaucugugaaaaacggaaccuacgauuaucccaaguacuccgaggaagcuaaacugaauagagaggagaucgacggcguuaaacuugaaagcacacggguguaucaaauccuggccacguacucuaccgucgcguccagccucgugcugguugugucccugggggcuauuucuuuuuggaugugcagcaacggcucccuccagugccgcaucuguauuuga

SEQ ID NO: 198235 - RNA, 1701 nt, Artificial Sequence
  derived and/or modified CDS sequence (opt5) from hemagglutinin__InfluenzaA__ADO29909
augaaggccauccuggugguccuccuguacaccuucgcuacagccaacgcggacacgcuuagaauuggcuaucacgcuaauaacagcaccgauacaguugacaccgugcuggagaagaaugugacagucacccauuccgugaaccuccuggaagauaagcacaaugggaaacuuugcaagcugcggggaguugcuccccuccaucugggcaaauguaacaucgccggguggauucugggaaauccugagugcgaaucucucagcacagccuccucuuggagcuacaucguggagaccuccucuagcgacaacggcacguguuauccgggggauuuuauugacuacgaagaacugcgcgagcagcuuuccagcgucucuuccuucgaaagauuugagaucuuccccaagaccagcucuuggccuaaucacgaucccaacaagggagugacagccgcuugcccucaugccggcgcgaaauccuuuuauaagaaucugaucuggcucguuaaaaagggcaacagcuaccccaaacugucuaaguccuauauuaaugacaaggggaaagaagugcuuguccuguggggaauccaccacccuagcaccuccgccgaucaacagucucucuaccagaacgcugacgccuacguguucgugggcacaagccgguauuccaagaaauuuaagccggagauugcuauccgccccaaagucagagaucaggaggggcggaugaauuacuauuggacccugguugaaccuggagacaagauuacguucgaggccacaggcaaccugguggugccccgcuacgcguuugccauggaaagaaacgcugggagcggaaucauuaucucugauaccccuguccaugacuguaauacaaccugccaaacccccaaaggcgccaucaacacaucccucccguuccagaauauucacccuaucacgauuggcaagugucccaaguaugugaaaagcaccaagcugcggcuugcuacagggcugcgcaacguuccuucuauccagagcagaggacucuuuggcgccauugccggguucaucgagggaggcuggaccgggaugguggacggaugguacggcuaucaucaccagaaugaacaaggcuccggguacgcugcggaucugaaaucuauccagaacgccauugacgagaucacaaauaaggucaacagcgugauugagaaaaugaauacccaguuuacggcuguuggaaaggaguucaaccaccuugagaagcggaucgaaaaucugaacaaaaagguggaugacggcuuccucgauauuuggacauacaaugccgagcugcugguccuccuggaaaacgagcgcacccuugacuaucaugauuccaaugugaaaaaccuguacgagaaggucagaagccagcucaaaaacaaugccaaggaaaucgggaacggaugcuuugaguucuaucacaagugugacaauaccugcauggaaucugugaaaaacggcacauacgauuaucccaaguacuccgaggaagcuaaacugaaucgggaggagaucgacgggguuaaacuugaaagcacccgcauuuaucaaauccuggccauuuacucuacaguggcguccagccucauccuggucgugucccugggcgcuauuucuuuuuggauguguagcaacggaucccuccagugcagaaucugcauuuga

SEQ ID NO: 198236 - RNA, 1701 nt, Artificial Sequence
  derived and/or modified CDS sequence (opt5) from hemagglutinin__InfluenzaA__ADO29910
augaaggccauccuggugguccuccuguacaccuucgcuacagccaacgcggacacgcuuugcauuggcuaucacgcuaauaacagcaccgauacaguugacaccgugcuggagaaaaaugugacagucacccauuccgugaaccuccuggaagauaagcacaaugggaaacuuuguaagcccagaggaguugccccucugcaucucggcaaaugcaacaucgccggguggauucugggaaauccggagugugaaucucugagcacagcuuccucuuggagcuacaucguggagaccuccucuagcgacaacggcacgugcuaucccggggauuuuauugacuacgaagaacuccgggagcagcuguccagcgucucuuccuucgaacgcuuugagaucuucccuaagaccagcucuuggcccaaucacgauccuaacaagggagugacagccgcuuguccccaugccggcgcgaaauccuuuuauaagaaucuuaucuggcugguuaaaaagggcaacagcuacccuaaacucucuaaguccuauauuaaugacaaggggaaagaagugcugguccuuuggggaauccaccacccgagcaccuccgccgaucaacagucucuguaccagaacgcugacgccuacguguucgugggcacaagcagauauuccaagaaauuuaagcccgagauugcuauccggccuaaaguccgcgaucaggaggggagaaugaauuacuauuggacccucguugaacccggagacaagauuacguucgaggccaucggcaaccugguggugccucgguacgcguuugccauggaacgcaacgcugggagcggaauuaucaucucugauacacccguccaugacugcaauaccacaugucaaaccccgaaaggcgccauuaacaccucccugccuuuccagaauauccaccccauuacaaucggcaagugcccuaaguaugugaaaagcacgaagcucagacuggcuaccgggcuucggaacguucccucuauucagagccgcggacuguuuggcgccaucgccggguucaucgagggaggcuggacagggaugguggacggaugguacggcuaucaucaccagaaugaacaaggcuccggguacgcugcggaucucaaaucuacccagaacgccauugacgagaucacaaauaaggucaacagcgugauugagaaaaugaauacccaguuuacggcuguuggaaaggaguucaaccaccuggagaagagaaucgaaaaucuuaacaaaaagguggaugacggcuuccuggauauuuggacauacaaugccgagcuccugguccugcucgaaaacgagcggacccuggacuaucaugauuccaaugugaaaaaccuuuacgagaagguccgcagccagcugaaaaacaaugccaaggaaaucgggaacggauguuuugaguucuaucacaagugcgacaauaccuguauggaaucugugaaaaacggcacauacgauuaucccaaguacuccgaggaagcuaaacucaauagaggggagaucgacggcguuaagcuggagagcacccggauuuaucaaauccuugccauuuacucuacaguggcguccagccugguccucgugguuucccugggagcuaucucuuuuuggaugugcagcaacggcucccugcagugccgcauuuguaucuga

SEQ ID NO: 198237 - RNA, 1701 nt, Artificial Sequence; identical to SEQ ID NO: 196463
  derived and/or modified CDS sequence (opt5) from hemagglutinin__InfluenzaA__ADO30407

SEQ ID NO: 198238 - RNA, 1701 nt, Artificial Sequence; identical to SEQ ID NO: 196354
  derived and/or modified CDS sequence (opt5) from hemagglutinin__InfluenzaA__ADO30417

SEQ ID NO: 198239 - RNA, 1701 nt, Artificial Sequence; identical to SEQ ID NO: 196076
  derived and/or modified CDS sequence (opt5) from hemagglutinin__InfluenzaA__ADO33202

SEQ ID NO: 198240 - RNA, 1701 nt, Artificial Sequence; identical to SEQ ID NO: 195584
  derived and/or modified CDS sequence (opt5) from hemagglutinin__InfluenzaA__ADO33240

SEQ ID NO: 198241 - RNA, 1701 nt, Artificial Sequence; identical to SEQ ID NO: 194741
  derived and/or modified CDS sequence (opt5) from hemagglutinin__InfluenzaA__ADO33247

SEQ ID NO: 198242 - RNA, 1701 nt, Artificial Sequence; identical to SEQ ID NO: 195584
  derived and/or modified CDS sequence (opt5) from hemagglutinin__InfluenzaA__ADO33254

SEQ ID NO: 198243 - RNA, 1701 nt, Artificial Sequence; identical to SEQ ID NO: 195584
  derived and/or modified CDS sequence (opt5) from hemagglutinin__InfluenzaA__ADO33261

SEQ ID NO: 198244 - RNA, 1701 nt, Artificial Sequence; identical to SEQ ID NO: 195584
  derived and/or modified CDS sequence (opt5) from hemagglutinin__InfluenzaA__ADO33269

SEQ ID NO: 198245 - RNA, 1701 nt, Artificial Sequence; identical to SEQ ID NO: 196076
  derived and/or modified CDS sequence (opt5) from hemagglutinin__InfluenzaA__ADO33277

SEQ ID NO: 198246 - RNA, 1701 nt, Artificial Sequence; identical to SEQ ID NO: 195584
  derived and/or modified CDS sequence (opt5) from hemagglutinin__InfluenzaA__ADO33285

SEQ ID NO: 198247 - RNA, 1701 nt, Artificial Sequence; identical to SEQ ID NO: 196076
  derived and/or modified CDS sequence (opt5) from hemagglutinin__InfluenzaA__ADO33293

SEQ ID NO: 198248 - RNA, 1701 nt, Artificial Sequence; identical to SEQ ID NO: 196076
  derived and/or modified CDS sequence (opt5) from hemagglutinin__InfluenzaA__ADO33307

SEQ ID NO: 198249 - RNA, 1701 nt, Artificial Sequence; identical to SEQ ID NO: 195584
  derived and/or modified CDS sequence (opt5) from hemagglutinin__InfluenzaA__ADO33313

SEQ ID NO: 198250 - RNA, 1701 nt, Artificial Sequence; identical to SEQ ID NO: 197834
  derived and/or modified CDS sequence (opt5) from hemagglutinin__InfluenzaA__ADO33329

SEQ ID NO: 198251 - RNA, 1701 nt, Artificial Sequence; identical to SEQ ID NO: 195584
  derived and/or modified CDS sequence (opt5) from hemagglutinin__InfluenzaA__ADO33337

SEQ ID NO: 198252 - RNA, 1701 nt, Artificial Sequence; identical to SEQ ID NO: 195584
  derived and/or modified CDS sequence (opt5) from hemagglutinin__InfluenzaA__ADO33345

SEQ ID NO: 198253 - RNA, 1701 nt, Artificial Sequence; identical to SEQ ID NO: 196076
  derived and/or modified CDS sequence (opt5) from hemagglutinin__InfluenzaA__ADO33352

SEQ ID NO: 198254 - RNA, 1701 nt, Artificial Sequence; identical to SEQ ID NO: 194741
  derived and/or modified CDS sequence (opt5) from hemagglutinin__InfluenzaA__ADO33360

SEQ ID NO: 198255 - RNA, 1701 nt, Artificial Sequence; identical to SEQ ID NO: 195584
  derived and/or modified CDS sequence (opt5) from hemagglutinin__InfluenzaA__ADO33368

SEQ ID NO: 198256 - RNA, 1701 nt, Artificial Sequence; identical to SEQ ID NO: 195584
  derived and/or modified CDS sequence (opt5) from hemagglutinin__InfluenzaA__ADO33376

SEQ ID NO: 198257 - RNA, 1701 nt, Artificial Sequence; identical to SEQ ID NO: 194728
  derived and/or modified CDS sequence (opt5) from hemagglutinin__InfluenzaA__ADO33384

SEQ ID NO: 198258 - RNA, 1701 nt, Artificial Sequence; identical to SEQ ID NO: 194741
  derived and/or modified CDS sequence (opt5) from hemagglutinin__InfluenzaA__ADO33391

SEQ ID NO: 198259 - RNA, 1701 nt, Artificial Sequence
  derived and/or modified CDS sequence (opt5) from hemagglutinin__InfluenzaA__ADO79917
augaaggccauccuggugguccuccuguacaccuucgcuacagccaacgcggacacgcuuugcauuggcuaucacgcuaauaacagcaccgauacaguugacaccgugcuggagaagaaugugacagucacccauuccgugaaccuccuggaagauaagcacaaugggaaacuuuguaagcugagaggaguugcuccccuccaucugggcaaaugcaacaucgccggguggauucugggaaauccugagugugaaucucucagcacagccuccucuuggagcuacaucguggagaccuccucuagcgacaacggcacgugcuauccgggggauuuuauugacuacgaagaacugcgggagcagcuuuccagcgucucuuccuucgaacgcuuugagaucuuccccaagaccagcucuuggccuaaucacgauuccaacaagggagugacagccgcuuguccccaugccggcgcgaaaucuuuuuauaagaaucugaucuggcucguuaaaaagggcaacagcuacccuaaacuguccaagagcuauauuaaugacaaggggaaagaagugcuuguccuguggggaauccaccaccccuccaccucugccgaucaacagagccucuaccagaacgcugacgccuacguguucgugggcacauccagauauagcaagaaauuuaagccugagauugcuauccggccgaaaguccgcgauagagaggggcggaugaauuacuauuggacccugguugaacccggagacaagauuacguucgaggccacaggcaaccugguggugccucgcuacgcguuugccauggaaagaaacgcugggucuggaaucauuaucuccgauacccccguccauaauugcaacacaaccugucagaccccuaaaggcgccaucaauacaagccuccccuuccaaaacauucacccgaucacgauuggcaagugcccuaaguaugugaaaucuaccaagcugcggcuugcuacagggcugcgcaauguucccagcauccaguccagaggacucuuuggcgccauugccggguucaucgagggaggcuggaccgggaugguggacggaugguacggcuaucaucaccagaacgaacagggcucuggguacgcugcggaccugaaaagcacacaaaaugccaucgaugagauuaccaacaaggucaauuccgugaucgagaaaaugaacacgcaguuuacagcuguuggaaaggaguucaaucaccuugagaagcggauugaaaaccugaauaaaaagguggacgauggcuuccucgacaucuggaccuacaacgccgagcugcugguccuccuggaaaaugagcgcacccuugauuaucaugacagcaacgugaaaaaccuguacgagaaggucagaucucagcucaaaaauaacgccaaggaaauugggaauggauguuuugaguucuaucacaagugcgauaacacauguauggaauccgugaaaaauggcaccuacgacuauccuaaguacagcgaggaagcuaaacugaaccgggaggagaucgaugggguuaaacuugaaucuacacgcaucuaucagauucuggccaucuacuccacgguggcgagcucccucguccuggugguuucucugggcgcuauuagcuuuuggaugugcuccaauggaucucuccaaugcagaaucuguauuuga

SEQ ID NO: 198260 - RNA, 1701 nt, Artificial Sequence
  derived and/or modified CDS sequence (opt5) from hemagglutinin__InfluenzaA__ADO79923
augaaggccauccuggugguccuccuguacaccuucgcuacagccaacgcggacacgcuuugcauuggcuaucacgcuaauaacagcaccgauacaguugacaccgugcuggagaaaaaugugacagucacccauuccgugaaccuccuggaagauaagcacaaugggaaacuuuguaagcugagaggaguugcuccccuccaucugggcaaaugcaacaucgccggguggauucugggaaauccugagugugaaucucucagcacagccuccucuuggagcuacaucguggagaccuccucuacggacaaguggaccugcuauccgggcgauuuuauugacuacgaggaacugcgggagcagcuuagcuccgucagcucuuucgaacgcuuugagaucuuccccaagacauccagcuggccuaaccacgauucuaauaaaggggugaccgccgcuuguccccaugccggagcgaaguccuuuuauaaaaaccugaucuggcucguuaagaaaggcaauagcuacccuaagcugucuaaguccuauauuaacgacaaaggcaaggaagugcuuguccugugggggauccaccaccccagcacauccgccgaucaacagucucucuaccagaaugcugacgccuacguguucgugggaaccagcagauauuccaaaaaguuuaaaccugagauugcuauccggccgaagguccgcgaucaggagagacggaugaacuacuauuggacgcugguucaacccggcgacaaaauuacauuccaggccaccgggaaucugguggugccucgcuacgcguuugccauggaaagaaacgcuggaagcggcaucauuaucucugauacacccguccauaacugcaauaccaccugucagacaccuaagggggccaucaacacgucccuccccuuccagaauauucacccgaucaccauuggaaagugcccuaaauauguuaagagcacaaaacugcggcuugcuaccggccugcgcaacgugcccucuauccaaagcagaggccucuuuggggccauugccggauucaucgagggcggguggacaggaaugguggacggcugguacggguaucaucaccagaaugaacagggauccggcuacgcugcggaccugaagucuacccagaacgccaucgaugagauuacgaauaaagucaacagcgugaucgaaaagaugaauacacaauuuaccgcuguuggcaaggaguucaaccaccuugagaaacggauugaaaaucugaacaagaaaguggacgauggguuccucgacaucuggaccuacaaugccgagcugcugguccuccuggaaaacgagcgcacacuugauuaucaugacuccaaugugaagaaccuguacgaaaaagucagaagccagcucaagaacaaugccaaggagauuggaaacggcuguuuugaguucuaucacaaaugcgauaauaccuguauggaaucugugaagaacgggacauacgacuauccuaaauacuccgaggaagcuaagcugaaucgggaggaaaucgauggaguuaaacuugagagcacgcgcaucuaucagauucuggccaucuacucuaccguggcguccagccucguccuggugguuucccugggcgcuauuucuuuuuggaugugcagcaacgggucccuccaaugcagaaucuguauuuga

SEQ ID NO: 198261 - RNA, 1701 nt, Artificial Sequence
  derived and/or modified CDS sequence (opt5) from hemagglutinin__InfluenzaA__ADO79924
augaaggccauccuggugguccuccuguacaccuucgcuacagccaacgcggacacgcuuugcauuggcuaucacgcuaauaacagcaccgauacaguugacaccgugcuggagaaaaaugugacagucacccauuccgugaaccuccuggaagauaagcacaaugggaaacuuuguaagcugagaggaguugcuccccuccaucugggcaaaugcaacaucgccggguggauucugggaaauccugagugugaaucucucagcacagccuccucuuggagcuacaucguggagaccuccucuacggacaaguggaccugcuauccgggcgauuuuauugacuacgaggagcugcgggagcagcuuagcuccgucagcucuuucgaacgcuuugagaucuuccccaagacauccagcuggccuaaccacgauucuaauaaaggggugaccgccgcuuguccccaugccggagcgaaguccuuuuauaaaaaccugaucuggcucguuaagaaaggcaauagcuacccuaagcugucuaaguccuauauuaacgacaaaggcaaggaagugcuuguccugugggggauccaccaccccagcacauccgccgaucaacagucucucuaccagaaugcugacgccuacguguucgugggaaccagcagauauuccaaaaaguuuaaaccugagauugcuauccggccgaagguccgcgauagagagggccggaugaacuacuauuggacgcugauugaacccggggacaaaaucacauucgagccuaccggaaaucugguugugccccgcuacgccuuugcgauggaaagaaacgccggcagcgggauuaucaucucugauacaccugugcauaacugcaauaccaccugucagacacccaagggagcuauuaacacgucccucccguuccaaaauauccacccuauuaccaucggcaagugccccaaauaugucaagagcacaaaacugcggcuugccaccggccugcgcaacgugccuucuauucagagcagagggcucuuuggagcuaucgccggcuucaucgaagggggauggacaggcaugguugacgggugguacggauaucaucaccagaaugaacagggcuccggcuacgccgcugaccugaagucuacccaaaacgcgauugaugagaucacgaauaaagugaacagcgucauugagaagaugaauacacaguuuaccgccguggggaaggaguucaaccaccuugaaaaacggaucgaaaaucugaacaagaaaguugacgauggauuccucgacauuuggaccuacaaugcugagcugcuggugcuccuggaaaacgagcgcacacuugauuaucaugacuccaaugucaagaaccuguacgagaaagugagaagccagcucaagaacaaugccaaggaaaucggcaacggguguuuugaguucuaucacaaaugcgauaauaccuguauggaaucugucaagaacggaacauacgacuaucccaaauacuccgaggaagccaagcugaaucgggaggagaucgauggcgugaaacuugaaagcacgcgcauuuaucagauccuggcuauuuacucuaccguugccuccagccucgugcuggucgugucccugggggcgaucucuuuuuggaugugcagcaacggcucccuccaaugcagaauuuguaucuga

SEQ ID NO: 198262 - RNA, 1701 nt, Artificial Sequence
  derived and/or modified CDS sequence (opt5) from hemagglutinin__InfluenzaA__ADO79925
augaaggccauccuggugguccuccuguacaccuucgcuacagccaacgcggacacgcuuugcauuggcuaucacgcuaauaacagcaccgauacaguugacaccgugcuggagaaaaaugugacagucacccauuccgugaaccuccuggaagauaagcacaaugggaaacuuuguaagcugagaggaguugcuccccuccaucugggcaaaugcaacaucgccggguggauucugggaaauccugagugugaaucucucagcacagccuccucuuggagcuacaucguggagaccuccucuacgcacgaauggaccugcuauccgggcgacuuuauugauuacgaggagcugcgggaacagcuuagcuccgucagcucuuucgagcgcuuugaaaucuuccccaagacauccagcuggccuaaccaugacucuaauaagggggugaccgccgcuuguccccacgccggagcgaaauccuuuuauaagaaccugaucuggcucguuaaaaagggcaauagcuacccuaaacugucuaaguccuauauuaacgauaagggcaaagaggugcuuguccugugggggauccaccaucccagcacauccgccgaccaacagucucucuaccagaaugcugaugccuacguguucgugggaaccagcagauauuccaagaaauuuaagccugagauugcuauccggccgaaaguccgcgacagagaaggccggaugaacuacuauuggacgcugguugagcccggggauaagauuacauucgaagccccuggaaaucugguggugccccgcuacgcguuugccauggagagaaacgcuggcagcgggaucauuaucucugacaccccuguccacaacugcaauacaaccugucagacccccaaaggagccaucaacacaucccucccguuccaaaauauucauccuaucaagauuggcaagugcagcaaauaugugaagucuacgaaacugcggcuugcuaccggccugcgcaacguucccagcauccaguccagagggcucuuuggagccauugccggcuucaucgaagggggauggacaggcaugguggaugggugguacggauaucaccaccagaaugagcagggcucuggcuacgcugcggaccuuaagagcacccaaaacgccaucgacgagauuacaaauaaagucaacuccgugaucgaaaagaugaauacccaguuuacggcuguugggaaggaguucaaccaucuggaaaaacggauugagaaucugaacaagaaaguggaugacggauuccucgauaucuggacauacaaugccgaacugcugguccuccuggagaacgagcgcacccuugacuaucacgauagcaaugugaagaaccuguacgaaaaagucagaucucagcucaagaacaaugccaaggagauuggcaacggguguuuugaguucuaucauaaaugcgacaauaccuguauggaauccgugaagaacggaacauacgauuauccuaaauacagcgaagaggcuaagcugaaucgggaggaaaucgacggcguuaaacuugagucuacccgcaucuaucagauucuggccaucuacuccacaguggcgagcucccucguccuggugguuucucugggggcuauuagcuuuuggaugugcuccaacggcucucuccaaugcagaaucuguauuuga

SEQ ID NO: 198263 - RNA, 1701 nt, Artificial Sequence
  derived and/or modified CDS sequence (opt5) from hemagglutinin__InfluenzaA__ADO79926
augaaggccauccuggugguccuccuguacaccuucgcuacagccaacgcggacacgcuuugcauuggcuaucacgcuaauaacagcaccgauacaguugacaccgugcuggagaagaaugugacagucacccauuccgugaaccuccuggaagauaagcacaaugggaaacuuuguaagcugagaggaguugcuccccuccaucugggcaaaugcaacaucgccggguggauucugggaaauccugagugugaaucucucagcacagccuccucuuggagcuacaucguggagaccuccucuacggacaaguggaccugcuauccgggcgauuuuauugacuacgaggagcugcgggagcagcuuagcuccgucagcucuuucgaacgcuuugagaucuuccccaagacauccagcuggccuaaccacgauucuaauaaaggggugaccgccgcuuguccccaugccggagcgaaguccuuuuauaaaaaccugaucuggcucguuaagaaaggcaauagcuucucuaagcuguccaagacauaccuuaacgacaaaggcaaggaagugcugguccucugggggauucaccacccuagcaccuccgccgaucaacagucucuguaucagaaugcugacgccuacguguuugugggaacgagcagauacuccaaaaaguucaaacccgagaucgcuauucggccuaagguccgcgaucaggagggcagaaugaacuauuacuggacacugguugaaccgggggacaaaaucaccuuugaggccacaggaaaucucguggugccccgguaugcguucgccauggaacgcaacgucggcagcgggauuaucauuucugauaccccugugcaugacugcaacaccacaugucaaacgcccaagggagcuaucaauaccucccugccuuuucagaacauccaccccauuacaaucggcaagugcccgaaauacguuaagagcaccaaacuuagacuggccacaggccuccggaaugugccuucuauucagagccgcgggcuguucggagcuaucgccggcuuuauugaagggggauggaccggcauggucgacgggugguauggauaccaucaccagaacgaacaaggcuccggcuaugccgcugaucuuaagucuacgcagaaugcgaucgacaaaaucacaaacaaggugaauagcguuauugagaagaugaacacccaguucaccgccguggggaaagaguucaaucaccuggaaaagagaaucgagaaccucaauaaaaaggucgaugacggauuucuggauauuuggacauacaacgcugaacugcucgugcugcuugagaaugaacggacccuggacuaccaugauuccaacgucaaaaaucucuaugagaaggugcgcagccagcugaagaacaacgccaaagagaugaagaauggcuguuucgaauuuuaccacaaaugcgacaacacauguauggagucuguuaagaaugggacguaugauuaccccaaauauuccgaagaggccaaacuuaacagagaagagaucgacggagugaagcuggagagcacccggauuuaccaaauccucgcuaucuauucuacagucgccuccagccuggugcugguugugucccucggcgcgauuucuuucuggaugugcagcaaugggucccugcagugccgcaucuguauuuga

SEQ ID NO: 198264 - RNA, 1701 nt, Artificial Sequence
  derived and/or modified CDS sequence (opt5) from hemagglutinin__InfluenzaA__ADO79927
augaaggccauccuggugguccuccuguacaccuucgcuacagccaacgcggacacgcuuugcauuggcuaucacgcuaauaacagcaccgauacaguugacaccgugcuggagaagaaugugacagucacccauuccgugaaccuccuggaagauaagcacaaugggaaacuuuguaagcugagaggaguugcuccccuccaucugggcaaaugcaacaucgccggguggauucugggaaauccugagugugaaucucucagcacagccuccucuuggagcuacaucguggagaccuccucuacggacaaguggaccugcuauccgggcgauuuuauugacuacgaagaacugcgggagcagcuuagcuccgucagcucuuucgaacgcuuugagaucuuccccaagacauccagcuggccuaaccacgauucuaauaaaggggugaccgccgcuuguccccaugccgcggccaaguccuuuuauaaaaaccugaucuggcucguuaagaaaggaaauagcuacccuaagcugucuaaguccuauauuaacgacaaaggcaaggaagugcuuguccuguggggcauccaccaccccagcacauccgcugaucaacagucucucuaccagaaugccgacgcuuacguguucguggggaccagcagauauuccaaaaaguuuaaaccugagauugccauccggccgaagguccgcgaucaggagggaagaaugaacuacuauuggacgcugguugaacccggcgacaaaauuacauucgaggcgaccgggaaucugguggugccucgguacgccuuugcuauggaacgcaacgccggaagcggcaucauuaucucugauacacccguccaugacugcaacaccaccugucaaacaccuaagggggcuaucaauacgucccuccccuuccagaacauucacccgaucaccauuggaaagugcccuaaauauguuaagagcacaaaacugagacuugccaccggccugcggaauauccccucugugcagagccgcggccucuuuggggccauugcuggauucaucgagggcggguggacaggaaugguggacggcugguacggguaucaucaccagaacgaacaaggauccggcuacgcggccgaucugaagucuacccagaaugcuaucgacaaaauuacgaacaaggucaauagcgugaucgagaagaugaacacacaguuuaccgccguuggcaaagaguucaaucaccuugaaaagagaauugagaaccugaauaaaaagguggaugacggguuccucgauaucuggaccuacaacgccgaacugcugguccuccuggagaaugaacggacacuugacuaucaugauuccaacgugaaaaaucuguacgagaagguccgcagccagcucaagaacaacgcuaaagagaugaagaauggauguuuugaguucuaucacaaaugcgacaacaccuguauggagucugugaagaauggcacauacgauuauccuaaauacuccgaagaggccaagcugaacagagaagagauugacgggguuaaacuugagagcacgcggaucuaucaaauccuggcgauuuacucuaccguggcuuccagccucguccuggugguuucccugggagccaucucuuuuuggaugugcagcaauggcucccuccagugccgcauuuguaucuga

SEQ ID NO: 198265 - RNA, 1701 nt, Artificial Sequence
  derived and/or modified CDS sequence (opt5) from hemagglutinin__InfluenzaA__ADO79928
augaaggccauccuggugguccuccuguacaccuucgcuacagccaacgcggacacgcuuugcauuggcuaucacgcuaauaacagcaccgauacaguugacaccgugcuggagaagaaugugacagucacccauuccgugaaccuccuggaagauaagcacaaugggaaacuuuguaagcugagaggaguugcuccccuccaucugggcaaaugcaacaucgccggguggauucugggaaauccugagugugaaucucucagcacagccuccucuuggagcuacaucguggagaccuccucuacggacaaguggaccugcuauccgggcgauuuuauugacuacgaggagcugcgggagcagcuuagcuccgucagcucuuucgaacgcuuugagaucuuccccaagacaaacuccuggccuaaucacgauagcaacaaaggggugaccgccgcuuguccccaugccggagcgaagucuuuuuauaaaaaucugaucuggcucguuaagaaaggcaacuccuacccuaagcugagcaagucuuauauuaaugacaaaggcaaggaagugcuuguccugugggggauccaccaccccuccacaagcgccgaucaacagucccucuaccagaacgcugacgccuacguguucgugggaaccucuaaauauagcaagaaauuuaagccugagauugcuaucagaccgaaaguccgggaucaggagggccgcaugaauuacuauuggacgcugguugaacccggggacaagauuacauucgaggccaccggaaaccugguggugccuagauacgcguuugccauggaacggaacgcuggcuccgggaucauuaucagcgauacacccguccaugacugcaauaccaccugucaaacaccuaagggagccaucaacacgucucuccccuuccagaauauucacccgaucaccauuggcaaaugcccuaaguaugugaaauccacaaagcugcgccuugcuaccggccugagaaacguucccagcauccagucucgggggcucuuuggagccauugccggcuucaucgaagggggauggacaggcaugguggacgggugguacggauaucaucaccagaaugaacaaggcagcggcuacgcugcggaucugaaauccacccagaacgccaucgacgagauuacgaauaaggucaacucugugaucgagaagaugaauacacaguuuaccgcuguugggaaagaguucaaccaccuugaaaagcgcauugaaaaucugaacaaaaagguggaugacggauuccucgauaucuggaccuacaaugccgagcugcugguccuccuggaaaacgagagaacacuugacuaucaugauagcaaugugaaaaaccuguacgagaagguccggucccagcucaagaacaaugccaaagaaauuggcaacggguguuuugaguucuaucacaagugcgacaauaccuguauggaaagcgugaaaaacggaacauacgauuauccuaaguacucugaggaagcuaaacugaaucgcgaggagaucgacggcguuaaacuugaauccacgagaaucuaucaaauucuggccaucuacagcaccguggcgucuucccucguccuggugguuagccugggggcuauuuccuuuuggaugugcucuaacggcagccuccagugccggaucuguauuuga

SEQ ID NO: 198266 - RNA, 1701 nt, Artificial Sequence
  derived and/or modified CDS sequence (opt5) from hemagglutinin__InfluenzaA__ADO79929
augaaggccauccuggugguccuccuguacaccuucgcuacagccaacgcggacacgcuuugcauuggcuaucacgcuaauaacagcaccgauacaguugacaccgugcuggagaaaaaugugacagucacccauuccgugaaccuccuggaagauaagcacaaugggaaacuuuguaagcugagaggaguugcuccccuccaucugggcaaaugcaacaucgccggguggauucugggaaauccugagugugaaucucucagcacagccuccucuuggagcuacaucguggagaccuccucuacggacaaguggaccugcuauccgggcgauuuuauugacuacgaagaacugcgggagcagcuuagcuccgucagcucuuucgaacgcuuugagaucuuccccaagacauccagcuggccuaaccacgauucuaauaaaggggugaccgccgcuuguccccaugccggagcgaaguccuuuuauaaaaaccugaucuggcucguuaagaaaggcaauagcuacccuaagcugucuaaguccuauauuaacgacaaaggcaaggaagugcuuguccugugggggauccaccaccccagcacauccgccgaucaacagucucucuaccagaaugcugacgccuacguguucgugggaaccagcagauauuccaaaaaguuuaaaccugagauugcuauccggccgaagguccgcggccaggaggggagaaugaacuacuauuggacgcugguugaacccggagauaaaauuacauucgaggccaccggcaaucugguggugccucgguacgcguuugccauggaacgcaacgcugggagcggaaucauuaucucugacacacccguccaugauugcaacaccaccugucaaacaccuaagggcgccaucaauacgucccuccccuuccagaacauucacccgaucaccauuggcaagugcccuaaauauguuaagagcacaaaacugagacuugcuaccgggcugcggaauauccccucuauucagagccgcggacucuuuggcgccaucgccggguucaucgagggaggcuggacagggaugguggacggaugguacggcuaucaucaccagaacgaacaaggcuccggguacgcugcggaccugaagucuacccagaaugccauugaugagaucacgaacaaagugaauagcgucauugagaagaugaacacacaguuuaccgcugugggaaaggaguucaaucaccuugagaaaagaaucgaaaaccugaauaagaaaguugacgauggcuuccucgacauuuggaccuacaacgccgagcugcuggugcuccuggaaaaugagcggacacuugauuaucaugacuccaacgucaagaaucuguacgagaaagugcgcagccagcucaagaacaacgccaaggaaaucgggaauggauguuuugaguucuaucacaaaugcgauaacaccuguauggaaucugucaagaauggcacauacgacuauccuaaauacuccgaggaagcuaagcugaacagagaggagaucgauggggugaaacuugaaagcacgcggauuuaucaaauccuggccauuuacucuaccguugcguccagccucgugcuggucgugucccugggcgcuaucucuuuuuggaugugcagcaauggaucccuccagugccgcauuuguaucuga

SEQ ID NO: 198267 - RNA, 1701 nt, Artificial Sequence
  derived and/or modified CDS sequence (opt5) from hemagglutinin__InfluenzaA__ADO79930
augaaggccauccuggugguccuccuguacaccuucgcuacagccaacgcggacacgcuuugcauuggcuaucacgcuaauaacagcaccgauacaguugacaccgugcuggagaaaaaugugacagucacccauuccgugaaccuccuggaagauaagcacaaugggaaacuuuguaagcugagaggaguugcuccccuccaucugggcaaaugcaacaucgccggguggauucugggaaauccugagugugaaucucucagcacagccuccucuuggagcuacaucguggagaccuccucuacggacaaguggaccugcuauccgggcgauuuuauugacuacgaggagcugcgggagcagcuuagcuccgucagcucuuucgaacgcuuugagaucuuccccaagacauccagcuggccuaaccacgauucuaauaaaggggugaccgccgcuuguccccaugccggagcgaaguccuuuuauaaaaaccugaucuggcucguuaagaaaggcaauagcuacccuaagcugucuaaguccuauauuaacgacaaaggcaaggaagugcuuguccugugggggauccaccaccccagcacauccgccgaucaacagucucucuaccagaaugcugacgccuacguguucgugggaaccagcagauauuccaaaaaguuuaaaccugagauugcuauccggccgaagguccgcgauagagagggccggaugaacuacuauuggacgcugguugaacccggggacaaaauuacauucgaggccaccggaaaucugguggugccucgcuacgcguuugccauggaaagaaacgcuggcagcgggaucauuaucucugauacacccguccauaacugcaauaccaccugucagacaccuaagggagccaucaacacgucccuccccuuccaaaauauucacccgaucaccauuggcaagugcccuaaauauguuaagagcacaaaacugcggcuugcuaccggccugcgcaacgugcccucuauccagagcagagggcucuuuggagccauugccggcuucaucgaagggggauggacaggcaugguggacgggugguacggauaucaucaccagaaugaacagggcuccggcuacgcugcggaccugaagucuacccaaaacgccaucgaugagauuacgaauaaagucaacagcgugaucgagaagaugaauacacaguuuaccgcuguugggaaggaguucaaccaccuugaaaaacggauugaaaaucugaacaagaaaguggacgauggauuccucgacaucuggaccuacaaugccgagcugcugguccuccuggaaaacgagcgcacacuugauuaucaugacuccaaugugaagaaccuguacgagaaagucagaagccagcucaagaacaaugccaaggaaauuggcaacggguguuuugaguucuaucacaaaugcgauaauaccuguauggaaucugugaagaacggaacauacgacuauccuaaauacuccgaggaagcuaagcugaaucgggaggagaucgauggcguuaaacuugaaagcacgcgcaucuaucagauucuggccaucuacucuaccguggcguccagccucguccuggugguuucccugggggcuauuucuuuuuggaugugcagcaacggcucccuccaaugcagaaucuguauuuga

SEQ ID NO: 198268 - RNA, 1701 nt, Artificial Sequence
  derived and/or modified CDS sequence (opt5) from hemagglutinin__InfluenzaA__ADO84715
augaaggccauccuggugguccuccuguacaccuucgcuacagccaacgcgggcacgcuuugcauuggguaucacgcuaauaacagcaccgacacaguugauaccgugcuggagaagaaugugacagucacccauuccgugaaccuccuggaagacaagcacaauggaaaacuuuguaagcugagaggcguugcuccccuccaucuggggaaaugcaacaucgccggauggauucugggcaauccugagugugaaucucucagcacagccuccucuuggagcuacaucguggagaccuuuuccucugauaacgggacgugcuauccgggagacuucauugauuacgaagaacugcgggagcagcuuagcuccgucagcucuuuugaacgcuucgagaucuuucccaagaccuccagcuggccuaaucacgacucuaacaagggcgugacagccgcuuguccccaugccggcgcgaaauccuucuauaagaaucugaucuggcucguuaaaaaggggaacagcuacccuaaacugucuaaguccuauauuaaugauaagggaaaagaagugcuuguccuguggggcauccaccaccccagcaccuccgccgaccaacagucucucuaccagaacgcugaugccuacguguuuguggggacaagcagauauuccaagaaauucaagccugagauugcuauccggccgaaaguccgcgaccaggagggaagaaugaauuacuauuggacccugguugaacccggcgauaagauuacguuugaggccacagggaaccugguggugccucgguacgcguucgccauggaacgcaacgcuggaagcggcaucauuaucucugacacccccguccaugauugcaauacaaccugucaaaccccuaaaggcgccaucaacacaucccuccccuuucagaauauucacccgaucacgauugggaagugcccuaaguaugugaaaagcaccaagcugagacuugcuacaggacugcggaacguucccucuauccagagccgcggccucuucggggccauugccggauuuaucgagggcggguggaccggaaugguggacggcugguacggcuaucaucaccagaaugaacaaggguccggauacgcugcggaccugaaaucuacacagaacgccaucgaugagauuaccaauaaggucaacagcgugaucgagaaaaugaauacgcaguucacagcuguuggcaaggaguucaaccaccuugagaagagaauugaaaaucugaacaaaaagguggacgauggguuucucgacaucuggaccuacaaugccgagcugcugguccuccuggaaaacgagcggacccuugauuaucaugacuccaaugugaaaaaccuguacgagaagguccgcagccagcucaaaaacaaugccaaggaaauuggaaacggcuguuucgaguuuuaucacaagugcgauaauacauguauggaaucugugaaaaacgggaccuacgacuauccuaaguacuccgaggaagcuaaacugaauagagaggagaucgauggcguuaaacuugaaagcacacggaucuaucaaauucuggccaucuacucuacgguggcguccagccucguccuggugguuucccugggagcuauuucuuucuggaugugcagcaacggcucccuccagugccgcaucuguauuuga

SEQ ID NO: 198269 - RNA, 1701 nt, Artificial Sequence; identical to SEQ ID NO: 194921
  derived and/or modified CDS sequence (opt5) from hemagglutinin__InfluenzaA__ADP95341

SEQ ID NO: 198270 - RNA, 1701 nt, Artificial Sequence; identical to SEQ ID NO: 194728
  derived and/or modified CDS sequence (opt5) from hemagglutinin__InfluenzaA__ADP95351

SEQ ID NO: 198271 - RNA, 1701 nt, Artificial Sequence; identical to SEQ ID NO: 194728
  derived and/or modified CDS sequence (opt5) from hemagglutinin__InfluenzaA__ADP95361

SEQ ID NO: 198272 - RNA, 1701 nt, Artificial Sequence; identical to SEQ ID NO: 194728
  derived and/or modified CDS sequence (opt5) from hemagglutinin__InfluenzaA__ADP95371

SEQ ID NO: 198273 - RNA, 1701 nt, Artificial Sequence; identical to SEQ ID NO: 194728
  derived and/or modified CDS sequence (opt5) from hemagglutinin__InfluenzaA__ADP95381

SEQ ID NO: 198274 - RNA, 1701 nt, Artificial Sequence; identical to SEQ ID NO: 194728
  derived and/or modified CDS sequence (opt5) from hemagglutinin__InfluenzaA__ADP95391

SEQ ID NO: 198275 - RNA, 1701 nt, Artificial Sequence; identical to SEQ ID NO: 194983
  derived and/or modified CDS sequence (opt5) from hemagglutinin__InfluenzaA__ADQ28007

SEQ ID NO: 198276 - RNA, 1701 nt, Artificial Sequence; identical to SEQ ID NO: 194741
  derived and/or modified CDS sequence (opt5) from hemagglutinin__InfluenzaA__ADQ28008

SEQ ID NO: 198277 - RNA, 1701 nt, Artificial Sequence; identical to SEQ ID NO: 196592
  derived and/or modified CDS sequence (opt5) from hemagglutinin__InfluenzaA__ADQ28009

SEQ ID NO: 198278 - RNA, 1701 nt, Artificial Sequence
  derived and/or modified CDS sequence (opt5) from hemagglutinin__InfluenzaA__ADQ28010
augaaggccauccuggugguccuccuguacaccuucgcuacagccaacgcggacacgcuuugcauuggcuaucacgcuaauaacagcaccgauacaguugacaccgugcuggagaagaaugugacagucacccauuccgugaaccuccuggaagauaagcacaaugggaaacuuuguaagcugagaggaguugcuccccuccaucugggcaaaugcaacaucgccggguggauucugggaaauccugagugugaaucucucagcacagccuccucuuggagcuacaucguggagaccuccucuagcgacaacggcacgugcuauccgggggauuuuauuaauuacgaagaacugcgggagcagcuuuccagcgucucuuccuucgaacgcuuugagaucuuccccaagaccagcucuuggccuaaccacgacuccaauaagggagugacagccgcuuguccccaugccggcgcgaaaucuuuuuauaagagccugaucuggcucguuaaaaagggcaacuccuacccuaaacugagcaaguccuauauuaaugauaaggggaaagaagugcuuguccuguggggaauccaccaccccucuaccagcgccgaccaacagucccucuaccagaacgcugaugccuacguguucgugggcacaagcagauauucuaagaaauuuaagccugagauugcuauccggccgaaaguccgcgaccaggaggggagaaugaauuacuauuggacccugguugaacccggagauaagauuacguucgaggccacaggcaaccugguggugccucgguacgcguuugccauggaacgcaacgcuggguccggaaucauuaucagcgacacccccguccaugauugcaauacaaccugucaaaccccuaaaggcgccaucaacacaucucuccccuuccagaauauucacccgaucacgauuggcaagugcccuaaguaugugaaaagcaccaagcugagacuugcuacagggcugcggaacguucccuccauccagucucgcggacucuuuggcgccauugccggguucaucgagggaggcuggaccgggaugguggacggaugguacggcuaucaucaccagaaugaacaaggcagcggguacgcugcggaccugaaauccacacagaacgccaucgaugagauuaccaauaaggucaacagcgugaucgagaaaaugaauacgcaguuuacagcuguuggaaaggaguucaaccaccuugagaagagaauugaaaaucugaacaaaaagguggacgauggcuuccucgacaucuggaccuacaaugccgagcugcugguccuccuggaaaacgagcggacccuugauuaucaugacucuaaugugaaaaaccuguacgagaagguccgcucccagcucaaaaacaaugccaaggaaauugggaacggauguuuugaguucuaucacaagugcgauaauacauguauggaaagcgugaaaaacggcaccuacgacuauccuaaguacucugaggaagcuaaacugaauagagaggagaucgaugggguuaaacuugaauccacacggaucuaucaaauucuggccaucuacagcacgguggcguccucucucguccuggugguuagccugggcgcuauuuccuuuuggaugugcucuaacggaagccuccagugccgcaucuguauuuga

SEQ ID NO: 198279 - RNA, 1701 nt, Artificial Sequence; identical to SEQ ID NO: 194741
  derived and/or modified CDS sequence (opt5) from hemagglutinin__InfluenzaA__ADQ28011

SEQ ID NO: 198280 - RNA, 1701 nt, Artificial Sequence; identical to SEQ ID NO: 194741
  derived and/or modified CDS sequence (opt5) from hemagglutinin__InfluenzaA__ADQ28012

SEQ ID NO: 198281 - RNA, 1701 nt, Artificial Sequence; identical to SEQ ID NO: 194741
  derived and/or modified CDS sequence (opt5) from hemagglutinin__InfluenzaA__ADQ28013

SEQ ID NO: 198282 - RNA, 1701 nt, Artificial Sequence; identical to SEQ ID NO: 194983
  derived and/or modified CDS sequence (opt5) from hemagglutinin__InfluenzaA__ADQ28014

SEQ ID NO: 198283 - RNA, 1701 nt, Artificial Sequence; identical to SEQ ID NO: 194983
  derived and/or modified CDS sequence (opt5) from hemagglutinin__InfluenzaA__ADQ28015

SEQ ID NO: 198284 - RNA, 1701 nt, Artificial Sequence; identical to SEQ ID NO: 194741
  derived and/or modified CDS sequence (opt5) from hemagglutinin__InfluenzaA__ADQ28016

SEQ ID NO: 198285 - RNA, 1701 nt, Artificial Sequence; identical to SEQ ID NO: 194741
  derived and/or modified CDS sequence (opt5) from hemagglutinin__InfluenzaA__ADQ28017

SEQ ID NO: 198286 - RNA, 1701 nt, Artificial Sequence; identical to SEQ ID NO: 196987
  derived and/or modified CDS sequence (opt5) from hemagglutinin__InfluenzaA__ADQ28018

SEQ ID NO: 198287 - RNA, 1701 nt, Artificial Sequence; identical to SEQ ID NO: 194983
  derived and/or modified CDS sequence (opt5) from hemagglutinin__InfluenzaA__ADQ28019

SEQ ID NO: 198288 - RNA, 1701 nt, Artificial Sequence
  derived and/or modified CDS sequence (opt5) from hemagglutinin__InfluenzaA__ADQ28020
auggaggccauccuggugguccuccuguacaccuucgcuacagccaacgcggacacgcuuugcauuggcuaucacgcuaauaacagcaccgauacaguugacaccgugcuggaaaagaaugugacagucacccauuccgugaaccuccuggaggauaaacacaaugggaaacuuuguaagcugagaggaguugcgccccuccaucugggcaagugcaacaucgccggguggauucugggaaauccugaaugugagucucucagcacagcuuccucuuggagcuacaucguggaaaccuccucuagcgacaacggcacgugcuauccgggggauuuuauugacuacgaggagcugcgggaacagcuuuccagcgucucuuccuucgagcgcuuugaaaucuuccccaaaaccagcucuuggccuaaucacgauuccaacaagggagugacagccgcuuguccccaagccggcgccaagagcuuuuauaaaaaucugaucuggcucguuaagaaaggcaacucuuacccuaagcuguccaaaagcuauauuaaugacaaggggaaggaggugcuuguccuguggggaauccaucaccccuccaccucugccgaucagcagagccucuaccagaacgcugacgccuacguguucgugggcuccagcagauauucuaaaaaguuuaaaccugagauugcuauccggccgaagguccgcgaucaagaagggagaaugaauuacuauuggacacugguugagcccggagacaaaauuaccuucgaagccacgggcaaccugguggugccucgguacgcguuugccauggagcgcaacgcuggguccggaaucauuaucagcgauacacccguccacgacugcaauaccacaugucagaccccuaagggcgccaucaacaccucucuccccuuccauaauauucacccgaucacaauuggcaaaugcccuaaguauguuaagagcacgaaacugagacuugcuaccgggcugcggaacgugcccuccauccagucucgcggacucuuuggcgccauugccggguucaucgaaggaggcuggacagggaugguggacggaugguacggcuaucaucaccagaaugagcaaggcagcggguacgcugcggaucugaaguccacccagaacgccaucgacgagauuacaaauaaagucaacagcgugaucgaaaagaugaauacccaguuuacggcuguuggaaaagaguucaaccaccuugaaaagagaauugagaaucugaacaagaaaguggaugacggcuuccucgauaucuggacauacaaugccgaacugcugguccuccuggagaacgagcggacccuugacuaucaugauucuaaugugaagaaccuguacgaaaaaguccgcucccagcucaagaacaaugccaaagagauugggaacggauguuuugaguucuaucacaagugcgacaauaccuguauggaaagcgugaagaacggcacauacgauuauccuaaauacucugaagaggcuaagcugaauagagaggaaaucgacgggguuaaacuugaguccacccggaucuaucaaauucuggccaucuacagcacaguggcguccucucucguccuggugguuagccugggcgcuauuuccuuuuggaugugcucuaacggaagccuccagugccgcaucuguauuuga

SEQ ID NO: 198289 - RNA, 1701 nt, Artificial Sequence; identical to SEQ ID NO: 195935
  derived and/or modified CDS sequence (opt5) from hemagglutinin__InfluenzaA__ADQ28021

SEQ ID NO: 198290 - RNA, 1701 nt, Artificial Sequence
  derived and/or modified CDS sequence (opt5) from hemagglutinin__InfluenzaA__ADQ28022
augaaggccauccuggugguccuccuguacaccuucgcuacagccaacgcggacacgcuuugcauuggcuaucacgcuaauaacagcaccgauacaguugacaccgugcuggagaagaaugugacagucacccauuccgugaaccuccuggaagauaagcacaaugggaaacuuuguaagcugagaggaguugcuccccuccaucugggcaaaugcaacaucgccggguggauucugggaaauccugagugugaaucucucagcacagccuccucuuggagcuacaucguggagaccuccucuagcgacaacggcacgugcuauccggggaauuuuauugauuacgaagaacugcgggagcagcuuuccagcgucucuuccuucgaacgcuuugagaucuuccccaagaccagcucuuggccuaaccacgacuccaauaagggagugacagccgcuuguccccaugccggcgcgaaaucuuuuuauaagaaccugaucuggcucguuaaaaagggcaauagcuacccuaaacuguccaagagcuauauuaacgauaaggggaaagaagugcuuguccuguggggaauccaccaccccuccaccucugccgaccaacagagccucuaccagaaugcugaugccuacguguucgugggcacauccagauauagcaagaaauuuaagccugagauugcuauccggccgaaaguccgcgggcaggagggaagaaugaacuacuauuggacccugguugaacccggcgacaagauuacguucgaggccacagggaaccugguggugccucgguacgcguuugccauggaacgcaaugcuggaucuggcaucauuaucuccgauacccccguccaugacugcaacacaaccugucaaaccccuaaaggcgccaucaauacaagccuccccuuccagaacauucacccgaucacgauugggaagugcccuaaguaugugaaaucuaccaagcugagacuugcuacaggacugcggaauguucccagcauccagucccgcggccucuuuggggccauugccggauucaucgagggcggguggaccggaaugguggauggcugguacggcuaucaucaccagaacgaacaagggucuggauacgcugcggaccugaaaagcacacagaaugccaucgacgagauuaccaacaaggucaauuccgugaucgagaaaaugaacacgcaguuuacagcuguuggcaaggaguucaaucaccuugagaagagaauugaaaaccugaauaaaaagguggaugacggguuccucgauaucuggaccuacaacgccgagcugcugguccuccuggaaaaugagcggacccuugacuaucaugauagcaacgugaaaaaccuguacgagaagguccgcucucagcucaaaaauaacgccaaggaaauuggaaauggcuguuuugaguucuaucacaagugcgacaacacauguauggaauccgugaaaaaugggaccuacgauuauccuaaguacagcgaggaagcuaaacugaacagagaggagaucgacggcguuaaacuugaaucuacacggaucuaucaaauucuggccaucuacuccacgguggcgagcucccucguccuggugguuucucugggagcuauuagcuuuuggaugugcuccaauggcucucuccagugccgcaucuguauuuga

SEQ ID NO: 198291 - RNA, 1701 nt, Artificial Sequence; identical to SEQ ID NO: 194741
  derived and/or modified CDS sequence (opt5) from hemagglutinin__InfluenzaA__ADQ28023

SEQ ID NO: 198292 - RNA, 1701 nt, Artificial Sequence; identical to SEQ ID NO: 194983
  derived and/or modified CDS sequence (opt5) from hemagglutinin__InfluenzaA__ADQ28024

SEQ ID NO: 198293 - RNA, 1701 nt, Artificial Sequence; identical to SEQ ID NO: 194983
  derived and/or modified CDS sequence (opt5) from hemagglutinin__InfluenzaA__ADQ28025

SEQ ID NO: 198294 - RNA, 1701 nt, Artificial Sequence; identical to SEQ ID NO: 195486
  derived and/or modified CDS sequence (opt5) from hemagglutinin__InfluenzaA__ADQ28028

SEQ ID NO: 198295 - RNA, 1701 nt, Artificial Sequence; identical to SEQ ID NO: 196966
  derived and/or modified CDS sequence (opt5) from hemagglutinin__InfluenzaA__ADQ28029

SEQ ID NO: 198296 - RNA, 1701 nt, Artificial Sequence
  derived and/or modified CDS sequence (opt5) from hemagglutinin__InfluenzaA__ADQ28030
augaaggccauccuggugguccuccuguacaccuucgcuacagccaacgcggacacgcuuugcauuggcuaucacgcuaauaacagcaccgauacaguugacaccgugcuggagaagaaugugacagucacccauuccgugaaccuccuggaagauaagcacaaugggaaacuuuguaagcugagaggaguugcuccccuccaucugggcaaaugcaacaucgccggguggauucugggaaauccugagugugaaucucucagcacagccuccucuuggagcuacaucguggagaccuccucuagcgacaacggcacgugcuauccgggggauuuuauuaauuacgaagaacugcgggagcagcuuuccagcgucucuuccuucgaacgcuuugagaucuuccccaagaccagcucuuggccuaaccacgacuccaauaagggaaucacagccgcuuguccccaugccggcgcgaaauccuuuuauaagaaccugauuuggcucgugaaaaagggcaauucuuacccuaaacuguccaagagcuauaucaacgauaaggggaaagaaguucuugugcuguggggcauucaccaccccuccaccucugccgaccaacagagccucuaccagaaugcugaugccuacgucuucgugggaacauccagauauagcaagaaauuuaagccugagaucgcuauucggccgaaagugcgcgaccaggaggggagaaugaacuacuauuggacccuggucgaacccggagauaagaucacguucgaggccacaggcaaccugguugugccucgguacgcguuugccauggaacgcaaugcugggucuggaauuaucaucuccgacacccccgugcaugauugcaacacaaccugucaaaccccuaaaggcgccauuaauacaagccuccccuuccagaacauccacccgauuacgaucggcaagugcccuaaguaugucaaaucuaccaagcugagacuugcuacagggcugcggaaugugcccagcauucagucccgcggacucuuuggcgccaucgccggguucaucgagggaggcuggaccgggaugguugacggaugguacggcuaucaucaccagaacgaacaaggcucuggguacgcugcggaccugaaaagcacacagaaugccauugaugagaucaccaacaaggugaauagcgucauugagaaaaugaacacgcaguuuacagcugugggaaaggaguucaaucaccuugagaagagaaucgaaaaccugaauaaaaagguugacgauggcuuccucgacauuuggaccuacaacgccgagcugcuggugcuccuggaaaaugagcggacccuugauuaucaugacagcaacgucaaaaaccuguacgagaaggugcgcucucagcucaaaaauaacgccaaggaaaucgggaauggauguuuugaguucuaucacaagugcgauaacacauguauggaauccgucaaaaauggcaccuacgacuauccuaaguacagcgaggaagcuaaacugaacagagaggagaucgauggggugaaacuugaaucuacacggauuuaucaaauccuggccauuuacuccacgguugcgagcucccucgugcuggucgugucucugggcgcuaucagcuuuuggaugugcuccaauggaucucuccagugccgcauuuguaucuga

SEQ ID NO: 198297 - RNA, 1701 nt, Artificial Sequence; identical to SEQ ID NO: 195935
  derived and/or modified CDS sequence (opt5) from hemagglutinin__InfluenzaA__ADQ28031

SEQ ID NO: 198298 - RNA, 1701 nt, Artificial Sequence; identical to SEQ ID NO: 194983
  derived and/or modified CDS sequence (opt5) from hemagglutinin__InfluenzaA__ADQ28032

SEQ ID NO: 198299 - RNA, 1701 nt, Artificial Sequence
  derived and/or modified CDS sequence (opt5) from hemagglutinin__InfluenzaA__ADQ28034
augaaggccauccuggugguccuccuguacaccuucgcuacagccaacgcggacacgcuuugcauuggcuaucacgcuaauaacagcaccgauacaguugacaccgugcuggagaaaaaugugacagucacccauuccgugaaccuccuggaagauaagcacaaugggaaacuuuguaagcugagaggaguugcuccccuccaucugggcaaaugcaacaucgccggguggauucugggaaauccugagugugaaucucucagcacagccuccucuuggagcuacaucguggagaccuccucuagcgacaacggcacgugcuauccgggggauuuuauuaauuacgaagaacugcgggagcagcuuuccagcgucucuuccuucgaacgcuuugagaucuuccccaagaccagcucuuggccuaaccacgacuccaauaagggagugacagccgcuuguccccaugccggcgcgaaaucuuuuuauaagaaccugaucuggcucguuaaaaagggcaauagcuacccuaaacuguccaagagcuauauuaacgauaaggggaaagaagugcuuguccuguggggaauccaccaccccuccaccucugccgaccaacagagccucuaccagaaugcugaugccuacguguucgugggcacauccagauauagcaagaaauuuaagccugagauugcuauccggccgaaaguccgcgggcaggagggaagaaugaacuacuauuggaccauuguugaacccggcgacaagaucacguucgaggccacagggaaccugguggugccucgguacgcguuugccauggaacgcaaugcuggaucuggcauuaucaucuccgauacccccguccaugacugcaacacaaccugucaaaccccuaaaggcgccauuaauacaagccugcccuuccagaacauccacccgauuacgaucgggaagugcccuaaguaugugaaaucuaccaagcucagacuggcuacaggacuucggaauguucccagcauucagucccgcggccuguuuggggccaucgccggauucaucgagggcggguggaccggaaugguggauggcugguacggcuaucaucaccagaacgaacaagggucuggauacgcugcggaccucaaaagcacacagaaugccauugacgagaucaccaacaaggucaauuccgugauugagaaaaugaacacgcaguuuacagcuguuggcaaggaguucaaucaccuggagaagagaaucgaaaaccuuaaucggaaaguggaugacggguuccuggauauuuggaccuacaacgccgagcuccugguccugcucgaaaaugagcgcacccuggacuaucaugauagcaacgugaagaaccuuuacgagaaagucagaucucagcugaagaauaacgccaaagaaaucggaaauggcuguuuugaguucuaucacaagugcgacaacacauguauggaauccgugaagaaugggaccuacgauuauccuaaauacagcgaggaagcuaagcucaaccgggaggagaucgacggcguuaaacuggaaucuacacgcauuuaucaaauccuugccauuuacuccacgguggcgagcucccugguccucgugguuucucugggagcuaucagcuuuuggaugugcuccaauggcucucugcagugcagaauuuguaucuga

SEQ ID NO: 198300 - RNA, 1701 nt, Artificial Sequence
  derived and/or modified CDS sequence (opt5) from hemagglutinin__InfluenzaA__ADQ28035
augaaggccauccuggugguccuccuguacaccuucgcuacagccaacgcggacacgcuuugcauuggcuaucacgcuaauaacagcaccgauacaguugacaccgugcuggagaaaaaugugacagucacccauuccgugaaccuccuggaagauaagcacaaugggaaacuuuguagacugcggggaguugcgccccuccaucugggcaagugcaacaucgccggguggauucugggaaauccugagugugaaucucucagcacagcuuccucuuggagcuacaucguggagaccuccucuagcgacaacggcacgugcuauccgggggauuuuauugacuacgaagaacugcgcgagcagcuuuccagcgucucuuccuucgaaagauuugagaucuuccccaaaaccagcucuuggccuaaucacgauuccaacaagggagugacagccgcuuguccccaugccggcgccaagagcuuuuauaaaaaucugaucuggcucguuaagaaaggcaacucuuacccuaagcuguccaaaagcuauauuaaugacaaggggaaggaagugcuuguccuguggggaauccaccaccccuccaccucugccgaucaacagagccucuaccagaacgcugacgccuacguguucgugggcacaucccgguauagcaaaaaguuuaaaccugagauugcuauccgcccgaaggucagagggcaggagggacggaugaauuacuauuggacccugguugaacccggcgauaaaauuacguucgaggccacagggaaccugguggugccucgcuacgcguuugccauggaaagaaacgcuggaucuggcaucauuaucuccgacacccccguccaugauugcaauacaaccugucaaaccccuaagggcgccaucaacacaagccuccccuuccagaauauucacccgaucacgauugggaaaugcccuaaguaugugaagucuaccaaacugcggcuugcuacaggacugcgcaacguucccagcauccaguccagaggccucuuuggggccauugccggauucaucgagggcggguggaccggaaugguggacggcugguacggcuaucaucaccagaaugaacaagggucuggauacgcugcggaccuuaagagcacacagaacgccaucgaugagauuaccaauaaagucaacuccgugaucgagaagaugaauacgcaguuuacagcuguuggcaaagaguucaaccaccuggagaagcggauugaaaaucugaacaagaaaguggacgauggguuccucgacaucuggaccuacaaugccgagcugcugguccuccuggaaaacgagcgcacccuugauuaucaugacagcaaugugaagaaccuguacgagaaagucagaucucagcucaagaacaaugccaaagaaauuggaaacggcuguuuugaguucuaucacaagugcgauaauacauguauggaauccgugaagaacgggaccuacgacuauccuaaauacagcgaggaagcuaagcugaaucgggaggagaucgauggcguuaaacuugaaucuacacgcaucuaucaaauucuggccaucuacuccacgguggcgagcucccucguccuggugguuucucugggagcuauuagcuuuuggaugugcuccaacggcucucuccagugcagaaucuguauuuga

SEQ ID NO: 198301 - RNA, 1701 nt, Artificial Sequence; identical to SEQ ID NO: 194741
  derived and/or modified CDS sequence (opt5) from hemagglutinin__InfluenzaA__ADQ28036

SEQ ID NO: 198302 - RNA, 1701 nt, Artificial Sequence; identical to SEQ ID NO: 194741
  derived and/or modified CDS sequence (opt5) from hemagglutinin__InfluenzaA__ADQ28037

SEQ ID NO: 198303 - RNA, 1701 nt, Artificial Sequence; identical to SEQ ID NO: 194983
  derived and/or modified CDS sequence (opt5) from hemagglutinin__InfluenzaA__ADQ28038

SEQ ID NO: 198304 - RNA, 1701 nt, Artificial Sequence; identical to SEQ ID NO: 194741
  derived and/or modified CDS sequence (opt5) from hemagglutinin__InfluenzaA__ADQ28039

SEQ ID NO: 198305 - RNA, 1701 nt, Artificial Sequence; identical to SEQ ID NO: 194983
  derived and/or modified CDS sequence (opt5) from hemagglutinin__InfluenzaA__ADQ28040

SEQ ID NO: 198306 - RNA, 1701 nt, Artificial Sequence; identical to SEQ ID NO: 194983
  derived and/or modified CDS sequence (opt5) from hemagglutinin__InfluenzaA__ADQ28041

SEQ ID NO: 198307 - RNA, 1701 nt, Artificial Sequence
  derived and/or modified CDS sequence (opt5) from hemagglutinin__InfluenzaA__ADQ28043
auggaggccauccuggugguccuccuguacaccuucgcuacagccaacgcggacacgcuuugcauuggcuaucacgcuaauaacagcaccgauacaguugacaccgugcuggaaaagaaugugacagucacccauuccgugaaccuccuggaggauaaacacaaugggaaacuuuguaagcugagaggaguugcuccccuccaucugggcaagugcaacaucgccggguggauucugggaaauccugaaugugagucucucagcacagccuccucuuggagcuacaucguggaaaccuccucuagcgacaacggcacgugcuauccgggggauuuuauugacuacgaggagcugcgggaacagcuuuccagcgucucuuccuucgagcgcuuugaaaucuuccccaaaaccagcucuuggccuaaucacgauuccaacaagggagugacagccgcuuguccccaugacggcgccaagagcuuuuauaaaaaucugaucuggcucguuaagaaaggcaacucuuacccuaagcuguccaaaagcuauauuaaugauaaggggaaggaggugcuuguccuguggggaauccaccaccccuccaccucugcggaccaacagagccucuaccagaacgccgaugcuuacguguucgugggcuccagcagauauucuaaaaaguuuaaaccugagauugccauccggccgaagguccgcgaccaggaagggagaaugaauuacuauuggacacugguugagcccggagauaaaauuaccuucgaagcuacgggcaaccugguggugccucgguacgccuuugcgauggagcgcaacgccggguccggaaucauuaucagcgacacacccguccaugacugcaauaccacaugucaaaccccuaagggcgcuaucaacaccucucuccccuuccacaauauucauccgaucacaauuggcaaaugcccuaaguauguuaagagcacgaaacugagacuugccaccgggcugcggaacgugcccuccauccagucucgcggacucuuuggcgcuauugccggguucaucgaaggaggcuggacagggaugguggauggaugguacggcuaucaccaccagaaugagcagggcagcggguacgccgcugaccugaaguccacccaaaacgcgaucgaugagauuacaaauaaagucaacagcgugaucgaaaagaugaauacccaguuuacggccguuggaaaagaguucaaccaucuugaaaagagaauugagaaucugaacaagaaaguggacgauggcuuccucgacaucuggacauacaaugcugaacugcugguccuccuggagaacgagcggacccuugauuaucacgacucuaaugugaagaaccuguacgaaaaaguccgcucccagcucaagaacaaugccaaagagauugggaacggauguuuugaguucuaucauaagugcgauaauaccuguauggaaagcgugaagaacggcacauacgacuauccuaaauacucugaagaggccaagcugaauagagaggaaaucgaugggguuaaacuugaguccacccggaucuaucagauucuggcuaucuacagcacaguggccuccucucucguccuggugguuagccugggcgcgauuuccuuuuggaugugcucuaacggaagccuccaaugccgcaucuguauuuga

SEQ ID NO: 198308 - RNA, 1701 nt, Artificial Sequence; identical to SEQ ID NO: 194983
  derived and/or modified CDS sequence (opt5) from hemagglutinin__InfluenzaA__ADQ28044

SEQ ID NO: 198309 - RNA, 1701 nt, Artificial Sequence
  derived and/or modified CDS sequence (opt5) from hemagglutinin__InfluenzaA__ADQ28045
augaaggccauccuggugguccuccuguacaccuucgcuacagccaacgcggacacgcuuugcauuggcuaucacgcuaauaacagcaccgauacaguugacaccgugcuggagaagaaugugacagucacccauuccgugaaccuccuggaagauaagcacaaugggaaacuuuguaagcugagaggaguugcuccccuccaucugggcaaaugcaacaucgccggguggauucugggaaauccugagugugaaucucucagcacagccuccucuuggagcuacaucguggagaccuccucuagcgacaacggcacgugcuauccgggggauuuuauugacuacgaagaacugcgggagcagcuuuccagcgucucuuccuucgaacgcuuugagaucuuccccaagaccagcucuuggccuaaucacgauuccaacaagggagugacagccgcuuguagccaugccggcgcgaaaucuuuuuauaagaaucugaucuggcucguuaaaaagggcaacuccuaccccaaacugagcaaguccuauauuaaugacaaggggaaagaagugcuuguccuguggggaauccaccacccuucuaccagcgccgaucaacagucccucuaccagaacgcugacgccuacguguucgugggcacaagcagauauucuaagaaauuuaagcccgagauugcuauccggccuaaaguccgcgaucaggaggggagaaugaauuacuauuggacccugguugaaccgggagacaagauuacguucgaggccacaggcaaccugguggugccccgguacgcguuugccauggaacgcaacgcuggguccggaaucauuaucagcgauaccccuguccaugacugcaauacaaccugucaaacccccaaaggcgccaucaacacaucucucccuuuccagaauauucaccccaucacgauuggcaagugcccgaaguaugugaaaagcaccaagcugagacuugcuacagggcugcggaacguuccuuccauccagucucgcggacucuuuggcgccauugccggguucaucgagggaggcuggaccgggaugguggacggaugguacggcuaucaucaccagaaugaacaaggcagcggguacgcugcggaucugaaauccacacagaacgccaucgacgagauuaccaauaaggucaacagcgugaucgagaaaaugaauacgcaguuuacagcuguuggaaaggaguucaaccaccuugagaagagaauugaaaaucugaacaaaaagguggaugacggcuuccucgauaucuggaccuacaaugccgagcugcugguccuccuggaaaacgagcggacccuugacuaucaugauucuaaugugaaaaaccuguacgagaagguccgcaaccagcucaaaaauaacgccaaggaaauugggaauggauguuuugaguucuaucacaagugcgacaacacauguauggaauccgugaaaaauggcaccuacgauuaucccaaguacagcgaggaagcuaaacugaacagagaggagaucgacgggguuaaacuugaaucuacacggaucuaucaaauucuggccaucuacuccacgguggcgagcucccucguccuggugguuucucugggcgcuauuagcuuuuggaugugcuccaauggaucucuccagugccgcaucuguauuuga

SEQ ID NO: 198310 - RNA, 1701 nt, Artificial Sequence; identical to SEQ ID NO: 195211
  derived and/or modified CDS sequence (opt5) from hemagglutinin__InfluenzaA__ADQ28047

SEQ ID NO: 198311 - RNA, 1701 nt, Artificial Sequence; identical to SEQ ID NO: 194741
  derived and/or modified CDS sequence (opt5) from hemagglutinin__InfluenzaA__ADQ28048

SEQ ID NO: 198312 - RNA, 1701 nt, Artificial Sequence; identical to SEQ ID NO: 194983
  derived and/or modified CDS sequence (opt5) from hemagglutinin__InfluenzaA__ADQ28049

SEQ ID NO: 198313 - RNA, 1701 nt, Artificial Sequence; identical to SEQ ID NO: 194741
  derived and/or modified CDS sequence (opt5) from hemagglutinin__InfluenzaA__ADQ28050

SEQ ID NO: 198314 - RNA, 1701 nt, Artificial Sequence
  derived and/or modified CDS sequence (opt5) from hemagglutinin__InfluenzaA__ADQ28051
augaaggccauccuggugguccuccuguacaccuucgcuacagccaacgcggacacgcuuugcauuggcuaucacgcuaauaacagcaccgauacaguugacaccgugcuggagaagaaugugacagucacccauuccgugaaccuccuggaagauaagcacgacgggaaacuuuguaagcugagaggaguugcuccccuccaucugggcaaaugcaauaucgccggguggauucugggaaacccugagugugaaucucucagcacagccuccucuuggagcuacaucguggagaccuccucuagcgauaauggcacgugcuauccgggggacuuuauuaacuacgaagaacugcgggagcagcuuuccagcgucucuuccuucgaacgcuuugagaucuuccccaagaccagcucuuggccuaaucacgauuccaacaagggagugacagccgcuuguccccaugccggcgcgaaaucuuuuuauaagaaucugaucuggcucguuaaaaagggcaacagcuacccuaaacuguccaagagcuauauuaaugacaaggggaaagaagugcuuguccuguggggaauccaccaccccuccaccucugccgaucaacagagccucuaccagaacgcugacgccuacguguucgugggcacauccagauauagcaagaaauuuaagccugagauugcuauccggccgaaaguccgcgaucaggaggggagaaugaauuacuauuggacccugguugaacccggagacaagauuacguucgaggccacaggcaaccugguggugccucgguacgcguuugccauggaacgcaacgcugggucuggaaucauuaucuccgauacccccguccaugacugcaauacaaccugucaaaccccuaaaggcgccaucaacacaagccuccccuuccagaauauucacccgaucacgauuggcaagugcccuaaguaugugaaaucuaccaagcugagacuugcuacagggcugcggaacguucccagcauccagucccgcggacucuuuggcgccauugccggguucaucgagggaggcuggaccgggaugguggacggaugguacggcuaucaucaccagaaugaacaaggcucuggguacgcugcggaucugaaaagcacacagaacgccaucgacgagauuaccaauaaggucaacuccgugaucgagaaaaugaauacgcaguuuacagcuguuggaaaggaguucaaccaccuugagaagagaauugaaaaucugaacaaaaagguggaugacggcuuccucgauaucuggaccuacaaugccgagcugcugguccuccuggaaaacgagcggacccuugacuaucaugauagcaaugugaaaaaccuguacgagaagguccgcucucagcucaaaaacaaugccaaggaaauugggaacggauguuuugaguucuaucacaagugcgacaauacauguauggaauccgugaaaaacggcaccuacgauuauccuaaguacagcgaggaagcuaaacugaauagagaggagaucgacgggguuaaacuugaaucuacacggaucuaucaaauucuggccaucuacuccacgguggcgagcucccucguccuggugguuucucugggcgcuauuagcuuuuggaugugcuccaacggaucucuccagugccgcaucuguauuuga

SEQ ID NO: 198315 - RNA, 1701 nt, Artificial Sequence; identical to SEQ ID NO: 194741
  derived and/or modified CDS sequence (opt5) from hemagglutinin__InfluenzaA__ADQ28053

SEQ ID NO: 198316 - RNA, 1701 nt, Artificial Sequence; identical to SEQ ID NO: 194983
  derived and/or modified CDS sequence (opt5) from hemagglutinin__InfluenzaA__ADQ28055

SEQ ID NO: 198317 - RNA, 1701 nt, Artificial Sequence
  derived and/or modified CDS sequence (opt5) from hemagglutinin__InfluenzaA__ADQ28056
auggaggccauccuggugguccuccuguacaccuucgcuacagccgacgcggauacgcuuugcauuggcuaucacgcuaacaauagcaccgacacaguugauaccgugcuggaaaagaacgugacagucacccauuccgugaaucuccuggaggacaaacacaacgggaaacuuuguaagcugagaggaguugcgccccuccaucugggcaagugcaauaucgccggguggauucugggaaacccugaaugugagucucucagcacagcuuccucuuggagcuacaucguggaaaccuccucuagcgauaauggcacgugcuauccgggggacuuuauugauuacgaggagcugcgggaacagcuuuccagcgucucuuccuucgagcgcuuugaaaucuuccccaaaaccagcucuuggccuaaccacgacuccaauaagggagugacagccgcuuguccccaugccggcgccaagagcuuuuauaaaaaccugaucuggcucguuaagaaaggcaauucuuacccuaagcuguccaaaagcuauauuaacgauaaggggaaggaggugcuuguccuguggggaauccaccaccccuccaccucugccgaccaacagagccucuaccagaaugcugaugccuacguguucgugggcuccagcagauauucuaaaaaguuuaaaccugagauugcuauccggccgaagguccgcgaccaggaagggagaaugaacuacuauuggacacugguugagcccggagauaaaauuaccuucgaagccacgggcaaucugguggugccucgguacgcguuugccauggagcgcaacgcuggguccggaaucauuaucagcgacacacccguccaugacugcaacaccacaugucaaaccccuaagggcgccaucaauaccucucuccccuuccacaacauucauccgaucacaauuggcaaaugcccuaaguauguuaagagcacgaaacugagacuugcuaccgggcugcggaaugugcccuccauccagucucgcggacucuuuggcgccauugccggguucaucgaaggaggcuggacagggaugguggauggaugguacggcuaucaccaccagaacgagcagggcagcggguacgcugcggaccugaaguccacccaaaaugccaucgaugagauuacaaacaaagucaauagcgugaucgaaaagaugaacacccaguuuacggcuguuggaaaagaguucaaucaucuugaaaagagaauugagaaccugaauaagaaaguggacgauggcuuccucgacaucuggacauacaacgccgaacugcugguccuccuggagaaugagcggacccuugauuaucacgacucuaacgugaagaaucuguacgaaaaaguccgcucccagcucaagaacaacgccaaagagauugggaauggauguuuugaguucuaucauaagugcgauaacaccuguauggaaagcgugaagaauggcacauacgacuauccuaaauacucugaagaggcuaagcugaacagagaggaaaucgaugggguuaaacuugaguccacccggaucuaucagauucuggccaucuacagcacaguggcguccucucucguccuggugguuagccugggcgcuauuuccuuuuggaugugcucuaauggaagccuccaaugccgcaucuguauuuga

SEQ ID NO: 198318 - RNA, 1701 nt, Artificial Sequence; identical to SEQ ID NO: 194741
  derived and/or modified CDS sequence (opt5) from hemagglutinin__InfluenzaA__ADQ28057

SEQ ID NO: 198319 - RNA, 1701 nt, Artificial Sequence; identical to SEQ ID NO: 194741
  derived and/or modified CDS sequence (opt5) from hemagglutinin__InfluenzaA__ADQ28058

SEQ ID NO: 198320 - RNA, 1701 nt, Artificial Sequence
  derived and/or modified CDS sequence (opt5) from hemagglutinin__InfluenzaA__ADQ28059
augaaggccauccuggugguccuccuguacacccuugcuacagccaacgcggacacgcugugcauuggcuaucacgcuaauaacagcaccgauacaguugacaccgugcucgagaaaaaugugacagucacccauuccgugaaccugcuugaagauaagcacaaugggaaacuguguaagcucagaggaguugcuccccugcaucugggcaaaugcaacaucgccggguggauucucggaaauccugagugugaaucucugagcacagccuccucuuggagcuacaucguggagaccuccucuagcgacaacggcacgugcuauccgggggauuucauugacuacgaggaacuucgggagcagcuguccagcgucucuuccuuugaacgcuucgagaucuuucccaagaccagcucuuggccuaaucacgauuccaacaagggagugacagccgcuuguccccaugccggcgcgaaaucuuucuauaagaaucucaucuggcugguuaaaaagggcaacagcuacccuaaacuuuccaagagcuauauuaaugacaaggggaaagaagugcugguccucuggggaauccaccaccccuccaccucugccgaucaacagagccuguaccagaacgcugacgccuacguguuugugggcacauccaaguauagcaaaaaguucaaaccugagauugcuaucagaccgaagguccgggaucaggaggggcgcaugaauuacuauuggacccugguugaacccggagacaaaauuacguuugaggccacaggcaaccucguggugccuagauacgcguucgccauggaacggaacgcugggucuggaaucauuaucuccgauacccccguccaugacugcaauacaaccugucaaaccccuaagggcgccaucaacacaagccugcccuuucagaauauucacccgaucacgauuggcaagugcccuaaauaugugaagucuaccaaacuucgccuggcuacagggcucagaaacguucccagcauccagucccggggacuguucggcgccauugccggguuuaucgagggaggcuggaccgggaugguggacggaugguacggcuaucaucaccagaaugaacaaggcucuggguacgcugcggaucuuaagagcacacagaacgccaucgacgagauuaccaauaaagucaacuccgugaucgagaagaugaauacgcaguucacagcuguuggaaaggaauuuaaccaccuggagaaacgcauugaaaaucucaacaagaaaguggaugacggcuuccuggauaucuggaccuacaaugccgagcugcucguccugcuugaaaacgagagaacccuggacuaucaugauagcaaugugaagaaccucuacgagaaaguccggucucagcugaagaacaaugccaaggaaauugggaacggauguuucgaguuuuaucacaaaugcgacaauacauguauggaauccgugaagaacggcaccuacgauuauccuaaauacagcgaggaagcuaaacuuaaucgcgaggagaucgacgggguuaagcuggaaucuacaagaaucuaucaaauucucgccaucuacuccacgguggcgagcucccugguccuggugguuucucucggcgcuauuagcuucuggaugugcuccaacggaucucugcagugccggaucuguauuuga

SEQ ID NO: 198321 - RNA, 1701 nt, Artificial Sequence; identical to SEQ ID NO: 194741
  derived and/or modified CDS sequence (opt5) from hemagglutinin__InfluenzaA__ADQ28060

SEQ ID NO: 198322 - RNA, 1701 nt, Artificial Sequence
  derived and/or modified CDS sequence (opt5) from hemagglutinin__InfluenzaA__ADQ28061
augaaggccauccuggugguccuccuguacaccuucgcuacagccaacgcggacacgcuuugcauuggcuaucacgcuaauaacagcaccgauacaguugacaccgugcuggagaaaaaugugacagucacccauuccgugaaccuccuggaagauaagcacaaugggaaacuuuguaagcugagaggaguugcgccccuccaucugggccggugcaacaucgccggguggauucugggaaauccugagugugaaucucucagcacagcuuccucuuggagcuacaucguggagaccuccucuagcgacaacggcacgugcuauccgggggauuuuauugacuacgaagaacugcgcgagcagcuuuccagcgucucuuccuucgaaagauuugagaucuuccccaaaaccagcucuuggccuaaucacgauuccaacaagggagugacagccgcuuguccccaugccggcgccaagagcuuuuauaaaaaucugaucuggcucguuaagaaaggcaacucuuacccuaagcuguccaaaagcuauauuaaugacaaggggaaggaagugcuuguccuguggggaauccaccaccccuccaccucugccgaucaacagagccucuaccagaacgcugacgccaauguguucgugggcacaucccgguacagcaaaaaguuuaaaccugagauugcuauccgcccgaaggucagagaucaggaggggcggaugaacuauuacuggacccugguugaacccggagacaaaauuacguucgaggccacaggcaaccugguggugccucgcuaugcguuugccauggaaagaaaugcugggucuggaaucauuaucuccgauacccccguccaugacugcaacacaaccugucaaaccccuaagggcgccaucaauacaagccuccccuuccagaacauucacccgaucacgauuggcaaaugcccuaaguacgugaagucuaccaaacugcggcuugcuacagggcugcgcaauguucccagcauccaguccagaggacucuuuggcgccauugccggguucaucgagggaggcuggaccgggaugguggacggaugguauggcuaccaucaccagaacgaacaaggcucuggguaugcugcggaucuuaagagcacacagaaugccaucgacgagauuaccaacaaagucaauuccgugaucgagaagaugaacacgcaguuuacagcuguuggaaaagaguucaaucaccuggagaagcggauugaaaaccugaauaagaaaguggaugacggcuuccucgauaucuggaccuacaacgccgagcugcugguccuccuggaaaaugagcgcacccuugacuaccaugauagcaacgugaagaaccuguaugagaaagucagaucucagcucaagaauaacgccaaagaaauugggaauggauguuuugaguucuaccacaagugcgacaacacauguauggaauccgugaagaauggcaccuaugauuacccuaaauauagcgaggaagcuaagcugaaccgggaggagaucgacgggguuaaacuugaaucuacacgcaucuaccaaauucuggccaucuauuccacgguggcgagcucccucguccuggugguuucucugggcgcuauuagcuuuuggaugugcuccaauggaucucuccagugcagaaucuguauuuga

SEQ ID NO: 198323 - RNA, 1701 nt, Artificial Sequence
  derived and/or modified CDS sequence (opt5) from hemagglutinin__InfluenzaA__ADQ28063
augaaggccauccuggugguccuccuguacaccuucgcuacagccaacgcggacacgcuuugcauuggcuaucacgcuaauaacagcaccgauacaguugacaccgugcuggagaaaaaugugacagucacccauuccgugaaccuccuggaagauaagcacaaugggaaacuuuguaagcugagaggaguugcuccccuccaucugggcaaaugcaacaucgccggguggauucugggaaauccugagugugaaucucucagcacagccuccucuuggagcuacaucguggagaccuccucuagcgacaacggcacgugcuauccgggggauuuuauuaauuacgaagaacugcgggagcagcuuuccagcgucucuuccuucgaacgcuuugagaucuuccccaagaccagcucuuggccuaaccacgacuccaauaagggagugacagccgcuuguccccaugccggcgcgaaaucuuuuuauaagaaccugaucuggcucguuaaaaagggcaauagcuacccuaaacuguccaagagcuauauuaacgauaaggggaaagaagugcuuguccuguggggaauccaccaccccuccaccucugccgaccaacagagccucuaccagaaugcugaugccuacguguucgugggcacauccagauauagcaagaaauuuaagccugagauugcuauccggccgaaaguccgcaaccaggaggggagaaugaacuaccauuggacccugguuaagcccggagacaaaauuacguucgaagccacaggcaaucugguggugccucgguaugcguuugccgucgagcgcaacgcugggucuggaaucauuaucuccgauacccccgugcacgacugcaauacaaccugucaaaccccuaagggcgccaucaacacaagccuccccuuccagaauauucauccgaucacgauuggcaagugcccuaaauacguuaagucuaccaaacugagacuugcuacagggcugcggaacgugcccagcauccagucccgcggacucuuuggcgccauugccggguucaucgaaggaggcuggaccgggauggucgauggaugguauggcuaccaccaccagaaugagcaaggcucuggguaugcugcggaccugaaaagcacacagaacgccaucgacgaaauuaccaauaaagugaacuccguuaucgagaagaugaauacgcaguuuacagcugugggaaaggaguucaaccaucuugaaaagagaauugagaaucugaacaagaaagucgaugacggcuuccucgauaucuggaccuacaaugccgaacugcuggugcuccuggagaacgaacggacccuugacuaccacgauagcaacgucaagaaucuguaugagaaagugcgcucucagcucaagaacaaugccaaggagauugggaacggauguuuugaguucuaccauaaaugcgacaauacauguauggaguccguuaagaacggcaccuaugauuacccuaaauauagcgaagaggcuaagcugaauagagaagagaucgacggggugaaacuugagucuacacggaucuaccaaauucuggccaucuauuccacggucgcgagcucccucgugcugguugugucucugggcgcuauuagcuuuuggaugugcuccaacggaucucuccagugccgcaucuguauuuga

SEQ ID NO: 198324 - RNA, 1701 nt, Artificial Sequence; identical to SEQ ID NO: 195489
  derived and/or modified CDS sequence (opt5) from hemagglutinin__InfluenzaA__ADQ28064

SEQ ID NO: 198325 - RNA, 1701 nt, Artificial Sequence
  derived and/or modified CDS sequence (opt5) from hemagglutinin__InfluenzaA__ADQ28065
augaaggccauccuggugguccuccuguacaccuucgcuacagccaacgcggacacgcuuugcauuggcuaucacgcuaauaacagcaccgauacaguugacaccgugcuggagaaaaaugugacagucacccauuccgugaaccuccuggaagauaagcacaaugggaaacuuuguaagcugagaggaguugcuccccuccaucugggcaaaugcaacaucgccggguggauucugggaaauccugagugugaaucucucagcacagccuccucuuggagcuacaucguggagaccuccucuagcgacaacggcacgugcuauccgggggauuuuauugacuacgaagaacugcgggagcagcuuuccagcgucucuuccuucgaacgcuuugagaucuuccccaagaccagcucuuggccuaaucacgauuccaacaagggagugacagccgcuuguccccaugccggcgcgaaaucuuuuuauaagaaucugaucuggcucguuaaaaagggcaacagcuacccuaaacuguccaagagcuauauuaaugacaaggggaaagaagugcuuguccuguggggaauccaccaccccuccaccucugccggccaacagagccucuaccagaacgcugaugccuacguguucguggggacauccagauauagcaagaaauuuaagccugagauugcuauccggccgaaaguccgcgaccaggagggaagaaugaauuacuauuggacccugguugaacccggcgauaagauuacguucgaggccacagggaaccugguggugccucgguacgcguuugccauggaacgcaacgcuggaucuggcaucauuaucuccgacacccaaguccaugauugcaauacaaccugucagacccccaaaggcgccaucaacacaagccucccuuuccagaauauucaccccaucacgauugggaagugcccgaaguaugugaaaucuaccaagcugagacuugcuacaggacugcggaacguuccuagcauccagucccgcggccucuuuggggccauugccggauucaucgagggcggguggaccggaaugguggacggcugguacggcuaucaucaccaaaaugaacaggggucuggauacgcugcggaccugaaaagcacacagaacgccaucgauaagauuaccaauaaagucaacuccgugaucgagaagaugaauacgcaguuuacagcuguuggcaaggaguucaaccaccuugagaaaagaauugagaaucugaacaagaaaguggacgauggguuccucgacaucuggaccuacaaugccgaacugcugguccuccuggagaacgaacggacccuugauuaucaugacagcaaugugaagaaccuguacgagaaaguccgcucucaacucaagaacaaugccaaggagauuggaaacggcuguuuugaguucuaucacaaaugcgauaauacauguauggaauccgugaagaacgggaccuacgacuaucccaaauacagcgaagaggcuaagcugaauagagaagagaucgauggcguuaaacuugagucuacacggaucuaucagauucuggccaucuacuccacgguggcgagcucccucguccuggugguuucucugggagcuauuagcuuuuggaugugcuccaacggcucucuccagugccgcaucuguauuuga

SEQ ID NO: 198326 - RNA, 1701 nt, Artificial Sequence
  derived and/or modified CDS sequence (opt5) from hemagglutinin__InfluenzaA__ADQ28066
augaaggccauccuggugguccuccuguacaccuucgcuacagccaacgcggacacgcuuugcauuggcuaucacgcuaauaacagcaccgauacaguugacaccgugcuggagaaaaaugugacagucacccauuccgugaaccuccuggaagauaagcacaaugggaaacuuuguaagcugagaggaguugcuccccuccaucugggcaaaugcaacaucgccggguggauucugggaaauccugagugugaaucucucagcacagccuccucuuggagcuacaucguggagaccuccucuagcgacaacggcacgugcuauccgggggauuuuauugacuacgaagaacugcgggagcagcuuuccagcgucucuuccuucgaacgcuuugagaucuuccccaagaccagcucuuggccuaaucacgauuccaacaagggagugacagccgcuuguccccaugccggcgcgaaaucuuuuuauaagaaucugaucuggcucguuaaaaagggcaacagcuacccuaaacuguccaagagcuauauuaaugacaaggggaaagaagugcuuguccuguggggaauccaccaccccuccaccucugccgaucaacagagccucuaccagaacgcugacgccuacguguucgugggcacauccagauauagcaagaaauuuaagccugagauugcuauccggccgcgcgucagagaucaggaggggcggaugaauuacuauuggacccugguugaacccggagacaaaauuacguucgaggccacaggcaaccugguggugccucgcuacgcguuugccauggaaagaaacgcugggucuggaaucauuaucuccgauacccccguccaugacugcaauacaaccugucaaaccccuaagggcgccaucaacacaagccuccccuuccagaauauucacccgaucacgauuggcaaaugcccuaaguaugugaagucuaccaaacugcggcuugcuacagggcugcgcaacguucccagcauccaguccagaggacucuuuggcgccauugccggguucaucgagggaggcuggaccgggaugguggacggaugguacggcuaucaucaccagaaugaacaaggcucuggguacgcugcggaucuuaagagcacacagaacgccaucgacaaaauuaccaauaaggucaacuccgugaucgagaaaaugaauacgcaguuuacagcuguuggaaaggaguucaaccaccuugaaaagcggauugagaaucugaacaaaaagguggaugacggcuuccucgauaucuggaccuacaaugccgaacugcugguccuccuggagaacgaacgcacccuugacuaucaugauagcaaugugaaaaaccuguacgagaaggucagaucucagcucaaaaacaaugccaaggagauugggaacggauguuuugaguucuaucacaagugcgacaauacauguauggaguccgugaaaaacggcaccuacgauuauccuaaguacagcgaagaggcuaaacugaaucgggaagagaucgacgggguuaagcuggagucuacacgcaucuaucaaauucuggccaucuacuccacgguggcgagcucccucguccuggugguuucucugggcgcuauuagcuuuuggaugugcuccaacggaucucuccagugcagaaucuguauuuga

SEQ ID NO: 198327 - RNA, 1701 nt, Artificial Sequence
  derived and/or modified CDS sequence (opt5) from hemagglutinin__InfluenzaA__ADQ28067
augaaggccauccuggugguccuccuguacaccuucgcuacagccaacgcggacacgcuuugcauuggcuaucacgcuaauaacagcaccgauacaguugacaccgugcuggagaaaaaugugacagucacccauuccgugaaccuccuggaagauaagcacaaugggaaacuuuguaagcugagaggaguugcuccccuccaucugggcaaaugcaacaucgccggguggauucugggaaauccugagugugaaucucucagcacagccuccucuuggagcuacaucguggagaccuccucuagcgacaacggcacgugcuauccgggggauuuuauugacuacgaagaacugcgggagcagcuuuccagcgucucuuccuucgaacgcuuugagaucuuccccaagaccagcucuuggccuaaucacgauuccaacaagggagugacagccgcuuguccccaugccggcgcgaaaucuuuuuauaagaaucugaucuggcucguuaaaaagggcaacagcuacccuaaacuguccaagagcuauauuaaugacaaggggaaagaagugcuuguccuguggggaauccaccaccccuccaccucugccgaucaacagagccucuaccagaacgcugacgccuacguguucgugggcacauccagauauagcaagaaauuuaagccugagauugcuauccggccgaaaguccgcgaucaggaggggagaaugaauuacuauuggacccugguugaacccggagacaagauuacguucgaggccacaggcaaccugguggugccucgguacgcguuugccauggaacgcaacgcugggucuggaaucauuaucuccgauacccccguccaugacugcaauacaaccugucaaaccccuaaaggcgccaucaacacaagccuccccuuccagaauauucacccgaucacgauuggcaagugcccuaaguaugugaaaucuaccaagcugagacuugcuacagggcugcggaacguucccagcauccagucccgcggacucuuuggcgccauugccggguucaucgagggaggcuggaccgggaugguggacggaugguacggcuaucaucaccagaaugaacaaggcucuggguacgcugcggaucugaaaagcacacagaacgccaucgacaagauuaccaauaaagucaacuccgugaucgagaagaugaauacgcaguuuacagcuguuggaaaggaguucaaccaccuugagaaaagaauugagaaucugaacaagaaaguggaugacggcuuccucgauaucuggaccuacaaugccgaacugcugguccuccuggagaacgaacggacccuugacuaucaugauagcaaugugaagaaccuguacgagaaaguccgcucucagcucaagaacaaugccaaggagauugggaacggauguuuugaguucuaucacaaaugcgacaauacauguauggaauccgugaagaacggcaccuacgauuauccuaaauacagcgaagaggcuaagcugaauagagaagagaucaacgggguuaaacuugagucuacacggaucuaucaaauucuggccaucuacuccacgguggcgagcucccucguccuggugguuucucugggcgcuauuagcuuuuggaugugcuccaauggaucucuccagugccgcaucuguauuuga

SEQ ID NO: 198328 - RNA, 1701 nt, Artificial Sequence
  derived and/or modified CDS sequence (opt5) from hemagglutinin__InfluenzaA__ADQ28068
augaaggccauccuggugguccuccuguacaccuucacaacggcuaacgccgacacccuuugcauuggcuaucacgcgaauaacagcacagauaccguugacacagugcuggagaaaaaugugaccgucacacauuccgugaaccuccuggaagauaagcacaaugggaaacuuuguaagcugagaggaguugcuccccuccaucugggcaaaugcaacaucgccggguggauucugggaaauccugagugugaaucucucagcaccgccuccucuuggagcuacaucguggagacguccucuagcgacaacgggaccugcuauccgggcgauuuuauuaauuacgaagaacugcgggagcagcuuuccagcgucucuuccuucgaacgcuuugagaucuuccccaagacaagcucuuggccuaaccacgacuccaauaagggagugaccgcugccuguccccaugcuggcgaaaagagcuuuuauaagaaccugaucuggcucguuaaaaagggcaauucuuacccuaaacuguccaagagcuauauuaacgauaaggggaaagaggugcuuguccuguggggaauccaccaccccuccacaucugccgaccaacagagccucuaccagaaugcggaugccuacguguucgugggcaccuccagauauagcaagaaauuuaagccugagauugcuauccggccgaaaguccgcgaccaggaagggagaaugaacuaccauuggacgcugguuaagcccggagauaaaauuacauucgaggccaccggcaaccugguggugccucgguaugcuuuugccauggaacgcaaugcggggucuggaaucauuaucuccgacacacccguccacgauugcaacaccaccugucaaacaccuaagggcgccaucaauacgagccuccccuuccagaacauucauccgaucaccauuggcaagugcccuaaauacgugaagucuacaaaacugagacuugcuaccgggcugcggaauguucccagcauccagucccgcggacucuuuggcgccauugcuggguucaucgagggaggcuggacagggaugguggacggaugguauggcuaccaccaccagaacgaacaaggcucuggguaugccgccgaccugaaaagcacccagaaugcuaucgaugagauuacgaacaaagucaauuccgugaucgagaagaugaacacacaguuuaccgcgguuggaaaggaguucaaucaucuugagaaaagaauugaaaaccugaauaagaaaguggacgauggcuuccucgacaucuggaccuacaacgccgagcugcugguccuccuggaaaaugagcggacacuugauuaccacgacagcaacgugaagaaccuguaugagaaaguccgcucucagcucaagaauaacgcuaaggaaauugggaauggauguuuugaguucuaccauaaaugcgauaacaccuguauggaauccgugaagaauggcacauaugacuacccuaaauauagcgaggaagccaagcugaacagagaggagaucgaugggguuaaacuugaaucuacgcggaucuaccaaauucuggccaucuauuccaccguggcuagcucccucguccuggugguuucucugggcgccauuagcuuuuggaugugcuccaauggaucucuccagugccgcaucuguauuuga

SEQ ID NO: 198329 - RNA, 1701 nt, Artificial Sequence; identical to SEQ ID NO: 198327
  derived and/or modified CDS sequence (opt5) from hemagglutinin__InfluenzaA__ADQ28069

SEQ ID NO: 198330 - RNA, 1701 nt, Artificial Sequence
  derived and/or modified CDS sequence (opt5) from hemagglutinin__InfluenzaA__ADQ28070
augaaggccauccuggugguccuccuguacaccuucgcuacagccaacgcggacacgcuuugcauuggcuaucacgcuaauaacagcaccgauacaguugacaccgugcuggagaaaaaugugacagucacccauuccgugaaccuccuggaagauaagcacaaugggaaacuuuguaagcugagaggaguugcuccccuccaucugggcaaaugcaacaucgccggguggauucugggaaauccugagugugaaucucucagcacagccuccucuuggagcuacaucguggagaccuccucuagcgacaacggcacgugcuauccgggggauuuuauugacuacgaagaacugcgggagcagcuuuccagcgucucuuccuucgaacgcuuugagaucuuccccaagaccagcucuuggccuaaucacgauuccaacaagggagugacagccgcuuguccccaugccggcgcgaaaucuuuuuauaagaaucugaucuggcucguuaaaaagggcaacagcuacccuaaacuguccaagagcuauauuaaugacaaggggaaagaagugcuuguccuguggggaauccaccaccccuccaccucugccgaucaacagagccucuaccagaacgcugacgccuacguguucgugggcacauccagauauagcaagaaauuuaagccugagauugcuauccggccgaaaguccgcgaucaggaggggagaaugaauuacuauuggacccugguugaacccggagacaagauuacguucgaggccacaggcaaccugguggugccucgguacgcguuugccauggaacgcaacgcugggucuggaaucauuaucuccgauacccccguccaugacugcaauacaaccugucaaaccccuaaaggcgccaucaacacaagccuccccuuccagaauauucacccgaucacgauuggcaagugcccuaaguaugugaaaucuaccaagcugagacuugcuacagggcugcggaacguucccagcauccagucccgcggacucuuuggcgccauugccggguucaucgagggaggcuggaccgggaugguggacggaugguacggcuaucaucaccagaaugaacaaggcucuggguacgcugcggaucugaaaagcacacagaacgccaucgacaagauuaccaauaaagucaacuccgugaucgagaagaugaauacgcaguuuacagcuguuggaaaggaguucaaccaccuugagaaaagaauugagaaucugaacaagaaaguggaugacggcuuccucgauaucuggaccuacaaugccgaacugcugguccuccuggagaacgaacggacccuugacuaucaugauagcaaugugaagaaccuguacgagaaaguccgcagacagcucaagaacaaugccaaggagauugggaacggauguuuugaguucuaucacaaaugcgacaauacauguauggaaucugugaagaacggcaccuacgauuauccuaaauacuccgaagaggcuaagcugaaucgggaagagaucgacgggguuaaacuugagagcacacgcaucuaucaaauucuggccaucuacucuacgguggcguccagccucguccuggugguuucccugggcgcuauuucuuuuuggaugugcagcaacggaucccuccagugcagaaucuguauuuga

SEQ ID NO: 198331 - RNA, 1701 nt, Artificial Sequence
  derived and/or modified CDS sequence (opt5) from hemagglutinin__InfluenzaA__ADQ28071
augaaggccauccuggugguccuccuguacacccuugcuacagccaacgcggacacgcugugcauuggcuaucacgcuaauaacagcaccgauacaguugacaccgugcucgagaaaaaugugacagucacccauuccgugaaccugcuugaagauaagcacaaugggaaacuguguaagcucagaggaguugcuccccugcaucugggcaaaugcaacaucgccggguggauucucggaaauccugagugugaaucucugagcacagccuccucuuggagcuacaucguggagaccuccucuagcgacaacggcacgugcuauccgggggauuucauugacuacgaggaacuucgggagcagcuguccagcgucucuuccuuugaacgcuucgagaucuuucccaagaccagcucuuggccuaaucacgauuccaacaagggagugacagccgcuuguccccaugccggcgcgaaaucuuucuauaagaaucucaucuggcugguuaaaaagggcaacagcuacccuaaacuuuccaagagcuauauuaaugacaaggggaaagaagugcugguccucuggggaauccaccaccccuccaccucugccgaucaacagagccuguaccagaacgcugacgccuacguguuugugggcacauccagauauagcaagaaauucaagccugagauugcuauccggccgaaaguccgcgaucaggaggggagaaugaauuacuauuggacccugguugaacccggagacaagauuacguuugaggccacaggcaaccucguggugccucgguacgcguucgccauggaacgcaacgcugggucuggaaucauuaucuccgauacccccguccaugacugcaauacaaccugucaaaccccuaaaggcgccaucaacacaagccugcccuuucagaauauucacccgaucacgauuggcaagugcccuaaguaugugaaaucuaccaaacuuagacuggcuacagggcuccggaacguucccagcauccagucccgcggacuguucggcgccauugccggguuuaucgagggaggcuggaccgggaugguggacggaugguacggcuaucaucaccagaaugaacaaggcucuggguacgcugcggaucuuaaaagcacacagaacgccaucgacaagauuaccaauaaagucaacuccgugaucgagaagaugaauacgcaguucacagcuguuggaaaggaguuuaaccaccuggaaaagagaauugagaaucucaacaagaaaguggaugacggcuuccuggauaucuggaccuacaaugccgaacugcucguccugcuugagaacgaacggacccuggacuaucaugauagcaaugugaagaaccucuacgagaaaguccgcucucagcugaagaacaaugccaaggagauugggaacggauguuucgaauuuuaucacaaaugcgacaauacauguauggaguccgugaagaacggcaccuacgauuauccuaaauacagcgaagaggcuaaacuuaauagagaagagaucgacgggguuaagcuggagucuacacggaucuaucaaauucucgccaucuacuccacgguggcgagcucccugguccuggugguuucucucggcgcuauuagcuucuggaugugcuccaacggaucucugcagugccgcaucuguauuuga

SEQ ID NO: 198332 - RNA, 1701 nt, Artificial Sequence; identical to SEQ ID NO: 195685
  derived and/or modified CDS sequence (opt5) from hemagglutinin__InfluenzaA__ADR32361

SEQ ID NO: 198333 - RNA, 1689 nt, Artificial Sequence
  derived and/or modified CDS sequence (opt5) from hemagglutinin__InfluenzaA__ADT78887
auggcccugaucuaccucauucugcuuuucaccagcgugagaggcgaccagaucugcauuggguaucacgcuaacaauuccacagagaaggucgauacgauccuggaacggaacguuaccgugacacaugccaaagacauucucgagaagacccacaauggaaaacuguguaaacuuaacggcauucccccucuggaacucggggauugcucuaucgcgggauggcugcugggcaauccggagugugaccgccuccugagagugcccgaauggagcuacaucauggagaaggagaacccuaaguauucccuuugcuaccccgggucuuuuaaugauuaugaggaacugaagcaucucaucagcuccgucaaacacuucgaaaaggugaaaauucugccuaaggacggauggacacaacauaccacaaccggcggcucucgggcuugugccguuagcgggaaccccuccuuuuuccgcaauaugguguggcuuacgaaaaagggaccuaacuacccggucgccaagggcagcuauaauaacaccucuggggagcagaugcugaucauuuggggagugcaccaccccaaugaugaggcugaacagagagcccucuaccagaaaguuggcacauacguguccgcuagcaccucuacacugaacaagcgguccaccccugagaucgccgcgcgccccgaagucaaugggcugggaagcagaauggaguuuucuuggacgcuccuggacaugugggauacaauuaacuucgaauccaccggcaaccuuguggccccugaguauggcuuuaaaaucagcaagcggggguccucuggagugaugaaaacagagggcacccuggaaaauugcgagaccaagugucaaacaccccucggggcuaucaacacgacccugccguuccauaauguccacccucuuacaauuggagaaugccccaaauacguuaagagcgagaagcuggugcucgccaccggccugcgcaacgugccucagaucgaauccagagggcuguuuggagcuauugccggcuucaucgagggcggguggcagggaauggucgacggcugguauggguaccaucacagcaaugaucagggaucuggcuaugcggccgacaaagaguccacacaaaaggcuuuugaugggauuaccaacaaagugaauagcguuaucgaaaagaugaacacgcaguucgaggccgugggcaaagaauuuucuaaucucgagaagcggcuggaaaaccuuaauaagaaaauggaggacggauuccuggacgucuggacauacaacgcugagcuccuggugcuuauggaaaaugagcgcacccuggauuuccacgacagcaacguuaagaaucucuaugauaaagugagaaugcagcugcgggacaacgucaaggaacugggcaacggguguuuugaguucuaccauaaaugcgaugacgaguguauggauuccgugaagaauggaaccuacgacuaucccaaguacgaagaggaaucuaaacucaaccgcaaugagaucaagggcgucaaacugagcuccauggggguguaucagauucuugccaucuacgccacaguugcuggaagccugucucucgcgauuaugauggccggcaucuccuuuuggaugugcagcaacgggucucugcaaugcagaauuuguaucuga

SEQ ID NO: 198334 - RNA, 1701 nt, Artificial Sequence
  derived and/or modified CDS sequence (opt5) from hemagglutinin__InfluenzaA__ADT78908
augaaggccaaacugcucauccugcuuugcgcucugagcgccaccgacgcggauacaauuuguaucggcuaccacgcuaacaauuccacggacaccguggauacaguccucgagaagaacguuaccgugacacauucugugaaucugcuugaagacagccacaacgggaaacugugcagacucaagggaaaagcuccccugcagcugggcaaguguaauauugccggguggguccucggaaacccugagugcgaaucccugcuuucuaaucggagcugguccuauaucgccgagaccccgaacucugaaaauggcacauguuaccccggggauuucgccgacuaugaggagcugcgcgaacaacucagcuccgugagcucuuuugagagauucgaaauuuuuccuaaggagcgguccuggcccaaacauaacaccacgcgcggaguuaccgcugccugcagccacgcgagaaagucuuccuucuacaaaaaucugguguggcuuacagaggccaacggcagcuauccuaaucugucuaaguccuacgucaacaaucaggaaaaagaggugcucguucuguggggcgugcaucaccccagcaacaucgaagaucagcggacccuguaucgcaaggacaacgcuuacgucuccguggugucuagcaauuacaacagacgguuuacaccugagaucgccaagcgcccgaaagucagagaucagcccgggcggaugaauuauuacuggacccuccuggaaccuggagacacgauuaucuucgaggcuacaggcaaccuuauugcccccugguaugcguuugcccugucccgcgggccuggaagcggcaucauuaccucuaaugcucccauggaugagugugacacaaagugccaaaccccgcagggggccaucaacuccagccucccuuuccagaauauucaccccguuaccaucggagaauguccuaaauacgugagaucuacaaagcugcggauggugacgggccuucgcaacauccccagcauucaguccagaggccuguuuggggcuaucgccggauucauugagggcggguggaccggaaugauggauggcugguauggguaccaucaccaaaaugaacagggaucuggcuaugccgcugaccagaaaagcacacagaacgcgaucaauggcauuaccaacaaggucaauuccgugaucgagaaaaugaacacacaauuuaccgccguugggaaggaguucaauaagcucgaaaaacggauggagaaccugaacaagaaaguggacgauggauuucuggacaucuggacguacaaugcugaacuccugguccuucuggagaacgaaagaacacucgauuuccaugacagcaaugugaagaaccuguacgagaaaguuaagaaucagcuucgcaacaaugccaaggaacugggcaacgggugcuucgaguuuuaucacaaaugugauaaugagugcauggaaucugugaagaacggaaccuacgacuaucccaaauacuccgaggaaagcaagcucaaucgggagaaaauugauggcgucaagcuggagucuauggggguguauagaauccuggccauuuacuccaccgucgcuagcucccucgugcugcuuguuucucugggcgccaucagcuucuggaugugcuccaacggaucucuccagugucgcauuugcaucuga

SEQ ID NO: 198335 - RNA, 1701 nt, Artificial Sequence
  derived and/or modified CDS sequence (opt5) from hemagglutinin__InfluenzaA__ADT78929
augaaggccaaacugcucauccugcuuugcgcucugagcgccaccgacgcggauacaauuuguaucggcuaccacgcuaacaauuccacggacaccguggauacaguccucgagaagaacguuaccgugacacauucugugaaucugcuugaagacagccacaacgggaaacugugcagacucaagggaauugccccgcugcagcugggcaaauguaauaucgccggguggauucucggaaacccugagugcgaaucccugcuuucuaagcggagcugguccuauaucgcugagacccccaauucugaaaacggcacauguuaccccggggauuucgccgacuaugaggagcugcgcgaacaacucagcuccgucagcucuuuugagagauucgaaaucuuuccuaaggagcgguccuggcccaaacauaauauuacccgcggagugacggcugccugcagccacgcgggcaagucuuccuucuacaaaaaccugcuuuggcugaccgagacaaagggcagcuauccuaaucucucuaaauccuacguuaacaauaaggaaaaggaggugcugguccuguggggagugcaucaccccagcaacaucgaagaucagaaaacccucuauagaaaggagaaugccuacguuuccguggucucuagcaacuacaaccggcgcuuuacaccugaaauugcugagagaccgaaagugcgggggcaggccggccgcaugaauuauuacuggacccugcuugagcccggggacacgaucauuuucgaagcuaacggaaaucugaucgccccuugguaugcguuugcccucuccagaggccuggggagcggaauuaucacaucuaacgcuuccauggaugagugugacaccaagugccagacaccccaaggcgccaucaauagcucucuuccuuuccagaacauucaccccgugaccaucggcgaauguccgaaauacgucaagagcaccaaacugcggaugguuacagggcuccgcaauauuccuuccauccagucuagaggacuguuuggcgcuauugccggguucaucgagggaggcuggacggggaugaucgauggaugguauggcuaccaucaccagaacgaacaaggcagcggguaugccgcugaccagaaguccacccagaaugcgauuaacggaaucacaaauaaggugaacagcgugauugagaaaaugaauacccaguuuacagccgucggcaaggaguucaacaaacuggaaaagcggauggagaaucucaacaaaaagguggaugacggguuucuggacaucuggaccuacaacgcugaacuucugguucuccuggagaaugaacgcacgcuugauuuccaugacucuaacgugaagaaucuguacgagaaagucaagaaccaacucagaaauaacgccaaagagauuggaaauggcugcuucgaauuuuaucacaaguguaacaaugagugcauggaauccgugaaaaacgggacauacgauuaucccaaguacagcgaggagucuaagcugaaucgggagaaaaucgacggcguuaagcuggaauccaugggaguguaucagauccucgccauuuacagcaccgucgcuuccucucuggugcuucuggucagccucggcgccaucuccuucuggaugugcucuaacgggagccugcaguguagaauuugcaucuga

SEQ ID NO: 198336 - RNA, 1701 nt, Artificial Sequence
  derived and/or modified CDS sequence (opt5) from hemagglutinin__InfluenzaA__ADT78936
augaaggccaaacugcucgugcugcuuugcgcucugagcgccaccuacgcggacacaaucuguauuggcuaucacgcuaacaauuccacggauaccgucgacacaguucucgagaagaacgugaccgugacacauucugucaaucugcuugaagauagccacaacgggaaacugugcagacucaagggaaaagccccgcugcagcugggcaaguguaauaucgccggguggauucucggaaacccugagugcgaaucccugcuuucuaagcggagcugguccuacaucgcugagacccccaauucugaaaacggcacauguuaucccggggacuucgccgauuacgaggagcugcgcgaacaacucagcuccgugagcucuuuugagagauucgaaauuuuuccuaaagaguccagcuggcccaagcauaauaccacgcggggaguuaccgcugccugcucucacgcgcgcaaauccagcuucuauaagaaccugcuuuggcugacagaggccaauggcucuuacccuaaccucuccaaaagcuaugugaauaaccaggaaaaggagguccuggugcuguggggcguucaucaccccuccaauaucgaagaccagagaacccucuaccggaaggagaacgcuuacgugucugucgugagcuccaacuauaaucgcagauuuacaccugaaaucgccgagcggccgaaagugcgcaaccaggcugggagaaugaauuacuauuggacccugcuugagcccggagauacgauuaucuucgaagccaacggcaaucugauugcgccuugguacgccuuugcucucagccgggggcugggaucuggcaucauuacauccaacgccagcauggacgagugugauaccaagugccaaacaccccagggggcuaucaauucuagccuuccuuuccagaacauucaccccgucaccaucggagaauguccgaaauauguuaaguccaccaaacugcgcauggugacaggccucagaaauaucccuucuauucagagccggggccuguuuggggccaucgccggauucauugagggcggguggacgggaaugauggacggcugguacggguaucaucaccaaaacgaacagggauccggcuacgcugcggaucaaaagagcacccagaaugccaucaacggcauuacaaauaaagugaacucugucaucgagaagaugaauacccaguuuacagcuguggggaaggaguucaacaaacuggaaaagcgcauggagaaccucaauaaaaagguugacgauggauuucuggacaucuggaccuacaacgccgaacuucuggugcuccuggagaaugaaagaacgcuugacuuccaugauuccaacgucaaaaaucuguaugagaaggugaagaaccagcuccggaauaacgccaaagagcugggcaaugggugcuucgaauuuuaccacaagugugacaacgagugcauggaaagcguuaaaaauggaacauaugauuaccccaaguauucugaggaguccaaacugaacagagaaaagauugacggcgugaagcucgagagcaugggggucuaccgcauccuggcuauuuauuccaccguggccucuagccuuguccugcucgugucccugggcgcgaucucuuucuggaugugcagcaauggaucccugcagugucggauuugcaucuga

SEQ ID NO: 198337 - RNA, 1689 nt, Artificial Sequence
  derived and/or modified CDS sequence (opt5) from hemagglutinin__InfluenzaA__ADT78961
auggccaucauuugccugauccuccuguucaccgcugugagaggcgaccagauuuguaucggguaccacgccaacaauagcacagagaaggucgauacgauucuugaacggaacguuaccgugacacaugcgaaagacauccuggagaagacccacaauggaaaacucugcaagcugaacggcauucccccucuugaacugggggauuguuccaucgcuggauggcuccugggcaauccggagugcgaccgccugcucucugugcccgaauggagcuauaucauggagaaagagaacccuagagaugggcuguguuaccccggauccuuuaaugacuaugaagaacuuaagcaucugcucucuagcgucaagcacuucgaaaaagugaagauucugccuaaaaaccgguggacacaacauaccacaaccggcggcucccgcgccugcgccguuucugggaaucccagcuuuuucagaaacaugguguggcuuacgaagaaaggauccaauuacccugucgcuaagggcagcuauaacaauaccucuggggagcagaugcugaucauuuggggagugcaccacccgaacgaugagacagaacagcggacccucuaccagaauguugagacauauguguccgucagcaccucuacgcugaacaagcgcuccacacccaaaaucgccaccagaccugaagugaacggccuggggagccggauggaguuuucuuggacacuccuggacaugugggauaccauuaauuucgaauccaccggaaaccuuaucgcucccgaguacggcuuuaagaucagcaaacgcggcuccucugggauuaugaagacagagggaacgcuggaaaauugugagaccaaaugccaaacaccucucggcgccaucaacaccacacugcccuuccauaaugugcacccgcuuaccauuggggaauguccuaaguacgucaaaagcgagaagcugguucucgcgacgggacccagaaacgugccucagaucgaaucccggggccuguuuggggccauugcuggauucaucgagggcggcuggcaggggaugguggacggaugguauggcuaccaucacagcaaugaucaggggucuggauaugccgcugacaaggaguccacacaaaaagccuuugauggcaucaccaacaaggucaauagcgugauugagaaaaugaacacccaguucgaggcgguugggaaggaauuuucuaaucuggagcgcagacucgaaaaccugaauaaaaagauggaggacggcuuccuugacguguggacauacaacgccgagcugcucguccugauggaaaaugagcggacccuugauuuccacgacagcaacgugaagaaccuguaugauaaaguucgcaugcagcucagagacaaugugaaggaacugggaaacggcugcuuugaguucuaccauaaaugugaugacgagugcaugaacuccgucaagaaugggacauaugauuaccccaaauacgaagaggaaucuaagcugaaucggaacgagaucaagggagugaaacucagcuccaugggcgucuaucagauucuggugaucuacgcuacgguugccgggagccuuucucuggcuauuaugauggccggaaucuccuuuuggaugugcagcaauggcucucuccaauguagaaucugcauuuga

SEQ ID NO: 198338 - RNA, 1701 nt, Artificial Sequence; identical to SEQ ID NO: 192836
  derived and/or modified CDS sequence (opt5) from hemagglutinin__InfluenzaA__ADT78971

SEQ ID NO: 198339 - RNA, 1701 nt, Artificial Sequence; identical to SEQ ID NO: 192377
  derived and/or modified CDS sequence (opt5) from hemagglutinin__InfluenzaA__ADT79010

SEQ ID NO: 198340 - RNA, 1701 nt, Artificial Sequence; identical to SEQ ID NO: 192836
  derived and/or modified CDS sequence (opt5) from hemagglutinin__InfluenzaA__ADT79030

SEQ ID NO: 198341 - RNA, 1701 nt, Artificial Sequence; identical to SEQ ID NO: 193414
  derived and/or modified CDS sequence (opt5) from hemagglutinin__InfluenzaA__ADT79050

SEQ ID NO: 198342 - RNA, 1701 nt, Artificial Sequence
  derived and/or modified CDS sequence (opt5) from hemagglutinin__InfluenzaA__ADT79108
augaaggccagacugcucauccugcuuugcgcucugagcgccaccgacgcggauacaauuuguaucggcuaccacgcuaacaauuccacggacaccguggauacaguccucgagaaaaacguuaccgugacacauucugugaaucugcuugaagacagccacaacgggaagcugugccggcucaaaggaauugcuccccugcagcugggcaaguguaauaucgccggguggauucucggaaacccugagugcgaaucccugcuuucuaaucgcagcugguccuauaucgccgagaccccgaacucugaaaauggcacauguuaccccggggauuucgccgacuaugaggagcugagagaacaacucagcuccgucagcucuuuugagcgguucgaaaucuuuccuaaagagcgcuccuggcccaagcauaacauuaccagaggagugacggcugccugcagccacgcgaagaaaucuuccuucuacaagaaucugcuuuggcugaccgaggccaacggcagcuauccuaaucucaucaaaucuuacguuaacaauaaggaaaaagaggugcugguccuguggggcgugcaucaccccuccaacauugaagaucagcggacacucuaucgcaaggagaacgcuuacguuagcguggucuccucuaauuacaacagacgguuuaccccugaaaucgccgagcgcccgaaggugagagggcaggcuggacggaugaauuauuacuggacacugcuugagcccggcgacaaaauuaucuucgaagccaacgggaaucugauugcgccuugguaugccuuugcucucagccgcggacugggcuccgggaucaucaccagcaacgccucuauggaugagugugacacgaagugccagacaccccaaggagcuauuaauuccagccuuccuuuccagaacauccaccccgugaccauuggcgaauguccgaaauacgucagaucuacaaagcugcggaugguuaccggccuccgcaauaucccuagcauucaguccagagggcuguuuggagccaucgccggcuucaucgaagggggauggaccggcaugguggaugggugguauggauaccaucaccagaacgaacaaggcucuggcuaugcugcggaccagaaaagcacacagaaugccauuaacgggaucacgaauaaggugaacuccgucauugagaaaaugaauacccaguuuacagcugugggaaaggaguucaacaagcuggaaaaacggauggagaaccucaauaagaaaguugaugacggcuuucuggacaucuggaccuacaacgccgaacuucuggugcuccuggagaaugaaagaacacuugauuuccaugacagcaacgucaagaaucuguacgagaaagugaagaaccaacuccgcaauaacgccaaggagauugggaauggaugcuucgaauuuuaucacaaaugugauaacgagugcauggaaucuguuaagaauggcaccuacgacuaucccaaauacuccgaggagagcaagcugaaccgggagaaaaucgauggggugaagcuggagucuaugggcgucuaucagauccucgcuauuuacuccacgguggccagcucccugguccuucuggugucucucggagcgaucagcuucuggaugugcuccaauggcucucugcaguguagaauuugcaucuga

SEQ ID NO: 198343 - RNA, 1689 nt, Artificial Sequence
  derived and/or modified CDS sequence (opt5) from hemagglutinin__InfluenzaA__ADT79119
auggccaucauuuaccugauccuccuguucaccgcugugagaggcgaccagauuugcaucggguaucacgccaacaauagcacagagaaggucgauacgauucuugaacggaacguuaccgugacacaugcgaaagacauccuggagaagacccacaauggaaaacucuguaagcugaacggcauucccccucuugaacugggggauugcuccaucgcuggauggcuccugggcaauccggagugugaccgccugcucucugugcccgaauggagcuacaucauggagaaagagaacccuagagaugggcugugcuaucccggauccuuuaaugacuacgaagaacuuaagcaucugcucucuagcgucaagcacuucgaaaaagugaagauucugccuaaagaucgguggacacaacauaccacaaccggcggcucccgcgccugugccguuucugggaaccccagcuuuuucagaaauaugguguggcuuacgaagaaaggauccaacuauccugucgcuaagggcagcuacaauaacaccucuggggagcagaugcugaucauuuggggagugcaccacccgaaugacgagacagaacagcggacccucuaucagaacguuggcacauacguguccgucgggaccagcacgcugaauaagcgcucuacacccgauaucgccaccagaccuaaagugaacggacugggcggccggauggaguuuuccuggacacuccuggacaugugggauaccauuaacuucgaaagcaccgggaaucuuaucgcucccgaguacggauuuaagaucucuaaacgcggcuccagcgggauuaugaagacagaaggaacgcugggcaacugcgagaccaaaugucaaacaccucucggggccaucaauaccacacugcccuuccauaacgugcacccgcuuaccauuggagagugcccuaaguaugucaaauccgaaaagcugguucucgcgacgggccugagaaaugugccccagaucgagucucggggccuguuuggggccauugcuggauucaucgaaggcggguggcagggaaugguggacggcugguacggguaucaucacagcaacgaucagggcuccggauacgccgcugacaaggagagcacacaaaaagccuuugacggcaucaccaauaaggucaacucugugauugagaaaaugaauacccaguucgaggcgguugggaaggaguuuuccaaccucgaacgcagacuggagaaucuuaacaaaaagauggaagauggauuccuggacguguggacauauaaugccgagcuccugguccuuauggaaaacgagcggacccuggauuuccacgacagcaaugugaagaaccucuacgauaaaguucgcaugcagcugagagacaacgugaaggagcugggcaauggguguuuugaguucuaucauaaaugcgaugacgaauguaugaacucugucaagaauggaacauacgauuacccuaaauaugaagaggagagcaagcucaaccggaaugaaaucaagggcgugaaacuguccucuaugggggucuaccagauucuugcuaucuaugccacgguggcuggcagccugucccucgccauuaugauggccggaaucagcuuuuggaugugcucuaacggcucccugcaaugcagaaucuguauuuga

SEQ ID NO: 198344 - RNA, 1689 nt, Artificial Sequence
  derived and/or modified CDS sequence (opt5) from hemagglutinin__InfluenzaA__ADT79129
auggccaucauuuaccugauccuccuguucaccgcugugagaggcgaccagauuugcaucggguaucacgccaacaauagcacagagaaggucgauacgauucuugaacggaacguuaccgugacacaugcgaaagacauccuggagaagacccacaauggaaaacucuguaagcugaacggcauucccccucuugaacugggggauugcuccaucgcuggauggcuccugggcaauccggagugugaccgccugcucagagugcccgaauggucuuacaucauggagaaagagaacccucgggaugggcugugcuaucccggaucuuuuaaugacuacgaggagcuuaagcaucugcucuccucugucaagcacuucgaaaaagugaagauucugccuaaagaucgcuggacacaacauaccacaaccggcggcagcagagccugugccguuuccgggaaccccagcuuuuuccggaauaugaucuggcuuacgaagaaaggaagcaacuauccuguggcuaagggcuccuacaauaacaccagcggggagcagaugcugauuaucuggggaguccaccacccgaaugacgagacagaacagcgcacccucuaucagaacgugggcacauacguuucuguggucaccuccacgcugaauaagagaagcacacccaaaauugccacccggccuaaggugaacgggcugggaggccgcauggaguuuucuuggacacuccuggauaugugggacaccaucaacuucgaauccaccggcaaucuuaucgcucccgaguacggguuuaaaauuagcaagagaggaucuuccggcaucaugaaaacagaagggacgcuggagaacugcgagaccaagugucaaacaccucucggagccauuaauaccacacugcccuuccauaacgugcacccgcuugcgaucggcgaaugcccuaaauaugucaagagcgagaagcugguucucgccaccgggcugcggaaugugccccagauugaaucccgcggacuguuuggcgcuaucgccggcuucaucgaagggggauggcagggcaugguggaugggugguacggauaucaucacucuaacgaccagggcagcggguacgcugccgauaaagaauccacgcaaagagcguuugacggcauuacaaauaaggucaacagcgugaucgagaaaaugaauacccaguucgaggccguuggaaaggaauuuucuaaccucgagcggcgccuggaaaaucuuaacaaaaagauggaggacggcuuccuggauguguggaccuauaaugcugaacuccugguccuuauggagaacgagagaacacuggacuuccacgauuccaaugugaagaaccucuacgacaaaguucggaugcagcugagagauaacgugaaggaacuggggaauggauguuuugaguucuaucauaaaugcgacgaugaauguaugaacagcgucaagaauggcaccuacgacuacccuaaauaugaggaggaaucuaagcucaaccgcaaugagauuaagggggugaaacugagcuccaugggagucuaccagauccuugccauuuaugcuacaguggccggcucucugagccucgccaucaugauggcugggaucuccuuuuggaugugcagcaacggcucucugcaaugccggauuuguaucuga

SEQ ID NO: 198345 - RNA, 1701 nt, Artificial Sequence
  derived and/or modified CDS sequence (opt5) from hemagglutinin__InfluenzaA__ADT79232
augaaggccauccuggugguccuccuguacaccuucgcuacagccaacgcggacacgcuuugcauuggcuaucacgcuaauaacagcaccgauacaguugacaccgugcuggagaaaaaugugacagucacccauuccgugaaccuccuggaagauaagcacaaugggaaacuuuguaagcugagaggaguugcuccccuccaucugggcaaaugcaacaucgccggguggauucugggaaauccugagugugaaucucucagcacagccuccucuuggagcuacaucguggagaccuccucuagcgacaacggcacgugcuauccgggggauuuuauugacuacgaagaacugcgggagcagcuuuccagcgucucuuccuucgaacgcuuugagaucuuccccaagaccagcucuuggccuaaucacgauuccaacaagggagugacagccgcuuguccccaugccggcgcgaaaucuuuuuauaagaaucugaucuggcucguuaaaaagggcaacagcuacccuaaacuguccaagagcuauauuaaugacaaggggaaagaagugcuuguccuguggggaauccaccaccccuccaccucugccgaucaacagagccucuaccagaacgcugacgccuacguguucgugggcuccagcagauauucuaagaaauuuaagccugagauugcuauccggccgaaaguccgcgaucaggaggggagaaugaauuacuauuggacacugguugaacccggagacaagauuaccuucgaggccacgggcaaccugguggugccucgguacgcguuugccauggaacgcaacgcuggguccggaaucauuaucagcgauacacccguccaugacugcaauaccacaugucaaaccccuaaaggcgccaucaacaccucucuccccuuccagaauaagcacccgauuacaaucggcaagugcccuaaauauguuaagagcacgaaacugagacuugcuaccgggcugcggaacgugcccuccauucagucucgcggacucuuuggcgccaucgccggguucauugagggaggcuggacagggaugguggacggaugguacggcuaucaucaccagaaugaacaaggcagcggguacgcugcggaugucaaguccacccagaacgccaucgacgagaucacaaauaaagugaacagcguuauugagaagaugaauacccaguuuacggcugugggaaaggaguucaaccaccuggagaaaagaaucgaaaaucuuaacaagaaagucgaugacggcuuccuggauauuuggacauacaaugccgagcuccuggugcugcucgaaaacgagcggacccuggacuaucaugauucuaaugucaagaaccuuuacgagaaagugcgcucccagcugaagaacaaugccaaggaaaucgggaacggauguuuugaguucuaucacaaaugcgacaauaccuguauggaaagcguuaagaacggcacauacgauuauccuaaauacucugaggaagcuaagcucaauagagaggagauugacggggugaaacuggaauccacccggaucuaucaaauccuugccauuuacagcacagucgcguccucucuggugcucguugugagccugggcgcuaucuccuuuuggaugugcucuaacggaagccugcagugccgcauuuguaucuga

SEQ ID NO: 198346 - RNA, 1701 nt, Artificial Sequence
  derived and/or modified CDS sequence (opt5) from hemagglutinin__InfluenzaA__ADT79242
augaaggccauccuggugguccuccuguacaccuucgcuacagccaacgcggacacgcuuugcauuggcuaucacgcuaauaacagcaccgauacaguugacaccgugcuggagaagaaugugacagucacccauuccgugaaccuccuggaagauaagcacaaugggaaacuuuguaagcugagaggaguugcuccccuccaucugggcaaaugcaacaucgccggguggauucugggaaauccugagugugaaucucucagcacagccuccucuuggagcuacaucguggagaccccguccucugacaacggcacgugcuaucccggggauuuuauugacuacgaagaacugcgggagcagcuuagcuccgucagcucuuucgaacgcuuugagaucuucccuaagaccuccagcuggcccaaucacgauucuaacaagggagugacagccgcuuguccucaugccggcgcgaaauccuuuuauaagaaucugaucuggcucguuaaaaagggcaacagcuaccccaaacugucuaaguccuauauuaaugacaaggggaaagaagugcuuguccuguggggaauccaccacccuagcaccuccgccgaucaacagucucucuaccagaacgcugacgccuacguguucgugggcagcuccagauauagcaagaaauuuaagccggagauugcuauccggcccaaaguccgcgaucaggaggggagaaugaauuacuauuggacacugguugaaccuggagacaagauuaccuucgaggccacgggcaaccugguggugccccgguacgcguuugccauggaacgcaacgcugggucuggaaucauuaucuccgauacaccuguccaugacugcaauaccacaugucaaacccccaaaggcgccaucaacaccagccucccguuccagaauauucacccuaucacaauuggcaagugccccaaguaugugaaaucuacgaagcugagacuugcuaccgggcugcggaacguuccuagcauccagucccgcggacucuuuggcgccauugccggguucaucgagggaggcuggacagggaugguggacggaugguacggcuaucaucaccagaaugaacaaggcucuggguacgcugcggaucugaaaagcacccagaacgccaucgacgagauuacaaauaaggucaacuccgugaucgagaaaaugaauacccaguuuacggcuguuggaaaggaguucaaccaccuugagaagagaauugaaaaucugaacaaaaagguggaugacggcuuccucgauaucuggacauacaaugccgagcugcugguccuccuggaaaacgagcggacccuugacuaucaugauagcaaugugaaaaaccuguacgagaagguccgcucucagcucaaaaacaaugccaaggaaauugggaacggauguuuugaguucuaucacaagugcgacaauaccuguauggaauccgugaaaaacggcacauacgauuaucccaaguacagcgaggaagcuaaacugaauagagaggagaucgacgggguuaaacuugaaucuacccggaucuaucaaauucuggccaucuacuccacaguggcgagcucccucguccuggugguuucucugggcgcuauuagcuuuuggaugugcuccaacggaucucuccagugccgcaucuguauuuga

SEQ ID NO: 198347 - RNA, 1701 nt, Artificial Sequence
  derived and/or modified CDS sequence (opt5) from hemagglutinin__InfluenzaA__ADT91182
augaaggccauccuggugguccuccuguacaccuucgcuacagccaacgcggacacgcuuugcauuggcuaucacgcuaauaacagcaccgauacaguugacaccgugcuggagaagaaugugacagucacccauuccgugaaccuccuggaagauaagcacaaugggaaacuuuguaagcugagaggaguugcuccccuccaucugggcaaaugcaacaucgccggguggauucugggaaauccugagugugaaccgcucucuacagccagcuccuggucuuacaucguggagaccagcuccucugacaacggcacgugcuaucccggggauuuuauugacuacgaagaacugcgggagcagcuuagcuccgucagcucuuucgaacgcuuugagaucuucccuaagaccuccagcuggcccaaucacgauucuaacaagggagugacaaccgccuguccucaugcuggcgccaaauccuuuuauaagaaucugaucuggcucguuaaaaagggcaacagcuaccccaaacugucuaaguccuauauuaaugacaaggggaaagaagugcuuguccuguggggaauccaccacccuccgacaagcgcggaucaacagucccucuaccagaacgccgacgcuuacguguucgugggcaccucuagauauagcaagaaauuuaagcccgagauugccauccggccuaaaguccgcgaucaggaggggagaaugaauuacuauuggacgcugguugaacccggagacaagauuacauucgaggcuaccggcaaccugguggugccucgguacgccuuugcgauggaacgcaacgccggguccggaaucauuaucagcgauacacccguccaugacugcaauaccaccugucaaacaccgaaaggcgcuaucaacacgucucucccuuuccagaauauucaccccaucaccauuggcaagugcccuaaguaugugaaauccacaaagcugagacuugccaccgggcugcggaacguucccagcauccagucucgcggacucuuuggcgcuauugccggguucaucgagggaggcuggacagggaugguggacggaugguacggcuaucaucaccagaaugaacaaggcagcggguacgccgcugaucugaaauccacccagaacgcgaucgacggaauuacgaauaaggucaacucugugaucgagaaaaugaauacacaguuuaccgccguuggcaaggaguucaaccaccuugaaaagagaauugagaaucugaacaaaaagguggaugacggguuccucgauaucuggaccuacaaugcugaacugcugguccuccuggagaacgaacggacacuugacuaucaugauagcaaugugaaaaaccuguacgagaagguccgcucccagcucaaaaacaaugccaaggagauuggaaacggcuguuuugaguucuaucacaagugcgacaauaccuguauggagagcgugaaaaacgggacauacgauuaucccaaguacucugaagaggccaaacugaauagagaagagaucgacggcguuaaacuugaguccacgcggaucuaucaaauucuggcuaucuacagcaccguggccucuucccucguccuggugguuagccugggagcgauuuccuuuuggaugugcucuaacggcagccuccagugccgcaucuguauuuga

SEQ ID NO: 198348 - RNA, 1701 nt, Artificial Sequence
  derived and/or modified CDS sequence (opt5) from hemagglutinin__InfluenzaA__ADU20561
augaaggccauccuggugguccuccuguacaccuucgcuacagccaacgcggacacgcuuugcauuggcuaucacgcuaauaacagcaccgauacaguugacaccgugcuggagaaaaaugugacagucacccauuccgugaaccuccuggaagauaagcacaaugggaaacuuuguaagcugggaggcguugcuccccuccaucuggggaaaugcaacaucgccggauggauucugggcaauccugagugugaaucucucagcacagccuccucuuggagcuacaucguggagaccuccucuagcgacaacgggacgugcuauccgggagauuuuauugacuacgaagaacugagagagcagcuuuccagcgucucuuccuucgaacgguuugagaucuuccccaagaccagcucuuggccuaaucacgauuccaacaagggcgugacagccgcuuguccccaugccggcgcgaaaucuuuuuauaagaaucugaucuggcucguuaaaaaggggaacagcuacccuaaacuguccaagagcuauauuaaugacaagggaaaagaagugcuuguccuguggggcauccaccaccccuccaccucugccgaucaacagagccucuaccagaacgcugacgccuacguguucguggggacaucccgcuauagcaagaaauuuaagccugagauugcuaucagaccgaaaguccgggaucaggagggacgcaugaauuacuauuggacccugguugaacccggcgacaagauuacguucgaggccacagggaaccugguggugccuagauacgcguuugccauggaacggaacgcuggaucuggcaucauuaucuccgauacccccguccaugacugcaauacaaccugucaaaccccuaaaggcgccaucaacacaagccuccccuuccagaauauucacccgaucacgauugggaagugcccuaaguaugugaaaucuaccaagcugcgccuugcuacaggacugagaaacguucccagcauccagucccggggccucuuuggggccauugccggauucaucgagggcggguggaccggaaugguggacggcugguacggcuaucaucaccagaaugaacaagggucuggauacgcugcggaucugaaaagcacacagaacgccaucgacaagauuaccaauaaagucaacuccgugaucgagaagaugaauacgcaguuuacagcuguuggcaaggaguucaaccaccuugaaaaacgcauugagaaucugaacaagaaaguggaugacggguuccucgauaucuggaccuacaaugccgaacugcugguccuccuggagaacgaaagaacccuugacuaucaugauagcaaugugaagaaccuguacgagaaaguccggucucagcucaagaacaaugccaaggagauuggaaacggcuguuuugaguucuaucacaaaugcgacaauacauguauggaguccgugaagaacgggaccuacgauuauccuaaauacagcgaagaggcuaagcugaaucgcgaagagaucgacggcguuaaacuugagucuacaagaaucuaucaaauucuggccaucuacuccacgguggcgagcucccucguccuggugguuucucugggagcuauuagcuuuuggaugugcuccaacggcucucuccagugccggaucuguauuuga

SEQ ID NO: 198349 - RNA, 1701 nt, Artificial Sequence
  derived and/or modified CDS sequence (opt5) from hemagglutinin__InfluenzaA__ADU20562
augaaggccauccuggugguccuccuguacaccuucgcuacagccaacgcggacacgcuuugcauuggcuaucacgcuaauaacagcaccgauacaguugacaccgugcuggagaaaaaugugacagucacccauuccgugaaccuccuggaagauaagcacaaugggaaacuuuguaagcugagaggaguugcgccccuccaucugggcaaaugcaagaucgccggguggauucugggaaacccugagugugaaucucucagcacagcuuccucuuggagcuacaucguggagaccuccucuagcgacaauggcacgugcuauccgggggauuuuauugacuacgaagaacugcgggagcagcuuuccagcgucucuuccuucgaacgcuuugagaucuuccccaagaccagcucuuggccuaaccacgauuccaauaaaggagugacagccgcuuguccccaugccggcgccaagagcuuuuauaaaaaccugaucuggcucguuaagaaaggcaauucuuacccuaagcuguccaagagcuauauuaacgacaaagggaaggaagugcuuguccuguggggaauccaccaccccuccaccucugccgaucaacagagccucuaccagaaugcugacgccuacguguucgugggcacauccagauauagcaaaaaguuuaaaccugagauugcuauccggccgaagguccgcgaucaggaggggagaaugaacuacuauuggacccugguugaacccggagacaaaauuacguucgaggccacaggcaaucugguggugccucgguacgcguuugccauggaacgcaacgcugggucuggaaucauuaucuccgauacccccguccaugacugcaacacaaccugucaaaccccuaagggcgccaucaauacaagccuccccuuccagaacauucacccgaucacgauuggcaagugcccuaaauaugugaagucuaccaaacugagacuugcuacagggcugcggaauguucccagcauccagucccgcggacucuuuggcgccauugccggguucaucgagggaggcuggaccgggaugguggacggaugguacggcuaucaucaccagaacgaacaaggcucuggguacgcugcggaucuuaagagcacacagaaugccaucgacaaaauuaccaacaaggucaauuccgugaucgagaagaugaacacgcaguuuacagcuguuggaaaagaguucaaucaccuugaaaagagaauugagaaccugaauaaaaagguggaugacggcuuccucgauaucuggaccuacaacgccgaacugcugguccuccuggagaaugaacggacccuugacuaucaugauagcaacgugaaaaaucuguacgagaagguccgcucucagcucaagaacaacgccaaagagauugggaauggauguuuugaguucuaucacaagugcgacaacacauguauggaguccgugaaaaauggcaccuacgauuauccuaaguacagcgaagaggcuaaacugaacagagaagagaucgacgggguuaagcuggagucuacacggaucuaucaaauucuggccaucuacuccacgguggcgagcucccucguccuggugguuucucugggcgcuauuagcuuuuggaugugcuccaauggaucucuccagugccgcaucuguauuuga

SEQ ID NO: 198350 - RNA, 1701 nt, Artificial Sequence
  derived and/or modified CDS sequence (opt5) from hemagglutinin__InfluenzaA__ADU25478
auggaggccaagcuguucgugcucuuuugcgcuuucaccgcccugaaagcggacacaaucugugucggcuaccacgcuaacaauagcacggauaccguugacacaauucuugaaagaaacgugaccgugacacauuccgucaaucugcucgagucuagccacaacgggaagcugugcucccuuaauggaaaagcuccccugcagcucggcaacuguaauguggccggguggauccugggaaacccugaaugcgaucugcuccugaccguuaauucuuggagcuauauuaucgagacauccaccucuaagaacggcgccuguuacccgggggaauuugccgacuaugaggagcuucgggaacaacugagcacgguguccagcuucgagcgcuuugaaauuuuccccaaagcuaccucuuggccuaaucaugagacaaccaagggaacaaccgucgccugcucccacagcggcgcgaacucuuuuuacagaaaucuccuguggaucgugaagaaaggcaacuccuaucccaaacuuagcaagucuuacacgaauaacaaggggaaagagguucuggugaucuggggaguccaucacccucccacagauuccgaccagcagacccucuaucagaacaaucacacauacgugagcgugggcuccucuaaguacuaucaacgguucaccccugaaauugucacccgcccgaagguuagagagcaggccgggcggaugaacuacuauuggacacugcuggaucagggagacacgaucaccuuugaagcuacaggcaaucucauugcccccuggcaugcuuucgcccugaacaaagggagcuccagcggaaucaugaugucugaugcgcacgugcauaauuguaccacaaagugccagaccccucacggcgcccuuaaauccaaccugcccuuucaaaaugugcacccuauuacgaucggcgagugucccaaguacgucaaaagcacacagcuccgcauggcuaccgggcugagaaacauuccgucuauccagagccggggacuuuucggcgccaucgcuggguuuauugaaggaggcuggaccgggaugaucgacggaugguauggcuaccaucaccagaaugagcaaggcuccggguaugccgccgaucagaagucuacacagauugcuaucgacggaauuagcaacaaaguuaauuccgugaucgagaagaugaacgugcaauucaccagcgucggcaaggaguucaauaaccuggaaaaacgcaucgaaaaucucaacaagaaaguggaugacggguuucuggacauuuggacauacaacgcggagcugcucauccugcuugaaaaugagagaacgcuggauuuccaugacuuuaacguuaagaaucucuacgagcgggugaaaucucagcugcgcaacaaugccaaggaaauuggaaacggcugcuucgaguuuuaucacaaguguaauaacgaaugcauggaguccgucaaaaaugggaccuacaacuauccuagauacagcgaagagucuaaacuuaaucgggaggaaaucgauggcgugaagcuggaguccgucggagugcaucagauucucgcuaucuauagcacaguugccuccucucuggugcugcucgucagccugggcgccaucuccuucuggaugugcucuaacgggagccuucagugucgcauuugcaucuga

SEQ ID NO: 198351 - RNA, 1701 nt, Artificial Sequence
  derived and/or modified CDS sequence (opt5) from hemagglutinin__InfluenzaA__ADU59558
augaaggccauccuggugguccuccuguacaccuucgcuacagccaacgcggacacgcuuugcauuggcuaucacgcuaauaacagcaccgauacaguugacaccgugcuggagaaaaaugugacagucacccauuccgugaaccuccuggaagauaagcacaaugggaaacuuuguaagcugagaggaguugcuccccuccaucugggcaaaugcaacaucgccggguggauucugggaaauccugagugugaaucucucagcacagccuccucuuggagcuacaucguggagaccuccucuagcgacaacggcacgugcuauccgggggauuuuauugacuacgaagaacugcgggagcagcuuuccagcgucucuuccuucgaacgcuuugagaucuuccccaagaccagcucuuggccuaaucacgauuccaacaagggagugacagccgcuuguccccaugccggcgcgaaaucuuuuuauaagaaucugaucuggcucguuaaaaagggcaacagcuacccuaaacuguccaagagcuauauuaaugacaaggggaaagaagugcuuguccuguggggaauccaccaccccuccaccucugccgaucaacagagccucuaccagaacgcugacgccuacguguucgugggcacauccagauauagcaagaaauuuaagccugagauugcuauccggccgaaaguccgcgggcaggagggaagaaugaauuacuauuggacccugguugaacccggcgauaagauuacguucgaggccacagggaaccugguggugccucgguacgcguuugccauggaacgcaacgcuggaucuggcaucauuaucuccgacacccccguccaugauugcaauacaaccugucaaaccccuaaaggcgccaucaacacaagccuccccuuccagaauauucacccgaucacgauugggaagugcccuaaguaugugaaaucuaccaagcugagacuugcuacaggacugcggaacguucccagcauccagucccgcggccucuuuggggccauugccggauucaucgagggcggguggaccggaaugguggacggcugguacggcuaucaucaccagaaugaacaagggucuggauacgcugcggaccugaaaagcacacagaacgccaucgauaagauuaccaauaaagucaacuccgugaucgagaagaugaauacgcaguuuacagcuguuggcaaggaguucaaccaccuugagaaaagaauugagaaucugaacaagaaaguggacgauggguuccucgacaucuggaccuacaaugccgaacugcugguccuccuggagaacgaacggacccuugauuaucaugacagcaaugugaagaaccuguacgagaaaguccgcucucagcucaagaacaaugccaaggagauuggaaacggcuguuuugaguucuaucacaaaugcgauaauacauguauggaauccgugaagaacgggaccuacgacuauccuaaauacagcgaagaggcuaagcugaauagagaagagaucgauggcguuaaacuugagucuacacggaucuaucaaauucuggccaucuacuccacgguggcgagcucccucguccuggugguuucucugggagcuauuagcuuuuggaugugcuccaacggcucucuccagugccgcaucuguauuuga

SEQ ID NO: 198352 - RNA, 1701 nt, Artificial Sequence; identical to SEQ ID NO: 194741
  derived and/or modified CDS sequence (opt5) from hemagglutinin__InfluenzaA__ADU59579

SEQ ID NO: 198353 - RNA, 1701 nt, Artificial Sequence; identical to SEQ ID NO: 194741
  derived and/or modified CDS sequence (opt5) from hemagglutinin__InfluenzaA__ADU59590

SEQ ID NO: 198354 - RNA, 1701 nt, Artificial Sequence; identical to SEQ ID NO: 194741
  derived and/or modified CDS sequence (opt5) from hemagglutinin__InfluenzaA__ADU59601

SEQ ID NO: 198355 - RNA, 1701 nt, Artificial Sequence; identical to SEQ ID NO: 194741
  derived and/or modified CDS sequence (opt5) from hemagglutinin__InfluenzaA__ADU59612

SEQ ID NO: 198356 - RNA, 1701 nt, Artificial Sequence; identical to SEQ ID NO: 194741
  derived and/or modified CDS sequence (opt5) from hemagglutinin__InfluenzaA__ADU59768

SEQ ID NO: 198357 - RNA, 1701 nt, Artificial Sequence; identical to SEQ ID NO: 194741
  derived and/or modified CDS sequence (opt5) from hemagglutinin__InfluenzaA__ADU59769

SEQ ID NO: 198358 - RNA, 1701 nt, Artificial Sequence; identical to SEQ ID NO: 194741
  derived and/or modified CDS sequence (opt5) from hemagglutinin__InfluenzaA__ADU59771

SEQ ID NO: 198359 - RNA, 1701 nt, Artificial Sequence; identical to SEQ ID NO: 194741
  derived and/or modified CDS sequence (opt5) from hemagglutinin__InfluenzaA__ADU59772

SEQ ID NO: 198360 - RNA, 1701 nt, Artificial Sequence; identical to SEQ ID NO: 194741
  derived and/or modified CDS sequence (opt5) from hemagglutinin__InfluenzaA__ADU59774

SEQ ID NO: 198361 - RNA, 1701 nt, Artificial Sequence; identical to SEQ ID NO: 194741
  derived and/or modified CDS sequence (opt5) from hemagglutinin__InfluenzaA__ADU59906

SEQ ID NO: 198362 - RNA, 1701 nt, Artificial Sequence; identical to SEQ ID NO: 194741
  derived and/or modified CDS sequence (opt5) from hemagglutinin__InfluenzaA__ADU59916

SEQ ID NO: 198363 - RNA, 1701 nt, Artificial Sequence; identical to SEQ ID NO: 194741
  derived and/or modified CDS sequence (opt5) from hemagglutinin__InfluenzaA__ADU76756

SEQ ID NO: 198364 - RNA, 1701 nt, Artificial Sequence; identical to SEQ ID NO: 194741
  derived and/or modified CDS sequence (opt5) from hemagglutinin__InfluenzaA__ADU76757

SEQ ID NO: 198365 - RNA, 1701 nt, Artificial Sequence; identical to SEQ ID NO: 194741
  derived and/or modified CDS sequence (opt5) from hemagglutinin__InfluenzaA__ADU76758

SEQ ID NO: 198366 - RNA, 1701 nt, Artificial Sequence; identical to SEQ ID NO: 194741
  derived and/or modified CDS sequence (opt5) from hemagglutinin__InfluenzaA__ADU76759

SEQ ID NO: 198367 - RNA, 1701 nt, Artificial Sequence; identical to SEQ ID NO: 195101
  derived and/or modified CDS sequence (opt5) from hemagglutinin__InfluenzaA__ADU76761

SEQ ID NO: 198368 - RNA, 1701 nt, Artificial Sequence; identical to SEQ ID NO: 194741
  derived and/or modified CDS sequence (opt5) from hemagglutinin__InfluenzaA__ADU76762

SEQ ID NO: 198369 - RNA, 1701 nt, Artificial Sequence
  derived and/or modified CDS sequence (opt5) from hemagglutinin__InfluenzaA__ADU76764
augaaggccauccuggugguccuccuguacaccuucgcuacagccaacgcggacacgcuuugcauuggcuaucacgcuaauaacagcaccgauacaguugacaccgugcuggagaaaaaugugacagucacccauuccgugaaccuccuggaagauaagcacaaugggaaacuuuguaagcugagaggaguugcuccccuccaucugggcaaaugcaacaucgccggguggauucugggaaauccugagugugaaucucucagcacagccuccucuuggagcuacaucguggaggccuccucuagcaacaaugggaccugcuauccgggcgacuuuauugauuacgaagaacugcgggagcagcuuuccagcgucucuuccuucgaacgcuuugagaucuuccccaagacgagcucuuggccuaaccacgacuccaauaagggagugaccgcugccuguccccaugcgggcgccaagagcuuuuauaagaaccugaucuggcucguuaaaaagggcaauucuuacccuaaacuguccaagagcuauauuaacgauaaggggaaagaagugcuuguccuguggggaauccaccaccccuccacaucugcugaccaacagagccucuaccagaaugccgaugcuuacguguucgugggcaccuccagauauagcaagaaauuuaagccugagauugccauccggccgaaaguccgcgaccaggaggggagaaugaacuacuauuggacacugguugaacccggagauaagauuaccuucgaggcgacgggcaaccugguggugccucgguacgccuuugcuauggaacgcaaugccgggucuggaaucauuaucuccgacacacccguccaugauugcaacaccacaugucaaaccccuaaaggcgcuaucaauaccagccuccccuuccagaacauucacccgaucacaauuggcaagugcccuaaguaugugaaaucuacgaagcugagacuugccaccgggcugcggaauguucccagcauccagucccgcggacucuuuggcgccauugcuggguucaucgagggaggcuggacagggaugguggacggaugguacggcuaucaucaccagaacgaacaaggcucuggguacgcggccgaccugaaaagcacccagaaugcuaucgaugagauuacaaacaaggucaauuccgugaucgagaaaaugaacacccaguuuauugccguuggaaaggaguucaaucaccuugagaagagaaucgaaaaccugaauaaaaagguggacgauggcuuccucgacauuuggacguacaacgccgagcugcugguccuccuggaaaaugagcggacacuugauuaucaugacagcaacgugaaaaaccuguacgagaagguccgcucucagcucaaaaauaacgcuaaggaaaucgggaauggauguuuugaguucuaucacaagugcgauaacaccuguauggaauccgugaaaaauggcaccuacgacuauccuaaguacagcgaggaagccaaacugaacagagaggagaucgaugggguuaaacuugaaucuacacggauuuaucaaauccuggcgauuuacuccaccguggcuagcucccucguccuggugguuucucugggcgccaucagcuuuuggaugugcuccaauggaucucuccagugccgcauuuguaucuga

SEQ ID NO: 198370 - RNA, 1701 nt, Artificial Sequence
  derived and/or modified CDS sequence (opt5) from hemagglutinin__InfluenzaA__ADU76765
augaaggccauccugauugugcuccuguacaccuucgcuacagccaacgcggacacgcuuugcaucggcuaucacgcuaauaacagcaccgauacagucgacaccguucuggagaagaaugugacagugacccauuccgucaaccuccuggaagauaagcacaaugggaaacuuuguaagcugagaggaguggcuccccuccaucugggcaaaugcaacauugccggguggauccugggaaauccugagugugaaucucucagcacagccuccucuuggagcuacauuguugagaccuccucuagcgacaacggcacgugcuauccgggggauuuuaucgacuacgaagaacugcgggagcagcuuuccagcgugucuuccuucgaacgcuuugagaucuuccccaagaccagcucuuggccuaaucacgauuccaacaagggagucacagccgcuuguccccaugccggcgcgaaaucuuuuuauaagaaucugauuuggcucgugaaaaagggcaacagcuacccuaaacuguccaagagcuauaucaaugacaaggggaaagaaguucuugugcuguggggcauucaccaccccuccaccucugccgaucaacagagccucuaccagaacgcugacgccuacgucuucgugggaacauccagauauagcaagaaauuuaagccugagaucgcuauucggccgaaagugcgcgaucaggaggggagaaugaauuacuauuggacccuggucgaacccggagacaagaucacguucgaggccacaggcaaccugguugugccucgguacgcguuugccauggaacgcaacgcugggucuggaauuaucaucuccgauacccccgugcaugacugcaauacaaccugucaaaccccuaaaggcgccauuaacacaagccuccccuuccagaauauccacccgauuacgaucggcaagugcccuaaguaugucaaaucuaccaagcugagacuugcuacagggcugcggaacgugcccagcauucagucccgcggacucuuuggcgccaucgccggguucaucgagggaggcuggaccgggaugguugacggaugguacggcuaucaucaccagaaugaacaaggcucuggguacgcugcggaucugaaaagcacacagaacgccauugacgagaucaccaauaaggugaacuccgucauugagaaaaugaauacgcaguuuacagcugugggaaaggaguucaaccaccuugagaagagaaucgaaaaucugaacaaaaagguugaugacggcuuccucgauauuuggaccuacaaugccgagcugcuggugcuccuggaaaacgagcggacccuugacuaucaugauagcaaugucaaaaaccuguacgagaaggugcgcucucagcucaaaaacaaugccaaggaaaucgggaacggauguuuugaguucuaucacaagugcgacaauacauguauggaauccgucaaaaacggcaccuacgauuauccuaaguacagcgaggaagcuaaacugaauagagaggagaucgacggggugaaacuugaaucuacacggauuuaucaaauccuggccauuuacuccagcguugcguccucucucgugcuggucgugagccugggcgcuaucuccuuuuggaugugcucuaacggaagccuccagugccgcauuuguaucuga

SEQ ID NO: 198371 - RNA, 1701 nt, Artificial Sequence; identical to SEQ ID NO: 196338
  derived and/or modified CDS sequence (opt5) from hemagglutinin__InfluenzaA__ADU76766

SEQ ID NO: 198372 - RNA, 1701 nt, Artificial Sequence
  derived and/or modified CDS sequence (opt5) from hemagglutinin__InfluenzaA__ADU76767
augaaggccauccuggugguccuccuguacaccuucgcuacagccaacgcggacacgcuuugcauuggcuaucacgcuaauaacagcaccgauacaguugacaccgugcuggagaaaaaugugacagucacccauuccgugaaccuccuggaagauaagcacaaugggaaacuuuguaagcugagaggaguugcuccccuccaucugggcaaaugcaacaucgccggguggauucugggaaauccugagugugaaucucucagcacagccuccucuuggagcuacaucguggagaccuccucuagcgacaacggcacgugcuauccgggggauuuuauugacuacgaagaacugcgggagcagcuuuccagcgucucuuccuucgaacgcuuugagaucuuccccaagaccagcucuuggccuaaucacgauuccaacaagggagugacagccgcuuguccccaugccggcgcgaaaucuuuuuauaagaaucugaucuggcucguuaaaaagggcaacagcuacccuaaacuguccaagagcuauauuaaugacaaggggaaagaagugcuuguccuguggggaauccaccaccccuccaccucugccgaucaacagagccucuaccagaacgcugacgccuacguguucgugggcacauccagauauagcaagaaauuuaagccugagauugcuauccggccgaaaguccgcgagcaggaagggagaaugaauuacuauuggacccugguugagcccggagauaagauuacguucgaagccacaggcaaccugguggugccucgguacgcguuugccauggagcgcaacgcugggucuggaaucauuaucuccgacacccccguccaugauugcaauacaaccugucaaaccccuaaaggcgccaucaacacaagccuccccuuccagaauauucacccgaucacgauuggcaagugcccuaaguaugugaaaucuaccaagcugagacuugcuacagggcugcggaacguucccagcauccagucccgcggacucuuuggcgccauugccggguucaucgaaggaggcuggaccgggaugguggacggaugguacggcuaucaucaccagaaugagcaaggcucuggguacgcugcggaccugaaaagcacacagaacgccaucgauaagauuaccaauaaagucaacuccgugaucgagaagaugaauacgcaguuuacagcuguuggaaaggaguucaaccaccuugagaaaagaauugaaaaucugaacaagaaaguggacgauggcuuccucgacaucuggaccuacaaugccgagcugcugguccuccuggaaaacgagcggacccuugauuaucaugacagcaaugugaagaaccuguacgagaaaguccgcucucagcucaagaacaaugccaaggaaauugggaacggauguuuugaguucuaucacaaaugcgauaauacauguauggaauccgugaagaacggcaccuacgacuauccuaaauacagcgaggaagcuaagcugaauagagaggagaucgaugggguuaaacuugaaucuacacggaucuaucaaauucuggccaucuacuccacgguggcgagcucccucguccuggugguuucucugggcgcuauuagcuuuuggaugugcuccaacggaucucuccagugccgcaucuguauuuga

SEQ ID NO: 198373 - RNA, 1701 nt, Artificial Sequence
  derived and/or modified CDS sequence (opt5) from hemagglutinin__InfluenzaA__ADU76768
augaaggccauccuggugguccuccuguacaccuucgcuauugccaacgcggacacacuuugcaucggcuaucacgcuaauaacagcacggauaccguugacacagugcuggagaaaaaugugaccgucacacauuccgugaaccuccuggaagauaagcacaaugggaaacuuuguaagcugagaggaguugcuccccuccaucugggcaaaugcaacauugccggguggauccugggaaauccugagugugaaucucucagcaccgccuccucuuggagcuacauuguggagacauccucuagcgacaacggaaccugcuauccgggggauuuuaucgacuacgaagaacugcgggagcagcuuuccagcgucucuuccuucgaacgcuuugagaucuuccccaagacgagcucuuggccuaaucacgauuccaacaagggagugaccgccgcuuguccccaugccggcgcgaaaucuuuuuauaagaaucugauuuggcucguuaaaaagggcaacagcuacccuaaacuguccaagagcuauaucaaugacaaggggaaagaagugcuuguccuguggggcauucaccaccccuccacaucugccgaucaacagagccucuaccagaacgcugacgccuacguguucgugggcaccuccaaguauagcaaaaaguuuaaaccugagaucgcuauuagaccgaagguccgggaucaggaggggcgcaugaauuacuauuggacacugguugaacccggagacaaaaucaccuucgaggccacgggcaaccugguggugccuagauacgcguuugccauggaacggaacgcugggucuggaauuaucaucuccgauacacccguccaugacugcaauaccacaugucaaaccccuaagggcgccauuaacaccagccuccccuuccagaauauccacccgauuacaaucggcaagugcccuaaauaugugaagucuacgaaacugcgccuugcuaccgggcugagaaacguucccagcauucagucccggggacucuuuggcgccaucgccggguucaucgagggaggcuggacagggaugguggacggaugguacggcuaucaucaccagaaugaacaaggcucuggguacgcugcggaucuuaagagcacccagcacgccauugacgagaucacaaacaaagucaauuccgugauugagaagaugaacacccaguuuacggcuguuggaaaggaguucaaucaucuggagaaacgcaucgaaaaccugaauaagaaaguggaugacggcuuccucgauauuuggacauacaacgccgagcugcugguccuccuggaaaaugagagaacccuugacuaucacgauagcaacgugaagaaucuguacgagaaaguccggucucagcucaagaacaacgccaaggaaaucgggaauggauguuuugaguucuaucauaaaugcgacaacaccuguauggaauccgugaagaauggcacauacgauuauccuaaauacagcgaggaagcuaagcugaaccgcgaggagaucaaugggguuaaacuugaaucuaccagaauuuaucaaauccuggccauuuacuccacaguggcgagcucccucguccuggugguuucucugggcgcuaucagcuuuuggaugugcuccaacggaucucuccagugccggauuuguaucuga

SEQ ID NO: 198374 - RNA, 1701 nt, Artificial Sequence; identical to SEQ ID NO: 194741
  derived and/or modified CDS sequence (opt5) from hemagglutinin__InfluenzaA__ADU76769

SEQ ID NO: 198375 - RNA, 1701 nt, Artificial Sequence; identical to SEQ ID NO: 194741
  derived and/or modified CDS sequence (opt5) from hemagglutinin__InfluenzaA__ADU76770

SEQ ID NO: 198376 - RNA, 1701 nt, Artificial Sequence; identical to SEQ ID NO: 194741
  derived and/or modified CDS sequence (opt5) from hemagglutinin__InfluenzaA__ADU76771

SEQ ID NO: 198377 - RNA, 1701 nt, Artificial Sequence; identical to SEQ ID NO: 195486
  derived and/or modified CDS sequence (opt5) from hemagglutinin__InfluenzaA__ADU76772

SEQ ID NO: 198378 - RNA, 1701 nt, Artificial Sequence; identical to SEQ ID NO: 194741
  derived and/or modified CDS sequence (opt5) from hemagglutinin__InfluenzaA__ADU76774

SEQ ID NO: 198379 - RNA, 1701 nt, Artificial Sequence; identical to SEQ ID NO: 194741
  derived and/or modified CDS sequence (opt5) from hemagglutinin__InfluenzaA__ADU76775

SEQ ID NO: 198380 - RNA, 1701 nt, Artificial Sequence; identical to SEQ ID NO: 194741
  derived and/or modified CDS sequence (opt5) from hemagglutinin__InfluenzaA__ADU76776

SEQ ID NO: 198381 - RNA, 1701 nt, Artificial Sequence; identical to SEQ ID NO: 194741
  derived and/or modified CDS sequence (opt5) from hemagglutinin__InfluenzaA__ADU76777

SEQ ID NO: 198382 - RNA, 1701 nt, Artificial Sequence; identical to SEQ ID NO: 194741
  derived and/or modified CDS sequence (opt5) from hemagglutinin__InfluenzaA__ADU76778

SEQ ID NO: 198383 - RNA, 1701 nt, Artificial Sequence; identical to SEQ ID NO: 197599
  derived and/or modified CDS sequence (opt5) from hemagglutinin__InfluenzaA__ADU76779

SEQ ID NO: 198384 - RNA, 1701 nt, Artificial Sequence; identical to SEQ ID NO: 194741
  derived and/or modified CDS sequence (opt5) from hemagglutinin__InfluenzaA__ADU76780

SEQ ID NO: 198385 - RNA, 1701 nt, Artificial Sequence; identical to SEQ ID NO: 196338
  derived and/or modified CDS sequence (opt5) from hemagglutinin__InfluenzaA__ADU76781

SEQ ID NO: 198386 - RNA, 1701 nt, Artificial Sequence; identical to SEQ ID NO: 195101
  derived and/or modified CDS sequence (opt5) from hemagglutinin__InfluenzaA__ADU76782

SEQ ID NO: 198387 - RNA, 1701 nt, Artificial Sequence
  derived and/or modified CDS sequence (opt5) from hemagglutinin__InfluenzaA__ADU76784
augaaggccauccuggugguccuccuguacaccuucgcuacagccaacgcggacacgcuuugcauuggcuaucacgcuaauaacagcaccgauacaguugacaccgugcuggagaagaaugugacagucacccauuccgugaaccuccuggaagauaagcacaaugggaaacuuuguaagcugagaggaguugcuccccuccaucugggcaaaugcaacaucgccggguggauucugggaaauccugagugugaaucucucagcacagccuccucuuggagcuacaucguggagaccuccucuagcaacaauggcacgugcuauccgggggacuuuauugauuacgaagaacugcgggagcagcuuuccagcgucucuuccuucgaacgcuuugagaucuuccccaagaccagcucuuggccuaaccacgacuccaauaagggagugacagccgcuuguccccaugccggcgcgaaaucuuuuuauaagaaccugaucuggcucguuaaaaagggcaauagcuacccuaaacuguccaagagcuauauuaacgauaaggggaaagaagugcuuguccuguggggaauccaccaccccuccaccucugccgaccaacagagccucuaccagaaugcugaugccuacguguucgugggcacauccagauauagcaagaaauuuaagccugagauugcuauccggccgaaaguccgcgaccaggaggggagaaugaacuacuauuggacccugguugaacccggagauaagauuacguucgaggccacaggcaaccugguggugccucgguacgcguuugccauggaacgcaaugcugggucuggaaucauuaucuccgacacccccguccaugauugcaacacaaccugucaaaccccuaaaggcgccaucaauacaagccuccccuuccagaacauucacccgaucacgauuggcaagugcccuaaguaugugaaaucuaccaagcugagacuugcuacagggcugcggaauguucccagcauccagucccgcggacucuuuggcgccauugccggguucaucgagggaggcuggaccgggaugguggacggaugguacggcuaucaucaccagaacgaacaaggcucuggguacgcugcggaccugaaaagcacacagaaugccaucgaugagauuaccaacaaggucaauuccgugaucgagaaaaugaacacgcaguuuacagcuguuggaaaggaguucaaucaccuugagaagagaauugaaaaccugaauaaaaagguggacgauggcuuccucgacaucuggaccuacaacgccgagcugcugguccuccuggaaaaugagcggacccuugauuaucaugacagcaacgugaaaaaccuguacgagaagguccgcucucagcucaaaaauaacgccaaggaaauugggaauggauguuuugaguucuaucacaagugcgauaacacauguauggaauccgugaaaaauggcaccuacgacuauccuaaguacagcgaggaagcuaaacugaacagagaggagaucgaugggguuaaacuugaaucuacacggaucuaucaaauucuggccaucuacuccacgguggcgagcucccucguccuggugguuucucugggcgcuauuagcuuuuggaugugcuccaauggaucucuccagugccgcaucuguauuuga

SEQ ID NO: 198388 - RNA, 1701 nt, Artificial Sequence; identical to SEQ ID NO: 194741
  derived and/or modified CDS sequence (opt5) from hemagglutinin__InfluenzaA__ADU76785

SEQ ID NO: 198389 - RNA, 1701 nt, Artificial Sequence; identical to SEQ ID NO: 194741
  derived and/or modified CDS sequence (opt5) from hemagglutinin__InfluenzaA__ADU76786

SEQ ID NO: 198390 - RNA, 1701 nt, Artificial Sequence
  derived and/or modified CDS sequence (opt5) from hemagglutinin__InfluenzaA__ADU76787
augaaggccauccuggugguccuccuguacaccuucgcuacagccaacgcggacacgcuuugcauuggcuaucacgcuaauaacagcaccgauacaguugacaccgugcuggagaaaaaugugacagucacccauuccgugaaccuccuggaagauaagcacaaugggaaacuuuguaagcugagaggaguugcuccccuccaucugggcaaaugcaacaucgccggguggauucugggaaauccugagugugaaucucucagcacagccuccucuuggagcuacaucguggagaccuccucuagcgacaacggcacgugcuauccgggggauuuuauugacuacgaagaacugcgggagcagcuuuccagcgucucuuccuucgaacgcuuugagaucuuccccaagaccagcucuuggccuaaucacgauuccaacaagggagugacagccgcuuguccccaugccggcgcgaaaucuuuuuauaagaaucugaucuggcucguuaaaaagggcaacagcuacccuaaacuguccaagagcuauauuaaugacaaggggaaagaagugcuuguccuguggggaauccaccaccccuccaccucugccgaucaacagagccucuaccagaacgcugacgccuacguguucgugggcacauccagauauagcaagaaauuuaagccugagauugcuauccggccgaaaguccgcgagcaggaagggagaaugaauuacuauuggacccugguugagcccggagauaagauuacguucgaagccacaggcaaccugguggugccucgguacgcguuugccauggagcgcaacgcugggucuggaaucauuaucuccgacacccccguccaugauugcaauacaaccugucaaaccccuaaaggcgccaucaacacaagccuccccuuccacaauauucauucuaucacgauuggcaagugcccgaaguaugugaaaagcaccaagcugagacuugcuacagggcugcggaacguuccuuccauccagucucgcggacucuuuggcgccauugccggguucaucgaaggaggcuggaccgggaugguggacggaugguacggcuaucaccaccagaaugagcagggcagcggguacgcugcggaccugaaauccacacaaaacgccaucgaugagauuaccaauaaggucaacagcgugaucgaaaagaugaauacgcaguuuacagcuguuggaaaggaguucaaccaucuugaaaagagaauugagaaucugaacaaaaagguggacgauggcuuccucgacaucuggaccuacaaugccgaacugcugguccuccuggagaacgagcggacccuugauuaucacgacucuaaugugaaaaaccuguacgaaaagguccgcucccagcucaaaaacaaugccaaggagauugggaacggauguuuugaguucuaucauaagugcgauaauacauguauggagagcgugaaaaacggcaccuacgacuaucccaaguacucugaagaggcuaaacugaauagagaggaaaucgaugggguuaaacuugaguccacacggaucuaucagauucuggccaucuacagcacgguggcguccucucucguccuggugguuagccugggcgcuauuuccuuuuggaugugcucuaacggaagccuccaaugccgcaucuguauuuga

SEQ ID NO: 198391 - RNA, 1701 nt, Artificial Sequence; identical to SEQ ID NO: 198372
  derived and/or modified CDS sequence (opt5) from hemagglutinin__InfluenzaA__ADU76788

SEQ ID NO: 198392 - RNA, 1701 nt, Artificial Sequence; identical to SEQ ID NO: 198372
  derived and/or modified CDS sequence (opt5) from hemagglutinin__InfluenzaA__ADU76789

SEQ ID NO: 198393 - RNA, 1701 nt, Artificial Sequence; identical to SEQ ID NO: 194741
  derived and/or modified CDS sequence (opt5) from hemagglutinin__InfluenzaA__ADU76790

SEQ ID NO: 198394 - RNA, 1701 nt, Artificial Sequence; identical to SEQ ID NO: 194741
  derived and/or modified CDS sequence (opt5) from hemagglutinin__InfluenzaA__ADU76791

SEQ ID NO: 198395 - RNA, 1701 nt, Artificial Sequence; identical to SEQ ID NO: 198372
  derived and/or modified CDS sequence (opt5) from hemagglutinin__InfluenzaA__ADU76792

SEQ ID NO: 198396 - RNA, 1701 nt, Artificial Sequence
  derived and/or modified CDS sequence (opt5) from hemagglutinin__InfluenzaA__ADU76793
augaaggccauccuggugguccuccuguacaccuucgcuacagccaacgcggacacgcuuugcauuggcuaucacgcuaauaacagcaccgauacaguugacaccgugcuggagaaaaaugugacagucacccauuccgugaaccuccuggaagauaagcacaaugggaaacuuuguaagcugagaggaguugcuccccuccaucugggcaaaugcaacaucgccggguggauucugggaaauccugagugugaaucucucagcacagccuccucuuggagcuacaucguggagaccuccucuagcgacaacggcacgugcuauccgggggauuuuauugacuacgaagaacugcgggagcagcuuuccagcgucucuuccuucgaaaaguuugagaucuuccccaagaccagcucuuggccuaaucacgauuccaacaaaggagugacagccgcuuguccccaugccggcaccaagagcuuuuauaaaaaucugaucuggcucguuaagaaaggcaacucuuacccuaagcuguccaagagcuauauuaaugacaaagggaaggaagugcuuguccuguggggaauccaccaccccuccacaucugcggaucaacagagccucuaccagaacgccgacgcuuacguguucgugggcaccucccgcuauagcaaaaaguuuaaaccugagauugccaucagaccgaagguccgggaucaggaggggcgcaugaauuacuauuggacgcugguugaacccggagacaaaauuacauucgaggcuaccggcaaccugguggugccuagauacgccuuugcgauggaacggaacgccgggucuggaaucauuaucuccgauacacccguccaugacugcaauaccaccugucaaacaccuaagggcgcuaucaacacgagccuccccuuccagaauauucacccgaucaccauuggcaagugcccuaaauaugugaagucuacaaaacugcgccuugccaccgggcugagaaacguucccagcauccagucccggggacucuuuggcgcuauugccggguucaucgagggaggcuggacagggaugguggacggaugguacggcuaucaucaccagaaugaacaaggcucuggguacgccgcugaucuuaagagcacccagaacgcgaucgacaaaauuacgaauaaggucaacuccgugaucgagaagaugaauacacaguuuaccgccguuggaaaagaguucaaccaccuugaaaagcgcauugagaaucugaacaaaaagguggaugacggcuuccucgauaucuggaccuacaaugcugaacugcugguccuccuggagaacgaaagaacacuugacuaucaugauagcaaugugaaaaaccuguacgagaagguccggucucagcucaagaacaaugccaaagagauugggaacggauguuuugaguucuaucacaagugcgacaauaccuguauggaguccgugaaaaacggcacauacgauuauccuaaguacagcgaagaggccaaacugaaucgcgaagagaucgacgggguuaagcuggagucuacgagaaucuaucaaauucuggcuaucuacuccaccguggccagcucccucguccuggugguuucucugggcgcgauuagcuuuuggaugugcuccaacggaucucuccagugccggaucuguauuuga

SEQ ID NO: 198397 - RNA, 1701 nt, Artificial Sequence
  derived and/or modified CDS sequence (opt5) from hemagglutinin__InfluenzaA__ADU85911
augaaggccaucauugugguccugcucuacaccuucgcuacagccgacgcggauacgcugugcaucggcuaucacgcuaacaauagcaccgacacaguugauaccgugcuugagaaaaacgugacagucacccauuccgugaaucugcucgaaaacaagcacaaugggaaacuguguaaacuuggaggcauugcuccccugcaucucgggaaaugcgacaucgccggauggcugcugggcaacccugagugugaaucucucuuuacagccagcuccuggucuuacauuguugagaccccgaauagcgauaacgggacgugcuaucccggagacuucaucaauuacgaggaacugagagagcaccuuuccucugugagcuccuuugaacgguucgagaucuuuccuaaggccaacagcuggcccaaucaugauaccaacaagggcgucacagcugccuguccuuaugcgggcgccaauucuuucuaccgcaaccugauuuggcucgugaaaaaggggaauagcuaucccaaacugagcaagucuuacaucaacaacaaaaagaaggaaguucuugugauuuggggaauccaccacccuccgaccuccacagaccagcaaacccuguaccagaaugcugaugccuaugucuuugugggcagcucuaaauacuccaagagauucaaacccgagauugcugcccggccuaaggugcgcgaccaggcggggagaauggauuauuacuggacgcucaucgagcccggagacacaauuaccuuugaagccacaggcaaccuggucguuccucgguaugcuuucgccaugaaacgcgggagcggauccggcaucaucgugucugaugcucccgugcaugacugcaauaccaccugucagacaccgaagggcgccauuaacacgagccugccuuuucaaaauauccaccccgucaccauuggggagugcccuaaauacgugaaguccacaaagcucagaauggccaccggacugcggaacauccccagcauucagucucgcggccuuuucggggcuaucgcgggauuucuggaaggcggguggacaggaaugaucgacggcugguauggcuaccaucaccagaaugagcagggguccggauacgccgcugaucaaaaauccacccagaacgccauugacggcaucacgaauaagguuaacucuauuaucgaaaagaugaauacacaguucaccgccguggggaaggaguucagccagcucgagaaaagaauugaaucccugaacaauaaggucgaugacggauuucuugauaucuggaccuauaacgcugagcugcucgugcugcuggaaaaugagcggacacucgacuaccacgauucuaacguuaagaaccuguaugaaaaagugcgcagccaacuuaagaauaacgccaaagagaucggcaauggguguuucgaguuuuaccauaagugcgacaacaccuguauggaauccgucaaaaauggcacauaugauuaccccaaguauagcgaggaagcgaagcugaacagagaggaaauugacggagugaaacucgagucugcucggaucuaccagauucuggccaucuacuccacggucgccagcucucuugugcugcucguuucccugggcgcuauuagcuucuggaugugcuccaaugggucucugcagugccgcaucuguauuuga

SEQ ID NO: 198398 - RNA, 1701 nt, Artificial Sequence; identical to SEQ ID NO: 195905
  derived and/or modified CDS sequence (opt5) from hemagglutinin__InfluenzaA__ADV17283

SEQ ID NO: 198399 - RNA, 1701 nt, Artificial Sequence; identical to SEQ ID NO: 195905
  derived and/or modified CDS sequence (opt5) from hemagglutinin__InfluenzaA__ADV17293

SEQ ID NO: 198400 - RNA, 1701 nt, Artificial Sequence
  derived and/or modified CDS sequence (opt5) from hemagglutinin__InfluenzaA__ADV17303
augaaggccauccuggugguccuccuguacaccuucgcuacagccaacgcggacacgcuuugcauuggcuaucacgcuaauaacagcaccgauacaguugacaccgugcuggagaaaaaugugacagucacccauuccgugaaccuccuggaagauaagcacaaugggaaacuuuguaagcugagaggaguugcuccccuccaucugggcaaaugcaacaucgccggguggauucugggaaauccugagugugaaucucucagcacagccuccucuuggagcuacaucguggagaccuccucuagcgacaacggcacgugcuauccgggggauuuuauugacuacgaagaacugcgggagcagcuuuccagcgucucuuccuucgaacgcuuugagaucuuccccaagaccagcucuuggccuaaucacgauuccaacaagggagugacagccgcuuguccccaugccggcgcgaaaucuuuuuauaagaaucugaucuggcucguuaaaaagggcaacagcuacccuaaacuguccaagagcuauauuaaugacaaggggaaagaagugcuuguccuguggggaauccaccaccccuccaccucugccgaucaacagagccucuaccagaacgcugacgccuacguguucgugggcacauccagauauagcaagaaauuuaagccugagauugcuauccggccgaaaguccgcgaucaggaggggagaaugaauuacuauuggacccugguugaacccggagacaagauuacguucgaggccacaggcaaccugguggugccucgguacgcguuugccauggaacgcaacgcugggucuggaaucauuaucuccgauacccccguccaugacugcaauacaaccugucaaaccccuaaaggcgccaucaacacaagccuccccuuccagaauauucacccgaucacgauuggcaagugcccuaaguaugugaaaucuaccaagcugagacuugcuaaagggcugcggaacguucccagcauccagucccgcggacucuuuggcgccauugccggguucaucgagggaggcuggacagggaugguggacggaugguacggcuaucaucaccagaaugaacaaggcucuggguacgcugcggaucuuaagagcacccagaacgccaucgacgagauuacaaauaaagucaacuccgugaucgagaagaugaauacccaguuuacggcuguuggaaaggaguucaaccaccuggagaaaagaauugaaaaucugaacaagaaaguggaugacggcuuccucgauaucuggacauacaaugccgagcugcugguccuccuggaaaacgagcggacccuugacuaucaugauagcaaugugaagaaccuguacgagaaaguccgcucucagcucaagaacaaugccaaggaaauugggaacggauguuuugaguucuaucacaaaugcgacaauaccuguauggaauccgugaagaacggcacauacgauuauccuaaauacagcgaggaagcuaagcugaauagagaggagaucgacgggguuaaacuugaaucuacccggaucuaucaaauucuggccaucuacuccacaguggcgagcucccucguccuggugguuucucugggcgcuauuagcuuuuggaugugcuccaacggaucucuccagugccgcaucuguauuuga

SEQ ID NO: 198401 - RNA, 1701 nt, Artificial Sequence; identical to SEQ ID NO: 195905
  derived and/or modified CDS sequence (opt5) from hemagglutinin__InfluenzaA__ADV17313

SEQ ID NO: 198402 - RNA, 1701 nt, Artificial Sequence
  derived and/or modified CDS sequence (opt5) from hemagglutinin__InfluenzaA__ADV17323
augaaggccauccuggugguccuccuguacaccuucgcuacaacgaacgccgacacccuuugcauuggcuaucacgcgaauaacagcacagauaccguugacacagugcuggagaagaaugugaccgucacacauuccgugaaccuccuggaagauaagcacaaugggaaacuuuguaagcugagaggaguugcuccccuccaucugggcaaaugcaacaucgccggguggauucugggaaauccugagugugaaucucucagcaccgccuccucuuggagcuacaucguggagacguccucuagcgacaacgggaccugcuauccgggcgauuuuauugacuacgaagaacugcgggagcagcuuuccagcgucucuuccuucgaacgcuuugagaucuuccccaagacaaauagcuggccuaaccacgauucuaauaagggagugaccgcugccuguccccaugcuggcgccaaauccuuuuauaagaaccugaucuggcucguuaaaaagggcaauagcuacccuaaacugucuaaguccuauauuaacgacaaggggaaagaagugcuuguccuguggggaauccaccaccccagcacauccgcggaucaacagggccucuaccagaaugccgacgcuuacguguucguggggaccucuagauauagcaagaaauuuaagccugagauugccauccggccgaaaguccgcgaucaggagggaagaaugaacuacuauuggacgcugguugaacccggcgacaagauuacauucgaggcuaccgggaaccugguggugccucgguacgccuuugcgauggaacgcaaugccggauccggcaucauuaucagcgauacacccguccaugacugcaacaccaccugucaaacaccugagggcgcuaucaauacgucucuccccuuccagaacauucacccgaucaccauugggaaaugcccuaaguaugugaaguccacaaaacugagacuugccaccggacugcggaauguucccagcauccagucucgcggccucuuuggggcuauugccggauucaucgaaggcggguggacaggaaugguggacggcugguacggcuaucaucaccagaacgagcaagggagcggauacgccgcugaucugaaguccacccagaaugcgaucgacaaaauuacgaacaaggucaauuacgugaucgagaaaaugaacacacaguuuaccgccguuggcaaggaguucaaucaccuugagaagagaauugaaaaccugaauaaaaagguggaugacggguuccucgauaucuggaccuauaacgcugagcugcugguccuccuggaaaaugagcggacacuugacuaccaugauucuaacgugaaaaaccuguaugagaagguccgcagccagcucaaaaauaacgccaaggaaauuggaaauggcuguuuugaguucuaccacaagugcgacaacaccuguauggaauccgugaaaaaugggacauaugauuacccuaaguauagcgaggaagccaaacugaacagagaggagaucgacggcguuaaacuugaaucuacgcggaucuaccaaauucuggcuaucuacuccaccguggccagcucucucguccuggugguuucccugggagcgauuagcuuuuggaugugcuccaauggcucucuccagugccgcaucuguauuuga

SEQ ID NO: 198403 - RNA, 1701 nt, Artificial Sequence
  derived and/or modified CDS sequence (opt5) from hemagglutinin__InfluenzaA__ADV17333
augaaggccauccuggugguccuccuguacaccuucgcuacagccaacgcggacacgcuuugcauuggcuaucacgcuaauaacagcaccgauacaguugacaccgugcuggagaaaaaugugacagucacccauuccgugaaccuccuggaagauaagcacaaugggaaacuuuguaagcugagaggaguugcuccccuccaucugggcaaaugcaacaucgccggguggauucugggaaauccugagugugaaucucucagcacagccuccucuuggagcuacaucguggagaccuccucuagcgacaacggcacgugcuauccgggggauuuuauugacuacgaagaacugcgggagcagcuuuccagcgucucuuccuucgaacgcuuugagaucuuccccaagaccagcucuuggccuaaucacgauuccaacaagggagugacagccgcuuguccccaugccggcgcgaaaucuuuuuauaagaaucugaucuggcucguuaaaaagggcaacagcuacccuaaacuguccaagagcuauauuaaugacaaggggaaagaagugcuuguccuguggggaauccaccaccccuccaccucugccgaucaacagaaccucuaccagaaugcugacgccuacguguucgugggcacaagcagauauuccaagaaauuuaagccugagauugcuauccggccgaaaguccgcgaucaggaggggagaaugaacuacuauuggacccugguugaacccggagacaagauuacguucgaggccacaggcaaccugguggugcuccgguacgcguuugccauggaacgcaaugcugggagcggaaucauuaucucugauaccccuguccaugacugcaacacaaccugucaaacccccaaaggcgccaucaauacaucccugccuuuccagaacauucaccccaucacgauuggcaagugcccgaaguaugugaaaagcaccaaacuuagacuggcuacagggcuccggaauguuccuucuauccagagccgcggacuguuuggcgccauugccggguucaucgagggaggcuggaccgggaugguggacggaugguacggcuaucaucaccagaacgaacaaggcuccggguacgcugcggaucuuaaaucuacacagaaugccaucgacaagauuaccaacaaagucaauagcgugaucgagaagaugaacacgcaguuuacagcuguuggaaaggaguucaaucaccuggaaaagagaauugagaaccucaauaagaaaguggaugacggcuuccuggauaucuggaccuacaacgccgaacugcucguccugcuugagaaugaacggacccuggacuauuacgauuccaacgugaagaaccucuaugagaaaguccgcagccagcugaagaauaacgccaaggagauugggaauggauguuuugaguucuaccauaaaugcgacaacacauguauggagucugugaagaauggcaccuaugauuaccccaaauauuccgaagaggcuaaacuuaacagagaagagaucgacgggguuaagcuggagagcacacggaucuaccaaauucucgugaucuacucuacggucgccuccagccuggugcugguugugucccucggcgcgauuucuuuuuggaugugcagcaauggaucccugcagugccgcaucuguauuuga

SEQ ID NO: 198404 - RNA, 1701 nt, Artificial Sequence; identical to SEQ ID NO: 194741
  derived and/or modified CDS sequence (opt5) from hemagglutinin__InfluenzaA__ADV19019

SEQ ID NO: 198405 - RNA, 1701 nt, Artificial Sequence; identical to SEQ ID NO: 195226
  derived and/or modified CDS sequence (opt5) from hemagglutinin__InfluenzaA__ADV41677

SEQ ID NO: 198406 - RNA, 1701 nt, Artificial Sequence
  derived and/or modified CDS sequence (opt5) from hemagglutinin__InfluenzaA__ADV58939
augaaggccauccuggugguccuccuguacaccuucgcuacagccaacgcggacacgcuuugcauuggcuaucacgcuaauaacagcaccgauacaguugacaccgugcuggagaaaaaugugacagucacccauuccgugaaccuccuggaagauaagcacaaugggaaacuuuguaagcugagaggaguugcuccccuccaucugggcaaaugcaacaucgccggguggauucugggaaauccugagugugaaucucucagcacagccuccucuuggagcuacaucguggagaccuccucuagcgacaacggcacgugcuauccgggggauuuuauugacuacgaagaacugcgggagcagcuuuccagcgucucuuccuucgaacgcuuugagaucuuccccaagaccagcucuuggccuaaucacgauuccaacaagggagugacagccgcuuguccccaugccggcgcgaaaggcuuuuauaagaaucugaucuggcucguuaaaaaggggaacagcuacccuaaacugucuaaguccuauauuaaugacaagggaaaagaagugcuuguccuguggggcauccaccaccccagcaccacagccgaucaacagucccucuaccagaacgcugacaccuacguguucguggggacgucuagauauagcaagaaauuuaagccugagauugccauccggccgaaaguccgcgaucaggagggaagaaugaauuacuauuggacacugguugaacccggcgacaagauuaccuucgaggcuacagggaaccugguggugccucgguacgccuuugcgauggaacgcaacgccggauccggcaucauuaucagcgauacccccguccaugacugcaauaccacaugucaaacgccuaaaggcgcuaucaacaccucucuccccuuccagaauauucacccgaucacaauugggaagugcccuaaguaugugaaauccaccaagcugagacuugccacaggacugcggaacguucccagcauccagucucgcggccucuuuggggcuauugccggauucaucgagggcggguggaccggaaugguggacggcugguacggcuaucaucaccagaaugaacaagggagcggauacgccgcugaucugaaauccacgcagaacgcgaucgacaagauuacaaauaaagucaacucugugaucgagaagaugaauacccaguuuaccgccguuggcaaggaguucaaccaccuugagaaaagaauugagaaucugaacaagaaaguggaugacggguuccucgauaucuggacauacaaugcugaacugcugguccuccuggagaacgaacggacccuugacuaucaugauagcaaugugaagaaccuguacgagaaaguccgcaaccagcucaagaauaacgccaaggagauuggaaauggcuguuuugaguucuaucacaaaugcgacaacacauguauggaauccgugaagaaugaaacguacgauuauccuaaauacagcgaggaagccaagcugaacagagaggagaucgacgggguuaaacuugaaucuacccggaucuaucaaauucuggcuaucuacuccacaguggccagcucucucguccuggugguuucccugggcgcgauuagcuuuuggaugugcuccaauggaucucuccagugccgcaucuguauuuga

SEQ ID NO: 198407 - RNA, 1698 nt, Artificial Sequence
  derived and/or modified CDS sequence (opt5) from hemagglutinin__InfluenzaA__ADV69074
augaaggugaaacugcucguccugcuuugcaccuucacagccacguacgcugacaccaucuguauuggcuaucacgccaacaauagcacagauaccguugacacagugcuggagaagaacgugaccgucacacauuccgugaaucuccuggaagauucucacaacgggaaacuuugccugcucaagggaaucgcgccccugcagcugggcaauuguaacguugcuggguggauucucggaaauccugagugcgaacugcuuaucagcaaagaguccuggucuuacauuguggaaaccccggaccccgagaacggcacguguuauccuggguacuuuaccgauuaugaggaacugagagagcaacucagcuccgucucuagcuucaagcgguuugaaaucuuccccaaggaguccagcuggccuaaucauacagugaccggaguuucugccuccugcagccacaacggcaaaucuuccuuuuaccgcaaucugcuuuggcugacagugaagaacggccucuaucccaaucugagcaaaucuuacaccaacgacaaggagaaagaaguccuggugcucuggggagugcaucacccuccguccaucggggaucagagaacgcuguaccacacagagaaugccuaugucagcguuguguccucucauuacagccggcgcuucacccccgaaauugugaagagaccuaagguccgggaccaggagggccgcaucaacuauuacuggacacuucuggaacccggggauaccauuaucugugaggcuaacggaaaucucauugccccuagauaugcuuuugcccugucccggggccuugggagcggaaucauuaccucuaacgcgcccaugggcgagugcaaugccaaaugucagacaccgcaaggcgcuaucaacuccagccugccuuuccagaaugugcaccccguuacgaucggggaaugcccuaaguacgugaaaucugccaagcuccgcauggucaccggacugagaaacacacccagcauucagucccggggccuguuuggggcuaucgccggauucauugagggcggguggaccggaaugguggacggcugguauggcuaccaucaccagaaugaacaagggucuggauacgcggccgaucagaaaagcacacagaacgcuaucaauggcauuaccaacaagguuaauuccgugaucgagaaaaugaacacgcaguuuacagccgucgggaaggaguucaauaagcucgaacgcagaauggagaaccugaauaaaaagguggacgauggauuucuugacaucuggaccuauaacgcugaacugcucguccugcuugagaacgaacggacccuggacuuccacgauagcaaugugaaaaaccucuacgagaagguuaaaucucaacugaagaauaacgccaaggaaauuggcaauggguguuucgaguuuuaucauaaaugcaacgacgagugcauggaauccgugaagaauggcacauacgauuaucccaaauacagcgaggaaucuaagcugaaccgcgagaaaaucgacggagucaagcucgaguccauggaaguguaucagauucuggccaucuacagcaccguugcuuccucucuuguguuccuggucgcgcucggcgccauuuguuuuuggaugugcagcaaugggucccugcaguguaagaucugcaucuga

SEQ ID NO: 198408 - RNA, 1698 nt, Artificial Sequence
  derived and/or modified CDS sequence (opt5) from hemagglutinin__InfluenzaA__ADV69075
augaaggugaaacugcucguccugcuuugcaccuucacagccacguacgcugacaccaucuguauuggcuaucacgccaacaauagcacagauaccguugacacagugcuggagaagaacgugaccgucacacauuccgugaaucuccuggaagauucucacaacgggaaacuuugccugcucaagggaaucgcgccccugcagcugggcaauuguaacguugcuggguggauucucggaaauccugagugcgaacugcuuaucagcaaagaguccuggucuuacauuguggaaaccccggaccccgagaacggcacguguuauccuggguacgucaccgauuaugaggaacugagagagcaacucagcuccgugucuagcuuuaagcgguucgaaaucuuucccaaggaguccagcuggccuaaucauacaguuaccggagugucugccuccugcagccacaacggcaaaucuuccuucuaccgcaaucugcuuuggcugacagucaagaacggccucuaucccaaucugagcaaaucuuacaccaacgacaaggagaaagaagugcuggugcucuggggaguccaucacccuccguccaucggggaucagagaacgcuguaccacacagagaaugccuauguuagcgugguguccucucauuacagccggcgcuuuacccccgaaauugucaagagaccuaaggugcgggaccaggagggccgcaucaacuauuacuggacacuucuggaacccggggauaccauuaucugugaggcuaacggaaaucucauugccccuagauaugcuuucgcccugucccggggcuuugggagcggaaucauuaccucuaacgcgcccaugggcgagugcaaugccaaaugucagacaccgcaaggcgcuaucaacuccagccuuccuuuccagaauguucaccccgugacgaucggggaaugcccuaaguacgucaaaucugccaagcugcgcauggugaccggacucagaaacacacccagcauucagucccggggccuguuuggggcuaucgccggauucauugagggcggguggaccggaaugguugacggcugguauggcuaccaucaccccaaugaacaggggucuggauacgcggccgaucaaaaauccacacagaacgcuaucaauggcauuaccaacaaggugaauagcgucaucgagaaaaugaacacgcaguuuacagccguggggaaggaguucaauaagcuggaacgcagaauggagaaccucaauaaaaaggucgacgauggauuucuggacaucuggaccuauaacgcugaacuucuggugcuccuggagaacgaacggacccuugacuuccacgauagcaauguuaaaaaccuguacgagaaggugaaaucucagcucaagaauaaggucaaagaaauuggcaacggguguuucgaguuuuaucauaagugcaaugacgagugcauggaauccgugaaaaacggcacauacgauuauccuaaguacagcgaggaaucuaaacugaaucgcgagaagaucgacggaguuaagcuggaguccauggaaguguaucaaauucucgccaucuacagcaccgucgccuccucucugguguuccuuguggcucugggcgcgauuuguuuuuggaugugcagcaacgggucccuccaguguaaaaucugcaucuga

SEQ ID NO: 198409 - RNA, 1698 nt, Artificial Sequence
  derived and/or modified CDS sequence (opt5) from hemagglutinin__InfluenzaA__ADV69077
augaaggugaaacugcucguccugcuuugcaccuucacagccacguacgcugacaccaucuguauuggcuaucacgccaacaauagcacagauaccguugacacagugcuggagaagaacgugaccgucacacauuccgugaaucuccuggaagauucucacaacgggaaacuuugccugcucaagggaaucgcgccccugcagcugggcaauuguaacguugcuggguggauucucggaaauccugagugcgaacugcuuaucagcaaagaguccuggucuuacauuguggaaaccccggaccccgagaacggcacguguuauccuggguacuuuaccgauuaugaggaacugagagagcaacucagcuccgucucuagcuucaagcgguuugaaaucuuccccaaggaguccagcuggccuaaucauacagugaccggaguuucugccuccugcagccacaacggcaaaucuuccuuuuaccgcaaucugcuuuggcugacagugaagaacggccucuaucccaaucugagcaaaucuuacaccaacgacaaggagaaagaaguccuggugcucuggggagugcaucacccuccguccaucggggaucagagaacgcuguaccacacagagaaugccuaugucagcguuguguccucucauuacagccggcgcuucacccccgaaauugugaagagaccuaagguccgggaccaggagggccgcaucaacuauuacuggacacuucuggaacccggggauaccauuaucuuugaggcuaacggaaaucucauugccccuagauaugcuuucgcccugucccggggcuuugggagcggaaucauuaccucuaacgcgcccaugggcgaguguaaugccaaaugccagacaccgcaaggcgcuaucaacuccagccuuccuuuccagaaugugcaccccguuacgaucggggaauguccuaaguacgugaaaucugccaagcugcgcauggucaccggacucagaaacacacccagcauucagucccggggccuguuuggggcuaucgccggauucauugagggcggguggaccggaaugguggacggcugguauggcuaccaucaccagaaugaacaagggucuggauacgcggccgaucagaaaagcacacagaacgcuaucaauggcauuaccaacaagguuaauuccgugaucgagaaaaugaacacgcaguuuacagccgucgggaaggaguucaauaagcuggaacgcagaauggagaaccucaauaaaaagguggacgauggauuccuggacaucuggaccuauaacgcugaacuucugguccuccuggagaacgaacggacccuugacuuucacgauagcaaugugaaaaaccuguacgagaagguuaaaucucaacucaagaauaacgccaaggaaauuggcaaugggugcuucgaguuuuaucauaaauguaacgacgagugcauggaauccgugaagaauggcacauacgauuaucccaaauacagcgaggaaucuaagcugaaccgcgagaaaaucgacggagucaagcuggaguccauggaaguguaucagauucucgccaucuacagcaccguugcuuccucucugguguuccuugucgcgcugggcgccauuugcuuuuggauguguagcaaugggucccuccagugcaagaucuguaucuga

SEQ ID NO: 198410 - RNA, 1698 nt, Artificial Sequence
  derived and/or modified CDS sequence (opt5) from hemagglutinin__InfluenzaA__ADV69078
augaaggugaaacugcucauccugcuuugcaccuucacagccacguacgcugacaccauuuguaucggcuaucacgccaacaauagcacagauaccgucgacacaguucuggagaagaacgugaccgugacacauuccgucaaucuccuggaagauucucacaacgggaaacuuugccugcucaagggaauugcgccccugcagcugggcaauuguagcguggcuggguggauccucggaaacccugagugcgaaucccugauuucuaaaaagagcugguccuacaucguugagaccccgaaucccgaaaacggcgccuguuauccuggggaguuugccgacuacgaggaacuuagagagcaacugucuagcguguccagcuucgaacgguuugagaucuuccccaaggagucuuccuggccuaaucauacggcugccggagucagcgcuucuugcucccacaacggcgaaaagagcuuuuaucgcaaucucauuuggcugaccaagaaaaacggccuuuaccccaaucugucuaaguccuaugagaacgauaaagaaaaggaggugcucauccuguggggaguucaucacccuccgaauauugaaaaccagagaacacuguaccggaccgagaacgccuacgugagcgucguguccucucacuauagcgggcgcuucacacccgagaucaccaagagaccuaaagugcggaaucaggaaggccgcauuaacuacuauuggacgcuccuggagcccggggacacaaucauuuuugaagcgaauggaaaccuuaucgccccuugguacgcuuucacccuguccagaggccucgggagcggaaucauuacaucuaaugcccccauggaugagugugacgcuaagugccagaccccgcaaggcgccaucaacuccagccugccuuuucagaauguccaucccguuaccauuggcgaauguccuaaauaugugcggucuagcaaacuucgcauggugacagggcugagaaacauccccuccauucagucucggggacucuucggcgcgaucgccggguuuaucgagggaggcuggacggggauggucgauggaugguacggcuaucaccaucagaaugagcaaggcagcggguacgcugccgaccaggaauccacccagaacgcuauuaauggaaucacaaacaaagugaauagcguuauugagaagaugaacacccaguucacagccgugggcaaagaauuuaauaagcuggagcgcagaauggaaaaccugaacaagaaagucgaugacggguuccucgauaucuggaccuacaaugccgagcugcuugugcugcucgagaacgaacggacgcuggacuuccacgacucuaauguuaagucccuuuaugagaaagucaagagccaacugaaaaacaaugcuaaggaaauuggaaacggcugcuuugaguucuaccacaaguguaauaacgagugcauggaaucugugaaaaaugggacauaugauuaccccaaguauuccgaggaaagcaaacucaaccgcgagaagaucgacggcgugaaacuggauuccaugggagucuacagaauccuggcgauuuauucuaccguggccagcucccucguucugcuugugucucugggcgcuaucagcuuuuggaugugcuccaaugggagccuccagugucggauuugcaucuga

SEQ ID NO: 198411 - RNA, 1698 nt, Artificial Sequence
  derived and/or modified CDS sequence (opt5) from hemagglutinin__InfluenzaA__ADV69079
augaaggugaaacugcucauccugcuuugcaccuucacagccacguacgcugacaccauuuguaucggcuaucacgccaacaauagcacagauaccgucgacacaguucuggagaagaacgugaccgugacacauuccgucaaucuccuggaagauucucacaacgggaaacuuugccugcucaagggaauugcgccccugcagcugggcaauuguagcguggcuggguggauccucggaaacccugagugcgaacugcuuauuuccaaaaagucuuggagcuacaucguuaagaccccgaaucccgagaacggcuccuguuauccuggguacuuugccgacuaugaagaacugagagagcaacucucuagcguguccagcuucgaacgguuugagauguuccccaaagaaucuuccuggccuaaucauaacgucaauggagugagcgccucuugcucccacaacggcaagcgcagcuuuuacagaaaucugcuuuggcugacgggcaaaaacgggcucuaucccaaucugaccaagucuuacgagaacaacaaugagaaagaaguucugauccucuggggagugcaucacccuuccaacauuggcgaucagcggacacuguaccacaccgagaaugcuuaugucagcgugauguccucucauuacagccgcagauucacaccggaaaucaacaagcggcccaaggugcgcgaccaggaggggagaauuaauuauuacuggacccuucuggaaccuggagauacgaucauuuuugaggccaacggcaaucucaucgcucccugguaugccuucgcgcugucccggggguuuggaagcggcauuaucacaucuuccgccccuauggacgagugugaugcuaaaugccagacaccccgcggcgccaucaacagcucucuuccguuccaaaauguccacccuguuaccauuggggaaugucccaaguacgugagaagcgcuaaacugcggauggugaccggacuccgcaacaucccuuccauucagucuagaggccuguuuggggccaucgcgggauucauugagggcggguggaccggaauggucgacggcugguauggcuaccaucaccagaaugaacaggggagcggauacgccgcugaucaagaguccacacagaacgccaucaauggcaucacgaacaaggugaauagcguuauugagaaaaugaacacccaguuuacagcuguggggaaggaguucaacaaacuggagcggcgcauggaaaaucucaacaagaaggucgacgauggauuccuggacaucuggaccuauaaugccgagcuucuggugcuccuggaaaacgagagaacacuugacuuucacgauucuaauguuaaaucccuguacgaaaaggugaaaagccagcucaagaacaaugccaaagagauuggcaacgggugcuucgaguuuuaucauaaguguaauaacgaaugcauggagucugucaagaauggcaccuacgacuaucccaaauacuccgaagagagcaagcugaaccgggagaaaaucgauggagugaagcuggacuccaugggcgucuaucaaauucucgcuaucuacucuacgguggcgagcucccugguucuucuggugucucucggggccaucagcuucuggaugugcuccaauggaagccugcaguguagaauuugcaucuga

SEQ ID NO: 198412 - RNA, 1698 nt, Artificial Sequence
  derived and/or modified CDS sequence (opt5) from hemagglutinin__InfluenzaA__ADV69080
augaaggugaaacugcucauccugcuuugcaccuucacagccacguacgcugacaccauuuguaucggcuaucacgccaacaauagcacagauaccgucgacacaguucuggagaagaacgugaccgugacacauuccgucaaucuccuggaagauucucacaacgggaaacuuugccugcucaagggaauugcgccccugcagcugggcaauuguagcguggcuggguggauccucggaaacccugagugcgaaucccugauuucuaaaaagagcugguccuacaucguugagaccccgaaucccgaaaacggcgccuguuauccuggggaguuugccgacuacgaggaacuuagagagcaacugucuagcguguccagcuucgaacgguuugagaucuuccccaaggagucuuccuggccuaaucauacggcugccggagucagcgcuucuugcucccacaacggcgaacgcagcuuuuauagaaaucucauuuggcugaccaugaaaaacggccuuuaccccaaucugcggaagucuuaugagaacgauaaagaaaaggaggugcucauccuguggggaguucaucacccuccgaauauugaaaaccagcgcacacuguaccacaccgagaacgccuacguguccgucgugagcucccauuauucugggagauucacacccgagaucaccaaacggccuaaggugcgcgaccaggaaggcagaauuaauuacuauuggacgcuccuggagcccggggauacaaucauuuuugaagcgaacggaaaucuuaucgccccuugguacgcuuucacccugagccggggccucggguccggaaucauuacaagcaacgcccccauggacgcuugugaugccaagugccagaccccgcaaggcgcgaucaauucuucccugccuuuucagaacguccaccccguuaccauuggcgaguguccuaaauaugugcgcagcgccaaacuuagaauggugacagggcugcggaauauccccucuauucagagccgcggacucuucggcgcuaucgccggguuuaucgaaggaggcuggacggggauggucgacggaugguacggcuaucaucaccagaacgagcaaggcuccggguacgcugccgaucaggagucuacccagaaugccauuaacggaaucacaaauaaggugaacagcguuauugaaaagaugaauacccaguucacagcugugggcaaagaguuuaacaagcuggaaagacggaucgagaaucugaacaaaaaggucgacgauggguucauugacaucuggaccuacaacgcggaacuccuggugcuucuggagaaugagcgcacgcucgacuuccacgauuccaacguuaagagccuguaugaaaaagugaagucucaacuuaaaaauaacgccaaggagaucggaaauggcugcuuugaguucuaccauaaauguaacaaugaaugcauggaguccgucaagaacgggacauaugacuaccccaaguauagcgaagagucuaaacugaauagagaaaagauugauggcgugaaacucgacuccaugggagucuaccggauccuggcuauuuauagcaccguggccuccucucugguucuccuggugagccuuggcgccaucuccuuuuggaugugcucuaacgggagccugcaguguagaauuugcaucuga

SEQ ID NO: 198413 - RNA, 1698 nt, Artificial Sequence
  derived and/or modified CDS sequence (opt5) from hemagglutinin__InfluenzaA__ADV69081
augaaggugaaacugcucguccugcuuugcaccuucacagccacguacgcugacaccaucuguauuggcuaucacgccaacaauagcacagauaccguugacacagugcuggagaagaacgugaccgucacacauuccgugaaucuccuggaagauucucacaacgggaaacuuugccugcucaagggaaucgcgccccugcagcugggcaauuguaacguugcuggguggauucucggaaauccugagugcgaacugcuuaucagcaaagaguccuggucuuacauuguggaaaccccgaaccccgagaauggcacguguuauccuggguacuuuaccgacuaugaggaacugagagagcaacucagcuccgucucuagcuucaagcgguuugaaaucuuccccaaggaguccagcuggccuaaccauacagugaccggaguuucugccuccugcagccacaauggcgagucuuccuuuuaccgcaaccugcuuuggcugacagugaaaaauggccucuaucccaagcugagcaaaucuuacaccaacgauaaggaaaaagagguccuggugcucuggggagugcaucacccuccgaauaucagagaccagcggacgcuguaccacacagaaaacgccuaugucuccguugugagcucccauuacucucgcagauucacccccgagauugugaagcggccuaagguccgcgaucaggaagggagaaucaacuauuacuggacacuucuggagcccggcgacaccauuaucuuugaggcuaaugggaaccucauugccccucgguaugcuuucgcccugagccgcggauuuggcuccgggaucauuaccagcaaugcgcccaugggagaauguaacgccaaaugccagacaccgcaaggcgcuaucaucucuucccuuccuuuccagaaugugcaccccguuacgauuggcgaguguccuaaguacgugaaaagcgccaagcugagaauggucaccgggcuccggaacacacccucuauccagagccgcggacuguuuggcgcuauugccggguucaucgaaggaggcuggaccgggaugguggauggaugguauggcuaccaucaccagaaugagcaaggcuccggguacgcggccgaccagaaaucuacacagaacgcuauuaauggaaucaccaacaagguuaauagcgugaucgaaaagaugaacacgcaguuuacagccgucggcaaagaguucaauaagcuggagagacggauggaaaaccucaauaaaaagguggaugacggguuccuggauauuuggaccuauaacgcugagcuucugguccuccuggaaaacgagcgcacccuugacuuucacgacuccaaugugaaaaaccuguacgaaaagguuaaaagccaacucaagaauaacgccaaggagaucggaaauggcugcuucgaguuuuaucauaaauguaacgaugaaugcauggagucugugaagaaugggacauacgacuaucccaaauacuccgaagagagcaagcugaacagagagaaaauugauggcgucaagcuggaaucuauggagguguaucagauccucgccauuuacuccaccguugcuagcucccugguguuccuugucgcgcugggagccaucugcuuuuggauguguucuaauggcagccuccagugcaagaucuguauuuga

SEQ ID NO: 198414 - RNA, 1698 nt, Artificial Sequence
  derived and/or modified CDS sequence (opt5) from hemagglutinin__InfluenzaA__ADV69083
augaaggugaaacugaugguccuccugugcaccuucacagccacguacgcugacaccaucuguguuggcuaucacgccaacaauagcacagauaccguggacacagugcuugagaagaacgucaccgugacacauuccguuaaucugcucgaagauucucacaacgggaaacugugccuucugaagggaauugcgccccuccagcugggcagcuguuccguggcuggguggauccugggaaauccugagugcgaacuccugauuucuaaagagagcugguccuacaucgucgaaaccccgaaccccgagaauggcacguguuauccuggguacuuuaccgacuaugaggaacuuagagagcaacugucuagcguguccagcuucaagcgguuugaaauuuuccccaaggagucuuccuggccuaaccauaauguuacaggagugucuagcuccugcagccacaacggcaaaucuuccuuuuaccgcaaucuccuguggcuuaccgucaagaacggccuguaucccaaucucagcaaauccuacacaaacaagaaagagaaggaagugcuggugcuguggggaguccaucacccuucuaauaucggggaucagagagcccucuaccacaccgagaacgccuauguuagcgugguguccagccauuacucucggcgcuucacgccggaaaucgcuaagagacccaaaguccggaaccaggagggccgcauuaauuauuacuggacacugcuugaaccuggggacaccaucauucuggaggccaacggaaaucucaucgcucccagauaugccuuugagcuguccaagggccuugggagcggaauuaucacaucuaacgcgccuaugggcgaauguaaugccaaaugccagacaccccaaggcgcuauuaacagcucccugccguuccagaaugugcacccuguuaccaucggggagugucccaaguacgugaaaucugccaagcuccggauggucaccggacugcgcaacacgccuagcauccaguccagaggccuguuuggggcuauugccggauucaucgaaggcggguggaccggaaugguggauggcugguauggcuaccaucaccagaaugagcaagggagcggauacgcggccgaccagcagucuacacagaacgcuauuaauggcaucaccaacaaaguuaauuccgugauugaaaagaugaacacacaauuuaccgccgucgggaaggaguucaauaaacucgagcggcgcauggaaaaccugaacaagaaaguggaugacggauuucuugauaucuggacguauaaugcugagcugcucguccugcuugaaaacgagagaacacuggacuuccacgauagcaaugugaagaaccucuacgaaaaaguuaagucucagcugaagaauaacgccaaagagaucggcaaugggugcuucgaguuuuaucauaaguguaacgacgaaugcauggaguccgugaaaaauggcaccuacgacuaucccaaguacagcgaagaguccaaacugaaccgggagaagauugauggagucaagcucgaaucuaugggcguguauaauauccuggccauuuacagcaccguugcuuccucucuugugcugcucgucagccugggggcgaucuccuucuggaugugcagcaacggaucucugcagugucgcauuugcaucuga

SEQ ID NO: 198415 - RNA, 1698 nt, Artificial Sequence
  derived and/or modified CDS sequence (opt5) from hemagglutinin__InfluenzaA__ADV69084
augaaggugaaacugaugguccuccugugcaccuucacagccacguacgcugacaccaucuguguuggcuaucacgccaacaauagcacagauaccguggacacagugcuugagaagaacgucaccgugacacauuccguuaaucugcucgaagauucucacaacgggaaacugugccuucugaagggaauugcgccccuccagcugggcagcuguuccguggcuggguggauccugggaaauccugagugcgaacuccugauuucuaaagagagcugguccuacaucgucgaaaccccgaaccccgagaauggcacguguuauccuggguacuuuaccgacuaugaggaacuuagagagcaacugucuagcguguccagcuucaagcgguuugaaauuuuccccaaggagucuuccuggccuaaccauaauguuacaggagugucuagcuccugcagccacaacggcaaaucuuccuuuuaccgcaaucuccuguggcuuaccgucaagaacggccuguaucccaaucucagcaaauccuacacaaacaagaaagagaaggaagugcugauccuguggggagugcaucacccuucuaauaucagagaucagcgggcccucuacuauaccgagaacgccuacgucagcguuguguccagccacuauucucgcagauucacgccggaaauugcuaagcggcccaaagugcgcaaccaggaggggagaaucaauuacuauuggacacugcuugaaccuggcgacaccauuaucuuugaggccaacgggaaucugauugcuccccgguacgccuucgagcucuccaagggauuuggcagcgggaucauuacaucugaugcgccuaugggagaauguaacgccaaaugccagacaccccaaggcgcuaucaauagcucccugccguuccagaacguccauccugugaccaucggcgagugucccaaguauguucgcucugccaaacuuagaauggugaccgggcugcggaauacgccuagcauucagucccgcggacucuuuggcgcuaucgccggguucauugaaggaggcuggaccgggauggucgacggaugguacggcuaccaccaucagaacgagcaaggcagcggguaugcggccgaucagcagucuacacagaaugcuaucaacggaauuaccaauaaggugaacuccguuaucgaaaagaugaauacacaauuuaccgccgugggcaaagaguucaacaagcuggagagacggauggaaaaucugaacaaaaagaucgacgauggguuccucgacauuuggacguacaacgcugagcugcuuguccugcucgaaaaugagcgcacacuggauuuucacgacagcaacgugaaaaaucuuuaugaaaaggucaaaucucagcugaagaacaaugccaaggagaucggaaacggcugcuucgaguuuuaccacaaauguaaugacgaaugcauggaguccgugaagaacgggaccuaugauuaccccaaauauagcgaagaguccaagcucaauagagagaaaauugacggcguuaagcuggaaucuaugggaguguacaacauccuggccauuuacagcaccgucgcuuccucucucgugcugcuuguuagccugggcgcgaucuccuucuggaugugcagcaaugggucucuccagugucggaucugcauuuga

SEQ ID NO: 198416 - RNA, 1698 nt, Artificial Sequence
  derived and/or modified CDS sequence (opt5) from hemagglutinin__InfluenzaA__ADV69085
augaaggugaaacugaugguccuccugugcaccuucacagccacguacgcugacaccaucuguguuggcuaucacgccaacaauagcacagauaccguggacacagugcuugagaagaacgucaccgugacacauuccguuaaucugcucgaagauucucacaacgggaaacugugccuucugaagggaauugcgccccuccagcugggcagcuguuccguggcuggguggauccugggaaauccugagugcgaacuccugauuucuaaagagagcugguccuacaucgucgaaaccccgaaccccgagaauggcacguguuauccuggguacuuuaccgacuaugaggaacuuagagagcaacugucuagcguguccagcuucaagcgguuugaaauuuuccccaaggagucuuccuggccuaaccauacaguuaccggagugucuagcuccugcagccacaauggcaaaucuuccuuuuaccgcaaccuccuguggcuuacaaugaagaauggccuguaucccaaccucagcaaauccuacaccaauaagaaagagaaggaaguccuggugcuguggggagugcaucacccuucuaacaucggggaucagagagcccucuaccacacggagaaugccuaugucagcguuguguccagccauuacucucggcgcuucacaccggaaaucgcuaagagacccaaagugcggaaccaggagggccgcauuaacuauuacuggacccugcuugaaccuggggacacaaucauuuuugaggccaauggaaaccugaucgcucccagauaugccuucgagcucuccaagggcuuugggagcggaauuaucaccucuaaugcgccuaugggcgaauguaacgccaaaugccagacaccccaaggcgcuauuaauagcucccugccguuccagaacguccacccugugaccaucggggagugucccaaguacguucggucuagcaaacuucgcauggugacgggacugagaaauaccccuuccauccagagccggggccucuuuggggccauugcuggauucaucgaaggcggguggacaggaauggucgauggcugguauggcuaccaucaccagaacgagcaagggucuggauacgccgcggaccagcaguccacccagaaugccauuaacggcaucacaaauaaggugaacagcguuauugaaaagaugaauacccaauuuacggcuguggggaaagaguucaacaagcuggagcgcagaauggaaaaucugaacaaaaagaucgaugacggauuccucgauaucuggacauauaacgccgagcugcuuguccugcucgaaaaugagcggacccuggacuuucacgauucuaacgugaaaaaucuuuacgaaaaggucaaaucccagcugaagaacaaugcuaaggagauuggcaacgggugcuucgaguuuuaucauaaauguaaugacgaaugcauggagagcgugaagaacggcaccuacgacuaucccaaauacuccgaagagucuaagcucaaucgcgagaaaaucgauggaguuaagcuggaaagcaugggcguguauaacauucuggccaucuacuccacagucgccucuagccucgugcugcuuguuucccugggggcuauuagcuucuggaugugcucuaauggaucccuccaguguagaaucugcaucuga

SEQ ID NO: 198417 - RNA, 1698 nt, Artificial Sequence
  derived and/or modified CDS sequence (opt5) from hemagglutinin__InfluenzaA__ADV69086
augaaggugaaacugcucguccugcuuugcaccuucacagccacguacgcugacaccaucuguauuggcuaucacgccaacaauagcacagauaccguugacacagugcuggagaagaacgugaccgucacacauuccgugaaucuccuggaagauucucacaacgggaaacuuugccugcucaagggaaucgcgccccugcagcugggcaauuguaacguugcuggguggauucucggaaauccugagugcgaacugcuuaucagcaaagaguccuggucuuacauuguggaaaccccgaaccccgagaauggcacguguuauccuggguacuuuaccgacuaugaggaacugagagagcaacucagcuccgucucuagcuucaagcgguuugaaaucuuccccaaggaguccagcuggccuaaacauacagugaccggaguuucugccuccugcagccacaacggcaagucuuccuuuuaccgcaaucugcuuuggcugacaggcaaaaacgggcucuaucccaaucugagcaagucuuacaccaacgauaaagagaaggaagugcugguccucuggggagugcaucacccuuccaauaucggcgaccagagagcccuguaccacaaggagaacgcuuaugugagcgucguuuccucucauuacagccggcgcuucacgccggaaauugugaaaagacccaaggugcgggaucaggaggggcgcaucaacuauuacuggacacuucuggaaccuggagacaccauuaucuuugaggccaauggcaaccucauugcucccagauaugccuucgcgcugucccggggguuuggaagcggcaucauuacaucuaaugccccuauggaugaguguaacaccaaaugccagacaccccaaggcgcuaucaauuccagccuuccguuccagaacguccacccugugaccaucggggaaugucccaaguacguuaaaucugccaagcugcgcauggugacgggacucagaaauaccccuagcauucagucccggggccuguuuggggcuaucgccggauucauugagggcggguggacaggaauggucgacggcugguauggcuaccaucaccagaacgaacaagggucuggauacgcggccgaucagaaaagcacccagaaugcuaucaacggcauuacaaauaaggugaacuccguuaucgagaagaugaauacccaguuuacggccguggggaaagaguucaacaagcuggaacgcagaauggagaaucucaacaaaaaggucgacgauggauuccuggacaucuggacauauaacgcugaacuucuggugcuccuggagaaugaacggacccuugacuuucacgauagcaacgucaaaaaucuguacgagaaggugaagucucaacucaaaaacaaugccaaggaaauuggcaacgggugcuucgaguuuuaucauaaauguaaugacgagugcauggaauccguuaagaacggcaccuacgauuaucccaaauacagcgaggaaucuaagcugaaucgcgagaagaucgacggagugaaacuggaguccauggaagucuaucagauucucgccaucuacagcacaguggcuuccucucugguuuuccuugugagccugggcgcgauuugcuuuuggauguguuccaacgggucucuccagugcagaaucuguaucuga

SEQ ID NO: 198418 - RNA, 1698 nt, Artificial Sequence
  derived and/or modified CDS sequence (opt5) from hemagglutinin__InfluenzaA__ADV69087
augaaggugaaacugaugguccuccugugcaccuucacagccacguacgcugacaccaucuguguuggcuaucacgccaacaauagcacagauaccguggacacagugcuugagaagaacgucaccgugacacauuccguuaaucugcucgaagauucucacaacgggaaacugugccuucugaagggaauugcgccccuccagcugggcagcuguuccguggcuggguggauccugggaaauccugagugcgaacuccugauuucuaaagagagcugguccuacaucgucgaaaccccgaaccccgagaauggcacguguuauccuggguacuuuaccgacuaugaggaacuuagagagcaacugucuagcguguccagcuucaagcgguuugaaauuuuccccaaggagucuuccuggccuaaccauacaguuaauggagugucuagcuccugcagccacaacggcgagucuuccuuuuaccgcaaucuccuguggcuuaccgucaaagauggccuguaucccaaccucagcaaguccuacacaaauaaaaaggaaaaagaggugcuggugcuguggggaguccaucacccuucuaacaucggggaccagagagcccucuaccacaccgaaaaugccuauguuagcgugguguccagccauuacucucggcgcuucacgccggagaucgcuaagagacccaagguccggaaccaggaaggccgcauuaacuauuacuggacacugcuugagccuggggauaccaucauuuuugaggccaauggaaaccugaucgcucccagauaugccuucgaacucuccaaaggcuuugggagcggaauuaucacaucuaaugcgccuaugggcgaguguaacgccaagugccagacaccccaaggcgcuauuaauagcucccugccguuccagaacgugcacccuguuaccaucggggaaugucccaaauacgugcggucuaccaaacuucgcauggucacgggacugagaaauaccccuagcauccagucccggggccucuuuggggccauugcuggauucaucgagggcggguggacaggaaugguggacggcugguauggcuaccaucaccagaacgaacaagggagcggauacgccgcggaucagcagucuacccagaaugccauuaacggcaucacaaauaagguuaacuccgugauugagaagaugaauacccaauuuacggcugucgggaaagaguucaacaagcuggaacgcagaauggagaaucugaacaagaaaaucgacgauggauuccucgacaucuggacauauaacgccgaacugcuugugcugcucgagaaugaacggacccuggauuuucacgacagcaacgucaagaaucuuuacgagaaagugaagucucagcugaaaaacaaugcuaaggagauuggcaacgggugcuucgaauuuuaucauaaguguaaugacgagugcauggaauccguuaaaaacggcaccuacgauuaucccaaguacagcgaggaguccaaacucaaucgcgaaaagaucgacggagugaaacuggagucuaugggcgucuauaacauucuggccaucuacagcacaguggccuccucucucguucugcuugugagccugggggcuauuuccuucuggaugugcagcaauggaucucuccaguguagaaucugcaucuga

SEQ ID NO: 198419 - RNA, 1698 nt, Artificial Sequence
  derived and/or modified CDS sequence (opt5) from hemagglutinin__InfluenzaA__ADV69088
augaaggugaaacugcucauccugcuuugcaccuucacagccacguacgcugacaccauuuguaucggcuaucacgccaacaauagcacagauaccgucgacacaguucuggagaagaacgugaccgugacacauuccgucaaucuccuggaagauucucacaacgggaaacuuugccugcucaagggaauugcgccccugcagcugggcaauuguagcgugaccggguggauccucggaaacccugagugcgaacugcuuauuuccaaaaagucuuggagcuacaucguugagacgccgaaucccgaaaacggcgcuuguuauccuggguacuuugccgacuaugaggagcugagagaacaacucuccucugugagcuccuucgagcgguuugaaaucuuccccaaggagagcucuuggccuaaucauaacgucaauggaguguccgccagcugcucucacaacggcaaauccagcuuuuaccgcaaucugcuuuggcugaccggcaagaacgggcucuaucccucucugacaaaauccuacgcuaaugauaaggagaaagaaguucugauucucuggggagugcaucacccuagcaacaucggcgaccagagaacccuguaccacacagagaacgccuaugucuccgugaugucuagccauuacucccggcgcuucaccccggaaauuagcaagagacccaaggugcgggaucaggaggggcgcaucaauuauuacuggacgcuucuggaaccuggagacacaauuaucuuugaggcuaacggcaaucucauugcccccugguaugcguucgcccugucuagaggguuuggauccggcaucaucaccagcucugcuccuauggaugccugugacgcuaaaugccagacaccccaaggcgccauuaacagcucccuuccguuccagaauguccacccuguuaccaucggggagugucccaaguacgugcggucuaccaaacugcgcauggugacaggacucagaaacauuccuagcauccagucccggggccuguuuggggcgauugccggauucaucgaaggcggguggacgggaauggucgauggcugguauggcuaccaucaccagaaugagcaagggagcggauacgcugccgaccaggaaucuacccagaacgcucugcacggcaucacaaauaaggugaacuccguuauugagaaaaugaauacccaguuuacagccguggggaaggaguucaacaaacucgaacgcagaauggagaaucugaacaagaaggucgaugacggauuccuugacaucuggaccuauaaugccgaacugcucgugcugcuugagaacgaacggacgcuggauuuucaugacagcaacguuaaaucucucuacgagaaggugaaaauucaacugaagaauaacgcuaaagaaaucggcaaugggugcuucgaguuuuaucacaaguguaacaaugagugcauggaauccguccgcaacggcacauacgauuaucccaaguacagcgaggaauccaaacugaauagagagaagauugacggagugaaacucgauucuaugggcgucuaucagauccuggcgaucuacagcaccguggccuccucucuuguucugcucgugagccugggggcuauuuccuucuggaugugcagcaacggaucucugcagugucggaucugcauuuga

SEQ ID NO: 198420 - RNA, 1698 nt, Artificial Sequence
  derived and/or modified CDS sequence (opt5) from hemagglutinin__InfluenzaA__ADV69089
augaaggugaaacugcucauccugcuuugcaccuucacagccacguacgcugacaccauuuguaucggcuaucacgccaacaauagcacagauaccgucgacacaguucuggagaagaacgugaccgugacacauuccgucaaucuccuggaagauucucacaacgggaaacuuugccugcucaagggaauugcgccccugcagcugggcaauuguagcguggcuggguggauccucggaaacccugagugcgaacugcuuauuuccaaaaagucuuggagcuacaucguugagaccccgaaucccgaaaacggcgccuguuauccuggguacuuugccgacuaugaggagcugagagaacaacucuccucugugagcuccuucgagcgguuugaaaucuuccccaaggagagcucuuggccuaaucauaacgucaauggaguguccgcuagcugcucucacaacggcaaauccagcuuuuaccgcaaucugcuuuggcugacgggcaagaacgggcucuaucccaaucugaccaaaucuuacgccaacaacaaggagaaagaaguucugauucucuggggagugcaucacccuuccaauaucggcgaucagagaacacuguaccacaccgagaacgcuuaugucagcgugauguccucucauuacagccggcgcuucacaccggaaauuaccaagagacccaagauccgggaccaggaggggcgcauuaauuauuacuggacgcuucuggaaccuggagauacaaucauuuaugaggccaacggcaaucucaucgcgcccugguacgccuuugcucuguccagaggguucggaagcggcaucauuaccucuuccgccccuauggacgagugugaugcuaaaugccagacaccccaaggcgccaucaacagcucucuuccguuucagaaugugcacccugucaccauuggggaaugucccaaguauguucggagcgcgaaacugcgcauggugaccggacucagaaacaucccuuccauucagucucggggccuguucggggccaucgcuggauuuaucgagggcggguggacaggaauggugaauggcugguacggcuaccgccugcauaacgaccaggggagcggauaugccgcugaucaaaaguccacgcagaaugcccucaacggcauuaccaauaaagucaacagcgugaucgaaaagaugaauacacaguucaccgccguugggaaagaguuuaacaagcuggaaagacggauggagaaccuuaauaagaaaguggacgauggauuccuggacauuuggacauacaacgcugagaugcucguccugcuugaaaaugagcgcacccuggacuuccacgauucuaacgugaagucccucuaugaaagaguuaaaauccagcugaagaauaacgcgaaagagauuggcaaugggugcuuugaguucuaccacaaguguaacaaugaaugcauggagagcgugcggaacggcacguaugacuaccccaaguauucugaagaguccaaacugaauagagaaaagaucgauggagucaaacucgacagcaugggcguguaccaaauccuggccauuuacuccacagucgcuucuagccuugugcugcucguuucccugggggccaucucuuuuuggaugugcagcaacggaucccugcagugucgcauuugcaucuga

SEQ ID NO: 198421 - RNA, 1698 nt, Artificial Sequence
  derived and/or modified CDS sequence (opt5) from hemagglutinin__InfluenzaA__ADV69090
augaaggugaaacugcucguccugcuuugcaccuucacagccacguacgcugacaccaucuguauuggcuaucacgccaacaauagcacagauaccguugacacagugcuggagaagaacgugaccgucacacauuccgugaaucuccuggaagauucucacaacgggaaacuuugccugcucaagggaaucgcgccccugcagcugggcaauuguagcguugcuggguggauucucggaaacccugagugcgaaucccugaucucuaaagagagcugguccuacauuguggaaaccccgaaucccgagaacggcacguguuauccuggguacuuugccgacuaugaggaacuuagagagcaacugucuagcgucuccagcuucgaacgguuugagaucuuccccaaggagucuuccuggccuaaucauaccgugacaggaguuagcgccucuugcucccacaacggcaagagcucuuuuuaccgcaaucuccuguggcuuacccggaaaaacggccuguaucccaaucucuccaagagcuacgcuaacaauaaagaaaaggaggugcugguccuguggggagugcaucacccuccgaaccucggggaucagagagcccuguaccacacagaaaacgcuuauguguccgucguuucuagccauuacucccgcagauucacccccgagaucgccaaacggccuaaggugcgcgaccaggaaggcagaauuaauuauuacuggacgcuucuggagcccggggauacaaucauuuuugaggcgaacggaaaucucaucgccccucgguucgcuuuugcccugagccgcggcuucgggucuggaauuaucaccuccaacgcucccauggacgaaugugaugccaagugccagacaccgcaaggcgcgauuaauagcucucuuccuuuucagaacgugcaccccgucaccaucggcgaguguccuaaauaugugagaagcaccaagcugcggaugguuacagggcuccgcaauauccccuccauucagucuagaggacuguucggcgccaucgcuggguuuauugaaggaggcuggacggggaugguggacggaugguacggcuaucaucaccagaacgagcaaggcagcggguacgccgcugaucagaaauccacccagaaugccaucaacggaauuacaaauaaggucaacagcgugaucgaaaagaugaauacccaguucacagccguuggcaaagaguucaacaaacuggagcggcgcauggaaaaucucaacaagaagguggacgauggguuucuggacaucuggaccuacaacgcugagcuucugguccuccuggaaaaugagagaacgcuugacuuccacgauucuaacgugaaaaaucuguaugaaaaggucaaaucccaacucaagaacaaugcgaaagagauuggaaacggcugcuuugaguucuaccauaaguguaaugacgaaugcauggagagcgugaagaacgggacauaugauuaccccaaauauucugaagaguccaagcugaaucgggagaaaaucgacggcguuaagcuggaaagcaugggaguguaccagauucucgccaucuauuccaccgucgcuucuagccuggugcuucugguuucccucggcgccauuucuuuuuggaugugcagcaacgggucccugcaguguagaaucugcaucuga

SEQ ID NO: 198422 - RNA, 1698 nt, Artificial Sequence
  derived and/or modified CDS sequence (opt5) from hemagglutinin__InfluenzaA__ADV69091
augaaggugaaacugcucguccugcuuugcaccuucacagccacguacgcugacaccaucuguauuggcuaucacgccaacaauagcacagauaccguugacacagugcuggagaagaacgugaccgucacacauuccgugaaucuccuggaagauucucacaacgggaaacuuugccugcucaagggaaucgcgccccugcagcugggcaauuguaacguugcuggguggauucucggaaauccugagugcgaacugcuuaucagcaaagaguccuggucuuacauuguggaaaccccgaaccccgagaauggcacguguuauccuggguacuuuaccgacuaugaggaacugagagagcaacucagcuccgucucuagcuucaagcgguuugaaaucuuccccaaggaguccagcuggccuaaccauacagugaccggaguuucugccuccugcagccacaauggcaaaucuuccuuuuaccgcaaccugcuuuggcugacaagaaagaauggccucuaucccaaccugagcaaaucuuacaccaaugauaaggagaaagaagugcugguccucuggggagugcaucacccuuccaacaucggggaccagcgggcccuguaccacaaggagaacgcuuaugugagcgucguuuccucucauuacagccgcagauucacgccggaaauugugaagcggcccaaagugcgcgaucaggagggcagaaucaauuauuacuggacacuucuggaaccuggggacaccauuaucuuugaggccaacggaaaucucauugcuccccgguaugccuucgcgcugucccgcggcuuugggagcggaaucauuacaucuaacgccccuauggaugaguguaauaccaagugccagacaccccaaggcgcuaucaacuccagccuuccguuccagaauguccacccugugaccaucggcgaaugucccaaauacguuaagucugccaaacugagaauggugacggggcuccggaacaccccuagcauucagucccgcggacuguuuggcgcuaucgccggguucauugagggaggcuggacagggauggucgacggaugguauggcuaccaucaccagaaugaacaaggcucuggguacgcggccgaucagaaguccacccagaacgcuaucaauggaauuacaaacaaagugaauagcguuaucgagaagaugaacacccaguuuacggccgugggcaaggaguucaauaaacuggaaagacggauggagaaccucaacaagaaagucgacgauggguuccuggacaucuggacauauaaugcugaacuucuggugcuccuggagaacgaacgcacccuugacuuucacgauagcaaugucaagaaccuguacgagaaagugaagaaucaacucaagaacaaugccaaagaaauuggaaacggcugcuucgaguuuuaucauaaguguaaugacgagugcauggaaucuguuaaaaacgggaccuacgauuaucccaaguacuccgaggaaagcaaacugaauagagagaagaucgacggcgugaagcuggagucuauggaagucuaucagauucucgccaucuacuccacaguggcuagcucccugguuuuccuugugucucugggagcgauuugcuuuuggauguguagcaacggcucccuccagugccggaucuguaucuga

SEQ ID NO: 198423 - RNA, 1698 nt, Artificial Sequence
  derived and/or modified CDS sequence (opt5) from hemagglutinin__InfluenzaA__ADV69092
augaaggugaaacugcucguccugcuuugcaccuucacagccacguacgcugacaccaucuguauuggcuaucacgccaacaauagcacagauaccguugacacagugcuggagaagaacgugaccgucacacauuccgugaaucuccuggaagauucucacaacgggaaacuuugccugcucaagggaaucgcgccccugcagcugggcaauuguaacguugcuggguggauucucggaaauccugagugcgaacugcuuaucagcaaagaguccuggucuuacauuguggaaaccccgaaccccgagaauggcacguguuauccuggguacuuuaccgacuaugaggaacugagagagcaacucagcuccgucucuagcuucaagcgguuugaaaucuuccccaaggaguccagcuggccuaaccauacagugaccggaguuucugccuccugcagccacaauggcaaaucuuccuuuuaccgcaaccugcuuuggcugacaggcaagaaugggcucuaucccaaccugagcaaaucuuacaccaaugauaaggagaaagaagugcugguccucuggggagugcaucacccuuccaacaucggcgaccagagagcccuguaccacaaggagaacgcuuaugugagcgucguuuccucucauuacagccggcgcuucacgccggaaauugugaagagacccaaagugcgggaucaggaggggcgcaucaauuauuacuggacacuucuggaaccuggagacaccauuaucuuugaggccaacggcaaucucauugcucccagauaugccuucgcgcugucccggggguuuggaagcggcaucauuacaucuaacgccccuauggaugaguguaauaccaagugccagacaccccaaggcgcuaucaacuccagccuuccguuccagaauguccacccugugaccaucggggaaugucccaaauacguuaagucugccaaacugcgcauggugacgggacucagaaacacccugagcauucaguccaagggccuguuuggggcuaucgccggauucauugagggcggguggacaggaauggucgacggcugguauggcuaccaucaccagaaugaacaagggucuggauacgcggccgaucagaaaagcacccagaacgcuaucaauggcauuacaaacaagguuaauuccgugaucgagaagaugaacacccaguuuacggccguggggaaagaguucaauaagcucgaacggcgcauggagaaccugaacaaaaaggucgacgauggauuccuugacaucuggacauauaaugcugaacugcucgugcugcuugagaacgaaagaacccuggacuuucacgauagcaaugucaaaaaccucuacgagaaggugaagucucaacugaaaaauaacgccaaggaaauuggcaaugggugcuucgaguuuuaucauaaauguaacgacgagugcauggaauccguuaagaauggcaccuacgauuauccuaaauacagcgaggaaucuaagcugaaccgggagaagaucgacggagugaaacucgaguccauggaagucuaucagauucuggccaucuacagcacaguggcuuccucucuuguuuuccuggugagccucggcgcgauuugcuuuuggauguguuccaaugggucucugcagugccgcaucuguaucuga

SEQ ID NO: 198424 - RNA, 1698 nt, Artificial Sequence
  derived and/or modified CDS sequence (opt5) from hemagglutinin__InfluenzaA__ADV69093
augaaggugaaacugaugguccuccugugcaccuucacagccacguacgcugacaccaucuguguuggcuaucacgccaacaauagcacagauaccguggacacagugcuugagaagaacgucaccgugacacauuccguuaaucugcucgaagauucucacaacgggaaacugugccuucugaagggaauugcgccccuccagcugggcagcuguuccguggcuggguggauccugggaaauccugagugcgaacuccugauuucuaaagagagcugguccuacaucgucgaaaccccgaaccccgagaauggcacguguuauccuggguacgugaccgacuaugaggaacuuagagagcaacugucuagcguuuccagcuuuaagcgguucgaaauuuuucccaaggagucuuccuggccuaaccauacagugaccggagucucuagcuccugcagccacaauggcaaaucuuccuucuaccgcaaccuccuguggcuuacagugaagaauggccuguaucccaaccucagcaaauccuacaccaauaagaaagagaaggaagugcugguccuguggggaguucaucacccuucuaacaucggggaucagagagcccucuaccacacggagaaugccuaugugagcguggucuccagccauuacucucggcgcuuuacaccggaaaucgcuaagagacccaaagugcggaaccaggagggccgcauuaacuauuacuggacccugcuugaaccuggggacacaaucauuuucgaggccaauggaaaccugaucgcucccagauaugccuuugagcucuccaagggcuucgggagcggaauuaucaccucuaaugcgccuaugggcgaauguaacgccaaaugccagacaccccaaggcgcuauuaauagcucccugccguuucagaacguucacccugugaccaucggggagugucccaaguacgucaaaucugccaaacuucggauggugacgggacugcgcaauaccccuagcauccaguccagaggccucuucggggcuauugccggauuuaucgaaggcggguggacaggaaugguugauggcugguauggcuaccaucaccagaacgagcaagggagcggauacgcggccgaccagcagucuacccagaaugcuauuaacggcaucacaaauaaggugaacuccgucauugaaaagaugaauacccaauucacggccguggggaaggaguuuaacaaacuggagcggcgcauggaaaaucugaacaagagagucgaugacggauuccucgauaucuggacauauaacgcugagcugcuugugcugcucgaaaaugagcggacccuggacuuccacgauagcaacguuaaaaaucuuuacgaaaaggugaaaucucagcugaagaacaaugccaaggagaucggcaacgggugcuuugaguucuaucauaaauguaaugacgaaugcauggaguccgucaagaacggcaccuacgacuaucccaaauacagcgaagaguccaagcucaaucgcgagaaaauugauggagugaagcuggaaucuaugggcguuuauaacauccuggccauuuacagcacaguggcuuccucucucguccugcuugugagccugggggcgaucuccuuuuggaugugcagcaauggaucucuccaguguagaauuugcaucuga

SEQ ID NO: 198425 - RNA, 1698 nt, Artificial Sequence
  derived and/or modified CDS sequence (opt5) from hemagglutinin__InfluenzaA__ADV69094
augaaggugaaacugaugguccuccugugcaccuucacagccacguacgcugacaccaucuguguuggcuaucacgccaacaauagcacagauaccguggacacagugcuugagaagaacgucaccgugacacauuccguuaaucugcucgaagauucucacaacgggaaacugugccuucugaagggaauugcgccccuccagcugggcagcuguuccguggcuggguggauccugggaaauccugagugcgaacuccugauuucuaaagagagcugguccuacaucgucgaaaccccgaaccccgagaauggcacguguuauccuggguacuuuaccgacuaugaggaacuuagagagcaacugucuagcguguccagcuucaagcgguuugaaauuuuccccaaggagucuuccuggccuaaccauacaguuaccggagugucuagcuccugcagccacaauggcaaaucuuccuuuuaccgcaaccuccuguggcuuacagucaagaauggccuguaucccaaccucagcaaauccuacaccaauaagaaagagaaggaagugcuggugcuguggggaguccaucacccuucuaacaucggggaucagagagcccucuaccacacggagaaugccuauguuagcgugguguccagccauuacucucggcgcuucacaccggaaaucgcuaagagacccaaaguccggaaccaggagggccgcauuaacuauuacuggacccugcuugaaccuggggacacaaucauuuuugaggccaauggaaaccugaucgcucccagauaugccuucgagcucuccaagggcuuugggagcggaauuaucaccucuaaugcgccuaugggcgaauguaacgccaaaugccagacaccccaaggcgcuauuaauagcucccugccguuccagaacgugcacccuguuaccaucggggagugucccaaguacgugaaaucugccaaacuucggauggucacgggacugcgcaauaccccuagcauccaguccagaggccucuuuggggcuauugccggauucaucgaaggcggguggacaggaauggugcauggcugguauggcuaccaccaccagaacgagcaagggagcggauacgcggccgaacagcagucuacccaguaugcuauuaauggcaucacaaacaaaguuaauuccgugauugagaagaugaacacccaauuuacggccgucgggaaggaguucaauaaacuggaacggcgcauggagaaccugaauaagagaguggaugacggauuccucgauaucuggacauacaacgcugaacugcuuguccugcucgagaacgaacggacccuggacuuucaugauagcaaugugaaaaaccuuuaugagaagguuaaaucucagcugaagaauaacgccaaggagaucggcaaugggugcuucgaauuuuaccacaaauguaacgacgagugcauggaauccgugaagaauggcaccuaugauuaccccaaauauagcgaggaguccaagcucaaccgcgaaaagauugacggagucaagcuggagucuaugggcguguacaauauccuggccauuuacagcacaguugcuuccucucucgugcugcuugucagccugggggcgaucuccuucuggaugugcagcaacggaucucuccaguguagaauuugcaucuga

SEQ ID NO: 198426 - RNA, 1698 nt, Artificial Sequence
  derived and/or modified CDS sequence (opt5) from hemagglutinin__InfluenzaA__ADV69095
augaaggugaaacugaugguccuccugugcaccuucacagccacguacgcugacaccaucuguguuggcuaucacgccaacaauagcacagauaccguggacacagugcuugagaagaacgucaccgugacacauuccguuaaucugcucgaagauucucacaacgggaaacugugccuucugaagggaauugcgccccuccagcugggcagcuguuccguggcuggguggauccugggaaauccugagugcgaacuccugauuucuaaagagagcugguccuacaucgucgaaccgcccaacccugagaauggcaccuguuaucccggguacuuuacggacuaugaggaacuuagagagcaacugucuagcguguccagcuucaagcgguuugaaauuuucccuaaggagucuuccuggcccaaccauaccguuaauggagugucuagcuccugcagccacaacggcgagucuuccuuuuaccgcaaucuccuguggcuuacagucaaagauggccuguauccuaaccucagcaaguccuacaccaauaaaaaggaaaaagaggugcuggugcuguggggaguccaucacccgucuaacaucggggaccagagagcccucuaccacacagaaaaugccuauguuagcgugguguccagccauuacucucggcgcuucacccccgagaucgcuaagagaccuaagguccggaaccaggaaggccgcauuaacuauuacuggacgcugcuugagcccggggauacaaucauuuuugaggccaauggaaaccugaucgcuccuagauaugccuucgaacucuccaaaggcuuugggagcggaauuaucaccucuaaugcgcccaugggcgaguguaacgccaagugccagacaccgcaaggcgcuauuaauagcucccugccuuuccagaacgugcaccccguuaccaucggggaauguccuaaauacgugcggucuaccaaacuucgcauggucacaggacugagaaauacgcccagcauccagucccggggccucuuuggggccauugcuggauucaucgagggcggguggaccggaaugguggacggcugguauggcuaccaucaccagaacgaacaagggagcggauacgccgcggaucagcagucuacacagaaugccauuaacggcaucaccaauaagguuaacuccgugauugagaagaugaauacacaauuuaccgcugucgggaaagaguucaacaagcuggaacgcagaauggagaaucugaacaagaaaaucgacgauggauuccucgacaucuggacguauaacgccgaacugcuugugcugcucgagaaugaacggacacuggauuuucacgacagcaacgucaagaaucuuuacgagaaagugaagucucagcugaaaaacaaugcuaaggagauuggcaacgggugcuucgaauuuuaucauaaguguaaugacgagugcauggaauccguuaaaaacggcaccuacgauuaucccaaguacagcgaggaguccaaacucaaucgcgaaaagaucgacggagugaaacuggagucuaugggcgucuauaacauucuggccaucuacagcaccguggccuccucucucguucugcuugugagccugggggcuauuuccuucuggaugugcagcaauggaucucuccaguguagaaucugcaucuga

SEQ ID NO: 198427 - RNA, 1698 nt, Artificial Sequence
  derived and/or modified CDS sequence (opt5) from hemagglutinin__InfluenzaA__ADV69096
augaaggugaaacugaugguccuccugugcaccuucacagccacguacgcugacaccaucuguguuggcuaucacgccaacaauagcacagauaccguggacacagugcuugagaagaacgucaccgugacacauuccguuaaucugcucgaagauucucacaacgggaaacugugccuucugaagggaauugcgccccuccagcugggcagcuguuccguggcuggguggauccugggaaauccugagugcgaacuccugauuucuaaagagagcugguccuacaucgucgaaaccccgaaccccgagaauggcacguguuauccuggguacgugaccgacuaugaggaacuuagagagcaacugucuagcguuuccagcuuuaagcgguucgaaauuuuucccaaggagucuuccuggccuaaccauacagugaccggagucucuagcuccugcagccacaauggcaaaucuuccuucuaccgcaaccuccuguggcuuacagugaagaauggccuguaucccaaccucagcaaauccuacaccaauaagaaagagaaggaagugcugguccuguggggaguucaucacccuucuaacaucggggaucagagagcccucuaccacacggagaaugccuaugugagcguggucuccagccauuacucucggcgcuuuacaccggaaaucgcuaagagacccaaagugcggaaccaggagggccgcauuaacuauuacuggacccugcuugaaccuggggacacaaucauuuucgaggccaauggaaaccugaucgcucccagauaugccuuugagcucuccaagggcuucgggagcggaauuaucaccucuaaugcgccuaugggcgaauguaacgccaaaugccagacccccaagggcgcuauuaauagcucccugccguuucaaaacguucacccugugacaaucggggagugucccaaauacgucaagucugccaaacuucggauggugacgggacugcgcaauaccccuagcauccaguccagaggccucuucggggcuauugccggauuuaucgaaggcggguggacaggaaugguugauggcugguauggcuaccaucaccagaacgagcaggggagcggauacgcggccgaccaacagucuacccagaaugcuauuaacggcaucacaaauaaggugaacuccgucauugaaaagaugaauacccaguucacggccguggggaaagaguuuaacaagcuggagcggcgcauggaaaaucugaacaaaaaggucgaugacggauuccucgauaucuggacauauaacgcugagcugcuugugcugcucgaaaaugagagaacccuggacuuccacgaaagcaacguuaaaaaucuuuacgagaaggugaagucucaacugaaaaacaaugccaaggagaucggcaacgggugcuuugaguucuaucauaaauguaaugaugaaugcauggaauccgucaagaacggcaccuacgacuaucccaaauacagcgaggaguccaagcucaaucgggaaaagauugacggagugaaacuggagucuaugggcguuuauaacauccuggccauuuacagcacaguggcuuccucucucguccugcuugugagccugggggcgaucuccuuuuggaugugcagcaauggaucucuccagugucgcauuugcaucuga

SEQ ID NO: 198428 - RNA, 1698 nt, Artificial Sequence
  derived and/or modified CDS sequence (opt5) from hemagglutinin__InfluenzaA__ADV69097
augaaggugaaacugcucauccugcuuugcaccuucacagccacguacgcugacaccauuuguaucggcuaucacgccaacaauagcacagauaccgucgacacaguucuggagaagaacgugaccgugacacauuccgucaaucuccuggaagauucucacaacgggaaacuuugccugcucaagggaauugcgccccugcagcugggcaauuguagcguggcuggguggauccucggaaacccugagugcgaacugcuuauuuccaaaaagucuuggagcuacaucguugagaccccgaaucccggcaacggggccuguuauccuggauacuuugccgacuaugaggaacugagagagcaacucuccucugugagcuccuucgaacgguuugagaucuuccccaaggaaagcucuugguccaaucauaacgucaauggcgugagcgcuucuugcucccacaacggcaaaagcucuuuuuaccgcaaucugcuuuggcugacggggaagaacggacucuauccuacccugacaaaauccuacgccaaugauaaggagaaagagguucugauucucuggggcgugcaucaccccagcaacaucggggaccagagaacccuguaccacacagaaaacgcuuaugucuccgugaugucuagccauuacucccggcgcuucaccccugagauuagcaagagaccgaaggugcgggaucaggaaggacgcaucaauuauuacuggacgcuucuggagcccggcgacacaauuaucuuugaagccaacgggaaucucauugcgccuugguaugccuucgcucugucuagaggauuuggcuccggcaucaucaccagcaacgcccccauggaugagugugacgcuaaaugccagacaccucaaggggccauuaauucuagccuucccuuccagaacauccacccggucaccauuggagaguguccuaaguacguucgguccgcgaaacugcgcauggugaccggccucagaaauacacccucuauccagagccgggggcuguuuggagccauugcuggcuucaucgaagggggauggacgggcaugguggauggcugguauggguaccaucaccagaacgagcaaggauccggcuacgccgcugaccaggaaagcacccagaaugccaucaacgagauuacaaauaaggaaaacucugucaucgagaaaaugaauacccaguuuacauccguggggaaggaguucaacaaacuggaacgcagaauggagaaucucaacaagaagguugaugacggauuccuggacauuuggaccuauaacgccgaacuucuggugcuccuggagaaugaacggacgcuugauuuucacgacagcaacgucaaaucucuguacgagaaggugaaaauccaacucaagaauaacgcuaaagagauuggcaaugggugcuucgaauuuuaucauaaguguaacaaugagugcauggaauccguucgcaacggcacauacgauuauccuaaguacagcgaggaguccaaacugaauagagaaaagaucgacggagugaaacuggauucuaugggcgucuaucagauccucgcgauuuacagcaccguggccuccucucugguccuucuggugagccucggggcuaucuccuucuggaugugcagcaacggaucucugcagugucggauuugcaucuga

SEQ ID NO: 198429 - RNA, 1698 nt, Artificial Sequence
  derived and/or modified CDS sequence (opt5) from hemagglutinin__InfluenzaA__ADV69098
augaaggugaaacugaucguccuccugugcaccuucacagccacguacgcugacaccauuuguguuggcuaucacgccaacaauagcacagauaccguggacacagugcuugagaagaacgucaccgugacacauuccguuaaucugcucgaagauucucacaacgggaaacugugccuucugaagggaaucgcgccccuccagcugggcagcuguuccguggcuggguggauucugggaaauccugagugcgaacuccugaucucuaaagagagcugguccuacauugucgaaaccccgaaccccgagaauggcacguguuauccuggguacuuuaccgacuaugaggaacuuagagagcaacugucuagcguguccagcuucaagcgguuugaaaucuuccccaaggagucuuccuggccuaaccauacaguuaccggagugucuagcuccugcagccacaauggcaacucuuccuuuuaccgcaaucuccuguggcuuacagucaaaaacggccuguaucccaaucucagcaaguccuacaccaacaaaaaggagaaagaagugcuggugcuguggggaguccaucacccuucuaauaucgaggaucagagagcccucuaccacacggaaaacgccuauguuagcgugguguccagccauuacucucggcgcuucaacccggagauugcuaagagacccaagguccggaaucaggaagggcgcaucaacuauuacuggacacugcuugagccuggcgacaccauuaucuuugaggccaaugggaaccugauugcucccagauaugccuucgaacucuccaaaggauuuggcagcgggaucauuacaucuaaugcgccuaugggagaguguaacgccaagugccagacaccccaaggcgcuaucaauagcaaccugccguuccagaaugugcacccuguuaccaucggcgaaugucccaaauacgugcgguccgccaaacuucgcauggucaccgggcugagaaacacgccuucuauucagagccggggacucuuuggcgcuaucgccggguucauugagggaggcuggaccgggaugguggauggaugguauggcuaccaucaccacaaugaacagggcuccggguacgcggccaaccaaaagagcacacccaaugcuaucaacggaauuaccaauaagguuaacucugugaucgagaaaaugaacacacaguuuaccgccgucggcaaggaguucaauaagcuggaacgcagaauggagaaccugaauaaaaagguggacgauggguuccucgacaucuggacguauaacgcugaacugcuuguccugcucgagaaugaacggacacuggauuuucaugacuccaacgugaaaaaucuuuacgagaagguucgcagccagcugaaaaacaaugccaaggagauuggaaacggcugcuucgaauuuuaucacaaguguaaugaugagugcauggaaucugugaaaaacgggaccuacgacuaucccaaguacuccgaggagagcaaacucaauagagaaaagaucgacggcgucaaacuggaguccaugggaguguauaacauucuggccaucuacucuaccguugcuagcucccucgugcugcuugucucucugggcgcgauuagcuucuggaugugcuccaaugggagccuccagugucggaucugcaucuga

SEQ ID NO: 198430 - RNA, 1698 nt, Artificial Sequence
  derived and/or modified CDS sequence (opt5) from hemagglutinin__InfluenzaA__ADV69099
augaaggugaaacugaucguccuccugugcaccuucacagccacguacgcugacaccauuuguguuggcuaucacgccaacaauagcacagauaccguggacacagugcuugagaagaacgucaccgugacacauuccguuaaucugcucgaagauucucacaacgggaaacugugccuucugaagggaaucgcgccccuccagcugggcagcuguuccguggcuggguggauucugggaaauccugagugcgaacuccugaucucuaaagagagcugguccuacauugucgaaaccccgaaccccgagaauggcacguguuauccuggguacuuuaccgacuaugaggaacuuagagagcaacugucuagcguguccagcuucaagcgguuugaaaucuuccccaaggagucuuccuggccuaaccauacaguuaccggagugucuagcuccugcagccacaauggcaacucuuccuuuuaccgcaaucuccuguggcuuacagucaaaaacggccuguaucccaaucucagcaaguccuacaccaacaaaaaggagaaagaagugcuggugcuguggggaguccaucacccuucuaauaucgaggaucagagagcccucuaccacacggaaaacgccuauguuagcgugguguccagccauuacucucggcgcuucaacccggagauugcuaagagacccaagguccggaaucaggaagggcgcaucaacuauuacuggacacugcuugagccuggcgacaccauuaucuuugaggccaaugggaaccugauugcucccagauaugccuucgaacucuccaaaggauuuggcagcgggaucauuacaucuaaugcgccuaugggagaguguaacgccaagugccagacaccccaaggcgcuaucaauagcaaccugccguuccagaaugugcacccuguuaccaucggcgaaugucccaaauacgugcgguccgccaaacuucgcauggucaccgggcugagaaacacgccuucuauucagagccggggacucuuuggcgcuaucgccggguucauugagggaggcuggaccgggauggugaauggaugguauggcuaccaucaccacaacgaacagggcuccggguacgcggccaaucaacagagcccucccaacgcuaucaauggaauuacaaacaaaguuaacucugugaucgagaagaugaauacccaguuuacagccgucggcaaagaguucaacaagcuggaacgcagaauggagaaucugaacaagaaaguggaugacggguuccucgauaucuggaccuauaaugcugaacugcuuguccugcucgagaacgaacggacgcuggacuuucaugauuccaaugugaagaaccuuuacgagaaaguucgcagccagcugaagaauaacgccaaagagauuggaaauggcugcuucgaauuuuaucacaaguguaacgacgagugcauggaaucugugaagaaugggacauacgauuaucccaaauacuccgaggagagcaagcucaacagagaaaagaucgacggcgucaagcuggaguccaugggaguguauaauauucuggccaucuacucuaccguugcuagcucccucgugcugcuugucucucugggcgcgauuagcuucuggaugugcuccaacgggagccuccaaugucggaucugcaucuga

SEQ ID NO: 198431 - RNA, 1698 nt, Artificial Sequence
  derived and/or modified CDS sequence (opt5) from hemagglutinin__InfluenzaA__ADV69100
augaaggugaaacugcucauccugcuuugcaccuucacagccacguacgcugacaccauuuguaucggcuaucacgccaacaauagcacagauaccgucgacacaguucuggagaagaacgugaccgugacacauuccgucaaucuccuggaagauucucacaacgggaaacuuugccugcucaagggaauugcgccccugcagcugggcaauuguagcguggcuggguggauccucggaaacccugagugcgaaucccugauuucuaaaaagagcugguccuacaucguugagaccccgaagcccgaaaauggcacguguuauccuggggaguuugccgacuacgaggaacuuagagagcaacugucuagcguguccagcuucgaacgguuugagaucuuccccaaagagucuuccuggccuaaccauaccgccgcuggagucagcgccucuugcucccacaauggcgaacgcagcuuuuauaagaaccucauuuggcugacagugaaaaauggccuuuaccccaaccugucuaaguccuauaaaaaugauaaggagaaggaaguucucauccuguggggagugcaucacccuccgaacauugagaaucagagaacccuguaccacacagaaaacaccuacgucagcgugguguccucucauuauagcgggcgguucacgcccgagaucacaaaacgcccuaaggucagagaccaggagggccggauuaacuacuauuggacccuccuggaacccggggauacaaucauuuuugaggcuaauggaaaccuuaucgccccuugguacgcguucacccugucccgcggccucgggagcggaaucguuaccucuaaugcccccauggacaaaugugaugcuaagugccagacaccgcacggcgccauuaacuccagccugccuuuucaaaaugugcaucccgugacgaucggcgaauguccuaaauaugucagaucugcuaaacuucggauggugaccgggcugcgcaacauucccagcauccaguccagaggacucuucggcgccauugcgggguuuaucgagggaggcuggacagggaugguugacggaugguacggcuaucaccaccagaaugaacagggcucuggguacgccgcugaucaagagagcacccagaacgccaucaauggaauuacaaacaaggucaauuccgugaucgagaagaugaacacccaguucacggcugugggcaaggaauuuaauaaacuggagcggcgcauggaaaaccugaauaagaaaguugacgauggguuccucgacauuuggacauacaacgccgagcugcuugugcugcucgaaaacgagagaacccuggacuuccaugauagcaaugucaagucucuuuaugagaaagugaagucccagcugaagaacaaugccaaagaaaucggaaacggcugcuuugaguucuaccacaaguguaauaacgaaugcauggagagcgucaaaaaugggaccuaugacuaccccaaguauucugaggaauccaaacucaaccgggagaagauugauggcgugaagcuggacagcaugggaguuuaccgcauccuggcuaucuauuccacaguggcgucuagccucguccugcuugugucccugggcgccauuucuuuuuggaugugcagcaaugggucccuccaauguagaaucugcauuuga

SEQ ID NO: 198432 - RNA, 1698 nt, Artificial Sequence
  derived and/or modified CDS sequence (opt5) from hemagglutinin__InfluenzaA__ADV69101
augaaggugaaacugcucauccuguucugcaccuuuacagccacguacgcugacaccauuuguaucggcuaucacgccaacaauagcacagauaccgucgacacaguucuugagaagaacgugaccgugacacauuccgucaaucugcucgaagauucucacaacgggaaacugugccuucugaagggaauugcgccccuccagcugggcaauuguagcguggcuggguggauccugggaaacccugagugcgaaucccucauuucuaaaaagagcugguccuacaucguugagaccccgaaucccgaaaacggcgccuguuauccuggggaguucgccgacuacgaggaacugagagagcaacuuucuagcguguccagcuuugaacgguucgagaucuuucccaaggagucuuccuggccuaaucauacggcuaccggagucagcgccucuugcucccacaacggcgaacgcagcuucuauagaaaucugauuuggcucacagugaaaaacggccuguaccccaaucuuucuaaguccuaugagaacgauaaagaaaaggagguucugauccucuggggagugcaucacccuccgaauauugaaaaccagcggacccuguaccacacagagaacgcuuacgucagcgugguguccucucauuauagcgggcgcuuuacccccgagaucacgaaaagaccuaagguccgggaccaggaaggccgcauuaauuacuauuggacacugcucgagcccggggauaccaucauuuucgaagccaacggaaaucugaucgcgccuugguacgccuuuacacuuuccagaggccuggggagcggaaucauuaccucuaacgcucccauggacgagugugauuccaagugccagaccccgcaaggcgccaucaauagcucucucccuuuccagaacguucaccccgugacaauuggcgaauguccuaaauaugugcggagcgcuaagcugcgcauggucacggggcuuagaaauauccccuccauucagucucggggacuguuuggcgccaucgcgggguucaucgagggaggcuggaccgggaugguggacggaugguacggcuaucaucaccagaacgagcaaggcagcggguacgccgcugaucaggaauccacacagaaugccauuaacggaaucaccaauaaaguuaacagcgugauugagaagaugaauccccaguuuacagcugucggcaaagaguucaacaagcucgaacgcagaauggaaaaucugaacaaaaagguggacgauggguuccuggacaucuggaccuacaacgccgagcuccugguucuucuggagaaugaacggacgcucgacuuucacgauucuaacgugaagucccuguaugagaaagucaagagccaacuuaaaaauaacgccaaggaaauuggaaauggcugcuucgaguuuuaccauaaauguaacaaugagugcauggaaucugugaagaacgggacauaugacuacccuaaguauuccgaggaaagcaaacugaaucgcgagaagaucgauggcgucaaacucgacuccaugggaguguacagaauccuggcuauuuauucuaccguugcgagcucccuggugcuccuggucucucuuggcgccaucagcuucuggaugugcuccaacgggagccugcagugucggauuugcaucuga

SEQ ID NO: 198433 - RNA, 1698 nt, Artificial Sequence
  derived and/or modified CDS sequence (opt5) from hemagglutinin__InfluenzaA__ADV69102
augaaggugaaacugcucauccuguucugcaccuuuacagccacguacgcugacaccauuuguaucggcuaucacgccaacaauagcacagauaccgucgacacaguucuugagaagaacgugaccgugacacauuccgucaaucugcucgaagauucucacaacgggaaacugugccuucugaagggaauugcgccccuccagcugggcaauuguagcguggcuggguggauccugggaaacccugagugcgaaucccucauuucuaaaaagagcugguccuacaucguugagaccccgaaucccgaaaacggcgccuguuauccuggggaguucgccgacuacgaggaacugagagagcaacuuucuagcguguccagcuuugaacgguucgagaucuuucccaaggagucuuccuggccuaaucauacggcuaccggagucagcgccucuugcucccacaacggcgaacgcagcuucuauagaaaucugauuuggcucacagugaaaaacggccuguaccccaaucuuucuaaguccuaugagaacgauaaagaaaaggagguucugauccucuggggagugcaucacccuccgaauauugaaaaccagcggacccuguaccacacagagaacgcuuacgucagcgugguguccucucauuauagcgggcgcuuuacccccgagaucacgaaaagaccuaagguccgggaccaggaaggccgcauuaauuacuauuggacacugcucgagcccggggauaccaucauuuucgaagccaacggaaaucugaucgcgccuugguacgccuuuacacuuuccaccggccuggggagcggaaucauuaccucuaacgcucccauggacgagugugauuccaagugccagacaccgcaaggcgccaucaauagcucucucccuuuccagaacguucaccccgugacgauuggcgaauguccuaaauaugugagaagcgcuaagcugcggauggucaccgggcuucgcaauauccccuccauucagucuagaggacuguuuggcgccaucgcgggguucaucgagggaggcuggacagggaugguggacggaugguacggcuaucaucaccagaacgagcaaggcagcggguacgccgcugaucaggaauccacccagaaugccauuaacggaaucacaaauaaaguuaacagcgugauugagaagaugaauacccaguuuacggcugucggcaaagaguucaacaagcucgaacggcgcauggaaaaucugaacaaaaagguggacgauggguuccuggacaucuggacauacaacgccgagcuccugguucuucuggagaaugaaagaacccucgacuuucacgauucuaacgugaagucccuguaugagaaagucaagagccaacuuaaaaauaacgccaaggaaauuggaaauggcugcuucgaguuuuaccauaaauguaacaaugagugcauggaaucugugaagaacgggaccuaugacuaccccaaguauuccgaggaaagcaaacugaaucgggagaagaucgauggcgucaaacucgacuccaugggaguguaccgcauccuggcuauuuauucuacaguugcgagcucccuggugcuccuggucucucuuggcgccaucagcuucuggaugugcuccaacgggagccugcaguguagaauuugcaucuga

SEQ ID NO: 198434 - RNA, 1698 nt, Artificial Sequence
  derived and/or modified CDS sequence (opt5) from hemagglutinin__InfluenzaA__ADV69103
augaaggugaaacugaugguccuccugugcaccuucacagccacguacgcugacaccaucuguguuggcuaucacgccaacaauagcacagauaccguggacacagugcuugagaagaacgucaccgugacacauuccguuaaucugcucgaagauucucacaacgggaaacugugccuucugaagggaauugcgccccuccagcugggcagcuguuccguggcuggguggauccugggaaauccugagugcgaacuccugauuucuaaagagagcugguccuacaucgucgaaaccccgaaccccgagaauggcacguguuauccuggguacuuuaccgacuaugaggaacuuagagagcaacugucuagcguguccagcuucaagcgguuugaaauuuuccccaaggagucuuccuggccuaaccauaauguuacaggagugucuagcuccugcagccacaacggcaaaucuuccuuuuaccgcaaucuccuguggcuuaccgucaagaacggccuguaucccaaucucagcaaauccuacacaaacaagaaagagaaggaagugcuggugcuguggggaguccaucacccuucuaauaucggggaucagagagcccucuaccacaccgagaacgccuauguuagcgugguguccagccauuacucucggcgcuucacgccggaaaucgcuaagagacccaaaguccggaaccaggagggccgcauuaauuauuacuggacacugcuugaaccuggggacaccaucauuuuugaggccaacggaaaucugaucgcucccagauaugccuucgagcucuccaagggcuuugggagcggaauuaucacaucuaacgcgccuauuggcgaauguaaugccaaaugccagacaccccaaggcgcuaucaacagcucccugccguuccagaaugugaacccuguuaccaucggggagugucccaaguacgugaaaucugccaaacuucggauggucaccggacugcgcaauacgccuagcauucaguccagaggccucuuuggggcuaucgccggauucauugaaggcggguggaccggaaugguggauggcugguauggcuaccaccaucagaacgagcaagggagcggauacgcggccgaccagcagucuacacagaaugcuaucaacggcauuaccaauaagguuaacuccgugaucgaaaagaugaauacacaauuuaccgccgucgggaaggaguucaacaaacuggagcggcgcauggaaaaccugaauaagaaaguggaugacggauuccucgauaucuggacguauaacgcugagcugcuuguccugcucgaaaaugagagaacacuggacuuucacgauagcaacgugaagaaucuuuacgaaaaaguuaagucucagcugaagaacaaugccaaagagauuggcaacgggugcuucgaguuuuaucacaaguguaaugacgaaugcauggaguccgugaaaaacggcaccuacgacuaucccaaguacagcgaagaguccaaacucaaucgggagaagaucgauggagucaagcuggaaucuaugggcguguauaacauucuggccaucuacagcaccguugcuuccucucucgugcugcuugucagccugggggcgauuuccuucuggaugugcagcaauggaucucuccagugucgcaucugcaucuga

SEQ ID NO: 198435 - RNA, 1698 nt, Artificial Sequence
  derived and/or modified CDS sequence (opt5) from hemagglutinin__InfluenzaA__ADV69104
augaaggugaaacugcucauccuguucugcaccuuuacagccacguacgcugacaccauuuguaucggcuaucacgccaacaauagcacagauaccgucgacacaguucuugagaagaacgugaccgugacacauuccgucaaucugcucgaagauucucacaacgggaaacugugccuucugaagggaauugcgccccuccagcugggcaauuguagcguggcuggguggauccugggaaacccugagugcgaaucccucauuucuaaaaagagcugguccuacaucguugagaccccgaaucccgaaaacggcgccuguuauccuggggaguucgccgacuacgaggaacugagagagcaacuuucuagcguguccagcuuugaacgguucgagaucuuucccaaggagucuuccuggccuaaucauacggcuaccggagucagcgccucuugcucccacaacggcgaacgcagcuucuauagaaaucugauuuggcucacagugaaaaacggccuguaccccaaucuuucuaaguccuaugagaacgauaaagaaaaggagguucugauccucuggggagugcaucacccuccgaauauugaaaaccagcggacccuguaccacacagagaacgcuuacgucagcgugguguccucucauuauagcgggcgcuuuacccccgagaucacgaaaagaccuaagguccgggaccaggaaggccgcauuaauuacuauuggacacugcucgagcccggggauaccaucauuuucgaagccaacggaaaucugaucgcgccuugguacgccuuuacacuuuccagaggccuggggagcggaaucauuaccucuaacgcucccauggacgagugugauuccaagugccagaccccgcaaggcgccaucaauagcucucucccuuuccagaacguucaccccgugacaauuggcgaauguccuaaauaugugcggagcgcuaagcugcgcauggucacggggcuuagaaauauccccuccauucagucucggggacuguuuggcgccaucgcgggguucaucgagggaggcuggaccgggaugguggacggaugguacggcuaucaucaccagaacgagcaaggcagcggguacgccgcugaucaggaauccacacagaaugccauuaacggaaucaccaauaaaguuaacagcgugauugagaagaugaauacacaguuuaccgcugucggcaaagaguucaacaagcucgaacgcagaauggaaaaucugaacaaaaagguggacgauggguuccuggacaucuggacguacaacgccgagcuccugguucuucuggagaaugaacggacacucgacuuucacgauucuaacgugaagucccuguaugagaaagucaagagccaacuuaaaaauaacgccaaggaaauuggaaauggcugcuucgaguuuuaccauaaauguaacaaugagugcauggaaucugugaagaacgggaccuaugacuaccccaaguauuccgaggaaagcaaacugaaucgcgagaagaucgauggcgucaaacucgacuccaugggaguguacagaauccuggcuauuuauucuaccguugcgagcucccuggugcuccuggucucucuuggcgccaucagcuucuggaugugcuccaacgggagccugcagugucggauuugcaucuga

SEQ ID NO: 198436 - RNA, 1698 nt, Artificial Sequence
  derived and/or modified CDS sequence (opt5) from hemagglutinin__InfluenzaA__ADV69105
augaaggugaaacugcucauccugcuuugcaccuucacagccacguacgcugacaccauuuguaucggcuaucacgccaacaauagcacagauaccgucgacacaguucuggaaaagaacgugaccgugacacauuccgucaaucuccuggaagauucucacaacgggaaacuuugccugcucaagggaauugcgccccugcagcugggcaauuguagcguggcuggguggauccucggaaacccugagugcgaaucccugauuucuaaaaagagcugguccuacaucguugagaccccgaaucccgaaaacggcgccuguuauccuggggaguuugccgacuacgaggaacuuagagagcaacugucuagcguguccagcuucgaacgguuugagaucuuccccaaggagucuuccuggccuaaucauacggcugccggagucagcgcuucuugcucccacaacggcgaacgcagcuuuuauagaaaucucauuuggcugaccgugaaaaacggccuuuaccccaaucugucuaaguccuauaaaaacgauaaggagaaagaaguucucaucauuuggggagugcaucacccuccgaauaucgagaaccagcggacacuguaccacaccgaaaacgccuacgucagcgugguguccucucauuauagcgggcgcuucacacccgagauuaccaagagaccuaagguccgggaccaggagggccgcaucaauuacuauuggacgcugcucgaacccggggauacaauuaucuuugaggcgaacggaaaucugaucgccccuugguacgcuuucacccuuuccagaggccuggggagcggaauuaucacaucuaacgcccccauggacgaaugugaugcuaaaugccagaccccgcaaggcgccauuaauuccagccucccuuuucagaacguucaccccgugaccaucggcgaguguccuaaguaugugcggucugcgaaacugcgcauggucacagggcuuagaaauauucccagcauccagucccggggacuguucggcgccaucgcuggguuuauugaaggaggcuggacggggaugguggacggaugguacggcuaucaucaccagaacgagcaaggcucuggguacgccgcugaucaggagagcacccagaaugccaucaacggaauuacaaauaagguuaacuccgugaucgagaaaaugaauacccaguucacagccgucggcaaggaauuuaacaaacucgaacgcagaauggagaaucugaacaagaagguggacgauggguuccuggacauuuggaccuacaacgcugaacuccugguucuucuggagaaugagcggacgcucgacuuccacgauagcaacgugaaaucucuguaugaaaaggucaaaucccaacuuaagaauaacgcgaaagagaucggaaauggcugcuuugaguucuaccauaaguguaacaaugaaugcauggagagcgugaagaacgggacauaugacuaccccaaauauucugaagaguccaagcugaaucgcgagaaaaucgauggcgucaagcucgacagcaugggaguguaccggauucuggccaucuauuccaccguugcuucuagccuggugcuccuggucucccuuggcgccauuucuuuuuggaugugcagcaacgggucccugcaguguagaaucugcauuuga

SEQ ID NO: 198437 - RNA, 1698 nt, Artificial Sequence
  derived and/or modified CDS sequence (opt5) from hemagglutinin__InfluenzaA__ADV69106
augaaggugaaacugcucauccugcuuugcaccuucacagccacguacgcugacaccauuuguaucggcuaucacgccaacaauagcacagauaccgucgacacaguucuggagaagaacgugaccgugacacauuccgucaaucuccuggaagauucucacaacgggaaacuuugccugcucaagggaauugcgccccugcagcugggcaauuguagcguggcuggguggauccucggaaacccugagugcgaaucccugauuucuaaaaagagcugguccuacaucguugagaccccgaaucccggcaacggggccuguuauccuggauacuuugccgacuaugaagaacuuagagagcaacugucuagcguguccagcuucgaacgguuugagauguuccccaaggaaucuuccuggccuaaucauaacgucaauggcgugagcgcuucuugcucccacaacggcaaaagcucuuuuuaccgcaaucuccuguggcuuacgagaaagaacgggcuguaucccaaucucaccaaauccuacgccaacaacaaugauaaggagguucugauccuguggggagugcaucacccuagcaacauuggcgaccagcggacacucuaccacaccgagaaugcuuaugucuccgugaugucuagccauuacucccgcagauucacaccggaaaucaccaaacggcccaaggugcgcgaucaggaggggagaauuaacuauuacuggacgcugcuugaaccuggagacacaaucauuuuugaggccaauggcaaccugaucgcgcccugguaugccuucgcucucagccggucuuuuggguccggaauuaucaccagcucugccccuauggaugaaugugacgcuaagugccagacaccccaaggcgccaucaauagcucccugccguuccagaacguccacccuguuaccauuggcgagugucccaaauacgugcgcucugcgaaacuuaaaauggugaccgggcugagaaauaucccuagcauucagucccggggacucuuuggcgccaucgcuggguucauugagggaggcuggacagggauggucgauggaugguauggcuaccaucaccagaacgaacaaggcagcggguacgccgcugaccaggagucuacgcagaaugccaucaacggaaucaccaauaaggugaacuccguuauugaaaagaugaauacacaguuuaccgccgugggcaaggaguucaacaaacuggaaaagcgcauggagaaccugaauaagaaagucgaugacggguuccucgacaucuggacauauaacgcugagcugcuugugcugcucgaaaaugagagaacccuggauuuucacgacagcaacguuaagucucuuuacgaaaaagugaagauucaacugaaaaauaacgcgaaggagaucggaaauggcugcuucgaauuuuaucauaaguguaacaaugagugcauggaguccguccggaacgggacguacgauuaucccaaauacagcgaagaguccaagcucaaucgcgagaaaauugacggcgugaagcuggauucuaugggagucuaucagauccuggccaucuacagcacaguggcuuccucucucguucugcuugugagccugggcgccauuuccuucuggaugugcagcaacgggucucuccaguguagaaucugcauuuga

SEQ ID NO: 198438 - RNA, 1698 nt, Artificial Sequence
  derived and/or modified CDS sequence (opt5) from hemagglutinin__InfluenzaA__ADV69107
augaaggugaaacugcucauccugcuuugcaccuucacagccacguacgcugacaccauuuguaucggcuaucacgccaacaauagcacagauaccgucgacacaguucuggagaagaacgugaccgugacacauuccgucaaucuccuggaagauucucacaacgggaaacuuugccugcucaagggaauugcgccccugcagcugggcaauuguagcguggcuggguggauccucggaaacccugagugcgaaucccugauuucuaaagagagcugguccuacaucguugaaacccccaauucugacaacggcgccuguuaucccgggcaauuuacggauuacgaggagcuuagagaacagcugagcuccgugagcucuuucgagcgguuugaaaucuucccuaaggaguccagcuggcccaaucauaccgucacaggagugucugccuccugcagccacaacggcgagcgcucuuuuuauagaaaucucauuuggcugaccguuaagaacggccuuuacccuaaucuguccaaaagcuaugaaaacgacaaggagaaagaagugcucauccuguggggaguccaucacccgccuaauauuggggaucagcggacacuguaccacaccgagaacgcuuacaucuccguggugucuagccauuauuccggccgcuucacgccggaaauuacaaagagacccaaaguccgggaccaggaggggcgcaucaacuacuauuggacccuccuggagccuggagauacaauuaucuuugaagccaauggcaaccuuaucgcucccugguacgccuucgcgcugagcagagggcucggaucuggcauuaucaccuccaaugccccuauggacaagugugaugcuaagugccaaacaccccagggcgccauuaacagcucucugccguuucagaauguucacccugugaccaucggggagugucccaaauaugugcggagcacgaaacuucgcauggucaccggacugagaaacauuccuuccauccagucucggggccucuucggggcuaucgccggauuuauugaaggcggguggacaggaaugguggacggcugguacggcuaucaucaccaaaaugagcaggggagcggauacgcggccgaucaggaauccacccagaacgcuaucaauggcauuacaaacaaaguuaauagcgugaucgagaagaugaacacccaauucacggccgucgggaaagaguuuaauaagcuggaacgcagaauggagaaccugaauaaaaagguggacgacggauuccucgauauuuggacauacaacgcugaacugcuuguucugcucgagaacgaacggacccuggacuuccacgauucuaaugugaagucccuuuaugagaaagucaagagccagcugaaaaacaaugccaaggagaucggcaacgggugcuuugaguucuaccauaaauguaauaacgaaugcauggaaucugugcgcaauggcaccuaugacuaccccaaguauuccgaggagagcaagcucaacagagaaaagaucgauggagucaagcuggacuccaugggcguguaccggauucuggccaucuauucuacagcugcgagcucccucguucugcuugugucucugggggccauuagcuuuuggaugugcuccaauggaagccuccaguguagaaucugcauuuga

SEQ ID NO: 198439 - RNA, 1698 nt, Artificial Sequence
  derived and/or modified CDS sequence (opt5) from hemagglutinin__InfluenzaA__ADV69108
augaaggugaaacugcucguccugcuuugcaccuucacagccacguacgcugacaccaucuguguuggcuaucacgccaacaauagcacagauaccguggacacagugcuggagaagaacgucaccgugacacauuccguuaaucuccuggaagauucucacaacgggaaacuuugccugcucaagggaauugcgccccugcagcugggcagcuguuccguggcuggguggauccucggaaauccugagugcgaacugcuuauuucuaaagagagcugguccuacaucgucgaaaccccgaaccccgagaauggcacguguuauccuggguacuuuaccgacuaugaggaacugagagagcaacucucuagcguguccagcuucaagcgguuugaaauuuuccccaaggagucuuccuggccuaaccauacaguuaccggagugucuagcuccugcagccacaauggcaaaucuuccuuuuaccgcaaccugcuuuggcugacaaugaagaauggccucuaucccaaccugagcaaauccuacaccaauaagaaagagaaggaaguccuggugcucuggggagugcaucacccuucuaacaucggggaucagagagcccuguaccacacggagaaugccuaugucagcguuguguccagccauuacucucggcgcuucacaccggaaaucgcuaagagacccaaagugcggaaccaggagggccgcauuaacuauuacuggacccuucuggaaccugaggacacaaucauuuuugaggccaaugggaaccucaucgcucccagauaugccuucgaacuguccaagggauuuggcagcgggauuaucaccucuaaugcgccuaugggagaguguaacgccaaaugccagacaccccaaggcgcuauuaauagcucccuuccguuccagaacguccacccugugaccaucggcgaaugucccaaguacguucggucuagcaaacugcgcauggugacggggcucagaaauaccccuuccauccagagccggggacuguuuggcgccauugcuggguucaucgagggaggcuggacagggauggucgauggaugguauggcuaccaucaccagaacgaacaaggcucuggguacgccgcggaccagcaguccacccagaaugccauuaacggaaucacaaauaaggugaacagcguuauugagaaaaugaauacccaauuuacggcugugggcaaggaguucaacaagcuggaacgcagaauggagaaucucaacaaaaagaucgaugacggguuccuggauaucuggacauauaacgccgaacuucugguccuccuggagaaugaacggacccuugacuuucacgauucuaacgugaaaaaucuguacgagaaggucaaaucccagcucaagaacaaugcuaaggagauuggaaacggcugcuucgaauuuuaucauaaauguaaugacgagugcauggaaagcgugaagaacgggaccuacgacuaucccaaauacuccgaggagucuaagcugaaucgcgagaaaaucgauggcguuaagcuggaaagcaugggaguguauaacauucucgccaucuacuccacagucgccucuagccuggugcuucugguuucccucggcgcuauuagcuucuggaugugcucuaaugggucccugcaguguagaaucugcaucuga

SEQ ID NO: 198440 - RNA, 1698 nt, Artificial Sequence
  derived and/or modified CDS sequence (opt5) from hemagglutinin__InfluenzaA__ADV69109
augaaggugaaacugcucauccugcuuugcaccuucaaggccacauacgcugacacgauuuguaucggcuaucacgccaacaauagcaccgagacagucgauaccguucuggaaaagaacgugacagugacccauuccgucaaucuccuggaggacucucacaacgggaaacuuugccugcucaaaggaauugcgccccugcagcugggcaauuguagcguggcuggguggauccucggaaacccugaaugcgagucccugauuucuaaaaagagcugguccuacaucguugaaacaccgaaucccgagaacggcgccuguuauccuggggaguuugccgauuacgaggaacuuagagaacaacugucuagcguguccagcuucgagcgguuugagaucuuccccaaggaaucuuccuggccuaaucauaccgcuacgggagucagcgccucuugcucccacaacggcgagcgcagcuuuuauagaaaucucauuuggcugaccgugaagaacggccuuuaccccaaucugucuaaauccuaugaaaacgacaagaaaaaggagguucucauccuguggggagugcaucacccuccgaauauugaaaaccagcggacacuguaccacaccgagaacgcuuacgucagcgugguguccucucauuauagcgggcgcuucacacccgagaucaccaagagaccuaaaguccgggaucaggaaggccgcauuaauuacuauuggacgcuccuggagcccggggacacaaucauuuuugaagccaacggaaaucuuaucgcgccuugguacgccuucacccuguccagaggccucgggagcggaaucauuacaucuaacgcucccauggaugagugugacgccaagugccagaccccgaaaggcgcuaucaauuccagccugccuuuucaaaacguucaccccgugaccauuggcgaauguccuaaguaugugcggucugccaaacuucgcauggucacagggcugagaaauauccccagcauucagucccggggacucuucggcgcgaucgccggguuuaucgagggaggcuggacggggaugguggauggaugguacggcuaucaucaccagaacgagcagggcucuggguacgcugccgaccaagaaagcacccagaaugcuauuaacggaaucacaaauaagguuaacuccgugauugagaaaaugaauacccaguucacagccgucggcaaggaauuuaacaagcuggagcgcagaauggaaaaucugaacaaaaagguggaugacggguuccucgauaucuggaccuacaacgccgagcugcuuguucugcucgagaaugaacggacgcuggacuuccacgacagcaacgugaaaucucuuuaugagaaggucaaaucccagcugaagaauaacgcuaaggaaauuggaaauggcugcuuugaguucuaccauaaauguaacaaugagugcauggaaagcgugaagaacgggacauaugauuaccccaaauauucugaggaauccaagcucaaucgcgagaaaaucgacggcgucaagcuggauagcaugggaguguacagaauccuggcgauuuauuccaccguugccucuagccucgugcugcuugucucccugggcgcuaucucuuuuuggaugugcagcaacgggucccuccaaugucggauuugcaucuga

SEQ ID NO: 198441 - RNA, 1701 nt, Artificial Sequence
  derived and/or modified CDS sequence (opt5) from hemagglutinin__InfluenzaA__ADV76579
augaagaccaucauugcccugagcuacauccucugccugguguucgcucagaaacuucccggcaacgacgauuccacagccacgcugugucucgggcaccaugcggucccuaauggaaccauuguuaagacaaucaccaacgaccaaauugaggugacaaaugcuaccgaacuggugcagucuagcuccacaggcgagaucugcgauucuccgcaccagauccuugacggggaaaacuguacccugauugaugcccuccugggagacccccagugcgauggcuuucaaaauaaaaagugggaccuguucgucgagagaagcaaagccuauuccaacuguuacccuuaugaugugcccgacuacgcuucucuccggagccugguugccuccagcgggacgcuugaauuuaauaacgagucuuucaauuggaccggagugacacagaacggcaccuccagcgcuugcauccgcagaucuaauaacuccuuuuucagccggcugaauuggcucacacaucugcgcuuuaaguauccugcccuuaacgucaccaugcccaauaacgagcaguucgauaagcuguacauuuggggcgugcaccauccugggacggacaacgaucagaucuuucucuaugcgcaagccucuggaagaauuacaguuuccaccaaacggagccagcagacagugaucccgaauauuggcucccgccccagaguccggaacaucccuucucgcaucagcauuuacuggaccaucgugaagcccggggacauucugcugaucaauuccaccggaaaccucauugcuccuagaggcuacuucaaaauccggagcgggaagucuuccaucaugcgcagcgacgcccccauuggaaaauguaauucugaaugcaucacaccgaacggcagcauuccuaaugauaagcccuuucagaacgugaauagaaucacguauggcgcuuguccucgguacgucaagcaaaacacccugaaacuugccacagggaugcgcaauguucccgagaagcagaccagaggaauuuucggcgcgaucgccggguuuaucgaaaacggaugggagggcaugguggacgggugguauggauuccggcaccaaaauuccgagggcagaggccaggcugccgaucugaaaucuacacaggcugccauugaccagaucaacgggaagcucaaucgccugauuggaaaaaccaacgaaaaguuccaccagaucgagaaagaauuuagcgagguggaaggccggauucaagaucuugagaaguacgucgaggacacgaagaucgaucugugguccuauaacgccgaacuccugguggcucuggagaaucagcauacaauugaccucaccgauagcgaaaugaacaaacuguucgagaagaccaaaaagcagcuuagagaaaaugcggaggacauggggaacggaugcuuuaaaaucuaccacaagugugauaaugccugcaucggcucuauucgcaacgggacauaugaccaugacguuuaccgggaugaggcucugaauaacagauuccagaucaagggcguggaacucaaauccggauacaaggacuggauucuguggaucagcuuugccauuucuugcuuccuucugugugucgcccuccugggcuuuaucaugugggcuugccaaaaagggaauauccgcuguaacauuugcaucuga

SEQ ID NO: 198442 - RNA, 1701 nt, Artificial Sequence; identical to SEQ ID NO: 195660
  derived and/or modified CDS sequence (opt5) from hemagglutinin__InfluenzaA__ADV76587

SEQ ID NO: 198443 - RNA, 1701 nt, Artificial Sequence; identical to SEQ ID NO: 195660
  derived and/or modified CDS sequence (opt5) from hemagglutinin__InfluenzaA__ADV76598

SEQ ID NO: 198444 - RNA, 1701 nt, Artificial Sequence; identical to SEQ ID NO: 195483
  derived and/or modified CDS sequence (opt5) from hemagglutinin__InfluenzaA__ADV76609

SEQ ID NO: 198445 - RNA, 1701 nt, Artificial Sequence; identical to SEQ ID NO: 195660
  derived and/or modified CDS sequence (opt5) from hemagglutinin__InfluenzaA__ADV76620

SEQ ID NO: 198446 - RNA, 1701 nt, Artificial Sequence
  derived and/or modified CDS sequence (opt5) from hemagglutinin__InfluenzaA__ADV76631
augaagaccaucauugcccugagcuacauccucugccugguguucgcucagaaacuucccggcaacgacaauuccacagccacgcugugucucgggcaccaugcggucccuaacggaaccauuguuaagacaaucaccaaugaucaaauugaggugacaaacgcuaccgaacuggugcagucuagcuccacaggcgagaucugcgacucuccgcaccagauccuugaugggaaaaauuguacccugauugacgcccuccugggagauccccagugcgacggcuuucaaaacaagaaaugggaucuguucgucgaaagaagcaaggccuauuccaauuguuacccuuaugacgugcccgauuacgcuucucuccggagccugguugccuccagcgggacgcuugaguuuaacaaugaaucuuucaacuggaccggagugacacagaauggcaccuccagcgcuugcauccgcagaucuaagaacuccuuuuucagccggcugaauuggcucacacaucugaacuuuaaauauccugcccuuaaugucaccaugcccaacaacgagcaguucgacaagcuguacauuuggggcgugcaccauccugggacggauaaagaccagaucuuucucuaugcgcaagccucuggacgcauuacaguuuccaccaagagaagccagcagacagugaucccgaauauuggcucccggccccgcgucagaaacaucccuucucggaucagcauuuacuggaccauggugaaacccggggauauccugcugauuaauuccaccggaaaccucaucgcuccucgcggcuacuucaagauuagaagcgggaagucuuccaucaugcggagcgacacacccaucggaaaauguaauucugagugcauuacgccgaacggcagcaucccuaaugacaagcccuuucagaacgugaaucgcauuaccuauggcgccuguccuagauacgucaaacaaaacacacugaaacuugcuaccgggaugcggaauguucccgaaaaacagacacgcggaaucuucggcgccauugcgggguuuaucgagaacggaugggaaggcaugguggaugggugguauggauucagacaccaaaauuccgagggccggggccaggccgcugaccugaagucuacccaggccgcuaucgaucagauuaacgggaaacucaauagacugaucggaaaggccaacgagaaguuccaccagauugaaaaagaguuuagcgaaguggagggccgcauccaagaccuugaaaaguacgucgaggauacgaaaauugaccugugguccuauaacgccgagcuccugguggcucuggaaaaucagcauacaaucgaucucaccgacagcgagaugaacaagcuguucgaaaagaccaagaagcagcuucgggagaaugcggaagauauggggaacggaugcuuuaaaauuuaccacaagugugacaaugccugcaucggcucuaucagaaacgggacauaugaucaugacguuuaccgcgacgaggcucugaauaaccgguuccagauuaaaggcguggagcucaaguccggauacaaagauuggauccuguggauuagcuuugccaucucuugcuuccuucugugugucgcccuccugggcuuuauuaugugggcuugccaaaaggggaauaucagauguaacaucugcauuuga

SEQ ID NO: 198447 - RNA, 1701 nt, Artificial Sequence; identical to SEQ ID NO: 197664
  derived and/or modified CDS sequence (opt5) from hemagglutinin__InfluenzaA__ADV76642

SEQ ID NO: 198448 - RNA, 1701 nt, Artificial Sequence; identical to SEQ ID NO: 197668
  derived and/or modified CDS sequence (opt5) from hemagglutinin__InfluenzaA__ADV76664

SEQ ID NO: 198449 - RNA, 1701 nt, Artificial Sequence
  derived and/or modified CDS sequence (opt5) from hemagglutinin__InfluenzaA__ADV76673
augaagaccaucauugcccugagcuacaucuucugccucgcucugggccaggaccuucccgggaacgauaauuccacagccacgcugugucucggacaccaugcggugccuaacggcacccuggucaaaacaauuaccgacgaucaaaucgagguuacaaaugcuaccgaacuugugcagucuagcuccacagggaagauuugcaacaauccgcacagaauccuggacggaaucgauuguacccucauugacgcccugcugggcgauccccauugcgacguguuucagaacgagacgugggaucucuucgucgaacggucuaaagccuuuagcaauuguuauccuuacgacgugcccgauuaugcuucccugcgcucucuuguugccagcuccgggacccuggaguucaucacagaaggauuuaccuggacaggcgugacccagaacggcgggagcaaugcuugcaagagaggaccuggcucuggguucuuuucccggcucaacuggcugacgaaaagcggaucuacauaccccguccuuaaugugaccaugccuaacaaugacaacuucgauaagcuguauauuuggggcguucaccauccguccacaaaucaagagcagaccagccucuacgugcaggccucugggcgcgucaccguguccacaagacggagccagcaaacgaucauucccaacaucgagucccgcccuugggugagaggacugucuagccggauuuccaucuauuggaccaucgucaaccccggcgacguucuggugauuaauagcaacggcaaucucaucgcgccucgcggguacuuuaagaugagaacaggaaaaucuuccauuaugcggagcgacgcccccaucgauaccuguauuucugaaugcaucacaccgaacggcagcaucccuaaugacaagcccuuccagaacgugaauaaaauuaccuacggggcuuguccuaaguaugucaaacagaacacgcugaaacuugccacaggaaugcgcaaugugcccgagaagcagaccagaggccuguuuggggcuaaagccggauucaucgaaaacggcugggagggcaugauugaugggugguacggauuucggcaccaaaauuccgagggcaccgggcaggcggccgaccucaagucuacacaggcugccaucgaucaaauuaacggaaaacugaaucgcguuaucgaaaagaccaacgagaaauuccaccagaucgaaaaggaguucagcgaaguggagggccggauucaggaccuugagaaauaugucgaagauacaaagaucgaccugugguccuacaaugcugagcuccugguggcccuggaaaaccagcauacgauugaucucaccgacagcgagaugaacaagcuguuugaaaagacaagaagacaacuucgcgagaaugccgaggauauggggaacggcugcuucaagaucuaucacaaaugugacaaugcuugcauugaaucuauccggaacggaaccuacgaccaugauguuuauagagacgaggcgcugaauaaccgcuuucagauuaagggcguggaacucaaauccggguacaaggauuggauccuguggaucagcuucgccauuucuugcuuucuucugugugucgugcuccugggauucaucaugugggcuugccagcggggcaauauuagauguaacaucugcauuuga

SEQ ID NO: 198450 - RNA, 1701 nt, Artificial Sequence
  derived and/or modified CDS sequence (opt5) from hemagglutinin__InfluenzaA__ADV76682
augaagaccaucauugcccugagcuacauccucugccugguguucgcucagaaacuucccggcaacgacaauuccacagccacgcugugucucgggcaccaugcggucccuaacggaaccauuguuaagacaaucaccaaugaucaaauugaggugacaaacgcuaccgaacuggugcagucuagcuccacaggcgagaucugcgacucuccgcaccagauccuugauggggaaaauuguacccugauugacgcccuccugggagauccccagugcgacggcuuucaaaacaaaaagugggaucuguucgucgagagaagcaaagccuauuccaauuguuacccuuaugacgugcccgauuacgcuucucuccggagccugguugccuccagcgggacgcuugaauuuaacaaugagucuuucaacuggaccggagugacacagaauggcaccuccagcgcuugcauccgcagaucuaacaauuccuuuuucagccggcugaacuggcucacacaucugaauuuuaaguauccugcccuuaacgucaccaugcccaacaaugagcaguucgacaagcuguacauuuggggcgugcaccauccugggacggauaaagaccagaucuuucucuaugcgcaagccucuggacgcauuacaguuuccaccaagagaagccagcaggcugugaucccgaacauuggcucccggccccgcgucagaaauaucccuucucggaucagcauuuacuggacaaucgugaaacccggggauauucugcugaucaacuccaccggaaaucucauugccccucgcggcuacuucaagaucagaagcggggaaucuuccaucaugcggagcgacgcucccauuggaaaauguaacucugagugcaucaccccgaauggcagcauuccuaacgacaagcccuuucagaaugugaaccgcaucacauauggcgccuguccuagauacgucaagcaaaauacgcugaaacuugcgaccgggaugcggaacguucccgaaaagcagacacgcggaauuuucggcgccaucgcuggguuuaucgagaauggaugggagggcaugguggaugggugguauggauucagacaccagaacuccgaaggccggggccaagccgcugaccugaaaucuacccaggccgccauugaucagaucaaugggaagcucaacagacugauuggaaaaacaaacgagaaguuccaccagaucgaaaaagaguuuagcgaaguggagggccgcauucaagaccuugagaaguacgucgaagauaccaagaucgaccugugguccuauaaugcugagcuccugguggcgcuggaaaaccagcauacgauugaucucacagacagcgagaugaauaaacuguucgaaaagaccaaaaagcagcuucgggagaacgccgaggauauggggaauggaugcuuuaaaaucuaccacaagugugacaacgcuugcaucggcucuauuagaaaugggaccuaugaucaugacguuuaccgcgacgaagcccugaacaaucgguuccagaucaagggcguggagcucaaauccggauacaaggauuggauucuguggaucagcuuugccauuucuugcuuccuucugugugucgcucuccugggcuuuaucaugugggccugccaaaaagggaacaucagauguaauauuugcaucuga

SEQ ID NO: 198451 - RNA, 1701 nt, Artificial Sequence; identical to SEQ ID NO: 195685
  derived and/or modified CDS sequence (opt5) from hemagglutinin__InfluenzaA__ADV76694

SEQ ID NO: 198452 - RNA, 1701 nt, Artificial Sequence; identical to SEQ ID NO: 195483
  derived and/or modified CDS sequence (opt5) from hemagglutinin__InfluenzaA__ADV76705

SEQ ID NO: 198453 - RNA, 1701 nt, Artificial Sequence; identical to SEQ ID NO: 195685
  derived and/or modified CDS sequence (opt5) from hemagglutinin__InfluenzaA__ADV76716

SEQ ID NO: 198454 - RNA, 1701 nt, Artificial Sequence
  derived and/or modified CDS sequence (opt5) from hemagglutinin__InfluenzaA__ADV76727
augaagaccaucauugcccugagcuacauccucugccugguguucgcucagaaacuucccggcaacgacaauuccacagccacgcugugucucgggcaccaugcggucccuaacggaaccauuguuaagacaaucaccaaugaucaaauugaggugacaaacgcuaccgaacuggugcagucuagcuccacaggcgagaucugcgacucuccgcaccagauccuugaugggaaaaauuguacccugauugacgcccuccugggagauccccagugcgacggcuuucaaaacaagaaaugggaucuguucgucgaaagaagcaaggccuauuccaauuguuacccuuaugacgugcccgauuacgcuucucuccggagccugguugccuccagcgggacgcuugaguuuaacaaugaaucuuucaacuggaccggagugacacagaauggcaaguccagcgcuugcauccgcagaucuaaaaacuccuuuuucagccggcugaauuggcucacccaucugaacuuuaaguauccugcccuuaaugucacaaugcccaacaacgagcaguucgacaaacuguacauuuggggcgugcaccauccugggaccgauaaggaccagaucuuucucuaugcgcaagccucuggacgcauuacgguuuccacaaaaagaagccagcagaccgugaucccgaauauuggcucccggccccgcgucagaaacaucccuucucggaucagcauuuacuggacaaucgugaagcccggggauauucugcugaucaauuccaccggaaaccucauugcuccucgcggcuacuucaagaucagaagcgggaaaucuuccaucaugcggagcgacgcccccauuggaaaguguaauucugagugcaucaccccgaacggcagcauuccuaaugacaaacccuuucagaacgugaaucgcaucacauauggcgcuuguccuagauacgucaagcaaaacacgcugaaacuugccaccgggaugcggaauguucccgaaaagcagacacgcggaauuuucggcgcgaucgccggguuuaucgagaacggaugggaaggcaugguggaugggugguauggauucagacaccaaaauuccgagggccggggccaggcugccgaccugaaaucuacccaggcugccauugaucagaucaacgggaagcucaauagacugauuggaaagacaaacgagaaauuccaccagaucgaaaaggaguuuagcgaaguggagggccgcauucaagaccuugaaaaauacgucgaggauaccaagaucgaccugugguccuauaacgccgagcuccugguggcucuggaaaaucagcauacgauugaucucacagacagcgagaugaacaaacuguucgaaaagaccaagaaacagcuucgggagaaugcggaagauauggggaacggaugcuuuaagaucuaccacaaaugugacaaugccugcaucggcucuauuagaaacgggaccuaugaucaugacguuuaccgcgacgaggcucugaauaaccgguuccagaucaagggcguggagcucaaauccggauacaaggauuggauucuguggaucagcuuugccauuucuugcuuccuucugugugucgcccuccugggcuuuaucaugugggcuugccaaaaggggaauaucagauguaacauuugcaucuga

SEQ ID NO: 198455 - RNA, 1701 nt, Artificial Sequence
  derived and/or modified CDS sequence (opt5) from hemagglutinin__InfluenzaA__ADV91009
augaaggccauccuggcugugcuccuguacaccuucgccacagcgaacgcugacacgcuuugcauuggcuaucacgccaauaacagcaccgauacagucgacaccguucuggagaaaaaugugacagugacccauuccgucaaccuccuggaagauaagcacaaugggaaacuuuguaagcugagaggaaucgcuccccuccaucugggcaaaugcaacauugccggguggauccugggaaauccugagugugaaucucucagcacagccuccucuuggagcuacauuguggagaccccguccucugacaacggcacgugcuaucccggggauuuuaucgacuacgaagaacugcgggagcagcuuagcuccguuagcucuuucgaacgcuuugagaucuucccuaagaccuccagcuggcccaaucacgauucuaacaagggagugacagcugccuguccucaugcgggcgccaaauccuuuuauaagaaucugauuuggcucgucaaaaagggcaacagcuaccccaaacugucuaaguccuauaucaaugacaaggggaaaaaggugcuuguucuguggggcauucaccacccuagcaccuccgcugaucaacagucucucuaccagaacgccgacgcuuacguguucgucggaacaagcagauauuccaaaaaguuuaaaccggaaaucgccauucggcccaaggugcgcgaucaggaggggagaaugaauuacuauuggacccugguggagccuggagacaaaaucacguucgaagcgacaggcaaccuggucguuccccgguacgccuuugcuauggagcgcaacgccgggagcggaauuaucaucucugauaccccugugcaugacugcaauacaaccugucaaacccccaagggcgcuauuaacacaucccucccguuccagaauauccacccuauuacgaucggcaagugccccaaauauguggaaagcaccaagcugagacuugccacagggcugcggaacgucccuucuauucagagccgcggacucuuuggcgccaucgcuggguucaucgagggaggcuggaccgggaugguggacggaugguacggcuaucaucaccagaaugaacaaggcuccggguacgcggccgaucugaaaucuacacagaacgcuauugacaagaucaccaauaaaguuaacagcgugauugagaagaugaauacgcaguuuacagccgucggaaaggaguucaaccaccuugagaaaagaaucgagaaucugaacaagaaaguggaugacggcuuccucgauauuuggaccuacaaugccgaacugcugguucuccuggagaacgaacggacccuugacuaucaugauuccaaugugaagaaccuguacgagaaaguccgcagccagcucaagaacaaugcuaaggagaucgggaacggauguuuugaguucuaucacaaaugcgacaauacauguauggaaucugugaagaacggcaccuacgauuaucccaaauacuccgaagaggccaagcugaauagagaagagaucgacggggucaaacuugagagcacacggauuuaucaaauccuggcgauuuacucuacgguggcuuccagccucguucugguggucucccugggcgccaucucuuuuuggaugugcagcaacggaucccuccagugccgcauuuguaucuga

SEQ ID NO: 198456 - RNA, 1701 nt, Artificial Sequence
  derived and/or modified CDS sequence (opt5) from hemagglutinin__InfluenzaA__ADV91010
augaaggccauccuggugguccuccuguacaccuucgcuacagccaacgcggacacgcuuugcauuggcuaucacgcuaauaacagcaccgauacaguugacaccgugcuggagaaaaaugugacagucacccauuccgugaaccuccuggaagauaagcacaaugggaaacuuuguaagcugagaggaguugcuccccuccaucugggcaaaugcaacaucgccggguggauucugggaaauccugagugugaaucucucagcacagccuccucuuggagcuacaucguggagaccuccucuagcgacaacggcacgugcuauccgggggauuuuaccgacuacgaagaacugcgggagcagcuuuccagcgucucuuccuucgaacgcuuugagauuuuccccaagacaagcucuuggccuaaucacgauuccaacaagggagugaccacagccuguccccaugcuggcgccaagagcuuuuauaagaaucugaucuggcucguuaaaaagggcaacucuuacccuaaacuguccaagagcuauaucaaugacaaggggaaagaagugcuuguccuguggggcauucaccaucccccuaccuccgcggaucaacagucucucuaccagaacgccgacgcuuacguguucgugggaacgagcagauauuccaagaaauuuaagccggagaucgccauucggcccaaaguccgcgaucaggaggggagaaugaauuacuauuggacacugguugaaccuggagacaagaucaccuucgaggcuacaggcaaccugguggugccccgguacgccuuugcgauggaacgcaacgccgggagcggaauuaucauuucugauaccccuguccacgacugcaauaccacaugucaaacgcccaaaggcgcuaucaacaccucccucccguuccagaauauccacccuauuacaaucggcaagugccccaaguaugugaaaagcaccaagcugagacuugccacagggcugcggaacguuccuucuauucagagccgcggacucuuuggcgcuaucgccggguucauugagggaggcuggaccgggaugguggacggaugguacggcuaucaucaccagaaugaacaaggcuccggguacgccgcugaucugaaaucuacgcagaacgcgaucgacgagaucacaaauaaggucaacagcgugauugagaaaaugaauacccaguuuaccgccguuggaaaggaguucaaccaccuugagaagagaaucgaaaaucugaacaaaaagguggaugacggcuuccucgauauuuggacauacaaugcugagcugcugguccuccuggaaaacgagcggacccuugacuaucaugauuccaaugugaaaaaccuguacgagaagguccgcagccagcucaaaaacaaugccaaggaaaucgggaacggauguuuugaguucuaucacaagugcgacaauacauguauggaaucugugaaaaacggcacguacgauuaucccaaguacuccgaggaagccaaacugaauagagaggagauugacgggguuaaacuugaaagcacccggaucuaucaaauccuggcuauuuacucuacaguggccuccagccucguccuggugguuucccugggcgcgaucucuuuuuggaugugcagcaacggaucccuccagugccgcauuuguaucuga

SEQ ID NO: 198457 - RNA, 1701 nt, Artificial Sequence
  derived and/or modified CDS sequence (opt5) from hemagglutinin__InfluenzaA__ADW01407
auggaggccaagcuguucgugcucuuuugcgcuuucaccgcccugaaagcggacacaaucugugucggcuaccacgcuaacaauagcacggauaccguugacacaauucuugaaaagaacgugaccgugacacauuccgucaaucugcucgagaacucucacaaugggaaacugugcagccuuaacggaaagaucccccugcagcucggcaauuguaacguggccggguggauucugggaaauccuaaaugcgaucugcuccugaccgccaacuccuggucuuauaucauugaaacaagcaauuccaagaacggcgcuuguuacccgggggaguuugccgacuaugaagaacuuaaggagcaacugucuaccguuagcuccuucgaaagauuugagaucuuccccaaagcuacgagcuggccuaaucaugauaccacacggggaaccacaguggccugcucucacuccggcgcgaacagcuuuuaccgcaaucuccuguggaucgucaagaaaggcaacucuuaucccaaacuuuccaaaagcuacaccaacaauaaggggaaggaagugcugguuauuuggggagugcaucacccucccacggacucugaucagcagacacucuaucagaacaaucacaccuacgucuccgugggcagcuccaaauacuauaagagacugacaccugagaucguggcccggccgaaaguccgcgagcaagcugggagaaugaacuacuauuggacccugcucgaccagggagauaccauuacauucgaagccacgggcaaucugaucgcucccuggcaugccuuugcgcuuaagaaagggucuagcuccggaauuaugcggagcgacgcccagguucacaacuguaccacaaagugccagaccccucauggcgcucugaaaggcaaucuccccuuccaaaacgugcacccugugacaaucggggagugucccaaguacgucaagucuacccagcugcgcauggccacgggacuuagaaauauuccguccauccagagccggggccuguuuggggcuaucgccggauucauugaaggcggguggacaggaaugguggauggcugguauggcuaccaccaucgcaacgagcaggggucuggauaugccgcugaccaaaagagcacccagaucgcgauugauggcaucuccaauaagguuaacucugugauugagaaaaugaauauccaguuuaccagcgucgggaaggaguucaacucccucgagaaaagaauggaaaaucugaacaagaagguggacgacggauuccuggauguuuggacauacaacgccgagcuccugauccuucuggaaaaugagcggacccucgacuuucacgaucugaacgugaaaaaucuuuacgaaaaggucaaaagccaacugcgcaacaaugcuaaggagauuggcaacgggugcuucgaguuuuaucauaaaugugacaaugaaugcauggagucugugaagaacggcacauacaauuauccuaaguacuccgaagagagcaaacucaacagagaagagaucgauggagucaagcuggagucuaugggcauucaccagauccuggccauuuauuccacgguggccagcucccucguucugcuugugucucugggggcuaucagcuucuggaugugcuccaauggaucucuccagugucgggucugcaucuga

SEQ ID NO: 198458 - RNA, 1698 nt, Artificial Sequence; identical to SEQ ID NO: 195203
  derived and/or modified CDS sequence (opt5) from hemagglutinin__InfluenzaA__ADW09101

SEQ ID NO: 198459 - RNA, 1698 nt, Artificial Sequence
  derived and/or modified CDS sequence (opt5) from hemagglutinin__InfluenzaA__ADW09111
augaaggugaaacugcucguccugcuuugcaccuucacagccacguacgcugacaccaucuguauuggcuaucacgccaacaauagcacagauaccguugacacagugcuggagaagaacgugaccgucacacauuccgugaaucuccuggaaaacucucacaaugggaaacuuugccugcucaagggaaucgcgccccugcagcugggcaacuguagcguugcuggguggauucucggaaauccugagugcgaacugcuuaucuccaaagagucuuggagcuacauuguggaaaagccgaaccccgagaauggcaccuguuauccugggcauuuugccgauuacgaggaacugagagagcaacucuccucugucagcuccuucgaacgguuugagaucuuccccaaggagagcucuuggccuaaccacacggugaccggaguuuccgccagcugcucucauaauggcgaauccagcuuuuaucgcaaccugcuuuggcugacaggcaaaaaugggcucuaccccaaccugucuaaguccuaugcuaauaacaaagagaaggaagugcugguccucuggggagugcaccacccuccgaacaucguggaccagaaaacccuguacagaacagagaaugccuacgucagcguuguguccucucauuauagccggaaguucacccccgaaauugcuaagcgcccuaaagugagagaucaggagggccggaucaacuacuauuggacgcuucuggagcccggggacacaauuaucuuugaagccaauggaaaccucauugcgccucgcuacgccuucgcucuguccagaggcuuugggagcggaaucauuaauucuaacgcccccauggauaagugugacgcuaaaugccagaccccgcggggcgccaucaauuccagccuuccuuuccaaaacguccaccccgugacaaucggcgaguguccuaaguauguucgcucugcgaaacugagaauggugaccgggcuccggaauauucccagcauccagucccgcggacuguuuggcgccauugcuggguucaucgaaggaggcuggaccgggauggucgauggaugguacggcuaucaucaccagaacgaccagggcucuggguacgccgcugaucaaaagagcacacagaaugccauuaacggaaucacgaauaaagugaacuccguuaucgagaagaugaauacccaguuuacagccgugggcaaggaguucaacaaacuggaaagacggauggagaaccucaauaagaaagucgacgauggguucauugacaucuggaccuacaacgcugaacugcuugugcugcucgagaaugaacgcacacuggacuuucacgauagcaacgucaagaaucuuuaugagaaagugaagucucagcugaagaacaaugcgaaagaaauuggaaacggcugcuucgaguuuuaccauaaguguaaugacgagugcauggaauccguuaaaaacgggaccuaugauuaccccaaguauagcgaggaaucuaaacucaauagagagaagaucgacggcgugaagcuggaguccaugggagucuaccaaauucuggccaucuauagcacgguggcuuccucucucguucugcuugugagccugggcgccaucuccuucuggaugugcucuaacgggagccuccagugucggauuugcaucuga

SEQ ID NO: 198460 - RNA, 1698 nt, Artificial Sequence
  derived and/or modified CDS sequence (opt5) from hemagglutinin__InfluenzaA__ADW09120
augaaggugaaacugcucguccugcuuugcaccuucacagccacguacgcugacaccaucuguauuggcuaucacgccaacaauagcacagauaccguugacacagugcuggagaagaacgugaccgucacacauuccgugaaucuccuggaaaacucucacaaugggaaacuuugccugcucaagggaaucgcgccccugcagcugggcaacuguagcguugcuggguggauucucggaaauccugagugcgaacugcuuaucuccaaagagucuuggagcuacauuguggaaaagccgaaccccgagaauggcaccuguuauccugggcauuuugccgauuacgaggaacugagagagcaacucuccucugucagcuccuucgaacgguuugagaucuuccccaaggagagcucuuggccuaaccacacggugaccggaguuuccgccagcugcucucauaauggcgaauccagcuuuuaucgcaaccugcuuuggcugacagugaaaaauggccucuaccccaaccugucuaaguccuaugcuaauaacaaagagaaggaaguccuggugcucuggggagugcaccacccuccgaacaucgucgaccagaaaacccuguaccauacagagaaugccuacguuagcgugguguccucucacuauagcagaaaguucacccccgaaauugcuaagcggccuaaaguccgcgaucaggaggggagaaucaacuacuauuggacgcuucuggagcccggcgacacaauuaucuuugaagccaaugggaaccucauugcgccucgguacgccuucgcucuguccaagggauuuggcagcgggaucauuaauucuaacgcccccauggauaaaugugacgcuaagugccagaccccgcgcggagccaucaauuccagccuuccuuuccaaaacgugcaucccguuacaaucggcgaguguccuaaauaugugagaucugcgaagcugcggauggucaccggccuccgcaauauucccagcauccaguccagagggcuguuuggagccauugcuggcuucaucgaagggggauggaccggcaugguggaugggugguacggauaucaccaccagaacgagcagggcucuggcuacgccgcugaccagaaaagcacacaaaaugccauuaacgggaucacgaauaagguuaacuccgugaucgaaaagaugaauacccaguuuacagccgucggaaaagaguucaacaagcuggagcggcgcauggaaaaccucaauaaaaagguggaugacggcuucauugauaucuggaccuacaacgcugagcugcuuguccugcucgaaaaugagagaacacuggacuuucaugacagcaacgugaaaaaucuuuaugaaaagguuaagucucagcugaaaaacaaugcgaaggagauugggaacggaugcuucgaguuuuaccacaaauguaaugaugaaugcauggaguccgugaagaacggcaccuaugacuaccccaaauauagcgaagagucuaagcucaaucgggagaagaucgauggggucaaacuggaauccaugggcguguaccaaauucuggccaucuauagcacgguugcuuccucucucgugcugcuugucagccugggagccaucuccuucuggaugugcucuaacggcagccuccagugucgcauuugcaucuga

SEQ ID NO: 198461 - RNA, 1698 nt, Artificial Sequence; identical to SEQ ID NO: 195688
  derived and/or modified CDS sequence (opt5) from hemagglutinin__InfluenzaA__ADW09131

SEQ ID NO: 198462 - RNA, 1698 nt, Artificial Sequence
  derived and/or modified CDS sequence (opt5) from hemagglutinin__InfluenzaA__ADW09153
augaaggugaaacugcucguccugcuuugcaccuucacagccacguacgcugacaccaucuguauuggcuaucacgccaacaauagcacagauaccguugacacagugcuggagaagaacgugaccgucacacauuccgugaaucuccuggaaaacucucacaaugggaaacuuugccugcucaagggaaucgcgccccugcagcugggcaacuguagcguugcuggguggauucucggaaauccugagugcgaacugcuuaucuccaaagagucuuggagcuacauuguggaaaagccgaaccccgagaauggcaccuguuauccugggcauuuugccgauuacgaggaacugagagagcaacucuccucugucagcuccuucgaacgguuugagaucuuccccaaggagagcucuuggccuaaccacacggugaccggaguuuccgccagcugcucucauaauggcgaauccagcuuuuaucgcaaccugcuuuggcugacagugaaaaauggccucuaccccaaccugucuaaguccuaugcuaauaacaaagagaaggaaguccuggugcucuggggagugcaccacccuccgaacaucgucgaccagaaaacccuguacagaacagagaaugccuacguuagcgugguguccucucauuauagccggaaguucacccccgaaauugcuaagcgcccuaaagucagagaucaggaggggcggaucaacuacuauuggacgcuucuggagcccggcgacacaauuaucuuugaagccaaugggaaccucauugcgccucgcuacgccuucgcucuguccagaggauuuggcagcgggaucauuaauucuaacgcccccauggauaagugugacgcuaaaugccagaccccgcggggagccaucaauuccagccuuccuuuccaaaacgugcaccccguuacaaucggcgaguguccuaaguaugugcgcucugcgaaacugagaauggucaccggccuccggaauauucccagcauccagucccgcgggcuguuuggagccauugcuggcuucaucgaagggggauggaccggcaugguggaugggugguacggauaucaucaccagaacgagcagggcucuggcuacgccgcugaccaaaagagcacacaggaugccauuaaugggaucacgaacaaaguuaauuccgugaucgaaaagaugaacacccaguuuacagccgucggaaaggaguucaauaaacuggagagacggauggaaaaccucaacaagaaaguggacgauggcuucauugacaucuggaccuacaaugcugagcugcuuguccugcucgaaaacgagcgcacacuggacuuucacgauagcaaugugaagaaccuuuaugaaaaaguuaagucucagcugaagaauaacgcgaaagagauugggaauggaugcuucgaguuuuaccauaaguguaacgacgaaugcauggaguccgugaaaaauggcaccuaugauuaccccaaguauagcgaagagucuaaacucaacagagagaagaucgacggggucaagcuggaauccaugggcguguaccaaauucuggccaucuauagcacgguugcuuccucucucgugcugcuugucagccugggagccaucuccuucuggaugugcucuaauggcagccuccagugucggauuugcaucuga

SEQ ID NO: 198463 - RNA, 1698 nt, Artificial Sequence; identical to SEQ ID NO: 195688
  derived and/or modified CDS sequence (opt5) from hemagglutinin__InfluenzaA__ADW09164

SEQ ID NO: 198464 - RNA, 1698 nt, Artificial Sequence
  derived and/or modified CDS sequence (opt5) from hemagglutinin__InfluenzaA__ADW09186
augaaggugaaacugcucguccugcuuugcaccuucacagccacguacgcugacaccaucuguauuggcuaucacgccaacaauagcacagauaccguugacacagugcuggagaagaacgugaccgucacacauuccgugaaucuccuggaaaacucucacaaugggaaacuuugccugcucaagggaaucgcgccccugcagcugggcaacuguagcguugcuggguggauucucggaaauccugagugcgaacugcuuaucuccaaagagucuuggagcuacauuguggaaaagccgaaccccgagaauggcaccuguuauccugggcauuuugccgauuacgaggaacugagagagcaacucuccucugucagcuccuucgaacgguuugagaucuuccccaaggagagcucuuggccuaaccacacggugaccggaguuuccgccagcugcucucauaauggcgaauccagcuuuuaucgcaaccugcuuuggcugacaggcaaaaaugggcucuaccccaaccugucuaaguccuaugcuaauaacaaagagaaggaagugcugguccucuggggagugcaccacccuccgaacaucguggaccagaaaacccuguacagaacagagaaugccuacgucagcguuguguccucucauuauagccggaaguucacccccgaaauugcuaagcgcccuaaagugagagaucaggagggccggaucaacuacuauuggacgcuucuggagcccggggacacaauuaucuuugaagccaauggaaaccucauugcgccucgcuacgccuucgcucuguccagaggcuuugggagcggaaucauuaauucuaacgcccccauggauaagugugacgcuaaaugccagaccccgcaaggcgccaucaauuccagccuuccuuuccagaacguccaccccgugacaaucggcgaguguccuaaguauguucggucugcgaaacugcgcauggugaccgggcucagaaauacccccagcauucagucccggggacuguuuggcgccaucgcuggguucauugaaggaggcuggacagggauggucgauggaugguacggcuaucaucaccagaacgagcaaggcucuggguacgccgcugaccaaaagagcacgcagaaugccaucaacggaauuaccaauaaagugaacuccguuaucgaaaagaugaauacacaguuuaccgccgugggcaaggaguucaacaaacuggagcgcagaauggaaaaccucaauaagaaagucgaugacggguucaucgauauuuggacauacaacgcugagcugcuugugcugcucgaaaaugagcggacccuggacuuucacgacagcaacgucaagaaucuuuaugaaaaagugaagucucagcugaagaacaaugcgaaagagaucggaaacggcugcuucgaguuuuaccauaaguguaaugaugaaugcauggaguccguuaaaaacgggacguaugacuaccccaaguauagcgaagagucuaaacucaaucgcgagaagauugauggcgugaagcuggaauccaugggagucuaccagauccuggccauuuauagcacaguggcuuccucucucguucugcuugugagccugggcgccaucuccuucuggaugugcucuaacgggagccuccaguguagaaucugcauuuga

SEQ ID NO: 198465 - RNA, 1698 nt, Artificial Sequence; identical to SEQ ID NO: 195203
  derived and/or modified CDS sequence (opt5) from hemagglutinin__InfluenzaA__ADW09197

SEQ ID NO: 198466 - RNA, 1698 nt, Artificial Sequence; identical to SEQ ID NO: 195688
  derived and/or modified CDS sequence (opt5) from hemagglutinin__InfluenzaA__ADW09208

SEQ ID NO: 198467 - RNA, 1698 nt, Artificial Sequence; identical to SEQ ID NO: 195688
  derived and/or modified CDS sequence (opt5) from hemagglutinin__InfluenzaA__ADW09219

SEQ ID NO: 198468 - RNA, 1698 nt, Artificial Sequence; identical to SEQ ID NO: 195203
  derived and/or modified CDS sequence (opt5) from hemagglutinin__InfluenzaA__ADW09230

SEQ ID NO: 198469 - RNA, 1698 nt, Artificial Sequence
  derived and/or modified CDS sequence (opt5) from hemagglutinin__InfluenzaA__ADW09241
augaaggugaaacugcucguccugcuuugcaccuucacagccacguacgcugacaccaucuguauuggcuaucacgccaacaauagcacagauaccguugacacagugcuggagaagaacgugaccgucacacauuccgugaaucuccuggaaaacucucacaaugggaaacuuugccugcucaagggaaucgcgccccugcagcugggcaacuguagcguugcuggguggauucucggaaauccugagugcgaacugcuuaucuccaaagagucuuggagcuacauuguggaaaagccgaaccccgagaauggcaccuguuauccugggcauuuugccgauuacgaggaaaugagagagcaacuguccucugucagcuccuucgaacgguuugagaucuuccccaaggagagcucuuggccuaaccacacggugaccggaguuuccgccagcugcucucauaauggcgaauccagcuuuuaucgcaaccuccuguggcuuacagugaaaaauggccuguaccccaaccucucuaaguccuaugcuaauaacaaagagaaggaaguccuggugcuguggggagugcaccacccuccgaacaucgucgaccagaaaacccucuacagaacagagaaugccuacguuagcgugguguccucucauuauagccggaaguucacccccgaaauugcuaagcgcccuaaagucagagaucaggaggggcggaucaacuacuauuggacgcugcuugagcccggcgacacaauuaucuuugaagccaaugggaaccugauugcgccucgcuacgccuucgcucucuccagaggauuuggcagcgggaucauuaauucuaacgcccccauggauaagugugacgcuaaaugccagaccccgcggggagccaucaauuccagccugccuuuccaaaacgugcaccccguuacaaucggcgaguguccuaaguaugugcgcucugcgaaacuuagaauggucaccggccugcggaauauucccagcauccagucccgcgggcucuuuggagccauugcuggcuucaucgaagggggauggaccggcaugguggaugggugguacggauaucaucaccagaacgagcagggcucuggcuacgccgcugaccaaaagagcacacagaaugccauuaacgggaucacgaauaaaguuaacuccgugaucgaaaagaugaauacccaguuuacagccgucggaaaggaguucaacaaacuggagagacggauggaaaaccugaauaagaaaguggaugacggcuucauugauaucuggaccuacaacgcugagcuccugguccuucuggaaaaugagcgcacacucgacuuucacgacagcaacgugaagaaucuguaugaaaaaguuaagucucagcuuaagaacaaugcgaaagagauugggaacggaugcuucgaguuuuaccauaaguguaaugaugaaugcauggaguccgugaaaaacggcaccuaugacuaccccaaguauagcgaagagucuaaacugaauagagagaagaucgauggggucaagcucgaauccaugggcguguaccaaauucuggccaucuauagcacgguugcuuccucucuggugcuccuggucagccuuggagccaucuccuucuggaugugcucuaacggcagccugcagugucggauuugcaucuga

SEQ ID NO: 198470 - RNA, 1698 nt, Artificial Sequence; identical to SEQ ID NO: 195688
  derived and/or modified CDS sequence (opt5) from hemagglutinin__InfluenzaA__ADW09252

SEQ ID NO: 198471 - RNA, 1698 nt, Artificial Sequence
  derived and/or modified CDS sequence (opt5) from hemagglutinin__InfluenzaA__ADW09274
augaaggugaaacugcucguccugcuuugcaccuucacagccacguacgcugacaccaucuguauuggcuaucacgccaacaauagcacagauaccguugacacagugcuggagaagaacgugaccgucacacauuccgugaaucuccuggaaaacucucacaaugggaaacuuugccugcucaagggaaucgcgccccugcagcugggcaacuguagcguugcuggguggauucucggaaauccugagugcgaacugcuuaucuccaaagagucuuggagcuacauuguggaaaagccgaaccccgagaauggcaccuguuauccugggcauuuugccgauuacgaggaacugagagagcaacucuccucugucagcuccuucgaacgguuugagaucuuccccaaggagagcucuuggccuaaccacacggugaccggaguuuccgccagcugcucucauaauggcgaauccagcuuuuaucgcaaccugcuuuggcugacagugaaaaauggccucuaccccaaccugucuaagccuuaugcuaauaacaaagagaaggaaguccuggugcucuggggagugcaccacccgcccaacaucgucgaccagaaaacccuguacagaacagagaaugccuacguuuccguggugagcucccauuauucucggaaguucaccccugaaauugcuaagcgccccaaagucagagaucaggaggggcggaucaacuacuauuggacgcuucuggagccuggcgacacaauuaucuuugaagccaaugggaaccucauugcgccccgcuacgccuucgcucugagcagaggauuuggcuccgggaucauuaauagcaacgccccgauggauaagugugacgcuaaaugccagaccccucggggagccaucaauucuucccuucccuuccaaaacgugcacccuguuacaaucggcgagugucccaaguaugugcgcagcgcgaaacugagaauggucaccggccuccggaauauucccucuauccagagccgcgggcuguuuggagccauugcuggcuucaucgaagggggauggaccggcaugguggaugggugguacggauaucaucaccagaacgagcagggcuccggcuacgccgcugaccaaaagucuacacagaaugccauuaacgggaucacgaauaaaguuaacagcgugaucgaaaagaugaauacccaguuuacagccgucggaaaggaguucaacaaacuggagagacggauggaaaaccucaauaagaaaguggaugacggcuucauugauaucuggaccuacaacgcugagcugcuuguccugcucgaaaaugagcgcacacuggacuuucacgacuccaacgugaagaaucuuuaugaaaaaguuaagagccagcugaagaacaaugcgaaagagauugggaacggaugcuucgaguuuuaccauaaguguaaugaugaaugcauggagucugugaaaaacggcaccuaugacuacccuaaguauuccgaagagagcaaacucaauagagagaagaucgauggggucaagcuggaaucuaugggcguguaccaaauucuggccaucuauuccacgguugcuagcucccucgugcugcuugucucucugggagccaucagcuucuggaugugcuccaacggcucucuccagugucggauuugcaucuga

SEQ ID NO: 198472 - RNA, 1698 nt, Artificial Sequence
  derived and/or modified CDS sequence (opt5) from hemagglutinin__InfluenzaA__ADW09285
augaaggugaaacugcucguccugcuuugcaccuucacagccacguacgcugacaccaucuguauuggcuaucacgccaacaauagcacagauaccguugacacagugcuggagaagaacgugaccgucacacauuccgugaaucuccuggaaaacucucacaaugggaaacuuugccugcucaagggaaucgcgccccugcagcugggcaacuguagcguugcuggguggauucucggaaauccugagugcgaacugcuuaucuccaaagagucuuggagcuacauuguggaaaagccgaaccccgagaauggcaccuguuauccugggcauuuugccgauuacgaggaacugagagagcaacucuccucugucagcuccuucgaacgguuugagaucuuccccaaggagagcucuuggccuaaccacacggugaccggaguuuccgccagcugcucucauaauggcgaauccagcuuuuaucgcaaccugcuuuggcugacaggcaaaaaugggcucuaccccaaccugucuaaguccuaugcuaauaacaaagagaaggaagugcugguccucuggggagugcaccacccuccgaacaucguggaccagaaaacccuguacagaacagagaaugccuacgucagcguuguguccucucauuauagccggaaguucacccccgaaauugcuaagcgcccuaaagugagagaucaggagggccggaucaacuacuauuggacgcuucuggagcccggggacacaauuaccuuugaagccaauggaaaccucaucgcgccucgcuacgccuucgcucuguccagaggcuuugggagcggaauuaucaauucuaacgcccccauggauaagugugacgcuaaaugccagacaccgcaaggcgccauuaauuccagccuuccuuuccagaacguccaccccgugaccaucggcgaguguccuaaguauguucggucugcgaaacugcgcauggugaccgggcucagaaauauccccagcauucagucccggggacuguuuggcgccaucgcuggguucauugaaggaggcuggacagggauggucgauggaugguacggcuaucaucaccagaacgagcaaggcucuggguacgccgcugaccaaaagagcacgcagaaugccaucaacggaauuaccaauaaagugaacuccguuaucgaaaagaugaauacacaguuuaccgccgugggcaaggaguucaacaaacuggagcgcagaauggaaaaccucaauaagaaagucgaugacggguucaucgauauuuggacauacaacgcugagcugcuugugcugcucgaaaaugagcggacccuggacuuucacgacagcaacgucaagaaucuuuaugaaaaagugaagucucagcugaagaacaaugcgaaagagaucggaaacggcugcuucgaguuuuaccauaaguguaaugaugaaugcauggaguccguuaaaaacgggacguaugacuaccccaaguauagcgaagagucuaaacucaaucgcgagaagauugauggcgugaagcuggaauccaugggagucuaccagauccuggccauuuauagcacaguggcuuccucucucguucugcuugugagccugggcgccaucuccuucuggaugugcucuaacgggagccuccaguguagaaucugcauuuga

SEQ ID NO: 198473 - RNA, 1698 nt, Artificial Sequence; identical to SEQ ID NO: 195688
  derived and/or modified CDS sequence (opt5) from hemagglutinin__InfluenzaA__ADW09296

SEQ ID NO: 198474 - RNA, 1698 nt, Artificial Sequence; identical to SEQ ID NO: 195203
  derived and/or modified CDS sequence (opt5) from hemagglutinin__InfluenzaA__ADW09307

SEQ ID NO: 198475 - RNA, 1698 nt, Artificial Sequence
  derived and/or modified CDS sequence (opt5) from hemagglutinin__InfluenzaA__ADW09327
augaaggugaaacugcucguccugcuuugcaccuucacagccacguacgcugacaccaucuguauuggcuaucacgccaacaauagcacagauaccguugacacagugcuggagaagaacgugaccgucacacauuccgugaaucuccuggaaaacucucacaaugggaaacuuugccugcucaagggaaucgcgccccugcagcugggcaacuguagcguugcuggguggauucucggaaauccugagugcgaacugcuuaucuccaaagagucuuggagcuacauuguggaaaagccgaaccccgagaauggcaccuguuauccugggcauuuugccgauuacgaggaacugagagagcaacucuccucugucagcuccuucgaacgguuugagaucuuccccaaggagagcucuuggccuaaccacacggugaccggaguuuccgccagcugcucucauaauggcgaauccagcuuuuaucgcaaccugcuuuggcugacaggcaaaaaugggcucuaccccaaccugucuaaguccuaugcuaauaacaaagagaaggaagugcugguccucuggggagugcaccacccuccgaacaucguggaccagaaaacccuguacagaacagagaaugccuacgucagcguuguguccucucauuauagccggaaguucacccccgaaauugcuaagcgcccuaaagugagagaucaggagggccggaucaacuacuauuggacgcuucuggagcccggggacacaauuaucuuugaagccaauggaaaccucauugcgccucgcuacgccuucgcucuguccagaggcuuugggagcggaaucauuaauucuaacgcccccauggauaagugugacgcuaaaugccagaccccgcaaggcgccaucaauuccagccuuccuuuccagaacguccaccccgugacaaucggcgaguguccuaaguauguucggucugcgaaacugcgcauggugaccgggcucagaaauauucccagcauccagucccggggacuguuuggcgccauugcuggguucaucgaaggaggcuggaccgggauggucgauggaugguacggcuaucaucaccagaacgagcaaggcucuggguacgccgcugaccaaaagagcacacagaaugccauuaacggaaucacgaauaaagugaacuccguuaucgaaaagaugaauacccaguuuacagccgugggcaaggaguucaacaaacuggagcgcagaauggaaaaccucaauaagaaagucgaugacggguucauugauaucuggaccuacaacgcugagcugcuugugcugcucgaaaaugagcggacacuggacuuucacgacagcaacgucaagaaucuuuaugaaaaagugaagucucagcugaagaacaaugcgaaagagauuggaaacggcugcuucgaguuuuaccauaaguguaauaacgaaugcauggaguccguuaaaaaugggaccuaugauuaccccaaguauagcgaagagucuaaacucaaccgcgagaagaucgacggcgugaagcuggaauccaugggagucuaccagauucuggccaucuauagcacgguggcuuccucucucguucugcuugugagccugggcgccaucuccuucuggaugugcucuaaugggagccuccaguguagaauuugcaucuga

SEQ ID NO: 198476 - RNA, 1698 nt, Artificial Sequence; identical to SEQ ID NO: 195688
  derived and/or modified CDS sequence (opt5) from hemagglutinin__InfluenzaA__ADW10483

SEQ ID NO: 198477 - RNA, 1698 nt, Artificial Sequence
  derived and/or modified CDS sequence (opt5) from hemagglutinin__InfluenzaA__ADW10494
augaaggugaaacugcucguccugcuuugcaccuucacagccacguacgcugacaccaucuguauuggcuaucacgccaacaauagcacagauaccguugacacagugcuggagaagaacgugaccgucacacauuccgugaaucuccuggaaaacucucacaaugggaaacuuugccugcucaagggaaucgcgccccugcagcugggcaacuguagcguugcuggguggauucucggaaauccugagugcgaacugcuuaucuccaaagagucuuggagcuacauuguggaaaagccgaaccccgagaauggcaccuguuauccugggcauuuugccgauuacgaggaacugagagagcaacucuccucugucagcuccuucgaacgguuugagaucuuccccaaggagagcucuuggccuaaccacacggugaccggaguuuccgccagcugcucucauaauggcgaauccagcuuuuaucgcaaccugcuuuggcugacaggcaaaaaugggcucuaccccaaccugucuaaguccuaugcuaauaacaaagagaaggaagugcugguccucuggggagugcaccacccuccgaacaucguggaccagaaaacccuguacagaacagagaaugccuacgucagcguuguguccucucauuauagccggaaguucacccccgaaauugcuaagcgcccuaaagugagagaucaggagggccggaucaacuacuauuggacgcuucuggagcccggggacacaauuaucuuugaagccaauggaaaccucauugcgccucgcuacgccuucgcucuguccagaggcuuugggagcggaaucauuaauucuaacgcccccauggauaagugugacgcuaaaugccagaccccgcaaggcgccaucaauuccagccuuccuuuccagaacguccaccccgugacaaucggcgaguguccuaaguauguucggucugcgaaacugcgcauggugaccgggcucagaaauauucccagcauccagucccggggacuguuuggcgccauugcuggguucaucgaaggaggcuggaccgggauggucgauggaugguacggcuaucaucaccagaacgagcaaggcucuggguacgccgcugaccaaaagagcacacagaaugccauuaacggaaucacgaauaaagugaacuccguuaucgaaaagaugaauacccaguuuacagccgugggcaaggaguucaacaaacuggagcgcagaauggaaaaccucaauaagaaagucgaugacggguucauugauaucuggaccuacaacgcugagcugcuugugcugcucgaaaaugagcggacacuggacuuucacgacagcaacgucaagaaucuuuaugaaaaagugaagaaccagcugaagaauaacgcgaaagagauuggaaauggcugcuucgaguuuuaccauaaguguaacgaugaaugcauggagucuguuaaaaaugggaccuaugacuaccccaaguauuccgaagagagcaaacucaaccgcgagaagaucgauggcgugaagcuggaaucuaugggagucuaccagauucuggccaucuauuccacgguggcuagcucccucguucugcuugugucucugggcgccaucagcuucuggaugugcuccaaugggucucuccaguguagaauuugcaucuga

SEQ ID NO: 198478 - RNA, 1698 nt, Artificial Sequence; identical to SEQ ID NO: 195688
  derived and/or modified CDS sequence (opt5) from hemagglutinin__InfluenzaA__ADW10505

SEQ ID NO: 198479 - RNA, 1698 nt, Artificial Sequence; identical to SEQ ID NO: 195688
  derived and/or modified CDS sequence (opt5) from hemagglutinin__InfluenzaA__ADW10516

SEQ ID NO: 198480 - RNA, 1698 nt, Artificial Sequence
  derived and/or modified CDS sequence (opt5) from hemagglutinin__InfluenzaA__ADW10527
augaaggugaaacugcucguccugcuuugcaccuucacagccacguacgcugacaccaucuguauuggcuaucacgccaacaauagcacagauaccguugacacagugcuggagaagaacgugaccgucacacauuccgugaaucuccuggaaaacucucacaaugggaaacuuugccugcucaagggaaucgcgccccugcagcugggcaacuguagcguugcuggguggauucucggaaauccugagugcgaacugcuuaucuccaaagagucuuggagcuacauuguggaaaagccgaaccccgagaauggcaccuguuauccugggcauuuugccgauuacgaggaacugagagagcaacucuccucugucagcuccuucgaacgguuugagaucuuccccaaggagagcucuuggccuaaccacacggugaccggaguuuccgccagcugcucucauaauggcgaauccagcuuuuaucgcaaccugcuuuggcugacaggcaaaaaugggcucuaccccaaccugucuaaguccuaugcuaauaacaaagagaaggaagugcugguccucuggggagugcaccacccuccgaacaucguggaccagaaaacccuguacagaacagagaaugccuacgucagcguuguguccucucauuauagccggaaguucacccccgaaauugcuaagcgcccuaaagugagagaucaggagggccggaucaacuacuauuggacgcuucuggagcccggggacacaauuaucuuugaagccaauggaaaccucauugcgccucgcuacgccuucgcucuguccagaggcuuugggcuuggaaucauuaauagcaacgcccccauggauaagugugacgcuaaaugccagaccccgcaaggcgccaucaauucuucccugccuuuccagaacguccaccccgugacaaucggcgaguguccuaaguauguucggagcgcgaaacuccgcauggugaccgggcugagaaauauucccucuauccagagccggggacuguuuggcgccauugcuggguucaucgaaggaggcuggaccgggauggucgauggaugguacggcuaucaucaccagaacgagcaaggcuccggguacgccgcugaccagaagucuacacagaaugccauuaacggaaucacgaauaaagugaacagcguuaucgaaaagaugaauacccaguuuacagccgugggcaaggaguucaacaaacucgagcgcagaauggaaaaccugaauaagaaagucgaugacggguucauugauaucuggaccuacaacgcugagcuucuggugcuccuggaaaaugagcggacacuugacuuucacgacuccaacgucaagaaucuguaugaaaaaguuaagagccaacucaagaacaaugcgaaagagauuggaaacggcugcuucgaguuuuaccauaaguguaaugaugaaugcauggagucugugaaaaacgggaccuaugacuaccccaaguauuccgaagagagcaaacugaaucgcgagaagaucgauggcgugaagcuggaaucuaugggagucuaccagauucucgccaucuauuccacgguggcuagcucccugguucuucuggugucucucggcgccaucagcuucuggaugugcuccaacgggucucugcaguguagaauuugcaucuga

SEQ ID NO: 198481 - RNA, 1698 nt, Artificial Sequence
  derived and/or modified CDS sequence (opt5) from hemagglutinin__InfluenzaA__ADW10538
augaaggugaaacugcucguccugcuuugcaccuucacagccacguacgcugacaccaucuguauuggcuaucacgccaacaauagcacagauaccguugacacagugcuggagaagaacgugaccgucacacauuccgugaaucuccuggaaaacucucacaaugggaaacuuugccugcucaagggaaucgcgccccugcagcugggcaacuguagcguugcuggguggauucucggaaauccugagugcgaacugcuuaucuccaaagagucuuggagcuacauuguggaaaagccgaaccccgagaauggcaccuguuauccugggcauuuugccgauuacgaggaacugagagagcaacucuccucugucagcuccuucgaacgguuugagaucuuccccaaggagagcucuuggccuaaccacacggugaccggaguuuccgccagcugcucucauaauggcgaauccagcuuuuaucgcaaccugcuuuggcugacaggcaaaaaugggcucuaccccaaccugucuaaguccuaugcuaauaacaaagagaaggaagugcugguccucuggggagugcaccacccuccgaacaucguggaccagaaaacccuguacagaacagagaaugccuacgucagcguuauguccucucauuauagccggaaguucacccccgaaauugcuaagcgcccuaaagugagagaucaggagggccggaucaacuacuauuggacgcuucuggagcccggggacacaauuaucuuugaagccaauggaaaccucauugcgccucgcuacgccuucgcucuguccagaggcuuugggagcggaaucauuaauucuaacgcccccauggauaagugugacgcuaaaugccagaccccgcaaggcgccaucaauuccagccuuccuuuccagaacgugcaccccgucacaaucggcgaguguccuaaguaugugcggucugcgaaacugcgcaugguuaccgggcucagaaauauucccagcauccagucccggggacuguuuggcgccauugcuggguucaucgaaggaggcuggaccgggaugguggauggaugguacggcuaucaucaccagaacgagcaaggcucuggguacgccgcugaccaaaagagcacacagaaugccauuaacggaaucacgaauaaagucaacuccgugaucgaaaagaugaauacccaguuuacagccguuggcaaggaguucaacaaacuggagcgcagaauggaaaaccucaauaagaaaguggaugacggguucauugauaucuggaccuacaacgcugagcugcuuguccugcucgaaaaugagcggacacuggacuuucacgacagcaacgugaagaaucuuuaugaaaaagucaagucucagcugaagaacaaugcgaaagagauuggaaacggcugcuucgaguuuuaccauaaguguaaugaugaaugcauggaguccgugaaaaacgggaccuaugacuaccccaaguauagcgaagagucuaaacucaaucgcgagaagaucgauggcguuaagcuggaauccaugggaguguaccagauucuggccaucuauagcacggucgcuuccucucucgugcugcuuguuagccugggcgccaucuccuucuggaugugcucuaacgggagccuccaguguagaauuugcaucuga

SEQ ID NO: 198482 - RNA, 1698 nt, Artificial Sequence; identical to SEQ ID NO: 195688
  derived and/or modified CDS sequence (opt5) from hemagglutinin__InfluenzaA__ADW10549

SEQ ID NO: 198483 - RNA, 1698 nt, Artificial Sequence
  derived and/or modified CDS sequence (opt5) from hemagglutinin__InfluenzaA__ADW10560
augaaggugaaacugcucguccugcuuugcaccuucacagccacguacgcugacaccaucuguauuggcuaucacgccaacaauagcacagauaccguugacacaguguuugagaagaacgugaccgucacacauuccgugaaucugcucgaaaacucucacaaugggaaacugugccuucugaagggaaucgcgccccuccagcugggcaacuguagcguugcuggguggauucugggaaauccugagugcgaacuccugaucuccaaagagucuuggagcuacauuguggaaaagccgaaccccgagaauggcaccuguuauccugggcauuucgccgauuacgaggaacuuagagagcaacuguccucugucagcuccuuugaacgguucgagaucuuucccaaggagagcucuuggccuaaccacacggugaccggaguuuccgccagcugcucucauaauggcgaacgcuccuucuauagaaaccuccuguggcuuacaggcaaaaaugggcuguaccccaaccucagcaagucuuaugcuaauaacaaagagaaggaagugcugguccuguggggagugcaccacccuccggacaucggcgaucagaaaacccucuaccauacagagaacgccuacguguccgucguuagcucccacuauucucggaaguuuacccccgaaauugcuaagcgcccuaaagugagagaccaggaggggcggaucaauuacuauuggacgcugcuugagcccggagauacaauuaucuucgaagccaacggcaaucugauugcgccucgcuacgccuuugcucucagcagaggguucggauccggcaucauuaacagcaaugcccccauggacaagugugaugcuaaaugccagaccccgcaaggcgccaucaacucuucccugccuuuucagaaugugcaucccgucacaaucggggaguguccuaaguaugugcggagcgcgaaacuucgcaugguuaccggacugagaaacauucccucuauccagagccggggccucuucggggccauugcuggauuuaucgaaggcggguggaccggaaugguggacggcugguacggcuaucaccaccagaaugagcaaggguccggauacgccgcugaucagaagucuacacagaacgccauuaauggcaucacgaacaaagucaauagcgugaucgaaaagaugaacacccaguucacagccguugggaaggaguucaauaaacuggagcgcagaauggaaaaccugaacaagaaaguggacgauggauuuauugacaucuggaccuacaaugcugagcuccugguccuucuggaaaacgagcggacacucgacuuccaugauuccaaugugaagaaccuguaugaaaaagucaagagccaacuuaagaauaacgcgaaagagauuggcaaugggugcuuugaguucuaccacaaguguaacgacgaaugcauggagucugugaaaaauggcaccuaugauuaccccaaguauuccgaagagagcaaacugaaccgcgagaagaucgacggaguuaagcucgaaucuaugggcguguaccagauucuggccaucuauuccacggucgcuagcucccuggugcuccugguuucucuuggggccaucagcuuuuggaugugcuccaauggaucucugcaguguagaauuugcaucuga

SEQ ID NO: 198484 - RNA, 1698 nt, Artificial Sequence; identical to SEQ ID NO: 198025
  derived and/or modified CDS sequence (opt5) from hemagglutinin__InfluenzaA__ADW10571

SEQ ID NO: 198485 - RNA, 1698 nt, Artificial Sequence; identical to SEQ ID NO: 195203
  derived and/or modified CDS sequence (opt5) from hemagglutinin__InfluenzaA__ADW10582

SEQ ID NO: 198486 - RNA, 1698 nt, Artificial Sequence; identical to SEQ ID NO: 195688
  derived and/or modified CDS sequence (opt5) from hemagglutinin__InfluenzaA__ADW10593

SEQ ID NO: 198487 - RNA, 1698 nt, Artificial Sequence; identical to SEQ ID NO: 195688
  derived and/or modified CDS sequence (opt5) from hemagglutinin__InfluenzaA__ADW10604

SEQ ID NO: 198488 - RNA, 1698 nt, Artificial Sequence; identical to SEQ ID NO: 195688
  derived and/or modified CDS sequence (opt5) from hemagglutinin__InfluenzaA__ADW10615

SEQ ID NO: 198489 - RNA, 1698 nt, Artificial Sequence
  derived and/or modified CDS sequence (opt5) from hemagglutinin__InfluenzaA__ADW10626
augaaggugaaacugcucguccugcuuugcaccuucacagccacguacgcugacaccaucuguauuggcuaucacgccaacaauagcacagauaccguugacacagugcuggagaagaacgugaccgucacacauuccgugaaucuccuggaaaacucucacaaugggaaacuuugccugcucaagggaaucgcgccccugcagcugggcaacuguagcguugcuggguggauucucggaaauccugagugcgaacugcuuaucuccaaagagucuuggagcuacauuguggaaaagccgaaccccgagaauggcaccuguuauccugggcauuuugccgauuacgaggaacugagagagcaacucuccucugucagcuccuucgaacgguuugagaucuuccccaaggagagcucuuggccuaaccacacggugaccggaguuuccgccagcugcucucauaauggcgaauccagcuuuuaucgcaaccugcuuuggcugacagugaaaaauggccucuaccccaaccugucuaaguccuaugcuaauaacaaagagaaggaaguccuggugcucuggggagugcaccacccuccgagcaucgucgaccagaaaacccuguacagaacagagaacgccuacguuuccguggugucuagccauuauucccggaaguucacccccgaaauugcuaagcgcccuaaagucagagaucaggaggggcggaucaauuacuauuggacgcuucuggagcccggcgacacaauuaucuuugaagccaacgggaaucucauugcgccucgcuacgccuucgcucugagcagaggauuuggcucugggaucauuaacuccaaugcccccauggauaagugugacgcuaaaugccagaccccgcggggagccaucaacagcucucuuccuuuccaaaaugugcaccccguuacaaucggcgaguguccuaaguaugugcgcagcgcgaaacugagaauggucaccggccuccggaacauucccuccauccagucucgcgggcuguuuggagccauugcuggcuucaucgaagggggauggaccggcaugguggaugggugguacggauaucaucaccagaaugagcagggcagcggcuacgccgcugaccaaaaguccacacagaacgccauuaaugggaucacgaacaaaguuaauagcgugaucgaaaagaugaacacccaguuuacagccgucggaaaggaguucaauaaacuggagagacggauggaaaaccucaacaagaaaguggaugacggcuucauugauaucuggaccuacaaugcugagcugcuuguccugcucgaaaacgagcgcacacuggacuuucacgacucuaaugugaagaaccuuuaugaaaaaguuaagucccagcugaagaauaacgcgaaagagauugggaauggaugcuucgaguuuuaccauaaguguaacgaugaaugcauggagagcgugaaaaauggcaccuaugacuaccccaaguauucugaagaguccaaacucaacagagagaagaucgauggggucaagcuggaaagcaugggcguguaccaaauucuggccaucuauuccacgguugcuucuagccucgugcugcuugucucccugggagccaucucuuucuggaugugcagcaauggcucccuccagugucggauuugcaucuga

SEQ ID NO: 198490 - RNA, 1698 nt, Artificial Sequence
  derived and/or modified CDS sequence (opt5) from hemagglutinin__InfluenzaA__ADW10721
augaaggugaaacugcucguccugcuuugcaccuucacagccacguacgcugacaccaucuguauuggcuaucacgccaacaauagcacagauaccguugacacagugcuggagaagaacgugaccgucacacauuccgugaaucuccuggaaaacucucacaaugggaaacuuugccugcucaagggaaucgcgccccugcagcugggcaacuguagcguugcuggguggauucucggaaauccugagugcgaacugcuuaucuccaaagagucuuggagcuacauuguggaaaagccgaaccccgagaauggcaccuguuauccugggcauuuugccgauuacgaggaacugagagagcaacucuccucugucagcuccuucaagcgguuugaaaucuuccccaaagagagcucuuggccuaaccacacggugaccggaguuuccgccagcugcucucauaauggcgaguccagcuuuuaucgcaaccugcuuuggcugacagugaagaauggccucuaccccaaccugucuaaauccuaugcuaauaacaaggaaaaagagguccuggugcucuggggagugcaccacccuccgaacaucgucgaccagagaacccuguaccauacagaaaaugccuacguuagcgugguguccucucacuauagccggaaguucacccccgagauugcuaagcgcccuaaagucagaaaccaggaagggcggaucaauuacuauuggacgcuucuggagcccggcgauacaauuaucuuugaggccaacgggaaucucauugcgccucgcuacgccuucgcucuguccagaggauuuggcagcgggaucauuaacucuaaugcccccauggacaagugugaugcuaaaugccagaccccgcggggagccaucaacuccagccuuccuuuccaaaaugugcaucccguuacaaucggcgaauguccuaaguaugugcgcucugcgaaacugagaauggucaccggccuccggaacauucccagcauccagucccgcgggcuguuuggagccauugcuggcuucaucgaagggggauggaccggcaugguggacgggugguacggauaucaccaccagaaugaacagggcucuggcuacgccgcugaucaaaagagcacacagaacgccauuaaugggaucacgaacaaaguuaauuccgugaucgagaagaugaacacccaguuuacagccgucggaaaggaguucaacaaacuggagagacggauggagaaucucaacaagaaaguggacgauggcuucauugacaucuggaccuacaaugcugaacugcuuguccugcucgagaacgaacgcacacuggauuuucaugacagcaaugugaagaaccuuuaugagaaaguuaagucucagcugaagaauaacgcgaaagaaauugggaauggaugcuucgaguuuuaccacaaguguaacgacgagugcauggaauccgugaaaaauggcaccuaugauuaccccaaguauagcgaggaaucuaaacucaacagagagaagaucgacggggucaagcuggaguccaugggcguguaccaaauucuggccaucuauagcacgguugcuuccucucucgugcugcuugucagccugggagccaucuccuucuggaugugcucuaauggcagccuccagugucggauuugcaucuga

SEQ ID NO: 198491 - RNA, 1698 nt, Artificial Sequence
  derived and/or modified CDS sequence (opt5) from hemagglutinin__InfluenzaA__ADW10743
augaaggugaaacugcucguccugcuuugcaccuucacagccacguacgcugacaccaucuguauuggcuaucacgccaacaauagcacagauaccguugacacagugcuggagaagaacgugaccgucacacauuccgugaaucuccuggaaaacucucacaaugggaaacuuugccugcucaagggaaucgcgccccugcagcugggcaacuguagcguugcuggguggauucucggaaauccugagugcgaacugcuuaucuccaaagagucuuggagcuacauuguggaaaagccgaaccccgagaauggcaccuguuauccugggcauuuugccgauuacgaggaacugagagagcaacucuccucugucagcuccuucgaacgguuugagaucuuccccaaggagagcucuuggccuaaccacacggugaccggaguuuccgccagcugcucucauaauggcgaauccagcuuuuaucgcaaccugcuuuggcugacagugaaaaauggccucuaccccaaccugucuaaguccuaugcuaauaacaaagagaaggaaguccuggugcucuggggagugcaccacccuccgaacaucgucgaccagaaaacccuguacagaacagagaauaccuacguuagcgugguguccucucauuauagccggaaguucacgcccgaaauugccaagcgcccuaaaaucagagaucaggaggggcggauuaacuacuauuggacacuucuggagcccggcgacaccaucauuuuugaagcuaaugggaaccucaucgccccucgcuacgcguucgcccuguccagaggauuuggcagcgggauuaucaauucuaacgcucccauggauaagugugacgccaaaugccagacaccgcggggagcuaucaauuccagccuuccuuuccaaaacguccaccccgugaccauuggcgaguguccuaaguauguucgcucugugaaacugagaauggucaccggccuccggaauauccccagcauucagucccgcgggcuguuuggagccaucgcgggcuucauugaagggggauggacaggcaugguggaugggugguacggauaucaucaccagaacgagcagggcucuggcuacgccgcugaccaaaagagcacgcagaaugccaucaacgggaucaccaauaaaguuaacuccgugauugaaaagaugaauacacaguuuaccgcugucggaaaggaguucaacaaacuggagagacggauggaaaaccucaauaagaaaguggaugacggcuucaucgauauuuggacauacaacgccgagcugcuuguccugcucgaaaaugagcgcacccuggacuuucacgacagcaacgugaagaaucuuuaugaaaaaguuaagucucagcugaagaacaaugccaaagagaucgggaacggaugcuucgaguuuuaccauaaguguaaugaugaaugcauggaguccgugaaaaacggcacguaugacuaccccaaguauagcgaagagucuaaacucaauagagagaagauugauggggucaagcuggaauccaugggcguguaccaaauccuggcuaucuauagcacaguugcguccucucucgugcugcuugucagccugggagccauuuccuucuggaugugcucuaacggcagccuccagugucggaucugcauuuga

SEQ ID NO: 198492 - RNA, 1698 nt, Artificial Sequence
  derived and/or modified CDS sequence (opt5) from hemagglutinin__InfluenzaA__ADW10754
augaaggugaaacugcucguccugcuuugcaccuucacagccacguacgcugacaccaucuguauuggcuaucacgccaacaauagcacagauaccguugacacagugcuggagaagaacgugaccgucacacauuccgugaaucuccuggaaaacucucacaaugggaaacuuugccugcucaagggaaucgcgccccugcagcugggcaacuguagcguugcuggguggauucucggaaauccugagugcgaacugcuuaucuccaaagagucuuggagcuacauuguggaaaagccgaaccccgagaauggcaccuguuauccugggcauuuugccgauuacgaggaacugagagagcaacucuccucugucagcuccuucgaacgguuugagaucuuccccaaggagagcucuuggccuaaccacacggugaccggaguuuccgccagcugcucucauaauggcgaaaacuccuuuuaucgcaaucugcuuuggcugacaggcaaaaacgggcucuaccccaaucugagcaagucuuaugcuaacaacaaagagaaggaagugcugguccucuggggagugcaccacccuccgaauaucgccgaccagaaaacccuguaccauacagagaacgcuuacguguccgucguuagcucccacuauucuagaaaguucacccccgaaauugccaagcggccuaaagugcgcgaucaggagggcagaaucaauuacuauuggacgcuucuggagcccggggacacaauuaucuuugaagcgaacggaaaucucauugccccucgguacgcuuucgcccugagccgcggcuuuggguccggaaucauuaacagcaaugcucccauggauaagugugacgccaaaugccagaccccgcaaggcgcgaucaacucuucccuuccuuuccagaaugugcaucccgucacaaucggcgaguguccuaaguaugugagaagcgccaaacugcggaugguuaccgggcuccgcaacauucccucugugcagagcagaggacuguuuggcgcuaucgccggguucauugaaggaggcuggaccgggauggucgauggaugguacggcuaucaccaccagaaugagcaaggcuccggguacgcugccgaccagaagucuacacagaacgccaucaauggaauuacgaacaaagugaauagcguuaucgaaaagaugaacacccaguuuacagcugugggcaaggaguucaacaaacuggagcggcgcauggaaaaucucaacaagaaagucgaugacggguucaucgauauuuggaccuacaaugcggagcugcuugugcugcucgaaaacgagagaacacuggacuuucaugacuccaaugucaagaaccuuuaugaaaaaguuaagagccaacugaagaauaacgccaaagagaucggaaauggcugcuucgaguuuuaccacaaguguaacgaugaaugcauggagucugugaaaaaugggaccuaugacuaccccaaguauuccgaagagagcaaacucaaccgggagaagauugauggcgugaagcuggaaucuaugggagucuaccagauccuggcuauuuauuccacgguggccagcucccucguucugcuugugucucugggcgccaucagcuucuggaugugcuccaaugggucucuccagugucgcaucugcauuuga

SEQ ID NO: 198493 - RNA, 1698 nt, Artificial Sequence
  derived and/or modified CDS sequence (opt5) from hemagglutinin__InfluenzaA__ADW10765
augaaggugaaacugcucguccugcuuugcaccuucacagccacguacgcugacaccaucuguauuggcuaucacgccaacaauagcacagauaccguugacacagugcuggagaagaacgugaccgucacacauuccgugaaucuccuggaaaacucucacaaugggaaacuuugccugcucaagggaaucgcgccccugcagcugggcaacuguagcguugcuggguggauucucggaaauccugagugcgaacugcuuaucuccaaagagucuuggagcuacauuguggaaaagccgaaccccgagaauggcaccuguuauccugggcauuuugccgauuacgaggaacugagagagcaacucuccucugucagcuccuucgaacgguuugagaucuuccccaaggagagcucuuggccuaaccacacggugaccggaguuuccgccagcugcucucauaauggcgaauccagcuuuuaucgcaaccugcuuuggcugacagugaaaaauggccucuaccccaaccugucuaaguccuaugcuaauaacaaagagaaggaaguccuggugcucuggggagugcaccacccuccgaacaucgucgaccagaaaacccuguaccauacagagaaugccuacguuagcgugguguccucucacuauagcagaaaguucacccccgaaauugcuaagcggccuaaaguccgcaaccaggaggggagaaucaauuacuauuggacgcuucuggagcccggcgauacaauuaucuuugaagccaacgggaaucucauugcgccucgguacgccuucgcucugucccgcggauuuggcagcgggaucauuaacucuaaugcccccauggacaagugugaugcuaaaugccagaccccgagaggagccaucaacuccagccuuccuuuccaaaaugugcaucccguuacaaucggcgaguguccuaaguaugugcggucugcgaaacugcgcauggucaccggccucagaaacauucccagcauccagucccgggggcuguuuggagccauugcuggcuucaucgaagggggauggaccggcaugguggacgggugguacggauaucaccaccagaaugagcagggcucuggcuacgccgcugaucaaaagagcacacagaacgccauuaaugggaucacgaacaaaguuaauuccgugaucgaaaagaugaacacccaguuuacagccgucggaaaggaguucaacaaacuggagcgcagaauggaaaaucucaacaagaaaguggacgauggcuucauugacaucuggaccuacaaugcugagcugcuuguccugcucgaaaacgagcggacacuggauuuucaugacagcaaugugaagaaccuuuaugaaaaaguuaagucucagcugaagaauaacgcgaaagagauugggaauggaugcuucgaguuuuaccacaaguguaacgacgaaugcauggaguccgugaaaaauggcaccuaugauuaccccaaguauagcgaagagucuaaacucaaccgcgagaagaucgacggggucaagcuggaauccaugggcguguaccaaauucuggccaucuauagcacgguugcuuccucucucgugcugcuugucagccugggagccaucuccuucuggaugugcucuaauggcagccuccaguguagaauuugcaucuga

SEQ ID NO: 198494 - RNA, 1698 nt, Artificial Sequence
  derived and/or modified CDS sequence (opt5) from hemagglutinin__InfluenzaA__ADW10776
augaaggugaaacugcucguccugcuuugcaccuucacagccacguacgcugacaccaucuguauuggcuaucacgccaacaauagcacagauaccguugacacagugcuggagaagaacgugaccgucacacauuccgugaaucuccuggaaaacucucacaaugggaaacuuugccugcucaagggaaucgcgccccugcagcugggcaacuguagcguugcuggguggauucucggaaauccugagugcgaacugcuuaucuccaaagagucuuggagcuacauuguggaaaagccgaaccccgagaauggcaccuguuauccugggcauuuugccgauuacgaggaacugagagagcaacucuccucugucagcuccuucgaacgguuugagaucuuccccaaggagagcucuuggccuaaccacacggugaccggaguuuccgccagcugcucucauaauggcgaauccagcuuuuaucgcaaccugcuuuggcugacaggcaaaaaugggcucuaccccaaccugucuaaguccuaugcuaaugacaaagagaaggaagugcugguccucuggggagugcaccacccuccgaacaucguggaucagaaaacccuguacagaacagagaacgccuacgucagcguuguguccucucauuauagccggaaguucacccccgaaauugcuaagcgcccuaaagugagagaccaggagggccggaucaauuacuauuggacgcuucuggagcccggggauacaauuaucuuugaagccaacggaaaucucauugcgccucgcuacgccuucgcucuguccagaggcuuugggagcggaaucauuaacucuaaugcccccauggacaagugugaugcuaaaugccagaccccgcaaggcgccaucaacuccagccuuccuuuccagaauguccaccccgugacaaucggcgaguguccuaaguauguucggucugcgaaacugcgcauggugaccgggcucagaaacauucccagcauccagucccggggacuguuuggcgccauugcuggguucaucgaaggaggcuggaccgggauggucgacggaugguacggcuaucaucaccagaaugagcaaggcucuggguacgccgcugaucagaaguccacacagaacgccauuaauggaaucacgaacaaagugaauagcguuaucgaaaagaugaacacccaguuuacagccgugggcaaggaguucaauaaacuggagcgcagaauggaaaaccucaacaagaaagucgacgauggguucauugacaucuggaccuacaaugcugagcugcuugugcugcucgaaaacgagcggacacuggacuuucacgauagcaaugucaagaaccuuuaugaaaaagugaagucucaacugaagaauaacgcgaaagagauuggaaauggcugcuucgaguuuuaccauaaguguaacgacgaaugcauggaguccguuaaaaaugggaccuaugauuaccccaaguauagcgaagagucuaaacucaaccgcgagaagaucgacggcgugaagcuggaauccaugggagucuaccagauucuggccaucuauagcacgguggcuuccucucucguucugcuugugagccugggcgccaucuccuucuggaugugcucuaaugggagccuccaguguagaauuugcaucuga

SEQ ID NO: 198495 - RNA, 1698 nt, Artificial Sequence
  derived and/or modified CDS sequence (opt5) from hemagglutinin__InfluenzaA__ADW10787
augaaggugaaaauccugguccuccugugcaccuucacagccacguacgcugacaccauuuguaucggcuaucacgccaacaauagcacagauaccguugacacagugcuugagaagaacgugaccgucacacauuccgugaaucugcucgaaaacucucacaaugggaaacugugccuucugaagggaauugcgccccuccagcugggcaacuguagcguugcuggguggauccugggaaauccugagugcgaacuccugauuuccaaagagucuuggagcuacaucguggaaaagccgaaccccgagaauggcaccuguuauccugggcauuuugccgauuacgaggaacuuagagagcaacuguccucugucagcuccuucgaacgguuugagaucuuccccaaggagagcucuuggccuaaccacacggugaccggaguuuccgccagcugcucucauaauggcgaauccagcuuuuaucgcaaccuccuguggcuuacagugaaaaauggccuguaccccaaccucucuaaguccuaugcuaauaacaaagagaaggaaguccuggugcuguggggagugcaccacccuccgaacauugucgaccagaaaacccucuacagaacagagaaugccuacguuagcgugguguccucucauuauagccggaaguucacccccgaaaucgcuaagcgcccuaaagucagagaucaggaggggcggauuaacuacuauuggacgcugcuugagcccggcgacacaaucauuuuugaagccaaugggaaccugaucgcgccucgcuacgccuucgcucucuccagaggauuuggcagcgggauuaucaauucuaacgcccccauggauaagugugacgcuaaaugccagaccccgcggggagccaucaauuccagccugccuuuccaaaacgugcaccccguuacaauuggcgaguguccuaaguaugugcgcucugcgaaacuuagaauggucaccggccugcggaauauccccagcauucagucccgcgggcucuuuggagccaucgcuggcuucauugaagggggauggaccggcaugguggaugggugguacggauaucaucaccagaacgagcagggcucuggcuacgccgcugaccaaaagagcacacagaaugccaucaacgggaucacgaauaaaguuaacuccgugauugaaaagaugaauacccaguuuacagccgucggaaaggaguucaacaaacuggagagacggauggaaaaccugaauaagaaaguggaugacggcuucaucgauauuuggaccuacaacgcugagcuccugguccuucuggaaaaugagcgcacacucgacuuucacgacagcaacgugaagaaucuguaugaaaaaguuaagucucagcuuaagaacaaugcgaaagagaucgggaacggaugcuucgaguuuuaccauaaguguaaugaugaaugcauggaguccgugaaaaacggcaccuaugacuaccccaaguauagcgaagagucuaaacugaauagagagaagauugauggggucaagcucgaauccaugggcguguaccaaauccuggccaucuauagcacgguugcuuccucucuggugcuccuggucagccuuggagccauuuccuucuggaugugcucuaacggcagccugcagugucggaucugcauuuga

SEQ ID NO: 198496 - RNA, 1698 nt, Artificial Sequence
  derived and/or modified CDS sequence (opt5) from hemagglutinin__InfluenzaA__ADW10798
augaaggugaaacugcucguccugcuuugcaccuucacagccacguacgcugacaccaucuguauuggcuaucacgccaacaauagcacagauaccguugacacagugcuggagaagaacgugaccgucacacauuccgugaaucuccuggaaaacucucacaaugggaaacuuugccugcucaagggaaucgcgccccugcagcugggcaacuguagcguugcuggguggauucucggaaauccugagugcgaacugcuuaucuccaaagagucuuggagcuacauuguggaaaagccgaaccccgagaauggcaccuguuauccugggcauuuugccgauuacgaggaacugagagagcaacucuccucugucagcuccuucgaacgguuugagaucuuccccaaggagagcucuuggccuaaccacacggugaccggaguuuccgccagcugcucucauaauggcgaauccagcuuuuaucgcaaccugcuuuggcugacaggcaaaaaugggcucuaccccaaccugucuaaguccuaugcuaauaacaaagagaaggaagugcugguccucuggggagugcaccacccuccgaacaucguggaccagaaaacccuguacagaacagagaaugccuacgucagcguuguguccucucauuauagccggaaguucacccccgaaauugcuaagcgcccuaaagugagagaucaggagggccggaucaacuacuauuggacgcuucuggagcccggggacacaauuaucuuugaagccaauggaaaccucauugcgccucgcuacgccuucgcucuguccagaggcuuugggagcggaaucauuaauucuaacgcccccaugggcaagugugaugcuaaaugccagaccccgcaaggcgccaucaauuccagccuuccuuuccagaacguccaccccgugacaaucggggaguguccuaaguauguucggucugcgaaacugcgcauggugaccggacucagaaauauucccagcauccagucccggggccuguuuggggccauugcuggauucaucgaaggcggguggaccggaauggucgacggcugguacggcuaucaucaccagaacgagcaagggucuggauacgccgcugaucaaaagagcacacagaaugccauuaacggcaucacgaauaaagugaacuccguuaucgaaaagaugaauacccaguuuacagccguggggaaggaguucaacaaacuggagcgcagagucgaaaaccucaauaagaaaguggacgauggauucauugacaucuggaccuacaacgcugagcugcuuguccugcucgaaaaugagcggacacuggauuuucacgacagcaacgugaagaaucuuuaugaaaaaguuaagucucagcugaagaacaaugcgaaagagauuggcaacgggugcuucgaguuuuaccauaaguguaaugacgaaugcauggaguccgugaaaaacggcaccuaugauuaccccaaguauagcgaagagucuaaacucaaucgcgagaagaucgacggagucaagcuggaauccaugggcguguaccagauucuggccaucuauagcacgguugcuuccucucucgugcugcuugucagccugggggccaucuccuucuggaugugcucuaacggaagccuccaguguagaauuugcaucuga

SEQ ID NO: 198497 - RNA, 1698 nt, Artificial Sequence; identical to SEQ ID NO: 198493
  derived and/or modified CDS sequence (opt5) from hemagglutinin__InfluenzaA__ADW10809

SEQ ID NO: 198498 - RNA, 1698 nt, Artificial Sequence; identical to SEQ ID NO: 195688
  derived and/or modified CDS sequence (opt5) from hemagglutinin__InfluenzaA__ADW10820

SEQ ID NO: 198499 - RNA, 1698 nt, Artificial Sequence; identical to SEQ ID NO: 195203
  derived and/or modified CDS sequence (opt5) from hemagglutinin__InfluenzaA__ADW10831

SEQ ID NO: 198500 - RNA, 1698 nt, Artificial Sequence
  derived and/or modified CDS sequence (opt5) from hemagglutinin__InfluenzaA__ADW10842
augaaggugaaacugcucguccugcuuugcaccuucacagccacguacgcugacaccaucuguauuggcuaucacgccaacaauagcacagauaccguugacacagugcuggagaagaacgugaccgucacacauuccgugaaucuccuggaaaacucucacaaugggaaacuuugccugcucaagggaaucgcgccccugcagcugggcaacuguagcguugcuggguggauucucggaaauccugagugcgaacugcuuaucuccaaagagucuuggagcuacauuguggaaaagccgaaccccgagaauggcaccuguuauccugggcauuuugccgauuacgaggaacugagagagcaacucuccucugucagcuccuucgaacgguuugagaucuuccccaaggagagcucuuggccuaaccacacggugaccggaguuuccgccagcugcucucauaauggcgaauccagcuuuuaucgcaaccugcuuuggcugacagugaaaaauggccucuaccccaaccugucuaaguccuaugcuaauaacaaagagaaggaaguccuggugcucuggggagugcaccacccuccgaacaucgucgaccagaaaacccuguacagaacagagaaugccuacguuagcgugguguccucucauuauagccggaaguucgcucccgaaauugccaagcgcccuaaagucagagaucaggaggggcggaucaacuacuauuggacccuucuggagcccggcgacacgauuaucuuugaagcgaaugggaaccucauugccccucgcuacgcuuucgcccuguccagaggauuuggcagcgggaucauuaauucuaacgcucccauggauaagugugacgccaaaugccagacaccgcggggagcgaucaauuccagccuuccuuuccaaaacgugcaccccguuaccaucggcgaguguccuaaguaugugcgcucugccaaacugagaauggucacaggccuccggaauauucccagcauccagucccgcgggcuguuuggagcuauugccggcuucaucgaagggggauggaccggcaugguggaugggugguacggauaucaucaccagaacgagcagggcucuggcuacgcugccgaccaaaagagcacccagaaugccauuaacgggaucacaaauaaaguuaacuccgugaucgaaaagaugaauacgcaguuuaccgcugucggaaaggaguucaacaaacuggagagacggauggaaaaccucaauaagaaaguggaugacggcuucauugauaucuggacauacaacgcggagcugcuuguccugcucgaaaaugagcgcacccuggacuuucacgacagcaacgugaagaaucuuuaugaaaaaguuaagucucagcugaagaacaaugccaaagagauugggaacggaugcuucgaguuuuaccauaaguguaaugaugaaugcauggaguccgugaaaaacggcacauaugacuaccccaaguauagcgaagagucuaaacucaauagagagaagaucgauggggucaagcuggaauccaugggcguguaccaaauucuggcuaucuauagcaccguugccuccucucucgugcugcuugucagccugggagccaucuccuucuggaugugcucuaacggcagccuccagugucggauuugcaucuga

SEQ ID NO: 198501 - RNA, 1698 nt, Artificial Sequence; identical to SEQ ID NO: 198044
  derived and/or modified CDS sequence (opt5) from hemagglutinin__InfluenzaA__ADW10853

SEQ ID NO: 198502 - RNA, 1698 nt, Artificial Sequence; identical to SEQ ID NO: 198493
  derived and/or modified CDS sequence (opt5) from hemagglutinin__InfluenzaA__ADW10864

SEQ ID NO: 198503 - RNA, 1698 nt, Artificial Sequence; identical to SEQ ID NO: 198493
  derived and/or modified CDS sequence (opt5) from hemagglutinin__InfluenzaA__ADW10875

SEQ ID NO: 198504 - RNA, 1698 nt, Artificial Sequence; identical to SEQ ID NO: 195688
  derived and/or modified CDS sequence (opt5) from hemagglutinin__InfluenzaA__ADW10886

SEQ ID NO: 198505 - RNA, 1698 nt, Artificial Sequence
  derived and/or modified CDS sequence (opt5) from hemagglutinin__InfluenzaA__ADW10897
augaaggugaaacugcucguccugcuuugcaccuucacagccacguacgcugacaccaucuguauuggcuaucacgccaacaauagcacagauaccguugacacagugcuggagaagaacgugaccgucacacauuccgugaaucuccuggaaaacucucacaaugggaaacuuugccugcucaagggaaucgcgccccugcagcugggcaacuguagcguugcuggguggauucucggaaauccugagugcgaacugcuuaucuccaaagagucuuggagcuacauuguggaaaagccgaaccccgagaauggcaccuguuauccugggcauuuugccgauuacgaggaacugagagagcaacucuccucugucagcuccuucgaacgguuugagaucuuccccaaggagagcucuuggccuaaccacacggugaccggaguuuccgccagcugcucucauaauggcgaauccagcuuuuaucgcaaccugcuuuggcugacaggcaaaaaugggcucuaccccaaccugucuaaguccuaugcuaauaacaaagagaaggaagugcugguccucuggggagugcaccacccuccgagcaucuccgaccagaaaacccuguaccauacagagaacgccuacgugucugucguuagcucccacuauagcagaaaguucacccccgaaauugcuaagcggccuaaagugcgcgaucaggagggcagaaucaauuacuauuggacgcuucuggagcccggggacacaauuaucuuugaagccaacggaaaucucauugcgccucgguacgccuucgcucugucucgcggcuuuggguccggaaucauuaacagcaaugcccccauggauaagugugacaccaaaugccagacaccgcaaggcgcuaucaacucuagccuuccuuuccagaaugugcaucccgucaccaucggcgaguguccuaaguaugugagauccgccaaacugcggaugguuaccgggcuccgcaacauucccucuauccagagcagaggacuguuuggcgcgauugccggguucaucgaaggaggcuggacagggaugguggauggaugguacggcuaucaccaccagaaugagcaaggcuccggguacgcugccgaccaaaagagcacgcagaacgcuauuaauggaaucaccaacaaagucaauucugugaucgaaaagaugaacacacaguuuaccgccguuggcaaggaguucaauaaacuggagcggcgcauggaaaaccucaacaagaaaguggaugacggguucauugauaucuggacauacaaugccgagcugcuuguccugcucgaaaacgagagaacccuggacuuucaugacuccaaugugaagaaccuuuaugaaaaagucaagagccagcugaagaauaacgcuaaagaggugggaaauggcugcuucgaguuuuaccacaaguguaacgaugaaugcauggagucuguuaaaaaugggacguaugacuaccccaaguauuccgaagagagcaaacucaaccgggagaagauugauggcgugaagcuggaauccaugggagucuaccagauccuggcgauuuauucuacaguggccagcucccucguucugcuugugucucugggcgcuaucagcuucuggaugugcuccaaugggagccuccagugucgcaucugcauuuga

SEQ ID NO: 198506 - RNA, 1701 nt, Artificial Sequence
  derived and/or modified CDS sequence (opt5) from hemagglutinin__InfluenzaA__ADW23115
augaagaccaucauugcccugagcuacauccucugccugguguucgcucagaaacuucccggcaacggaaauuccacagccacgcugugucucgggcaccaugcggucccuaacggcaccauuguuaagacaaucaccaaugaccaaauugaggugacaaacgcuaccgaacuggugcagucuagcuccacaggggagaucugcgauucuccgcaccagauccuugacggagaaaauuguacccugauugaugcccuccugggcgacccccagugcgauggguuucaaaacaaaaagugggaccuguucgucgagagaagcaaagccuauuccaauuguuacccuuaugaugugcccgacuacgcuucucuccggagccugguugccuccagcggaacgcuugaauuuaacaaugagucuuucaacuggaccggcgugacacagaauggcaccuccagcgcuugcauccgcagaucuaacaauuccuuuuucagccggcugaacuggcucacacauucuaaguuuaaguauccugcccugaaugucaccaugcccaacaacgagcaguucgauaaacuuuacauuuggggagugcaccauccugggacggacaaugaucagaucuuucuguaugcgcaagccuccggccgcauuacaguuagcaccaagagaucccagcagacagugaucccgaacauugggucucggccccgcgucagaaauaucccuagccggaucuccauuuacuggaccaucgugaaacccggagacauucuccugaucaacagcaccggcaaucugauugcuccucgcggguacuucaagaucagaucuggaaaauccagcaucaugcggucugaugcccccauuggcaaguguaacagcgaaugcaucacaccgaauggcuccauuccuaacgacaagcccuuucagaaugugaaccgcaucacguauggggcuuguccuagauacgucaaacaaaauacccucaagcuggccacaggaaugcggaacguucccgagaaacagacccgcggcauuuucggggcgaucgccggauuuaucgaaaauggcugggaggggaugguggacggaugguauggcuucagacaccagaacucugagggccgggggcaagcugccgaucuuaagagcacacaggcugccauugaccagaucaauggaaaacugaacagacucauuggcaagaccaacgaaaaauuccaccagaucgagaaggaauuuuccgagguggaagggcgcauucaagaucuggagaaguacgucgaggacacgaaaaucgaucuuuggagcuauaaugccgaacugcucguggcucuggagaaccagcauacaauugaccugaccgauucugaaaugaauaagcuguucgagaaaaccaagaaacagcugcgggaaaacgcggaggacaugggaaauggcugcuuuaagaucuaccacaagugugauaacgccugcaucggguccauuagaaauggcacauaugaccaugauguuuaccgcgacgaggcucuuaacaaucgguuccagaucaaaggaguggaacucaagagcggcuacaaagacuggauucucuggaucucuuuugccauuuccugcuuccugcuuugugucgcccugcucggguuuaucaugugggcuugccaaaagggaaacaucagauguaauauuugcaucuga

SEQ ID NO: 198507 - RNA, 1701 nt, Artificial Sequence
  derived and/or modified CDS sequence (opt5) from hemagglutinin__InfluenzaA__ADW54481
augaaggccauccuggugguccuccuguacaccuucgcuacagccaacgcggacacgcuuugcauuggcuaucacgcuaauaacagcaccgauacaguugacaccgugcuggagaaaaaugugacagucacccauuccgugaaccuccuggaagauaagcacaaugggaaacuuuguaagcugagaggaguugcuccccuccaucugggcaaaugcaacaucgccggguggauucugggaaauccugagugugaaucucucagcacagccuccucuuggagcuacaucguggagaccuccucuagcgacaacggcacgugcuauccgggggauuuuauugacuacgaagaacugcgggagcagcuuuccagcgucucuuccuucgaacgcuuugagaucuuccccaagaccagcucuuggccuaaucacgauuccaacaagggagugacagccgcuuguccccaugccggcgcgaaaucuuuuuauaagaaucugaucuggcucguuaaaaagggcaacagcuacccuaaacuguccaagagcuauauuaaugacaaggggaaagaagugcuuguccuguggggaauccaccaccccuccaccacagccgaucaacagucucucuaccagaacgcugacaccuacguguucgugggcacgagcagauauuccaagaaauuuaagccugagauugccauccggccgaaaguccgcgaucaggaggggagaaugaauuacuauuggacacugguugaacccggagacaagauuaccuucgaggcuacaggcaaccugguggugccucgguacgccuuugcgauggaacgcaacgccgggagcggaaucauuaucucugauacccccguccaugacugcaauaccacaugucaaacgccuaaaggcgcuaucaacaccucccuccccuuccagaauauucacccgaucacaauuggcaagugcccuaaguaugugaaaagcaccaagcugagacuugccacagggcugcggaacguucccucuauccagagccgcggacucuuuggcgcuauugccggguucaucgagggaggcuggaccgggaugguggacggaugguacggcuaucaucaccagaaugaacaaggcuccggguacgccgcugaucugaaaucuacgcagaacgcgaucgacaagauuacaaauaaagucaacagcgugaucgagaagaugaauacccaguuuaccgccguuggaaaggaguucaaccaccuugagaaaagaauugagaaucugaacaagaaaguggaugacggcuuccucgauaucuggacauacaaugcugaacugcugguccuccuggagaacgaacggacccuugacuaucaugauuccaaugugaagaaccuguacgagaaaguccgcaaccagcucaagaauaacgccaaggagauugggaauggauguuuugaguucuaucacaaaugcgacaacacauguauggaaagcgugaagaauggcacguacgauuauccuaaauacucugaagaggccaagcugaacagagaagagaucgacgggguuaaacuugaguccacccggaucuaucaaauucuggcuaucuacagcacaguggccucuucccucguccuggugguuagccugggcgcgauuuccuuuuggaugugcucuaauggaagccuccagugccgcaucuguauuuga

SEQ ID NO: 198508 - RNA, 1701 nt, Artificial Sequence
  derived and/or modified CDS sequence (opt5) from hemagglutinin__InfluenzaA__ADW54512
augaaggccauccuggugguccuccuguacaccuucgcuacagccaacgcggacacgcuuugcauuggcuaucacgcuaauaacagcaccgauacaguugacaccgugcuggagaaaaaugugacagucacccauuccgugaaccuccuggaagauaagcacaaugggaaacuuuguaagcugagaggaguugcuccccuccaucugggcaaaugcaacaucgccggguggauucugggaaauccugagugugaaucucucagcacagccuccucuuggagcuacaucguggagaccuccucuagcgacaacggcacgugcuauccgggggauuuuauugacuacgaagaacugcgggagcagcuuuccagcgucucuuccuucaagcgcuuugaaaucuuccccaagaccagcucuuggccuaaucacgauuccaacaaaggagugacaaccgccuguccccaugcuggcgccaagagcuuuuauaaaaaucugaucuggcucguuaagaaaggcaacucuuacccuaagcuguccaagagcuauauuaaugacaaagggaaggaggugcuuguccuguggggaauccaccaucccccuacauccgcggaucaacagucucucuaccagaacgccgacgcuuacguguucgugggcaccagcagauauuccaaaaaguuuaaaccggaaauugccauccggcccaagguccgcgaucaggaggggagaaugaauuacuauuggacgcugguugagccuggagacaaaauuacauucgaagcuaccggcaaccugguggugccccgguacgccuuugcgauggagcgcaacgccgggagcggaaucauuaucucugauacaccuguccacgacugcaauaccaccugucaaacacccaagggcgcuaucaacacgucccucccguuccagaauauucacccuaucaccauuggcaagugccccaaauaugugaaaagcacaaaacugagacuugccaccgggcugcggaacguuccuucuauccagagccgcggacucuuuggcgcuauugccggguucaucgaaggaggcuggacagggaugguggacggaugguacggcuaucaucaccagaaugagcaaggcuccggguacgccgcugaucugaagucuacccagaacgcgaucgacgaaauuacgaauaaagucaacagcgugaucgagaagaugaauacacaguuuaccgccguuggaaaggaguucaaccaccuugaaaagagaauugagaaucugaacaagaaaguggaugacggcuuccucgauaucuggaccuacaaugcugaacugcugguccuccuggagaacgaacggacacuugacuaucaugauuccaaugugaagaaccuguacgagaaaguccgcagccagcucaagaacaaugccaaggagauugggaacggauguuuugaguucuaucacaaaugcgacaauaccuguauggagucugugaagaacggcacauacgauuaucccaaauacuccgaagaggccaagcugaauagagaagagaucgacgggguuaaacuugagagcacgcggaucuaucaaauucuggcuaucuacucuaccguggccuccagccucguccuggugguuucccugggcgcgauuucuuuuuggaugugcagcaacggaucccuccagugccgcaucuguauuuga

SEQ ID NO: 198509 - RNA, 1701 nt, Artificial Sequence
  derived and/or modified CDS sequence (opt5) from hemagglutinin__InfluenzaA__ADW54527
augaaggccauccuggugguccuccuguacaccuucgcuacagccagcgcggacacgcuuugcauuggcuaucacgcuaacaauuccaccgauacaguugacaccgugcuggagaaaaacgugacagucacccauucugugaaucuccuggaagauaagcacaacgggaaacuuuguaagcugagaggaguugcuccccuccaucugggcaaaugcaauaucgccggguggauucugggaaacccugagugugaaagccucuccacagccucuagcugguccuacaucguggagaccucuagcuccgacaauggcacgugcuauccgggggauuuuauugacuacgaagaacugcgggagcagcuuagcucugucuccagcuucgaacgcuuugagaucuuccccaagaccucuuccuggccuaaccacgauagcaauaagggagugacaaccgccuguccccaugcuggcgccaaaucuuuuuauaagaaccugaucuggcucguuaaaaagggcaauuccuacccuaaacugagcaaguccuauauuaacgacaaggggaaagaagugcuuguccuguggggaauccaccaucccccuacaucugcggaucaacagagccucuaccagaaugccgacgcuuacguguucgugggcaccuccagauauagcaagaaauuuaagccggagauugccauccggcccaaaguccgcgaucaggaggggagaaugaacuacuauuggacgcugguugaaccuggagacaagauuacauucgaggcuaccggcaaucugguggugccccgguacgccuuugcgauggaacgcaacgccgggucuggaaucauuaucuccgauacaccuguccacgacugcaacaccaccugucaaacacccaauggcgcuaucaacacgagccucccguuccagaauauucacccuaucaccauuggcaaaugccccaaguaugugaagucuacaaaacugagacuugccaccgggcugcggaacguuccuagcauccagucccgcggacucuuuggcgcuauugccggguucaucgagggaggcuggacagggaugguggacggaugguacggcuaucaucaccagaaugaacaaggcucuggguacgccgcugaucuuaagagcacccagaacgcgaucgacgagauuacgaauaaagucaacuccgugaucgagaagaugaauacacaguuuaccgccguuggaaaagaguucaaccaccuggagaagagaauugaaaaucugaacaagaaaguggaugacggcuuccucgauaucuggaccuacaaugcugagcugcugguccuccuggaaaacgagcggacacuugacuaucaugauagcaaugugaagaaccuguacgagaaaguccgcucucagcucaagaacaaugccaaagaaauugggaacggauguuuugaguucuaucacaagugcgacaauaccuguauggaauccgugaagaacggcacauacgauuaucccaaauacagcgaggaagccaagcugaauagagaggagaucgacgggguuaaacuugaaucuacgcggaucuaucaaauucuggcuaucuacuccaccguggccagcucccucguccuggugguuucucugggcgcgauuagcuuuuggaugugcuccaacggaucucuccagugccgcaucuguauuuga

SEQ ID NO: 198510 - RNA, 1701 nt, Artificial Sequence; identical to SEQ ID NO: 198507
  derived and/or modified CDS sequence (opt5) from hemagglutinin__InfluenzaA__ADW65825

SEQ ID NO: 198511 - RNA, 1701 nt, Artificial Sequence
  derived and/or modified CDS sequence (opt5) from hemagglutinin__InfluenzaA__ADW82135
augaagaccaucauugcccugagcuacauccucugccugguguucgcucagaaacuucccggcaacgacaauuccacagccacgcugugucucgggcaccaugcggucccuaacggaaccguugugaagacaauuaccaaugaucaaaucgaggugacaaacgcuaccgaacugguccagucuagcuccacaggcgagauuugcgacucuccgcaccagauccuugaugggaaaaauuguacccugaucgacgcccuccugggagauccccagugcgacggcuuucaaaacaagaaaugggaucuguucguggaaagaagcaaggccuauuccaauuguuacccuuaugacguucccgauuacgcuucucuccggagccugguggccuccagcgggacgcuugaguuuaacaaugaaucuuucaacuggaccggagucacacagaauggcaccuccagcgcuugcauucgcagaucuaagaacuccuuuuucagccggcugaauuggcucacacaucugaacuuuaaauauaccgcccuuaaugugacgaugccuaacaacgagcaguucgacaagcuguacaucuggggcguucaccaucccgggacagauaaagaccagauuuuucucuaugcgcaagccucuggacgcaucaccguguccacaaagagaagccagcagaccgucauuccuaauaucggcucccggccgcgcgugagaaacauucccucucggaucagcaucuacuggaccauugugaaaccuggggauauccugcugauuaauuccacaggaaaccucaucgcuccccgcggcuacuucaagauuagaagcgggaagucuuccaucaugcggagcgacgccccuaucggaaaauguaauucugagugcauuacgcccaacggcagcaucccgaaugacaagccuuuucagaacgucaaucgcauuaccuauggcgcuugucccagauacguuaaacaaaacacacugaaacuugccaccgggaugcggaaugugccugaaaaacagacacgcggaaucuucggcgcgauugccggguuuaucgagaacggaugggaaggcaugguggaugggugguauggauucagacaccaaaauuccgagggccggggccaggcugccgaccugaagucuacccaggcugccaucgaucagauuaacgggaaacucaauagacugaucggaaagacgaacgagaaguuccaccagauugaaaaagaguuuagcgaagucgagggccgcauccaagaccuugaaaaguacguggaggauacaaaaauugaccugugguccuauaacgccgagcuccugguugcucuggaaaaucagcauaccaucgaucucaccgacagcgagaugaacaagcuguucgaaaagacaaagaagcagcuucgggagaaugcggaagauauggggaacggaugcuuuaaaauuuaccacaagugugacaaugccugcaucggcucuaucagaaacgggaccuaugaucaugacguguaccgcgacgaggcucugaauaaccgguuccagauuaaaggcgucgagcucaaguccggauacaaagauuggauccuguggauuagcuuugccaucucuugcuuccuucuguguguggcccuccugggcuuuauuaugugggcuugccaaaaggggaauaucagauguaacaucugcauuuga

SEQ ID NO: 198512 - RNA, 1701 nt, Artificial Sequence; identical to SEQ ID NO: 198511
  derived and/or modified CDS sequence (opt5) from hemagglutinin__InfluenzaA__ADW82155

SEQ ID NO: 198513 - RNA, 1701 nt, Artificial Sequence; identical to SEQ ID NO: 198511
  derived and/or modified CDS sequence (opt5) from hemagglutinin__InfluenzaA__ADW82166

SEQ ID NO: 198514 - RNA, 1701 nt, Artificial Sequence; identical to SEQ ID NO: 198511
  derived and/or modified CDS sequence (opt5) from hemagglutinin__InfluenzaA__ADW82177

SEQ ID NO: 198515 - RNA, 1701 nt, Artificial Sequence; identical to SEQ ID NO: 194741
  derived and/or modified CDS sequence (opt5) from hemagglutinin__InfluenzaA__ADW82188

SEQ ID NO: 198516 - RNA, 1701 nt, Artificial Sequence; identical to SEQ ID NO: 194741
  derived and/or modified CDS sequence (opt5) from hemagglutinin__InfluenzaA__ADW82198

SEQ ID NO: 198517 - RNA, 1701 nt, Artificial Sequence; identical to SEQ ID NO: 194741
  derived and/or modified CDS sequence (opt5) from hemagglutinin__InfluenzaA__ADW82208

SEQ ID NO: 198518 - RNA, 1701 nt, Artificial Sequence; identical to SEQ ID NO: 194741
  derived and/or modified CDS sequence (opt5) from hemagglutinin__InfluenzaA__ADW82218

SEQ ID NO: 198519 - RNA, 1701 nt, Artificial Sequence; identical to SEQ ID NO: 194741
  derived and/or modified CDS sequence (opt5) from hemagglutinin__InfluenzaA__ADW82228

SEQ ID NO: 198520 - RNA, 1701 nt, Artificial Sequence; identical to SEQ ID NO: 194741
  derived and/or modified CDS sequence (opt5) from hemagglutinin__InfluenzaA__ADW82238

SEQ ID NO: 198521 - RNA, 1701 nt, Artificial Sequence; identical to SEQ ID NO: 194741
  derived and/or modified CDS sequence (opt5) from hemagglutinin__InfluenzaA__ADW82248

SEQ ID NO: 198522 - RNA, 1701 nt, Artificial Sequence; identical to SEQ ID NO: 194741
  derived and/or modified CDS sequence (opt5) from hemagglutinin__InfluenzaA__ADW82258

SEQ ID NO: 198523 - RNA, 1701 nt, Artificial Sequence
  derived and/or modified CDS sequence (opt5) from hemagglutinin__InfluenzaA__ADW82268
augaaggccauccuggugguccuccuguacaccuucgcuacagccaacgcggacacgcuuugcauuggcuaucacgcuaauaacagcaccgauacaguugacaccgugcuggagaagaaugugacagucacccauuccgugaaccuccuggaagauaagcacaaugggaaacuuuguaagcugagaggaguugcuccccuccaucugggcaaaugcaacaucgccggguggauucugggaaauccugagugugaaucucucagcacagccuccucuuggagcuacaucguggagaccuccucuagcgacaacggcacgugcuauccgggggauuuuauugacuacgaagaacugcgggagcagcuuuccagcgucucuuccuucgaacgcuuugagaucuuccccaagaccagcucuuggccuaaucacgauuccaacaagggagugacagccgcuuguccccaugccggcgcgaaaucuuuuuauaagaaucugaucuggcucguuaaaaagggcaacagcuacccuaaacuguccaagagcuauauuaaugacaaggggaaagaagugcuuguccuguggggaauccaccaccccuccaccucugccgaucaacagagccucuaccagaacgcugacgccuacguguucgugggcacauccagauauagcaagaaauuuaagccugagauugcuauccggccgaaaguccgcgaucaggaggggagaaugaauuacuauuggacccugguugaacccggagacaagauuacguucgaggccacaggcaaccugguggugccucgguacgcguuugccauggaacgcaacgcugggucuggaaucauuaucuccgauacccccguccaugacugcaauacaaccugucaaaccccuaaaggcgccaucaacacaagccuccccuuccagaauauucacccgaucacgauuggcaagugcccuaaguaugugaaaucuaccaagcugagacuugcuacagggcugcggaacguucccagcauccagucccgcggacucuuuggcgccauugccggguucaucgagggaggcuggaccgggaugguggacggaugguacggcuaucaucaccagaaugaacaaggcucuggguacgcugcggaucugaaaagcacacagaacgccaucgacgagauuaccaauaaggucaacuccgugaucgagaaaaugaauacgcaguuuacagcuguuggaaaggaguucaaccaccuugagaagagaauugaaaaucugaacaaaaagguggaugacggcuuccucgauaucuggaccuacaaugccgagcugcugguccuccuggaaaacgagcggacccuugacuaucaugauagcaaugugaaaaaccuguacgagaagguccgcucucagcucaaaaacaaugccaaggaaauugggaacggauguuuugaguucuaucacaagugcgacaauacauguauggaauccgugaaaaacggcaccuacgauuauccuaaguacagcgaggaagcuaaacugaauagagaggagaucgacgggguuaaacuugaaucuacacggauccaucaaauucuggccaucuauuccacgguggcgagcucccucguccuggugguuucucugggcgcuauuagcuuuuggaugugcuccaacggaucucuccagugccgcaucuguauuuga

SEQ ID NO: 198524 - RNA, 1701 nt, Artificial Sequence; identical to SEQ ID NO: 198511
  derived and/or modified CDS sequence (opt5) from hemagglutinin__InfluenzaA__ADW93760

SEQ ID NO: 198525 - RNA, 1701 nt, Artificial Sequence
  derived and/or modified CDS sequence (opt5) from hemagglutinin__InfluenzaA__ADW95319
augaaggccauccuggugguccuccuguacaccuucgcuacagccaacgcggacacgcuuugcauuggcuaucacgcuaauaacagcaccgauacaguugacaccgugcuggagaagaaugugacagucacccauuccgugaaccuccuggaagauaagcacaaugggaaacuuuguaagcugagaggaguugcuccccuccaucugggcaaaugcaacaucgccggguggauucugggaaauccugagugugaaucucucagcacagccuccucuuggagcuacaucguggagaccuccucuagcgacaacggcacgugcuauccgggggauuuuauugacuacgaagaacugcgggagcagcuuuccagcgucucuuccuucgaacgcuuugagaucuuccccaagaccagcucuuggccuaaucacgauuccaacaagggagugacagccgcuuguccccaugccggcgcgaaaggcuuuuauaagaaucugaucuggcucguuaaaaaggggaacagcuacccuaaacugucuaaguccuauauuaaugacaagggaaaagaagugcuuguccuguggggcauccaccaccccagcaccacagccgaucaacagucccucuaccagaacgcugacaccuacguguucguggggacgucuagauauagcaagaaauuuaagccugagauugccauccggccgaaaguccgcgaucaggagggaagaaugaauuacuauuggacacugguugaacccggcgacaagauuaccuucgaggcuacagggaaccugguggugccucgguacgccuuugcgauggaacgcaacgccggauccggcaucauuaucagcgauacccccguccaugacugcaauaccacaugucaaacgccuaaaggcgcuaucaacaccucucuccccuuccagaauauucacccgaucacaauugggaagugcccuaaguaugugaaauccaccaagcugagacuugccacaggacugcggaacguucccagcauccagucucgcggccucuuuggggcuauugccggauucaucgagggcggguggaccggaaugguggacggcugguacggcuaucaucaccagaaugaacaagggagcggauacgccgcugaucugaaauccacgcagaacgcgaucgacgagauuacaaauaaggucaacucugugaucgagaaaaugaauacccaguuuaccgccguuggcaaggaguucaaccaccuugagaagagaauugaaaaucugaacaaaaagguggaugacggguuccucgauaucuggacauacaaugcugagcugcugguccuccuggaaaacgagcggacccuugacuaucaugauagcaaugugaaaaaccuguacgagaagguccgcaaccagcucaaaaauaacgccaaggaaauuggaaauggcuguuuugaguucuaucacaagugcgacaacacauguauggaauccgugaaaaaugggacguacgauuauccuaaguacagcgaggaagccaaacugaacagagaggagaucgacggcguuaaacuugaaucuacccggaucuaucaaauucuggcuaucuacuccacaguggccagcucucucguccuggugguuucccugggagcgauuagcuuuuggaugugcuccaauggcucucuccagugccgcaucuguauuuga

SEQ ID NO: 198526 - RNA, 1701 nt, Artificial Sequence
  derived and/or modified CDS sequence (opt5) from hemagglutinin__InfluenzaA__ADW95332
augaaggccauccuggugguccuccuguacaccuucgcuacagccaacgcggacacgcuuugcauuggcuaucacgcuaauaacagcaccgauacaguugacaccgugcuggagaaaaaugugacagucacccauuccgugaaccuccuggaagauaagcacaaugggaaacuuuguaagcugagaggaguugcuccccuccaucugggcaaaugcaacaucgccggguggauucugggaaauccugagugugaaucucucagcacagccuccucuuggagcuacaucguggagaccuccucuagcgacaacggcacgugcuauccgggggauuuuauugacuacgaagaacugcgggagcagcuuuccagcgucucuuccuucgaacgcuuugagaucuuccccaagaccagcucuuggccuaaucacgauuccaacaagggagugacagccgcuuguccccaugccggcgcgaaaggcuuuuauaagaaucugaucuggcucguuaaaaaggggaacagcuacccuaaacugucuaaguccuauauuaaugacaagggaaaagaagugcuuguccuguggggcauccaccaccccagcaccacagccgaucaacagucccucuaccagaacgcugacaccuacguguucguggggacgucuagauauagcaagaaauuuaagccugagauugccauccggccgaaaguccgcgaucaggagggaagaaugaauuacuauuggacacugguugaacccggcgacaagauuaccuucgaggcuacagggaaccugguggugccucgguacgccuuugcgauggaacgcaacgccggauccggcaucauuaucagcgauacccccguccaugacugcaauaccacaugucaaacgccuaaaggcgcuaucaacaccucucuccccuuccagaauauucacccgaucacaauugggaagugcccuaaguaugugaaauccaccaagcugagacuugccacaggacugcggaacguucccagcauccagucucgcggccucuuuggggcuauugccggauucaucgagggcggguggaccggaaugguggacggcugguacggcuaucaucaccagaaugaacaagggagcggauacgccgcugaucugaaauccacgcagaacgcgaucgacaagauuacaaauaaagucaacucugugaucgagaagaugaauacccaguuuaccgccguuggcaaggaguucaaccaccuugagaaaagaauugagaaucugaacaagaaaguggaugacggguuccucgauaucuggacauacaaugcugaacugcugguccuccuggagaacgaacggacccuugacuaucaugauagcaaugugaagaaccuguacgagaaaguccgcaaccagcucaagaauaacgccaaggagauuggaaauggcuguuuugaguucuaucacaaaugcgacaacacauguauggaauccgugaagaaugggacguacgauuauccuaaauacagcgaagaggccaagcugaacagagaagagaucgacggcguuaaacuugagucuacccggaucuaucaaauucuggcuaucuacuccacaguggccagcucucucguccuggugguuucccugggagcgauuagcuuuuggaugugcuccaauggcucucuccagugccgcaucuguauuuga

SEQ ID NO: 198527 - RNA, 1701 nt, Artificial Sequence
  derived and/or modified CDS sequence (opt5) from hemagglutinin__InfluenzaA__ADX21078
augaagaccaucauugcccugagcuacauccucugccugguguucgcucagaaacuucccggcaacgacaauuccacagccacgcugugucucgggcaccaugcggucccuaacggaaccguugugaagacaauuaccaaugaucaaaucgaggugacaaacgcuaccgaacugguccagucuagcuccacaggcgagauuugcgacucuccgcaccagauccuugaugggaaaaauuguacccugaucgacgcccuccugggagauccccagugcgacggcuuucaaaacaagaaaugggaucuguucguggaaagaagcaaggccuauuccaauuguuacccuuaugacguucccgauuacgcuucucuccggagccugguggccuccagcgggacgcuugaguuuaacaaugaaucuuucaacuggaccggagucacacagaauggcaccuccagcgcuugcauucgcagaucuaagaacuccuuuuucagccggcugaauuggcucacacaucugaacuuuaaauauaccgcccuuaaugugacgaugccuaacaacgagcaguucgacaagcuguacaucuggggcguucaccaucccgggacagauaaagaccagauuuuucucuaugcgcaagccucuggacgcaucaccguguccacaaagagaagccagcagaccgucauuccuaauaucggcucccggccgcgcgugagaaacauucccucucggaucagcaucuacuggaccauugugaaaccuggggauauccugcugauuaauuccacaggaaaccucaucgcuccccgcggcuacuucaagauuagaagcgggaagucuuccaucaugcggagcgacgccccuaucggaaaauguaauucugagugcauuacgcccaacggcagcaucccgaaugacaagccuuuucagaacgucaaucgcauuaccuauggcgcuugucccagauacguuaaacaaaacacacugaaacuugccaccgggaugcggaaugugccugaaaaacagacacgcggaaucuucggcgcgauugccggguuuaucgagaacggaugggaaggcaugguggaugggugguauggauucagacaccaaaauuccgagggccggggccaggcugccgaccugaagucuacccaggcugccaucgaucagauuaacgggaaacucaauagacugauccgcaagacgaacgagaaguuccaccagauugaaaaagaguuuagcgaagucgagggacggauccaagaccuugaaaaguacguggaggauacaaaaauugaccugugguccuauaacgccgagcuccugguugcucuggaaaaucagcauaccaucgaucucaccgacagcgagaugaacaagcuguucgaaaagacaaagaagcagcuuagagagaaugcggaagauaugggcaacgggugcuuuaaaauuuaccacaagugugacaaugccugcaucggaucuauccgcaacggcaccuaugaucaugacguguaccgggacgaggcucugaauaacagauuccagauuaaaggggucgagcucaaguccggcuacaaagauuggauccuguggauuagcuuugccaucucuugcuuccuucuguguguggcccuccugggauuuauuaugugggcuugccaaaagggcaauauccgcuguaacaucugcauuuga

SEQ ID NO: 198528 - RNA, 1701 nt, Artificial Sequence; identical to SEQ ID NO: 198527
  derived and/or modified CDS sequence (opt5) from hemagglutinin__InfluenzaA__ADX21088

SEQ ID NO: 198529 - RNA, 1701 nt, Artificial Sequence
  derived and/or modified CDS sequence (opt5) from hemagglutinin__InfluenzaA__ADX21098
augaaggccauccuggugguccuccuguacaccuucgcuacagccaacgcggacacgcuuugcauuggcuaucacgcuaauaacagcaccgauacaguugacaccgugcuggagaagaaugugacagucacccauuccgugaaccuccuggaagauaagcacaaugggaaacuuuguaagcugagaggaguugcuccccuccaucugggcaaaugcaacaucgccggguggauucugggaaauccugagugugaaucucucagcacagccuccucuuggagcuacaucguggagaccuccucuagcgacaacggcacgugcuauccgggggauuuuauugacuacgaagaacugcgggagcagcuuuccagcgucucuuccuucgaacgcuuugagaucuuccccaagaccagcucuuggccuaaucacgauuccaacaagggagugacagccgcuuguccccaugccggcgcgaaaucuuuuuauaagaaucugaucuggcucguuaaaaagggcaacagcuacccuaaacuguccaagagcuauauuaaugacaaggggaaagaagugcuuguccuguggggaauccaccaccccuccaccucugccgaucaacagagccucuaccagaacgcugacgccuacguguucgugggcacauccagauauagcaagaaauuuaagccugagauugcuauccggccgaaaguccgcgaucaggaggggagaaugaauuacuauuggacccugguugaacccggagacaagauuacguucgaggccacaggcaaccugguggugccucgguacgcguuugccauggaacgcaacgcugggucuggaaucauuaucuccgauacccccguccaugacugcagcacaaccugucaaaccccuaaaggcgccaucaauacaucucuccccuuccagaacauucacccgaucacgauuggcaagugcccuaaguaugugaaaagcaccaagcugagacuugcuacagggcugcggaauguucccuccauccagucucgcggacucuuuggcgccauugccggguucaucgagggaggcuggaccgggaugguggacggaugguacggcuaucaucaccagaacgaacaaggcagcggguacgcugcggaucugaaauccacacagaaugccaucgacgagauuaccaacaaggucaauagcgugaucgagaaaaugaacacgcaguuuacagcuguuggaaaggaguucaaucaccuugagaagagaauugaaaaccugaauaaaaagguggaugacggcuuccucgauaucuggaccuacaacgccgagcugcugguccuccuggaaaaugagcggacccuugacuaucaugauucuaacgugaaaaaucuguacgagaagguccgcucccagcucaaaaacaacgccaaggaaauugggaauggauguuuugaguucuaucacaagugcgacaacacauguauggaaagcgugaaaaauggcaccuacgauuauccuaaguacucugaggaagcuaaacugaacagagaggagaucgacgggguuaaacuugaauccacacggauccaucaaauucuggccaucuauagcacgguggcguccucucucguccuggugguuagccugggcgcuauuuccuuuuggaugugcucuaauggaagccuccagugccgcaucuguauuuga

SEQ ID NO: 198530 - RNA, 1701 nt, Artificial Sequence; identical to SEQ ID NO: 195660
  derived and/or modified CDS sequence (opt5) from hemagglutinin__InfluenzaA__ADX36109

SEQ ID NO: 198531 - RNA, 1701 nt, Artificial Sequence
  derived and/or modified CDS sequence (opt5) from hemagglutinin__InfluenzaA__ADX96278
augaaggccauccuggugguccuccuguacaccuucgcuacagccaacgcggacacgcuuugcauuggcuaucacgcuaauaacagcaccgauacaguugacaccgugcuggagaaaaaugugacagucacccauuccgugaacauccucgaagauaagcacaaugggaaacuguguaaacuuagaggaguugcuccccugcaucucggcaagugcaacauugccggguggauccugggaaauccugagugugaaucucugagcacagccuccucuuggagcuacauuguggagaccuccucuagcgacaacggcacgugcuauccgggggauuuuaucgacuacgaagaacuccgggagcagcuguccagcgucucuuccuucgaacgcuuugagaucuuccccaagaccagcucuuggccuaaucacgauuccaacaagggagugacagccgcuuguccccaugccggcgcgaaaggcuuuuauaagaaucuuauuuggcugguuaaaaaggggaacagcuacccuaaacucucuaaguccuauaucaaugacaagggaaaagaagugcugguccuuuggggcauucaccaccccagcaccuccgccgaucaacagucucuguaccagaacgcugacgccuacguguucguggggagcuccagauauagcaagaaauuuaagccugagaucgcuauucggccgaaaguccgcgaucaggagggaagaaugaauuacuauuggacacucguugaacccggcgacaagaucaccuucgaggccacggggaaccugguggugccucgguacgcguuugccauggaacgcaacgcuggaucuggcauuaucaucuccgauacacccguccaugacugcaauaccacaugucaaaccccuaaaggcgccgugaacaccagccugcccuuccagaauauucacccgaucacaauugggaagugcccuaaguauguuaaaucuacgaagcucagacuggcuaccggacuucggaacgugcccagcauccagucccgcggccuguuuggggccauugccggauucaucgagggcggguggacaggaauggucgacggcugguacggcuaucaucaccagaaugaacaagggucuggauacgcugcggaucucaaaagcacccagaacgccaucgacgagauuacaaauaaggugaacuccguuaucgagaaaaugaauacccaguuuacggcugugggcaaggaguucaaccaccuggagaagagaauugaaaaucuuaacaaaaaggucgaugacggguuccuggauaucuggacauacaaugccgagcuccuggugcugcucgaaaacgagcggacccuggacuaucaugauagcaaugucaaaaaccuuuacgagaaggugcgcucucagcugaaaaacaaugccaaggaaguuggaaacggcuguuuugaguucuaucacaagugcgacaauaccuguauggaauccgugaaaaacgggacauacgauuauccuaaguacagcgaggaagcuaaacucaauagagaggagauugacggcgucaagcuggaaucuacccggaucuaucaaauccuugccauuuacuccacagcggcuagcucccuggugcucguugugucucugggagccaucagcuuuuggaugugcuccaacggcucucugcagugccgcauuuguaucuga

SEQ ID NO: 198532 - RNA, 1701 nt, Artificial Sequence
  derived and/or modified CDS sequence (opt5) from hemagglutinin__InfluenzaA__ADX96288
augaaggccauccuggugguccuccuguacaccuucgcuacagccaacgcggacacgcuuugcauuggcuaucacgcuaauaacagcaccgauacaguugacaccgugcuggagaaaaaugugacagucacccauuccgugaacauccucgaagauaagcacaaugggaaacuguguaaacuuagaggaguugcuccccugcaucucggcaagugcaacauugccggguggauccugggaaauccugagugugaaucucugagcacagccuccucuuggagcuacauuguggagaccuccucuagcgacaacggcacgugcuauccgggggauuuuaucgacuacgaagaacuccgggagcagcuguccagcgucucuuccuucgaacgcuuugagaucuuccccaagaccagcucuuggccuaaucacgauuccaacaagggagugacagccgcuuguccccaugccggcgcgaaaucuuuuuauaagaaucuuauuuggcugguuaaacaaggcaacagcuacccuaagcucuccaaaagcuauaucaaugacaaggggaaggaagugcugguccuuuggggcauucaccaccccuccaccucugccgaucagcagagccuguaccagaacgcugacgccuacguguucgugggauccagcagauauucuaaaaaguuuaaaccugagaucgcuauucggccgaagguccgcgaucaagaggggagaaugaauuacuauuggacacucguugaacccggagacaaaaucaccuucgaggccacgggcaaccugguggugccucgguacgcguuugccauggaacgcaacgcuggguccggaauuaucaucagcgauacacccguccaugacugcaauaccacaugucagaccccuaagggcgccauuaacaccucucugcccuuccagaauauccacccgauuacaaucggcaaaugcccuaaguauguuaagagcacgaaacucagacuggcuaccgggcuucggaacgugcccuccauucagucucgcggacuguuuggcgccaucgccggguucaucgagggaggcuggacagggaugguggacggaugguacggcuaucaucaccaaaaugaacagggcagcggguacgcugcggaucucaaguccacccagaacgccauugacgagaucacaaauaaagucaacagcgugauugagaagaugaauacccaguuuacggcuguuggaaaagaguucaaccaccuggagaagagaaucgaaaaucuuaacaagaaaguggaugacggcuuccuggauauuuggacauacaaugccgagcuccugguccugcucgaaaacgagcggacccuggacuaucaugauucuaaugugaagaaccuuuacgagaaaguccgcucccaacugaagaacaaugccaaagaaguggggaacggauguuuugaguucuaucacaagugcgacaauaccuguauggaaagcguuaagaacggcacauacgauuauccuaaauacucugaggaagcuaagcucaauagagaggagaucgacggggugaaacuggaauccacccggaucuaucagauucuugccaucuacagcacagcggcuuccucucugguccucgugguuagccugggcgccauuuccuuuuggaugugcucuaacggaagccugcagugccgcaucuguauuuga

SEQ ID NO: 198533 - RNA, 1701 nt, Artificial Sequence
  derived and/or modified CDS sequence (opt5) from hemagglutinin__InfluenzaA__ADX96298
augaaggccauccuggugguccuccuguacaccuucgcuacagccaacgcggacacgcuuugcauuggcuaucacgcuaauaacagcaccgauacaguugacaccgugcuggagaaaaaugugacagucacccauuccgugaacauccucgaagauaagcacaaugggaaacuguguaaacuuagaggaguugcuccccugcaucucggcaagugcaacauugccggguggauccugggaaauccugagugugaaucucugagcacagccuccucuuggagcuacauuguggagaccuccucuagcgacaacggcacgugcuauccgggggauuuuaucgacuacgaagaacuccgggagcagcuguccagcgucucuuccuucgaacgcuuugagaucuuccccaagaccagcucuuggccuaaucacgauuccaacaagggagugacagccgcuuguccccaugccggcgcgaaaucuuuuuauaagaaucuuauuuggcugguuaaaaagggcaacagcuacccuaaacucuccaagagcuauaucaaugacaaggggaaagaagugcugguccuuuggggcauucaccaccccuccaccucugccgaucaacagagccuguaccagaacgcugacgccuacguguucgugggaacauccagauauagcaagaaauuuaagccugagaucgucauucggccgaaaguucgcgaucaggaggggagaaugaauuacuauuggacccucguggaacccggagacaagaucacguucgaggcuacaggcaaccugguggucccucgguacgccuuugcgauggaacgcaacgccgggucuggaauuaucaucuccgauacccccgugcaugacugcaauacaaccugucaaaccccuaaaggcgcuauuaacacaagccugcccuuccagaauauccacccgauuacgaucggcaagugcccuaaguauguuaaaucuaccaagcucagacuggccacagggcuucggaacgugcccagcauucagucccgcggacuguuuggcgcuaucgccggguucaucgagggaggcuggaccgggauggucgacggaugguacggcuaucaucaccagaaugaacaaggcucuggguacgccgcugaucucaaaagcacacagaacgcgauugacgagaucaccaauaaggugaacuccguuauugagaaaaugaauacgcaguuuacagccgugggaaaggaguucaaccaccuggagaagagaaucgaaaaucuuaacaaaaaggucgaugacggcuuccuggauauuuggaccuacaaugcugagcuccuggugcugcucgaaaacgagcggacccuggacuaucaugauagcaaugucaaaaaccuuuacgagaaggugcgcucucagcugaaaaacaaugccaaggaaaucgggaacggauguuuugaguucuaucacaagugcgacaauacauguauggaauccguuaaaaacggcaccuacgauuauccuaaguacagcgaggaagccaaacucaauagagaggagaucgacggggugaagcuggaaucuacacggauuuaucaaauccuugcuauuuacuccacggucgccagcucccuggugcucguugugucucugggcgcgaucagcuuuuggaugugcuccaccggaucucugcagugccgcauuuguaucuga

SEQ ID NO: 198534 - RNA, 1701 nt, Artificial Sequence; identical to SEQ ID NO: 196338
  derived and/or modified CDS sequence (opt5) from hemagglutinin__InfluenzaA__ADX96308

SEQ ID NO: 198535 - RNA, 1701 nt, Artificial Sequence
  derived and/or modified CDS sequence (opt5) from hemagglutinin__InfluenzaA__ADX96318
augaaggccauccuggugguccuccuguacaccuucgcuacagccaacgcggacacgcuuugcauuggcuaucacgcuaauaacagcaccgauacaguugacaccgugcuggagaaaaaugugacagucacccauuccgugaaccuccuggaagauaagcacaaugggaaacuuuguaagcugagaggaguugcuccccuccaucugggcaaaugcaacaucgccggguggauucugggaaauccugagugugaaucucucagcacagccuccucuuggagcuacaucguggagaccuccucuagcgacaacggcacgugcuauccgggggauuuuauugacuacgaagaacugcgggagcagcuuuccagcgucucuuccuucgaacgcuuugagaucuuccccaagaccagcucuuggccuaaucacgauuccaacaagggagugacagccgcuuguccccaugccggcgcgaaaucuuuuuauaagaaucugaucuggcucguuaaaaagggcaacagcuacccuaaacuguccaagagcuauauuaaugacaaggggaaagaagugcuuguccuguggggaauccaccaccccuccaccucugccgaucaacagagccucuaccagaacgcugacuccuacguguucgugggcacaagcagauauucuaagaaauuuaagccugagauugccauccggccgaaaguccgcgaucaggaggggagaaugaauuacuauuggacccugguugaacccggagacaagauuacguucgaggcuacaggcaaccugguggugccucgguacgccuuugcgauggaacgcaacgccggguccggaaucauuaucagcgauacccccguccaugacugcaauacaaccugucaaaccccuaaaggcgcuaucaacacaucucuccccuuccagaauauucacccgaucacgauuggcaagugcccuaaguaugugaaaagcaccaagcugagacuugccacagggcugcggaacguucccuccauccagucucgcggacucuuuggcgcuauugccggguucaucgagggaggcuggaccgggaugguggacggaugguacggcuaucaucaccagaaugaacaaggcagcggguacgccgcugaucugaaauccacacagaacgcgaucgacaagauuaccaauaaagucaacagcgugaucgagaagaugaauacgcaguuuacagccguuggaaaggaguucaaccaccuugagaaaagaauugagaaucugaacaagaaaguggaugacggcuuccucgauaucuggaccuacaaugcugaacugcugguccuccuggagaacgaacggacccuugacuaucaugauucuaaugugaagaaccuguacgagaaaguccgcucccagcucaagaacaaugccaaggagauugggaacggauguuuugaguucuaucacaaaugcgacaauacauguauggaaagcgugaagaacggcaccuacgauuauccuaaauacucugaagaggccaagcugaauagagaagagaucgacgggguuaaacuugaguccacacggaucuaucaaauucuggcuaucuacagcacgguggccuccucucucguccuggugguuagccugggcgcgauuuccuuuuggaugugcucuaacggaagccuccagugccgcaucuguauuuga

SEQ ID NO: 198536 - RNA, 1701 nt, Artificial Sequence
  derived and/or modified CDS sequence (opt5) from hemagglutinin__InfluenzaA__ADX96328
augaaggccauccuggugguccuccuguacaccuucgcuacagccaacgcggacacgcuuugcauuggcuaucacgcuaauaacagcaccgauacaguugacaccgugcuggagaaaaaugugacagucacccauuccgugaaccuccuggaagauaagcacaaugggaaacuuuguaagcugagaggaguugcuccccuccaucugggcaaaugcaacaucgccggguggauucugggaaauccugagugugaaucucucagcacagccuccucuuggagcuacaucguggagaccuccucuagcgacaacggcacgugcuauccgggggauuuuauugacuacgaagaacugcgggagcagcuuuccagcgucucuuccuucgaacgcuuugagaucuuccccaagaccagcucuuggccuaaucacgauuccaacaagggagugacagccgcuuguccccaugccggcgcgaaaucuuuuuauaagaaucugaucuggcucguuaaaaagggcaacagcuacccuaaacuguccaagagcuauauuaaugacaaggggaaagaagugcuuguccuguggggaauccaccaccccuccaccucugccgaucaacagagccucuaccagaacgcugacgccuacguguucgugggcacauccagauauagcaagaaauuuaagccugagauugcuauccggccgaaaguccgcgaucaggaggggagaaugaauuacuauuggacccugguugaacccggagacaagauuacguucgaggccacaggcaaccugguggcgccucgguacgccuuugcuauggaacgcaacgccgggucuggaaucauuaucuccgauacccccgugcaugacugcaauacaaccugucaaaccccuaaaggcgcuaucaacacaagccuccccuuccagaauauucacccgaucacgauuggcaagugcccuaaguaugucaaaucuaccaagcugagacuugccacagggcugcggaacgugcccagcauccagucccgcggacucuuuggcgccauugcuggguucaucgagggaggcuggaccgggaugguugacggaugguacggcuaucaucaccagaaugaacaaggcucuggguacgcggccgaucugaaaagcacacagaacgcuaucgacaagauuaccaauaaagugaacuccgucaucgagaagaugaauacgcaguuuacagccgugggaaaggaguucaaccaccuugagaaaagaauugagaaucugaacaagaaaguugaugacggcuuccucgauaucuggaccuacaaugccgaacugcuggugcuccuggagaacgaacggacccuugacuaucaugauagcaaugucaagaaccuguacgagaaagugcgcucucagcucaagaacaaugcuaaggagauugggaacggauguuuugaguucuaucacaaaugcgacaauacauguauggaauccgucaagaacggcaccuacgauuauccuaaauacagcgaagaggccaagcugaauagagaagagaucgacggggugaaacuugagucuacacggaucuaucaaauucuggcgaucuacuccacgguugcuagcucccucgugcuggucgugucucugggcgccauuagcuuuuggaugugcuccaacggaucucuccagugccgcaucuguauuuga

SEQ ID NO: 198537 - RNA, 1701 nt, Artificial Sequence
  derived and/or modified CDS sequence (opt5) from hemagglutinin__InfluenzaA__ADX96347
augaaggccauccuggugguccuccuguacaccuucgcuacagccaacgcggacacgcuuugcauuggcuaucacgcuaauaacagcaccgauacaguugacaccgugcuggagaaaaaugugacagucacccauuccgugaaccuccuggaagauaagcacaaugggaaacuuuguaagcugagaggaguugcuccccuccaucugggcaaaugcaacaucgccggguggauucugggaaauccugagugugaaucucucagcacagccuccucuuggagcuacaucguggagaccuccucuagcgacaacggcacgugcuauccgggggauuuuauugacuacgaagaacugcgggagcagcuuuccagcgucucuuccuucgaacgcuuugagaucuuccccaagaccagcucuuggccuaaucacgauuccaacaagggagugacagccgcuuguccccaugccggcgcgaaaucuuuuuauaagaaucugaucuggcucguuaaaaagggcaacagcuacccuaaacuguccaagagcuauauuaaugacaaggggaaagaagugcuuguccuguggggaauccaccaccccuccaccucugccgaucaacagagccucuaccagaacgcugacgccuacguguucgugggcacauccagauauagcaagaaauuuaagccugagauugcuauccggccgaaaguccgcgaucaggaggggagaaugaauuacuauuggacccugguugaacccggagacaagauuacguucgaggccacaggcaaccugguggugccucgguacgcguuugccauggaacgcaacgcugggucuggaaucauuaucuccgauacccccguccauaauugcaacacaaccugucaaaccccuaaaggcgccaucaauacaagccuccccuuccagaacauucacccgaucacgauuggcaagugcccuaaguaugugaaaucuaccaagcugagacuugcuacagggcugcggaauguucccagcauccagucccgcggacucuuuggcgccauugccggguucaucgagggaggcuggaccgggaugguggacggaugguacggcuaucaucaccagaacgaacaaggcucuggguacgcugcggaccugaaaagcacacagaaugccaucgauaagauuaccaacaaagucaauuccgugaucgagaagaugaacacgcaguuuacagcuguuggaaaggaguucaaucaccuugagaaaagaauugagaaccugaauaagaaaguggacgauggcuuccucgacaucuggaccuacaacgccgaacugcugguccuccuggagaaugaacggacccuugauuaucaugacagcaacgugaagaaccuguacgagaaaguccgcucucagcucaagaauaacgccaaggagauugggaauggauguuuugaguucuaucacaaaugcgauaacacauguauggaauccgugaagaauggcaccuacgacuauccuaaauacagcgaagaggcuaagcugaacagagaagagaucgaugggguuaaacuugagucuacacggaucuaucaaauucuggccaucuacuccacgguggcgagcucccucguccuggugguuucucugggcgcuauuagcuuuuggaugugcuccaauggaucucuccagugccgcaucuguauuuga

SEQ ID NO: 198538 - RNA, 1701 nt, Artificial Sequence
  derived and/or modified CDS sequence (opt5) from hemagglutinin__InfluenzaA__ADX96357
augaaggccauccuggugguccuccuguacaccuucgcuacagccaacgcggacacgcuuugcauuggcuaucacgcuaauaacagcaccgauacaguugacaccgugcuggagaaaaaugugacagucacccauuccgugaacauccucgaagauaagcacaaugggaaacuguguaaacuuagaggaguugcuccccugcaucucggcaagugcaacauugccggguggauccugggaaauccugagugugaaucucugagcacagccuccucuuggagcuacauuguggagaccuccucuagcgacaacggcacgugcuauccgggggauuuuaucgacuacgaagaacuccgggagcagcuguccagcgucucuuccuucgaacgcuuugagaucuuccccaagaccagcucuuggccuaaucacgauuccaacaagggagugacagccgcuuguccccaugccggcgcgaaaucuuuuuauaagaaucuuauuuggcugguuaaaaagggcaacagcuacccuaaacucuccaagagcuauaucaaugacaaggggaaagaagugcugguccuuuggggcauucaccaccccuccaccucugccgaucaacagagccuguaccagaacgcugacgccuacguguucgugggaacauccagauauagcaagaaauuuaagccugagaucgucauucggccgaaaguucgcgaucaggaggggagaaugaauuacuauuggacccucguggaacccggagacaagaucacguucgaggcuacaggcaaccugguggucccucgguacgccuuugcgauggaacgcaacgccgggucuggaauuaucaucuccgauacccccgugcaugacugcaauacaaccugucaaaccccuaaaggcgcuauuaacacaagccugcccuuccagaauauccacccgauuacgaucggcaagugcccuaaguauguuaaaucuaccaagcucagacuggccacagggcuucggaacgugcccagcauucagucccgcggacuguuuggcgcuaucgccggguucaucgagggaggcuggaccgggauggucgacggaugguacggcuaucaucaccagaaugaacaaggcucuggguacgccgcugaucucaaaagcacacagaacgcgauugacgagaucaccaauaaggugaacuccguuauugagaaaaugaauacgcaguuuacagccgugggaaaggaguucaaccaccuggagaagagaaucgaaaaucuuaacaaaaaggucgaugacggcuuccuggauauuuggaccuacaaugcugagcuccuggugcugcucgaaaacgagcggacccuggacuaucaugauagcaaugucaaaaaccuuuacgagaaggugcgcucucagcugaaaaacaaugccaaggaaaucgggaacggauguuuugaguucuaucacaagugcgacaauacauguauggaauccguuaaaaacggcaccuacgauuauccuaaguacagcgaggaagccaaacucaauagagaggagaucgacggggugaagcuggaaucuacacggauuuaucaaauccuugcuauuuacuccacggucgccagcucccuggugcucguugugucucugggcgcgaucagcuuuuggaugugcuccaacggaucucugcagugccgcauuuguaucuga

SEQ ID NO: 198539 - RNA, 1701 nt, Artificial Sequence; identical to SEQ ID NO: 197678
  derived and/or modified CDS sequence (opt5) from hemagglutinin__InfluenzaA__ADX96367

SEQ ID NO: 198540 - RNA, 1701 nt, Artificial Sequence
  derived and/or modified CDS sequence (opt5) from hemagglutinin__InfluenzaA__ADX96378
augaaggccauccuggugguccuccuguacaccuucgcuacagccaacgcggacacgcuuugcauuggcuaucacgcuaauaacagcaccgauacaguugacaccgugcuggagaagaaugugacagucacccauuccgugaaccuccuggaagauaagcacaaugggaaacuuuguaagcugagaggaguugcuccccuccaucugggcaaaugcaacaucgccggguggauucugggaaauccugagugugaaucucucagcacagccuccucuuggagcuacaucguggagaccuccucuagcgacaacggcacgugcuauccgggggauuuuauugacuacgaagaacugcgggagcagcuuuccagcgucucuuccuucgaacgcuuugagaucuuccccaagaccagcucuuggccuaaucacgauuccaacaagggagugacagccgcuuguccccaugccggcgcgaaaucuuuuuauaagaaucugaucuggcucguuaaaaagggcaacagcuacccuaaacuguccaagagcuauauuaaugacaaggggaaagaagugcuuguccuguggggaauccaccaccccuccaccucugccgaucaacagagccucuaccagaacgcugacgccuacguguucgugggcacauccagauauagcaagaaauuuaagccugagauugcuauccggccgaaaguccgcgaucaggaggggagaaugaauuacuauuggacccugguugaacccggagacaagauuacguucgaggccacaggcaaccugguggugccucgguacgcguuugccauggaacgcaacgcugggucuggaaucauuaucuccgauacccccauccaugacugcaauacaaccugucaaaccccuaaaggcgccauuaacacaagccuccccuuccagaauauccacccgauuacgaucggcaagugcccuaaguaugucaaaucuaccaagcugagacuugcuacagggcugcggaacgugcccagcauucagucccgcggacucuuuggcgccaucgccggguucaucgagggaggcuggaccgggaugguugacggaugguacggcuaucaucaccagaaugaacaaggcucuggguacgcugcggaucugaaaagcacacagaacgccauugacgagaucaccaauaaggugaacuccgucauugagaaaaugaauacgcaguuuacagcugugggaaaggaguucaaccaccuugagaagagaaucgaaaaucugaacaaaaagguugaugacggcuuccucgauauuuggaccuacaaugccgagcugcuggugcuccuggaaaacgagcggacccuugacuaucaugauagcaaugucaaaaaccuguacgagaaggugcgcucucagcucaaaaacaaugccaaggaaaucgggaacggauguuuugaguucuaucacaagugcgacaauacauguauggaauccgucaaaaacggcaccuacgauuauccuaaguacagcgaggaagcuaaacugaauagagaggagaucgacggggugaaacuugaaucuacacggauuuaucaaauccuggccauuuacuccacgguugcgagcucccucgugcuggucgugucucugggcgcuaucagcuuuuggaugugcuccaacggaucucuccagugccgcauuuguaucuga

SEQ ID NO: 198541 - RNA, 1701 nt, Artificial Sequence; identical to SEQ ID NO: 198540
  derived and/or modified CDS sequence (opt5) from hemagglutinin__InfluenzaA__ADX96398

SEQ ID NO: 198542 - RNA, 1701 nt, Artificial Sequence
  derived and/or modified CDS sequence (opt5) from hemagglutinin__InfluenzaA__ADX96408
augaaggccauccuggugguccuccuguacaccuucgcuacagccaacgcggacacgcuuugcauuggcuaucacgcuaauaacagcaccgauacaguugacaccgugcuggagaaaaaugugacagucacccauuccgugaacauccucgaagauaagcacaaugggaaacuguguaaacuuagaggaguugcuccccugcaucucggcaagugcaacauugccggguggauccugggaaauccugagugugaaucucugagcacagccuccucuuggagcuacauuguggagaccuccucuagcgacaacggcacgugcuauccgggggauuuuaucgacuacgaagaacuccgggagcagcuguccagcgucucuuccuucgaacgcuuugagaucuuccccaagaccagcucuuggccuaaucacgauuccaacaagggagugacagccgcuuguccccaugccggcgcgaaaucuuuuuauaagaaucuuauuuggcugguuaaaaagggcaacagcuacccuaaacucuccaagagcuauaucaaugacaaggggaaagaagugcugguccuuuggggcauucaccaccccuccaccucugccgaucaacagagccuguaccagaacgcugacgccuacguguucgugggaacauccagauauagcaagaaauuuaagccugagaucgcuauucggccgaaaguccgcgaucaggaggggagaaugaauuacuauuggacccucguugaacccggagacaagaucacguucgaggccacaggcaaccugguggugccucgguacgcguuugccauggaacgcaacgcugggucuggaauuaucaucuccgauacccccauucaugacugcaauacaaccugucaaaccccuaaaggcgccaucaacacaagccugcccuuccagaauauucacccgaucacgauuggcaagugcccuaaguaugucaaaucuaccaagcucagacuggcuacagggcuucggaacgugcccagcauccagucccgcggacuguuuggcgccaucgccggguucauugagggaggcuggaccgggaugguugacggaugguacggcuaucaucaccagaaugaacaaggcucuggguacgcugcggaucucaaaagcacacagaacgccaucgacgagauuaccaauaaggugaacuccgucaucgagaaaaugaauacgcaguuuacagcugugggaaaggaguucaaccaccuggagaagagaauugaaaaucuuaacaaaaagguugaugacggcuuccuggauaucuggaccuacaaugccgagcuccuggugcugcucgaaaacgagcggacccuggacuaucaugauagcaaugucaaaaaccuuuacgagaaggugcgcucucagcugaaaaacaaugccaaggaaaucgggaacggauguuuugaguucuaucacaagugcgacaauacauguauggaauccgucaaaaacggcaccuacgauuauccuaaguacagcgaggaagcuaaacucaauagagaggagauugacggggugaagcuggaaucuacacggaucuaucaaauucuugccaucuacuccacgguugcgagcucccuggugcucgucgugucucugggcgcuauuagcuuuuggaugugcuccaacggaucucugcagugccgcaucuguauuuga

SEQ ID NO: 198543 - RNA, 1701 nt, Artificial Sequence; identical to SEQ ID NO: 195054
  derived and/or modified CDS sequence (opt5) from hemagglutinin__InfluenzaA__ADX96427

SEQ ID NO: 198544 - RNA, 1701 nt, Artificial Sequence
  derived and/or modified CDS sequence (opt5) from hemagglutinin__InfluenzaA__ADX96437
augaaggccauccuggugguccuccuguacaccuucgcuacagccaacgcggacacgcuuugcauuggcuaucacgcuaauaacagcaccgauacaguugacaccgugcuggagaagaaugugacagucacccauuccgugaacauccucgaagauaagcacaaugggaaacuguguaaacuuagaggaguugcuccccugcaucucggcaagugcaacauugccggguggauccugggaaauccugagugugaaucucugagcacagccuccucuuggagcuacauuguggagaccuccucuagcgacaacggcacgugcuauccgggggauuuuaucgacuacgaagaacuccgggagcagcuguccagcgucucuuccuucgaacgcuuugagaucuuccccaagaccagcucuuggccuaaucacgauuccaacaagggagugacagccgcuuguccccaugccggcgcgaaaucuuuuuauaagaaucuuauuuggcugguuaaaaagggcaacagcuacccuaaacucuccaagagcuauaucaaugacaaggggaaagaagugcugguccuuuggggcauucaccaccccuccaccucugccgaucaacagagccuguaccagaacgcugacgccuacguguucgugggauccagcagauauucuaagaaauuuaagccugagaucgcuauucggccgaaaguccgcgaucaggaggggagaaugaauuacuauuggacacucguugaacccggagacaagaucaccuucgaggccacgggcaaccugguggugccucgguacgcguuugccauggaacgcaacgcuggguccggaauuaucaucagcgauacacccguccaugacugcaauaccacaugucaaaccccuaaaggcgccauuaacaccucucugcccuuccagaauauccacccgauuacaaucggcaagugcccuaaguaugugaaaagcacgaagcucagacuggcuaccgggcuucggaacguucccuccauucagucucgcggacuguuuggcgccaucgccggguucaucgagggaggcuggacagggaugguggacggaugguacggcuaucaucaccagaaugaacaaggcagcggguacgcugcggaucucaaauccacccagaacgccauugacgagaucacaaauaaggucaacagcgugauugagaaaaugaauacccaguuuacggcuguuggaaaggaguucaaccaccuggagaagagacuugaaaaucugaacaaaaagguggaugacggcuuccucgauaucuggacauacaaugccgagcugcugguccuccuggaaaacgagcggacccuugacuaucaugauucuaaugugaaaaaccuguacgagaagguccgcucccagcucaaaaacaaugccaaggaaguggggaacggauguuuugaguucuaucacaagugcgacaauaccuguauggaaagcguuaaaaacggcacauacgauuauccuaaguacucugaggaagcuaaacugaauagagaggagauugacggggugaaacuugaauccacccggaucuaucaaauccuggccauuuacagcacagcggcuuccucucucguccuggugguuagccugggcgccaucuccuuuuggaugugcucuaacggaagccuccagugccgcauuuguaucuga

SEQ ID NO: 198545 - RNA, 1701 nt, Artificial Sequence; identical to SEQ ID NO: 194728
  derived and/or modified CDS sequence (opt5) from hemagglutinin__InfluenzaA__ADX96447

SEQ ID NO: 198546 - RNA, 1701 nt, Artificial Sequence; identical to SEQ ID NO: 194741
  derived and/or modified CDS sequence (opt5) from hemagglutinin__InfluenzaA__ADX96497

SEQ ID NO: 198547 - RNA, 1701 nt, Artificial Sequence
  derived and/or modified CDS sequence (opt5) from hemagglutinin__InfluenzaA__ADX96507
augaaggccauccuggugguccuccuguacaccuucgcuacagccaacgcggacacgcuuugcauuggcuaucacgcuaauaacagcaccgauacaguugacaccgugcuggagaagaaugugacagucacccauuccgugaaccuccuggaagauaagcacaaugggaaacuuuguaagcugagaggaguugcuccccuccaucugggcaaaugcaacaucgccggguggauucugggaaauccugagugugaaucucucagcacagccuccucuuggagcuacaucguggagaccuccucuagcgacaacggcacgugcuauccgggggauuuuauugacuacgaagaacugcgggagcagcuuuccagcgucucuuccuucgaacgcuuugagaucuuccccaagaccagcucuuggccuaaucacgauuccaacaagggagugacagccgcuuguccccaugccggcgcgaaaucuuuuuauaagaaucugaucuggcucguuaaaaagggcaacagcuacccuaaacuguccaagagcuauauuaaugacaaggggaaagaagugcuuguccuguggggaauccaccaccccuccaccucugccgaucaacagagccucuaccagaacgcugacgccuacguguucgugggcacauccagauauagcaagaaauuuaagccugagauugcuauccggccgaaaguccgcgaucaggaggggagaaugaauuacuauuggacccugguugaacccggagacaagauuacguucgaggccacaggcaaccugguggugccucgguacgcguuugccauggaacgcaacgcugggucuggaaucauuaucuccgauacccccguccaugacugcaauacaaccugucaaaccccuaaaggcgccaucaacacaagccuccccuuccagaauauucacccgaucacgauuggcaagugcccuaaguaugugaaaucuaccaagcugagacuugcuacagggcugcggaacguucccagcauccagucccgcggacucuuuggcgccauugccggguucaucgagggaggcuggaccgggaugguggacggaugguacggcuaucaucaccagaaugaacaaggcucuggguacgcugcggaucugaaaagcacacagaacgccaucgacgagauuaccaauaaggucaacuccgugaucgagaaaaugaauacgcaguuuacagcuguuggaaaggaguucaaccaccuugagaagagaauugaaaaucugaacaaaaagguggaugacggcuuccucgauaucuggaccuacaaugccgagcugcugguccuccuggaaaacgagcggacccuugacuaucaugauagcaaugugaaaaaccuguacgagaagguccgcucucagcucaaaaacaaugccaaggaaauugggaacggauguuuugaguucuaucacaagugcgacaauacauguauggaauccgugaaaaacggcaccuacgauuauccuaaguacagcgaggaagcuaaacugaauagagaggagaucgacgggguuaaacuugaaucuacacggaucuaucaaauucuggccaucuacuccacgguggcgagcucccucguccuggugguuucucugggcgcuauuagcuuuuggaugugcuccaccggaucucuccagugccgcaucuguauuuga

SEQ ID NO: 198548 - RNA, 1701 nt, Artificial Sequence; identical to SEQ ID NO: 198547
  derived and/or modified CDS sequence (opt5) from hemagglutinin__InfluenzaA__ADX96517

SEQ ID NO: 198549 - RNA, 1701 nt, Artificial Sequence
  derived and/or modified CDS sequence (opt5) from hemagglutinin__InfluenzaA__ADX96527
augaaggccauccuggugguccuccuguacaccuucgcuacagccaacgcggacacgcuuugcauuggcuaucacgcuaauaacagcaccgauacaguugacaccgugcuggagaagaaugugacagucacccauuccgugaaccuccuggaagauaagcacaaugggaaacuuuguaagcugagaggaguugcuccccuccaucugggcaaaugcaacaucgccggguggauucugggaaauccugagugugaaucucucagcacagccuccucuuggagcuacaucguggagaccuccucuagcgacaacggcacgugcuauccgggggauuuuauugacuacgaagaacugcgggagcagcuuuccagcgucucuuccuucgaacgcuuugagaucuuccccaagaccagcucuuggccuaaucacgauuccaacaagggagugacagccgcuuguccccaugccggcgcgaaaucuuuuuauaagaaucugaucuggcucguuaaaaagggcaacagcuacccuaaacuguccaagagcuauauuaaugacaaggggaaagaagugcuuguccuguggggaauccaccaccccuccaccucugccgaucaacagagccucuaccagaacgcugacgccuacguguucgugggcacauccagauauagcaagaaauuuaagccugagauugcuauccggccgaaaguccgcgaucaggaggggagaaugaauuacuauuggacccugguugaacccggagacaagauuacguucgaggccacaggcaaccugguggugccucgguacgcguuugccauggaacgcaacgcugggucuggaaucauuaucuccgauacccccguccaugacugcaauacaaccugucaaaccccuaaaggcgccaucaacacaagccuccccuuccagaauauucacccgaucacgauuggcaagugcccuaaguaugugaaaucuaccaagcugagacuugcuacagggcugcggaacguucccagcauccagucccgcggacucuuuggcgccauugccggguucaucgagggaggcuggaccgggaugguggacggaugguacggcuaucaucaccagaaugaacaaggcucuggguacgcugcggaucugaaaagcacacagaacgccaucgacgagauuaccaauaaggucaacuccgugaucgagaaaaugaauacgcaguuuacagcuguuggaaaggaguucaaccaccuugagaagagaauugaaaaucugaacaaaaagguggaugacggcuuccucgauaucuggaccuacaaugccgagcugcugguccuccuggaaaacgagcggacccuugacuaucaugauagcaaugugaaaaaccuguacgagaagguccgcucucagcucaaaaacaaugccaaggaaauugggaacggauguuuugaguucuuucacaagugcgacaauacauguauggaauccgugaaaaacggcaccuaugauuacccuaaguauagcgaggaagcuaaacugaauagagaggagaucgacgggguuaaacuugaaucuacacggaucuaccaaauucuggccaucuauuccacgguggcgagcucccucguccuggugguuucucugggcgcuauuagcuucuggaugugcuccaacggaucucuccagugccgcaucuguauuuga

SEQ ID NO: 198550 - RNA, 1701 nt, Artificial Sequence; identical to SEQ ID NO: 194741
  derived and/or modified CDS sequence (opt5) from hemagglutinin__InfluenzaA__ADX96537

SEQ ID NO: 198551 - RNA, 1701 nt, Artificial Sequence; identical to SEQ ID NO: 194741
  derived and/or modified CDS sequence (opt5) from hemagglutinin__InfluenzaA__ADX96547

SEQ ID NO: 198552 - RNA, 1701 nt, Artificial Sequence; identical to SEQ ID NO: 195842
  derived and/or modified CDS sequence (opt5) from hemagglutinin__InfluenzaA__ADX96557

SEQ ID NO: 198553 - RNA, 1701 nt, Artificial Sequence; identical to SEQ ID NO: 194741
  derived and/or modified CDS sequence (opt5) from hemagglutinin__InfluenzaA__ADX96587

SEQ ID NO: 198554 - RNA, 1701 nt, Artificial Sequence; identical to SEQ ID NO: 194728
  derived and/or modified CDS sequence (opt5) from hemagglutinin__InfluenzaA__ADX96597

SEQ ID NO: 198555 - RNA, 1701 nt, Artificial Sequence; identical to SEQ ID NO: 194728
  derived and/or modified CDS sequence (opt5) from hemagglutinin__InfluenzaA__ADX96607

SEQ ID NO: 198556 - RNA, 1701 nt, Artificial Sequence
  derived and/or modified CDS sequence (opt5) from hemagglutinin__InfluenzaA__ADX96627
augaaggccauccuggugguccuccuguacaccuucgcuacagccaacgcggacacgcuuugcauuggcuaucacgcuaauaacagcaccgauacaguugacaccgugcuggagaaaaaugugacagucacccauuccgugaaccuccuggaagauaagcacaaugggaaacuuuguaagcugagaggaguugcuccccuccaucugggcaaaugcaacaucgccggguggauucugggaaauccugagugugaaucucucagcacagccuccucuuggagcuacaucguggagaccuccucuagcgacaacggcacgugcuauccgggggauuuuauugacuacgaagaacugcgggagcagcuuuccagcgucucuuccuucgaacgcuuugagaucuuccccaagaccagcucuuggccuaaucacgauuccaacaagggagugacagccgcuuguccccaugccggcgcgaaaucuuuuuauaagaaucugaucuggcucguuaaaaagggcaacagcuacccuaaacuguccaagagcuauauuaaugacaaggggaaagaagugcuuguccuguggggaauccaccaccccuccaccucugccgaucaacagagccucuaccagaacgcugacgccuacguguucgugggcacauccagauauagcaagaaauuuaagccugagauugcuauccggccgaaaguccgcgaucaggaggggagaaugaauuacuauuggacccugguugaacccggagacaagauuacguucgaggccacaggcaaccugguggugccucgguacgcguuugccauggaaaagaacgcugggucuggaaucauuaucuccgauacccccguccaugacugcaauacaaccugucaaaccccuaagggcgccaucaacacaagccuccccuuccagaauauucacccgaucacgauuggcaagugcccuaaauaugugaagucuaccaaacugcgccuugcuacagggcugagaaacguucccagcauccagucccggggacucuuuggcgccauugccggguucaucgagggaggcuggaccgggaugguggacggaugguacggcuaucaucaccagaaugaacaaggcucuggguacgcugcggaucugaaaagcacacagaacgccaucgacgagauuaccaauaaagucaacuccgugaucgagaagaugaauacgcaguuuacagcuguuggaaaggaguucaaccaccuugagaaacgcauugaaaaucugaacaagaaaguggaugacggcuuccucgauaucuggaccuacaaugccgagcugcugguccuccuggaaaacgagagaacccuugacuaucaugauagcaaugugaagaaccuguacgagaaaguccggucucagcucaagaacaaugccaaggaaauugggaacggauguuuugaguucuaucacaaaugcgacaauacauguauggaauccgugaagaacggcaccuacgauuauccuaaauacagcgaggaagcuaagcugaaucgcgaggagaucgacgggguuaaacuugaaucuacaagaaucuaucaaauucuggccaucuacuccacgguggcgagcucccucguccuggugguuucucugggcgcuauuagcuuuuggaugugcuccaccggaucucuccagugccggaucuguauuuga

SEQ ID NO: 198557 - RNA, 1701 nt, Artificial Sequence; identical to SEQ ID NO: 195188
  derived and/or modified CDS sequence (opt5) from hemagglutinin__InfluenzaA__ADX96637

SEQ ID NO: 198558 - RNA, 1701 nt, Artificial Sequence; identical to SEQ ID NO: 194741
  derived and/or modified CDS sequence (opt5) from hemagglutinin__InfluenzaA__ADX96647

SEQ ID NO: 198559 - RNA, 1701 nt, Artificial Sequence; identical to SEQ ID NO: 194728
  derived and/or modified CDS sequence (opt5) from hemagglutinin__InfluenzaA__ADX96657

SEQ ID NO: 198560 - RNA, 1701 nt, Artificial Sequence; identical to SEQ ID NO: 194741
  derived and/or modified CDS sequence (opt5) from hemagglutinin__InfluenzaA__ADX96667

SEQ ID NO: 198561 - RNA, 1701 nt, Artificial Sequence
  derived and/or modified CDS sequence (opt5) from hemagglutinin__InfluenzaA__ADX96677
augaaggccauccuggugguccuccuguacaccuucgcuacagccaacgcggacacgcuuugcauuggcuaucacgcuaauaacagcaccgauacaguugacaccgugcuggagaaaaaugugacagucacccauuccgugaaccuccuggaagauaagcacaaugggaaacuuuguaagcugagaggaguugcuccccuccaucugggcaaaugcaacaucgccggguggauucugggaaauccugagugugaaucucucagcacagccuccucuuggagcuacaucguggagaccuccucuagcgacaacggcacgugcuauccgggggauuuuauugacuacgaagaacugcgggagcagcuuuccagcgucucuuccuucgaacgcuuugagaucuuccccaagaccagcucuuggccuaaucacgauuccaacaagggagugacagccgcuuguccccaugccggcgcgaaaucuuuuuauaagaaucugaucuggcucguuaaaaagggcaacagcuacccuaaacuguccaagagcuauauuaaugacaaggggaaagaagugcuuguccuguggggaauccaccaccccuccaccucugccgaucaacagagccucuaccagaacgcugacgccuacguguucgugggcuccagcagauauucuaagaaauuuaagccugagauugcuauccggccgaaaguccgcgaucaggaggggagaaugaauuacuauuggacaguuguggaacccggagacaagauuaccuucgaggccacgggcaaccugguggucccucgguacgcguuugccauggaacgcaacgcuggguccggaaucauuaucagcgauacacccgugcaugacugcaauaccacaugucaaaccccuaaaggcgccaucaacaccucucugcccuuccacaauauucauccgaucacaauuggcaagugcccuaaguauguuaaaagcacgaagcucagacuggcuaccgggcuucggaacgugcccuccauccagucucgcggacuguuuggcgccauugccggguucaucgagggaggcuggacagggauggucgacggaugguacggcuaucaccaccagaaugaacagggcagcggguacgcugcggaucucaaauccacccaaaacgccaucgacgagauuacaaauaaggugaacagcguuaucgagaaaaugaauacccaguuuacggcugugggaaaggaguucaaccaucuggagaagagaauugaaaaucuuaacaaaaaggucgaugacggcuuccuggauaucuggacauacaaugccgagcuccuggugcugcucgaaaacgagcggacccuggacuaucacgauucuaaugucaaaaaccuuuacgagaaggugcgcucccagcugaaaaacaaugccaaggaaauugggaacggauguuuugaguucuaucauaagugcgacaauaccuguauggaaagcguuaaaaacggcacauacgauuauccuaaguacucugaggaagcuaaacucaauagagaggagaucgacggggugaagcuggaauccacccggaucuaucagauucuugccaucuacagcacagucgcguccucucuggugcucguugugagccugggcgcuauuuccuuuuggaugugcucuaacggaagccugcaaugccgcaucuguauuuga

SEQ ID NO: 198562 - RNA, 1701 nt, Artificial Sequence
  derived and/or modified CDS sequence (opt5) from hemagglutinin__InfluenzaA__ADX96687
augaaggccauccuggugguccuccuguacaccuucgcuacagccaacgcggacacgcuuugcauuggcuaucacgcuaauaacagcaccgauacaguugacaccgugcuggagaaaaaugugacagucacccauuccgugaaccuccuggaagauaagcacaaugggaaacuuuguaagcugagaggaguugcgccccuccaucugggcaaaugcaacaucgccggguggauucugggaaauccugagugugaaucucucagcacagcuuccucuuggagcuacaucguggagaccuccucuagcgacaacggcacgugcuauccgggggauuuuauugacuacgaagaacugcgggagcagcuuuccagcgucucuuccuucaagcgcuuugaaaucuuccccaagaccagcucuuggccuaaucacgauuccaacaaaggagugacagccgcuuguccccaugccggcgccaagagcuuuuauaaaaaucugaucuggcucguuaagaaaggcaacucuuacccuaagcuguccaagagcuauauuaaugacaaagggaaggaggugcuuguccuguggggaauccaccaccccuccaccucugccgaucaacagagccucuaccagaacgcugacgccuacguguucgugggcacauccagauauagcaaaaaguuuaaaccugaaauugcuauccggccgaagguccgcgaucaggaggggagaaugaauuacuauuggacccugguugagcccggagacaaaauuacguucgaagccacaggcaaccugguggugccucgguacgcguuugccauggagcgcaacgcugggucuggaaucauuaucuccgauacccccgucuaugacugcaauacaaccugucaaaccccuaagggcgccaucaacacaagccuccccuuccagaauauucauccgaucacgauuggcaagugcccuaaauacgugaagucuaccaaacugagacuugcuacagggcugcggaacguucccagcauccagucccgcggacucuuuggcgccauugccggguucaucgaaggaggcuggaccgggaugguggacggaugguauggcuaccaccaucagaaugagcaaggcucuggguacgcugcggaucugaaaagcacacagaacgccaucgacgaaauuaccaauaaagucaacuccgugaucgagaagaugaauacgcaguuuacagcuguuggaaaggaguucaaccaccuugaaaagagaauugagaaucugaacaagaaaguggaugacggcuuccucgauaucuggaccuauaaugccgaacugcugguccuccuggagaacgaacggacccuugacuaccacgauagcaaugugaagaaccuguaugagaaaguccgcucucagcucaagaacaaugccaaggagauugggaacggauguuuugaguucuaccauaaaugcgacaauacauguauggaguccgugaagaacggcaccuaugauuacccuaaauauagcgaagaggcuaagcugaauagagaagagaucgacgggguuaaacuugagucuacacggaucuaccaaauucuggccaucuacuccacgguggcgagcucccucguccuggugguuucucugggcgcuauuagcuuuuggaugugcuccaacggaucucuccagugccgcaucuguauuuga

SEQ ID NO: 198563 - RNA, 1701 nt, Artificial Sequence; identical to SEQ ID NO: 194741
  derived and/or modified CDS sequence (opt5) from hemagglutinin__InfluenzaA__ADX96697

SEQ ID NO: 198564 - RNA, 1701 nt, Artificial Sequence
  derived and/or modified CDS sequence (opt5) from hemagglutinin__InfluenzaA__ADX96707
augaaggccauccuggugguccuccuguacaccuucgcuacagccaacgcggacacgcuuugcauuggcuaucacgcuaauaacagcaccgauacaguugacaccgugcuggagaaaaaugugacagucacccauuccgugaaccuccuggaagauaagcacaaugggaaacuuuguaagcugagaggaguugcuccccuccaucugggcaaaugcaacaucgccggguggauucugggaaauccugagugugaaucucucagcacagccuccucuuggagcuacaucguggagaccuccucuagcgacaacggcacgugcuauccgggggauuuuauugacuacgaagaacugcgggagcagcuuuccagcgucucuuccuucgaacgcuuugagaucuuccccaagaccagcucuuggccuaaucacgauuccaacaagggagugacagccgcuuguccccaugccggcgcgaaaucuuuuuauaagaaucugaucuggcucguuaaaaagggcaacagcuacccuaaacuguccaagagcuauauuaaugacaaggggaaagaagugcuuguccuguggggaauccaccaccccuccaccucugccgaucaacagagccucuaccagaacgcugacgccuacguguucgugggcacauccagauauagcaagaaauuuaagccugagauugcuauccggccgaaaguccgcgaucaggaggggagaaugaauuacuauuggacccugguugaacccggagacaagauuacguucgaggccacaggcaaccugguggugccucgguacgcguuugccauggaacgcaacgcugggucuggaaucauuaucuccgauacccccguccaugacugcgacacaaccugucaaaccccuaaaggcgccaucaauacaagccuccccuuccagaacauucacccgaucacgauuggcaagugcccuaaguaugugaaaucuaccaagcugagacuugcuacagggcugcggaauguucccagcauccagucccgcggacucuuuggcgccauugccggguucaucgagggaggcuggaccgggaugguggauggaugguacggcuaucaucaccagaacgaacaaggcucuggguacgcugcggaccugaaaagcacacagaaugccaucgauaagauuaccaacaaagucaauuccgugaucgagaagaugaacacgcaguuuacagcuguuggaaaggaguucaaucaccuugagaaaagaauugagaaccugaauaagaaaguggacgauggcuuccucgacaucuggaccuacaacgccgaacugcugguccuccuggagaaugaacggacccuugauuaucaugacagcaacgugaagaaucuguacgagaaaguccgcucucagcucaagaacaacgccaaggagauugggaauggauguuuugaguucuaucacaaaugcgauaacacauguauggaauccgugaagaauggcaccuacgacuauccuaaauacagcgaagaggcuaagcugaacagagaagagaucgaugggguuaaacuugagucuacacggaucuaucaaauucuggccaucuacuccacgguggcgagcucccucguccuggugguuucucugggcgcuauuagcuuuuggaugugcuccaccggaucucuccagugccgcaucuguauuuga

SEQ ID NO: 198565 - RNA, 1701 nt, Artificial Sequence; identical to SEQ ID NO: 195901
  derived and/or modified CDS sequence (opt5) from hemagglutinin__InfluenzaA__ADX96727

SEQ ID NO: 198566 - RNA, 1701 nt, Artificial Sequence
  derived and/or modified CDS sequence (opt5) from hemagglutinin__InfluenzaA__ADX96737
augaaggccauccuggugguccuccuguacaccuucgcuacagccaacgcggacacgcuuugcauuggcuaucacgcuaauaacagcaccgauacaguugacaccgugcuggagaagaaugugacagucacccauuccgugaaccuccuggaagauaagcacaaugggaaacuuuguaagcugagaggaguugcuccccuccaucugggcaaaugcaacaucgccggguggauucugggaaauccugagugugaaucucucagcacagccuccucuuggagcuacaucguggagaccuccucuagcgacaacggcacgugcuauccgggggauuuuauugacuacgaagaacugcgggagcagcuuuccagcgucucuuccuucgaacgcuuugagaucuuccccaagaccagcucuuggccuaaucacgauuccaacaagggagugacagccgcuuguccccaugccggcgcgaaaucuuuuuauaagaaucugaucuggcucguuaaaaagggcaacagcuacccuaaacuguccaagagcuauauuaaugacaaggggaaagaagugcuuguccuguggggaauccaccaccccuccaccucugccgaucaacagagccucuaccagaacgcugacgccuacguguucgugggcacauccagauauagcaagaaauuuaagccugagauugcuauccggccgaaagucaaggagcaggaagggcgcaugaauuacuauuggacccugguugagcccggagauaaaauuacguucgaagccacaggcaaccugguggugccuagauacgcguuugccauggagcggaaggcugggucuggaaucauuaucuccgacacccccguccaugauugcaacacaaccugucaaaccccuaagggcgccaucaauacaagccuccccuuccagaacauucacucuaucacgauuggcaaaugcccgaaguaugugaaaagcaccaagcugcgccuugcuacagggcugagaaauguuccuuccauccagucucggggacucuuuggcgccauugccggguucaucgaaggaggcuggaccgggaugguggacggaugguacggcuaucaucaccagaacgagcaaggcagcggguacgcugcggaccugaaauccacacagaaugccaucgaugagauuaccaacaaggucaauagcgugaucgaaaagaugaacacgcaguuuacagcuguuggaaaagaguucaaucaccuugaaaagcgcauugagaaccugaauaaaaagguggacgauggcuuccucgacaucuggaccuacaacgccgaacugcugguccuccuggagaaugagagaacccuugauuaucaugacucuaacgugaaaaaucuguacgaaaagguccggucccagcucaagaacaacgccaaagagauugggaauggauguuuugaguucuaucacaagugcgauaacacauguauggagagcgugaaaaauggcaccuacgacuaucccaaguacucugaagaggcuaaacugaaccgcgaggaaaucgaugggguuaaacuugaguccacaagaaucuaucaaauucuggccaucuacagcacgguggcguccucucucguccuggugauuagccugggcgcuaucuccuuuuggaugugcucuaccggaagccuccagugccggauuuguaucuga

SEQ ID NO: 198567 - RNA, 1701 nt, Artificial Sequence; identical to SEQ ID NO: 194741
  derived and/or modified CDS sequence (opt5) from hemagglutinin__InfluenzaA__ADX96747

SEQ ID NO: 198568 - RNA, 1701 nt, Artificial Sequence
  derived and/or modified CDS sequence (opt5) from hemagglutinin__InfluenzaA__ADX96757
augaaggccauccuggugguccuccuguacaccuucgcuacagccaacgcggacacgcuuugcauuggcuaucacgcuaauaacagcaccgauacaguugacaccgugcuggagaagaaugugacagucacccauuccgugaaccuccuggaagauaagcacaaugggaaacuuuguaagcugagaggaguugcuccccuccaucugggcaaaugcaacaucgccggguggauucugggaaauccugagugugaaucucucagcacagccuccucuuggagcuacaucguggagaccuccucuagcggcaacgggacgugcuauccgggagacuuuauugauuacgaagaacugcgggagcagcuuuccagcgucucuuccuucgaacgcuuugagaucuuccccaagaccagcucuuggccuaaucacgacuccaacaagggcgugacagccgcuuguccccaugccggcgcgaaaucuuuuuauaagaaucugaucuggcucguuaaaaaggggaacagcuacccuaaacuguccaagagcuauauuaaugauaagggaaaagaagugcuuguccuguggggcauccaccaccccuccaccucugccgaccaacagagccucuaccagaacgcugaugccuacguguucguggggacauccagauauagcaagaaauuuaagccugagauugcuauccggccgaaaguccgcgaccaggagggaagaaugaauuacuauuggacccugguugugcccggcgauaagauuacguucgaagccacagggaaccugguggucccucgguacgcguuugccauggagcgcaacgcuggaucuggcaucauuaucuccgacacccccgugcaugauugcaauacaaccugucaaaccccuaaaggcgccaucaacacaagccuccccuuccagaauauucacccgaucacgauugggaagugcccuaaguauguuaaaucuaccaagcugagacuugcuacaggacugcggaacgugcccagcauccagucccgcggccucuuuggggccauugccggauucaucgaaggcggguggaccggaauggucgacggcugguacggcuaucaucaccagaaugagcaagggucuggauacgcugcggaccugaaaagcacacagaacgccaucgaugaaauuaccaauaaggugaacuccguuaucgagaaaaugaauacgcaguuuacagcugugggcaaggaguucaaccaccuugaaaagagaauugagaaucugaacaaaaaggucgacgauggguuccucgacaucuggaccuacaaugccgaacugcuggugcuccuggagaacgaacggacccuugauuaucaugacagcaaugucaaaaaccuguacgagaaggugcgcucucagcucaaaaacaaugccaaggagauuggaaacggcuguuuugaguucuaucacaagugcgauaauacauguauggaguccguuaaaaacgggaccuacgacuauccuaaguacagcgaagaggcuaaacugaauagagaagagaucgauggcgugaaacuugagucuacacggaucuaucaaauucuggccaucuacuccacggucgcgagcucccucgugcugguugugucucugggagcuauuagcuuuuggaugugcuccaccggcucucuccagugccgcaucuguauuuga

SEQ ID NO: 198569 - RNA, 1701 nt, Artificial Sequence
  derived and/or modified CDS sequence (opt5) from hemagglutinin__InfluenzaA__ADX96767
augaaggccauccuggugguccuccuguacaccuucgcuacagccaacgcggacacgcuuugcauuggcuaucacgcuaauaacagcaccgauacaguugacaccgugcuggagaaaaaugugacagucacccauuccgugaaccuccuggaagauaagcacaaugggaaacuuuguaagcugagaggaguugcuccccuccaucugggcaaaugcaacaucgccggguggauucugggaaauccugagugugaaucucucagcacagccuccucuuggagcuacaucguggagaccuccucuagcgacaacggcacgugcuauccgggggauuuuauugacuacgaagaacugcgggagcagcuuuccagcgucucuuccuucgaacgcuuugagaucuuccccaagaccagcucuuggccuaaucacgauuccaacaagggagugacagccgcuuguccccaugccggcgcgaaaucuuuuuauaagaaucugaucuggcucguuaaaaagggcaacagcuacccuaaacuguccaagagcuauauuaaugacaaggggaaagaagugcuuguccuguggggaauccaccaccccuccaccucugccgaucaacagagccucuaccagaacgcugacgccuacguguucgugggcacauccagauauagcaagaaauuuaagccugagauugcuauccggccgaaaguccgcgaucaggaggggagaaugaauuacuauuggacccugguugaaucuggagacaagauuacguucgaggccacaggcaaccugguggugccccgguacgcguuugccauggaacgcaacgcuggguccggaaucauuaucagcgauaccccuguccaugacugcaauacaaccugucaaacccccaaaggcgccaucaacacaucucucccuuuccagaauauucaccccaucacgauuggcaagugcccgaaguaugugaaaagcaccaagcugagacuugcuacagggcugcggaacguuccuuccauccagucucgcggacucuuuggcgccauugccggguucaucgagggaggcuggaccgggaugguggacggaugguacggcuaucaucaccagaaugaacaaggcagcggguacgcugcggaucugaaauccacacagaacgccaucgacgagauuaccaauaaggucaacagcgugaucgagaaaaugaauacgcaguuuacagcuguuggaaaggaguucaaccaccuugagaagagaauugaaaaucugaacaaaaagguggaugacggcuuccucgauaucuggaccuacaaugccgagcugcugguccuccuggaaaacgagcggacccuugacuaucaugauucuaaugugaaaaagcuguacgagaaaguccgcucccagcucaagaacaacgccaaggaaauugggaauggauguuuugaguucuaucacaaaugcgacaacacauguauggaaagcgugaagaauggcaccuacgauuaucccaaauacucugaggaagcuaagcugaacagagaggagaucgacgggguuaaacuugaauccacacggaucuaucaaauucuggccaucuacagcacgguggcguccucucucguccuggugguuagccugggcgcuauuuccuuuuggaugugcucuaccggaagccuccagugccgcaucuguauuuga

SEQ ID NO: 198570 - RNA, 1701 nt, Artificial Sequence
  derived and/or modified CDS sequence (opt5) from hemagglutinin__InfluenzaA__ADX96777
augaaggccauccuggugguccuccuguacaccuucgcuacagccaacgcggacacgcuuugcauuggcuaucacgcuaauaacagcaccgauacaguugacaccgugcuggagaagaaugugacagucacccauuccgugaaccuccuggaagauaagcacaaugggaaacuuuguaagcugagaggaguugcuccccuccaucugggcaaaugcaacaucgccggguggauucugggaaauccugagugugaaucucucagcacagccuccucuuggagcuacaucguggagaccuccucuagcgacaacggcacgugcuauccgggggauuuuauugacuacgaagaacugcgggagcagcuuuccagcgucucuuccuucgaacgcuuugagaucuuccccaagaccagcucuuggccuaaucacgauuccaacaagggagugacagccgcuuguccccaugccggcgcgaaaucuuuuuauaagaaucugaucuggcucguuaaaaagggcaacagcuacccuaaacuguccaagagcuauauuaaugacaaggggaaagaagugcuuguccuguggggaauccaccaccccuccaccucugccgaucaacagagccucuaccagaacgcugacgccuacguguucgugggcacauccagauauagcaagaaauuuaagccugagauugcuauccggccgaaaguccgcgaucaggaggggagaaugaauuacuauuggacccugguugugcccggagacaagauuacguucgaagccacaggcaaccugguggucccucgguacgcguuugccauggagcgcaacgcugggucuggaaucauuaucuccgauacccccgugcaugacugcaauacaaccugucaaaccccuaaaggcgccaucaacacaagccuccccuuccagaauauucacucuaucacgauuggcaagugcccgaaguauguuaaaagcaccaagcugagacuugcuacagggcugcggaacgugccuuccauccagucucgcggacucuuuggcgccauugccggguucaucgaaggaggcuggaccgggauggucgacggaugguacggcuaucaucaccagaaugagcaaggcagcggguacgcugcggaucugaaauccacacagaacgccaucgacgaaauuaccaauaaggugaacagcguuaucgagaaaaugaauacgcaguuuacagcugugggaaaggaguucaaccaccuugaaaagagaauugagaaucugaacaaaaaggucgaugacggcuuccucgauaucuggaccuacaaugccgaacugcuggugcuccuggagaacgaacggacccuugacuaucaugauucuaaugucaaaaaccuguacgagaaggugcgcucccagcucaaaaacaaugccaaggagauugggaacggauguuuugaguucuaucacaagugcgacaauacauguauggagagcguuaaaaacggcaccuacgauuaucccaaguacucugaagaggcuaaacugaauagagaagagaucgacggggugaaacuugaguccacacggaucuaucaaauucuggccaucuacagcacggucgcguccucucucgugcugguugugagccugggcgcuauuuccuuuuggaugugcucuaacggaagccuccagugccgcaucuguauuuga

SEQ ID NO: 198571 - RNA, 1701 nt, Artificial Sequence; identical to SEQ ID NO: 194741
  derived and/or modified CDS sequence (opt5) from hemagglutinin__InfluenzaA__ADX96787

SEQ ID NO: 198572 - RNA, 1701 nt, Artificial Sequence; identical to SEQ ID NO: 197968
  derived and/or modified CDS sequence (opt5) from hemagglutinin__InfluenzaA__ADX96797

SEQ ID NO: 198573 - RNA, 1701 nt, Artificial Sequence
  derived and/or modified CDS sequence (opt5) from hemagglutinin__InfluenzaA__ADX96807
augaaggccauccuggugguccuccuguacaccuucgcuacagccaacgcggacacgcuuugcauuggcuaucacgcuaauaacagcaccgauacaguugacaccgugcuggagaaaaaugugacagucacccauuccgugaacauccucgaagauaagcacaaugggaaacuguguaaacuuagaggaguugcuccccugcaucucggcaagugcaacauugccggguggauccugggaaauccugagugugaaucucugagcacagccuccucuuggagcuacauuguggagaccuccucuagcgacaacggcacgugcuauccgggggauuuuaucgacuacgaagaacuccgggagcagcuguccagcgucucuuccuucgaacgcuuugagaucuuccccaagaccagcucuuggccuaaucacgauuccaacaagggagugacagccgcuuguccccaugccggcgcgaaaucuuuuuauaagaaucuuauuuggcugguuaaaaagggcaacagcuacccuaaacucuccaagagcuauaucaaugacaaggggaaagaagugcugguccuuuggggcauucaccaccccuccaccucugccgaucaacagagccuguaccagaacgcugacgccuacguguucgugggauccagcagauuuucuaagaaauucaagccugagaucgcuauucggccgaaaguccgcgaucaggaggggagaaugaauuauuacuggacacucguugaacccggagacaagaucaccuuugaggccacgggcaaccugguggugccucgguaugcguucgccauggaacgcaacgcuggguccggaauuaucaucagcgauacacccguccaugacugcaauaccacaugucaaaccccuaaaggcgccauuaacaccucucugcccuuucagaauauccacccgauuacaaucggcaagugcccuaaguacgugaaaagcacgaagcucagacuggcuaccgggcuucggaacguucccuccauucagucucgcggacuguucggcgccaucgccggguuuaucgagggaggcuggacagggaugguggacggaugguauggcuaccaucaccagaaugaacaaggcagcggguaugcugcggaucucaaauccacccagaacgccauugacgagaucacaaauaaggucaacagcgugauugagaaaaugaauacccaguucacggcuguuggaaaggaguucaaccaccuggagaagagaaucgaaaaucuuaacaaaaagguggaugacggcuuucuggauauuuggacauacaaugccgagcuccugguccugcucgaaaacgagcggacccuggacuaccaugauucuaaugugaaaaaccuuuaugagaagguccgcucccagcugaaaaacaaugccaaggaaguggggaacggauguuucgaguuuuaccacaagugcgacaauaccuguauggaaagcguuaaaaacggcacauaugauuacccuaaguauucugaggaagcuaaacucaauagagaggagaucgacggggugaagcuggaauccacccggaucuaccaaauucuugccaucuauagcacagucgcguccucucuggugcucguugugagccugggcgcuauuuccuucuggaugugcucuaacggaagccugcagugccgcaucuguauuuga

SEQ ID NO: 198574 - RNA, 1701 nt, Artificial Sequence; identical to SEQ ID NO: 194728
  derived and/or modified CDS sequence (opt5) from hemagglutinin__InfluenzaA__ADX96817

SEQ ID NO: 198575 - RNA, 1701 nt, Artificial Sequence
  derived and/or modified CDS sequence (opt5) from hemagglutinin__InfluenzaA__ADX96837
augaaggccauccuggugguccuccuguacaccuucgcuacagccaacgcggacacgcuuugcauuggcuaucacgcuaauaacagcaccgauacaguugacaccgugcuggagaaaaaugugacagucacccauuccgugaacauccucgaagauaagcacaaugggaaacuguguaaacuuagaggaguugcuccccugcaucucggcaagugcaacauugccggguggauccugggaaauccugagugugaaucucugagcacagccuccucuuggagcuacauuguggagaccuccucuagcgacaacggcacgugcuauccgggggauuuuaucgacuacgaagaacuccgggagcagcuguccagcgucucuuccuucgaacgcuuugagaucuuccccaagaccagcucuuggccuaaucacgauuccaacaagggagugacagccgcuugucccuaugccggcgcgaaaucuuuuuacaagaaucuuauuuggcugguuaaaaagggcaacagcuauccuaaacucuccaagagcuacaucaaugacaaggggaaagaagugcugguccuuuggggcauucaucaccccuccaccucugccgaucaacagagccuguaccagaacgcugacgccuauguguucgugggauccagcagauacucuaagaaauuuaagccugagaucgcuauucggccgaaaguccgcgaucaggaggggagaaugaauuauuacuggacacucguugaacccggagacaagaucaccuucgaggccacgggcaaccugguggugccucgguaugcguuugccauggaacgcaacgcuggguccggaauuaucaucagcgauacacccguccacgacugcaauaccacaugucaaaccccuaaaggcgccauuaacaccucucugcccuuccagaauauccauccgauuacaaucggcaagugcccuaaguacgugaaaagcacgaagcucagacuggcuaccgggcuucggaacguucccuccauucagucucgcggacuguuuggcgccaucgccggguucaucgagggaggcuggacagggaugguggacggaugguauggcuaccaccaucagaaugaacaaggcagcggguacgcugcggaucucaaauccacccagaacgccauugacgagaucacaaauaaggucaacagcgugauugagaaaaugaauacccaguuuacggcuguuggaaaggaguucaaccaccuggagaagagaaucgaaaaucuuaacaaaaagguggaugacggcuuccuggauauuuggacauauaaugccgagcuccugguccugcucgaaaacgagcggacccuggacuaccacgauucuaaugugaaaaaccuuuaugagaagguccgcucccagcugaaaaacaaugccaaggaaguggggaacggauguuuugaguucuaccauaagugcgacaauaccuguauggaaagcguuaaaaacggcacauaugauuacccuaaguauucugaggaagcuaaacucaauagagaggagaucgacggggugaagcuggaauccacccggaucuaccaaauucuugccaucuacagcacagucgcguccucucuggugcucguugugagccugggcgcuauuuccuuuuggaugugcucuacgggaagccugcagugccgcaucuguauuuga

SEQ ID NO: 198576 - RNA, 1701 nt, Artificial Sequence; identical to SEQ ID NO: 194741
  derived and/or modified CDS sequence (opt5) from hemagglutinin__InfluenzaA__ADX96847

SEQ ID NO: 198577 - RNA, 1701 nt, Artificial Sequence; identical to SEQ ID NO: 194741
  derived and/or modified CDS sequence (opt5) from hemagglutinin__InfluenzaA__ADX96857

SEQ ID NO: 198578 - RNA, 1701 nt, Artificial Sequence; identical to SEQ ID NO: 194921
  derived and/or modified CDS sequence (opt5) from hemagglutinin__InfluenzaA__ADX96867

SEQ ID NO: 198579 - RNA, 1701 nt, Artificial Sequence; identical to SEQ ID NO: 197678
  derived and/or modified CDS sequence (opt5) from hemagglutinin__InfluenzaA__ADX96877

SEQ ID NO: 198580 - RNA, 1701 nt, Artificial Sequence
  derived and/or modified CDS sequence (opt5) from hemagglutinin__InfluenzaA__ADX96897
augaaggccauccuggugguccuccuguacaccuucgcuacagccaacgcggacacgcuuugcauuggcuaucacgcuaauaacagcaccgauacaguugacaccgugcuggagaaaaaugugacagucacccauuccgugaaccuccuggaagauaagcacaaugggaaacuuuguaagcugagaggaguugcuccccuccaucugggcaaaugcaacaucgccggguggauucugggaaauccugagugugaaucucucagcacagccuccucuuggagcuacaucguggagaccuccucuagcgacaacggcacgugcuauccgggggauuuuauugacuacgaagaacugcgggagcagcuuuccagcgucucuuccuucgaacgcuuugagaucuuccccaagaccagcucuuggccuaaucacgauuccaacaagggagugacagccgcuuguccccaugccggcgcgaaaucuuuuuauaagaaucugaucuggcucguuaaaaagggcaacagcuacccuaaacuguccaagagcuauauuaaugacaaggggaaagaagugcuuguccuguggggaauccaccaccccuccaccucugccgaucaacagagccucuaccagaacgcugacgccuacguguucgugggcacauccagauauagcaagaaauuuaagccugagauugcuauccggccgaaaguccgcgaucaggaggggagaaugaauuacuauuggacccugguugaacccggagacaagauuacguucgaggccacaggcaaccugguggugccucgguacgcguuugccauggaacgcaacgcugggucuggaaucauuaucuccgauacccccauccaugacugcaauacaaccugucaaaccccuaaaggcgccauuaacacaagccuccccuuccagaauauccacccgauuacgaucggcaagugcccuaaguaugucaaaucuaccaagcugagacuugcuacagggcugcggaacgugcccagcauucagucccgcggacucuuuggcgccaucgccggguucaucgagggaggcuggaccgggaugguugacggaugguacggcuaucaucaccagaaugaacaaggcucuggguacgcugcggaucugaaaagcacacagaacgccauugacaagaucaccaauaaagugaacuccgucauugagaagaugaauacgcaguuuacagcugugggaaaggaguucaaccaccuugagaaaagaaucgagaaucugaacaagaaaguugaugacggcuuccucgauauuuggaccuacaaugccgaacugcuggugcuccuggagaacgaacggacccuugacuaucaugauagcaaugucaagaaccuguacgagaaagugcgcucucagcucaagaacaaugccaaggagaucgggaacggauguuuugaguucuaucacaaaugcgacaauacauguauggaauccgucaagaacggcaccuacgauuauccuaaauacagcgaagaggcuaagcugaauagagaagagaucgacggggugaaacuugagucuacacggauuuaucaaauccuggccauuuacuccacgguugcgagcucccucgugcuggucgugucucugggcgcuaucagcuuuuggaugugcuccaacggaucucuccagugccgcauuuguaucuga

SEQ ID NO: 198581 - RNA, 1701 nt, Artificial Sequence
  derived and/or modified CDS sequence (opt5) from hemagglutinin__InfluenzaA__ADX96907
augaaggccauccuggugguccuccuguacaccuucgcuacagccaacgcggacacgcuuugcauuggcuaucacgcuaauaacagcaccgauacaguugacaccgugcuggagaaaaaugugacagucacccauuccgugaaccuccuggaagauaagcacucugggaaacuuuguaagcugagaggaguugcuccccuccaucugggcaaaugcaauaucgccggguggauucugggaaacccugagugugaaagccucuccacagccucuagcugguccuacaucguggagaccucuagcuccgacaauggcacgugcuauccgggggauuuuauugacuacgaagaacugcgggagcagcuuagcucugucuccagcuucgaacgcuuugagaucuuccccaagaccucuuccuggccuaaccacgauagcucuaagggagugacagccgcuuguccccaugccggcgcgaaauccuuuuauaagaaucugaucuggcucguuaaaaagggcaacagcuacccuaaacuguccaagucuuauauuaaugacaaggggaaagaagugcuuguccuguggggaauccaccaccccagcaccuccgccgaucaacagagccucuaccagaacgcugacgccuacguguucgugggcacaucuagauauuccaagaaauuuaagccugagauugcuauccggccgaaaguccgcgaucaggaggggagaaugaauuacuauuggacccugguugaacccggagacaagauuacguucgaggccacaggcaaccugguggugccucgguacgcguuugccauggaacgcaaugcugggagcggaaucauuaucucugauacccccguccaugacugcaacacaaccugucaaaccccuaaaggcgccaucaacacaagccuccccuuccagaauauucacccgaucacgauuggcaagugcccuaaguaugugaaauccaccaagcugagacuugcuacagggcugcggaacguucccucuauccagagccgcggacucuuuggcgccauugccggguucaucgagggaggcuggaccgggaugguggacggaugguacggcuaucaucaccagaaugaacaaggcuccggguacgcugcggaucugaaaagcacacagaacgccaucgacaagauuaccaauaaagucaacucugugaucgagaagaugaauacgcaguuuacagcuguuggaaaggaguucaaccaccuugagaaaagaauugagaaucugaacaagaaaguggaugacggcuuccucgauaucuggaccuacaaugccgaacugcugguccuccuggagaacgaacggacccuugacuaucaugauuccaaugugaagaaccuguacgagaaaguccgcagccagcucaagaauaacgccaaggagauugggaacggauguuuugaguucuaucacaaaugcgacaauacauguauggaaucugugaagaacggcaccuacgauuauccuaaauacuccgaagaggcuaagcugaauagagaagagaucgacgggguuaaacuugagagcacacggaucuaucaaauucuggccaucuacuccacgguggcgucuagccucguccuggugguuucccugggcgcuauuucuuuuuggaugugcagcaacggaucccuccagugccgcaucuguauuuga

SEQ ID NO: 198582 - RNA, 1701 nt, Artificial Sequence
  derived and/or modified CDS sequence (opt5) from hemagglutinin__InfluenzaA__ADX96927
augaaggccauccuggugguccuccuguacaccuucgcuacagccaacgcggacacgcuuugcauuggcuaucacgcuaauaacagcaccgauacaguugacacccugcucgagaaaaaugugacagugacccauuccgucaaccugcuugaagauaagcacaaugggaaacuguguaagcucagaggaguggcuccccugcaucugggcaaaugcaacaucgccggguggauucucggaaauccugagugugaaucucugagcacagccuccucuuggagcuacaucguugagaccuccucuagcgacaacggcacgugcuauccgggggauuuuauugacuacgaagaacuucgggagcagcuguccagcgugucuuccuucgaacgcuuugagaucuuccccaagaccagcucuuggccuaaucacgauuccaacaagggagucacagccgcuuguccccaugccggcgcgaaaucuuuuuauaagaaucucaucuggcuggugaaaaagggcaacagcuacccuaaacuuuccaagagcuauauuaaugacaaggggaaagaaguucuggugcucuggggaauccaccaccccuccaccucugccgaucaacagagccuguaccagaacgcugacgccuacgucuucgugggcacauccagauauagcaagaaauuuaagccugagauugcuauccggccgaaagugcgcgaucaggaggggagaaugaauuacuauuggacccuggucgaacccggagacaagauuacguucgaggccacaggcaaccucguugugccucgguacgcguuugccauggaucgcaacgcugggucuggaaucauuaucuccgacacccccgugcaugacugcaauacaaccugucaaaccccuaaaggcgccaucaacacaagccugcccuuccagaauauucacccgaucacgauuggcaagugcccuaaguaugucaaaucuaccaaacuuagacuggcuacagggcuccggaacgugcccagcauccagucccgcggacuguuuggcgccauugccggguucaucgaaggaggcuggaccgggaugguugauggaugguacggcuaucaucaccagaaugagcaaggcucuggguacgcugcggaccuuaagagcacacagaacgccaucgaugaaauuaccaauaaggugaacuccgucaucgagaaaaugaauacgcaguuuacagcugugggaaaggaguucaaccaccuggaaaagagaauugagaaucucaacaaaaagguugacgauggcuuccuggacaucuggaccuacaaugccgaacugcucgugcugcuugagaacgaacggacccuggauuaucaugacagcaaugucaaaaaccucuacgagaaggugcgcucucagcugaaaaacaaugccaaggagauugggaacggauguuuugaguucuaucacaagugcgauaauacauguauggaguccgucaaaaacggcaccuacgacuauccuaaguacagcgaagaggcuaaacuuaauagagaagagaucgauggggugaagcuggagucuacacggaucuaucaaauucucgccaucuacuccacgguugcgagcucccuggugcuggucgugucucucggcgcuauuagcuuuuggaugugcuccaacggaucucugcagugccgcaucuguauuuga

SEQ ID NO: 198583 - RNA, 1701 nt, Artificial Sequence; identical to SEQ ID NO: 196161
  derived and/or modified CDS sequence (opt5) from hemagglutinin__InfluenzaA__ADX96937

SEQ ID NO: 198584 - RNA, 1701 nt, Artificial Sequence; identical to SEQ ID NO: 194728
  derived and/or modified CDS sequence (opt5) from hemagglutinin__InfluenzaA__ADX96947

SEQ ID NO: 198585 - RNA, 1701 nt, Artificial Sequence; identical to SEQ ID NO: 195905
  derived and/or modified CDS sequence (opt5) from hemagglutinin__InfluenzaA__ADX96957

SEQ ID NO: 198586 - RNA, 1701 nt, Artificial Sequence; identical to SEQ ID NO: 195054
  derived and/or modified CDS sequence (opt5) from hemagglutinin__InfluenzaA__ADX96967

SEQ ID NO: 198587 - RNA, 1701 nt, Artificial Sequence; identical to SEQ ID NO: 194921
  derived and/or modified CDS sequence (opt5) from hemagglutinin__InfluenzaA__ADX96977

SEQ ID NO: 198588 - RNA, 1701 nt, Artificial Sequence
  derived and/or modified CDS sequence (opt5) from hemagglutinin__InfluenzaA__ADX96987
augaaggccauccuggugguccuccuguacaccuucgcuacagccaacgcggacacgcuuugcauuggcuaucacgcuaauaacagcaccgauacaguugacaccgugcuggagaaaaaugugacagucacccauuccgugaacauccucgaagauaagcacaaugggaaacuguguaaacuuagaggaguugcuccccugcaucucggcaagugcaacauugccggguggauccugggaaauccugagugugaaucucugagcacagccuccucuuggagcuacauuguggagaccuccucuagcgacaacggcacgugcuauccgggggauuuuaucgacuacgaagaacuccgggagcagcuguccagcgucucuuccuucgaacgcuuugagaucuuccccaagaccagcucuuggccuaaucacgauuccaacaagggagugacagccgcuuguccccaugccggcgcgaaaucuuuuuauaagaaucuuauuuggcugguuaaaaagggcaacagcuacccuaaacucuccaagagcuauaucaaugacaaggggaaagaagugcugguccuuuggggcauucaccaccccuccaccucugccgaucaacagagccuguaccagaacgcugacgccuacguguucgugggauccagcagauauucuaagaaauuuaagccugagaucgcuauucggccgaaaguccgcgaucaggaggggagaaugaauuacuauuggacacucguugaacccggagacaagaucaccuucgaggccacgggcaaccugguggugccucgguacgcguuugccauggaacgcaacgcuggguccggaauuaucaucagcgauacacccguccaugacugcaauaccacaugucaaaccccuaaaggcgccauuaacaccucucugcccuuccagaauauccacccgauuacaaucggcaagugcccuaaguaugugaaaagcacgaagcucagacuggcuaccgggcuucggaacguucccuccauucagucucgcggacuguuuggcgccaucgccggguucaucgagggaggcuggacagggaugguggacggaugguacggcuaucaucaccagaaugaacaaggcagcggguacgcugcggaucucaaauccacccagaacgccauugacgagaucacaaauaaggucaacagcgugauugagaaaaugaauacccaguuuacggcuguuggaaaggaguucaaccaccuggagaagagaaucgaaaaucuuaacaaaaagguggaugacggcuuccuggauauuuggacauacaaugccgagcuccugguccugcucgaaaacgagcggacccuggacuaucaugauucuaaugugaaaaaccuuuacgagaagguccgcucccagcugaaaaacaaugccaaggaaaucgggaacggauguuuugaguucuaucacaagugcgacaauaccuguauggaaagcgugaaaaacggcacauacgauuauccuaaguacucugaggaagcuaaacucaauagagaggagaucgacgggauuaagcuggaauccacccggaucuaucaaauucuugccaucuacagcacaguugcguccucucuggugcucgucgugagccugggcgcuauuuccuuuuggaugugcucuaacggaagccugcagugccgcaucuguauuuga

SEQ ID NO: 198589 - RNA, 1701 nt, Artificial Sequence; identical to SEQ ID NO: 194921
  derived and/or modified CDS sequence (opt5) from hemagglutinin__InfluenzaA__ADX96997

SEQ ID NO: 198590 - RNA, 1701 nt, Artificial Sequence
  derived and/or modified CDS sequence (opt5) from hemagglutinin__InfluenzaA__ADX97007
augaaggccauccuggugguccuccuguacaccuucgcuacagccaacgcggacacgcuuugcauuggcuaucacgcuaauaacagcaccgauacaguugacaccgugcuggagaagaaugugacagucacccauuccgugaaccuccuggaagauaagcacaaugggaaacuuuguaagcugagaggaguugcuccccuccaucugggcaaaugcaacaucgccggguggauucugggaaauccugagugugaaucucucagcacagccuccucuuggagcuacaucguggagaccuccucuagcgacaacggcacgugcuauccgggggauuuuauugacuacgaagaacugcgggagcagcuuuccagcgucucuuccuucgaacgcuuugagaucuuccccaagaccagcucuuggccuaaucacgauuccaacaagggagugacagccgcuuguccccaugccggcgcgaaaucuuuuuauaagaaucugaucuggcucguuaaaaagggcaacagcuacccuaaacuguccaagagcuauauuaaugacaaggggaaagaagugcuuguccuguggggaauccaccaccccuccaccucugccgaucaacagagccucuaccagaacgcugacgccuacguguucgugggcacauccagauauagcaagaaauuuaagccugagauugcuauccggccgaaaguccgcgaucaggaggggagaaugaauuacuauuggacccugguugaacccggagacaagauuacguucgaggccacaggcaaccugguggugccucgguacgcguuugccauggaacgcaacgcugggucuggaaucauuaucuccgaugcccccguccaugacugcaauaccacaugucaaaccccuaaaggcgcuaucaacaccagccuccccuuccagaauauucacccgaucacaauuggcaagugcccuaaguaugugaaaucuacgaagcugagacuugccaccgggcugcggaacguucccagcauccagucccgcggacucuuuggcgccauugcuggguucaucgagggaggcuggacagggaugguggacggaugguacggcuaucaucaccagaaugaacaaggcucuggguacgcggccgaucugaaaagcacccagaacgcuaucgacgagauuacaaauaaggucaacuccgugaucgagaaaaugaauacccaguuuacggccguuggaaaggaguucaaccaccuugagaagagaauugaaaaucugaacaaaaagguggaugacggcuuccucgauaucuggacauacaaugccgagcugcugguccuccuggaaaacgagcggacccuugacuaucaugauagcaaugugaaaaaccuguacgagaagguccgcucucagcucaaaaacaaugcuaaggaaauugggaacggauguuuugaguucuaucacaagugcgacaauaccuguauggaauccgugaaaaacggcacauacgauuauccuaaguacagcgaggaagccaaacugaauagagaggagaucgacgggguuaaacuugaaucuacccggaucuaucaaauucuggcgaucuacuccacaguggcuagcucccucguccuggugguuucucugggcgccauuagcuuuuggaugugcuccaacggaucucuccagugccgcaucuguauuuga

SEQ ID NO: 198591 - RNA, 1701 nt, Artificial Sequence; identical to SEQ ID NO: 198540
  derived and/or modified CDS sequence (opt5) from hemagglutinin__InfluenzaA__ADX97018

SEQ ID NO: 198592 - RNA, 1701 nt, Artificial Sequence
  derived and/or modified CDS sequence (opt5) from hemagglutinin__InfluenzaA__ADX97028
augaaggccauccuggugguccuccuguacaccuucgcuacagccaacgcggacacgcuuugcauuggcuaucacgcuaauaacagcaccgauacaguugacaccgugcuggagaaaaaugugacagucacccauuccgugaacauccucgaagauaagcacaaugggaaacuguguaaacuuagaggaguugcuccccugcaucucggcaagugcaacauugccggguggauccugggaaauccugagugugaaucucugagcacagccuccucuuggagcuacauuguggagaccuccucuagcgacaacggcacgugcuauccgggggauuuuaucgacuacgaagaacuccgggagcagcuguccagcgucucuuccuucgaacgcuuugagaucuuccccaagaccagcucuuggccuaaucacgauuccaacaagggagugacagccgcuuguccccaugccggcgcgaaaucuuuuuauaagaaucuuauuuggcugguuaaacaaggcaacagcuacccuaagcucuccaaaagcuauaucaaugacaaggggaaggaagugcugguccuuuggggcauucaccaccccuccaccacagccgaucagcagucucuguaccagaacgcugacgccuacguguucgugggaagcuccagauauagcaaaaaguuuaaaccugagaucgcuauucggccgaagguccgcgaucaagaggggagaaugaauuacuauuggacccucguugaacccggagacaaaaucacguucgaggccacaggcaaccugguggugccucgguacgcguuugccauggaacgcaacgcugggucuggaauuaucaucuccgauacccccguccaugacugcaauacaaccugucagaccccuaagggcgccauuaacacaagccugcccuuccagaauauccacccgauuacgaucggcaaaugcccuaaguaugugaagucuaccaaacucagacuggcuacagggcuucggaacguucccagcauucagucccgcggacuguuuggcgccaucgccggguucaucgagggaggcuggaccgggaugguggacggaugguacggcuaucaucaccaaaaugaacagggcucuggguacgcugcggaucucaagagcacacagaacgccauugacgagaucaccaauaaagucaacuccgugauugagaagaugaauacgcaguuuacagcuguuggaaaagaguucaaccaccuggagaagagaaucgaaaaucuuaacaagaaaguggaugacggcuuccuggauauuuggaccuacaaugccgagcuccugguccugcucgaaaacgagcggacccuggacuaucaugauagcaaugugaagaaccuuuacgagaaaguccgcucucaacugaagaacaaugccaaagaaguggggaacggauguuuugaguucuaucacaagugcgacaauacauguauggaauccguuaagaacggcaccuacgauuauccuaaauacagcgaggaagcuaagcucaauagagaggagaucgacggggugaaacuggaaucuacacggaucuaucagauucuugccaucuacuccacggcggcuagcucccugguccucgugguuucucugggcgccauuagcuuuuggaugugcuccaacggaucucugcagugccgcaucuguauuuga

SEQ ID NO: 198593 - RNA, 1701 nt, Artificial Sequence; identical to SEQ ID NO: 197294
  derived and/or modified CDS sequence (opt5) from hemagglutinin__InfluenzaA__ADX98640

SEQ ID NO: 198594 - RNA, 1701 nt, Artificial Sequence; identical to SEQ ID NO: 196293
  derived and/or modified CDS sequence (opt5) from hemagglutinin__InfluenzaA__ADX98650

SEQ ID NO: 198595 - RNA, 1701 nt, Artificial Sequence
  derived and/or modified CDS sequence (opt5) from hemagglutinin__InfluenzaA__ADX98665
augaaggccauccuggugguccuccuguacaccuucgcuacagccaacgcggacacgcuuugcauuggcuaucacgcuaauaacagcaccgauacaguugacaccgugcuggagaagaaugugacagucacccauuccgugaaccuccuggaagauaagcacaaugggaaacuuuguaagcugagaggaguugcuccccuccaucugggcaaaugcaacaucgccggguggauucugggaaauccugagugugaaucucucagcacagccuccucuuggagcuacaucguggagaccuccucuagcggcaacgggacgugcuauccgggagacuuuauugauuacgaagaacugcgggagcagcuuuccagcgucucuuccuucgaacgcuuugagaucuuccccaagaccagcucuuggccuaaucacgacuccaacaagggcgugacagccgcuuguccccaugccggcgcgaaaucuuuuuauaagaaucugaucuggcucguuaaaaaggggaacagcuacccuaaacuguccaagagcuauauuaaugauaagggaaaagaagugcuuguccuguggggcauccaccaccccuccaccucugccgaccaacagagccucuaccagaacgcugaugccuacguguucguggggacauccagauauagcaagaaauuuaagccugagauugcuauccggccgaaaguccgcgaccaggagggaagaaugaauuacuauuggacccugguugaacccggcgauaagauuacguucgaggccacagggaaccugguggugccucgguacgcguuugccauggaacgcaacgcuggaucuggcaucauuaucuccgacacccccguccaugauugcaauacaaccugucaaaccccuaaaggcgccaucaacacaagccuccccuuccagaauauucacccgaucacgauugggaagugcccuaaguaugugaaaucuaccaagcugagacuugcuacaggacugcggaacguucccagcauccagucccgcggccucuuuggggccauugccggauucaucgagggcggguggaccggaaugguggacggcugguacggcuaucaucaccagaaugaacaagggucuggauacgcugcggaccugaaaagcacacagaacgccaucgaugagauuaccaauaaggucaacuccgugaucgagaaaaugaauacgcaguuuacagcuguuggcaaggaguucaaccaccuugagaagagaauugaaaaucugaacaaaaagguggacgauggguuccucgacaucuggaccuacaaugccgagcugcugguccuccuggaaaacgagcggacccuugauuaucaugacagcaaugugaaaaaccuguacgagaagguccgcucucagcucaaaaacaaugccaaggaaauuggaaacggcuguuuugaguucuaucacaagugcgauaauacauguauggaauccgugaaaaacgggaccuacgacuauccuaaguacagcgaggaagcuaaacugaauagagaggagaucgauggcguuaaacuugaaucuacacggaucuaucaaauucuggccaucuacuccacggcggcuagcucccucgugcuggucgugucucugggagccauuagcuuuuggaugugcuccaacggcucucuccagugccgcaucuguauuuga

SEQ ID NO: 198596 - RNA, 1701 nt, Artificial Sequence; identical to SEQ ID NO: 195905
  derived and/or modified CDS sequence (opt5) from hemagglutinin__InfluenzaA__ADX98675

SEQ ID NO: 198597 - RNA, 1701 nt, Artificial Sequence; identical to SEQ ID NO: 195905
  derived and/or modified CDS sequence (opt5) from hemagglutinin__InfluenzaA__ADX98695

SEQ ID NO: 198598 - RNA, 1701 nt, Artificial Sequence; identical to SEQ ID NO: 196293
  derived and/or modified CDS sequence (opt5) from hemagglutinin__InfluenzaA__ADX98729

SEQ ID NO: 198599 - RNA, 1701 nt, Artificial Sequence; identical to SEQ ID NO: 197624
  derived and/or modified CDS sequence (opt5) from hemagglutinin__InfluenzaA__ADX98739

SEQ ID NO: 198600 - RNA, 1701 nt, Artificial Sequence; identical to SEQ ID NO: 197373
  derived and/or modified CDS sequence (opt5) from hemagglutinin__InfluenzaA__ADX98748

SEQ ID NO: 198601 - RNA, 1701 nt, Artificial Sequence; identical to SEQ ID NO: 194741
  derived and/or modified CDS sequence (opt5) from hemagglutinin__InfluenzaA__ADX98758

SEQ ID NO: 198602 - RNA, 1701 nt, Artificial Sequence; identical to SEQ ID NO: 195094
  derived and/or modified CDS sequence (opt5) from hemagglutinin__InfluenzaA__ADX98767

SEQ ID NO: 198603 - RNA, 1701 nt, Artificial Sequence; identical to SEQ ID NO: 196338
  derived and/or modified CDS sequence (opt5) from hemagglutinin__InfluenzaA__ADX98777

SEQ ID NO: 198604 - RNA, 1701 nt, Artificial Sequence
  derived and/or modified CDS sequence (opt5) from hemagglutinin__InfluenzaA__ADX98785
augaaggccauccuggugguccuccuguacacccuugcuacagccaacgcggacacgcugugcauuggcuaucacgcuaauaacagcaccgauacaguugacaccgugcucgagaaaaaugugacagucacccauuccgugaaccugcuugaagauaagcacaaugggaaacuguguaagcucagaggaaucgcuccccugcaucugggcaaaugcaacauugccggguggauccucggaaauccugagugugaaucucugagcacagccuccucuuggagcuacauuguugagaccuccucuagcgacaacggcacgugcuauccgggggauuucaucgacuacgaggaacuucgggagcagcuguccagcgugucuuccuuugaacgcuucgagaucuuucccaagaccagcucuuggccuaaucacgauuccaacaagggagucacagccgcuuguccccaugccggcgcgaaaucuuucuauaagaaucucauuuggcuggugaaaaagggcaacagcuacccuaaacuuuccaagagcuauaucaaugacaaggggaaagaaguucuggugcucuggggcauucaccaccccuccaccucugccgaucaacagagccuguaccagaacgcugacgccuacgucuuugugggaacauccagauauagcaagaaauucaagccugagaucgcuauucggccgaaagugcgcgaucaggaggggagaaugaauuacuauuggacccuggucgaacccggagacaagaucacguuugaggccacaggcaaccucguugugccucgguacgcguucgccauggaacgcaacgcugggucuggaauuaucaucuccgauacccccgugcaugacugcaauacaaccugucaaaccccuaaaggcgccauuaacacaagccugcccuuucagaauauccacccgauuacgaucggcaagugcccuaaguaugucaaaucuaccaaacuuagacuggcuacagggcuccggaacgugcccagcauucagucccgcggacuguucggcgccaucgccggguuuaucgagggaggcuggaccgggaugguugacggaugguacggcuaucaucaccagaaugaacaaggcucuggguacgcugcggaucuuaagagcacacagaacgccauugacgagaucaccaauaaggugaacuccgucauugagaaaaugaauacgcaguucacagcugugggaaaggaauuuaaccaccuggagaagagaaucgaaaaucucaacaaaaagguugaugacggcuuccuggauauuuggaccuacaaugccgagcugcucgugcugcuugaaaacgagcggacccuggacuaucaugauagcaaugucaaaaaccucuacgagaaggugcgcucucagcugaaaaacaaugccaaggaaaucgggaacggauguuucgaguuuuaucacaagugcgacaauacauguauggaauccgucaaaaacggcaccuacgauuauccuaaguacagcgaggaagcuaaacuuaauagagaggagaucgggggcgugaagcuggaaucuacacggauuuaucaaauccucgccauuuacuccacgguugcgagcucccuggugcuggucgugucucucggagcuaucagcuucuggaugugcuccaacggcucucugcagugccgcauuuguaucuga

SEQ ID NO: 198605 - RNA, 1701 nt, Artificial Sequence; identical to SEQ ID NO: 195842
  derived and/or modified CDS sequence (opt5) from hemagglutinin__InfluenzaA__ADX98792

SEQ ID NO: 198606 - RNA, 1701 nt, Artificial Sequence; identical to SEQ ID NO: 195842
  derived and/or modified CDS sequence (opt5) from hemagglutinin__InfluenzaA__ADX98806

SEQ ID NO: 198607 - RNA, 1701 nt, Artificial Sequence; identical to SEQ ID NO: 197782
  derived and/or modified CDS sequence (opt5) from hemagglutinin__InfluenzaA__ADX98818

SEQ ID NO: 198608 - RNA, 1701 nt, Artificial Sequence; identical to SEQ ID NO: 194741
  derived and/or modified CDS sequence (opt5) from hemagglutinin__InfluenzaA__ADX98828

SEQ ID NO: 198609 - RNA, 1701 nt, Artificial Sequence; identical to SEQ ID NO: 198132
  derived and/or modified CDS sequence (opt5) from hemagglutinin__InfluenzaA__ADX98843

SEQ ID NO: 198610 - RNA, 1701 nt, Artificial Sequence
  derived and/or modified CDS sequence (opt5) from hemagglutinin__InfluenzaA__ADX98853
augaaggccauccuggugguccuccuguacaccuucgcuacagccaacgcggacacgcuuugcauuggcuaucacgcuaauaacagcaccgauacaguugacaccgugcuggagaaaaaugugacagucacccauuccgugaaccuccuggaagauaagcacaaugggaaacuuuguaagcugagaggaguugcuccccuccaucugggcaaaugcaacaucgccggguggauucugggaaauccugagugugaaucucucagcaucgccuccucuuggagcuacauuguggagacauccucuagcgacaacggaaccugcuauccgggggauuuuaucgacuacgaagaacugcgggagcagcuuuccagcgucucuuccuucgaacgcuuugagaucuuccccaagacgagcucuuggccuaaucacgauuccaacaagggagugaccgccgcuuguccccaugccggcgcgaaaucuuuuuauaagaaucugauuuggcucguuaaaaagggcaacagcuacccuaaacuguccaagagcuauaucaaugacaaggggaaagaagugcuuguccuguggggcauucaccaccccuccacaucugccgaucaacagagccucuaccagaacgcugacgccuacguguucgugggcaccuccagauauagcaagaaauuuaagccugagaucgcuauucggccgaaaguccgcgaucaggaggggagaaugaauuaccauuggacacugguugaacccggagacaagaucaccuucgaggccacgggcaaccugguggugccucgguaugcguuugccauggaacgcaacgcugggucuggaauuaucaucuccgauacacccguccacgacugcaauaccacaugucaaaccccuaaaggcgccauuaacaccagccuccccuuccagaauauccauccgauuacaaucggcaagugcccuaaguacgugaaaucuacgaagcugagacuugcuaccgggcugcggaacguucccagcauucagucccgcggacucuuuggcgccaucgccggguucaucgagggaggcuggacagggaugguggacggaugguauggcuaccaccaccagaaugaacaaggcucuggguaugcugcggaucugaaaagcacccagaacgccauugacaagaucacaaauaaagucaacuccgugauugagaagaugaauacccaguuuacggcuguuggaaaggaguucaaccaucuugagaaaagaaucgagaaucugaacaagaaaguggaugacggcuuccucgauauuuggacauacaaugccgaacugcugguccuccuggagaacgaacggacccuugacuaccacgauagcaaugugaagaaccuguaugagaaaguccgcucucagcucaagaacaaugccaaggagaucgggaacggauguuuugaguucuaccauaaaugcgacaauaccuguauggaauccgugaagaacggcacauaugauuacccuaaauauagcgaagaggcuaagcugaauagagaagagaucgacgggguuaaacuugagucuacccggauuuaccaaauccuggccauuuauuccacaguggcgagcucccucguccuggugguuucucugggcgcuaucagcuuuuggaugugcuccaacggaucucuccagugccgcauuuguaucuga

SEQ ID NO: 198611 - RNA, 1701 nt, Artificial Sequence; identical to SEQ ID NO: 195905
  derived and/or modified CDS sequence (opt5) from hemagglutinin__InfluenzaA__ADX98860

SEQ ID NO: 198612 - RNA, 1701 nt, Artificial Sequence; identical to SEQ ID NO: 197293
  derived and/or modified CDS sequence (opt5) from hemagglutinin__InfluenzaA__ADX98870

SEQ ID NO: 198613 - RNA, 1701 nt, Artificial Sequence
  derived and/or modified CDS sequence (opt5) from hemagglutinin__InfluenzaA__ADX98880
augaaggccauccuggugguccuccuguacaccuucgcuacagccaacgcggacacgcuuugcauuggcuaucacgcuaauaacagcaccgauacaguugacaccgugcuggagaagaaugugacagucacccauuccgugaaccuccuggaagauaagcacaaugggaaacuuuguaagcugagaggaguugcuccccuccaucugggcaaaugcaacaucgccggguggauucugggaaauccugagugugaaucucucagcacagccuccucuuggagcuacaucguggagaccuccucuagcgacaacggcacgugcuauccgggggauuuuauugacuacgaagaacugcgggagcagcuuuccagcgucucuuccuucgaacgcuuugagaucuuccccaagaccagcucuuggccuaaucacgauuccaacaagggagugacagccgcuuguccccaugccggcgcgaaaucuuuuuauaagaaucugaucuggcucguuaaaaagggcaacagcuacccuaaacuguccaagagcuauauuaaugacaaggggaaagaagugcuuguccuguggggaauccaccaccccuccaccucugccgaucaacagagccucuaccagaacgcugacgccuacguguucgugggcacauccagauauagcaagaaauuuaagccugagauugcuauccggccgaaaguccgcgaucaggaggggagaaugaauuacuauuggacccugguugaacccggagacaagauuacguucgaggccacaggcaaccugguggugccucgguacgcguuugccauggaacgcaacgcugggucuggaaucauuaucuccgauacccccguccaugacugcaauacaaccugucaaaccccuaaaggcgccaucaacacaagccuccccuuccagaauauucacccgaucacgauuggcaagugcccuaaguaugugaaaucuaccaagcugagacuugcuacagggcugcggaacguucccagcauccagucccgcggacucuuuggcgccauugccggguucaucgagggaggcuggaccgggaugguggacggaugguacggcuaucaucaccagaaugaacaaggcucuggguacgcugcggaucugaaaagcacacagaacgccaucgacgagauuaccaauaaggucaacuccaucauugagaaaaugaauacgcaguuuacagcugugggaaaggaguucaaccaccuugagaagagaaucgaaaaucugaacaaaaagguugaugacggcuuccucgauauuuggaccuacaaugccgagcugcuggugcuccuggaaaacgagcggacccuugacuaucaugauagcaaugucaaaaaccuguacgagaaggugcgcucucagcucaaaaacaaugccaaggaaaucgggaacggauguuuugaguucuaucacaagugcgacaauacauguauggaauccgucaaaaacggcaccuacgauuauccuaaguacagcgaggaagcuaaacugaauagagaggagaucgacggggugaaacuugaaucuacacggauuuaucaaauccuggccauuuacuccacgguugcgagcucccucgugcuggucgugucucugggcgcuaucagcuuuuggaugugcuccaacggaucucuccagugccgcauuuguaucuga

SEQ ID NO: 198614 - RNA, 1701 nt, Artificial Sequence
  derived and/or modified CDS sequence (opt5) from hemagglutinin__InfluenzaA__ADX98890
augaaggccauccuggugguccuccuguacaccuucgcuacagccaacgcggacacgcuuugcauuggcuaucacgcuaauaacagcaccgauacaguugacaccgugcuggagaaaaaugugacagucacccauuccgugaaccuccuggaagauaagcacaaugggaaacuuuguaagcugagaggaguugcuccccuccaucugggcaaaugcaacaucgccggguggauucugggaaauccugagugugaaucucucagcacagccuccucuuggagcuacaucguggagaccuccucuagcgacaacggcacgugcuauccgggggauuuuauugacuacgaagaacugcgggagcagcuuuccagcgucucuuccuucgaacgcuuugagaucuuccccaagaccagcucuuggccuaaucacgauuccaacaagggagugacagccgcuuguccccaugccggcgcgaaaucuuuuuauaagaaucugaucuggcucguuaaaaagggcaacagcuacccuaaacuguccaagagcuauauuaaugacaaggggaaagaagugcuuguccuguggggaauccaccaccccuccaccucugccgaucaacagagccucuaccagaacgcugacgccuacguguucgugggcacauccagauauagcaagaaauuuaagccugagauugcuauccggccgaaaguccgcgaucaggaggggagaaugaauuacuauuggacccugguugaacccggagacaagauuacguucgaggccacaggcaaccugguggugccucgguacgcguuugccauggaacgcaacgcugagucugggaucauuaucuccgauacccccguccaugacugcaauacaaccugucaaaccccuaaaggagccaucaacacaagccuccccuuccagaauauucacccgaucacgauuggcaagugcccuaaguaugugaaaucuaccaagcugagacuugcuacaggccugcggaacguucccagcauccagucccgcgggcucuuuggagccauugccggcuucaucgaagggggauggaccggcaugguggacgggugguacggauaucaucaccagaaugagcaaggcucuggcuacgcugcggaucugaaaagcacacagaacgccaucgacaagauuaccaauaaagucaacuccgugaucgagaagaugaauacgcaguuuacagcuguugggaaggaguucaaccaccuugagaaaagaauugaaaaucugaacaagaaaguggaugacggauuccucgauaucuggaccuacaaugccgagcugcugguccuccuggaaaacgagcggacccuugacuaucaugauagcaaugugaagaaccuguacgagaaaguccgcucucagcucaagaacaaugccaaggaaauuggcaacggguguuuugaguucuaucacaaaugcgacaauacauguauggaauccgugaagaacggaaccuacgauuauccuaaauacagcgaggaagcuaagcugaauagagaggagaucgacggcguuaaacuugaaucuacacggaucuaucaaauucuggccaucuacuccacgguggcgagcucccucguccuggugguuucucugggggcuauuagcuuuuggaugugcuccaacggcucucuccagugccgcaucuguauuuga

SEQ ID NO: 198615 - RNA, 1701 nt, Artificial Sequence; identical to SEQ ID NO: 196293
  derived and/or modified CDS sequence (opt5) from hemagglutinin__InfluenzaA__ADX98900

SEQ ID NO: 198616 - RNA, 1701 nt, Artificial Sequence
  derived and/or modified CDS sequence (opt5) from hemagglutinin__InfluenzaA__ADX98910
augaaggccauccuggugguccuccuguacaccuucgcuacagccaacgcggacacgcuuugcauuggcuaucacgcuaauaacagcaccgauacaguugacaccgugcuggagaaaaaugugacagucacccauuccgugaaccuccuggaagauaagcacaaugggaaacuuuguaagcugagaggaguugcuccccuccaucugggcaaaugcaacaucgccggguggauucugggaaauccugagugugaaucucucagcacagccaucuccuggucuuacauuguggagaccagcuccucugacaacggcacgugcuauccgggggauuuuaucgacuacgaagaacugcgggagcagcuuagcuccgucagcucuuucgaacgcuuugagaucuuccccaagaccuccagcuggccuaaucacgauucuaacaagggagugacagccgcuuguccccaugccggcgcgaaauccuuuuauaagaaucugauuuggcucguuaaaaagggcaacagcuacccuaaacugucuaaguccuauaucaaugacaaggggaaagaagugcuuguccuguggggcauucaccaccccagcaccuccgccgaucaacagucucucuaccagaacgcugacgccuacguguucgugggaacaagcagauauuccaagaaauuuaagccugagaucgcuauucggccgaaaguccgcgaucaggaggggagaaugaauuacuauuggacccugguugaacccggagacaagaucacguucgaggccacaggcaaccugguggugccucgguacgcguuugccauggaacgcaacgcugggagcggaauuaucaucucugauacccccguccaugacugcaauacaaccugucaaaccccuaaaggcgccauuaacacaucccuccccuuccagaauauccacccgauuacgaucggcaagugcccuaaguaugugaaaagcaccaagcugagacuugcuacagggcugcggaacguucccucuauucagagccgcggacucuuuggcgccaucgccggguucaucgagggaggcuggaccgggaugguggacggaugguacggcuaucaucaccagaaugaacaaggcuccggguacgcugcggaucugaaaucuacacagaacgccauugacaagaucaccaauaaagucaacagcgugauugagaagaugaauacgcaguuuacagcuguuggaaaggaguucaaccaccuugagaaaagaaucgagaaucugaacaagaaaguggaugacggcuuccucgauauuuggaccuacaaugccgaacugcugguccuccuggagaacgaacggacccuugacuaucaugauuccaaugugaagaaccuguacgagaaaguccgcagccagcucaagaacaaugccaaggagaucgggaacggauguuuugaguucuaucacaaaugcgacaauacauguauggaaucugugaagaacggcaccuacgauuauccuaaauacuccgaagaggcuaagcugaauagagaagagaucgacgggguuaaacuugagagcacacggauuuaucaaauccuggccauuuacucuacgguggcguccagccucguccuggugguuucccugggcgcuaucucuuuuuggaugugcagcaacggaucccuccagugccgcauuuguaucuga

SEQ ID NO: 198617 - RNA, 1701 nt, Artificial Sequence; identical to SEQ ID NO: 196293
  derived and/or modified CDS sequence (opt5) from hemagglutinin__InfluenzaA__ADX98920

SEQ ID NO: 198618 - RNA, 1701 nt, Artificial Sequence; identical to SEQ ID NO: 195905
  derived and/or modified CDS sequence (opt5) from hemagglutinin__InfluenzaA__ADX98930

SEQ ID NO: 198619 - RNA, 1701 nt, Artificial Sequence; identical to SEQ ID NO: 195532
  derived and/or modified CDS sequence (opt5) from hemagglutinin__InfluenzaA__ADX98940

SEQ ID NO: 198620 - RNA, 1701 nt, Artificial Sequence; identical to SEQ ID NO: 197361
  derived and/or modified CDS sequence (opt5) from hemagglutinin__InfluenzaA__ADX98950

SEQ ID NO: 198621 - RNA, 1701 nt, Artificial Sequence; identical to SEQ ID NO: 197342
  derived and/or modified CDS sequence (opt5) from hemagglutinin__InfluenzaA__ADX98960

SEQ ID NO: 198622 - RNA, 1701 nt, Artificial Sequence
  derived and/or modified CDS sequence (opt5) from hemagglutinin__InfluenzaA__ADX98970
augaaggccauccuggugguccuccuguacaccuucgcuacagccaacgcggacacgcuuugcauuggcuaucacgcuaauaacagcaccgauacaguugacaccgugcuggagaaaaaugugacagucacccauuccgugaaccuccuggaagauaagcacaaugggaaacuuuguaagcugagaggaguugcuccccuccaucugggcaaaugcaacaucgccggguggauucugggaaauccugagugugaaucucucagcacagccuccucuuggagcuacaucguggagaccuccucuagcgacaacggcacgugcuauccgggggauuuuauugacuacgaagaacugcgggagcagcuuuccagcgucucuuccuucgaacgcuuugagaucuuccccaagaccagcucuuggccuaaucacgauuccaacaagggagugacagccgcuuguccccaugccggcgcgaaaucuuuuuauaagaaucugaucuggcucguuaaaaagggcaacagcuacccuaaacuguccaagagcuauauuaaugacaaggggaaagaagugcuuguccuguggggaauccaccaccccuccaccucugccgaucaacagggccucuaccagaacgcugacgccuacguguucguggggacaagcagauauuccaagaaauuuaagccugagauugcuauccggccgaaaguccgcgaucaggagggaagaaugaauuacuauuggacccugguugaacccggcgacaagauuacguucgaggccacagggaaccugguggugccucgguacgcguuugccauggaacgcaacgcuggaagcggcaucauuaucucugauacccccguccaugacugcaauacaaccugucaaaccccuaaaggcgccaucaacacaucccuccccuuccagaauauucacccgaucacgauugggaagugcccuaaguaugugaaaagcaccaagcugagacuugcuacaggacugcggaacauccccucuauucagagccgcggccucuuuggggccaucgccggauucaucgagggcggguggaccggaaugguugacggcugguacggcuaucaucaccagaaugaacaaggguccggauacgcugcggaucugaaaucuacacagaacgccauugacaagaucaccaauaaagugaacagcgucauugagaagaugaauacgcaguuuacagcugugggcaaggaguucaaccaccuugagaaaagaaucgagaaucugaacaagaaaguugaugacggguuccucgauauuuggaccuacaaugccgaacugcuggugcuccuggagaacgaacggacccuugacuaucaugauuccaaugucaagaaccuguacgagaaagugcgcagccagcucaagaacaaugccaaggagaucggaaacggcuguuuugaguucuaucacaaaugcgacaauacauguauggaaucugucaagaacgggaccuacgauuauccuaaauacuccgaagaggcuaagcugaauagagaagagaucgacggcgugaaacuugagagcacacggauuuaucaaauccuggccauuuacucuacgguugcguccagccucgugcuggucgugucccugggagcuaucucuuuuuggaugugcagcaacggcucccuccagugccgcauuuguaucuga

SEQ ID NO: 198623 - RNA, 1701 nt, Artificial Sequence; identical to SEQ ID NO: 195842
  derived and/or modified CDS sequence (opt5) from hemagglutinin__InfluenzaA__ADX98980

SEQ ID NO: 198624 - RNA, 1701 nt, Artificial Sequence; identical to SEQ ID NO: 194741
  derived and/or modified CDS sequence (opt5) from hemagglutinin__InfluenzaA__ADX98990

SEQ ID NO: 198625 - RNA, 1701 nt, Artificial Sequence; identical to SEQ ID NO: 195905
  derived and/or modified CDS sequence (opt5) from hemagglutinin__InfluenzaA__ADX99000

SEQ ID NO: 198626 - RNA, 1698 nt, Artificial Sequence
  derived and/or modified CDS sequence (opt5) from hemagglutinin__InfluenzaA__ADX99581
augaaggccaaccugcucgugcugcuuagcgcucuggccgcggcugacgccgauaccaucugcauuggcuaccacgccaauaacuccacagacacggucgauaccguucucgagaaaaaugugacagugacccauucugucaaccugcuugaagacagccacaaugggaagcuguguagacucaaaggaaucgcuccccugcagcugggcaagugcaacauugccggguggcuccugggaaauccugagugugauccgcuucugcccgugcgguccuggucuuauaucguugaaacaccuaacagcgagaauggcauuugcuaccccggggacuucaucgauuaugaagaacuccgcgagcaacuguccucugugagcuccuuugaaagauucgagaucuuuccuaaagaaagcucuuggcccaaccauaauaccaacggagucacagcugccuguucccacgagggcaagagcucuuucuaccggaaucuucuguggcucaccgagaaggaaggcuccuauccuaaacugaagaacagcuacgugaauaaaaaggggaaagagguucuggugcucuggggcauucaucacccgcccaacucuaaggaacagcagaaccuguaucagaaugagaacgcguacgucuccguggugacgagcaauuacaaccgcagauuuaccccugaaaucgccgagcggcccaagguccgcgaccaagcuggaagaaugaauuauuacuggacacuucugaaaccuggggauaccauuaucuucgaggccaacggaaaucucauugcucccauguaugccuuugcgcugucccggggcuucgggucuggaaucauuacaagcaacgccuccaugcacgaaugcaauaccaagugucagacgccgcuuggcgcuaucaacagcucucugccuuaccagaauauccaucccguuacaauuggcgagugcccuaaauaugugcgcuccgccaagcucagaauggugaccgggcugcggaacacacccagcauccagucucgcggacuguuuggcgcuauugccggguucaucgaaggaggcuggaccgggaugauugacggaugguacggcuaucaccaucaaaaugagcagggcagcggguacgccgcugaucagaaauccacccagaacgcgaucaauggaaucacaaacaaggucaacacggugauugagaaaaugaauauccaauuuaccgccguuggcaaggaguucaacaagcucgagaaaagaauggaaaaucugaacaagaaaguggacgauggguuucuugacauuuggacauacaaugcugagcugcucguccugcuugaaaacgagcggacccuggacuuccacgauucuaaugugaagaaccucuaugaaaaaguuaagagccagcugaagaauaacgccaaagagaucggaaauggcuguuucgaguuuuaccacaagugcgacaacgaauguauggaguccgugcgcaaugggacauaugauuaccccaaauauagcgaagagucuaagcugaacagagagaaagucgacggcgugaagcucgaauccaugggaauuuaccagauccuggccaucuauagcaccgucgcuucuucccuugugcugcucguuagccugggcgccauuuccuucuggaugugcucuaaugggagccugcaaugccggaucuguauuuga

SEQ ID NO: 198627 - RNA, 1698 nt, Artificial Sequence; identical to SEQ ID NO: 198626
  derived and/or modified CDS sequence (opt5) from hemagglutinin__InfluenzaA__ADX99592

SEQ ID NO: 198628 - RNA, 1698 nt, Artificial Sequence; identical to SEQ ID NO: 198626
  derived and/or modified CDS sequence (opt5) from hemagglutinin__InfluenzaA__ADX99603

SEQ ID NO: 198629 - RNA, 1698 nt, Artificial Sequence
  derived and/or modified CDS sequence (opt5) from hemagglutinin__InfluenzaA__ADX99614
augaaggccaaccugcucgugcugcuuagcgcucuggccgcggcugacgccgauaccaucugcauuggcuaccacgccaauaacuccacagacacggucgauaccguucucgagaaaaaugugacagugacccauucugucaaccugcuugaagacagccacaaugggaagcuguguagacucaaaggaaucgcuccccugcagcugggcaagugcaacauugccggguggcuccugggaaauccugagugugauccgcuucugcccgugcgguccuggucuuauaucguugaaacaccuaacagcgagaauggcauuugcuaccccggggacuucaucgauuaugaagaacuccgcgagcaacuguccucugugagcuccuuugaaagauucgagaucuuuccuaaagaaagcucuuggcccaaccauaauaccaacggagucacagcugccuguucccacgagggcaagagcucuuucuaccggaaucuucuguggcucaccgagaagaaaggcuccuauccuaagcugaaaaacagcuacgugaauaagaaagggaaggaaguucuggugcucuggggcauucaucacccgcccaacucuaaggagcagcagaaccuguaucagaaugaaaacgcguacgucuccguggugacgagcaauuacaaccgcagauuuaccccugagaucgccgaacggcccaaaguccgcgaccaagcuggaagaaugaauuauuacuggacacuucugaagccuggggauaccauuaucuucgaggccaacggaaaucucauugcucccauguaugccuuugcgcugucccggggcuucgggucuggaaucauuacaagcaacgccuccaugcacgagugcaauaccaaaugucagacgccgcuuggcgcuaucaacagcucucugccuuaccagaauauccaucccguuacaauuggcgaaugcccuaaguaugugcgcuccgccaaacucagaauggugaccgggcugcggaacacacccagcauccagucucgcggacuguuuggcgcuauugccggguucaucgagggaggcuggaccgggaugauugacggaugguacggcuaucaccaucaaaaugaacagggcagcggguacgccgcugaucagaaguccacccagaacgcgaucaauggaaucacaaacaaagucaacacggugauugagaagaugaauauccaauuuaccgccguuggcaaggaguucaacaaacucgagaagagaauggagaaucugaacaaaaagguggacgauggguuucuugacauuuggacauacaaugcugaacugcucguccugcuugagaacgaacggacccuggacuuccacgauucuaaugugaaaaaccucuaugagaagguuaagagccagcugaaaaauaacgccaaggaaaucggaaauggcuguuucgaguuuuaccacaaaugcgacaacgaguguauggaauccgugcgcaaugggacauaugauuaccccaaguauagcgaggaaucuaaacugaacagagagaaggucgacggcgugaagcucgaguccaugggaauuuaccagauccuggccaucuauagcaccgucgcuucuucccuugugcugcucguuagccugggcgccauuuccuucuggaugugcucuaaugggagccugcaaugccggaucuguauuuga

SEQ ID NO: 198630 - RNA, 1698 nt, Artificial Sequence
  derived and/or modified CDS sequence (opt5) from hemagglutinin__InfluenzaA__ADX99625
augaaggccaaccugcucgugcugcuuagcgcucuggccgcggcugacgccgauaccaucugcauuggcuaccacgccaauaacuccacagacacggucgauaccguucucgagaaaaaugugacagugacccauucugucaaccugcuugaagacagccacaaugggaagcuguguagacucaaaggaaucgcuccccugcagcugggcaagugcaacauugccggguggcuccugggaaauccugagugugauccgcuucugcccgugcgguccuggucuuauaucguugaaacaccuaacagcgagaauggcauuugcuaccccggggacuucaucgauuaugaagaacuccgcgagcaacuguccucugugagcuccuuugaaagauucgagaucuuuccuaaagaaagcucuuggcccaaccauaauaccaacggagucacagcugccuguucccacgagggcaagagcucuuucuaccggaaucuucuguggcucaccgagaaggaaggcuccuauccuaaacugaagaacagcuacgugaauaaaaaggggaaagagguucuggugcucuggggcauucaucacccgcccaacucuaaggaacagcagaaccuguaucagaaugagaacgcguacgucuccguggugacgagcaauuacaaccgcagauuuaccccugaaaucgccgagcggcccaagguccgcgaccaagcuggaagaaugaauuauuacuggacacuucugaaaccuggggauaccauuaucuucggagccaacggcaaucucauugcucccauguaugccuuugcgcugucccggggguucggaucuggcaucauuacaagcaacgccuccaugcacgagugcaauaccaagugucagacgccgcuuggcgcuaucaacagcucucugccuuaccagaauauccaucccguuacaauuggggaaugcccuaaauaugugcgcuccgccaagcucagaauggugaccggacugcggaacacacccagcauccagucucgcggccuguuuggggcuauugccggauucaucgagggcggguggaccggaaugauugacggcugguacggcuaucaccaucaaaaugaacaggggagcggauacgccgcugaucagaaauccacccagaacgcgaucaauggcaucacaaacaaggucaacacggugauugagaaaaugaauauccaauuuaccgccguugggaaggaguucaacaagcucgagaaaagaauggagaaucugaacaagaaaguggacgauggauuucuugacauuuggacauacaaugcugaacugcucguccugcuugagaacgaacggacccuggacuuccacgauucuaaugugaagaaccucuaugagaaaguuaagagccagcugaagaauaacgccaaagaaaucggcaauggguguuucgaguuuuaccacaagugcgacaacgaguguauggaauccgugcgcaauggcacauaugauuaccccaaauauagcgaggaaucuaagcugaacagagagaaagucgacggagugaagcucgaguccaugggcauuuaccagauccuggccaucuauagcaccgucgcuucuucccuugugcugcucguuagccugggggccauuuccuucuggaugugcucuaauggaagccugcaaugccggaucuguauuuga

SEQ ID NO: 198631 - RNA, 1698 nt, Artificial Sequence
  derived and/or modified CDS sequence (opt5) from hemagglutinin__InfluenzaA__ADX99636
augaaggccaaccugcucgugcugcuuagcgcucuggccgcggcugacgccgauaccaucugcauuggcuaccacgccaauaacuccacagacacggucgauaccguucucgagaaaaaugugacagugacccauucugucaaccugcuugaagacagccacaaugggaagcuguguagacucaaaggaaucgcuccccugcagcugggcaagugcaacauugccggguggcuccugggaaauccugagugugauccgcuucugcccgugcgguccuggucuuauaucguugaaacaccuaacagcgagaauggcauuugcuaccccggggacuucaucgauuaugaagaacuccgcgagcaacuguccucugugagcuccuuugaaagauucgagaucuuuccuaaagaaagcucuuggcccaaccauaauaccaacggagucacagcugccuguucccacgagggcaagagcucuuucuaccggaaucuucuguggcucaccaagaaagagggcuccuauccuaagcugaaaaacagcuacgugaauaagaaagggaaggaaguucuggugcucuggggcauucaucacccgcccaacucuaaggagcagcagaaccuguaucagaaugaaaacgcguacgucuccguggugacgagcaauuacaaccgcagauuuaccccugagaucgccgaacggcccaaaguccgcgaccaagcuggaagaaugaauuauuacuggacacuucugaagccuggggauaccauuaucuucgaggccaacggaaaucucauugcucccauguaugccuuugcgcugucccggggcuucgggucuggaaucauuacaagcaacgccuccaugcacgagugcaauaccaaaugucagacgccgcuuggcgcuaucaacagcucucugccuuaccagaauauccaucccguuacaauuggcgaaugcccuaaguaugugcgcuccgccaaacucagaauggugaccgggcugcggaacacacccagcauccagucucgcggacuguuuggcgcuauugccggguucaucgagggaggcuggaccgggaugauugacggaugguacggcuaucaccaucaaaaugaacagggcagcggguacgccgcugaucagaaguccacccagaacgcgaucaauggaaucacaaacaaagucaacacggugauugagaagaugaauauccaauuuaccgccguuggcaaggaguucaacaaacucgagaagagaauggagaaucugaacaaaaagguggacgauggguuucuugacauuuggacauacaaugcugaacugcucguccugcuugagaacgaacggacccuggacuuccacgauucuaaugugaaaaaccucuaugagaagguuaagagccagcugaaaaauaacgccaaggaaaucggaaauggcuguuucgaguuuuaccacaaaugcgacaacgaguguauggaauccgugcgcaaugggacauaugauuaccccaaguauagcgaggaaucuaaacugaacagagagaaggucgacggcgugaagcucgaguccaugggaauuuaccagauccuggccaucuauagcaccgucgcuucuucccuugugcugcucguuagccugggcgccauuuccuucuggaugugcucuaaugggagccugcaaugccggaucuguauuuga

SEQ ID NO: 198632 - RNA, 1698 nt, Artificial Sequence; identical to SEQ ID NO: 195350
  derived and/or modified CDS sequence (opt5) from hemagglutinin__InfluenzaA__ADX99647

SEQ ID NO: 198633 - RNA, 1698 nt, Artificial Sequence
  derived and/or modified CDS sequence (opt5) from hemagglutinin__InfluenzaA__ADX99680
augaaggccaaccugcucgugcugcuuugcgcucuggccgcggcugacgccgauaccaucuguauuggcuaccacgccaauaacagcacagacacggucgauaccguucucgagaaaaaugugacagugacccauuccgucaaccugcuugaagacucucacaaugggaagcugugcagacucaaaggaaucgcuccccugcagcugggcaaguguaacauugccggguggcuccugggaaauccugagugcgauccgcuucugcccgugcggagcugguccuauaucguugaaacaccuaacucugagaauggcauuuguuaccccggggacuucaucgauuaugaagaacuccgcgagcaacugagcuccgugucuagcuuugaaagauucgagaucuuuccuaaagaauccagcuggucuaaccauaauaccaacggagucacagcugccugcucccacgagggcaagagcucuuucuaccggaaucuucuguggcucaccgagaaggaaggcuccuaucccaaacugaagaacagcuacgugaauaaaaaggggaaagagguucuggugcucuggggcauucaucacccuccgaacucuaaggaacagcagaaccuguaucagaaugagaacgcguacgucuccguggugacgagcaauuacaaccgcagauuuacccccgaaaucgccgagcggccuaagguccgcgaccaagcuggaagaaugaauuauuacuggacacuucugaaacccggggauaccauuaucuucgaggccaacggaaaucucauugcuccuauguaugccuuugcgcugucccggggcuucgggucuggaaucauuacaagcaacgccuccaugcacgaauguaauaccaagugccagacgccccuuggcgcuaucaacagcucucugccguaccagaauauccauccuguuacaauuggcgagugucccaaauaugugcgcuccgccaagcucagaauggugaccgggcugcggaacaucccuagcauucagucucgcggacuguuuggcgcuaucgccggguucauugaaggaggcuggacagggaugaucgacggaugguacggcuaucaccaucaaaaugagcagggcagcggguacgccgcugaucagaaauccacccagaacgcgaucaauggaauuaccaacaaggucaacacagugaucgagaaaaugaauauucaauuuacggccguuggcaaggaguucaacaagcucgagaaaagaauggaaaaucugaacaagaaaguggacgauggguuucuugacaucuggaccuacaaugcugagcugcucguccugcuugaaaacgagcggacacuggacuuccacgauucuaaugugaagaaccucuaugaaaaaguuaagagccagcugaagaauaacgccaaagagauuggaaauggcugcuucgaguuuuaccacaagugugacaacgaaugcauggaguccgugcgcaaugggaccuaugauuaccccaaauauagcgaagagucuaagcugaacagagagaaagucgacggcgugaagcucgaauccaugggaaucuaccagauccuggccauuuauagcacagucgcuucuucccuugugcugcucguuagccugggcgccaucuccuucuggaugugcucuaaugggagccugcaaugucggauuugcaucuga

SEQ ID NO: 198634 - RNA, 1698 nt, Artificial Sequence
  derived and/or modified CDS sequence (opt5) from hemagglutinin__InfluenzaA__ADX99702
augaaggccaaccugcucgugcugcuuugcgcucuggccgcggcugacgccgauaccaucuguauuggcuaccacgccaauaacagcacagacacggucgauaccguucucgagaaaaaugugacagugacccauuccgucaaccugcuugaagacucucacaaugggaagcugugcagacucaaaggaaucgcuccccugcagcugggcaaguguaacauugccggguggcuccugggaaauccugagugcgauccgcuucugcccgugcggagcugguccuauaucguugaaacaccuaacucugagaauggcauuuguuaccccggggacuucaucgauuaugaggaacuccgcgagcaacugagcuccgugucuagcuuugaaagauucgagaucuuuccuaaagaauccagcuggcccaaccauaauaccaacggagucacagcugccugcucucacgagggcaaguccagcuucuaccggaaucuucuguggcucaccgagaaggaaggcucuuauccuaaacugaagaaauccuacgugaacaagaaagggaaggagguucuggugcucuggggcauucaucacccgcccaauagcaaggaacagcagaaccuguaucagaacgagaaugcguacgucucuguggugacguccaacuacaaucgcagauuuaccccugaaaucgccgagcggcccaaaguccgcgaccaagcuggaagaaugaacuauuacuggacacuucugaagccuggggauaccauuaucuucgaggccaauggaaaccucauugcucccauguaugccuuugcgcugagccggggcuucggguccggaaucauuacaucuaaugccagcaugcacgaauguaacaccaaaugccagacgccgcuuggcgcuaucaauuccagccugccuuaccagaacauccaucccguuacaauuggcgaguguccuaaguaugugcgcucugccaaacucagaauggugaccgggcugcggaauauccccuccauucagagccgcggacuguuuggcgcuaucgccggguucauugaaggaggcuggacagggaugaucgacggaugguacggcuaucaccaucaaaacgagcagggcucuggguacgccgcugaucaaaagagcacccagaaugcgaucaacggaauuaccaauaaagucaacacagugaucgaaaagaugaacauucaguuuacggccguuggcaaggaguucaauaaacucgagaagagaauggaaaaccugaauaaaaagguggacgauggguuucuugacaucuggaccuacaacgcugagcugcucguccugcuugaaaaugagcggacacuggacuuccacgauuccaacgugaaaaaucucuaugaaaagguuaagucucagcugaaaaacaaugccaaggagauuggaaacggcugcuucgaguuuuaccacaaaugugacaaugaaugcauggagagcgugcgcaacgggaccuaugauuaccccaaguauuccgaagagagcaaacugaauagagagaaggucgacggcgugaagcucgaaucuaugggaaucuaccagauccuggccauuuauuccacagucgcuagcucucuugugcugcucguuucccugggcgccaucagcuucuggaugugcuccaacgggucucugcaaugucggauuugcaucuga

SEQ ID NO: 198635 - RNA, 1698 nt, Artificial Sequence; identical to SEQ ID NO: 198634
  derived and/or modified CDS sequence (opt5) from hemagglutinin__InfluenzaA__ADX99843

SEQ ID NO: 198636 - RNA, 1698 nt, Artificial Sequence
  derived and/or modified CDS sequence (opt5) from hemagglutinin__InfluenzaA__ADX99854
augaaggccaaccugcucgugcugcuuugcgcucuggccgcggcugacgccgauaccaucuguauuggcuaccacgccaauaacagcacagacacggucgauaccguucucgagaaaaaugugacagugacccauuccgucaaccugcuugaagacucucacaaugggaagcugugcagacucaaaggaaucgcuccccugcagcugggcaaguguaacauugccggguggcuccugggaaauccugagugcgauccgcuucugcccgugcggagcugguccuauaucguugaaacaccuaacucugagaauggcauuuguuaccccggggacuucaucgauuaugaagaacuccgcgagcaacugagcuccgugucuagcuuugaaagauucgagaucuuuccuaaagaauccagcuggcccaaccauaauaccaacggagucacagcugccugcucucacgagggcaaguccagcuucuaccggaaucuucuguggcucaccgagaaggaaggcucuuaucugaaacugaagaacuccuacgugaauaaaaaggggaaagagguucucgugcuguggggcauucaucacccuccgaacagcaaggaacagcagaaccuuuaucagaaugagaacgcguacgucucuguggugacguccaauuacaaccgcagauuuacccccgaaaucgccgagcggccuaagguccgcgaccaagcuggaagaaugaauuauuacuggacacugcucaaacccggggauaccauuaucuucgaggccaacggaaaucugauugcuccuauguaugccuuugcgcuuagccggggcuucggguccggaaucauuacaucuaacgccagcaugcacgaauguaauaccaagugccagacgccccugggcgcuaucaacuccagccucccguaccagaauauccauccuguuacaauuggcgagugucccaaauaugugcgcucugccaagcugagaauggugaccgggcugcggaacaucccuuccauucagagccgcggacucuuuggcgcuaucgccggguucauugaaggaggcuggacagggaugaucgacggaugguacggcuaucaccaucaaaaugagcagggcucuggguacgccgcugaucagaaaagcacccagaacgcgaucaauggaauuaccaacaaggucaacacagugaucgagaaaaugaauauucaauuuacggccguuggcaaggaguucaacaagcuggagaaaagaauggaaaaucuuaacaagaaaguggacgauggguuucuggacaucuggaccuacaaugcugagcuccugguccuucuggaaaacgagcggacacucgacuuccacgauuccaaugugaagaaccuguaugaaaaaguuaagucucagcugaagaauaacgccaaagagauuggaaauggcugcuucgaguuuuaccacaagugugacaacgaaugcauggagagcgugcgcaaugggaccuaugauuaccccaaauauuccgaagagagcaagcucaacagagagaaagucgacggcgugaagcuggaaucuaugggaaucuaccagauccuugccauuuauuccacagucgcuagcucucuggugcuccugguuucccugggcgccaucagcuucuggaugugcuccaaugggucucuucaaugucggauuugcaucuga

SEQ ID NO: 198637 - RNA, 1698 nt, Artificial Sequence
  derived and/or modified CDS sequence (opt5) from hemagglutinin__InfluenzaA__ADX99865
augaaggccaaccugcucgugcugcuuugcgcucuggccgcggcugacgccgauaccaucuguauuggcuaccacgccaauaacagcacagacacggucgauaccguucucgagaaaaaugugacagugacccauuccgucaaccugcuugaagacucucacaaugggaagcugugcagacucaaaggaaucgcuccccugcagcugggcaaguguaacauugccggguggcuccugggaaauccugagugcgauccgcuucugcccgugcggagcugguccuauaucguugaaacaccuaacucugagaauggcauuuguuaccccggggacuucaucgauuaugaagaacuccgcgagcaacugagcuccgugucuagcuuugaaagauucgagaucuuuccuaaagaauccagcuggcccaaccauaauaccaacggagucacagcugccugcucucacgagggcaaguccagcuucuaccggaaucuucuguggcucaccgagaaggaaggcucuuauccuaaacagaagaacuccuacgugaauaaaaaggggaaagagguucuggugcuguggggcauucaucacccgcccaacagcaaggaacagcagaaccucuaucaaaaugagaacgcguacgucucuguggugacguccaauuacaaccgcagauuuaccccugaaaucgccgagcggcccaagguccgcgaccaggcuggaagaaugaauuauuacuggacacugcuuaaaccuggggauaccauuaucuucgaggccaacggaaaucugauugcucccauguaugccuuugcgcucagccggggcuucggguccggaaucauuacaucuaacgccagcaugcacgaauguaauaccaagugccagacgccgcugggcgcuaucaacuccagccuuccuuaccagaauauccaucccguuacaauuggcgaguguccuaaauaugugcgcucugccaagcugagaauggugaccgggcuccggaacauccccuccauucaaagccgcggacuguuuggcgcuaucgccggguucauugaaggaggcuggacagggaugaucgacggaugguacggcuaucaccaucagaaugagcagggcucuggguacgccgcugaucagaaaagcacccaaaacgcgaucaauggaauuaccaacaaggucaacacagugaucgagaaaaugaauauucaguuuacggccguuggcaaggaguucaacaagcuggagaaaagaauggaaaaucucaacaagaaaguggacgauggguuucuggacaucuggaccuacaaugcugagcuucugguccuccuggaaaacgagcggacacuugacuuccacgauuccaaugugaagaaccuguaugaaaaaguuaagucucagcucaagaauaacgccaaagagauuggaaauggcugcuucgaguuuuaccacaagugugacaacgaaugcauggagagcgugcgcaaugggaccuaugauuaccccaaauauuccgaagagagcaagcugaacagagagaaagucgacggcgugaagcuggaaucuaugggaaucuaccaaauccucgccauuuauuccacagucgcuagcucucuggugcuucugguuucccucggcgccaucagcuucuggaugugcuccaaugggucucugcagugucggauuugcaucuga

SEQ ID NO: 198638 - RNA, 1698 nt, Artificial Sequence
  derived and/or modified CDS sequence (opt5) from hemagglutinin__InfluenzaA__ADX99887
augaaggccaaccugcucgugcugcuuugcgcucuggccgcggcugacgccgauaccaucuguauuggcuaccacgccaauaacagcacagacacggucgauaccguucucgagaaaaaugugacagugacccauuccgucaaccugcuugaagacucucacaaugggaagcugugcagacucaaaggaaucgcuccccugcagcugggcaaguguaacauugccggguggcuccugggaaauccugagugcgauccgcuucugcccgugcggagcugguccuauaucguugaaacaccuaacucugagaauggcauuuguuaccccggggacuucaucgauuaugaggaacuccgcgagcaacugagcuccgugucuagcuuugaaagauucgagaucuuuccuaaagaauccagcuggcccaaccauaauaccaacggagucacagcugccugcucucacgagggcaaguccagcuucuaccggaaucuucuguggcucaccgagaaggaaggcucuuauccuaaacuggagaacuccuacgugaauaagaaagggaaggaaguucuggugcucuggggcauucaucacccgcccaacagcaaagagcagcagaaccuguaucagaaugaaaacgcguacgucucuguggugacguccaauuacaaccgcagauuuaccccugagaucgccgagcggagcaagguccgcgaccaagcuggaagaaugaauuauuacuggacacuucugaagcccggggauaccauuaucuucgaagccaacggaaaucucauugcuccuauguaugccuuugcgcugucccggggcuucgggucuggaaucauuacaagcaacgccuccaugcacgaguguaauaccaaaugccagacgccccuuggcgcuaucaacagcucucugccguaccagaauauccauccuguuacaauuggcgaaugucccaaguaugugcgcuccgccaaacucagaauggugaccgggcugcggaacaucccuagcauucagucucgcggacuguuuggcgcuaucgccggguucauugagggaggcuggacagggaugaucgacggaugguacggcuaucaccaucaaaaugaacagggcagcggguacgccgcugaucagaaguccacccagaacgcgaucaauggaauuaccaacaaagucaacacagugaucgagaagaugaauauucaauuuacggccguuggcaaagaguucaacaagcucgaaaagagaauggagaaucugaacaaaaagguggacgauggguuucuugacaucuggaccuacaaugcugaacugcucguccugcuugagaacgaacggacacuggacuuccacgauucuaaugugaaaaaccucuaugagaagguuaaaagccagcugaagaauaacgccaaggagauuggaaauggcugcuucgaauuuuaccacaaaugugacaacgagugcauggaauccgugcgcaaugggaccuaugauuaccccaaguauagcgaggagucuaaacugaacagagaaaaggucgacggcgugaaacucgaguccaugggaaucuaccagauccuggccauuuauagcacagucgcuucuucccuugugcugcucguuagccugggcgccaucuccuucuggaugugcucuaaugggagccugcaaugucggauuugcaucuga

SEQ ID NO: 198639 - RNA, 1698 nt, Artificial Sequence
  derived and/or modified CDS sequence (opt5) from hemagglutinin__InfluenzaA__ADX99898
augaaggccaaccugcucgugcugcuuugcgcucuggccgcggcugacgccgauaccaucuguauuggcuaccacgccaauaacagcacagacacggucgauaccguucucgagaaaaaugugacagugacccauuccgucaaccugcuugaagacucucacaaugggaagcugugcagacucaaaggaaucgcuccccugcagcugggcaaguguaacauugccggguggcuccugggaaauccugagugcgauccgcuucugcccgugcggagcugguccuauaucguugaaacaccuaacucugagaauggcauuuguuaccccggggacuucaucgauuaugaagaacuccgcgagcaacugagcuccgugucuagcuuugaaagauucgagaucuuuccuaaagaauccagcuggcccaaccauaauaccaacggagucacagcugccugcucucacgagggcaaguccagcuucuaccggaaucuucuguggcucaccgagaaggaaggcucuuauccuaaacugaagaacuacuaugugaauaaaaaggggaaagagguucuggugcucuggggcauucaucacccgcccaacuccaaggaacagcagaaccuguaccagaaugagaacgcguacgucagcguggugacgucuaauuauaaccgcagauuuaccccugaaaucgccgagcggcccaagguccgcgaccaagcuggaagaaugaauuacuauuggacacuucugaaaccuggggauaccauuaucuucgaggccaacggaaaucucauugcucccauguacgccuuugcgcugucccggggcuucgggagcggaaucauuacauccaacgccucuaugcacgaauguaauaccaagugccagacgccgcuuggcgcuaucaacagcucccugccuuaucagaauauccaucccguuacaauuggcgaguguccuaaauacgugcgcagcgccaagcucagaauggugaccgggcugcggaacauccccucuauucagucccgcggacuguuuggcgcuaucgccggguucauugaaggaggcuggacagggaugaucgacggaugguauggcuaccaccaucaaaaugagcagggcagcggguacgccgcugaucagaaaucuacccagaacgcgaucaauggaauuaccaacaaggucaacacagugaucgagaaaaugaauauucaauuuacggccguuggcaaggaguucaacaagcucgagaaaagaauggaaaaucugaacaagaaaguggacgauggguuucuugacaucuggaccuauaaugcugagcugcucguccugcuugaaaacgagcggacacuggacuuccacgauagcaaugugaagaaccucuacgaaaaaguuaagucccagcugaagaauaacgccaaagagauuggaaauggcugcuucgaguuuuaucacaagugugacaacgaaugcauggagucugugcgcaaugggaccuacgauuaucccaaauacagcgaagaguccaagcugaacagagagaaagucgacggcgugaagcucgaaagcaugggaaucuaucagauccuggccauuuacucuacagucgcuuccagccuugugcugcucguuucucugggcgccaucuccuucuggaugugcagcaaugggucccugcaaugucggauuugcaucuga

SEQ ID NO: 198640 - RNA, 1698 nt, Artificial Sequence
  derived and/or modified CDS sequence (opt5) from hemagglutinin__InfluenzaA__ADX99909
augaaggccaaccugcucgugcugcuuugcgcucuggccgcggcugacgccgauaccaucuguauuggcuaccacgccaauaacagcacagacacggucgauaccguucucgagaaaaaugugacagugacccauuccgucaaccugcuugaagacucucacaaugggaagcugugcagacucaaaggaaucgcuccccugcagcugggcaaguguaacauugccggguggcuccugggaaauccugagugcgauccgcuucugcccgugcggagcugguccuauaucguugaaacaccuaacucugagaauggcauuuguuaccccggggacuucaucgauuaugaagaacuccgcgagcaacugagcuccgugucuagcuuugaaagauucgagaucuuuccuaaagaauccagcuggcccaaccauaauaccaacggagucacagcugccugcucucacgagggcaaguccagcuucuaccggaaucuucuguggcucaccgagaaggaaggcucuuauccuaaacugaagaacuuuuacgugaauaaaaaggggaaagagguucuggugcucuggggcauucaucacccgcccaacuccaaggaacagcagaaccuguaucagaaugagaacgcguacgucagcguggugacgucuaauuacaaccgcagauucaccccugaaaucgccgagcggcccaagguccgcgaccaagcuggaagaaugaauuauuacuggacacuucugaaaccuggggauaccauuaucuuugaggccaacggaaaucucauugcucccauguaugccuucgcgcugucccggggcuuugggagcggaaucauuacauccaacgccucuaugcacgaauguaauaccaagugccagacgccgcuuggcgcuaucaacagcucccugccuuaccagaauauccaucccguuacaauuggcgaguguccuaaauaugugcgcagcgccaagcucagaauggugaccgggcugcggaacauccccucuauucagucccgcggacuguucggcgcuaucgccggguuuauugaaggaggcuggacagggaugaucgacggaugguacggcuaucaccaucaaaaugagcagggcagcggguacgccgcugaucagaaaucuacccagaacgcgaucaauggaauuaccaacaaggucaacacagugaucgagaaaaugaauauucaauucacggccguuggcaaggaguuuaacaagcucgagaaaagaauggaaaaucugaacaagaaaguggacgauggguuccuugacaucuggaccuacaaugcugagcugcucguccugcuugaaaacgagcggacacuggacuuccacgauagcaaugugaagaaccucuaugaaaaaguuaagucccagcugaagaauaacgccaaagagauuggaaauggcugcuuugaguucuaccacaagugugacaacgaaugcauggagucugugcgcaaugggaccuaugauuaccccaaauauagcgaagaguccaagcugaacagagagaaagucgacggcgugaagcucgaaagcaugggaaucuaccagauccuggccauuuauucuacagucgcuuccagccuugugcugcucguuucucugggcgccaucuccuuuuggaugugcagcaaugggucccugcaaugucggauuugcaucuga

SEQ ID NO: 198641 - RNA, 1698 nt, Artificial Sequence; identical to SEQ ID NO: 198640
  derived and/or modified CDS sequence (opt5) from hemagglutinin__InfluenzaA__ADX99920

SEQ ID NO: 198642 - RNA, 1698 nt, Artificial Sequence
  derived and/or modified CDS sequence (opt5) from hemagglutinin__InfluenzaA__ADX99931
augaaggccaaccugcucgugcugcuuugcgcucuggccgcggcugacgccgauaccaucuguauuggcuaccacgccaauaacagcacagacacggucgauaccguucucgagaaaaaugugacagugacccauuccgucaaccugcuugaagacucucacaaugggaagcugugcagacucaaaggaaucgcuccccugcagcugggcaaguguaacauugccggguggcuccugggaaauccugagugcgauccgcuucugcccgugcggagcugguccuauaucguugaaacaccuaacucugagaauggcauuuguuaccccggggacuucaucgauuaugaggaacuccgcgagcaacugagcuccgugucuagcuuugaaagauucgagaucuuuccuaaagaauccagcuggcccaaccauaauaccaacggagucacagcugccugcucucacgagggcaaguccagcuucuaccggaaucuucuguggcucaccgagaaggaaggcucuuauccuaaacuggagaacuccuacgugaauaagaaagggaaggaaguucuggugcucuggggcauucaucacccgcccaacagcaaagagcagcagaaccuguaucagaaugaaaacgcguacgucucuguggugacguccaauuacaaccgcagauuuaccccugagaucgccggacggcccaagguccgcgaccaagcugggagaaugaauuauuacuggacacuucugaagccuggagauaccauuaucuucgaggccaacggcaaucucauugcucccauguaugccuuugcgcugagccggggguucggauccggcaucauuacaucuaacgccagcaugcacgaauguaauaccaaaugccagacgccgcuuggcgcuaucaacuccagccugccuuaccagaauauccaucccguuacaauuggggaguguccuaaguaugugcgcucugccaaacucagaauggugaccggacugcggaacauccccuccauucagagccgcggccuguuuggggcuaucgccggauucauugaaggcggguggacaggaaugaucgacggcugguacggcuaucaccaucaaaaugagcaggggucuggauacgccgcugaucaaaagagcacccagaacgcgaucaauggcauuaccaacaaagucaacacagugaucgaaaagaugaauauucaguuuacggccguugggaaagaguucaacaagcucgagaagagaauggaaaaucugaacaaaaagguggacgauggauuucuugacaucuggaccuacaaugcugagcugcucguccugcuugaaaacgagcggacacuggacuuccacgauuccaaugugaaaaaccucuaugaaaagguuaaaucucagcugaagaauaacgccaaggagauuggcaaucgcugcuucgaguuuuaccacaaaugugacaacgaaugcauggagagcgugagaaaugggaccuaugauuaccccaaguauuccgaagagagcaaacugaaccgggagaaggucgacggcgugaaacucgaaucuaugggaaucuaccagauccuggccauuuauuccacagucgcuagcucucuugugcugcucguuucccugggcgccaucagcuucuggaugugcuccaaugggucucugcaauguagaauuugcaucuga

SEQ ID NO: 198643 - RNA, 1698 nt, Artificial Sequence
  derived and/or modified CDS sequence (opt5) from hemagglutinin__InfluenzaA__ADX99964
augaaggccaaccugcucgugcugcuuugcgcucuggccgcggcugacgccgauaccaucuguauuggcuaccacgccaauaacagcacagacacggucgauaccguucucgagaaaaaugugacagugacccauuccgucaaccugcuugaagacucucacaaugggaagcugugcagacucaaaggaaucgcuccccugcagcugggcaaguguaacauugccggguggcuccugggaaauccugagugcgauccgcuucugcccgugcggagcugguccuauaucguugaaacaccuaacucugagaauggcauuuguuaccccggggacuucaucgauuaugaggaacuccgcgagcaacugagcuccgugucuagcuuugaaagauucgagaucuuuccuaaagaauccagcuggcccaagcauaacaccaauggagucacagcugccugcucucacgagggcaaguccagcuucuaccggaaccuucuguggcucaccgagaaagaaggcucuuauccuaagcugaaaaauuccuacgugaacaagaaagggaaggagguucuggugcucuggggcauucaucacccgcccaauagcaaggaacagcagaaccuguaucagaacgagaaugcguacgucucuguggugacguccaacuacaaucgcagauuuaccccugaaaucgccgagcggcccaaaguccgcgaccaagcuggaagaaugaacuauuacuggacacuucugaagccuggggauaccauuaucuucgaggccaauggaaaccucauugcucccauguaugccuuugcgcugagccggggcuucggguccggaaucauuacaucuaaugccagcaugcacgaauguaacaccaaaugccagacgccgcuuggcgcuaucaauuccagccugccuuaccagaacauccaucccguuacaauuggcgaguguccuaaguaugugcgcucugccaaacucagaauggugaccgggcugcggaauauccccuccauucagagccgcggacuguuuggcgcuaucgccggguucauugaaggaggcuggacagggaugaucgacggaugguacggcuaucaccaucaaaacgagcagggcucuggguacgccgcugaucaaaagagcacccagaaugcgaucaacggaauuaccaauaaagucaacacagugaucgaaaagaugaacauucaguuuacggccguuggcaaggaguucaauaaacucgagaagagaauggaaaaccugaauaaaaagguggacgauggguuucuugacaucuggaccuacaacgcugagcugcucguccugcuugaaaaugagcggacacuggacuuccacgauuccaacgugaaaaaucucuaugaaaagguuaagucucagcugaaaaacaaugccaaggagauuggaaacggcugcuucgaguuuuaccacaaaugugacaaugaaugcauggagagcgugcgcaacgggaccuaugauuaccccaaguauuccgaagagagcaaacugaauagagagaaggucgacggcgugaagcucgaaucuaugggaaucuaccagauccuggccauuuauuccacagucgcuagcucucuugugcugcucguuucccugggcgccaucagcuucuggaugugcuccaacgggucucugcaaugucggauuugcaucuga

SEQ ID NO: 198644 - RNA, 1698 nt, Artificial Sequence
  derived and/or modified CDS sequence (opt5) from hemagglutinin__InfluenzaA__ADX99975
augaaggccaaccugcucgugcugcuuugcgcucuggccgcggcugacgccgauaccaucuguauuggcuaccacgccaauaacagcacagacacggucgauaccguucucgagaaaaaugugacagugacccauuccgucaaccugcuugaagacucucacaaugggaagcugugcagacucaaaggaaucgcuccccugcagcugggcaaguguaacauugccggguggcuccugggaaauccugagugcgauccgcuucugcccgugcggagcugguccuauaucguugaaacaccuaacucugagaauggcauuuguuaccccggggacuucaucgauuaugaggaacuccgcgagcaacugagcuccgugucuagcuuugaaagauucgagaucuuuccuaaagaauccagcuggcccaaccauaauaccaacggagucacagcuaccugcucucacgagggcaaguccagcuucuaccggaaucuucuguggcucacggagaaggaaggcucuuauccugagcugaaaaacuccuacgugaauaagaaagggaaggaaguucuggugcucuggggcauucaucacccgcccaacagcaaagagcagcagaaccuguaucagaaugaaaacgccuacgucucuguggugaccuccaauuacaaccgcagauuuacaccugagaucgcggagcggcccaagguccgcgaccaagccggaagaaugaauuauuacuggacccuucugaagccuggggauacaauuaucuucgaagcuaacggaaaucucauugcccccauguaugcuuuugcccugagccggggcuucggguccggaaucauuaccucuaacgcgagcaugcacgaguguaauacgaaaugccagacaccgcuuggcgccaucaacuccagccugccuuaccagaauauccaucccguuaccauuggcgaauguccuaaguaugugcgcucugcuaaacucagaauggugacagggcugcggaacauccccuccauucagagccgcggacuguuuggcgccaucgcuggguucauugagggaggcuggaccgggaugaucgacggaugguacggcuaucaccaucaaaaugaacagggcucuggguacgccgccgaucaaaagagcacccagaacgcuaucaauggaauuacaaacaaagucaacacggugaucgagaagaugaauauucaguuuaccgcgguuggcaaagaguucaacaagcucgaaaagagaauggagaaucugaacaaaaagguggacgauggguuucuugacaucuggacauacaaugccgaacugcucguccugcuugagaacgaacggacccuggacuuccacgauuccaaugugaaaaaccucuaugagaagguuaaaucucagcugaagaauaacgcuaaggagauuggaaauggcugcuucgaauuuuaccacaaaugugacaacgagugcauggaaagcgugcgcaaugggacauaugauuaccccaaguauuccgaggagagcaaacugaacagagaaaaggucgacggcgugaaacucgagucuaugggaaucuaccagauccuggccauuuauuccaccgucgccagcucucuugugcugcucguuucccugggcgcuaucagcuucuggaugugcuccaaugggucucugcaaugucggauuugcaucuga

SEQ ID NO: 198645 - RNA, 1698 nt, Artificial Sequence
  derived and/or modified CDS sequence (opt5) from hemagglutinin__InfluenzaA__ADX99986
augaaggccaaccugcucgugcugcuuugcgcucuggccgcggcugacgccgauaccaucuguauuggcuaccacgccaauaacagcacagacacggucgauaccguucucgagaaaaaugugacagugacccauuccgucaaccugcuugaagacucucacaaugggaagcugugcagacucaaaggaaucgcuccccugcagcugggcaaguguaacauugccggguggcuccugggaaauccuaaaugcgauccgcuucugcccgugcggagcugguccuauaucguugagacaccuaacucugaaaauggcauuuguuaccccggggacuucaucgauuaugaggaacuccgcgagcaacugagcuccgugucuagcuuugagagauucgaaaucuuuccuaaggaguccagcuggcccaaccauaauaccaacggagucacagcugccugcucucacgaaggcaaguccagcuucuaccggaaucuucuguggcucaccgagaaagagggcucuuauccuaagcuggaaaacuccuacgugaauaaaaaggggaaagagguucuggugcucuggggcauucaucacccgcccaacagcaaggaacagcagaaccuguaucagaaugagaacgcguacgucucuguggugacguccaauuacaaccgcagauuuaccccugaaaucgccgagcggcccaagguccgcgaccaagcuggaagaaugaauuauuacuggacacuucugaaaccuggggauaccauuaucuucgaggccaacggaaaucucauugcucccauguaugccuuugcgcugagccggggcuucggguccggaaucauuacaucuaacgccagcaugcacgaauguaauaccaagugccagacgccgcuuggcgcuaucaacuccagccugccuuaccagaauauccaucccguuacaauuggcgaguguccuaaauaugugcgcucugccaagcucagaauggugaccgggcugcggaacauccccuccauucagagccgcggacuguuuggcgcuaucgccggguucauugaaggaggcuggacagggaugaucgacggaugguacggcuaucaccaucaaaaugagcagggcucuggguacgccgcugaucagaaaagcacccagaacgcgaucaauggaauuaccaacaaggucaacacagugaucgaaaagaugaauauucaauuuacggccguuggcaaagaguucaacaagcucgagaaaagaauggaaaaucugaacaagaaaguggacgauggguuucuugacaucuggaccuacaaugcugagcugcucguccugcuugaaaacgagcggacacuggacuuccacgauuccaaugugaagaaccucuaugaaaaaguuaagucucagcugaagaauaacgccaaagagauuggaaauggcugcuucgaguuuuaccacaagugugacaacgaaugcauggagagcgugcgcaaugggaccuaugauuaccccaaauauuccgaagagagcaagcugaacagagagaaagucgacggcgugaagcucgaaucuaugggaaucuaccagauccuggccauuuauuccacagucgcuagcucucuugugcugcucguuucccugggcgccaucagcuucuggaugugcuccaaugggucucugcaaugucggauuugcaucuga

SEQ ID NO: 198646 - RNA, 1698 nt, Artificial Sequence
  derived and/or modified CDS sequence (opt5) from hemagglutinin__InfluenzaA__ADX99997
augaaggccaaccugcucgugcugcuuugcgcucuggccgcggcugacgccgauaccaucuguauuggcuaccacgccaauaacagcacagacacggucgauaccguucucgagaaaaaugugacagugacccauuccgucaaccugcuugaagacucucacaaugggaagcugugcagacucaaaggaaucgcuccccugcagcugggcaaguguaacauugccggguggcuccugggaaauccugagugcgauccgcuucugcccgugcggagcugguccuauaucguugaaacaccuaacucugagaauggcauuuguuaccccggggacuucaucgauuaugaagaacuccgcgagcaacugagcuccgugucuagcuuugaaagauucgagaucuuuccuaaagaauccagcuggcccaaccauaauaccaacggagucacagcugccugcucucacgagggcaaguccagcuucuaccggaaucuucuguggcucaccgagaaggaaggcucuuauccuaaacuggagaacuccuacgugaauaagaaagggaaggaaguucuggugcucuggggcauucaucacccgcccaacagcaaagagcagcagaaccuguaucagaaugaaaacgcguacgucucuguggugacguccaauuacaaccgcagauuuaccccugagaucgccgagcggcccaagguccgcgaccaagcuggaagaaugaaguauuacuggacacuucugaaaccuggggauaccauuaucuucgaagccaauggaaaccucauugcucccauguaugccuuugcgcugagccggggcuucggguccggaaucauuacaucuaaugccagcaugcacgaguguaacaccaagugccagacgccgcuuggcgcuaucaauuccagccugccuuaccagaacauccaucccguuacaauuggcgaauguccuaaauaugugcgcucugccaagcucagaauggugaccgggcugcggaauauccccuccauucagagccgcggacuguuuggcgcuaucgccggguucauugagggaggcuggacagggaugaucgacggaugguacggcuaucaccaucaaaacgaacagggcucuggguacgccgcugaucagaaaagcacccagaaugcgaucaacggaauuaccaauaaggucaacacagugaucgagaaaaugaacauucaauuuacggccguuggcaaggaguucaauaagcucgagaaaagaauggagaaccugaauaagaaaguggacgauggguuucuugacaucuggaccuacaacgcugaacugcucguccugcuugagaaugaacggacacuggacuuccacgauuccaacgugaagaaucucuaugagaaaguuaagucucagcugaagaacaaugccaaagagauuggaaacggcugcuucgaauuuuaccacaagugugacaaugagugcauggaaagcgugcgcaacgggaccuaugauuaccccaaauauuccgaggagagcaagcugaauagagaaaaagucgacggcgugaagcucgagucuaugggaaucuaccagauccuggccauuuauuccacagucgcuagcucucuugugcugcucguuucccugggcgccaucagcuucuggaugugcuccaacgggucucugcaaugucggauuugcaucuga

SEQ ID NO: 198647 - RNA, 1698 nt, Artificial Sequence
  derived and/or modified CDS sequence (opt5) from hemagglutinin__InfluenzaA__ADY00009
augaaggccaaccugcucgugcugcuuugcgcucuggccgcggcugacgccgauaccaucuguauuggcuaccacgccaauaacagcacagacacggucgauaccguucucgagaaaaaugugacagugacccauuccgucaaccugcuugaagacucucacaaugggaagcugugcagacucaaaggaaucgcuccccugcagcugggcaaguguaacauugccggguggcuccugggaaauccugagugcgauccgcuucugcccgugcggagcugguccuauaucguugaaacaccuaacucugagaauggcauuuguuaccccggggacuucaucgauuaugaagaacuccgcgagcaacugagcuccgugucuagcuuugaaagauucgagaucuuuccuaaagaauccagcuggcccaaccauaauaccaacggagucacagcugccugcucucacgagggcaaguccagcuucuaccggaaucuucuguggcucaccgagaagaaaggcucuuauccuaagcuggaaaacuccuacgugaauaaaaaggggaaagagguucuggugcucuggggcauucaucacccgcccaacagcaaggaacagcagaaccuguaucagaaugagaacgcguacgucucuguggugacguccaauuacaaccgcagauuuaccccugaaaucgccgagcggcccaagguccgcgaccaagcuggaagaaugaauuauuacuggacacuucugaaaccuggggauaccauuaucuucgaggccaacggaaaucucauugcucccauguaugccuuugcgcugagccggggcuucggguccggaaucauuacaucuaacgccagcaugcacgaauguaauaccaagugccagacgccgcuuggcgcuaucaacuccagccugccuuaccagaauauccaucccguuacaauuggcgaguguccuaaauaugugcgcucugccaagcucagaauggugaccgggcugcggaacauccccuccauucagagccgcggacuguuuggcgcuaucgccggguucauugaaggaggcuggacagggaugaucgacggaugguacggcuaucaccaucaaaaugagcagggcucuggguacgccgcugaucagaaaagcacccagaacgcgaucaauggaauuaccaacaaggucaacacagugaucgagaaaaugaauauucaauuuacggccguuggcaaggaguucaacaagcucgagaaaagaauggaaaaucugaacaagaaaguggacgauggguuucuugacaucuggaccuacaaugcugagcugcucguccugcuugaaaacgagcggacacuggacuuccacgauuccaaugugaagaaccucuaugaaaaaguuaagucucagcugaagaauaacgccaaagagauuggaaauggcugcuucgaguuuuaccacaagugugacaacgaaugcauggagagcgugcgcaaugggaccuaugauuaccccaaauauuccgaagagagcaagcugaacagagagaaagucgacggcgugaagcucgaaucuaugggaaucuaccagauccuggccauuuauuccacagucgcuagcucucuugugcugcucguuucccugggcgccaucagcuucuggaugugcuccaaugggucucugcaaugucggauuugcaucuga

SEQ ID NO: 198648 - RNA, 1698 nt, Artificial Sequence; identical to SEQ ID NO: 195350
  derived and/or modified CDS sequence (opt5) from hemagglutinin__InfluenzaA__ADY00020

SEQ ID NO: 198649 - RNA, 1698 nt, Artificial Sequence
  derived and/or modified CDS sequence (opt5) from hemagglutinin__InfluenzaA__ADY04727
augaaggccaaacugcucgugcugcuuugcaccuucacagcuacguacgccgacaccaucuguauuggcuaucacgcgaacaauagcacagauaccgucgacacaguucuggagaagaacgugaccgugacacauuccgucaaucuccuggaagauucucacaacgggaaacuuugccugcucaagggaaucgcuccccugcagcugggcaauuguagcguggccggguggauucucggaaacccugagugcgaacugcuuaucuccaaagagucuuggagcuacauuguugaaaccccgaaucccgagaacggcacguguuauccuggguacuuugccgacuaugaggaacugagagagcaacucuccucugugagcuccuucgaacgguuugagaucuuccccaagggaagcucuuggccuaaucauaccgucacaggcguguccgcuagcugcucucacaacggcaaguccagcuuuuaccgcaaucugcuuuggcugaccgggaaaaacggacucuaucccaaucugucuauguccuacguuaacaauaaggagaaagaagugcugguccucuggggcgugcaucacccuccgaacaucgggaaccagagagcccuguaccacacagagaaugcuuaugugagcgucguuuccucucauuacagccggcgcuucacccccgaaauugccaagagaccuaaagugcgggaucaggagggacgcaucaacuauuacuggacgcuucuggaacccggcgacacaauuaucuuugaggcgaaugggaaccucauugccccuugguaugcuuucgcccuguccagaggauuuggcagcggcaucauuaccucuaaugcucccaugggggagugugaugccaagugccagacaccgcaaggagcgaucaacuccagccuuccuuuccagaaugugcaccccgucaccaucggcgaauguccuaaguacgugcggucugccaaacugcgcaugguuaccgggcucagaaacauucccagcauccagucccggggacuguuuggcgcuauugccggguucaucgagggaggcuggacaggcaugguggacgggugguauggauaccaucaccagaaugaacaaggcucuggguacgcugccgaucaaaagagcacgcagaacgccauuaauggaaucaccaacaaagucaauuccgugaucgagaagaugaacacacaguuuaccgcuguuggcaaagaguucaauaagcuggaacgcagaauggagaaccucaacaaaaagguggacgauggguuccuggacauuuggacauauaaugcggaacuucugguccuccuggagaacgaacggacccuugauuuucacgacagcaaucugaagaaccucuacgagaaagugaagucucagcugaaaaauaacgccaaggaaaucggcaauggaugcuucgaguuuuaucauaaauguaacaaugagugcauggaauccgucaagaacggcacguacgacuaucccaaguacagcgaggaaucuaaacugaaucgcgagaagauugauggggugaaacucgaguccaugggaguuuaucagauccuggcuauuuacagcacaguggccuccucucuuguccugcucgugagccugggcgccaucuccuucuggaugugcucuaacgggagccugcaguguagaaucugcauuuga

SEQ ID NO: 198650 - RNA, 1701 nt, Artificial Sequence; identical to SEQ ID NO: 195685
  derived and/or modified CDS sequence (opt5) from hemagglutinin__InfluenzaA__ADY11836

SEQ ID NO: 198651 - RNA, 1701 nt, Artificial Sequence; identical to SEQ ID NO: 195660
  derived and/or modified CDS sequence (opt5) from hemagglutinin__InfluenzaA__ADY17654

SEQ ID NO: 198652 - RNA, 1701 nt, Artificial Sequence
  derived and/or modified CDS sequence (opt5) from hemagglutinin__InfluenzaA__ADY17665
augaagaccaucauugcccugagcuacauccucugccugauuuucgcucagaaacuucccggcaacgacaauuccacagccacgcugugucucgggcaccaugcggugccuaacggaaccaucgucaagacaauuaccaaugaucaaaucgagguuacaaacgcuaccgaacuggugcagucuagcuccacaggcgagaucugcgacucuccgcaccagauucuugaugggaaaaauuguacccugaucgacgcccuccugggagauccccagugcgacggcuuucaaaacaagaaaugggaucuguucguggaaagaagcaaggccuauuccaauuguuacccuuaugacguccccgauuacgcuucucuccggagccugguggccuccagcgggacgcuugaguuuaacaaugaaucuuucaacuggaccggaguuacacaggacggcaccuccagcgcuugcauucgcagaucuaaaaauuccuuuuucagccggcugaacuggcucacacaucugaauuuuaaauauccugcccuuaacgugaccaugcccaauaacgagcaguucgauaagcuguacaucuggggcguccaccauccugggacggacaaagaucagauuuuucucuaugcgcaagccucuggacgcaucacaguguccaccaagagaagccagcagacagcuauuccgaacaucggcucccggccccgcguuagaaauaucccuucucggauuagcaucuacuggaccauugugaaacccggggacauccugcugauuaacuccaccggaaaucucaucgccccucgcggcuacuucaagaucagaagcgggaagucuuccauuaugcggagcgacgcucccaucggaaaauguaacucugagugcauuacaccgaauggcagcaucccuaacgauaagcccuuucagaaugucaaccgcauuacguauggcgccuguccuagauacgugaaacaaaauacccugaaacuugcgacagggaugcggaacgugcccgaaaagcagacccgcggaaucuucggcgccaucgcuggguuuauugagaauggaugggaaggcauggucgacgggugguauggauucagacaccagaacuccgagggccggggccaagccgcugaucugaagucuacacaggccgccaucgaccagauuaaugggaaacucaacagacugaucggaaagaccaaugagaaguuccaccagauugaaaaagaguuuagcgaaguugagggccgcauccaagaucuugaaaaguacguggaggacacgaaaauugaucugugguccuauaacgcugagcuccugguggcgcuggaaaaccagcauacaaucgaccucaccgauagcgagaugaauaagcuguucgaaaagaccaagaagcagcuucgggagaacgccgaagacauggggaauggaugcuuuaaaaucuaccacaagugugauaacgcuugcauuggcucuaucagaaaugggacauaugaccaugacgucuaccgcgaugaggcccugaacaaucgguuccagauuaaaggcguggagcucaaguccggauacaaagacuggauccuguggauuagcuuugccaucucuugcuuccuucuguguguugcucuccugggcuuuaucaugugggccugccaaaaggggaacauuagauguaauaucugcauuuga

SEQ ID NO: 198653 - RNA, 1701 nt, Artificial Sequence; identical to SEQ ID NO: 195685
  derived and/or modified CDS sequence (opt5) from hemagglutinin__InfluenzaA__ADY17676

SEQ ID NO: 198654 - RNA, 1701 nt, Artificial Sequence
  derived and/or modified CDS sequence (opt5) from hemagglutinin__InfluenzaA__ADY17687
augaagaccaucauugcccugagcuacauccucugccugguguucgcucagaaacuucccggcaacgacaauuccacagccacgcugugucucgggcaccaugcggucccuaacggaaccauuguuaagacaaucaccaaugaucaaauugaggugacaaacgcuaccgaacuggugcagucuagcuccacaggcgagaucugcgacucuccgcaccagauccuugaugggaaaaauuguacccugauugacgcccuccugggagauccccagugcgacggcuuucaaaacaagaaaugggaucuguucgucgaaagaagcaaggccuauuccaauuguuacccuuaugacgugcccgauuacgcuucucuccggagccugguugccuccagcgggacgcuugaguuuaacaaugaaucuuucaacuggaccggagugacacaggacggcaccuccagcgcuugcauccgcagaucuaaaaauuccuuuuucagccggcugaacuggcucacacaucugaauuuuaaauauccugcccuuaacgucaccaugcccaauaacgagcaguucgauaagcuguacauuuggggcgugcaccauccugggacggacaaagaucagaucuuucucuaugcgcaagccucuggacgcauuacaguuuccaccaagagaagccagcagacagcuaucccgaacauuggcucccggccccgcgugagaaauaucccuucucggaucagcauuuacuggaccaucgucaaacccggggacauucugcugaucaacuccaccggaaaucucauugccccucgcggcuacuucaagaucagaagcgggaagucuuccaucaugcggagcgacgcucccauuggaaaauguaacucugagugcaucacaccgaauggcagcauuccuaacgauaagcccuuucagaaugugaaccgcaucacguauggcgccuguccuagauacgugaaacaaaauacccugaaacuugcgacagggaugcggaacguccccgaaaagcagacccgcggaauuuucggcgccaucgcuggguuuaucgagaauggaugggaaggcaugguugacgggugguauggauucagacaccagaacuccgagggccggggccaagccgcugaucugaagucuacacaggccgccauugaccagaucaaugggaaacucaacagacugauuggaaagaccaaugagaaguuccaccagaucgaaaaagaguuuagcgaaguggagggccgcauucaagaucuugaaaaguacguggaggacacgaaaaucgaucugugguccuauaacgcugagcuccuggucgcgcuggaaaaccagcauacaauugaccucaccgauagcgagaugaauaagcuguucgaaaagaccaagaagcagcuucgggagaacgccgaagacauggggaauggaugcuuuaaaaucuaccacaagugugauaacgcuugcaucggcucuauuagaaaugggacauaugaccaugacguguaccgcgaugaggcccugaacaaucgguuccagaucaaaggcguugagcucaaguccggauacaaagacuggauucuguggaucagcuuugccauuucuugcuuccuucugugugcugcccuccugggcuuuaucaugugggcgugccaaaaggggaacaucagauguaauauuugcaucuga

SEQ ID NO: 198655 - RNA, 1701 nt, Artificial Sequence; identical to SEQ ID NO: 195660
  derived and/or modified CDS sequence (opt5) from hemagglutinin__InfluenzaA__ADY17698

SEQ ID NO: 198656 - RNA, 1701 nt, Artificial Sequence
  derived and/or modified CDS sequence (opt5) from hemagglutinin__InfluenzaA__ADY38719
augaagaccaucauugcccugagcuacauccucugccugguguucacacagaaacuucccggcaacgacaauuccacggcuacccugugucucgggcaccaugccgucccuaacggaacaauuguuaagaccaucacaaaugaucaaauugaggugaccaacgcgacagaacuggugcagucuagcuccaccggcgagaucugcgacucuccgcaccagauccuugaugggaaaaauuguacgcugauugacgcucuccugggagauccccagugcgacggcuuucaaaacaagaaaugggaucuguucgucgaaagaagcaaggccuauuccaauuguuacccuuaugacgugcccgauuacgccucucuccggagccugguugcuuccagcgggacccuugaguuuaacaaugaaucuuucaacuggacaggagugacccagaauggcacauccagcgccugcauccgcagaucuaagaacuccuuuuucagccggcugaauuggcucacccaucugaacuuuaaauauccugcucuuaaugucacgaugcccaacaacgagcaguucgacaagcuguacauuuggggcgugcaccauccugggacagauaaagaccagaucuuucucuaugcccaagcgucuggacgcauuaccguuuccacaaagagaagccagcagaccgccaucccgaauauuggcucccggccccgcgugagaaacaucccuucucggaucagcauuuacuggaccaucgucaaacccggggauauucugcugaucaauuccacaggaaaccucauugcuccucgcggcuacuucaagaucagaagcgggaagucuuccaucaugcggagcgacgcccccauuggaaaauguaauucugagugcaucacgccgaacggcagcauuccuaaugacaagcccuuucagaacgugaaucgcaucaccuauggcgcuuguccuagauacgugaaacaaaacacacugaaacuugccaccgggaugcggaauguccccgaaaaacagacacgcggaauuuucggcgcgaucgccggguuuaucgagaacggaugggaaggcaugguugaugggugguauggauucagacaccaaaauuccgagggccggggccaggcugccgaccugaagucuacccaggcugccauugaucagaucaacgggaaacucaauagacugauuggaaagacgaacgagaaguuccaccagaucgaaaaagaguuuagcgaaguggagggccgcauucaagaccuugaaaaguacguggaggauacaaaaaucgaccugugguccuauaacgccgagcuccuggucgcucuggaaaaucagcauaccauugaucucaccgacagcgagaugaacaagcuguucgaaaagacaaagaagcagcuucgggagaaugcggaagauauggggaacggaugcuuuaaaaucuaccacaagugugacaaugccugcaucggcucuauuagaaacgggaccuaugaucaugacguguaccgcgacgaggcucugaauaaccgguuccagaucaaaggcguugagcucaaguccggauacaaagauuggauucuguggaucagcuuugccauuucuugcuuccuucuguguguggcccuccugggcuuuaucaugugggcuugccaaaaggggaauaucagauguaacauuugcaucuga

SEQ ID NO: 198657 - RNA, 1701 nt, Artificial Sequence; identical to SEQ ID NO: 194741
  derived and/or modified CDS sequence (opt5) from hemagglutinin__InfluenzaA__ADY38750

SEQ ID NO: 198658 - RNA, 1701 nt, Artificial Sequence; identical to SEQ ID NO: 195905
  derived and/or modified CDS sequence (opt5) from hemagglutinin__InfluenzaA__ADY38760

SEQ ID NO: 198659 - RNA, 1701 nt, Artificial Sequence
  derived and/or modified CDS sequence (opt5) from hemagglutinin__InfluenzaA__ADZ04607
augaaggccauccuggugguccuccuguacaccuucgcuacagccaacgcggacacgcuuugcauuggcuaucacgcuaauaacagcaccgauacaguugacaccgugcuggagaagaaugugacagucacccauuccgugaaccuccuggaagauaagcacaaugggaaacuuuguaagcugagaggaguugcuccccuccaucugggcaaaugcaacaucgccggguggauucugggaaauccugagugugaaucucucagcacagccuccucuuggagcuacaucguggagaccuccucuagcgacaacggcacgugcuauccgggggauuuuauugacuacgaagaacugcgggagcagcuuuccagcgucucuuccuucgaacgcuuugagaucuuccccaagaccagcucuuggccuaaucacgauuccaacaagggagugacagccgcuuguccccaugccggcgcgaaaucuuuuuauaagaaucugaucuggcucguuaaaaagggcaacagcuacccuaaacuguccaagagcuauauuaaugacaaggggaaagaagugcuuguccuguggggaauccaccaccccuccaccucugccgaucaacagagccucuaccagaacgcugacgccuacguguucgugggcacauccagauauagcaagaaauuuaagccugagauugcuauccggccgaaaguccgcgaucaggaggggagaaugaauuacuauuggacccugguugaacccggagacaagauuacguucgaggccacaggcaaccugguggugccucgguacgcguuugccauggaacgcaacgcugggucuggaaucauuaucuccgauacccccguccaugacugcaauacaaccugucaaaccccuaaaggcgccaucaacacaagccuccccuuccagaauauucacccgaucacgauuggcaagugcccuaaguaugugaaaucuaccaagcugagacuugcuacagggcugcggaacguucccagcauccagucccgcggacucuuuggcgccauugccggguucaucgagggaggcuggaccgggaugguggacggaugguacggcuaucaucaccagaaugaacaaggcucuggguacgcugcggaucugaaaagcacacagaacgccaucgacgagauuaccaauaaggucaacuccgugaucgagaaaaugaauacgcaguuuacagcuguuggaaaggaguucaaccaccuugagaagagaauugaaaaucugaacaaaaagguggaugacggcuuccucgauaucuggaccuacaaugccgagcugcugguccuccuggaaaacgagcggacccuugacuaucaugauagcaaugugaaaaaccuguacgagaagguccgcucucagcucaaaaacaaugccaaggaaauugggaacggauguuuugaguucuaucacaagugcgacaauacauguauggaauccgugaaaaacggcaccuacgauuauccuaaguacagcgaggaagcuaaacugaauagagaggagaucgacgggguuaaacuugaaucuacacggguguaucaaauccuggccauuuacuccacggucgcgagcucccucgugcugguugugucucugggcgcuaucagcuuuuggaugugcuccaacggaucucuccagugccgcauuuguaucuga

SEQ ID NO: 198660 - RNA, 1698 nt, Artificial Sequence; identical to SEQ ID NO: 198035
  derived and/or modified CDS sequence (opt5) from hemagglutinin__InfluenzaA__ADZ05834

SEQ ID NO: 198661 - RNA, 1698 nt, Artificial Sequence
  derived and/or modified CDS sequence (opt5) from hemagglutinin__InfluenzaA__ADZ05845
augaaggugaaacugcucguccugcuuugcaccuucacagccacguacgcugacaccaucuguauuggcuaucacgccaacaauagcacagauaccguugacacagugcuggagaagaacgugaccgucacacauuccgugaaucuccuggaagauucucacaacgggaaacuuugccugcucaagggaaucgcgccccugcagcugggcaauuguagcguugcuggguggauucucggaaacccugagugcgaacugcuuaucuccaaagagucuuggagcuacauuguggaaaagccgaaucccgagaacggcaccuguuauccugggcauuuugccgacuacgaggaacugagagagcaacucuccucugucagcuccuucgaacgguuugagaucuuccccaaggagagcucuuggccuaaucacacggugaccggaguuuccgccagcugcucucauaacggcgaaaauuccuuuuaucgcaaccugcuuuggcugacaggcaaaaaugggcucuaccccaaccugagcaagucuuaugcuaauaacaaagagaaggaagugcugguccucuggggagugcaccacccuccgaacauggccgaucagaaaacccuguaccauacagagaaugcuuacguguccgucguuagcucccacuauucuagaaaguucacccccgaaaucgccaagcggccuaaagugcgcgaccaggagggcagaauuaacuacuauuggacgcuucuggagcccggggauacaaucauuuuugaagcgaauggaaaccucaucgccccucgguacgcuuucgcccugagccgcggcuuuggguccggaauuaucaauagcaacgcucccauggacaagugugaugccaaaugccagaccccgcaaggcgcgauuaauucuucccuuccuuuccagaacgugcaucccgucacaaucggcgaguguccuaaguaugugagaagcgccaaacugcggaugguuaccgggcuccgcaauauccccucuauucagagcagaggacuguuuggcgcuaucgccggguucauugaaggaggcuggaccgggaugguggacggaugguacggcuaucaccaccagaacgagcaaggcuccggguacgcugccgaucagaagucuacacagaaugccaucaacggaauuacgaauaaagucaacagcgugaucgaaaagaugaauacccaguuuacagcuguuggcaaggaguucaacaaacuggagcggcgcauggaaaaccucaauaagaaaguggacgauggguucaucgacauuuggaccuacaacgcggagcugcuuguccugcucgaaaaugagagaacacuggacuuucaugauuccaacgugaagaaucuuuaugaaaaagucaagagccaacugaagaacaaugccaaagagaucggaaacggcugcuucgaguuuuaccacaaguguaaugacgaaugcauggagucugugaaaaacgggaccuaugauuaccccaaguauuccgaagagagcaaacucaaucgggagaagauugacggcguuaagcuggaaucuaugggaguguaccagauccuggcuauuuauuccacggucgccagcucccucgugcugcuuguuucucugggcgccaucagcuucuggaugugcuccaacgggucucuccagugucgcaucugcauuuga

SEQ ID NO: 198662 - RNA, 1701 nt, Artificial Sequence; identical to SEQ ID NO: 194506
  derived and/or modified CDS sequence (opt5) from hemagglutinin__InfluenzaA__ADZ05855

SEQ ID NO: 198663 - RNA, 1701 nt, Artificial Sequence
  derived and/or modified CDS sequence (opt5) from hemagglutinin__InfluenzaA__ADZ47838
augaaggccauccuggugguccuccuguacacccuugcuacagccaacgcggacacgcugugcauuggcuaucacgcuaauaacagcaccgauacaguugacaccgugcucgagaaaaaugugacagucacccauuccgugaaccugcuugaagauaagcacaaugggaaacuguguaagcucagaggaguugcuccccugcaucugggcaaaugcaacaucgccggguggauucucggaaauccugagugugaaucucugagcacagccuccucuuggagcuacaucguggagaccuccucuagcgacaacggcacgugcuauccgggggauuucauugacuacgaggaacuucgggagcagcuguccagcgucucuuccuuugaacgcuucgagaucuuucccaagaccagcucuuggccuaaucacgauuccaacaagggagugacagccgcuuguccccaugccggcgcgaaaucuuucuauaagaaucucaucuggcugguuaaaaagggcaacagcuacccuaaacuuuccaagagcuauauuaaugacaaggggaaagaagugcugguccucuggggaauccaccaccccuccaccucugccgaucaacagagccuguaccagaacgcugacgccuacguguuugugggcacauccagauauagcaagaaauucaagccugagauugcuauccggccgaaaguccgcgagcaggaagggagaaugaauuacuauuggacccugguugagcccggagauaagauuacguuugaagccacaggcaaccucguggugccucgguacgcguucgccauggagcgcaacgcugggucuggaaucauuaucuccgacacccccguccaugauugcaauacaaccugucaaaccccuaaaggcgccaucaacacaagccugcccuuucagaauauucacucuaucacgauuggcaagugcccgaaguaugugaaaagcaccaaacuuagacuggcuacagggcuccggaacguuccuuccauccagucucgcggacuguucggcgccauugccggguuuaucgaaggaggcuggaccgggaugguggacggaugguacggcuaucaucaccagaaugagcaaggcagcggguacgcugcggaccuuaaauccacacagaacgccaucgaugagauuaccaauaaggucaacagcgugaucgaaaagaugaauacgcaguucacagcuguuggaaaggaguuuaaccaccuggaaaagagaauugagaaucucaacaaaaagguggacgauggcuuccuggacaucuggaccuacaaugccgaacugcucguccugcuugagaacgagcggacccuggauuaucaugacucuaaugugaaaaaccucuacgaaaagguccgcucccagcugaaaaacaaugccaaggagauugggaacggauguuucgaauuuuaucacaagugcgauaauacauguauggagagcgugaaaaacggcaccuacgacuaucccaaguacucugaagaggcuaaacuuaauagagaggaaaucgaugggguuaagcuggaguccacacggaucuaucaaauucucgccaucuacagcacgguggcguccucuuucguccugauugugagccugggcgcuaucuccuuuuggaugugcucuaacggaagccuccagugccgcauuuguaucuga

SEQ ID NO: 198664 - RNA, 1701 nt, Artificial Sequence; identical to SEQ ID NO: 195913
  derived and/or modified CDS sequence (opt5) from hemagglutinin__InfluenzaA__ADZ47858

SEQ ID NO: 198665 - RNA, 1698 nt, Artificial Sequence
  derived and/or modified CDS sequence (opt5) from hemagglutinin__InfluenzaA__ADZ53100
augaaggugaaacugcucguccugcuuugcaccuucacagccacguacgcugacaccaucuguauuggcuaucacgccaacaauagcacagauaccguugacacagugcuggagaagaacgugaccgucacacauuccgugaaucuccuggaaaacucucacaaugggaaacuuugccugcucaagggaaucgcgccccugcagcugggcaacuguagcguugcuggguggauucucggaaauccugagugcgaacugcuuaucuccaaagagaccuggucuuacauuguggaaaagccgaaccccgagaauggcacguguuauccugggcauuuugccgauuacgaggaacugagagagcaacucagcuccgucucuagcuucgaacgguuugagaucuuccccaaggaguccagcuggccuaaccacaccgugacaggaguuucugccuccugcagccauaauggcgaaucuuccuuuuaucgcaaccugcuuuggcugaccggcaaaaaugggcucuaccccaaccugagcaagucuuaugcuaauaacaaagagaaggaagugcugguccucuggggagugcaccacccuccguccaucaacgaccagaaaacacuguaccauaccgagaaugccuacgugagcgucguuuccucucacuauagcagaaaguucacgcccgaaauugcuaagcggccuaaagugcgcgaucaggagggcagaaucaacuacuauuggacacuucuggagccccgggacaccauuaucuuugaagccaaugggaaccucauugcgccucgcuacgccuucgcucuguccagaggauuuggcagcgggaucauuaauucuaacgcccccauggauaagugugacgcuaaaugccagacaccgcaaggagccaucaauuccagccuuccuuuccagaacgugcaucccgucaccaucggcgaguguccuaaguaugugcggucugcgaaacugcgcaugguuaccggccucagaaauauucccagcauccagucccgggggcuguuuggagccauugcuggcuucaucgaagggggauggacaggcaugguggaugggugguacggauaucaccaccagaacgagcaaggcucuggcuacgccgcugaccaaaagagcacgcagaaugccauuaacgggaucaccaauaaagucaacuccgugaucgaaaagaugaauacacaguuuaccgccguuggaaaggaguucaacaaacuggagcgcagaauggaaaaccucaauaagaaaguggaugacggcuucauugauaucuggacauacaacgcugagcugcuuguccugcucgaaaaugagcggacccuggacuuucaugacagcaacgugaagaaucuuuaugaaaaagucaagucucagcugaagaacaaugcgaaagagauugggaacggaugcuucgaguuuuaccacaaguguaaugaugaaugcauggaguccgugaaaaacggcacguaugacuaccccaaguauagcgaagagucuaaacucaaucgcgagaagaucgaugggguuaagcuggaauccaugggcguguaccagauucuggccaucuauagcacagucgcuuccucucucgugcugcuuguuagccugggagccaucuccuucuggaugugcucuaacggcagccuccaguguagaauuugcaucuga

SEQ ID NO: 198666 - RNA, 1701 nt, Artificial Sequence; identical to SEQ ID NO: 195188
  derived and/or modified CDS sequence (opt5) from hemagglutinin__InfluenzaA__ADZ53123

SEQ ID NO: 198667 - RNA, 1701 nt, Artificial Sequence; identical to SEQ ID NO: 194983
  derived and/or modified CDS sequence (opt5) from hemagglutinin__InfluenzaA__ADZ53125

SEQ ID NO: 198668 - RNA, 1701 nt, Artificial Sequence; identical to SEQ ID NO: 195365
  derived and/or modified CDS sequence (opt5) from hemagglutinin__InfluenzaA__ADZ53127

SEQ ID NO: 198669 - RNA, 1701 nt, Artificial Sequence; identical to SEQ ID NO: 194728
  derived and/or modified CDS sequence (opt5) from hemagglutinin__InfluenzaA__ADZ53131

SEQ ID NO: 198670 - RNA, 1701 nt, Artificial Sequence; identical to SEQ ID NO: 194741
  derived and/or modified CDS sequence (opt5) from hemagglutinin__InfluenzaA__ADZ53133

SEQ ID NO: 198671 - RNA, 1701 nt, Artificial Sequence; identical to SEQ ID NO: 194983
  derived and/or modified CDS sequence (opt5) from hemagglutinin__InfluenzaA__ADZ53135

SEQ ID NO: 198672 - RNA, 1701 nt, Artificial Sequence; identical to SEQ ID NO: 195905
  derived and/or modified CDS sequence (opt5) from hemagglutinin__InfluenzaA__ADZ53138

SEQ ID NO: 198673 - RNA, 1701 nt, Artificial Sequence; identical to SEQ ID NO: 194741
  derived and/or modified CDS sequence (opt5) from hemagglutinin__InfluenzaA__ADZ53140

SEQ ID NO: 198674 - RNA, 1701 nt, Artificial Sequence; identical to SEQ ID NO: 195188
  derived and/or modified CDS sequence (opt5) from hemagglutinin__InfluenzaA__ADZ93496

SEQ ID NO: 198675 - RNA, 1689 nt, Artificial Sequence; identical to SEQ ID NO: 194422
  derived and/or modified CDS sequence (opt5) from hemagglutinin__InfluenzaA__AEA04365

SEQ ID NO: 198676 - RNA, 1689 nt, Artificial Sequence
  derived and/or modified CDS sequence (opt5) from hemagglutinin__InfluenzaA__AEA04376
auggccaucauuuaccugauccuccuguucaccgcugugagaggcgaccagauuugcaucggguaucacgccaacaauagcacagagaaggucgauacgauucuugaacggaacguuaccgugacacaugcgaaagacauccuggagaagacccacaauggaaaacucuguaagcugaacggcauucccccucuugaacugggggauugcuccaucgcuggauggcuccugggcaauccggagugugaccgccugcucucugugcccgaauggagcuacaucauggagaaagagaacccuagagaugggcugugcuaucccggauccuuuaaugacuacgaggaacuuaagcaucugcucucuagcgucaagcacuucgaaaaagugaagauucugccuaaagaucgguggacacaacauaccacaaccggcggcucccgcgccugugccguuucugggaaccccagcuuuuucagaaauaugguguggcuuacggagaagggauccaacuauccugucgcuaaaggcagcuacaauaacaccucuggggagcagaugcugaucauuuggggagugcaccacccgaaugacgaaacagagcagcggacccucuaucagaacguuggcacauacguguccgucgggaccagcacgcugaauaagcgcucuacacccgaaaucgccaccagaccuaaggugaacggacaaggcggccggauggaguuuuccuggacacugcucgauaugugggacaccauuaacuucgaaagcaccgggaaucugaucgcucccgaguacggauuuaaaaucucuaagcgcggcuccagcgggauuaugaaaacagagggaacgcuugaaaacugcgagaccaagugucagacaccucugggcgccaucaauaccacacuccccuuccauaacgugcacccgcugaccauuggggaaugcccuaaauaugucaaguccgagaaacuuguucuggcgacgggacucagaaaugugccccagaucgaaucucggggccuguuuggcgccauugcuggguucaucgagggaggcuggcaggggaugguggauggaugguacggcuaucaucacagcaacgaccaaggguccggcuacgccgcugauaaggagagcacacagaaggccuuugacggaaucaccaauaaagucaacucugugauugaaaagaugaauacccaguucgaggcgguuggcaaagaauuuuccaaccuggagcgcagacucgaaaaucugaacaagaaaguggaggacggguuccuugaugucuggacauauaaugccgagcugcucgugcugauggaaaacgagcggacccuugacuuccacgauagcaauguuaagaaccuguacgacaaggugcgcaugcagcucagagauaacgucaaagaacugggaaauggcuguuuugaguucuaucauaagugcgacgaugaguguaugaacucugugaaaaaugggacauacgacuacccuaaguaugaagaggaaagcaaacugaaccggaaugagaucaagggagucaagcucuccucuaugggcguguaccaaauucuggcuaucuaugccacgguugcugggagccuuucccuggccauuaugauggccggcaucagcuuuuggaugugcucuaacggaucccuccagugcagaaucuguauuuga

SEQ ID NO: 198677 - RNA, 1698 nt, Artificial Sequence
  derived and/or modified CDS sequence (opt5) from hemagglutinin__InfluenzaA__AEA10292
augaaggugaaacugcucguccugcuuugcaccuucacagccacguacgcugacaccaucuguauuggcuaucacgccaacaauagcacagauaccguugacacagugcuggagaagaacgugaccgucacacauuccgugaaucuccuggaaaacucucacaaugggaaacuuugcagccugaagggaaucgcgccccuccagcugggcaacuguuccguugcuggguggauucugggaaauccugagugcgaacuccugaucucuaaagagagcugguccuacauuguggaaaagccgaaccccgagaauggcaccuguuauccugggcauuuugccgauuacgaggaacuuagagagcaacugucuagcgucuccagcuucgaacgguuugagaucuuccccaaggagucuuccuggccuaaccacacggugaccggaguuagcgccucuugcucccauaauggcgaaagcucuuuuuaucgcaaccuccuguggcuuacagugaaaaauggccuguaccccaaccucuccaagagcuaugcuaauaacaaagagaaggaaguccuggugcuguggggagugcaccacccuccgaacaucgucgaccagaaaacccucuacagaacagagaaugccuacguuuccguggugucuagccauuauucccggaaguucacccccgaaauugcuaagcgcccuaaagucagagaucaggaggggcggaucaacuacuauuggacgcugcuugagcccggcgacacaauuaucuuugaagccaaugggaaccugauugcgccucgcuacgccuucgcucucagcagaggauuuggcucugggaucauuaauuccaacgcccccauggauaagugugacgcuaaaugccagaccccgcggggagccaucaauagcucucugccuuuccaaaacgugcaccccguuacaaucggcgaguguccuaaguaugugcgcagcgcgaaacuuagaauggucaccggccugcggaauauucccuccauccagucucgcgggcucuuuggagccauugcuggcuucaucgaagggggauggaccggcaugguggaugggugguacggauaucaucaccagaacgagcagggcagcggcuacgccgcugaccaaaaguccacacagaaugccauuaacgggaucacgaauaaaguuaacagcgugaucgaaaagaugaauacccaguuuacagccgucggaaaggaguucaacaaacuggagagacggauggaaaaccugaauaagaaaguggaugacggcuucauugauaucuggaccuacaacgcugagcuccugguccuucuggaaaaugagcgcacacucgacuuucacgacucuaacgugaagaaucuguaugaaaaaguuaagucccagcuuaagaacaaugcgaaagagauugggaacggaugcuucgaguuuuaccauaaguguaaugaugaaugcauggagagcgugaaaaacggcaccuaugacuaccccaaguauucugaagaguccaaacugaauagagagaagaucgauggggucaagcucgaaagcaugggcguguaccaaauucuggccaucuauuccacgguugcuucuagccuggugcuccuggucucccuuggagccaucucuuucuggaugugcagcaacggcucccugcagugucggauuugcaucuga

SEQ ID NO: 198678 - RNA, 1701 nt, Artificial Sequence; identical to SEQ ID NO: 197340
  derived and/or modified CDS sequence (opt5) from hemagglutinin__InfluenzaA__AEA10303

SEQ ID NO: 198679 - RNA, 1701 nt, Artificial Sequence; identical to SEQ ID NO: 198194
  derived and/or modified CDS sequence (opt5) from hemagglutinin__InfluenzaA__AEA10313

SEQ ID NO: 198680 - RNA, 1701 nt, Artificial Sequence; identical to SEQ ID NO: 195905
  derived and/or modified CDS sequence (opt5) from hemagglutinin__InfluenzaA__AEA10323

SEQ ID NO: 198681 - RNA, 1701 nt, Artificial Sequence; identical to SEQ ID NO: 196293
  derived and/or modified CDS sequence (opt5) from hemagglutinin__InfluenzaA__AEA10339

SEQ ID NO: 198682 - RNA, 1701 nt, Artificial Sequence
  derived and/or modified CDS sequence (opt5) from hemagglutinin__InfluenzaA__AEA10349
augaaggccauccugauugugcuccuguacaccuucgcuacagccaacgcggacacgcuuugcaucggcuaucacgcuaauaacagcaccgauacagucgacaccguucuggagaaaaaugugacagugacccauuccgucaaccuccuggaagauaagcacaaugggaaacuuuguaagcugagaggaguggcuccccuccaucugggcaaaugcaacauugccggguggauccugggaaauccugagugugaaucucucagcacagccuccucuuggagcuacauuguugagaccuccucuagcgacaacggcacgugcuauccgggggauuuuaucgacuacgaagaacugcgggagcagcuuuccagcgugucuuccuucgaacgcuuugagaucuuccccaagaccagcucuuggccuaaucacgauuccaacaagggagucacagccgcuuguccccaugccggcgcgaaaucuuuuuauaagaaucugauuuggcucgugaaaaagggcaacagcuacccuaaacuguccaagagcuauaucaaugacaaggggaaagaaguucuugugcuguggggcauucaccaccccuccaccucugccgaucaacagagccucuaccagaacgcugacgccuacgucuucgugggaacauccagauauagcaagaaauuuaagccugagaucgcuauucggccgaaagugcgcgaucaggaggggagaaugaauuacuauuggacccuggucgaacccggagacaagaucacguucgaggccacaggcaaccugguugugccucgguacgcguuugccauggaacgcaacgcugggucuggaauuaucaucuccgauacccccgugcaugacugcaauacaaccugucaaaccccuaaaggcgccauuaacacaagccuccccuuccagaauauccacccgauuacgaucggcaagugcccuaaguaugucaaaucuaccaagcugagacuugcuacagggcugcggaacgugcccagcauucagucccgcggacucuuuggcgccaucgccggguucaucgagggaggcuggaccgggaugguugacggaugguacggcuaucaucaccagaaugaacaaggcucuggguacgcugcggaucugaaaagcacacagaacgccauugacaagaucaccaauaaagugaacuccgucauugagaagaugaauacgcaguuuacagcugugggaaaggaguucaaccaccuugagaaaagaaucgagaaucugaacaagaaaguugaugacggcuuccucgauauuuggaccuacaaugccgaacugcuggugcuccuggagaacgaacggacccuugacuaucaugauagcaaugucaagaaccuguacgagaaagugcgcucucagcucaagaacaaugccaaggagaucgggaacggauguuuugaguucuaucacaaaugcgacaauacauguauggaauccgucaagaacggcaccuacgauuauccuaaauacagcgaagaggcuaagcugaauagagaagagaucgacggggugaaacuugagucuacacggauuuaucaaauccuggccauuuacuccacgguugcgagcucccucgugcuggucgugucucugggcgcuaucagcuuuuggaugugcuccaacggaucucuccagugccgcauuuguaucuga

SEQ ID NO: 198683 - RNA, 1701 nt, Artificial Sequence; identical to SEQ ID NO: 196338
  derived and/or modified CDS sequence (opt5) from hemagglutinin__InfluenzaA__AEA30293

SEQ ID NO: 198684 - RNA, 1701 nt, Artificial Sequence
  derived and/or modified CDS sequence (opt5) from hemagglutinin__InfluenzaA__AEA48989
augaaggccauccuggugguccuccuguacaccuucgcuacagccaacgcggacacgcuuugcauuggcuaucacgcuaauaacagcaccgauacaguugacaccgugcuggagaaaaaugugacagucacccauuccgugaaccuccuggaagauaagcacaaugggaaacuuuguaagcugagaggaguugcuccccuccaucugggcaaaugcaacaucgccggguggauucugggaaauccugagugugaaucucucagcacagccuccucuuggagcuacaucguggagaccuccucuagcgacaacggcacgugcuauccgggggauuuuauugacuacgaagaacugcgggagcagcuuuccagcgucucuuccuucgaacgcuuugagaucuuccccaagaccagcucuuggccuaaucacgaauccaacaagggagugacagccgcuuguccccaugccggcgcgcggagcuuuuauaaaaaucugaucuggcucguuaagaaaggcaacucuuacccuaagcuguccaaaagcuauauuaaugauaaggggaaggaggugcuuguccuguggggaauccaccaccccuccaccucugccgaccaacagagccucuaccagaacgcugaugccuacguguucgugggcacauccagauauagcaaaaaguuuaaaccugagauugcuauccgcccgaaggucagagaccaggaagggcggaugaauuacuauuggacccugguugagcccggagauaaaauuacguucgaagccacaggcaaccugguggugccucgcuacgcguuugccauggagagaaacgcugggucuggaaucauuaucuccgacacccccguccaugauugcaauacaaccugucaaaccccuaagggcgccaucaacacaagccuccccuuccagaauauucacccgaucacgauuggcaaaugcccuaaguaugugaagucuaccaaacugcggcuugcuacagggcugcgcaacguucccagcauccaguccagaggacucuuuggcgccauugccggguucaucgaaggaggcuggaccgggaugguggacggaugguacggcuaucaucaccagaaugagcaaggcucuggguacgcugcggaccuuaagagcacacagaacgccaucgaugagauuaccaauaaagucaacuccgugaucgaaaagaugaauacgcaguuuacagcuguuggaaaagaguucaaccaccuggaaaagcggauugagaaucugaacaagaaaguggacgauggcuuccucgacaucuggaccuacaaugccgaacugcugguccuccuggagaacgagcgcacccuugauuaucaugacagcaaugugaagaaccuguacgaaaaagucagaucucagcucaagaacaaugccaaagagauugggaacggauguuuugaguucuaucacaagugcgauaauacauguauggaguccgugaagaacggcaccuacgacuauccuaaauacagcgaagaggcuaagcugaaucgggaggaaaucgaugggguuaaacuugagucuacacgcaucuaucaaauucuggccaucuacuccacgguggcgagcucccucguccuggugguuucucugggcgcuauuagcuuuuggaugugcuccaacggaucucuccagugcagaaucuguauuuga

SEQ ID NO: 198685 - RNA, 1707 nt, Artificial Sequence
  derived and/or modified CDS sequence (opt5) from hemagglutinin__InfluenzaA__AEA50985
auggagaagaucgugcugcuccuggccauuaucaaccuugucaaaagcgaccagauuugcaucggcuaccacgcuaauaacuccaccgaacaaguugauacaauuauggagaagaaugugacggugacccaugcccaggacauccuggaaaagacacacaacgggaaacucugugaucuggacggagucaaaccccuuauccugagagauugcucuguggcgggcuggcuccuggggaauccuaugugugacgaguuccugaacguuccggaauggagcuauauuguggagaagaucaaucccgcuaacgaucucugcuacccuggaaauuuuaacgacuaugaggaacugaagcaucuucugucccggauuaaucacuucgagaaaauccagauuauccccaagucuagcugguccgaucaugaagccucuagcggcgucuccagcgccuguccuuaccaggggagaucuuccuuuuuccgcaacgugguuuggcucauuaaaaagaaugacgcuuaucccaccaucaaaaucagcuacaacaauacaaaccaagaggaucugcuugugcuguggggcauucaccacccuaacgacgccgcugagcagaccaagcucuaucagaauccgacaaccuacaucucugucggaacguccacccugaaccugcggcucgugcccaagauugccacacgcagcaaagugaauggccagucugggagaauggaauuuuucuggaccauccugaagccuaacgaugcgauuaauuuugaguccaacggaaauuucaucgcccccgaaaacgcuuacaaaaucgucaagaaaggcgacagcacaauuaugaaguccgagcuugaauaugggaauugcaacaccaaaugucaaacgccuguuggagccaucaauucuagcaugcccuuucauaacauucacccgcugacaaucggcgagugcccuaaguacgugaaguccaaucggcucgugcuggcuaccgggcuucgcaacagcccccagggagagagacggcgcaaaaagagaggccuguucggcgccauugcgggguuuaucgaaggaggcuggcaggggauggucgacggaugguauggcuaccaucacucuaaugagcagggguccggauaugccgcugauaaagaaagcacacaaaaggccaucaacggcgugaccaacaaaguuaauucuauuaucgacaagaugaacacccaguucgaggcugugggccgggaauuuaauaaccucgagcgcagaauugagaaucugaacaagaaaauggaagauggguuccuggacgucuggacauacaaugccgagcuccuggugcuuauggaaaacgagcggacgcuggauuuccacgacagcaauguuaagaaccucuaugauaaagugcgccugcagcuuagagacaaugccaaggaacugggaaacggcuguuuugaguucuaccaucggugcgauaaugaguguauggaauccgucagaaacgggaccuacgacuauccucaauacucugaggaaagccgccucaaacgggaggagaucuccggagugaagcuggaaagcauuggcaucuaucagauucugucuaucuacuccacagcugcgagcucucucgcccuggcuaucauggucgccgggcuuucccuguggaugugcagcaauggcucccuccagugcagaauuuguaucuga

SEQ ID NO: 198686 - RNA, 1701 nt, Artificial Sequence; identical to SEQ ID NO: 197605
  derived and/or modified CDS sequence (opt5) from hemagglutinin__InfluenzaA__AEA72704

SEQ ID NO: 198687 - RNA, 1701 nt, Artificial Sequence; identical to SEQ ID NO: 197605
  derived and/or modified CDS sequence (opt5) from hemagglutinin__InfluenzaA__AEA72715

SEQ ID NO: 198688 - RNA, 1701 nt, Artificial Sequence; identical to SEQ ID NO: 197605
  derived and/or modified CDS sequence (opt5) from hemagglutinin__InfluenzaA__AEA72726

SEQ ID NO: 198689 - RNA, 1701 nt, Artificial Sequence
  derived and/or modified CDS sequence (opt5) from hemagglutinin__InfluenzaA__AEA72740
augaaggccauccuggugguccuccuguacaccuucgcuacagccaacgcggacacgcuuugcauuggcuaucacgcuaauaacagcaccgauacaguugacaccgugcuggagaagaaugugacagucacccauuccgugaaccuccuggaagauaagcacaaugggaaacuuuguaagcugagaggaguugcuccccuccaucugggcaaaugcaacaucgccggguggauucugggaaauccugagugugaaucucucagcacagccuccucuuggagcuacaucguggagaccuccucuagcgacaacggcacgugcuauccgggggauuuuauugacuacgaagaacugcgggagcagcuuuccagcgucucuuccuucgaacgcuuugagaucuuccccaagaccagcucuuggccuaaucacgauuccaacaagggagugacagccgcuuguccccaugccggcgcgaaaucuuuuuauaagaaucugaucuggcucguuaaaaagggcaacagcuacccuaaacuguccaagagcuauauuaaugacaaggggaaagaagugcuuguccuguggggaauccaccaccccuccaccucugccgaucaacagagccucuaccagaacgcugacgccuacguguucgugggcacauccagauauagcaagaaauuuaagccugagauugcuacccggccgaaaguccgcgaucaggaggggagaaugaauuacuauuggacgcugguugaacccggagacaagaucacauucgaggccaccggcaaccugguggugccucgguacgcguuugccauggaacgcaacgcugggucuggaauuaucauuuccgauacacccguccaugacugcaauaccaccugucaaacaccuaaaggcgccaucaacacgagccuccccuuccagaauauccacccgauuaccaucggcaagugcccuaaguaugugaaaucuacaaagcugagacuugcuaccgggcugcggaacguucccagcauucagucccgcggacucuuuggcgccaucgccggguucauugagggaggcuggacagggaugguggacggaugguacggcuaucaucaccagaaugaacaaggcucuggguacgcugcggaucugaaaagcacccagaacgccaucgacgagaucacgaauaaggucaacuccgugauugagaaaaugaauacacaguuuaccgcuguuggaaaggaguucaaccaccuugagaagagaaucgaaaaucugaacaaaaagguggaugacggcuuccucgauauuuggaccuacaaugccgagcugcugguccuccuggaaaacgagcggacacuugacuaucaugauagcaaugugaaaaaccuguacgagaagguccgcaaccagcucaaaaauaacgccaaggaaaucgggaauggauguuuugaguucuaucacaagugcgacaacaccuguauggaaucugugaaaaauggcacauacgauuauccuaaguacuccgaggaagcuaaacugaacagagaggagauugacgggguuaaacuugaaagcacgcggaucuaucaaauccuggccauuuacucuaccguggcguccagccucguccuggugguuucccugggcgcuaucucuuuuuggaugugcagcaauggaucccuccagugccgcauuuguaucuga

SEQ ID NO: 198690 - RNA, 1701 nt, Artificial Sequence
  derived and/or modified CDS sequence (opt5) from hemagglutinin__InfluenzaA__AEA72750
augaaggccauccuggugguccuccuguacaccuucgcuacagccaacgcggacacgcuuugcauuggcuaucacgcuaauaacagcaccgauacaguugacaccgugcuggagaaaaaugugacagucacccauuccgugaaccuccuggaagauaagcacaaugggaaacuuuguaagcugagaggaguugcuccccuccaucugggcaaaugcaacaucgccggguggauucugggaaauccugagugugaaucucucagcacagccuccucuuggagcuacaucguggagaccuccucuagcgacaacggcacgugcuauccgggggucuuuauugauuacgaagaacugcgggagcagcuuuccagcgugucuuccuucgaacgcuuugagaucuuccccaagaccagcucuuggccuaaucacgacuccaacaagggaguuacagccgcuuguccccaugccggcgcgaaaucuuuuuauaagaaucugaucuggcucgugaaaaagggcaacagcuacccuaaacuguccaagagcuauauuaaugauaaggggaaagaaguccuugugcuguggggaauccaccaccccuccaccacagccgaccaacagucucucuaccagaacgcugauaccuacguguucgucggcacgagcagauauuccaagaaauuuaagccugagauugccauccggccgaaaguucgcgaccaggaggggagaaugaauuacuauuggacacugguggaacccggagauaagauuaccuucgaggcuacaggcaaccugguggucccucgguacgccuuugcgauggaacgcaacgccgggagcggaaucauuaucucugacacccccgugcaugauugcaauaccacaugucaaacgccuaaaggcgcuaucaacaccucccuccccuuccagaauauucacccgaucacaauuggcaagugcccuaaguauguuaaaagcaccaagcugagacuugccacagggcugcggaacgugcccucuauccagagccgcggacucuuuggcgcuauugccggguucaucgagggaggcuggaccgggauggucgacggaugguacggcuaucaucaccagaaugaacaaggcuccggguacgccgcugaccugaaaucuacgcagaacgcgaucgauaagauuacaaauaaagugaacagcguuaucgagaagaugaauacccaguuuaccgccgugggaaaggaguucaaccaccuugagaaaagaauugagaaucugaacaagaaagucgacgauggcuuccucgacaucuggacauacaaugcugaacugcuggugcuccuggagaacgaacggacccuugauuaucaugacuccaaugucaagaaccuguacgagaaagugcgcaaccagcucaagaauaacgccaaggagauugggaauggauguuuugaguucuaucacaaaugcgauaacacauguauggaaagcguuaagaauggcacguacgacuauccuaaauacucugaagaggccaagcugaacagagaagagaucgauggggugaaacuugaguccacccggaucuaucaaauucuggcuaucuacagcacagucgccucuucccucgugcugguugugagccugggcgcgauuuccuuuuggaugugcucuaauggaagccuccagugccgcaucuguauuuga

SEQ ID NO: 198691 - RNA, 1701 nt, Artificial Sequence; identical to SEQ ID NO: 198507
  derived and/or modified CDS sequence (opt5) from hemagglutinin__InfluenzaA__AEA72759

SEQ ID NO: 198692 - RNA, 1701 nt, Artificial Sequence
  derived and/or modified CDS sequence (opt5) from hemagglutinin__InfluenzaA__AEA72777
augaaggccauccuggugguccuccuguacacccuugcuacagccaacgcggacacgcugugcauuggcuaucacgcuaauaacagcaccgauacaguugacaccgugcucgagaaaaaugugacagucacccauuccgugaaccugcuugaagauaagcacgacgggaaacuguguaagcucagaggaguugcuccccugcaucugggcaaaugcaauaucgccggguggauucucggaaacccugagugugaaucucugagcacagccuccucuuggagcuacaucguggagaccuccucuagcgauaauggcacgugcuauccgggggacuucauugauuacgaggaacuucgggagcagcuguccagcgucucuuccuuugaacgcuucgagaucuuucccaagaccagcucuuggccuaaccacgacuccaauaagggagugacagccgcuuguccccaugccggcgcgaaauccuucuauaagaaccucaucuggcugguuaaaaagggcaauucuuacccuaaacuuuccaagagcuauauuaacgauaaggggaaagaaauccuggugcucuggggcauucaccaccccuccaccucugccgaccaacagagccuguaccagaaugcugaugccuacgucuuugugggaacauccagauauagcaagaaauucaagccugagaucgcuauucggccgaaagugcgcgaccaggaggggagaaugaacuacuauuggacccuggucgaacccggagauaagaucacguuugaggccacaggcaaucucguugugccucgguacgcguucgccauggaacgcaacgcugggucuggaauuaucaucuccgacacccccgugcaugacugcaacgccacaugucaaaccccuaaaggcgcuauuaauaccagccugcccuuucagaacauccacccgauuacaaucggcaagugcccuaaguaugucaaaucuacgaaacuuagacuggccaccgggcuccggaaugugcccagcauucagucccgcggacuguucggcgccaucgcuggguuuaucgagggaggcuggacagggaugguugauggaugguacggcuaucaucaccagaacgaacaaggcucuggguacgcggccgaccuuaaaagcacccagaaugcuauugauaagaucacaaacaaagugaauagcgucauugagaagaugaacacccaguucacggccgugggaaaggaguuuaaucaccuggaaaagagaaucgagaaccucaauaagaaaguugacgauggcuuccuggacauuuggacauacaacgccgaacugcucgugcugcuugagaaugaacggacccuggauuaucaugacagcaacgucaagaaucucuacgagaaagugcgcucucagcugaagaacaacgcuaaggagaucgggaauggauguuucgaauuuuaucacaaaugcgauaacaccuguauggaguccgucaagaauggcacauacgacuauccuaaauacagcgaagaggccaaacuuaacagagaagagaucgauggggugaagcuggagucuacccggauuuaucaaauccucgcgauuuacuccacaguugcuagcucccuggugcuggucgugucucucggcgccaucagcuucuggaugugcuccaauggaucucugcagugccgcauuuguaucuga

SEQ ID NO: 198693 - RNA, 1701 nt, Artificial Sequence; identical to SEQ ID NO: 198507
  derived and/or modified CDS sequence (opt5) from hemagglutinin__InfluenzaA__AEA72787

SEQ ID NO: 198694 - RNA, 1701 nt, Artificial Sequence; identical to SEQ ID NO: 197605
  derived and/or modified CDS sequence (opt5) from hemagglutinin__InfluenzaA__AEA73288

SEQ ID NO: 198695 - RNA, 1701 nt, Artificial Sequence; identical to SEQ ID NO: 197605
  derived and/or modified CDS sequence (opt5) from hemagglutinin__InfluenzaA__AEA73299

SEQ ID NO: 198696 - RNA, 1701 nt, Artificial Sequence; identical to SEQ ID NO: 197605
  derived and/or modified CDS sequence (opt5) from hemagglutinin__InfluenzaA__AEA73310

SEQ ID NO: 198697 - RNA, 1701 nt, Artificial Sequence
  derived and/or modified CDS sequence (opt5) from hemagglutinin__InfluenzaA__AEA73321
augaagaccaucauugcccugagcuacauccucugccugguguucgcucagaaacuucccggcaacgacaauuccacagccacgcugugucucgggcaccaugcggucccuaacggaaccauuguuaagacaaucaccaaugaucaaauugaggugacaaacgcuaccgaacuggugcagucuagcuccacaggcgagaucugcgacucuccgcaccagauccuugauggggaaaauuguacccugauugacgcccuccugggagauccccagugcgacggcuuucaaaacaaaaagugggaucuguucgucgagagaagcaaagccuauuccaauuguuacccuuaugacgugcccgauuacgcuucucuccggagccugguugccuccagcgggacgcuugaauuuaacaaugagucuuucaacuggaccggagugacacagaauggcaccuccagcgcuugcauccgcagaucuaacaauuccuuuuucagccggcugaacuggcucacacaucugaauuuuaaguauccugcccuuaacgucaccaugcccaacaaugagcaguucgacaagcuguacauuuggggcgugcaccauccugggacggauaaagaccagaucuuucucuaugcgcaagccucuggacgcauuacaguuuccaccaagagaagccagcaggcugugaucccgaacauuggcucccggccccgcgucagaaauaucccuucucggaucagcauuuacuggacaaucgugaaacccggggauauucugcugaucaacuccaccggaaaucucauugccccucgcggcuacuucaagaucagaagcgggaaaucuuccaucaugcggagcgacgcucccauuggaaaguguaacucugaaugcaucaccccgaauggcagcauuccuaacgacaagcccuuucagaaugugaaccgcaucacauauggcgccuguccuagauacgucaaacaauccacgcugaagcuggcgaccgggaugcggaauguucccgagaaacagacacgcggaauuuucggcgccaucgcuggguuuaucgaaaacggaugggagggcaugguggaugggugguauggauucagacaccaaaauucugagggccggggccaggccgcugaccuuaagagcacccaggccgccauugaucagaucaacgggaaacucaauagacugauuggaaagacaaacgaaaaauuccaccagaucgagaaggaauuuuccgagguggaaggccgcauucaagaccuugagaaguacgucgaggauaccaaaaucgaccuguggagcuauaacgcugaacuccuggugacgcuggagaaucagcauacaauugaucucaccgacucugaaaugaacaagcuguucgagaaaaccaagaaacagcuucgggaaaaugcggaggauauggggaacggaugcuuuacaaucuaccacaagugugacaaugccugcaucggcuccauuagaaacgggaccuaugaucauaauguuuaccgcgacgaggcucugaacaaucgguuccagaucaagggcguggaacucaaaagcggauacaaggacuggauucuguggaucucuuuugccauuuccugcuuccuucugugugucgcccuccugggcuuuaucaugugggcuugccaaaaagggaacaucagauguaauauuugcaucuga

SEQ ID NO: 198698 - RNA, 1701 nt, Artificial Sequence; identical to SEQ ID NO: 197605
  derived and/or modified CDS sequence (opt5) from hemagglutinin__InfluenzaA__AEA73332

SEQ ID NO: 198699 - RNA, 1701 nt, Artificial Sequence; identical to SEQ ID NO: 197605
  derived and/or modified CDS sequence (opt5) from hemagglutinin__InfluenzaA__AEA73343

SEQ ID NO: 198700 - RNA, 1701 nt, Artificial Sequence; identical to SEQ ID NO: 197605
  derived and/or modified CDS sequence (opt5) from hemagglutinin__InfluenzaA__AEA73354

SEQ ID NO: 198701 - RNA, 1701 nt, Artificial Sequence
  derived and/or modified CDS sequence (opt5) from hemagglutinin__InfluenzaA__AEA73365
augaagaccaucauugcccugagcuacacacucugccugguguucgcucagaaacuucccggcaacgacaauuccacggccacccugugucucgggcaccaugcggucccuaacggaacaaucguuaagaccauuacaaaugaucaaaucgaggugaccaacgcuacagaacuggugcagucuagcuccaccggcgagauuugcgacucuccgcaccagauccuugauggggaaaauuguacgcugaucgacgcccuccugggagauccccagugcgacggcuuucaaaacaaaaagugggaucuguucgucgagagaagcaaagccuauuccaauuguuacccuuaugacgugcccgauuacgcuucucuccggagccugguugccuccagcgggacccuugaauuuaacaaugagucuuucaacuggacaggagugacccagaauggcacauccagcgcuugcauucgcagaucuaacaauuccuuuuucagccggcugaacuggcucacccaucugaauuuuaaguauccugcccuuaacgucacgaugcccaacaaugagcaguucgacaagcuguacaucuggggcgugcaccauccugggacagauaaagaccagauuuuucucuaugcgcaagccucuggacgcaucaccguuuccacaaagagaagccagcaggcugugauuccgaacaucggcucccggccccgcgucagaaauauuccuucucggaucagcaucuacuggaccauugugaaacccggggauauccugcugauuaacuccaccggaaaucucaucgccccucgcggcuacuucaagauuagaagcgggaaaucuuccaucaugcggagcgacgcucccaucggaaaguguaacucugaaugcauuacaccgaauggcagcaucccuaacgacaagcccuuucagaaugugaaccgcauuacguauggcgccuguccuagauacgucaaacaauccacccugaagcuggcgacagggaugcggaauguucccgagaaacagacccgcggaaucuucggcgccauugcuggguuuaucgaaaacggaugggagggcaugguggaugggugguauggauucagacaccaaaauucugagggccggggccaggccgcugaccuuaagagcacacaggccgccaucgaucagauuaacgggaaacucaauagacugaucggaaagaccaacgaaaaauuccaccagauugagaaggaauuuuccgagguggaaggccgcauccaagaccuugagaaguacgucgaggauacgaaaauugaccuguggagcuauaacgcugaacuccugguggcgcuggagaaucagcauacaaucgaucucaccgacucugaaaugaacaagcuguucgagaaaaccaagaaacagcuucgggaaaaugccgaggauauggggaacggaugcuuuacaauuuaccacaagugugacaaugcuugcaucggcuccaucagaaacgggaccuaugaucauaauguuuaccgcgacgaggcccugaacaaucgguuccagauuaagggcguggaacucaaaagcggauacaaggacuggauccuguggauuucuuuugccaucuccugcuuccuucugugugucgcucuccugggcuuuauuaugugggccugccaaaaagggaacaucagauguaauaucugcauuuga

SEQ ID NO: 198702 - RNA, 1701 nt, Artificial Sequence; identical to SEQ ID NO: 197605
  derived and/or modified CDS sequence (opt5) from hemagglutinin__InfluenzaA__AEA73376

SEQ ID NO: 198703 - RNA, 1701 nt, Artificial Sequence; identical to SEQ ID NO: 197605
  derived and/or modified CDS sequence (opt5) from hemagglutinin__InfluenzaA__AEA73387

SEQ ID NO: 198704 - RNA, 1701 nt, Artificial Sequence; identical to SEQ ID NO: 197605
  derived and/or modified CDS sequence (opt5) from hemagglutinin__InfluenzaA__AEA73398

SEQ ID NO: 198705 - RNA, 1701 nt, Artificial Sequence; identical to SEQ ID NO: 197605
  derived and/or modified CDS sequence (opt5) from hemagglutinin__InfluenzaA__AEA73409

SEQ ID NO: 198706 - RNA, 1701 nt, Artificial Sequence; identical to SEQ ID NO: 197605
  derived and/or modified CDS sequence (opt5) from hemagglutinin__InfluenzaA__AEA73420

SEQ ID NO: 198707 - RNA, 1701 nt, Artificial Sequence; identical to SEQ ID NO: 197605
  derived and/or modified CDS sequence (opt5) from hemagglutinin__InfluenzaA__AEA73452

SEQ ID NO: 198708 - RNA, 1701 nt, Artificial Sequence; identical to SEQ ID NO: 197605
  derived and/or modified CDS sequence (opt5) from hemagglutinin__InfluenzaA__AEA73463

SEQ ID NO: 198709 - RNA, 1701 nt, Artificial Sequence; identical to SEQ ID NO: 197605
  derived and/or modified CDS sequence (opt5) from hemagglutinin__InfluenzaA__AEA73474

SEQ ID NO: 198710 - RNA, 1701 nt, Artificial Sequence
  derived and/or modified CDS sequence (opt5) from hemagglutinin__InfluenzaA__AEA73485
augaagaccaucauugcccugagcuacauccucugccugguguucgcucagaaacuucccggcaacgacaauuccacagccacgcugugucucgggcaccaugcggucccuaacggaaccauuguuaagacaaucaccaaugaucaaauugaggugacaaacgcuaccgaacuggugcagucuagcuccacaggcgagaucugcgacucuccgcaccagauccuugauggggaaaauuguacccugauugacgcccuccugggagauccccagugcgacggcuuucaaaacaaaaagugggaucuguucgucgagagaagcaaagcccauuccaauuguuauccuuacgacgugcccgauuaugcuucucuccggagccugguugccuccagcgggacgcuugaauuuaacaaugagucuuucaacuggaccggagugacacagaauggcaccuccagcgcuugcauccgcagaucuaacaauuccuuuuucagccggcugaacuggcucacacaccugaauuuuaaguacccugcccuuaacgucaccaugcccaacaaugagcaguucgacaagcuguauauuuggggcgugcaucacccugggacggauaaagaccagaucuuucucuacgcgcaagccucuggacgcauuacaguuuccaccaagagaagccagcaggcugugaucccgaacauuggcucccggccccgcgucagaaauaucccuucucggaucagcauuuauuggacaaucgugaaacccggggauauucugcugaucaacuccaccggaaaucucauugccccucgcggcuacuucaagaucagaagcgggaaaucuuccaucaugcggagcgacgcucccauuggaaaguguaacucugaaugcaucaccccgaauggcagcauuccuaacgacaagcccuuucagaaugugaaccgcaucacauacggcgccuguccuagauaugucaaacaauccacgcugaagcuggcgaccgggaugcggaauguucccgagaaacagacacgcggaauuuucggcgccaucgcuggguuuaucgaaaacggaugggagggcaugguggaugggugguacggauucagacaccaaaauucugagggccggggccaggccgcugaccuuaagagcacccaggccgccauugaucagaucaacgggaaacucaauagacugauuggaaagacaaacgaaaaauuccaucagaucgagaaggaauuuuccgagguggaaggccgcauucaagaccuugagaaguaugucgaggauaccaaaaucgaccuguggagcuacaacgcugaacuccugguggcgcuggagaaucagcacacgauugaucucacagacucugaaaugaacaagcuguucgagaaaaccaagaaacagcuucgggaaaaugccgaggauauggggaacggaugcuuuaccaucuaucauaagugugacaaugcuugcaucggcuccauuagaaacgggacauacgaucacaauguuuaucgcgacgaggcccugaacaaucgguuccagaucaagggcguggaacucaaaagcggauacaaggacuggauucuguggaucucuuuugccauuuccugcuuccuucugugugucgcucuccugggcuuuaucaugugggccugccaaaaagggaacaucagauguaauauuugcaucuga

SEQ ID NO: 198711 - RNA, 1701 nt, Artificial Sequence; identical to SEQ ID NO: 197605
  derived and/or modified CDS sequence (opt5) from hemagglutinin__InfluenzaA__AEA73496

SEQ ID NO: 198712 - RNA, 1701 nt, Artificial Sequence; identical to SEQ ID NO: 197605
  derived and/or modified CDS sequence (opt5) from hemagglutinin__InfluenzaA__AEA73507

SEQ ID NO: 198713 - RNA, 1701 nt, Artificial Sequence; identical to SEQ ID NO: 197605
  derived and/or modified CDS sequence (opt5) from hemagglutinin__InfluenzaA__AEA73518

SEQ ID NO: 198714 - RNA, 1701 nt, Artificial Sequence; identical to SEQ ID NO: 197605
  derived and/or modified CDS sequence (opt5) from hemagglutinin__InfluenzaA__AEA73529

SEQ ID NO: 198715 - RNA, 1701 nt, Artificial Sequence; identical to SEQ ID NO: 197605
  derived and/or modified CDS sequence (opt5) from hemagglutinin__InfluenzaA__AEA73540

SEQ ID NO: 198716 - RNA, 1701 nt, Artificial Sequence; identical to SEQ ID NO: 197605
  derived and/or modified CDS sequence (opt5) from hemagglutinin__InfluenzaA__AEA73551

SEQ ID NO: 198717 - RNA, 1701 nt, Artificial Sequence; identical to SEQ ID NO: 197605
  derived and/or modified CDS sequence (opt5) from hemagglutinin__InfluenzaA__AEA73562

SEQ ID NO: 198718 - RNA, 1698 nt, Artificial Sequence
  derived and/or modified CDS sequence (opt5) from hemagglutinin__InfluenzaA__AEA73573
augaaggugaaacugcucguccugcuuugcaccuucacagccacguacgcugacaccaucuguauuggcuaucacgccaacaauagcacagauaccguugacacagugcuggagaagaacgugaccgucacacauuccgugaaucuccuggaaaacucucacaaugggaaacuuugccugcucaagggaaucgcgccccugcagcugggcaacuguagcguugcuggguggauucucggaaauccugagugcgaacugcuuaucuccaaagagucuuggagcuacauuguggaaaagccgaaccccgagaauggcaccuguuauccugggcauuuugccgauuacgaggaacugagagagcaacucuccucugucagcuccuucgaacgguuugagaucuuccccaaggagagcucuuggccuaaccacacggugaccggaguuuccgccagcugcucucauaauggcgaauccagcuuuuaucgcaaccugcuuuggcugacagagaaaaauggccucuaccccaaccugucuaaguccuaugcuaauaacaaagaaaaggaggugcugguccucuggggagugcaccacccuccgaacaucggggaccagaaaacccuguaccauacagaaaaugccuacgugagcgucguuuccucucacuauagcagaaaguucacccccgagauugcuaagcggccuaaagugcgcgaucaggagggcagaaucaacuacuauuggacgcuucuggaacccggggacacaauuaucuuugaggccaauggaaaccucauugcgccucgguacgccuucgcucugucccgcggcuuugggagcggaaucauuaauucuaacgcccccauggauaagugugacgcuaaaugccagaccccgcaaggcgccaucaauuccagccuuccuuuccagaacgugcaucccgucacaaucggcgaauguccuaaguaugugagaucugcgaaacugcggaugguuaccgggcuccgcaauauucccagcauccaguccagaggacuguuuggcgccauugcuggguucaucgagggaggcuggaccgggaugguggauggaugguacggcuaucaccaccagaacgaacaaggcucuggguacgccgcugaccaaaagagcacacagaaugccauuaacggaaucacgaauaaagucaacuccgugaucgagaagaugaauacccaguuuacagccguuggcaaggaguucaacaaacuggaacggcgcauggagaaccucaauaagaaaguggaugacggguucauugauaucuggaccuacaacgcugaacugcuuguccugcucgagaaugaaagaacacuggacuuucaugacagcaacgugaagaaucuuuaugagaaagucaagucucagcugaagaacaaugcgaaagagauuggaaacggcugcuucgaauuuuaccacaaguguaaugaugagugcauggaauccgugaaaaacgggaccuaugacuaccccaaguauagcgaggagucuaaacucaaucgggaaaagaucgauggcguuaagcuggaguccaugggaguguaccagauucuggccaucuauagcacggucgcuuccucucucgugcugcuuguuagccugggcgccaucuccuucuggaugugcucuaacgggagccuccagugucgcauuugcaucuga

SEQ ID NO: 198719 - RNA, 1698 nt, Artificial Sequence
  derived and/or modified CDS sequence (opt5) from hemagglutinin__InfluenzaA__AEA73584
augaaggugaaacugcucguccugcuuugcaccuucacagccacguacgcugacaccaucuguauuggcuaucacgccaacaauagcacagauaccguugacacagugcuggagaagaacgugaccgucacacauuccgugaaucuccuggaaaacucucacaaugggaaacuuugccugcucaagggaaucgcgccccugcagcugggcaacuguagcguugcuggguggauucucggaaauccugagugcgaacugcuuaucuccaaagagucuuggagcuacauuguggaaaagccgaaccccgagaauggcaccuguuauccugggcauuuugccgauuacgaggaacugagagagcaacucuccucugucagcuccuucgaacgguuugagaucuuccccaaggagagcucuuggccuaaccacacggugaccggaguuuccgccagcugcucucauaauggcgaauccagcuuuuaucgcaaccugcuuuggcugacaggcaaaaaugggcucuaccccaaccugucuaaguccuaugcuaauaacaaagagaaggaagugcugguccucuggggagugcaccacccuccgaacaucguggaccagaaaacccuguacagaacagagaaugccuacgucagcguuguguccucucauuauagccggaaguucacccccgaaauugcuaagcgcccuaaagugagaaaccaggagggccggaucaauuacuauuggacgcuucuggagcccggggauacaauuaucuuugaagccaacggaaaucucauugcgccucgcuacgccuucgcucuguccagaggcuuugggagcggaaucauuaacucuaaugcccccauggacaagugugaugcuaaaugccagaccccgcaaggcgccaucaacuccagccuuccuuuccagaauguccaccccgugacaaucggcgaguguccuaaguauguucggucugcgaaacugcgcauggugaccgggcucagaaacauucccagcauccagucccggggacuguuuggcgccauugcuggguucaucgaaggaggcuggaccgggauggucgacggaugguacggcuaucaucaccagaaugagcaaggcucuggguacgccgcugaucagaaguccacacagaacgccauuaauggaaucacgaacaaagugaauagcguuaucgaaaagaugaacacccaguuuacagccgugggcaaggaguucaacaaacuggagcgcagaauggaaaaucucaacaagaaagucgacgauggguucauugacaucuggaccuacaaugcugagcugcuugugcugcucgaaaacgagcggacacuggauuuucacgacagcaaugucaagaaccuuuaugaaaaagugaagucucaacugaagaauaacgcgaaagagauuggaaauggcugcuucgaguuuuaccauaaguguaacgacgaaugcauggaguccguuaaaaaugggaccuaugauuaccccaaguauagcgaagagucuaaacucaaccgcgagaagaucgacggcgugaagcuggaauccaugggagucuaccagauucuggccaucuauagcacgguggcuuccucucucguucugcuugugagccugggcgccaucuccuucuggaugugcucuaaugggagccuccaguguagaauuugcaucuga

SEQ ID NO: 198720 - RNA, 1698 nt, Artificial Sequence
  derived and/or modified CDS sequence (opt5) from hemagglutinin__InfluenzaA__AEA73595
augaaggugaaacugcucguccugcuuugcaccuucacagccacguacgcugacaccaucuguauuggcuaucacgccaacaauagcacagauaccguugacacagugcuggagaagaacgugaccgucacacauuccgugaaucuccuggaaaacucucacaaugggaaacuuugccugcucaagggaaucgcgccccugcagcugggcaacuguagcguugcuggguggauucucggaaauccugagugcgaacugcuuaucuccaaagagucuuggagcuacauuguggaaaagccgaaccccgagaauggcaccuguuauccugggcauuuugccgauuacgaggaacugagagagcaacucuccucugucagcuccuucgaacgguuugagaucuuccccaaggagagcucuuggccuaaccacacggugaccggaguuuccgccagcugcucucauaauggcgaauccagcuuuuaucgcaaccugcuuuggcugacagugaaaaauggccucuaccccaaccugucuaaguccuaugcuaauaacaaagagaaggaaguccuggugcucuggggagugcaccacccuccgaacaucgucgaccagaaaacccuguaccauacagagaaugccuacguuagcgugguguccucucacuauagcagaaaguucacccccgaaauugcuaagcggccuaaaguccgcgaucaggaggggagaaucaacuacuauuggacgcuucuggagcccggcgacacaauuaucuuugaagccaaugggaaccucauugcgccucgguacgccuucgcucugucccgcggauuuggcagcgggaucauuaauucuaacgcccccauggauaagugugacgcuaaaugccagaccccgagaggagccaucaauuccagccuuccuuuccaaaacgugcaucccguuacaaucggcgaguguccuaaguaugugcggucugcgaaacugcgcauggucaccggccucagaaauauucccagcauccagucccgggggcuguuuggagccauugcuggcuucaucgaagggggauggaccggcaugguggaugggugguacggauaucaccaccagaacgagcagggcucuggcuacgccgcugaccaaaagagcacacagaaugccauuaacgggaucacgaauaaaguuaacuccgugaucgaaaagaugaauacccaguuuacagccgucggaaaggaguucaacaaacuggagcgcagaauggaaaaccucaauaagaaaguggaugacggcuucauugauaucuggaccuacaacgcugagcugcuuguccugcucgaaaaugagcggacacuggacuuucaugacagcaacgugaagaaucuuuaugaaaaaguuaagucucagcugaagaacaaugcgaaagagauugggaacggaugcuucgaguuuuaccacaaguguaaugaugaaugcauggaguccgugaaaaacggcaccuaugacuaccccaaguauagcgaagagucuaaacucaaucgcgagaagaucgauggggucaagcuggaauccaugggcguguaccaaauucuggccaucuauagcacgguugcuuccucucucgugcugcuugucagccugggagccaucuccuucuggaugugcucuaacggcagccuccaguguagaauuugcaucuga

SEQ ID NO: 198721 - RNA, 1698 nt, Artificial Sequence; identical to SEQ ID NO: 198025
  derived and/or modified CDS sequence (opt5) from hemagglutinin__InfluenzaA__AEA73606

SEQ ID NO: 198722 - RNA, 1698 nt, Artificial Sequence; identical to SEQ ID NO: 195203
  derived and/or modified CDS sequence (opt5) from hemagglutinin__InfluenzaA__AEA73617

SEQ ID NO: 198723 - RNA, 1698 nt, Artificial Sequence; identical to SEQ ID NO: 195688
  derived and/or modified CDS sequence (opt5) from hemagglutinin__InfluenzaA__AEA73628

SEQ ID NO: 198724 - RNA, 1698 nt, Artificial Sequence; identical to SEQ ID NO: 198044
  derived and/or modified CDS sequence (opt5) from hemagglutinin__InfluenzaA__AEA73639

SEQ ID NO: 198725 - RNA, 1698 nt, Artificial Sequence; identical to SEQ ID NO: 195203
  derived and/or modified CDS sequence (opt5) from hemagglutinin__InfluenzaA__AEA73650

SEQ ID NO: 198726 - RNA, 1698 nt, Artificial Sequence; identical to SEQ ID NO: 195688
  derived and/or modified CDS sequence (opt5) from hemagglutinin__InfluenzaA__AEA73661

SEQ ID NO: 198727 - RNA, 1698 nt, Artificial Sequence
  derived and/or modified CDS sequence (opt5) from hemagglutinin__InfluenzaA__AEA73672
augaaggugaaacugcucguccugcuuugcaccuucacagccacguuugcugacaccaucuguauuggcuaccacgccaacaauagcacagauaccguugacacagugcuggagaagaacgugaccgucacacauuccgugaaucuccuggaaaacucucacaaugggaaacuuugccugcucaagggaaucgcgccccugcagcugggcaacuguagcguugcuggguggauucucggaaauccugagugcgaacugcuuaucuccaaagagucuuggagcuauauuguggaaaagccgaaccccgagaauggcaccuguuacccugggcauuucgccgauuaugaggaacugagagagcaacucuccucugucagcuccuuugaacgguucgagaucuuucccaaggagagcucuuggccuaaccacacggugaccggaguuuccgccagcugcucucauaauggcgaauccagcuucuaccgcaaccugcuuuggcugacagugaaaaauggccucuaucccaaccugucuaaguccuacgcuaauaacaaagagaaggaaguccuggugcucuggggagugcaccacccuccgaacaucgucgaccagaaaacccuguauagaacagagaaugccuacguuagcgugguguccucucauuacagccggaaguuuacccccgaaauugcuaagcgcccuaaagucagagaucaggaggggcggaucaacuauuacuggacgcuucuggagcccggcgacacaauuaucuucgaagccaaugggaaccucauugcgccucgcuaugccuuugcucuguccagaggauucggcagcgggaucauuaauucuaacgcccccauggauaagugugacgcuaaaugccagaccccgcggggagccaucaauuccagccuuccuuuucaaaacgugcaccccguuacaaucggcgaguguccuaaguacgugcgcucugcgaaacugagaauggucaccggccuccggaauauucccagcauccagucccgcgggcuguucggagccauugcuggcuuuaucgaagggggauggaccggcaugguggaugggugguauggauaccaucaccagaacgagcagggcucuggcuaugccgcugaccaaaagagcacacagaaugccauuaacgggaucacgaauaaaguuaacuccgugaucgaaaagaugaauacccaguucacagccgucggaaaggaguucaacaaacuggagagacggauggaaaaccucaauaagaaaguggaugacggcuuuauugauaucuggaccuacaacgcugagcugcuuguccugcucgaaaaugagcgcacacuggacuuccacgacagcaacgugaagaaucuuuacgaaaaaguuaagucucagcugaagaacaaugcgaaagagauugggaacggaugcuuugaguucuaucauaaguguaaugaugaaugcauggaguccgugaaaaacggcaccuacgacuaucccaaguacagcgaagagucuaaacucaauagagagaagaucgauggggucaagcuggaauccaugggcguguaucaaauucuggccaucuacagcacgguugcuuccucucucgugcugcuugucagccugggagccaucuccuuuuggaugugcucuaacggcagccuccagugucggauuugcaucuga

SEQ ID NO: 198728 - RNA, 1698 nt, Artificial Sequence; identical to SEQ ID NO: 195688
  derived and/or modified CDS sequence (opt5) from hemagglutinin__InfluenzaA__AEA73683

SEQ ID NO: 198729 - RNA, 1698 nt, Artificial Sequence
  derived and/or modified CDS sequence (opt5) from hemagglutinin__InfluenzaA__AEA73694
augaaggugaaacugcucguccugcuuugcaccuucacagccacguacgcugacaccaucuguauuggcuaucacgccaacaauagcacagauaccguugacacagugcuggagaagaacgugaccgucacacauuccgugaaucuccuggaaaacucucacaaugggaaacuuugccugcucaagggaaucgcgccccugcagcugggcaacuguagcguugcuggguggauucucggaaauccugagugcgaacugcuuaucuccaaagagucuuggagcuacauuguggaaaagccgaaccccgagaauggcaccuguuauccugggcauuuugccgauuacgaggaacugagagagcaacucuccucugucagcuccuucgaacgguuugagaucuuccccaaggagagcucuuggccuaaccacacggugaccggaguuuccgccagcugcucucauaauggcgaauccagcuuuuaucgcaaccugcuuuggcugacagugaaaaauggccucuaccccaaccugucuaaguccuaugcuaauaacaaagagaaggaaguccuggugcucuggggagugcaccacccuccgaacaucgucgaccagaaaacccuguacagaacagagaaugccuacguuagcgugguguccucucauuauagccggaaguucacccccgaaauugcuaagcgcccuaaagucagagaucaggaggggcggaucaacuacuauuggacgcuucuggagcccggcgacacaauuaucuuugaagccaaugggaaccucauugcgccucgcuacgccuucgcucuguccagaggauuuggcagcgggaucauuaauucuaacgcccccauggauaagugugacgcuaaaugccagaccccgcggggagccaucaauuccagccuuccuuuccaaaacgugcaccccguuacaaucggcgaguguccuaaguaugugcgcucugcgaaacugagaauggucaccggccuccggaauauucccagcauccagucccgcgggcuguuuggagccauugcuggcuucaucgaagggggauggaccggcaugguggaugggugguacggauaucaucaccagaacgagcagggcucuggcuacgccgcugaccaaaagagcacacagaaugccauuaacgggaucacgaauaaaguuaacuccgugaucgaaaagaugaauacccaguuuacagccgucggaaaggaguucaacaaacuggagagacggauggaaaaccucaauaagaaaguggaugacggcuucauugauaucuggaccuacaacgcugagcugcuuguccugcucgaaaaugagcgcacacuggacuuucacgacagcaacgugaagaaucuuuaugaaaaaguuaagucucagcugaagaacaaugcgaaagagauugggaacggaugcuucgaguuuuaccauaaguguaaugaugaaugcauggaguccgugaaaaacggcaccuaugacuaccccaaguauagcgaagagucuaaacucaauagagagaagaucgauggggucgaacuggaguccaugggcguguaccaaauucuggccaucuauagcacgguugcuuccucucucgugcugcuugucagccugggagccaucuccuucuggaugugcucuaacggcagccuccagugucggauuugcaucuga

SEQ ID NO: 198730 - RNA, 1698 nt, Artificial Sequence; identical to SEQ ID NO: 195688
  derived and/or modified CDS sequence (opt5) from hemagglutinin__InfluenzaA__AEA73705

SEQ ID NO: 198731 - RNA, 1698 nt, Artificial Sequence; identical to SEQ ID NO: 195203
  derived and/or modified CDS sequence (opt5) from hemagglutinin__InfluenzaA__AEA73716

SEQ ID NO: 198732 - RNA, 1698 nt, Artificial Sequence; identical to SEQ ID NO: 195203
  derived and/or modified CDS sequence (opt5) from hemagglutinin__InfluenzaA__AEA73727

SEQ ID NO: 198733 - RNA, 1698 nt, Artificial Sequence; identical to SEQ ID NO: 195203
  derived and/or modified CDS sequence (opt5) from hemagglutinin__InfluenzaA__AEA73738

SEQ ID NO: 198734 - RNA, 1698 nt, Artificial Sequence; identical to SEQ ID NO: 195203
  derived and/or modified CDS sequence (opt5) from hemagglutinin__InfluenzaA__AEA73749

SEQ ID NO: 198735 - RNA, 1698 nt, Artificial Sequence
  derived and/or modified CDS sequence (opt5) from hemagglutinin__InfluenzaA__AEA73760
augaaggugaaacugcucguccugcuuugcaccuucacagccacguacgcugacaccaucuguauuggcuaucacgccaacaauagcacagauaccguugacacagugcuggagaagaacgugaccgucacacauuccgugaaucuccuggaaaacucucacaaugggaaacuuugccugcucaagggaaucgcgccccugcagcugggcaacuguagcguugcuggguggauucucggaaauccugagugcgaacugcuuaucuccaaagagucuuggagcuacauuguggaaaagccgaaccccgagaauggcaccuguuauccugggcauuuugccgauuacgaggaacugagagagcaacucuccucugucagcuccuucgaacgguuugagaucuuccccaaggagagcucuuggccuaaccacacggugaccggaguuuccgccagcugcucucauaauggcgaauccagcuuuuaucgcaaccugcuuuggcugacagugaaaaauggccucuaccccaaccugucuaaguccuaugcuaauaacaaagagaaggaaguccuggugcucuggggagugcaccacccuccgaacaucgucgaccagaaaacccuguacagaacagagaaugccuacguuagcgugguguccucucauuauagccggaaguucacccccgaaauugcuaagcgcccuaaaaucagagaucaggaggggcggauuaacuacuauuggacgcuucuggagcccggcgacacaaucauuuuugaagccaaugggaaccucaucgcgccucgcuacgccuucgcucuguccagaggauuuggcagcgggauuaucaauucuaacgcccccauggauaagugugacgcuaaaugccagaccccgcggggagccaucaauuccagccuuccuuuccaaaacguccaccccgugacaauuggcgaguguccuaaguauguucgcucugcgaaacugagaauggugaccggccuccggaauauccccagcauucagucccgcgggcuguuuggagccaucgcuggcuucauugaagggggauggaccggcauggucgaugggugguacggauaucaucaccagaacgagcagggcucuggcuacgccgcugaccaaaagagcacacagaaugccaucaacgggaucacgaauaaagugaacuccguuauugaaaagaugaauacccaguuuacagccgugggaaaggaguucaacaaacuggagagacggauggaaaaccucaauaagaaagucgaugacggcuucaucgauauuuggaccuacaacgcugagcugcuugugcugcucgaaaaugagcgcacacuggacuuucacgacagcaacgucaagaaucuuuaugaaaaagugaagucucagcugaagaacaaugcgaaagagaucgggaacggaugcuucgaguuuuaccauaaguguaaugaugaaugcauggaguccguuaaaaacggcaccuaugacuaccccaaguauagcgaagagucuaaacucaauagagagaagauugauggggugaagcuggaauccaugggcgucuaccaaauccuggccaucuauagcacgguggcuuccucucucguucugcuugugagccugggagccauuuccuucuggaugugcucuaacggcagccuccagugucggaucugcauuuga

SEQ ID NO: 198736 - RNA, 1701 nt, Artificial Sequence; identical to SEQ ID NO: 194741
  derived and/or modified CDS sequence (opt5) from hemagglutinin__InfluenzaA__AEA73771

SEQ ID NO: 198737 - RNA, 1701 nt, Artificial Sequence; identical to SEQ ID NO: 196371
  derived and/or modified CDS sequence (opt5) from hemagglutinin__InfluenzaA__AEA73781

SEQ ID NO: 198738 - RNA, 1701 nt, Artificial Sequence; identical to SEQ ID NO: 196293
  derived and/or modified CDS sequence (opt5) from hemagglutinin__InfluenzaA__AEA73791

SEQ ID NO: 198739 - RNA, 1701 nt, Artificial Sequence; identical to SEQ ID NO: 194921
  derived and/or modified CDS sequence (opt5) from hemagglutinin__InfluenzaA__AEA73801

SEQ ID NO: 198740 - RNA, 1701 nt, Artificial Sequence; identical to SEQ ID NO: 195905
  derived and/or modified CDS sequence (opt5) from hemagglutinin__InfluenzaA__AEA73811

SEQ ID NO: 198741 - RNA, 1701 nt, Artificial Sequence; identical to SEQ ID NO: 196463
  derived and/or modified CDS sequence (opt5) from hemagglutinin__InfluenzaA__AEA73821

SEQ ID NO: 198742 - RNA, 1701 nt, Artificial Sequence
  derived and/or modified CDS sequence (opt5) from hemagglutinin__InfluenzaA__AEA73831
augaaggccauccuggugguccuccuguacaccuucgcuacagccaacgcggacacgcuuugcauuggcuaucacgcuaauaacagcaccgauacaguugacaccgugcuggagaaaaaugugacagucacccauuccgugaaccuccuggaagauaagcacaaugggaaacuuuguaagcugagaggaguuacaccccuccaucugggcaaaugcaacaucgccggguggauucugggaaauccugagugugaaucucucagcaccgccuccucuuggagcuacaucguggagacguccucuagcgacaacgggaccugcuauccgggcgauuuuauugacuacgaagaacugcgggagcagcuuuccagcgucucuuccuucgaacgcuuugagaucuuccccaagacaagcucuuggccuaaucacgauuccaacaagggagugaccgcugccuguccccaugcuggcgccaagagcuuuuauaaaaaucugaucuggcucguuaaaaagggcaacucuuacccuaaacuguccaagagcuauauuaaugacaaggggaaagaagugcuuguccuguggggaauccaccaccccuccacaucuaccgaucaacagagccucuaccagaacgcggacgccuacguguucgugggcacguccagauauagcaagaaauuuaagccugagauugcuauccggccgaaaguccgcgaucaggaggggagaaugaauuacuauuggacacugguugaacccggagacaagauuaccuucgaggccacaggcaaccugguggugccucgguacgcuuuugccauggaacgcaacgcggggucuggaaucauuaucuccgauacccccguccaugacugcaauaccacaugucaaacgccuaaaggcgccaucaacaccagccuccccuuccagaauauucacccgaucacaauuggcaagugcccuaaguaugugaaaucuaccaagcugagacuugcuacagggcugcggaacguucccagcauccagucccgcggacucuuuggcgccauugcuggguucaucgagggaggcuggaccgggaugguggacggaugguacggcuaucaucaccagaaugaacaaggcucuggguacgccgccgaucugaaaagcacgcagaacgcuaucgacaagauuacaaauaaagucaacuccgugaucgagaagaugaauacccaguuuaccgcgguuggaaaggaguucaaccaccuugagaaaagaauugagaaucugaacaagaaaguggaugacggcuuccucgauaucuggacauacaaugccgaacugcugguccuccuggagaacgaacggacccuugacuaucaugauagcaaugugaagaaccuguacgagaaaguccgcucucagcucaagaacaaugcuaaggagauugggaacggauguuuugaguucuaucacaaaugcgacaauacauguauggaauccgugaagaacggcacguacgauuauccuaaauacagcgaagaggccaagcugaauagagaagagaucgacgggguuaaacuugagucuacccggaucuaucaaauucuggccaucuacuccacaguggcuagcucccucguccuggugguuucucugggcgccauuagcuuuuggaugugcuccaacggaucucuccagugccgcaucuguauuuga

SEQ ID NO: 198743 - RNA, 1701 nt, Artificial Sequence
  derived and/or modified CDS sequence (opt5) from hemagglutinin__InfluenzaA__AEA73841
augaaggccauccuggugguccuccuguacaccuucgcuacagccaacgcggacacgcuuugcauuggcuaucacgcuaauaacagcaccgauacaguugacaccgugcuggagaaaaaugugacagucacccauuccgugaaccuccuggaagauaagcacaaugggaaacuuuguaagcugagaggaguugcuccccuccaucugggcaaaugcaacaucgccggguggauucugggaaauccugagugugaaucucucagcacagccuccucuuggagcuacaucguggagaccuccucuagcgacaacggcacgugcuauccgggggauuuuauuaauuacgaagaacugcgggagcagcuuuccagcgucucuuccuucgaacgcuuugagaucuuccccaagaccagcucuuggccuaaccacgacuccaauaagggagugacagccgcuuguccccaugccggcgcgaaaucuuuuuauaagaaccugaucuggcucguuaaaaagggcaauagcuacccuaaacuguccaagagcuauauuaacgauaaggggaaagaagugcuuguccuguggggaauccaccaccccuccaccucugccgaccaacagagccucuaccagaaugcugaugccuacguguucgugggcacauccagauauagcaagaaauuuaagccugagauugcuauccggccgaaaguccgcgaccaggaggggagaaugaacuacuauuggacccugguugaacccggagauaagauuacguucgaggccacaggcaaccugguggugccucgguacgcguuugccauggaacgcaaugcugagucugggaucauuaucuccgacacccccguccaugauugcaacacaaccugucaaaccccuaaaggagccaucaauacaagccuccccuuccagaacauucacccgaucacgauuggcaagugcccuaaguaugugaaaucuaccaagcugagacuugcuacaggccugcggaauguucccagcauccagucccgcgggcucuuuggagccauugccggcuucaucgaagggggauggaccggcaugguggacgggugguacggauaucaucaccagaacgagcaaggcucuggcuacgcugcggaccugaaaagcacacagaaugccaucgauaagauuaccaacaaagucaauuccgugguugagaagaugaacacgcaguuuacagcuguggggaaggaguucaaucaccuugagaaaagaaucgaaaaccugaauaagaaagucgacgauggauuccucgacauuuggaccuacaacgccgagcugcuggugcuccuggaaaaugagcggacccuugauuaucaugacagcaacgucaagaaccuguacgagaaagugcgcucucagcucaagaauaacgccaaggaaaucggcaauggguguuuugaguucuaucacaaaugcgauaacacauguauggaauccguuaagaauggaaccuacgacuauccuaaauacagcgaggaagcuaagcugaacagagaggagauugauggcgugaaacuugaaucuacacggaucuaucaaauccuggccauuuacuccacggucgcgagcucccucgugcugguugugucucugggggcuaucagcuuuuggaugugcuccaauggcucucuccagugccgcauuuguaucuga

SEQ ID NO: 198744 - RNA, 1701 nt, Artificial Sequence; identical to SEQ ID NO: 196371
  derived and/or modified CDS sequence (opt5) from hemagglutinin__InfluenzaA__AEA73851

SEQ ID NO: 198745 - RNA, 1701 nt, Artificial Sequence
  derived and/or modified CDS sequence (opt5) from hemagglutinin__InfluenzaA__AEA73861
augaaggccauccuggugguccuccuguacaccuucgcuacagccaacgcggacacgcuuugcauuggcuaucacgcuaauaacagcaccgauacaguugacaccgugcuggagaaaaaugugacagucacccauuccgugaaccuccuggaagauaagcacaaugggaaacuuuguaagcugagaggaguugcgccccuccaucugggcgagugcaacaucgccggguggauucugggaaauccugaaugugagucucucagcacagcuuccucuuggagcuacaucguggaaaccuccucuagcgacaacggcacgugcuauccgggggauuuuauugacuacgaggagcugcgggaacagcuuuccagcgucucuuccuucgagcgcuuugaaaucuuccccaaaaccagcucuuggccuaaucacgauuccaacaagggagugacagccgcuuguccccaugccggcgccaagagcuuuuauaaaaaucugaucuggcucguuaagaaaggcaacucuuacccuaagcuguccaaaagcuauauuaaugacaaggggaaggaggugcuuguccuguggggaauccaccaccccuccaccucugccgaucaacagagccucuaccagaacgcugacgccuacguguucgugggcacauccagauauagcaaaaaguuuaaaccugagauugcuauccggccgaagguccgcgaucaggaagggagaaugaauuacuauuggacccugguugagcccggagacaaaauuacguucgaagccacaggcaaccugguggugccucgguacgcguuugccauggagcgcaacgcugggucuggaaucauuaucuccgauacccccguccaugacugcaauacaaccugucaaaccccuaagggcgccaucaacacaagccuccccuuccagaaugugcacccgauuacgaucggcaaaugcccuaaguauguuaagucuaccaaacugagacuugcuacagggcugcggaacgugcccagcauucagucccgcggacucuuuggcgccaucgccggguucauugaaggaggcuggaccgggauggucgacggaugguacggcuaucaucaccagaaugagcaaggcucuggguacgcugcggaucuuaagagcacacagaacgccaucgacgagaucaccaauaaagugaacuccguuauugaaaagaugaauacgcaguuuacagcugugggaaaagaguucaaccaccuggaaaagagaaucgagaaucugaacaagaaaauugaugacggcuuccucgauaucuggaccuacaaugccgaacugcugguccuccuggagaacgagcggacccuugacuaucaugauagcaaugugaagaaccuguacgaaaaaguccgcucucagcucaagaacaaugccaaagagauugggaacggauguuuugaguucuaucacaagugcgacaauacauguauggaauccgugaagaacggcaccuacgauuauccuaaauacagcgaagaggcuaagcugaauagagaggaaaucgacgggguuaaacuugagucuacacggaucuaucaaauucuggccaucuacuccacgguggcgagcucccucguccuggugguuucucugggcgcuauuagcuuuuggaugugcuccaacggaucucuccagugccgcaucuguauuuga

SEQ ID NO: 198746 - RNA, 1701 nt, Artificial Sequence; identical to SEQ ID NO: 196613
  derived and/or modified CDS sequence (opt5) from hemagglutinin__InfluenzaA__AEA73871

SEQ ID NO: 198747 - RNA, 1701 nt, Artificial Sequence; identical to SEQ ID NO: 196613
  derived and/or modified CDS sequence (opt5) from hemagglutinin__InfluenzaA__AEA73881

SEQ ID NO: 198748 - RNA, 1701 nt, Artificial Sequence; identical to SEQ ID NO: 196293
  derived and/or modified CDS sequence (opt5) from hemagglutinin__InfluenzaA__AEA73891

SEQ ID NO: 198749 - RNA, 1701 nt, Artificial Sequence
  derived and/or modified CDS sequence (opt5) from hemagglutinin__InfluenzaA__AEA73901
augaacgccauccuggugguccuccuguacaccuucgcuacagccaaugcggacacgcuuugcauuggcuaucacgcuaacaauagcaccgauacaguugacacccugcucgagaagaacgugacagugacccauuccgucaaucugcuugaagauaaacacaacgggaagcuguguaaacucagaggaguggcgccccugcaucugggcaagugcaauaucgccggguggauucucggaaacccugagugugaaucucugagcacagcuuccucuuggagcuacaucguugagaccuccucuagcgacaauggcacgugcuauccgggggauuuuauugacuacgaagaacuucgggagcagcuguccagcgugucuuccuucgaacgcuuugagaucuuccccaaaaccagcucuuggccuaaccacgauuccaauaagggagucacagccgcuuguccccaugccggcgccaagagcuuuuauaaaaaccucaucuggcuggugaagaaaggcaauucuuacccuaaacuuuccaagagcuauauuaacgacaaggggaaggaaguucuggugcucuggggaauccaccaccccuccaccucugccgaucaacagagccuguaccagaaugcugacgccuacgucuucgugggcacauccagauauagcaaaaaguuuaaaccugagauugcuauccggccgaaggugcgcgaucaggaggggagaaugaacuacuauuggacccuggucgaacccggagacaaaauuacguucgaggccacaggcaaccucguugugccucgguacgcguuugccauggaacgcaaugcugggucuggaaucauuaucuccgauacccccgugcaugacugcaacacaaccugucaaaccccuaagggcgccaucaauacaagccugcccuuccagaacauucacccgaucacgauuggcaaaugcccuaaguaugucaagucuaccaaacuuagacuggcuacagggcuccggaaugugcccagcauccagucccgcggacuguuuggcgccauugccggguucaucgagggaggcuggaccgggaugguugacggaugguacggcuaucaucaccagaacgaacaaggcucuggguacgcugcggaucuuaagagcacacagaaugccaucgacgagauuaccaacaaaaucaauuccgugauugagaagaugaacacgcaguuuacagcugucggaaaagaguucaaucaccuggagaagagaaucgaaaaccucaauaagaaaguggaugacggcuuccuggauauuuggaccuacaacgccgagcugcucguucugcuugaaaaugagcggacccuggacuaucaugauagcaacgugaagaaccucuacgagaaaguccgcucucagcugaagaauaacgccaaagaaaucgggaauggauguuuugaguucuaucacaagugcgacaacacauguauggaauccgugaagaauggcaccuacgauuauccuaaauacagcgaggaagcuaaacuuaacagagaggagaucgacggggucaagcuggaaucuacacggauuuaucaaauccucgccauuuacuccacgguggcgagcucccugguucugguggucucucucggcgcuaucagcuuuuggaugugcuccaauggaucucugcagugccgcauuuguaucuga

SEQ ID NO: 198750 - RNA, 1701 nt, Artificial Sequence; identical to SEQ ID NO: 195905
  derived and/or modified CDS sequence (opt5) from hemagglutinin__InfluenzaA__AEA73911

SEQ ID NO: 198751 - RNA, 1701 nt, Artificial Sequence; identical to SEQ ID NO: 196613
  derived and/or modified CDS sequence (opt5) from hemagglutinin__InfluenzaA__AEA73921

SEQ ID NO: 198752 - RNA, 1701 nt, Artificial Sequence; identical to SEQ ID NO: 196371
  derived and/or modified CDS sequence (opt5) from hemagglutinin__InfluenzaA__AEA73931

SEQ ID NO: 198753 - RNA, 1701 nt, Artificial Sequence; identical to SEQ ID NO: 196371
  derived and/or modified CDS sequence (opt5) from hemagglutinin__InfluenzaA__AEA73961

SEQ ID NO: 198754 - RNA, 1701 nt, Artificial Sequence
  derived and/or modified CDS sequence (opt5) from hemagglutinin__InfluenzaA__AEA73971
augaaggccauccuggugguccuccuguacaccuucgcuacagccaacgcggacacgcuuugcauuggcuaucacgcuaauaacagcaccgauacaguugacaccgugcuggagaaaaaugugacagucacccauuccgugaaccuccuggaagauaagcacaaugggaaacuuuguaagcugagaggaguugcuccccuccaucugggcaaaugcaacaucgccggguggauucugggaaauccugagugugaaucucucagcacagccuccucuuggagcuacaucguggagaccuccucuagcgacaacggcacgugcuauccgggggauuuuauugacuacgaagaacugcgggagcagcuuuccagcgucucuuccuucgaacgcuuugagaucuuccccaagaccagcucuuggccuaaucacgauuccaacaagggagugacagccgcuuguccccaugccggcgcgaaaucuuuuuauaagaaucugaucuggcucguuaaaaagggcaacagcuacccuaaacuguccaagagcuauauuaaugacaaggggaaagaagugcuuguccuguggggaauccaccaccccuccaccucugccgaucaacagagccucuaccagaacgcugacgccuacguguucgugggcacauccagauauagcaagaaauuuaagccugagauugcuauccggccgaaaguccgcgagcaggaagggagaaugaauuacuauuggacccugguugagcccggagauaagauuacguucgaagccacaggcaaccugguggugccucgguacgcguuugccauggagcgcaacgcugggucuggaaucauuaucuccgacacccccguccaugauugcaauacaaccugucaaaccccuaaaggcgccaucaacacaagccuccccuuccagaauauucacucuaucacgauuggcaagugcccgaaguaugugaaaagcaccaagcugagacuugcuacagggcugcggaacguuccuuccauccagucucgcggacucuuuggcgccauugccggguucaucgaaggaggcuggaccgggaugguggacggaugguacggcuaucaucaccagaaugagcaaggcagcggguacgcugcggaccagaaauccacacagaacgccaucgaugagauuaccaauaaggucaacagcgugaucgagaaaaugaauacgcaguuuacagcuguuggaaaggaguucaaccaccuggaaaagagaauugagaaucuuaacaaaaagguggacgauggcuuccuggacaucuggaccuacaaugccgaacuccugguccugcucgagaacgagcggacccuggauuaucaugacucuaaugugaaaaaccuuuacgaaaagguccgcucccaacugaaaaacaaugccaaggagauugggaacggauguuuugaguucuaucacaagugcaauaacacauguauggaaagcgugaaaaauggcaccuacgauuaucccaaguacucugaagaggcuaaacucaacagagaggaaaucgacgggguuaagcuggaguccacacggaucuaucagauucuugccaucuacagcacgguggcguccucucugguccucgugguuagccugggcgcuauuuccuuuuggaugugcucuaauggaagccugcagugccgcaucuguauuuga

SEQ ID NO: 198755 - RNA, 1701 nt, Artificial Sequence; identical to SEQ ID NO: 196371
  derived and/or modified CDS sequence (opt5) from hemagglutinin__InfluenzaA__AEA73981

SEQ ID NO: 198756 - RNA, 1701 nt, Artificial Sequence
  derived and/or modified CDS sequence (opt5) from hemagglutinin__InfluenzaA__AEA73991
augaaggccauccuggugguccuccuguacaccuucgcuacagccaacgcggacacgcuuugcauuggcuaucacgcuaauaacagcaccgauacaguugacaccgugcuggagaaaaaugugacagucacccauuccgugaaccuccuggaagauaagcacaaugggaaacuuuguaagcugagaggaguugcgccccuccaucugggcaaaugcaacaucgccggguggauucugggaaauccugagugugaaucucucagcacagcuuccucuuggagcuacaucguggagaccuccucuagcgacaacggcacgugcuauccgggggauuuuauugacuacgaagaacugcgggagcagcuuuccagcgucucuuccuucgaaaaguuugagaucuuccccaagaccagcucuuggccuaaucacgauuccaacaaaggagugacagccgcuuguccccaugccggcgccaagagcuuuuauaaaaaucugaucuggcucguuaagaaaggcaacucuuacccuaagcuguccaagagcuauauuaaugacaaagggaaggaagugcuuguccuguggggaauccaccaccccuccaccucugccgaucaacagagccucuaccagaacgcugacuccuacguguucgugggcacaagccgcuauucuaaaaaguuuaaaccugagauugccaucagaccgaagguccgggaucaggaggggcgcaugaauuacuauuggacccugguugaacccggagacaaaauuacguucgaggcuacaggcaaccugguggugccuagauacgccuuugcgauggaacggaacgccggguccggaaucauuaucagcgauacccccguccaugacugcaauacaaccugucaaaccccugagggcgcuaucaacacaucucuccccuuccagaauauucacccgaucacgauuggcaagugcccuaaguaugugaaaagcaccaagcugcgccuugccacagggcugagaaacguucccuccauccagucucggggacucuuuggcgcuauugccggguucaucgaaggaggcuggaccgggaugguggacggaugguacggcuaucaucaccagaaugagcaaggcagcggguacgccgcugaucugaaauccacacagaacgcgaucgacgagauuaccaauaaggucaacagcgugaucgaaaagaugaauacgcaguuuacagccguuggaaaggaguucaaccaccuugaaaagcgcauugagaaucugaacaaaaagguggaugacggcuuccucgauaucuggaccuacaaugcugaacugcugguccuccuggagaacgagagaacccuugacuaucaugauucuaaugugaaaaaccuguacgaaaagguccggucccagcucaaaaacaaugccaaggagauugggaacggauguuuugaguucuaucacaagugcgacaauacauguauggagagcgugaaaaacggcaccuacgauuauccuaaguacucugaagaggccaaacugaaucgcgaggaaaucgacgggguuaaacuugaguccacaagaaucuaucaaauucuggcuaucuacagcacgguggccuccucucucguccuggugguuagccugggcgcgauuuccuuuuggaugugcucuaacggaagccuccagugccggaucuguauuuga

SEQ ID NO: 198757 - RNA, 1701 nt, Artificial Sequence; identical to SEQ ID NO: 196354
  derived and/or modified CDS sequence (opt5) from hemagglutinin__InfluenzaA__AEA74001

SEQ ID NO: 198758 - RNA, 1701 nt, Artificial Sequence
  derived and/or modified CDS sequence (opt5) from hemagglutinin__InfluenzaA__AEA74011
augaaggccauccuggugguccuccuguacaccuucgcuacagccaacgcggacacgcuuugcauuggcuaucacgcuaauaacagcaccgauacaguugacaccgugcuggagaaaaaugugacagucacccauuccgugaaccuccuggaagauaagcacaaugggaaacuuuguaagcugagaggaguugcuccccuccaucugggcaaaugcaacaucgccggguggauucugggaaauccugagugugaaucucucagcacagccuccucuuggagcuacaucguggagaccuccucuagcgacaacggcacgugcuauccgggggauuuuauugacuacgaggagcugcgggagcagcuuuccagcgucucuuccuucgaacgcuuugagaucuuccccaagaccagcucuuggccuaaucacgauuccaacaagggagugacagccgcuuguccccaugccggcgcgaaaucuuuuuauaagaaucugaucuggcucguuaaaaagagaaacagcuacccuaaacugucccaaagcuauauuaaugacaagggcaaggaagugcuuguccugugggggauccaccaccccuccaccucugccgaucagcagagccucuaccagaacgcugacgccuacguguucgugggaacaucccgguauagcaaaaaguuuaaaccugagauugcuauccgcccgaaggucagagaucaagagggccggaugaauuacuauuggacccugguugaacccggggacaaaauuacguucgaggccacaggaaaccugguggugccucgcuacgcguuugccauggaaagaaacgcuggcucugggaucauuaucuccgauacccccguccaugacugcaauacaaccugucagaccccuaagggagccaucaacacaagccuccccuuccagaauauucacccgaucacgauuggcaaaugcccuaaguaugugaagucuaccaaacugcggcuugcuacaggccugcgcaacguucccagcauccaguccagagggcucuuuggagccauugccggcuucaucgaagggggauggaccggcaugguggacgggugguacggauaucaucaccaaaaugaacagggcucuggcuacgcugcggaucuuaagagcacacagaacgccaucgacaaaauuaccaauaaggucaacuccgugaucgagaaaaugaauacgcaguuuacagcuguugggaaggaguucaaccaccuugaaaagcggauugagaaucugaacaaaaagguggaugacggauuccucgauaucuggaccuacaaugccgaacugcugguccuccuggagaacgaacgcacccuugacuaucaugauagcaaugugaaaaaccuguacgagaaggucagaucucaacucaaaaacaaugccaaggagauuggcaacggguguuuugaguucuaucacaagugcgacaauacauguauggaauccaucaaaaacggaaccuacgauuauccuaaguacagcgaagaggcuaaacugaaucgggaagagaucgacggcgugaagcuggagucuacacgcauuuaucagauccuggccauuuacuccacgguugcgagcucccucgugcuggucgugucucugggggcuaucagcuuuuggaugugcuccaacggcucucuccagugcagaauuuguaucuga

SEQ ID NO: 198759 - RNA, 1701 nt, Artificial Sequence
  derived and/or modified CDS sequence (opt5) from hemagglutinin__InfluenzaA__AEA74021
augaaggccauccuggugguccuccuguacaccuucgcuacagccaacgcggacacgcuuugcauuggcuaucacgcuaauaacagcaccgauacaguugacaccgugcuggagaaaaaugugacagucacccauuccgugaaccuccuggaagauaagcacaaugggaaacuuuguaagcugagaggaguugcuccccuccaucugggcaaaugcaacaucgccggguggauucugggaaauccugagugugaaucucucagcacagccuccucuuggagcuacaucguggagaccuccucuagcgacaacggcacgugcuauccgggggauuuuauugacuacgaagaacugcgggagcagcuuuccagcgucucuuccuucgaacgcuuugagaucuuccccaagaccagcucuuggccuaaucacgauuccaacaagggagugacagccgcuuguccccaugccggcgcgaaaucuuuuuauaagaaucugaucuggcucguuaaaaagggcaacagcuacccuaaacugucccaaagcuauauuaaugacaaggggaaggaagugcuuguccuguggggaauccaccaccccuccaccucugccgaucagcagagccucuaccagaacgcugacgccuacguguucgugggcacauccagauauagcaaaaaguuuaaaccugagauugcuauccggccgaagguccgcgaucaagaggggagaaugaauuacuauuggacccugguugaacccggagacaaaauuacguucgaggccacaggcaaccugguggugccucgguacgcguuugccauggaacgcaacgcugggucuggaaucauuaucuccgauacccccguccaugacugcaauacaaccugucagaccccuaagggcgccaucaacacaagccuccccuuccagaauauucacccgaucacgauuggcaaaugcccuaaguaugugaagucuaccaaacugagacuugcuacagggcugcggaacguucccagcauccagucccgcggacucuuuggcgccauugccggguucaucgagggaggcuggaccgggaugguggacggaugguacggcuaucaucaccaaaaugaacagggcucuggguacgcugcggaucuuaagagcacacagaacgccaucgacaaaauuaccaauaaggucaacuccgugaucgagaaaaugaauacgcaguuuacagcuguuggaaaggaguucaaccaccuugaaaagagaauugagaaucugaacaaaaagguggaugacggcuuccucgauaucuggaccuacaaugccgaacugcugguccuccuggagaacgaacggacccuugacuaucaugauagcaaugugaaaaaccuguacgagaagguccgcucucaacucaaaaacaaugccaaggagauugggaacggauguuuugaguucuaucacaagugcgacaauacauguauggaguccaucaaaaacggcaccuacgauuauccuaaguacagcgaagaggcuaaacugaauagagaagagaucgacggggugaagcuggagucuacacggauuuaucagauccuggccauuuacuccacgguugcgagcucccucgugcuggucgugucucugggcgcuaucagcuuuuggaugugcuccaacggaucucuccagugccgcauuuguaucuga

SEQ ID NO: 198760 - RNA, 1701 nt, Artificial Sequence
  derived and/or modified CDS sequence (opt5) from hemagglutinin__InfluenzaA__AEA74031
augaaggccauccuggugguccuccuguacaccuucgcuacagccaacgcggacacgcuuugcauuggcuaucacgcuaauaacagcaccgauacaguugacaccgugcuggagaaaaaugugacagucacccauuccguggaucuccuggaagacaagcacaacgggaaacuuuguaagcugagaggaguugcuccccuccaucugggcaaaugcaauaucgccggguggauucugggaaacccugagugugaaucucucagcacagccuccucuuggagcuacaucguggagaccuccucuagcgauaauggcacgugcuauccgggggacuuuauugauuacgaagaacugcgggagcagcuuuccagcgucucuuccuucgaacgcuuugagaucuuccccaagaccagcucuuggccuaaccacgacuccaauaagggagugacagccgcuuguccccaugccggcgcgaaaucuuuuuauaacaaucugaucuggcucguuaagaaaggcaacagcuacccuaagcugaauaaauccuauauuaacgauaaggggaaggaagugcuuguccuguggggaauccaccaccccagcaccuccacagaccaacagucucucuaccagaaugccgaugcuuacguguucgugggcaccagcagauauuccaaaaaguuuaaaccugagauugccauccggccgaagguccgcaaccaggaggggagaaugaacuacuauuggacgcugguugaacccggagacaaaauuacauucgaggcuaccggcaaucugguggugccucgguacgccuuugcgauggaacgcaacgccgggagcggaaucauuaucucugauacacccauccaugacugcaauaccaccugucaaacaccuaagggcgcuauuaacacgucccuccccuuccagaauauccacccgauuaccaucggcaaaugcccuaaguaugucaagagcacaaaacugagacuugccaccgggcugcggaacgugcccucuauucagagccgcggacucuuuggcgcuaucgccggguucaucgagggaggcuggacagggaugguugacggaugguacggcuaucaucaccagaaugaacaaggcuccggguacgccgcugaucugaagucuacccagaacgcgauugacgagaucacgaauaaagugaacagcgucauugagaagaugaauacacaguuuaccgccgugggaaaagaguucaaccaccuugagaagagaaucgaaaaucugaacaagaaaguugaugacggcuuccucgauauuuggaccuacaaugcugagcugcuggugcuccuggaaaacgagcggacacuugacuaucaugauuccaacgucaagaaucuguacgagaaagugcgcagccagcucaagaacaaugccaaagaaaucgggaacggauguuuugaguucuaucacaagugcgacaauaccuguauggaaucugucaagaacggcacauacgauuauccuaaauacuccgaggaagccaagcugaauagagaggagaucgacggggugaaacuugaaagcacgcggauuuaucaaauccuggcuauuuacucuaccguugccuccagccucgugcuggucgugucccugggcgcgaucucuuuuuggaugugcagcaacggaucccuccagugccgcauuuguaucuga

SEQ ID NO: 198761 - RNA, 1701 nt, Artificial Sequence
  derived and/or modified CDS sequence (opt5) from hemagglutinin__InfluenzaA__AEA74035
augaaggccauccuggugguccuccuguacaccuucgcuacagccaacgcggacacgcuuugcauuggcuaucacgcuaauaacagcaccgauacaguugacaccgugcuggagaaaaaugugacagucacccauuccguggaucuccuggaagacaagcacaacgggaaacuuuguaagcugagaggaguugcuccccuccaucugggcaaaugcaauaucgccggguggauucugggaaacccugagugugaaucucucagcacagccuccucuuggagcuacaucguggagaccuccucuagcgauaauggcacgugcuauccgggggacuuuauugauuacgaagaacugcgggagcagcuuuccagcgucucuuccuucgaacgcuuugagaucuuccccaagaccagcucuuggccuaaccacgacuccaauaagggagugacagccgcuuguccccaugccggcgcgaaaucuuuuuauaacaaucugaucuggcucguuaagaaaggcaacagcuacccuaagcugaauaaauccuauauuaacgauaaggggaaggaagugcuuguccuguggggaauccaccaccccagcaccuccacagaccaacagucucucuaccagaaugccgaugcuuacguguucgugggcaccagcagauauuccaaaaaguuuaaaccugagauugccauccggccgaagguccgcgaccaggaggggagaaugaacuacuauuggacgcugguugaacccggagauaaaauuacauucgaggcuaccggcaaccugguggugccucgguacgccuuugcgauggaacgcaaugccgggagcggaaucauuaucucugacacacccauccaugacugcaacaccaccugucaaacaccuaagggcgcuauuaauacgucccuccccuuccagaacauccacccgauuaccaucggcaaaugcccuaaguaugucaagagcacaaaacugagacuugccaccgggcugcggaaugugcccucuauucagagccgcggacucuuuggcgcuaucgccggguucaucgagggaggcuggacagggaugguugauggaugguacggcuaucaucaccagaacgaacaaggcuccggguacgccgcugaccugaagucuacccagaaugcgauugaugagaucacgaacaaagugaauagcgucauugagaagaugaacacacaguuuaccgccgugggaaaagaguucaaucaccuugagaagagaaucgaaaaccugaauaagaaaguugacgauggcuuccucgacauuuggaccuacaacgcugagcugcuggugcuccuggaaaaugagcggacacuugauuaucaugacuccaacgucaagaaccuguacgagaaagugcgcagccagcucaagaauaacgccaaagaaaucgggaauggauguuuugaguucuaucacaagugcgauaacaccuguauggaaucugucaagaauggcacauacgacuauccuaaauacuccgaggaagccaagcugaacagagaggagaucgauggggugaaacuugaaagcacgcggauuuaucaaauccuggcuauuuacucuaccguugccuccagccucgugcuggucgugucccugggcgcgaucucuuuuuggaugugcagcaauggaucccuccagugccgcauuuguaucuga

SEQ ID NO: 198762 - RNA, 1701 nt, Artificial Sequence; identical to SEQ ID NO: 194506
  derived and/or modified CDS sequence (opt5) from hemagglutinin__InfluenzaA__AEA77299

SEQ ID NO: 198763 - RNA, 1701 nt, Artificial Sequence; identical to SEQ ID NO: 198507
  derived and/or modified CDS sequence (opt5) from hemagglutinin__InfluenzaA__AEB21316

SEQ ID NO: 198764 - RNA, 1701 nt, Artificial Sequence; identical to SEQ ID NO: 198526
  derived and/or modified CDS sequence (opt5) from hemagglutinin__InfluenzaA__AEB21326

SEQ ID NO: 198765 - RNA, 1701 nt, Artificial Sequence; identical to SEQ ID NO: 198507
  derived and/or modified CDS sequence (opt5) from hemagglutinin__InfluenzaA__AEB21338

SEQ ID NO: 198766 - RNA, 1701 nt, Artificial Sequence; identical to SEQ ID NO: 198526
  derived and/or modified CDS sequence (opt5) from hemagglutinin__InfluenzaA__AEB21348

SEQ ID NO: 198767 - RNA, 1701 nt, Artificial Sequence; identical to SEQ ID NO: 195660
  derived and/or modified CDS sequence (opt5) from hemagglutinin__InfluenzaA__AEB40206

SEQ ID NO: 198768 - RNA, 1701 nt, Artificial Sequence; identical to SEQ ID NO: 195660
  derived and/or modified CDS sequence (opt5) from hemagglutinin__InfluenzaA__AEB66895

SEQ ID NO: 198769 - RNA, 1698 nt, Artificial Sequence
  derived and/or modified CDS sequence (opt5) from hemagglutinin__InfluenzaA__AEB71102
auggacgugcccgucuucguucugcucaugcugaccagcaucugcgugcaggccgauagaauuugugugggcuaccuuuccacaaacucuagcgagcgggucgacacgcugcucgaaaauaacgugccuguuaccuccucuguggaucuggucgagacaaaucacaccgggacauauugcagccuuggaggcaucuccccggugcaucugggggacuguucuuuugaaggauggauuguuggcaaccccgcuugcgccagcaaucucgggauccgcgagugguccuaccugauugaagauccuagcgcgccccacggacuguguuauccuggcgagcucgacaacaauggcgagcugagacaucuuuucucugggauccgguccuuuagccgcaccgaacugaucgcucccacaucuuggggagaggugaacgauggcgucaccgccgccugccaagacaagggggcuuccagcuucuacagaaaucucgugugguuuguggaacggggaaacaaauauccugucauucgcagaacguacaauaacaccacaggccgggauguucuggugaucugggggauucaccauccggugucuaccgacgaggcccgcaaacuuuaugcuaaggauaaucccuacacacuggucuccaccagcuccuggucuagaaaguacaaccucgagacgggaacacggccuggcuauaauggccagaaaagcuggaccaagaucuacugguaucugaugcaccccggggacuccauuagcuucgaaucuaacggaggccugcucgccccuaaguacggguauaucauugaggaauacggaaaaggccgcaucuuucaguccagaauccggauugcgaaguguaacacaaaaugccagaccagcguugggggaaucaauaccaacaagacauuccaaaauauugagcgcaacgcccugggcgauugucccaaauauaucaagucuggccagcuuaagcuggcuacggggcucagaaaugugccggccauuagcaaccggggacuguuuggcgcuaucgccggguucaucgaaggaggcuggccugggcuuauuaauggcugguacggauuucagcaccagaacgagcaaggcauggggauggcggccgacaaagaguccacccagaaggcuaucgaccagauuacaaccaaaaucaauaacauuaucgaaaagaugaauggaaacuacgauucuaucagaggcgaguucagccagguggaacaacgcauuaauaugcuggccgaccggaucgaugacgcugucacagaugugugguccuauaacgccaaacuccugguucugcucgagaaugacaagacccuggauaugcaugacgccaacgugagaaaccuucacgaucagguccgccgggugcugagaacgaaugcuauugacgaagggaacggaugcuuugagcuccugcauaaauguaaugauagcugcauggagacaauccgcaacggcaccuacaaucacauugaauaugaggaagagucuaaacuuaagcggcaggaaaucgaggggauuaagcugaaguccgacgacaacgucuacaaagcgcucagcaucuauucuugcaucgccuccagcauugugcugguuggccugauccucgcuuucauuaugugggccuguuccucuggaaauugcagauucaacaucuguauuuga

SEQ ID NO: 198770 - RNA, 1698 nt, Artificial Sequence
  derived and/or modified CDS sequence (opt5) from hemagglutinin__InfluenzaA__AEB71896
augaaggugaaacugcucguccugcuuugcaccuucacagccacguacgcugacaccaucuguauuggcuaucacgccaacaauagcacagauaccguugacacagugcuggagaagaacgugaccgucacacauuccgugaaucuccuggaaaacucucacaaugggaaacuuugccugcucaagggaaucgcgccccugcagcugggcaacuguagcguugcuggguggauucucggaaauccugagugcgaacugcuuaucuccaaagagucuuggagcuacauuguggaaaagccgaaccccgagaauggcaccuguuauccugggcauuuugccgauuacgaggaacugagagagcaacucuccucugucagcuccuucgaacgguuugagaucuuccccaaggagagcucuuggccuaaccacacggugaccggaguuuccgccagcugcucucauaauggcgaauccagcuuuuaucgcaaccugcuuuggcugacaggcaaaaaugggcucuaccccaaccugucuaaguccuaugcuaauaacaaagagaaggaagugcugguccucuggggagugcaccacccuccgaacaucguggaccagaaaacccuguacagaacagagaaugccuacgucagcguuguguccucucauuauagccggaaguucacccccgaaauugcuaagcgcccuaaagugagagaucaggagggccggaucaacuacuauuggacgcuucuggagcccggggacacaauuaucuuugaagccaauggaaaccucauugcgccucgcuacgccuucgcucuguccagaggcuuugggagcggaaucauuaauucuaacgcccccaugggcaagugugaugcuaaaugccagaccccgcaaggcgccaucaauuccagccuuccuuuccagaacguccaccccgugacaaucggggaguguccuaaguauguucggucugcgaaacugcgcauggugaccggacucagaaauauucccagcauccagucccggggccuguuuggggccauugcuggauucaucgaaggcggguggaccggaauggucgacggcugguacggcuaucaucaccagaacgagcaagggucuggauacgccgcugaucaaaagagcacacagaaugccauuaacggcaucacgaauaaagugaacuccguuaucgaaaagaugaauacccaguuuacagccguggggaaggaguucaacaaacuggagcgcagaauggaaaaccucaauaagaaagucgacgauggauucauugacaucuggaccuacaacgcugagcugcuugugcugcucgaaaaugagcggacacuggauuuucacgacagcaacgucaagaaucuuuaugaaaaagugaagucucagcugaagaacaaugcgaaagagauuggcaacgggugcuucgaguuuuaccauaaguguaaugacgaaugcauggaguccguuaaaaacggcaccuaugauuaccccaaguauagcgaagagucuaaacucaauaaggagaagaucgacggagugaaacuggaauccaugggcgucuaccagauucuggccaucuauagcacgguggcuuccucucucguucugcuugugagccugggggccaucuccuucuggaugugcucuaacggaagccuccagugucgcauuugcaucuga

SEQ ID NO: 198771 - RNA, 1701 nt, Artificial Sequence; identical to SEQ ID NO: 194983
  derived and/or modified CDS sequence (opt5) from hemagglutinin__InfluenzaA__AEB71916

SEQ ID NO: 198772 - RNA, 1701 nt, Artificial Sequence; identical to SEQ ID NO: 194506
  derived and/or modified CDS sequence (opt5) from hemagglutinin__InfluenzaA__AEB71925

SEQ ID NO: 198773 - RNA, 1701 nt, Artificial Sequence; identical to SEQ ID NO: 194506
  derived and/or modified CDS sequence (opt5) from hemagglutinin__InfluenzaA__AEB71936

SEQ ID NO: 198774 - RNA, 1701 nt, Artificial Sequence; identical to SEQ ID NO: 194506
  derived and/or modified CDS sequence (opt5) from hemagglutinin__InfluenzaA__AEB71947

SEQ ID NO: 198775 - RNA, 1698 nt, Artificial Sequence; identical to SEQ ID NO: 198044
  derived and/or modified CDS sequence (opt5) from hemagglutinin__InfluenzaA__AEB71958

SEQ ID NO: 198776 - RNA, 1701 nt, Artificial Sequence; identical to SEQ ID NO: 197491
  derived and/or modified CDS sequence (opt5) from hemagglutinin__InfluenzaA__AEB71969

SEQ ID NO: 198777 - RNA, 1701 nt, Artificial Sequence
  derived and/or modified CDS sequence (opt5) from hemagglutinin__InfluenzaA__AEB71980
augaagaccaucauugcccugagcugcauccucugucugguguucgcucagaaacuucccggcaacgacaauuccacagccacgcugugccucgggcaccaugcggucccuaacggaaccauuguuaagacaaucaccaaugaucaaauugaggugacaaacgcuaccgaacuggugcagucuagcuccacaggcgagaucugugacucuccgcaccagauccuugauggggaaaauugcacccugauugacgcccuccugggagauccccagugugacggcuuucaaaacaaaaagugggaucuguucgucgagagaagcaaagccuacuccaauugcuauccuuacgacgugcccgauuaugcuucucuccggagccugguugccuccagcgggacgcuugaauuuaacaaugagucuuucaacuggaccggagugacacagaauggcaccuccagcgcuuguauccgcagaucuaacaauuccuuuuucagccggcugaacuggcucacacaucugaaguuuaaguacccugcccuuaaugucaccaugcccaacaacgagcaguucgacaaacuguauauuuggggcgugcaccauccugggacggauaaugaccagaucuuucucuacgcgcaagccucuggacgcauuacaguuuccaccaagagaagccagcagacagugaucccgaacauuggcucccggccccgcgucagaaauaucccuucucggaucagcauuuauuggaccaucgugaaacccggggauauucugcugaucaacuccaccggaaaucucauugcuccucgcggcuacuucaagaucagaagcgggaaaucuuccaucaugcggagcgacgcccccauuggaaagugcaacucugaauguaucacaccgaauggcagcauuccuaacgacaagcccuuucagaaugugaaccgcaucacguacggcgcuugcccuagauaugucaaacaaaauacccugaaacuugccacagggaugcggaacguucccgagaagcagacccgcggaauuuucggcgcgaucgccggguuuaucgaaaauggaugggagggcaugguggaugggugguacggauucagacaccagaacuccgagggccggggccaagcugccgaccugaagucuacacaggcugccauugaucagaucaaugggaaacucaacagacugauuggaaagaccaacgaaaaauuccaccagaucgagaaggaauuuagcgagguggaaggccgcauucaagaccuugagaaguaugucgaggauacgaaaaucgaccugugguccuacaaugccgaacuccugguggcucuggagaaccagcauacaauugaucucaccgacagcgaaaugaauaagcuguucgagaaaaccaagaaacagcuucgggaaaacgcggaggauauggggaauggauguuuuaagaucuaucacaagugcgacaacgccugcaucggcucuauuagaaaugggacauacgaucaugacguuuaucgcgacgaggcucugaacaaucgguuccagaucaaaggcguggaacucaaguccggauacaaagauuggauucuguggaucagcuuugccauuucuuguuuccuucugugcgucgcccuccugggcuuuaucaugugggcuugucaaaaggggaacaucagaugcaauauuuguaucuga

SEQ ID NO: 198778 - RNA, 1698 nt, Artificial Sequence; identical to SEQ ID NO: 195688
  derived and/or modified CDS sequence (opt5) from hemagglutinin__InfluenzaA__AEB71992

SEQ ID NO: 198779 - RNA, 1698 nt, Artificial Sequence; identical to SEQ ID NO: 195688
  derived and/or modified CDS sequence (opt5) from hemagglutinin__InfluenzaA__AEC13313

SEQ ID NO: 198780 - RNA, 1701 nt, Artificial Sequence
  derived and/or modified CDS sequence (opt5) from hemagglutinin__InfluenzaA__AEC46553
augaaggccauccuggugguccuccuguacaccuucgcuacagccaacgcggacacgcuuugcauuggcuaucacgcuaauaacagcaccgauacaguugacaccgugcuggagaaaaaugugacagucacccauuccgugaaccuccuggaagauaagcacaaugggaaacuuuguaagcugagaggaguugcuccccuccaucugggcaaaugcaacaucgccggguggauucugggaaauccugagugugaaucucucagcacagccuccucuuggagcuacaucguggagaccuccucuagcgacaacggcacgugcuauccgggggauuuuauugacuacgaggaacugcgggagcagcuuuccagcgucucuuccuucgaacgcuuugagaucuuccccaagaccagcucuuggccuaaucacgaucccaacaagggagugacagccgcuuguccucaugccggcgcgaaauccuuuuauaagaaucugaucuggcucguuaaaaagggcaacagcuaccccaaacugucuaccuccuauauuaaugacaaggggaaggaagugcuuguccuguggggaauccaccacccuagcacauccgccgaucaacagucucucuaccagaacgcugacgccuacgcuuucgugggcaccagcagauauuccaaaaaguuuaaaccggagauugccauccggcccaaggugcgcgaucaggaggggagaaugaauuacuauuggacgcuggucgaaccuggagacaaaauuacauucgaggcgaccggcaaccugguugugccccgguacgccuuugcuauggaacgcaacgccgggagcggaaucauuaucucugauacauccgugcaugacugcaauaccaccugucaaacaccuaagggcgcuaucaacacgagccuccccuuccagaauguccacccgauuaccaucggcaaaugcccuaaguaugugaagucuacaaaacugagacuugccaccgggcugcggaacguucccagcauucagucccgcggacucuuuggcgccaucgcuggguucauugagggaggcuggacagggaugguggacggaugguacggcuaucaucaccagaaugaacaaggcucuggguacgcggccgaucuuaagagcacccagaacgcuuuugacaaaaucacgaauaaggucaacuccgugaucgagaaaaugaauacacaguucaccgccguuggaaaggaguucaaccaccuugaaaagagaauugagaaucugaacaaaaagguggaugacggcuuucucgauaucuggaccuacaaugccgaacugcugguccuccuggagaacgaacggacacuugacuaucaugauagcaaugugaaaaaccuguacgagaagguccgcucucagcucaaaaacaaugcuaaggagauugggaacggauguuucgaauuuuaucacaagugcgacaauaccuguauggaguccgugaaaaacggcacauacgauuauccuaaguacagcgaagaggccaaacugaauagagaagagaucgacgggguuaagcuggagucuacgcggauuuaucaaauccuggcgaucuacuccaccguggcuagcucccucguccuggugguuucucugggcgccauuagcuucuggaugugcuccaacggaucucuccagugccgcaucuguauuuga

SEQ ID NO: 198781 - RNA, 1701 nt, Artificial Sequence
  derived and/or modified CDS sequence (opt5) from hemagglutinin__InfluenzaA__AEC46555
augaaggccauccuggugguccuccuguacaccuucgcuacagccaacgcggacacgcuuugcauuggcuaucacgcuaauaacagcaccgauacaguugacaccgugcuggagaaaaaugugacagucacccauuccgugaaccuccuggaagauaagcacaaugggaaacuuuguaagcugagaggaguugcuccccuccaucugggcaaaugcaacaucgccggguggauucugggaaauccugagugugaaucucucagcacagccuccucuuggagcuacaucguggagaccuccucuagcgacaacggcacgugcuauccgggggauuuuauugacuacgaagaacugcgggagcagcuuuccagcgucucuuccuucgaacgcuuugagaucuuccccaagaccagcucuuggccuaaucacgaucccaacaagggagugacagccgcuuguccucaugccggcgcgaaauccuuuuauaagaaucugaucuggcucguuaaaaagggcaacagcuaccccaaacugucuaccuccuauauuaaugacaaggggaagaaagugcuuguccuguggggaauccaccacccuagcacauccgccgaucaacagucucucuaccagaacgcugacgccuacgcuuucgugggcaccagcagauauuccaagaaauuuaagccggaaauugccauccggcccaaagugcgcgaucaggaggggagaaugaauuacuauuggacgcuggucgagccuggagacaagauuacauucgaagcgaccggcaaccugguugugccccgguacgccuuugcuauggagcgcaacgaagggagcggaaucauuaucucugauacauccgugcaugacugcaauaccaccugucaaacaccuaaaggcgccaucaacacgagccuccccuuccagaauguccacccgauuaccaucggcaagugcccuaaguaugugaaaucuacaaagcugagacuugcuaccgggcugcggaacguucccagcauucagucccgcggacucuuuggcgccaucgccggguucauugagggaggcuggacagggaugguggacggaugguacggcuaucaucaccagaaugaacaaggcucuggguacgcugcggaucugaaaagcacccagaacgccuuugacaagaucacgaauaaagucaacuccgugaucgagaagaugaauacacaguucaccgcuguuggaaaggaguucaaccaccuugagaaaagaauugagaaucugaacaagaaaguggaugacggcuuucucgauaucuggaccuacaaugccgaacugcugguccuccuggagaacgaacggacacuugacuaucaugauagcaaugugaagaaccuguacgagaaaguccgcucucagcucaagaacaaugccaaggagauugggaacggauguuucgaauuuuaucacaaaugcgacaauaccuguauggaguccgugaagaacggcacauacgauuauccuaaauacagcgaagaggcuaagcugaauagagaagagaucgacgggguuaaacuugagucuacgcggauuuaucaaauccuggccaucuacuccaccguggcgagcucccucguccuggugguuucucugggcgcuauuagcuucuggaugugcuccaacggaucucuccagugccgcaucuguauuuga

SEQ ID NO: 198782 - RNA, 1701 nt, Artificial Sequence; identical to SEQ ID NO: 198780
  derived and/or modified CDS sequence (opt5) from hemagglutinin__InfluenzaA__AEC46557

SEQ ID NO: 198783 - RNA, 1701 nt, Artificial Sequence; identical to SEQ ID NO: 194728
  derived and/or modified CDS sequence (opt5) from hemagglutinin__InfluenzaA__AEC53259

SEQ ID NO: 198784 - RNA, 1701 nt, Artificial Sequence
  derived and/or modified CDS sequence (opt5) from hemagglutinin__InfluenzaA__AEC53269
augaaggccauccuggugguccuccuguacaccuucgcuacagccaacgcggacacgcuuugcauuggcuaucacgcuaauaacagcaccgauacaguugacaccgugcuggagaaaaaugugacagucacccauuccgugaaccuccuggaagauaagcacaaugggaaacuuuguaagcugagaggaguugcuccccuccaucugggcaaaugcaacaucgccggguggauucugggaaauccugagugugaaucucucagcacagccuccucuuggagcuacaucguggagaccuccucuagcgacaacggcacgugcuauccgggggauuuuauugacuacgaagaacugcgggagcuucuguccagcgucucuuccuucgaacgcuuugagaucuuccccaagaccagcucuuggccuaaucacgauuccaacaagggagugacagccgcuuguccccaugccggcgcgaaaucuuuuuauaagaaucucaucuggcugguuaaaaagggcaacagcuacccuaaacuuuccaagagcuauauuaaugacaaggggaaagaagugcugguccucuggggaauccaccaccccuccaccucugccgaucagcaaagccuguaccagaacgcugacgccuacguguucgugggcuccagcagauauucuaagaaauuuaagccugagauugcuauccggccgaaaguccgcgaucaggaggggagaaugaauuacuauuggacacugguugaacccggagacaagauuaccuucgaggccacgggcaaccucguggugccucgguacgcguuugccauggaacgcaacgcuggguccggaaucauuaucagcgauacacccguccaugacugcaauaccacaugucagaccccuaaaggcgccaucaacaccucucugcccuuccaaaauauucacccgaucacaauuggcaagugcccuaaguaugugaaaagcacgaaacuuagacuggcuaccgggcuccggaacauccccuccauucagucucgcggacuguuuggcgccaucgccggguucaucgagggaggcuggacagggaugguugacggaugguacggcuaucaucaccagaaugaacagggcagcggguacgcugcggaucuuaaguccacccaaaacgccauugacgagaucacaaauaaggugaacagcgucauugagaaaaugaauacccaguuuacggcugugggaaaggaguucaaccaccuggagaagagaaucgaaaaucucaacaaaaagguugaugacggcuuccuggauauuuggacauacaaugccgagcugcucgugcugcuugaaaacgagcggacccuggacuaucaugauucuaaugucaaaaaccucuacgagaaggugcgcucccagcugaaaaacaaugccaaggaaaucgggaacggauguuuugaguucuaucacaagugcgacaauaccuguauggaaagcgucaaaaacggcacauacgauuauccuaaguacucugaggaagcuaaacuuaauagagaggagaucgacggggugaagcuggaauccacccggauuuaucagauccucgccauuuacagcacaguugcguccucucuggugcuggucgugagccucggcgcuaucuccuuuuggaugugcucuaacggaagccugcaaugccgcauuuguaucuga

SEQ ID NO: 198785 - RNA, 1701 nt, Artificial Sequence; identical to SEQ ID NO: 195471
  derived and/or modified CDS sequence (opt5) from hemagglutinin__InfluenzaA__AEC53279

SEQ ID NO: 198786 - RNA, 1701 nt, Artificial Sequence; identical to SEQ ID NO: 194728
  derived and/or modified CDS sequence (opt5) from hemagglutinin__InfluenzaA__AEC53289

SEQ ID NO: 198787 - RNA, 1701 nt, Artificial Sequence; identical to SEQ ID NO: 194728
  derived and/or modified CDS sequence (opt5) from hemagglutinin__InfluenzaA__AEC53299

SEQ ID NO: 198788 - RNA, 1701 nt, Artificial Sequence; identical to SEQ ID NO: 194921
  derived and/or modified CDS sequence (opt5) from hemagglutinin__InfluenzaA__AEC53327

SEQ ID NO: 198789 - RNA, 1701 nt, Artificial Sequence
  derived and/or modified CDS sequence (opt5) from hemagglutinin__InfluenzaA__AEC53347
augaaggccauccuggugguccuccuguacaccuucgcuacagccaacgcggacacgcuuugcauuggcuaucacgcuaauaacagcaccgauacaguugacaccgugcuggagaagaaugugacagucacccauuccgugaaccuccuggaagauaagcacaaugggaaacuuuguaagcugagaggaguugcuccccuccaucugggcaaaugcaacaucgccggguggauucugggaaauccugagugugaaucucucagcacagccuccucuuggagcuacaucguggagaccuccucuagcgacaacggcacgugcuauccgggggauuuuauugacuacgaagaacugcgggagcagcuuuccagcgucucuuccuucgaacgcuuugagaucuuccccaagaccagcucuuggccuaaucacgauuccaacaagggagugacagccgcuuguccccaugccggcgcgaaaucuuuuuauaagaaucugaucuggcucguuaaaaagggcaacagcuacccuaaacuguccaagagcuauauuaaugacaaggggaaagaagugcuuguccuguggggaauccaccaccccuccaccucugccgaucaacagagccucuaccagaacgcugacgccuacguguucgugggcuccagcagauauucuaagaaauuuaagccugagauugcuauccggccgaaaguccgcgaucaggaggggagaaugaauuacuauuggacacugauugaacccggagacaagaucaccuucgaggccacgggcaaccugguugugccucgguacgcguuugccauggaacgcaacgcuggguccggaauuaucaucagcgauacacccgugcaugacugcaauaccacaugucaaaccccuaaaggcgccauuaacaccucucuccccuuccagaauauccacccgauuacaaucggcaagugcccuaaguaugucaaaagcacgaagcugagacuugcuaccgggcugcggaacgugcccuccauucagucucgcggacucuuuggcgccaucgccggguucaucgagggaggcuggacagggaugguugacggaugguacggcuaucaucaccagaaugaacaaggcagcggguacgcugcggaucugaaauccacccagaacgccauugacgagaucacaaauaaggugaacagcgucauugagaaaaugaauacccaguuuacggcugugggaaaggaguucaaccaccuugagaagagaaucgaaaaucugaacaaaaagguugaugacggcuuccucgauauuuggacauacaaugccgagcugcuggugcuccuggaaaacgagcggacccuugacuaucaugauucuaaugucaaaaaccuguacgagaaggugcgcucccagcucaaaaacaaugccaaggaaaucgggaacggauguuuugaguucuaucacaagugcgacaauaccuguauggaaagcgucaaaaacggcacauacgauuauccuaaguacucugaggaagcuaaacugaauagagaggagaucgacggggugaaacuugaauccacccggauuuaucaaauccuggccauuuacagcacaguugcguccucucucgugcuggucgugagccugggcgcuaucuccuuuuggaugugcucuaacggaagccuccagugccgcauuuguaucuga

SEQ ID NO: 198790 - RNA, 1701 nt, Artificial Sequence
  derived and/or modified CDS sequence (opt5) from hemagglutinin__InfluenzaA__AEC53404
augaaggccauccuggugguccuccuguacaccuucgcuacagccaacgcggacacgcuuugcauuggcuaucacgcuaauaacagcaccgauacaguugacaccgugcuggagaaaaaugugacagucacccauuccgugaacauccucgaagauaagcacaaugggaaacuguguaaacuuagaggaguugcuccccugcaucucggcaagugcaacauugccggguggauccugggaaauccugagugugaaucucugagcacagccuccucuuggagcuacauuguggagaccuccucuagcgacaacggcacgugcuauccgggggauuuuaucgacuacgaagaacuccgggagcagcuguccagcgucucuuccuucgaacgcuuugagaucuuccccaagaccagcucuuggccuaaucacgauuccaacaagggaauuacagccgcuuguccccaugccggcgcgaaaucuuuuuauaagaaucuuaucuggcuggugaaaaagggcaacagcuacccuaaacucuccaagagcuauauuaaugacaaggggaaagaaguucuggugcuuuggggaauccaccaccccuccaccucugccgaucaacagagccuguaccagaacgcugacgccuacgucuucgugggcuccagcagauauucuaagaaauuuaagccugagauugcuauccggccgaaagugcgcgaucaggaggggagaaugaauuacuauuggacacucgucgaacccggagacaagauuaccuucgaggccacgggcaaccugguugugccucgguacgcguuugccauggaacgcaacgcuggguccggaaucaucauuagcgauacacccgugcaugacugcaauaccacaugucaaaccccuaaaggcgccaucaacaccucucugcccuuccagaauauucacccgaucacaauuggcaagugcccuaaguaugucaaaagcacgaagcucagacuggcuaccgggcuucggaacgugcccuccauccagucucgcggacuguuuggcgccaucgccggguucauugagggaggcuggacagggaugguugacggaugguacggcuaucaucaccagaaugaacaaggcagcggguacgcugcggaucucaaauccacccagaacgccaucgacgagauuacaaauaaggugaacagcgucaucgagaaaaugaauacccaguuuacggcugugggaaaggaguucaaccaccuggagaagagaauugaaaaucuuaacaaaaagguugaugacggcuuccuggauaucuggacauacaaugccgagcuccuggugcugcucgaaaacgagcggacccuggacuaucaugauucuaaugucaaaaaccuuuacgagaaggugcgcucccagcugaaaaacaaugccaaggaaaucgggaacggauguuuugaguucuaucacaagugcgacaauaccuguauggaaagcgucaaaaacggcacauacgauuauccuaaguacucugaggaagcuaaacucaauagagaggagauugacggggugaagcuggaauccacccggaucuaucaaauucuugccaucuacagcacaguugcguccucucuggugcucgucgugagccugggcgcuauuuccuuuuggaugugcucuaacggaagccugcagugccgcaucuguauuuga

SEQ ID NO: 198791 - RNA, 1701 nt, Artificial Sequence; identical to SEQ ID NO: 194728
  derived and/or modified CDS sequence (opt5) from hemagglutinin__InfluenzaA__AEC53414

SEQ ID NO: 198792 - RNA, 1701 nt, Artificial Sequence
  derived and/or modified CDS sequence (opt5) from hemagglutinin__InfluenzaA__AEE27177
augaagaccauccuggugguccuccuguacacauucgccacggcuaacgccgacacccuuugcauuggcuaucacgcgaauaacagcacagauaccguugacacagugcuggagaaaaaugugaccgucacacauuccgugaacauccucgaagauaagcacaaugggaaacuguguaaacuuagaggaguugcuccccugcaucucggcaaaugcaacauugccggguggauccugggaaauccugagugugaaucucugagcaccgccuccucuuggagcuacauuguggagacguccucuagcgacaacgggaccugcuauccgggggauuuuaucgacuacgaagaacuccgggagcagcuguccagcgucucuuccuucgaacgcuuugagaucuuccccaagacaagcucuuggccuaaucacgauuccaacaagggagugaccgcugccuguccccaugcuggcgccaagagcuuuuauaagaaucuuauuuggcugguuaaaaagggcaacucuuacccuaaacucuccaagagcuauaucaaugacaagagaaaagaagugcugguccuuugggggauucaccaccccuccacaucugcggaucaacagagccuguaccagaacgccgacgcuuacguguucgugggauccagccgguauucuaagaaauuuaagccugagaucgccauucgcccgaaagucagagaucaggagggccggaugaauuacuauuggacccucguugaacccggggacaagaucacguucgaggcuacaggaaaccugguggugccucgcuacgccuuugcgauggaaagaaacgccggcuccgggauuaucaucagcgauacccccguccaugacugcaauacaaccugucaaaccccuaaaggagcuauuaacacaucucugcccuuccagaauauccacccgauuacgaucggcaagugcccuaaguaugugaaaagcaccaagcuccggcuggccacaggccuucgcaacguucccuccauucagucuagagggcuguuuggagcuaucgccggcuucaucgagggcggauggaccggcaugguggacgggugguacggauaucaucaccagaaugaacaaggcagcggcuacgccgcugaucucaaauccacacagaacgcgauugacgagaucaccaauaaggucaacagcgugauugagaaaaugaauacgcaguuuacagccguugggaaggaguucaaccaccuggagaagcggaucgaaaaucuuaacaaaaagguggaugacggauuccuggauauuuggaccuacaaugcugagcuccugguccugcucgaaaacgagcgcacccuggacuaucaugauucuaaugugaaaaaccuuuacgagaaggucagaucccagcugaaaaacaaugccaaggaaaucggcaacggguguuuugaguucuaucacaagugcgacaauacauguauggaaagcgugaaaaacggaaccuacgauuauccuaaguacucugaggaagccaaacucaaucgggaggagaucgacggcguuaagcuggaauccacacgcauuuaucaaauccuugcuauuuacagcacgguggccuccucucugguccucgugguuagccugggggcgaucuccuuuuggaugugcucuaacggcagccugcagugcagaauuuguaucuga

SEQ ID NO: 198793 - RNA, 1701 nt, Artificial Sequence; identical to SEQ ID NO: 196513
  derived and/or modified CDS sequence (opt5) from hemagglutinin__InfluenzaA__AEE27187

SEQ ID NO: 198794 - RNA, 1701 nt, Artificial Sequence
  derived and/or modified CDS sequence (opt5) from hemagglutinin__InfluenzaA__AEE27207
augaaggccauccuggugguccuccuguacaccuucgcuacagccaacgcggacacgcuuugcauuggcuaucacgcuaauaacagcaccgauacaguugacaccgugcuggagaaaaaugugacagucacccauuccgugaaccuccuggaagauaagcacaaugggaaacuuuguaagcugagaggaguugcuccccuccaucugggcaaaugcaacaucgccggguggauucugggaaauccugagugugaaucucucagcacagccuccucuuggagcuacaucguggagaccuccucuagcgacaacggcacgugcuauccgggggauuuuauugacuacgaagaacugcgggagcagcuuuccagcgucucuuccuucgaacgcuuugagaucuuccccaagaccagcucuuggccuaaucacgauuccaacaagggagugacagccgcuuguccccaugccggcgcgaaaucuuuuuauaagaaucugaucuggcucguuaaaaagggcaacagcuacccuaaacuguccaagagcuauauuaaugacaaggggaaagaagugcuuguccuguggggaauccaccaccccuccaccucugccgaucaacagagccucuaccagaacgcugacgccuacguguucgugggcacauccagauauagcaagaaauuuaagccugagauugcuauccggccgaaaguccgcgaucaggaggggagaaugaauuacuauuggacccugguugaacccggagacaagauuacguucgaggccacaggcaaccugguggugccucgguacgcguuugccauggaacgcaacgcugggucuggaaucauuaucuccgauacccccguccaugacugcaauacaaccugucaaaccccuaaaggcgccaucaacacaagccuccccuuccagaauauucacccgaucacgauuggcaagugcccuaaguaugugaaaucuaccaagcugagacuugcuacagggcugcggaacguucccagcauccagucccgcggacucuuuggcgccauugccggguucaucgagggaggcuggaccgggaugguggacggaugguacggcuaucaucaccagaaugaacaaggcucuggguacgcugcggaucugaaaagcacacagaacgccaucgacgagauuaccaauaaggucaacuccgugaucgagaaaaugaauacgcaguuuacagcuguuggaaaggaguucaaccaccuugagaagagaauugaaaaucugaacaaaaagguggaugacggcuuccucgauaucuggaccuacaaugccgagcugcugguccuccuggaaaacgagcggacccuugacuaucaugauagcaaagugaagaaucuguacgagaaaguccgcucucagcucaagaacaacgccaaggaaauugggaauggauguuuugaguucuaucacaaaugcgacaacacauguauggaauccgugaagaauggcaccuacgauuauccuaaauacagcgaggaagcuaagcugaacagagaggagaucgacgggguuaaacuugaaucuacacggaucuaucaaauucuggccaucuacuccacgguggcgagcucccucguccuggugguuucucugggcgcuauuagcuuuuggaugugcuccaauggaucucuccagugccgcaucuguauuuga

SEQ ID NO: 198795 - RNA, 1701 nt, Artificial Sequence
  derived and/or modified CDS sequence (opt5) from hemagglutinin__InfluenzaA__AEG64752
augaaggccauccuggugguccuccuguacaccuucgcuacagccaacgcggacacgcuuugcauuggcuaucacgcuaauaacagcaccgauacaguugacaccgugcuggagaaaaaugugacagucacccauuccgugaaccuccuggaagauaagcacaaugggaaacuuuguaagcugagaggaguugcuccccuccaucugggcaaaugcaacaucgccggguggauucugggaaauccugagugugaaucucucagcacagccuccucuuggagcuacaucguggagaccuccucuagcgacaacggcacgugcuauccgggggauuuuauugacuacgaagaacugcgggagcagcuuuccagcgucucuuccuucgaacgcuuugagaucuuccccaagaccagcucuuggccuaaucacgauuccaacaagggagugacagccgcuuguccccaugccggcgcgaaaucuuuuuauaagaaucugaucuggcucguuaaaaagggcaacagcuacccuaaacuguccaagagcuauauuaaugacaaggggaaagaagugcuuguccuguggggaauccaccaccccuccaccucugccgaucaacagagccucuaccagaacgcugacgccuacguguucgugggcuccagcagauauucuaagaaauuuaagccugagauugcuauccggccgaaaguccgcgaucaggaggggagaaugaauuacuauuggacacugguugaacccggagacaagauuaccuucgaggccacgggcaaccugguggugccucgguacgcguuugccauggaacgcaacgcuggguccggaaucauuaucagcgauacacccguccaugacugcaauaccacaugucaaaccccuaaaggcgccaucaacaccucucuccccuuccagaauauucacccgaucacaauuggcaagugcccuaaguaugugagaagcacgaaacugcggcuugcuaccgggcugcgcaacguucccuccauccagucuagaggacucuuuggcgccauugccggguucaucgagggaggcuggacagggaugguggacggaugguacggcuaucaucaccagaaugaacaaggcagcggguacgcugcggaucugaaguccacccagaacgccaucgacgagauuacaaauaaagucaacagcgugaucgagaagaugaauacccaguuuacggcuguuggaaaagaguucaaccaccuugagaagcggauugaaaaucugaacaagaaaguggaugacggcuuccucgauaucuggacauacaaugccgagcugcugguccuccuggaaaacgagcgcacccuugacuaucaugauucuaaugugaagaaccuguacgagaaagucagacggcagcucaagaacaaugccaaagaaauugggaacggauguuuugaguucuaucacaagugcgacaauaccuguauggaauccgugaagaacggcacauacgauuauccuaaauacagcgaggaagcuaagcugaaucgcgaggagaucgacgggguuaaacuugaaucuaccagaaucuaucaaauucuggccaucuacuccacaguggcgagcucccucguccuggugguuucucugggcgcuauuagcuuuuggaugugcuccaacggaucucuccagugccggaucuguauuuga

SEQ ID NO: 198796 - RNA, 1701 nt, Artificial Sequence
  derived and/or modified CDS sequence (opt5) from hemagglutinin__InfluenzaA__AEG64762
augaaggccagacugcucgugcugcuuugcgcucuggccgcgaccgacgcugauacaaucuguauuggcuaccacgccaacaauagcacggacaccgucgauacacuccuggagaaaaacguuaccgugacacauuccgugaaucuucuggaagacucucacaacgggaagcucugcaaacugaagggaaucgcuccccugcagcucggcaaauguaauauugccggguggcugcuuggaaacccugagugcgauagccugcucccggcccgguccuggucuuauaucgucgaaacccccaauagcgagaacggcgcuuguuacccuggggacuucauugauuaugaagaacugcgcgagcaacuuuccacagugucuagccuggaaagauuugagaucuuccccaaggaauccagcuggccuaaucauaacacccucaagggaguuacggugucuugcucccacggcggcaaaagcucuuuuuaccggaaucugcuguggcucaccaagacaggggacuccuaucccaaacugaacaauagcuacgucaacaauaagggaaaagaggugcuuguucuguggggcgugcaucacccuucuuccagcaacgagcagcagucccucuaucacaacgucaaugccuacgugucuguggucagcuccaacuacaaucgcagauucaccccggaaaucgcggcccggcccaagguucgcgaucagccugggagaaugaacuauuacuggacacugcuugagcccggagacaccauucuguuugaagcuacgggcaaucucaucgccccuugguaugcuuucgcccugagccggggguuuggaucuggcauuaucacauccaacgcgagcaugcaugaguguaauaccaagugccaaacaccccagggcgccauuaacucuagccugccguuccagaauauccacccugugaccauuggggaaugucccaaauacgugcgcuccaccaagcucagaauggucacaggacugcggaacaucccuucuauccagagccgcggccuuuuuggggcuauugccggauucaucgagggcggguggacgggaaugauugauggcugguauggcuaccaucaccaaaaugagcagggguccggauaugcugccgaccagaaaagcacccagaacgccaucaauggcauuacaaacaagguuaauucugugaucgagaaaaugaacacccaauuuacagcuguggggaaggaguucaacaaucuggagaaaagaauggaaaaccucaauaagaaggucgaugacggauuucuggacaucuggaccuacaacgcggaacuucuggugcuccuggagaaugagcggacgcuggauuuccacgaccucaacguuaaaaaucuguacgaaaaggugaaaucccagcuuaagaacaaugccaaagagauuggcaacgggugcuucgaauuuuaucauaagugugauaaugagugcauggaaagcguccgcgacggcacauacgauuaucccaaguacucugaggaguccaaacugaacagagaaaagaucgacggagugaaacucgagagcaugggcgucuaucagauucuggcuaucuacuccaccguggccucuagccugguucuucucgugucccugggggccauuucuuucuggaugugcagcaauggaucccugcaaugucggaucugcaucuga

SEQ ID NO: 198797 - RNA, 1701 nt, Artificial Sequence; identical to SEQ ID NO: 194741
  derived and/or modified CDS sequence (opt5) from hemagglutinin__InfluenzaA__AEG64784

SEQ ID NO: 198798 - RNA, 1701 nt, Artificial Sequence
  derived and/or modified CDS sequence (opt5) from hemagglutinin__InfluenzaA__AEG64834
augaagaccaucauugcccugagcuacauccucugccugguguucgcucagaaacuucccggcaacgacaauuccacagccacgcugugucucgggcaccaugcggucccuaacggaaccauuguuaagacaaucaccaaugaucaaauugaggugacaaacgcuaccgaacuggugcaaaauucuagcgccggcgagaucugcgacuccccgcaccagauccuugauggggaaaacuguacacugauugacgcccuccugggagauccccagugcgacggcuuucagaauaaaaagugggaucuguucgucgagagaucucgggcuuauagcaacuguuacccuuaugacgugcccgauuacgccucccuccgcucucugguugcuagcuccgggacccuugaauuuaauaacgagagcuucaauuggacgggagugacccagaacggcacaucuuccgccugcaucagacggagcaauaacuccuuuuucucucgccugaauuggcucacccaucugaacuuuaaauauccugcgcuuaacgucacaaugcccaauaacgagcaguucgacaagcuguacauuuggggcgugcaccauccugggaccgauaaggaccagaucuuucucuaugcccaagcuagcggaagaauuacgguuucuacaaaacggucccagcaggccgugaucccgaauauuggcagccgccccagaguccggaacaucccuucccgcaucucuauuuacuggaccaucgugaagcccggggauauucugcugaucaauagcacaggaaaccucauugcuccuagaggcuacuucaaaauccgguccgggaaaagcucuaucaugcgcuccgacgcccccauuggaaaauguaauagcgaaugcaucaccccgaacggcucuauuccuaaugacaagcccuuucagaacgugaauagaaucaccuauggcgcguguccucgguacgucaagcaaagcacacugaaacuugccacggggaugcgcaacguucccgagaagcagaccagaggaauuuucggcgcuaucgccggguuuaucgaaaauggaugggagggcaugguggaugggugguauggauuccggcaccagaacuccgagggcagaggccaagcugccgaccugaaaucuacacaggccgcuauugaucagaucaaugggaagcucaaccgccugauuggaaaaaccaacgaaaaguuccaccagaucgagaaagaauuuagcgagguggaaggccggauucaagaccuugagaaguacgucgaggauacaaagaucgaccugugguccuauaaugcggaacuccugguggcccuggagaaccagcauaccauugaucucacggacagcgaaaugaauaaacuguucgagaagacaaagaagcagcuuagagaaaacgcugaggauauggggaauggaugcuuuaaaaucuaccacaagugugacaacgccugcaucggcucuauucgcaaugggaccuaugaucaugacguuuaccgggacgaggcccugaacaauagauuccagaucaagggcguggaacucaaauccggauacaaggauuggauucuguggaucagcuuugcuauuucuugcuuccuucugugugucgcccuccugggcuuuaucaugugggcgugccaaaaagggaacauccgcuguaauauuugcaucuga

SEQ ID NO: 198799 - RNA, 1701 nt, Artificial Sequence
  derived and/or modified CDS sequence (opt5) from hemagglutinin__InfluenzaA__AEG64845
augaagaccaucauugcccugagcuacauccucugccugguguucgcucagaaacuucccggcaacgacaauuccacagccacgcugugucucgggcaccaugcggucccuaacggaaccauuguuaagacaaucaccaaugaucaaauugaggugacaaacgcuaccgaacuggugcaaaauucuagcacaggcgagaucugcgacuccccgcaccagauccuugauggggaaaacuguacccugauugacgcccuccugggagauccccagugcgacggcuuucagaauaaaaagugggaucuguucgucgagagaucuaaagccuauagcaacuguuacccuuaugacgugcccgauuacgcuucccuccggucucugguugccagcuccgggacgcuugaauuuaauaacgagagcuucaauuggaccggagugacacagaacggcaccucuuccgcuugcauccgcagaagcaauaacuccuuuuucucucggcugaauuggcucacacaucugaacuuuaaguauccugcccuuaacgucaccaugcccaauaacgagcaguucgacaagcuguacauuuggggcgugcaccauccugggacggauaaagaccagaucuuucucuaugcgcaagccagcggacgcauuacaguuucuaccaagagaucccagcagacagugaucccgaauauuggcagccggccccgcgucagaaacaucccuucccggaucucuauuuacuggaccaucgugaaacccggggauauucugcugaucaauagcaccggaaaccucauugcuccucgcggcuacuucaagaucagauccgggaaaagcucuaucaugcgguccgacgcccccauuggaaaguguaauagcgaaugcaucacaccgaacggcucuauuccuaaugacaagcccuuucagaacgugaaucgcaucacguauggcgcuuguccuagauacgucaaacaaaacacccugaaacuugccacagggaugcggaauguucccgagaagcagacccgcggaauuuucggcgcgaucgccggguuuaucgaaaacggaugggagggcaugguggaugggugguauggauucagacaccagaauagcgagggccggggccaagcugccgaccugaaguccacacaggcugccauugaucagaucaacgggaaacucaacagacugauuggaaagaccaaugaaaaauuccaccagaucgagaaggaauuuucugagguggaaggccgcauucaagaccuugagaaguacgucgaggauacgaaaaucgaccuguggagcuauaacgccgaacuccugguggcucuggagaaucagcauacaauugaucucaccgacuccgaaaugaacaagcuguucgagaaaaccaagaaacagcuucgggaaaaugcggaggauauggggaacggaugcuuuaagaucuaccacaagugugacaaugccugcaucggcagcauuagaaacgggacauaugaucaugacguuuaccgcgacgaggcucugaauaaccgguuccagaucaaaggcguggaacucaagucuggauacaaagauuggauucuguggaucuccuuugccauuagcugcuuccuucugugugucgcccuccugggcuuuaucaugugggcuugccaaaaggggaauaucagauguaacauuugcaucuga

SEQ ID NO: 198800 - RNA, 1701 nt, Artificial Sequence
  derived and/or modified CDS sequence (opt5) from hemagglutinin__InfluenzaA__AEG64856
augaagaccaucauugcccugagcuacauccucugccugguguucgcucagaaacuucccggcaacgacaauuccacagccacgcugugucucgggcaccaugcggucccuaacggaacccugguuaagacaauuaccaaugaucaaaucgaggugacaaacgcuaccgaacuugugcagucuagcuccacaggcagaauuugcgacucuccgcaccagauccuggauggggagaauuguacccucaucgacgcccugcugggagauccccauugcgacggcuuucagaacaaagaaugggaucucuucgucgagcggagcaaggccuauuccaauuguuacccuuaugacgugcccgauuacgcuucucugcgcagccuuguugccuccagcgggacgcuggaauuuaacaaugagucuuucaacuggaccggaguggcucaaaauggcacauccagcgccugcaaaagacggucuaacaaguccuuuuucagccgccucaauuggcugcaccagcuuaaguauaaauacccugcgcugaacgucaccaugcccaauaacgagaaguuugacaaacucuauauuuggggcgugcaucacccuucuacagauuccgaccagaucagccuguacgcccaggcuuccgggagaguuaccgugucuacgaagcggagccaacagacagucauuccgaacaucggaucccgccccugggugagaggcgugagcucucggauuuccaucuacuggaccauugucaaaccuggggauauccugcucaucaauagcacaggaaaccugauugcuccccgcggcuauuucaagaucagaucugggaagucuuccguuaugcggucugacgccagcauuggaaaauguaauuccgaaugcaucaccccuaacggcagcauucccaaugacaagccguuucagaacgugaaucgcaucaccuacggcgccuguccuagauaugugaaacagaacacacuuaagcuggcgacggggaugcggaauguccccgagaaacaaacccgcggaaucuucggcgccauugcuggguuuaucgaaaacggaugggagggcaugguggaugggugguacggauucagacaccagaauagcgagggcacaggccaggccgcugaccucaaguccacccaagccgccauuaaccagaucaaugggaaacugaaccggcuuauugaaaagacaaaugagaaguuucaucagaucgaaaaagaguucagcgaaguugagggaagaauccaggaucuggagaaguauguggaagacaccaaaauugaucucuggucuuacaacgcugagcugcuggucgcgcucgaaaaccaacacacgaucgaccugacagauuccgagaugaauaaacuuuucgaacgcaccaagaagcagcugcgggagaacgccgaggacaugggcaaugggugcuuuaagauuuaucauaaaugugauaacgcuugcaucgaaagcauuagaaauggaaccuacgaccacgauguguaccgcgacgaggcccucaacaaucgguuccagaucaagggcguugaacugaaauccggguauaaggacuggauucuuuggaucucuuuugccaucagcugcuuccugcucugugugguccugcugggcuuuauuaugugggcuugccagaaaggaaacaucagauguaauauuugcaucuga

SEQ ID NO: 198801 - RNA, 1701 nt, Artificial Sequence; identical to SEQ ID NO: 192144
  derived and/or modified CDS sequence (opt5) from hemagglutinin__InfluenzaA__AEG64867

SEQ ID NO: 198802 - RNA, 1701 nt, Artificial Sequence
  derived and/or modified CDS sequence (opt5) from hemagglutinin__InfluenzaA__AEG64878
augaagaccaucauugcccugagcuacauccucugccugguguucgcucagaaacuucccgucaacgacaauuccacagccacgcugugucucggccaccaugcgguuccuaacgggacccuggugaagacaauuaccaaugaucacaucgaggugacaaacgcuaccgaacuuguccaaucuagcuccacaggaagaauuugcgacucuccgcaucagauccuggauggcgagaauuguacccucaucgacgcccugcugggggauccccacugcgacggauuucagaacaaagaaugggaucucuucguggagcggagcacggccuauuccaauuguuacccuuaugacguucccgauuacgcuucucugcgcagccuuguggccuccagcggcacccuggaauuuaacaaugagucuuucaacuggacaggggucgcucagaauggaaccuccagcgccugcaagagacggucuauuaaauccuuuuucagccgccucaacuggcugcaucaacuuaaguauaaguacccugcgcugaaugugacaaugcccaacaaugagaaauuugacaagcucuauaucuggggcguucaccacccuucuaccgauuccgaccagauuagccuguacgcccaggcuuccggcagagugacggucucuacaaaacggagccagcaaaccgugaucccgaacauugggucccgccccugggugagaggagucagcucucggaucuccauuuacuggacaaucguuaagccuggcgauauccugcucauuaacagcaccgggaaucugaucgcccccagaggauauuucaaaauuagaucuggcaagagcuccaucaugcggucuaacgcuccuauugggaaguguaauagcgaaugcaucacccccaacggauccaucccgaaugacaaaccuuuucagaacgugaaucgcauuacauacggcgccugucccagauaugugaagcagaacacgcuuaaacuggcgaccggcaugcggaaugucccugagaagcagacacgcgggaucuucggagccauugcuggcuuuaucgaaaacgggugggagggaaugguggacggcugguacggguucagacaucaaaauagcgagggaauuggccaggccgcugaucucaaaucuacccaggccgccaucaaccaaaucaauggcaagcugaaccggcuuauugagaaaacaaaugaaaaguuucaccagaucgaaaaggaguucuccgaaguugaggggcgcauucaggaccuggagaaauauguggaagauaccaagaucgaccucuggagcuacaacgcugagcugcuggucgcgcucgaaaaccagcauacgauugaucugacagacucugagaugaauaaacuuuucgaacgcacccggaagcaacugagagagaacgccgaggauaugggaaauggcugcuuuaaaaucuaucacaagugugacaacgcuugcauuggguccauccgcaauggaaccuacgaucacgacguguaccgggaugaagcccucaacaauagauuccagaucaagggcguugagcugaaaagcggguauaaggacuggauucuuuggaucuccuuugccauuucuugcuuccugcucugugugguccugcugggcuuuaucaugugggcuugccagaaaggaaacauucgcuguaauaucugcaucuga

SEQ ID NO: 198803 - RNA, 1701 nt, Artificial Sequence
  derived and/or modified CDS sequence (opt5) from hemagglutinin__InfluenzaA__AEG64889
augaagaccaucauugcccugagcuacauccucugccugguguucgcucagaaacuucccgucaacgacaauuccacagccacgcugugucucggccaccaugcgguuccuaacgggacccuggugaagacaauuaccaaugaucacaucgaggugacaaacgcuaccgaacuuguccaaucuagcuccacaggaagaauuugcgacucuccgcaucagauccuggauggcgagaauuguacccucaucgacgcccugcugggggauccccacugcgacggauuucagaacaaagaaugggaucucuucguggagcggagcacggccuauuccaauuguuacccuuaugacguucccgauuacgcuucucugcgcagccuuuuugccuccagcggcacccuggaguucaacaaugaaucuuuuaacuggacagggguggcucagaauggaaccuccagcgccugcaagagacggucuauuaaauccuucuuuagccgccucaacuggcugcaucaacuuaaguauaaguacccugcgcugaaugucacaaugcccaacaaugagaaauucgacaagcucuauaucuggggcgugcaccacccuucuaccgauuccgaccagauuagccuguacgcccaggcuuccggcagaguuacggugucuacaaaacggagccagcaaaccgucaucccgaacauugggucccgccccugggugagaggagugagcucucggaucuccauuuacuggacaaucgucaagccuggcgauauccugcucauuaacagcaccgggaaucugaucgcuccccgcggauauuuuaaaauuagaucuggcaagagcuccaucaugcggucuaacgccccuauugggaaguguaauagcgaaugcaucacccccaacggauccaucccgaaugacaaaccuuuccagaacguuaaucgcauuacauacggcgccugucccagauaugugaagcagaacacgcuuaaacuggcgaccggcaugcggaaugugccugagaagcagacacgcgggaucuuuggagccauugcuggcuucaucgaaaacgggugggagggaauggucgacggcugguacggguuuagacaucaaaauagcgagggaaccggccaggccgcugaucucaaaucuacacaggccgccauuaaccaaaucaauggcaagcugaaccggcuuaucgaaaagaccaaugagaaguuccaccagauugaaaaggaguucuccgaaguggaggggagaauccaggaccuggagaaauauguugaagauacgaagauugaccucuggagcuacaacgcugagcugcugguggcgcucgaaaaccagcauacaaucgaucugaccgacucugagaugaauaaacuuuuugaaaagacccgcaaacaacugcgggagaacgccgaggauaugggaaauggcugcuucaagauuuaucacaagugugacaacgcuugcaucggguccauuagaaauggaacauacgaucacgacgucuaccgcgaugaagcccucaacaaucgguuucagaucaaaggcguggagcugaaaagcggguauaaagacuggauccuuuggauuuccuucgccaucucuugcuuucugcucuguguugugcugcugggcuucauuaugugggcuugccagaagggaaacaucagauguaauauuugcaucuga

SEQ ID NO: 198804 - RNA, 1701 nt, Artificial Sequence; identical to SEQ ID NO: 192104
  derived and/or modified CDS sequence (opt5) from hemagglutinin__InfluenzaA__AEG64911

SEQ ID NO: 198805 - RNA, 1701 nt, Artificial Sequence; identical to SEQ ID NO: 192104
  derived and/or modified CDS sequence (opt5) from hemagglutinin__InfluenzaA__AEG64922

SEQ ID NO: 198806 - RNA, 1701 nt, Artificial Sequence; identical to SEQ ID NO: 192104
  derived and/or modified CDS sequence (opt5) from hemagglutinin__InfluenzaA__AEG64933

SEQ ID NO: 198807 - RNA, 1701 nt, Artificial Sequence; identical to SEQ ID NO: 192190
  derived and/or modified CDS sequence (opt5) from hemagglutinin__InfluenzaA__AEG64944

SEQ ID NO: 198808 - RNA, 1701 nt, Artificial Sequence; identical to SEQ ID NO: 192104
  derived and/or modified CDS sequence (opt5) from hemagglutinin__InfluenzaA__AEG64955

SEQ ID NO: 198809 - RNA, 1701 nt, Artificial Sequence; identical to SEQ ID NO: 192104
  derived and/or modified CDS sequence (opt5) from hemagglutinin__InfluenzaA__AEG64966

SEQ ID NO: 198810 - RNA, 1701 nt, Artificial Sequence
  derived and/or modified CDS sequence (opt5) from hemagglutinin__InfluenzaA__AEG64977
augaagaccaucauugcccugagcuacauccucugccugguguucgcucagaaacuucccgagaacgacaauuccacagccacgcugugucucggccaccaugcggucccuaacgggaccauuguuaagacaaucaccaaugaucaaauugaagugacaaacgcuaccgagcuggugcagucuagcuccacaggaggcaucugcgacucuccgcaccagauccuugauggggaaaauuguacccugauugacgcccuccugggagauccccagugcgacggcuuucaaaacaaaaagugggaucuguucgucgagagaagcaaagccuauuccaauuguuacccuuaugacgugcccgauuacgcuucucuccggagccugguugccuccagcgggacgcuugaauuuaacaaugagucuuucgacuggaccggagugacacagaacggcaccuccagcgcuugcaagcgcagaucuaauaaguccuuuuucagccggcugaacuggcucacacaucugaaauauaaguacccugcccuuaaugucaccaugcccaacaaugagaaauuugauaagcuguauaucuggggcgugcaccauccugggacggacucugaucagauuucccucuacgcgcaggccagcggacgcaucacaguuuccaccaaaagaucucaacagacagugauuccgaacaucggcagccggccccgcgucagagacguguccagccggauuucuaucuacuggaccaucgugaagccuggggacauucugcugaucaacuccaccggaaaucucauugcuccccgcggcuauuucaagaucagaagcgggaaaucuagcauuaugcgguccgaugccccuaucgacaaguguaacucugaaugcaucacacccaauggaagcauuccgaacgauaaaccuuuucagaaugucaaccgcaucacguacggcgcuugucccagauauguuaagcagaauacccugaaacuugccacaggcaugcggaacgugccugagaagcaaacccgcgggauuuucggagcgaucgccggcuuuauugaaaaugggugggagggaaugguggacggcugguacggguucagacaccagaacuccgagggaacaggccaggcugccgaucugaaaagcacccaagcugccaucaaucagaucaacggcaagcucaaucggcugauugggaagacgaacgaaaaauuucaccagaucgagaaggaguucucugaagucgaaggacgcauucaggaccuugagaaauauguggaggauacaaagaucgaccugugguccuacaaugccgaacuccugguugcucuggagaaccaacauaccauugaucucaccgacagcgaaaugaacaaacuguucgagagaacaaagaagcagcuucgggaaaaugcggaggauaugggcaacgggugcuuuaaaaucuaucacaagugugacaaugccugcauuggaucuaucagaaacggcaccuacgaccaugauguguaccgcgacgaggcucugaauaaccgguuccagaucaaaggggucgaacucaaguccggcuauaaagauuggauucuguggaucagcuuugccauuuccugcuuccuucuguguguggcccuccugggauuuaucaugugggcuugccagaagggcaauauuagauguaacaucugcaucuga

SEQ ID NO: 198811 - RNA, 1701 nt, Artificial Sequence
  derived and/or modified CDS sequence (opt5) from hemagglutinin__InfluenzaA__AEG64988
augaagaccaucauugcccugagcuacauccucugccugguguucgcucagaaacuucccggcaacgacaauuccacagccacgcugugucucgggcaccaugcggucccuaacggaaccauuguuaagacaaucaccaaugaucaaauugaggugacaaacgcuaccgaacuggugcagucuagcuccacaggcgagaucugcgacaugccgcaccagauccuugauggggaaaauuguacccugauugacgcccuccugggagauccccagugcgacggcuuucaaaacaaaaagugggaucuguucgucgagagaucuaaagccuauagcaauuguuacccuuaugacgugcccgauuacgcuucccuccggucucugguugccagcuccgggacgcuugaauuuaacaaugagagcuucaacuggaccggagugacacagaauggcaccucuuccgcuugcaagcgcagaagcaacaauagcuuuuucucccggcugaacuggcucacacaucugaaguuuaaauauccugcccuuaaugucaccaugcccaacaacgagaaguucgacaaacuguacaucuggggcgugcaccauccugggacggauaaugaccagauuuuucucuaugcgcaggccagcggacgcaucacaguuucuaccaagagaucccaacagacagugauuccgaacaucggcagccggccccgcgucagaaauauuccuucccggaucucuaucuacuggaccauugugaaacccggggauauccugcugauuaacagcaccggaaaucucaucgcuccucgcggcuacuucaagauuagauccgggaagucuucuaucaugcgguccgacgcccccaucggaaaauguaacagcgaaugcauuacaccgaauggcucuaucccuaacgacaagcccuuucagaaugugaaccgcauuacguauggcgcuuguccuagauacgucaaacagaauacccugaaacuugccacagggaugcggaacguucccgagaagcaaacccgcggaaucuucggcgcgauugccggguuuaucgaaaauggaugggagggcaugguggaugggugguauggauucagacaccagaacagcgagggcaucggccaggcugccgaccugaaguccacacaagcugccauuaaucagaucaacgggaaacucaaccggcugauuggaaagaccaaugaaaaguuccaccagaucgagaaagaauuuucugagguggaaggccgcauucaggaucuugagaaguacgucgaggacacgaaaaucgaucuguggagcuauaacgccgaacuccugguggcucuggagaaucaacauacaauugaccucaccgauuccgaaaugaacaagcuguucgagagaaccaaaaagcagcuucgggaaaaugcggaggacauggggaacggaugcuuuaagaucuaccacaaaugugauaaugccugcaucggcagcauuagaaacgggacauaugaccaugauguuuaccgcgacgaggcucugaauaaccgguuccagaucaagggcguggaacucaaaucuggauacaaggacuggauucuguggaucuccuuugccauuagcugcuuccuucugugugucgugcuccugggcuuuaucaugugggccugccagaaagggaauaucagauguaacauuugcaucuga

SEQ ID NO: 198812 - RNA, 1701 nt, Artificial Sequence
  derived and/or modified CDS sequence (opt5) from hemagglutinin__InfluenzaA__AEG64999
augaagaccaucauugcccugagcuacauccucugccugguguucgcucagaaacuucccggcaacgacaauuccacagccacgcugugucucgggcaccaugcggucccuaacggaaccauuguuaagacaaucaccaaugaucaaauugaggugacaaacgcuaccgaacuggugcaaaauucuagcacaggcgggaucugcgacuccccgcaccagauccuugauggagagaacuguacccugauugacgcccuccugggcgauccccagugcgacggguuucagaauaaaaagugggaucuguucgucgaaagaucuaaagccuauagcaacuguuacccuuaugacgugcccgauuacguuucccuccggucucugguggcuagcuccggaacgcuugaguuuaauaacgaaucuuucaauuggaccggcgucacacagaacggcaccucuuccgccugcaagcgcagaagcaauaacagcuuuuucucccggcugaauuggcucacacaucugaaguuuaaauauccugcucuuaacgugaccaugcccaacaaugagaaguucgacaaacuguacaucuggggaguucaccauccugggacggauaacgaccagauuagccucuaugcccaggcgucuggccgcaucacaguguccaccaagagaagccaacagacagucauuccgaauaucgggucccggccccgcgugagagauauuccuucucggaucagcaucuacuggaccauugugaaacccggagacauccugcugauuaacuccaccggcaaucucaucgccccucgcggguacuuuaagauuagaagcggaaagucuuccaucaugcggagcgacgcucccaucggcaaauguaacucugagugcauuacaccgaauggcagcaucccuaacgauaagcccuuccagaaugucaaccgcauuacguauggggccuguccuagauacguuaaacagaauacccugaaacuugcuacaggaaugcggaacgugcccgaaaagcaaacccgcggcaucuuuggggccauugcgggauucaucgagaauggcugggaagggaugguggacggaugguauggcuuuagacaccagaacuccgagggcaucgggcaggccgcugaucugaagucuacacaagccgcuauuaaucagaucaacggaaaacucaaccggcugauuggcaagaccaaugagaaguuccaccagaucgaaaaagaguucagcgaagucgaggggcgcauucaggaccuugaaaaguacguggaggauacgaaaaucgaccugugguccuauaacgccgagcuccugguugcccuggaaaaucaacauacaauugaucucaccgacagcgagaugaacaagcuguuugaaagaaccaaaaagcagcuucgggagaaugcugaagauaugggaaacggcugcuucaagaucuaccacaaaugugacaaugcgugcaucgggucuauuagaaacggcacauaugaucaugacguguaccgcgacgaggcccugaauaaccgguuucagaucaagggagucgagcucaaauccggcuacaaggauuggauucuguggaucagcuucgcuauuucuugcuuucuucuguguguggcccuccugggguucaucaugugggccugccagaaaggaaauaucagauguaacauuugcaucuga

SEQ ID NO: 198813 - RNA, 1701 nt, Artificial Sequence; identical to SEQ ID NO: 192327
  derived and/or modified CDS sequence (opt5) from hemagglutinin__InfluenzaA__AEG65010

SEQ ID NO: 198814 - RNA, 1701 nt, Artificial Sequence
  derived and/or modified CDS sequence (opt5) from hemagglutinin__InfluenzaA__AEG65021
augaagaccaucauugcccugagcuacauccucugccugguguucgcucagaaacuucccggcaacgacaauuccacagccacgcugugucucgggcaccaugcggucccuaacggaaccauuguuaagacaaucaccaaugaucaaauugaggugacaaacgcuaccgaacuggugcagucuagcuccacaggcgggaucugcgacucuccgcaccagauccuugauggagagaauuguacccugauugacgcccuccugggcgauccccagugcgacggguuucaaaacaaaaagugggaucuguucgucgaaagaagcaaagccuauuccaauuguuacccuuaugacgugcccgauuacguuucucuccggagccugguggcuuccagcggaacgcuugaguuuaacaaugaaucuuucaacuggaccggcgucacacagaauggcaccuccagcgccugcaagcgcagaucuaacaauuccuuuuucagccggcugaacuggcucacacaucugaaguuuaaauauccugcucuuaaugugaccaugcccaacacggagaaguucgacaaacuguacaucuggggaguucaccauccugggacagauaacgaccagauuucucucuaugcccaggcguccggccgcaucaccgugagcacaaagagaucccaacagaccgucauuccgaauaucgggucucggccccgcgugagagauauuccuagccggaucuccaucuacuggaccauugugaaacccggagacauccugcugauuaacagcacaggcaaucucaucgccccucgcggguacuuuaagauuagaucuggaaaguccagcaucaugcggucugacgcucccaucggcaaauguaacagcgagugcauuacgccgaauggcuccaucccuaacgauaagcccuuccagaaugucaaccgcauuaccuauggggccuguccuagauacguuaaacagaauacacugaaacuugcuaccggaaugcggaacgugcccgaaaaacaaacacgcggcaucuuuggggccauugcgggauucaucgagaauggcugggaagggaugguggacggaugguauggcuuuagacaccagaacucugagggcaucgggcaggccgcugaucucaagagcacccaagccgcuauuaaucagaucaacggaaaacugaaucggcugauuggcaagacgaacgagaaguuccaccagaucgaaaaagaguucuccgaagucgaggggcgcauucaggaccuugaaaaguacguggaggauacaaaaaucgaccuguggagcuauaacgccgagcuccugguugcccuggaaaaucaacauaccauugaucucaccgacucugagaugaacaagcuguuugaaagaacaaagaagcagcuucgggagaaugcugaagauaugggaaacggcugcuucaagaucuaccacaaaugugacaaugcgugcaucggguccauuagaaacggcaccuaugaucaugacguguaccgcgacgaggcccugaauaaccgguuucagaucaagggagucgagcucaaaagcggcuacaaggauuggauucuguggaucucuuucgcuauuuccugcuuucuucuguguguggcccuccugggguucaucaugugggccugccagaaaggaaauaucagauguaacauuugcaucuga

SEQ ID NO: 198815 - RNA, 1701 nt, Artificial Sequence
  derived and/or modified CDS sequence (opt5) from hemagglutinin__InfluenzaA__AEG65032
augaagaccaucauugcccugagcuacauccucugccugguguucgcucagaaacuucccggcaacgacaauuccacagccacgcugugucucgggcaccaugcggucccuaacggaaccauuguuaagacaaucaccaaugaucaaauugaggugacaaacgcuaccgaacuggugcagucuagcuccacaggcgggaucugcgacucuccgcaccagauccuugauggagagaauuguacccugauugacgcccuccugggcgauccccagugcgacggguuucaaaacaaaaagugggaucuguucgucgaaagaagcaaagccuauuccaauuguuacccuuaugacgugcccgauuacgcuucucuccggagccugguugccuccagcggaacgcuugaguuuaacaaugaaucuuucaacuggaccggcgugacacagaauggcaccuccagcgcuugcaagcgcagaucuaacaauuccuuuuucagccggcugaacuggcucacacaucugaaguuuaaauauccugcccuuaaugucaccaugcccaacaacgagaaguucgacaaacuguacaucuggggagugcaccauccugggacggauaaugaccagauuuuucucuaugcgcaggccucuggccgcaucacaguuuccaccaagagaagccaacagacagugauuccgaacaucgggucccggccccgcgucagaaauauuccuucucggaucagcaucuacuggaccauugugaaacccggagauauccugcugauuaacuccaccggcaaucucaucgcuccucgcggguacuucaagauuagaagcggaaagucuuccaucaugcggagcgacgcccccaucggcaaauguaacucugagugcauuacaccgaauggcagcaucccuaacgacaagcccuuucagaaugugaaccgcauuacguauggggcuuguccuagauacgucaaacagaauacccugaaacuugccacaggaaugcggaacguucccgaaaagcaaacccgcggcaucuucggggcgauugccggauuuaucgagaauggcugggaagggaugguggauggaugguauggcuucagacaccagaacuccgagggcaucgggcaggcugccgaccugaagucuacacaagcugccauuaaucagaucaacggaaaacucaacaagcugauuggcaagaccaaugagaaauuccaccagaucgaaaaggaguuuagcgaaguggaggggcggauucaggaucuugaaaaauacgucgaggacacgaagaucgaucugugguccuauaacgccgagcuccugguggcucuggaaaaucaacauacaauugaccucaccgauagcgagaugaacaaacuguucgaaagaaccaagaagcagcuucgcgagaaugcggaagacaugggaaacggcugcuuuaaaaucuaccacaagugugauaaugccugcaucgggucuauucggaacggcacauaugaccaugauguuuacagagacgaggcucugaauaaccgcuuccagaucaaaggaguggagcucaaguccggcuacaaagacuggauucuguggaucagcuuugccauuucuugcuuccuucugugugucgcccuccugggguuuaucaugugggcuugccagaagggaaauauccgguguaacauuugcaucuga

SEQ ID NO: 198816 - RNA, 1701 nt, Artificial Sequence; identical to SEQ ID NO: 192702
  derived and/or modified CDS sequence (opt5) from hemagglutinin__InfluenzaA__AEG65043

SEQ ID NO: 198817 - RNA, 1701 nt, Artificial Sequence; identical to SEQ ID NO: 192702
  derived and/or modified CDS sequence (opt5) from hemagglutinin__InfluenzaA__AEG65054

SEQ ID NO: 198818 - RNA, 1701 nt, Artificial Sequence
  derived and/or modified CDS sequence (opt5) from hemagglutinin__InfluenzaA__AEG65065
augaagaccaucauugcccugagcuacauccucugccugguguucgcucagaaacuucccggcaacgacaauuccacagccacgcugugucucgggcaccaugcggucccuaacggaaccauuguuaagacaaucaccaaugaucaaauugaggugacaaacgcuaccgaacuggugcagucuagcuccacaggcgagaucugcgacucuccgcaccagauccuugauggggaaaauuguacccugauugacgcccuccugggagauccccagugcgacggcuuucaaaacaaaaagugggaucuguucgucgagagaagcaaagccuauuccaauuguuacccuuaugacgugcccgauuacgcuucucuccggagccugguugccuccagcgggacgcuugaauuuaacaaugagucuuucaacuggaccggagugacacagaauggcaccuccagcgcuugcaagcgcagaucuaacaauuccuuuuucagccggcugaacuggcucacacaucugaaguuuaaauauccugcccuuaaugucaccaugcccaacaacgagaaguucgacaaacuguacaucuggggcgugcaccauccugggacggauaaugaccagauuuuucucuaugcgcaggccucuggacgcaucacaguuuccaccaagagaagccaacagacagugauuccgaacaucggcucccggccccgcgucagaaauauuccuucucggaucagcaucuacuggaccauugugaaacccggggauauccugcugauuaacuccaccggaaaucucaucgcuccucgcggcuacuucaagauuagaagcgggaagucuuccaucaugcggagcgacgcccccaucggaaaauguaacucugaaugcauuacaccgaauggcagcaucccuaacgacaagcccuuucagaaugugaaccgcauuacguauggcgcuuguccuagauacgucaaacagaauacccugaaacuugccacagggaugcggaacguucccgagaagcaaacccgcggaaucuucggcgcgauugccggguuuaucgaaaauggaugggagggcaugguggaugggugguauggauucagacaccagaacuccgagggcaucggccaggcugccgaccugaagucuacacaagcugccauuaaucagaucaacgggaaacucaaccggcugauuggaaagaccaaugaaaaguuccaccagaucgagaaagaauuuagcgagguggaaggccgcauucaggaucuugagaaguacgucgaggacacgaaaaucgaucugugguccuauaacgccgaacuccugguggcucuggagaaucaacauacaauugaccucaccgauagcgaaaugaacaagcuguucgagagaaccaaaaagcagcuucgggaaaaugcggaggacauggggaacggaugcuuuaagaucuaccacaaaugugauaaugccugcaucggcucuauuagaaacgggacauaugaccaugauguuuaccgcgacgaggcucugaauaaccgguuccagaucaagggcguggaacucaaauccggauacaaggacuggguccuguggauuagcuuugccaucucuugcuuccuucugugugugguucuccugggcuuuauuaugugggccugccagaaagggaauaucagauguaacaucugcauuuga

SEQ ID NO: 198819 - RNA, 1701 nt, Artificial Sequence
  derived and/or modified CDS sequence (opt5) from hemagglutinin__InfluenzaA__AEG65076
augaagaccaucauugcccugagcuacauccucugccugguguucgcucagaaacuucccggcaacgacaauuccacagccacgcugugucucgggcaccaugcggucccuaacggaaccauuguuaagacaaucaccaaugaucaaauugaggugacaaacgcuaccgaacuggugcagucuagcuccacaggcgggaucugcgacucuccgcaccagauccuugauggagagaauuguacccugauugacgcccuccugggcgauccccagugcgacggguuucaaaacaaaaagugggaucuguucgucgaaagaagcaaagccuauuccaauuguuacccuuaugacgugcccgauuacgcuucucuccggagccugguugccuccagcggaacgcuugaguuuaacaaugaaucuuucaacuggaccggcgugacacagaauggcaccuccagcgcuugcaagcgcagaucuaacaauuccuuuuucagccggcugaacuggcucacacaucugcgcuuuaaguauccugcccuuaaugucaccaugcccaacaacgagaaauucgacaagcuguacaucuggggagugcaccauccugggacggauaaugaccagauuuuucucuaugcgcaggccucuggcagaaucacaguuuccaccaaacggagccaacagacagugauuccgaacgucgggucccgccccagagugcggaauaucccuucucgcauuagcaucuacuggaccaucgugaagcccggagauauucugcugaucaacuccaccggcaaucucauugcuccuagaggguacuucaaaauccggagcggaaagucuuccauuaugcgcagcgacgcccccaucggcaaguguaacucugagugcaucacaccgaauggcagcauuccuaacgacaaacccuuucagaaugucaacagaaucacguauggggcuuguccucgguacguuaagcagaauacccugaaacuugccacaggaaugcgcaacgugcccgaaaagcaaaccagaggcauuuucggggcgaucgccggauuuauugagaauggcugggaagggaugguggauggaugguauggcuuccggcaccagaacuccgagggcacagggcaggcugccgaccugaaaucuacccaagcugccaucaaucagaucaacggaaagcucaacagacugauuggcaaaacgaaugagaaguuccaccagaucgaaaaggaguuuagcgaagucgaggggcgcauucaggaucuugaaaaauacguggaggacacaaagaucgaucugugguccuauaacgccgagcuccugguugcucuggaaaaucaacauaccauugaccucaccgauagcgagaugaacaaacuguucgaacggacaaagaaacagcuuagagagaaugcggaagacaugggaaacggcugcuuuaagaucuaccacaagugugauaaugccugcauugggucuauccgcaacggcaccuaugaccaugauguguaccgggacgaggcucugaauaacagauuccagaucaaaggagucgagcucaaguccggcuacaaagacuggauucuguggaucagcuuugccauuucuugcuuccuucuguguguggcccuccugggguuuaucaugugggcuugccagaagggaaauauucgcuguaacaucugcaucuga

SEQ ID NO: 198820 - RNA, 1701 nt, Artificial Sequence
  derived and/or modified CDS sequence (opt5) from hemagglutinin__InfluenzaA__AEG65087
augaagaccaucauugcccugagcuacauccucugccugguguucgcucagaaacuucccggcaacgacaauuccacagccacgcugugucucgggcaccaugcggucccuaacggaaccauuguuaagacaaucaccaaugaucaaauugaggugacaaacgcuaccgaacuggugcagucuagcuccacaggcgggaucugcgacucuccgcaccagauccuugauggagagaauuguacccugauugacgcccuccugggcgauccccagugcgacggguuucaaaacaaaaagugggaucuguucgucgaaagaagcaaagccuauuccaauuguuacccuuaugacgugcccgauuacgcuucucuccggagccugguugccuccagcggaacgcuugaguuuaacaaugaaucuuucaacuggaccggcgugacacagaauggcaccuccagcgcuugcaagcgcagaucuaacaauuccuuuuucagccggcugaacuggcucacacaucugaaguuuaaauauccugcccuuaaugucaccaugcccaacaacgagaaguucgacaaacuguacaucuggggagugcaccauccugggacgaauaacgaucagauuuuucucuaugcgcaggccucuggccgcaucacaguuuccaccaagagaagccaacagacagugauuccgaauaucgggucccggccccgcgucagaaacauuccuucucggaucagcaucuacuggaccauugugaaacccggagacauccugcugauuaauuccaccggcaaccucaucgcuccucgcggguacuucaagauuagaagcggaaagucuuccaucaugcggagcgaugcccccaucggcaaauguaauucugagugcauuacaccgaacggcagcaucccuaaugacaagcccuuucagaacgugaaucgcauuacguauggggcuuguccuagauacgucaaacagaacacccugaaacuugccacaggaaugcggaauguucccgaaaagcaaacccgcggcaucuucggggcgauugccggauuuaucgagaacggcugggaagggaugguggacggaugguauggcuucagacaccaaaauuccgagggcaucgggcaggcugccgaucugaagucuacacaggcugccauuaaccagaucaacggaaaacucaaucggcugauuggcaagaccaacgagaaguuccaccagaucgaaaaagaguuuagcgaaguggaggggcgcauucaggaccuugaaaaguacgucgaggauacgaaaaucgaccugugguccuauaaugccgagcuccugguggcucuggaaaaccaacauacaauugaucucaccgacagcgagaugaauaagcuguucgaaagaaccaaaaagcagcuucgggagaacgcggaagauaugggaaauggcugcuuuaagaucuaccacaaaugugacaacgccugcaucgggucuauuagaaauggcacauaugaucaugacguuuaccgcgaugaggcucugaacaaucgguuccagaucaagggaguggagcucaaauccggcuacaaggacuggauucuguggaucagcuuugccauuucuugcuuccuucugugugucgcccuccugggguuuaucaugugggcuugccagaaaggaaacaucagauguaauauuugcaucuga

SEQ ID NO: 198821 - RNA, 1701 nt, Artificial Sequence
  derived and/or modified CDS sequence (opt5) from hemagglutinin__InfluenzaA__AEG65098
augaagaccaucauugcccugagcuacauccucugccugguguucgcucagaaacuucccggcaacgacaauuccacagccacgcugugucucgggcaccaugcggucccuaacggaaccauuguuaagacaaucaccaaugaucaaauugaggugacaaacgcuaccgaacuggugcagucuagcuccacaggcgagaucugcgacucuccgcaccagauccuugauggggaaaauuguacccugauugacgcccuccugggagauccccagugcgacgauuuucaaaacaaaaagugggaccuguucgucgagagaagcaaagccuauuccaauuguuacccuuaugaugugcccgacuacgcuucucuccggagccugguugccuccagcggcacgcuugaauuuaacaaugagucuuucaacuggaccggggugacacagaauggaaccuccagcgcuugcaagcgcagaucuaacaauuccuuuuucagccggcugaacuggcucacacauucuaaguuuaaauauccugcccugaaugucaccaugcccaacaacgagaaguucgauaaacuuuacaucuggggcgugcaccauccuggcacggacaaugaucagauuuuucuguaugcgcaggccuccgggcgcaucacaguuagcaccaagagaucccaacagacagugauuccgaacaucggaucucggccccgcgucagaaauauuccuagccggaucuccaucuacuggaccauugugaaacccggcgacauccuccugauuaacagcaccgggaaucugaucgcuccucgcggauacuucaagauuagaucuggcaaguccagcaucaugcggucugacgcccccaucgggaaauguaacagcgaaugcauuacaccgaauggauccaucccuaacgauaagcccuuucagaaugugaaccgcauuacguauggcgcuuguccuagauacgucaaacagaauacccucaagcuggccacaggcaugcggaacguucccgagaaacaaacccgcgggaucuucggagcgauugccggcuuuaucgaaaaugggugggagggaaugguggacggcugguauggguucagacaccagaacucugagggaaucggccaggcugccgaucuuaagagcacacaagcugccauuaaucagaucaacggcaaccugaaucggcucauugggaaaaccaacgaaaaguuccaccagaucgagaaggaauuuuccgagguggaaggacgcauucaggaccuggagaaauacgucgaggauacgaagaucgaccuuuggagcuauaaugccgaacugcucguggcucuggagaaccaacauacaauugaucugaccgacucugaaaugaauaaacucuucgagagaaccaagaaacagcugcgggaaaacgcggaggauaugggcaaugggugcuuuaagaucuaccacaagugugacaacgccugcaucggauccauuagaaauggcacauaugaucaugacguuuaccgcgacgaggcucuuaacaaucgguuccagaucaaagggguggaacucaagagcggcuacaaagauuggauucuguggaucucuuuugccauuuccugcuuccugcuuugugucgugcugcucggauuuaucaugugggccugccagaagggcaacaucagauguaauauuugcaucuga

SEQ ID NO: 198822 - RNA, 1701 nt, Artificial Sequence
  derived and/or modified CDS sequence (opt5) from hemagglutinin__InfluenzaA__AEG65109
augaagaccaucauugcccugagcuacauccucugccugguguucgcucagaaacuucccggcaacgacaauuccacagccacgcugugucucgggcaccaugcggucccuaacggaaccauuguuaagacaaucaccaaugaucaaauugaggugacaaacgcuaccgaacuggugcagucuagcuccacaggcgagaucugcgacucuccgcaccagauccuugauggggaaaauuguaaacugauugacgcccuccugggagauccccagugcgacggcuuucaaaacaagaaaugggaucuguucgucgagagaagcaaggccuauuccaauuguuacccuuaugacgugcccgauuacgcuucucuccggagccugguugccuccagcgggacccuugaauuuaacaaugagucuuucaacuggacgggagugacccagaauggcacauccagcgcuugcaagcgcagaucuaacaauuccuuuuucagccggcugaacuggcucacccaucugaaauuuaaguauccugcccuuaaugucacaaugcccaacaacgagaaauucgacaagcuguacaucuggggcgugcaccauccugggaccgauaaugaccagauuuuucucuaugcgcagucuuccggacgcaucacgguuagcacaaaaagaucccaacagaccgugauuccgaacaucggcucucggccccgcgucagaaauauuccuagccggaucuccaucuacuggacaauugugaagcccggggauauccugcugauuaacagcaccggaaaucucaucgccccucgcggcuacuucaagauuagaucugggaaauccagcaucaugcggucugacgcucccaucggaaaguguaacagcgaaugcauuaccccgaauggcuccaucccuaacgacaaacccuuucagaaugugaaccgcauuacauauggcgccuguccuagauacgucaagcagaauacgcugaaacuugcuaccgggaugcggaacguucccgagaagcaaacacgcggaaucuucggcgccauugcgggguuuaucgaaaauggaugggagggcaugguggaugggugguauggauucagacaccagaacucugagggcaucggccaggccgcugaccugaaaagcacccaagccgcuauuaaucagaucaacgggaagcucaaccggcugauuggaaagacaaaugaaaaauuccaccagaucgagaaggaauuuuccgagguggaaggccgcauucaggaucuugagaaauacgucgaggacaccaagaucgaucuguggagcuauaacgccgaacuccugguggcccuggagaaucaacauacgauugaccucacagauucugaaaugaacaaacuguucgagagaaccaagaagcagcuucgggaaaaugcugaggacauggggaacggaugcuuuaaaaucuaccacaagugugauaaugcgugcaucggcuccauuagaaacgggaccuaugaccaugauguuuaccgcgacgaggcccugaauaaccgguuccagaucaaaggcguggaacucaagagcggauacaaagacuggauucuguggaucucuuuugcuauuuccugcuuccuucugugugucgcccuccugggcuuuaucaugugggccugccagaaggggaauaucagauguaacauuugcaucuga

SEQ ID NO: 198823 - RNA, 1701 nt, Artificial Sequence
  derived and/or modified CDS sequence (opt5) from hemagglutinin__InfluenzaA__AEG65120
augaagaccaucauugcccugagcuacauccucugccugguguucgcucagaaacuucccggcaacgacaauuccacagccacgcugugucucgggcaccaugcggucccuaacggaaccauuguuaagacaaucaccaaugaucaaauugaggugacaaacgcuaccgaacuggugcagucuagcuccacaggcgagaucugcgacucuccgcaccagauccuugauggggaaaauuguacccugauugacgcccuccugggagauccccagugcgacggcuuucaaaacaaaaagugggaucuguucgucgagagaagcaaagccuauuccaauuguuacccuuaugacgugcccgauuacgcuucucuccggagccugguugccuccagcgggacgcuugaauuuaacaaugagucuuucaacuggaccggagugacacagaauggcaccuccagcgcuugcaagcgcagaucuaacaauuccuuuuucagccggcugaacuggcucacacaucugaaguuuaaauauccugcccuuaaugucaccaugcccaacaacgagaaguucgacaaacuguacaucuggggcgugcaccauccugggacggauaaugaccagauuuuucucuaugcgcaggccucuggacgcaucacaguuuccaccaagagaagccaacagacagugauuccgaacaucggcucccggccccgcgucagaaauauuccuucucggaucagcaucuacuggaccauugugaaacccggggauauccugcugauuaacuccaccggaaaucucaucgcuccucgcggcuacuucaagauuagaagcgggaagucuuccaucaugcggagcgacgcccccaucggaaaauguaacucugaaugcauuacaccgaauggcagcaucccuaacgacaagcccuuucagaaugugaaccgcauugcuuauggcgccuguccuagauacgucaaacagaauacgcugaaacuugcgaccgggaugcggaacguucccgagaagcaaacacgcggaaucuucggcgccauugcuggguuuaucgaaaauggaugggagggcaugguggaugggugguauggauucagacaccagaacuccgagggcaucggccaggccgcugaccugaagucuacccaagccgccauuaaucagaucaacgggaaacucaaccggcugauuggaaagacaaaugaaaaguuccaccagaucgagaaagaauuuagcgagguggaaggccgcauucaggaucuugagaaguacgucgaggacaccaaaaucgaucugugguccuauaacgcugaacuccugguggcgcuggagaaucaacauacgauugaccucacagauagcgaaaugaacaagcuguucgagagaaccaaaaagcagcuucgggaaaaugccgaggacauggggaacggaugcuuuaagaucuaccacaaaugugauaaugcuugcaucggcucuauuagaaacgggaccuaugaccaugauguuuaccgcgacgaggcccugaauaaccgguuccagaucaagggcguggaacucaaauccggauacaaggacuggauucuguggaucagcuuugccauuucuugcuuccuucugugugucgugcuccugggcuuuaucaugugggcuugccagaaagggaauaucagauguaacauuugcaucuga

SEQ ID NO: 198824 - RNA, 1701 nt, Artificial Sequence
  derived and/or modified CDS sequence (opt5) from hemagglutinin__InfluenzaA__AEG65131
augaagaccaucauugcccugagcuacauccucugccugguguucgcucagaaacuucccggcaacgacaauuccacagccacgcugugucucgggcaccaugcggucccuaacggaaccauuguuaagacaaucaccaaugaucaaauugaggugacaaacgcuaccgaacuggugcagucuagcuccacaggcgagaucugcgacucuccgcaccagauccuugauggggaaaauuguacccugauugacgcccuccugggagauccccagugcgacggcuuucaaaacaaaaagugggaucuguucgucgagagaagcaaagccuauuccaauuguuacccuuaugacgugcccgauuacgcuucucuccggagccugguugccuccagcgggacgcuugaauuuaacaaugagucuuucaacuggaccggagugacacagaauggcaccuccagcgcuugcaagcgcagaucuaacaauuccuuuuucagccggcugaacuggcucacacauucuaaguuuaaauauccugcccugaaugucaccaugcccaacaacgagaaguucgacaaacuuuacaucuggggcgugcaccauccugggacggauaaugaccagauuuuucuguaugcgcaggccuccggacgcaucacaguuagcaccaagagaucccaacagacagugauuccgaacaucggcucucggccccgcgucagaaauauuccuagccggaucuccaucuacuggaccauugugaaacccggggauauccuccugauuaacagcaccggaaaucugaucgcuccucgcggcuacuucaagauuagaucugggaaguccagcaucaugcggucugacgcccccaucggaaaauguaacagcgaaugcauuacaccgaauggcuccaucccuaacgacaagcccuuucagaaugugaaccgcauuacguauggcgcuuguccuagauacgucaaacagaauacccucaagcuggccacagggaugcggaacguucccgagaaacaaacccgcggaaucuucggcgcgauugccggguuuaucgaaaauggaugggagggcaugguggaugggugguauggauucagacaccagaacucugagggcaucggccaggcugccgaccuuaagagcacacaagcugccauuaaucagaucaacgggaaacugaaccggcucauuggaaagaccaaugaaaaguuccaccagaucgagaaagaauuuuccgagguggaaggccgcauucaggaucuggagaaguacgucgaggacacgaaaaucgaucuuuggagcuauaacgccgaacugcucguggcucuggagaaucaacauacaauugaccugaccgauucugaaaugaacaaacucuucgagagaaccaagaagcagcugcgggaaaaugcggaggacauggggaacggaugcuuuaagaucuaccacaaaugugauaaugccugcaucggcuccauuagaaacgggacauaugaccaugauguuuaccgcgacgaggcucuuaauaaccgguuccagaucaagggcguggaacugaaaagcggauacaaggacuggauucucuggaucucuuuugccauuuccugcuuccugcuuugugucgugcugcucggcuuuaucaugugggccugccagaaagggaauaucagauguaacauuugcaucuga

SEQ ID NO: 198825 - RNA, 1701 nt, Artificial Sequence; identical to SEQ ID NO: 192123
  derived and/or modified CDS sequence (opt5) from hemagglutinin__InfluenzaA__AEG65142

SEQ ID NO: 198826 - RNA, 1701 nt, Artificial Sequence; identical to SEQ ID NO: 192123
  derived and/or modified CDS sequence (opt5) from hemagglutinin__InfluenzaA__AEG65153

SEQ ID NO: 198827 - RNA, 1701 nt, Artificial Sequence
  derived and/or modified CDS sequence (opt5) from hemagglutinin__InfluenzaA__AEG65164
augaagaccaucauugcccugagcuacauccucugccugguguucgcucagaaacuucccggcaacgacaauuccacagccacgcugugucucgggcaccaugcggucccuaacggaacccugguuaagacaauuaccaaugaucaaaucgaggugacaaacgcuaccgaacuugugcagucuagcuccacaggcagaauuugcgacucuccgcaccagauccuggauggggagaauuguacccucaucgacgcccugcugggagauccccauugcgacggcuuucagaacaaagaaugggaucucuucgucgagcggagcaaggccuauuccaauuguuacccuuaugacgugcccgauuacguuucucugcgcagccuuguggcuuccagcgggacgcuggaauuuaacaaugagucuuucaacuggaccggagucgcccaaaauggcacauccagcgcuugcaaaagacggucugacaaguccuuuuucagccgccucaacuggcugcaccagcuuaaguauaaauacccugcccugaaugugaccaugcccaacaaugagaaguuugauaaacucuauauuuggggcguucaucacccugggacagacucugaucagaucucccuguacgcgcaggccagcggaagagugaccgucuccacgaagcggucucaacagacagugauuccgaacaucggcagccgccccugggugagaggggucuccagccggauuucuaucuacuggaccauuguuaaaccuggagacauccugcucaucaacuccacaggcaaucugauugcuccccgcggguauuucaagaucagaagcggaaagucuagcauuaugcgguccgacgccccuaucggcaaauguaacucugaaugcauuacccccaauggcagcaucccgaacgauaagccuuuucagaaugugaaccgcaucaccuacgggcccuguccuagauaugugaaacagaauacacuuaagcuggcuacgggaaugcggaacguccccgagaaacaaacccgcggcauuuucggggccaucgcgggauuuauugaaaauggcugggaggggaugauggacggaugguacggcuucagacaccagaacuccgagggcacagggcaggccgcugaucucaagagcacccaagccgcuaucaaucagauuaacggaaaacugaaucggcuuaucgaaaagacaaacgagaaguuucaucagaucgaaaaagaguucucugaaguggagggccgcauucaggaccuggagaaguauguugaagauaccaaaaucgaccucugguccuacaaugccgaguuccugguggcccuggaaaaccaacacacgauugaucucacagacagcgagaugaacaagcuguuugaaagaaccaaaaagcagcuucgggagaaugcugaggauauggggaacggaugcuucaagaucuaucauaaaugugacaaugcgugcauuggcucuaucagaaacgggaccuacgaucacgacgucuaccgcgacgaagcccugaauaaccgguuucagauuaagggcguggagcucaaauccggauauaaggauuggauccuguggaucagcuucgcuauuuccugcuuucuucuguguaucguucuccugggcuucauuaugugggccugccagaaagggaauaucagauguaacauuugcaucuga

SEQ ID NO: 198828 - RNA, 1701 nt, Artificial Sequence
  derived and/or modified CDS sequence (opt5) from hemagglutinin__InfluenzaA__AEG65175
augaagaccaucauugcccugagcuacauccucugccugguguucgcucagaaacuucccggcaacgacaauuccacagccacgcugugucucgggcaccaugcggucccuaacggaaccauuguuaagacaaucaccaaugaucaaauugaggugacaaacgcuaccgaacuggugcagucuagcuccacaggcgggaucugcgacucuccgcaccagauccuugauggagagaauuguacccugauugacgcccuccugggcgauccccagugcgacggguuucaaaacaaaaagugggaucuguucgucgaaagaagcaaagccuauuccaauuguuacccuuaugacgugcccgauuacgcuucucuccggagccugguugccuccagcggaacgcuugaguuuaacaaugaaucuuucaacuggaccggcgugacacagaauggcaccuccagcgcuugcgagcgcagaucuaacaaguccuuuuucagccggcugaauuggcucacacaucugaaguauaaauacccugcccuuaacgucaccaugcccaauaacgagaaguuugacaaacuguauaucuggggagugcaccauccugggacggauucugaccagauuucccucuacgcgcaggccagcggccgcaucacaguuuccaccaagagaucucaacagacagugauuccgaacaucgggagccggccccgcgucagagauguguccagccggauuucuaucuacuggaccaucgugaaaccuggagacauucugcugaucaauuccaccggcaaccucauugcuccccgcggguauuucaagaucagaaauggaaagagcucuauuaugcggagcgacgccccuaucggcaaauguaacuccgaaugcaucacacccaauggcucuauuccgaacgauaagccuuuucagaaugucaaccgcaucacguacggggcuugucccagauauguuaaacagaauacccugaaacuugccacaggaaugcggaacgugccugagaaacaaacccgcggcauuuucggggcgaucgccggauuuauugaaaauggcugggaggggaugguggacggaugguacggcuucagacaccagaacagcgagggcacagggcaggcugccgaucugaaguccacccaagcugccaucaaucagaucaacggaaaacucaaucggcugauuggcaagacgaacgaaaaguuucaccagaucgagaaagaguucagcgaagucgaagggcgcauucaggaccuugagaaguauguggaggauacaaaaaucgaccuguggucuuacaacgccgaacuccugguugcucuggagaaucaacauaccauugaucucaccgacuccgaaaugaacaagcuguucgagagaacaaagaagcagcuucgggaaaaugcggaggauaugggaaacggcugcuuuaagaucuaucacaaaugugacaaugccugcauugggagcaucagaaacggcaccuacgaucaugacguguaccgcgacgaggcucugaauaaccgguuccagaucaagggagucgaacucaaaucuggcuauaaggauuggauucuguggaucuccuuugccauuagcugcuuccuucuguguguggcccuccugggguuuaucaugugggcuugccagaaaggaaauauuagaugugacaucugcaucuga

SEQ ID NO: 198829 - RNA, 1701 nt, Artificial Sequence; identical to SEQ ID NO: 192491
  derived and/or modified CDS sequence (opt5) from hemagglutinin__InfluenzaA__AEG65186

SEQ ID NO: 198830 - RNA, 1701 nt, Artificial Sequence
  derived and/or modified CDS sequence (opt5) from hemagglutinin__InfluenzaA__AEG65197
augaagaccaucauugcccugagcuacauccucugccugguguucgcucagaaacuucccggcaacgacaauuccacagccacgcugugucucgggcaccaugcggucccuaacggaaccauuguuaagacaaucaccaaugaucaaauugaggugacaaacgcuaccgaacuggugcagucuagcccgacaggcgggaucugcgacucuccccaccagauccuugauggagagaauuguacccugauugacgcccuccugggcgauccucagugcgacggguuucaaaacaaaaagugggaucuguucgucgaaagaucuaaagccuauagcaauuguuaccccuaugacgugccugauuacgcuucccuccggucucugguugccagcuccggaacgcuugaguuuaacaaugagagcuucaacuggaccggcgugacacagaauggcaccucuuccgcuugcaagcgcagaagcaacaauuccuuuuucucccggcugaacuggcucacacaucugaaguuuaaauaucccgcccuuaaugucaccaugccuaacaacgaaaaguucgacaaacuguacaucuggggagugcaccauccggggacggauaaugaccagauuagccucuaugcgcaggccucuggccgcaucacaguuuccaccaagagaagccaacagacagugauucccaacaucgggucccggccucgcgucagagauauucccucucggaucagcaucuacuggaccauugugaaaccuggagacaucauucugaucaauuccaccggcaaccugauugcuccccgcggguacuuuaagaucagaagcggaaagucuuccaucaugcggagcgacacaccgauuggcaaauguaauucugagugcaucacgccuaacggcagcauucccaaugauaagccuuuccagaacgugaaucgcaucaccuauggggccugucccagauacgucaaacagaacacacucaagcuggcuaccggaaugcggaauguucccgaaaaacaaacacgcggcauuuuuggggccaucgcgggauucaucgagaacggcugggaagggaugguggacggaugguauggcuuuagacaccaaaauuccgagggcauugggcaggccgcugaucuuaagucuacccaggccgcuaucaaccagauuaauggaaaacugaaccggcucaucggcaagacgaacgagaaguuccaccagauugaaaaagaguucagcgaaguggaggggagaauccaggaccuggaaaaguacgucgaggauacaaaaauugaccuuugguccuauaaugccgagcugcucguggcccuggaaaaccaacauaccaucgaucugaccgacagcgagaugaauaagcucuuugaacgcaccaaaaagcagcugcgggagaacgcugaagauaugggaaauggcugcuucaagaucuaccacaaaugugacaacgcgugcauugggucuaucagaaauggcacauaugaucaugacguuuaccgcgacgaggcccuuaacaaucgguuucagauuaagggaguggagcugaaauccggcuacaaggauuggauccucuggauuagcuucgcuaucucuugcuuucugcuuugugucgcccugcucggguucaucaugugggccugccagaaaggaaacauuagauguaauaucugcauuuga

SEQ ID NO: 198831 - RNA, 1701 nt, Artificial Sequence; identical to SEQ ID NO: 192702
  derived and/or modified CDS sequence (opt5) from hemagglutinin__InfluenzaA__AEG65208

SEQ ID NO: 198832 - RNA, 1701 nt, Artificial Sequence
  derived and/or modified CDS sequence (opt5) from hemagglutinin__InfluenzaA__AEG65219
augaagaccaucauugcccugagcuacauccucugccugguguucgcucagaaacuucccggcaacgacaauuccacagccacgcugugucucgggcaccaugcggucccuaacggaaccauuguuaagacaaucaccaaugaucaaauugaggugacaaacgcuaccgaacuggugcagucuagcuccacaggcgggaucugcgacucuccgcaccagauccuugauggagagaauuguacccugauugacgcccuccugggcgauccccagugcgacggguuucaaaacaaaaagugggaucuguucgucgaaagaagcaaagccuauuccaauuguuacccuuaugacgugcccgauuacgcuucucuccggagccugguugccuccagcggaacgcuugaguuuaacaaugaaucuuucaacuggaccggcgugacacagaauggcaccuccagcgcuugcaagcgcagaucuaacaaguccuuuuucagccggcugaauuggcucacacaucugaaauuuaaguauccugcccuuaacgucaccaugcccaauaacgagaaauucgacaagcuguacaucuggggagugcaccauccugggacggauaacgaccagauuucucucuaugcgcaggccuccggccgcaucacaguuagcaccaaaagaucccaacagacagugauuccgaauaucgggucucggccccgcgucagagaugugccuagccggauuuccaucuacuggaccaucgugaagcccggagacauucugcugaucaacagcaccggcaaucucauugcuccucgcggguacuuuaagaucagaucuggaaaauccagcauuaugcggucugacgcccccaucggcaaguguaacagcgagugcaucacaccgaauggcuccauuccuaacgauaaacccuuccagaaugucaaccgcaucacguauggggcuuguccuagauacguuaagcagaauacccugaaacuugccacaggaaugcggaacgugcccgaaaagcaaacccgcggcauuuuuggggcgaucgccggauucauugagaauggcugggaagggaugguggacggaugguauggcuuuagacaccagaacucugagggcacagggcaggcugccgaucugaaaagcacccaagcugccaucaaucagaucaacggaaagcucaaucggcugauuggcaagacgaacgagaaauuccaccagaucgaaaaggaguucuccgaagucgaggggcgcauucaggaccuugaaaaauacguggaggauacaaagaucgaccuguggagcuauaacgccgagcuccugguugcucuggaaaaucaacauaccauugaucucaccgacucugagaugaacaaacuguuugaaagaacaaagaagcagcuucgggagaaugcggaagauaugggaaacggcugcuucaaaaucuaccacaagugugacaaugccugcauuggguccaucagaaacggcaccuaugaucaugacguguaccgcgacgaggcucugaauaaccgguuucagaucaaaggagucgagcucaagagcggcuacaaagauuggauucuguggaucucuuucgccauuuccugcuuucuucuguguguggcccuccugggguucaucaugugggcuugccagaagggaaauauuaaguguaacaucugcaucuga

SEQ ID NO: 198833 - RNA, 1701 nt, Artificial Sequence; identical to SEQ ID NO: 193867
  derived and/or modified CDS sequence (opt5) from hemagglutinin__InfluenzaA__AEG65230

SEQ ID NO: 198834 - RNA, 1701 nt, Artificial Sequence; identical to SEQ ID NO: 193867
  derived and/or modified CDS sequence (opt5) from hemagglutinin__InfluenzaA__AEG65252

SEQ ID NO: 198835 - RNA, 1701 nt, Artificial Sequence; identical to SEQ ID NO: 192588
  derived and/or modified CDS sequence (opt5) from hemagglutinin__InfluenzaA__AEG65263

SEQ ID NO: 198836 - RNA, 1701 nt, Artificial Sequence; identical to SEQ ID NO: 192588
  derived and/or modified CDS sequence (opt5) from hemagglutinin__InfluenzaA__AEG65274

SEQ ID NO: 198837 - RNA, 1701 nt, Artificial Sequence; identical to SEQ ID NO: 192588
  derived and/or modified CDS sequence (opt5) from hemagglutinin__InfluenzaA__AEG65285

SEQ ID NO: 198838 - RNA, 1701 nt, Artificial Sequence
  derived and/or modified CDS sequence (opt5) from hemagglutinin__InfluenzaA__AEG65296
augaagaccgugaucgcccugagcuacauucucugccuggucuucgcucagaaacuucccggcaacgacaauuccacagccacgcugugucucgggcaccaugcgguuccuaacggaaccaucgugaagacaauuaccaaugaucaaaucgaggugacaaacgcuaccgaacugguccagucuagcuccacaggcgggauuugcgacucuccgcaccagauccuugauggagagaauuguacccugaucgacgcccuccugggcgauccccagugcgacggguuucaaaacaaaaagugggaucuguucguggaaagaagcaaagccuauuccaauuguuacccuuaugacguucccgaucaugcuucucuccggagccugguggccuccagcggaacgcuugaguuuaacaaugaaucuuucgacuggaccggcgucacacagaacggcaccuccagcgcuugcaagcgcagaucuaauaaguccuuuuucagccggcugaacuggcucacacaccugaaauacaaguauccugcccuuaaugugaccaugcccaacaaugagaaauuugauaagcuguacauuuggggaguucaucacccugggacggacucugaucagaucucccucuaugcgcaggccagcggccgcauuacaguguccaccaaaagaucucaacagacagucaucccgaacauugggagccggccccgcgugagagacguguccagccggaucucuauuuacuggaccaucgucaagccuggagacauccugcugauuaacuccaccggcaaucucaucgcuccccgcggguacuucaagauuagaagcggaaaaucuagcaucaugcgguccgaugccccuauuggcaaguguaacucugagugcaucacacccaauggcagcaucccgaacgacaaaccuuuucagaauguuaaccgcauuacguauggggcuugucccagauacgugaagcagaauacccugaaacuugccacaggaaugcggaacgugccugaaaagcaaacccgcggcaucuucggggcgauugccggauuuaucgagaauggcugggaagggauggucgauggaugguauggcuucagacaccagaacuccgagggcacagggcaggcugccgaccugaaaagcacccaagcugccauuaaucagaucaacggaaagcucaaucggcugaucggcaagacgaacgagaaauuucaucagauugaaaaggaguucucugaaguggaggggagaauccaggaucuugaaaaauacguugaggacacaaagauugaucugugguccuauaaugccgagcuccugguggcucuggaaaaccaacacaccaucgaccucaccgauagcgagaugaacaaacuguucgaacgcacaaagaagcagcuucgggagaaugcggaagacaugggaaacggcugcuuuaaaauuuaccauaagugugauaaugccugcaucgggucuauuagaaacggcaccuaugaccacgacgucuaccgcgaugaggcucugaauaaccgguuccagaucaaaggaguggagcucaaguccggcuacaaagacuggauccuguggauuagcuuugccaucuccugcuuccuucuguguguugcccuccugggguuuauuaugugggcuugccagaagggaaauaucagauguaacauuugcaucuga

SEQ ID NO: 198839 - RNA, 1701 nt, Artificial Sequence; identical to SEQ ID NO: 193867
  derived and/or modified CDS sequence (opt5) from hemagglutinin__InfluenzaA__AEG65307

SEQ ID NO: 198840 - RNA, 1701 nt, Artificial Sequence
  derived and/or modified CDS sequence (opt5) from hemagglutinin__InfluenzaA__AEG65318
augaagaccaucauugcccugagcuacauccucugccugguguucgcucagaaacuucccggcaacgacaauuccacagccacgcugugucucgggcaccaugcggucccuaacggaaccauuguuaagacaaucaccaaugaucaaauugaggugacaaacgcuaccgaacuggugcagucuagcuccacaggcgggaucugcgacucuccgcaccagauccuugauggagagaauuguacccugauugacgcccuccugggcgauccccagugcgacggguuucaaaacaaaaagugggaucuguucgucgaaagaagcaaagccuauuccaauuguuacccuuaugacgugcccgauuacgcuucucuccggagccugguugccuccagcggaacgcuugaguuuaacaaugaaucuuucaacuggaccggcgugacacagaauggcaccuccagcgcuugcaagcgcagaucuaacaaguccuuuuucagccggcugaauuggcucacacaucugaaauuuaaguauccugcccuuaacgucaccaugcccaauaacgagaaauucgacaagcuguacaucuggggagugcaccauccugggacggauaacgaccagauuucucucuaugcgcaggccuccggccgcaucacaguuagcaccaaaagaucccaacagacagugauuccgaauaucgggucucggccccgcgucagagaugugccuagccggauuuccaucuacuggaccaucgugaagcccggagacauucugcugaucaacagcaccggcaaucucauugcuccucgcggguacuuuaagaucagaucuggaaaauccagcauuaugcggucugacgcccccaucggcaaguguaacagcgagugcaucacaccgaauggcuccauuccuaacgauaaacccuuccagaaugucaaccgcaucacguauggggcuuguccuagauacguucggcagaauacccugaaacuugccacaggaaugcgcaacgugcccgaaaaacaaaccagaggcauuuuuggggcgaucgccggauucauugagaauggcugggaagggaugguggacggaugguauggcuuucggcaccagaacucugagggcacagggcaggcugccgaucucaagagcacccaagcugccaucaaucagaucaacggaaaacugaauagacugauuggcaagacgaacgagaaguuccaccagaucgaaaaagaguucuccgaagucgaggggcgcauucaggaccuugaaaaguacguggaggauacaaaaaucgaccuguggagcuauaacgccgagcuccugguugcucuggaaaaucaacauaccauugaucucaccgacucugagaugaacaagcuguuugaacggacaaagaagcagcuuagagagaaugcggaagauaugggaaacggcugcuucaagaucuaccacaaaugugacaaugccugcauuggguccauccgcaacggcaccuaugaucaugacguguaccgggacgaggcucugaauaacagauuucagaucaagggagucgagcucaaaagcggcuacaaggauuggauucuguggaucucuuucgccauuuccugcuuucuucuguguguggcccuccugggguucaucaugugggcuugccagaaaggaaauauucgcuguaacaucugcaucuga

SEQ ID NO: 198841 - RNA, 1701 nt, Artificial Sequence; identical to SEQ ID NO: 193867
  derived and/or modified CDS sequence (opt5) from hemagglutinin__InfluenzaA__AEG65329

SEQ ID NO: 198842 - RNA, 1701 nt, Artificial Sequence
  derived and/or modified CDS sequence (opt5) from hemagglutinin__InfluenzaA__AEG65340
augaagaccaucauugcccugagcuacauccucugccugguguucgcucagaaacuucccggcaacgacaauuccacagccacgcugugucucgggcaccaugcggucccuaacggaaccauuguuaagacaaucaccaaugaucaaauugaggugacaaacgcuaccgaacuggugcagucuagcuccacaggcgggaucugcgacucuccgcaccagauccuugauggagagaauuguacccugauugacgcccuccugggcgauccccagugcgacggguuucaaaacaaaaagugggaucuguucgucgaaagaagcaaagccuauuccaauuguuacccuuaugacgugcccgauuacgcuucucuccggagccugguugccuccagcggaacgcuugaguuuaacaaugaaucuuucaacuggaccggcgugacacagaauggcaccuccagcgcuugcgagcgcagaucuaacaaguccuuuuucagccggcugaauuggcucacacaucugaaguauaaauacccugcccuuaacgucaccaugcccaauaacgagaaguuugacaaacuguauaucuggggagugcaccauccugggacggauucugaccagauuucccucuacgcgcaggccagcggccgcaucacaguuuccaccaagagaucucaacagacagugauuccgaacaucgggagccggccccgcgucagagauguguccagccggauuucuaucuacuggaccaucgugaaaccuggagacauucugcugaucaauuccaccggcaaccucauugcuccccgcggguauuucaagaucagaagcggaaagucuagcauuaugcgguccgacgccccuaucggcaaauguaauucugaaugcaucacacccaacggcagcauuccgaaugauaagccuuuucagaacgucaaucgcaucacguacggggcuugucccagauauguuaaacagaacacccugaaacuugccacaggaaugcggaaugugccugagaaacaaacccgcggcauuuucggggcgaucgccggauuuauugaaaacggcugggaggggaugguggacggaugguacggcuucagacaccagaauagcgagggcacagggcaggcugccgaucugaaguccacccaagcugccaucaaccagaucaauggaaaacucaaccggcugauuggcaagacgaaugaaaaguuucaccagaucgagaaagaguucucugaagucgaagggcgcauucaggaccuugagaaguauguggaggauacaaaaaucgaccugugguccuacaacgccgaacuccugguugcucuggagaaccaacauaccauugaucucaccgacagcgaaaugaauaagcuguucgagagaacaaagaagcagcuucgggaaaacgcggaggauaugggaaauggcugcuuuaagaucuaucacaaaugugacaacgccugcauugagucuaucagaaaugggaccuacgaucaugacguguaccgcgacgaagcucugaacaaucgguuccagaucaagggcgucgagcucaaauccggauauaaggauuggauucuguggaucagcuuugccauuuccugcuuccuucuguguguggcccuccugggcuuuaucaugugggcuugccagaaagggaacauuagauguaauaucugcaucuga

SEQ ID NO: 198843 - RNA, 1701 nt, Artificial Sequence; identical to SEQ ID NO: 193867
  derived and/or modified CDS sequence (opt5) from hemagglutinin__InfluenzaA__AEG65351

SEQ ID NO: 198844 - RNA, 1701 nt, Artificial Sequence; identical to SEQ ID NO: 193867
  derived and/or modified CDS sequence (opt5) from hemagglutinin__InfluenzaA__AEG65362

SEQ ID NO: 198845 - RNA, 1701 nt, Artificial Sequence; identical to SEQ ID NO: 198842
  derived and/or modified CDS sequence (opt5) from hemagglutinin__InfluenzaA__AEG65373

SEQ ID NO: 198846 - RNA, 1701 nt, Artificial Sequence; identical to SEQ ID NO: 192588
  derived and/or modified CDS sequence (opt5) from hemagglutinin__InfluenzaA__AEG65384

SEQ ID NO: 198847 - RNA, 1701 nt, Artificial Sequence; identical to SEQ ID NO: 192588
  derived and/or modified CDS sequence (opt5) from hemagglutinin__InfluenzaA__AEG65406

SEQ ID NO: 198848 - RNA, 1701 nt, Artificial Sequence; identical to SEQ ID NO: 192588
  derived and/or modified CDS sequence (opt5) from hemagglutinin__InfluenzaA__AEG65417

SEQ ID NO: 198849 - RNA, 1701 nt, Artificial Sequence; identical to SEQ ID NO: 192588
  derived and/or modified CDS sequence (opt5) from hemagglutinin__InfluenzaA__AEG65428

SEQ ID NO: 198850 - RNA, 1701 nt, Artificial Sequence
  derived and/or modified CDS sequence (opt5) from hemagglutinin__InfluenzaA__AEG65439
augaagaccaucauugcccugagcuacauccucugccugguguucgcucagaaacuucccggcaacgacaauuccacagccacgcugugucucgggcaccaugcggucccuaacggaaccauuguuaagacaaucaccaaugaucaaauugaggugacaaacgcuaccgaacuggugcagucuagcuccacaggcgggaucugcgacucuccgcaccagauccuugauggagagaauuguacccugauugacgcccuccugggcgauccccagugcgacggguuucaaaacaaaaagugggaucuguucgucgaaagaagcaaagccuauuccaauuguuacccuuaugacgugcccgauuacgcuucucuccggagccugguugccuccagcggaacgcuugaguuuaacaaugaaucuuucaacuggaccggcgugacacagaauggcaccuccagcgcuugcaagcgcagaucuaacaauuccuuuuucagccggcugaacuggcucacacaucugaaguuuaaauauccugcccuuaaugucaccaugcccaacaacgagaaguucgacaaacuguacaucuggggagugcaccauccugggacggauaaugaccagauuuuucucuaugcgcaggccucuggccgcaucacaguuuccaccaagagaagccaacagacagugauuccgaacaucgggucccggccccgcgucagaaauauuccuucucggaucagcaucuacuggaccauugugaaacccggagauauccugcugauuaacuccaccggcaaucucaucgcuccucgcggguacuucaagauuagaagcggaaagucuuccaucaugcggagcgacgcccccaucggcaaauguaacucugagugcauuacaccgaauggcagcaucccuaacgacaagcccuuucagaaugugaaccgcauuacguauggggcuuguccuagauacgucaaacagaauacccugaaacuugccacaggaaugcggaacguucccgaaaagcaaacccgcggcaucuucggggcgauugccggauuuaucgagaauggcugggaagggaugguggauggaugguauggcuucagacaccagaacuccgagggcguggggcaggcugccgaccugaagucuacacaagcugccaucaaucagauuaacggaaaacucaaccggcugaucggcaagaccaaugagaaguuccaccagauugaaaaagaguuuagcgaagucgaggggagaauccaggaucuugaaaaguacguggaggacacgaaaauugaucugugguccuauaacgccgagcuccugguugcucuggaaaaucaacauacaaucgaccucaccgauagcgagaugaacaagcuguucgaacgcaccaaaaagcagcuucgggagaaugcggaagacaugggaaacggcugcuuuaagauuuaccacaaaugugauaaugccugcaucgggucuaucagaaacggcacauaugaccaugauguguaccgcgacgaggcucugaauaaccgguuccagauuaagggagucgagcucaaauccggcuacaaggacuggauccuguggauuagcuuugccaucucuugcuuccuucuguguguggcccuccugggguuuauuaugugggcuugccagaaaggaaauaucagauguaacaucugcauuuga

SEQ ID NO: 198851 - RNA, 1701 nt, Artificial Sequence
  derived and/or modified CDS sequence (opt5) from hemagglutinin__InfluenzaA__AEG65450
augaagaccaucauugccuggagcuacauccugugccucguguucgcucagaaacugcccggcaacgacaauuccacagccacgcuuugucuggggcaccaugcggucccuaacggaaccauuguuaagacaaucaccaaugaucaaauugaggugacaaacgcuaccgaacucgugcagucuagcuccacaggcgggaucugcgacucuccgcaccagauccuggauggagagaauuguacccuuauugacgcccugcucggcgauccccagugcgacggguuucaaaacaaaaagugggaucuguucgucgaaagaagcaaagccuauuccaauuguuacccuuaugacgugcccgauuacgcuucucugcggagccucaucgccuccagcggaacgcuggaguuuaacaaugaaucuuucaacuggaccggcguuacacagaauggcaccuccagcgcuugcaagcgcagaucuaacuccagcuuuuucucucggcuuaauuggcugacacaucucaaguuuaaauauccugcccugaacgugaccaugcccaauaacgaggaguucgacaaacuuuacauuuggggaguccaccauccugggacguauaacgaucagaucucccuguacgcgcaggccagcggccgcauuacaguguccaccaagagaucucaacagacaguuaucccgaauauugggagccggccccgcgugagagacaucccuucccggaucagcauuuacuggaccaucgucaagcccggagauauucuccugaucaacucuaccggcaaucugauugcuccucgcggguauuuuaaaaucagauccggaaagagcucuaucaugcggagcgacgcccccauuggcaaguguaacuccgaaugcaucacaccgaauggcucuauuccuaacgacaaacccuuccagaaugugaaccgcaucacguacggggcuuguccuagauaugugaagcagaauacccucaaacuggccacaggaaugcggaacguccccgagaagcaaacccgcggcauuuuuggggcgaucgccggauucaucgaaaauggcugggaggggaugguugauggaugguacggcuuuagacaccagaacagcgagggcauugggcaggcugccgaccuuaaauccacacaagcugccaucgaucagauuaauggaaagcugaaccggcucaucggcaaaaccaaugaaaaguuccaccagauugagaaggaguucagcgaaguggaagggagaauccaggaccuggagaaauauguggaggauacgaagauugaccuuuggucuuacaacgccgaacugcucgucgcucuggagaaccaacauacaaucgaucugaccgacuccgaaaugaauaaacucuuugagcgcaccaagaaacagcugcgggaaaacgcggaggauaugggaaauggcugcuucaagaucuaucacaagugugacaacgccugcauugggagcaucagaaauggcacauacgaucaugacguguaccgcgacgaggcucuuaacaaucgguuucagauuaaaggaguugaacugaagucuggcuauaaagauuggauccucuggauuuccuucgccaucagcugcuuucugcuuuguguggcccugcucggguucaucaugugggcuugccagaagggaaacauuagauguaauaucugcauuuga

SEQ ID NO: 198852 - RNA, 1701 nt, Artificial Sequence; identical to SEQ ID NO: 198851
  derived and/or modified CDS sequence (opt5) from hemagglutinin__InfluenzaA__AEG65461

SEQ ID NO: 198853 - RNA, 1701 nt, Artificial Sequence
  derived and/or modified CDS sequence (opt5) from hemagglutinin__InfluenzaA__AEG65472
augaagaccaucauugccuggagcuacauccugugccucguguucgcucagaaacugcccggcaacgacaauuccacagccacgcuuugucuggggcaccaugcggucccuaacggaaccauuguuaagacaaucaccaaugaucaaauugaggugacaaacgcuaccgaacucgugcagucuagcuccacaggcgggaucugcgacucuccgcaccagauccuggauggagagaauuguacccuuauugacgcccugcucggcgauccccagugcgacggguuucaaaacaaaaagugggaucuguucgucgaaagaagcaaagccuauuccaauuguuacccuuaugacgugcccgauuacgcuucucugcggagccucaucgccuccagcggaacgcuggaguuuaacaaugaaucuuucaacuggaccggcguuacacagaauggcaccuccagcgcuugcaagcgcagaucuaacuccagcuuuuucucucggcuuaauuggcugacacaucucaaguuuaaauauccugcccugaacgugaccaugcccaauaacgaggaguucgacaaacuuuacauuuggggaguccaccauccugggacguauaacgaucagaucucccuguacgcgcaggccagcggccgcauuacaguguccaccaagagaucucaacagacaguuaucccgaauauugggagccggccccgcgugagagacaucccuucccggaucagcauuuacuggaccaucgucaagcccggagauauucuccugaucaacucuaccggcaaucugauugcuccucgcggguauuuuaaaaucagauccggaaagagcucuaucaugcggagcgacgcccccauuggcaaguguaacuccgaaugcaucacaccgaauggcucuauuccuaacgacaaacccuuccagaaugugaaccgcaucacguacggggcuuguccuagauaugugaagcagaauacccucaaacuggccacaggaaugcggaacguccccgagaagcaaacccgcggcauuuuuggggcgaucgccggauucaucgaaaauggcugggaggggaugguugauggaugguacggcuuuagacaccagaacagcgagggcauugggcaggcugccgaccuuaaauccacacaagcugccaucgaucagauuaauggaaagcugaaccggcucaucggcaaaaccaaugaaaaguuccaccagauugagaaggaguucagcgaaguggaagggagaauccaggaccuggagaaauauguggaggauacgaagauugaccuuuggucuuacaacgccgaacugcucgucgcucuggagaaccaacauacaaucgaucugaccgacuccgaaaugaauaaacucuuugagaucaccaagaaacagcugcgcgaaaacgcggaggauaugggaaauggcugcuucaagauuuaucacaagugugacaacgccugcaucgggagcauucggaauggcacauacgaucaugacguguacagagacgaggcucuuaacaaucgcuuucagaucaaaggaguugaacugaagucuggcuauaaagauuggauucucuggaucuccuucgccaucagcugcuuucugcuuuguguggcccugcucggguucauuaugugggcuugccagaagggaaacauccgguguaauauuugcaucuga

SEQ ID NO: 198854 - RNA, 1701 nt, Artificial Sequence; identical to SEQ ID NO: 198851
  derived and/or modified CDS sequence (opt5) from hemagglutinin__InfluenzaA__AEG65483

SEQ ID NO: 198855 - RNA, 1701 nt, Artificial Sequence; identical to SEQ ID NO: 198851
  derived and/or modified CDS sequence (opt5) from hemagglutinin__InfluenzaA__AEG65494

SEQ ID NO: 198856 - RNA, 1701 nt, Artificial Sequence; identical to SEQ ID NO: 198851
  derived and/or modified CDS sequence (opt5) from hemagglutinin__InfluenzaA__AEG65505

SEQ ID NO: 198857 - RNA, 1701 nt, Artificial Sequence; identical to SEQ ID NO: 198851
  derived and/or modified CDS sequence (opt5) from hemagglutinin__InfluenzaA__AEG65516

SEQ ID NO: 198858 - RNA, 1701 nt, Artificial Sequence; identical to SEQ ID NO: 198851
  derived and/or modified CDS sequence (opt5) from hemagglutinin__InfluenzaA__AEG65527

SEQ ID NO: 198859 - RNA, 1701 nt, Artificial Sequence; identical to SEQ ID NO: 198851
  derived and/or modified CDS sequence (opt5) from hemagglutinin__InfluenzaA__AEG65538

SEQ ID NO: 198860 - RNA, 1701 nt, Artificial Sequence
  derived and/or modified CDS sequence (opt5) from hemagglutinin__InfluenzaA__AEG65560
augaagaccaucauugcccugagcuacauccucugccugguguucgcucagaaacuucccggcaacgacaauuccacagccacgcugugucucgggcaccaugcggucccuaacggaaccauuguuaagacaaucaccaaugaucaaauugaggugacaaacgcuaccgaacuggugcagucuagcuccacaggcgggaucugcgacucuccgcaccagauccuugauggagagaauuguacccugauugacgcccuccugggcgauccccagugcgacggguuucaaaacaaaaagugggaucuguucgucgaaagaagcaaagccuauuccaauuguuacccuuaugacgugcccgauuacgcuucucuccggagccugaucgccuccagcggaacgcuugaguuuaacaaugaaucuuucaacuggaccggcguuacacagaauggcaccuccagcgcuugcaagcgcagaucuaacuccagcuuuuucucucggcugaauuggcucacacaucugaaguuuaaauauccugcccuuaacgugaccaugcccaauaacgaggaguucgacaagcuguacauuuggggaguccaccauccugggacguauaacgaucagaucucccucuacgcgcaggccagcggccgcauuacaguguccaccaaaagaucucaacagacaguuaucccgaauauugggagccggccccgcgugagagacaucccuucccggaucagcauuuacuggaccaucgucaagcccggagauauucugcugaucaacucuaccggcaaucucauugcuccucgcggguauuuuaaaaucagauccggaaagagcucuaucaugaaaagcgacgcccccauuggcaaguguaacuccgaaugcaucacaccgaauggcucuauuccuaacgacaagcccuuccagaaugugaaccggaucacguacggggcuuguccucgcuaugugaaacagaauacccugaaacuugccacaggaaugagaaacguccccgagaagcaaacccggggcauuuuuggggcgaucgccggauucaucgaaaauggcugggaggggaugguugauggaugguacggcuuucgccaccagaacagcgagggcauugggcaggcugccgaccugaaguccacacaagcugccaucgaucagauuaauggaaaacucaacagacugaucggcaagaccaaugaaaaguuccaccagauugagaaagaguucagcgaaguggaagggcggauccaggaccuugagaaguauguggaggauacgaaaauugaccuguggucuuacaacgccgaacuccuggucgcucuggagaaccaacauacaaucgaucucaccgacuccgaaaugaauaagcuguuugagagaaccaaaaagcagcuucgcgaaaacgcggaggauaugggaaauggcugcuucaagaucuaucacaaaugugacaacgccugcauugggagcauccggaauggcacauacgaucaugacguguacagagacgaggcucugaacaaucgcuuucagauuaagggaguugaacucaaaucuggcuauaaggauuggauccuguggauuuccuucgccaucagcugcuuucuucuguguguggcccuccugggguucaucaugugggcuugccagaaaggaaacauucgguguaauaucugcauuuga

SEQ ID NO: 198861 - RNA, 1701 nt, Artificial Sequence; identical to SEQ ID NO: 198860
  derived and/or modified CDS sequence (opt5) from hemagglutinin__InfluenzaA__AEG65571

SEQ ID NO: 198862 - RNA, 1701 nt, Artificial Sequence; identical to SEQ ID NO: 198860
  derived and/or modified CDS sequence (opt5) from hemagglutinin__InfluenzaA__AEG65582

SEQ ID NO: 198863 - RNA, 1701 nt, Artificial Sequence; identical to SEQ ID NO: 198860
  derived and/or modified CDS sequence (opt5) from hemagglutinin__InfluenzaA__AEG65593

SEQ ID NO: 198864 - RNA, 1701 nt, Artificial Sequence
  derived and/or modified CDS sequence (opt5) from hemagglutinin__InfluenzaA__AEG65604
augaagaccaucauugcccugagcuacauccucugccugguguucgcucagaaacuucccggcaacgacaauuccacagccacgcugugucucgggcaccaugcggucccuaacggaaccauuguuaagacaaucaccaaugaucaaauugaggugacaaacgcuaccgaacuggugcagucuagcuccacaggcgggaucugcgacucuccgcaccagauccuugauggagagaauuguacccugauugacgcccuccugggcgauccccagugcgacggguuucaaaacaaaaagugggaucuguucgucgaaagaagcaaagccuauuccaauuguuacccuuaugacgugcccgauuacgcuucucuccggagccugaucgccuccagcggaacgcuugaguuuaacaaugaaucuuucaacuggaccggcguuacacagaauggcaccuccagcgcuugcaagcgcagaucuaacaauuccuuuuucagccggcugaacuggcucacacaucugaaguuuaaauauccugcccuuaaugugaccaugcccaacaacgaggaguucgacaagcuguacauuuggggaguccaccauccugggacggauaaugaccagaucucucucuaugcgcaggccuccggcaaaauuacagugagcaccaagcgcucccaacagacaguuaucccgaacauugggucuagaccccgggugcgcgauaucccuagcagaaucuccauuuacuggaccaucgucaaacccggagacauucugcugaucaauagcaccggcaaccucauugcuccucggggguacuuuaagauccgcucuggaaaguccagcaucaugagaucugacgcccccauuggcaaauguaauagcgaaugcaucacaccgaacggcuccauuccuaaugauaagcccuuccagaacgugaaucggaucacguauggggcuuguccucgcuacgugaaacagaacacccugaagcuggccacaggaaugagaaauguccccgagaaacaaacccggggcauuuuuggggcgaucgccggauucaucgaaaacggcugggaggggaugguugacggaugguauggcuuucgccaccaaaauucugagggcauugggcaggcugccgaucuuaagagcacacaggcugccaucgaccagauuaacggaaaacucaauagacugaucggcaagaccaacgaaaaguuccaccagauugagaaagaguucuccgaaguggaagggcggauccaggaucuugagaaguacguggaggacacgaaaauugaucuguggagcuauaacgccgaacuccuggucgcucuggagaaucaacauacaaucgaccucaccgauucugaaaugaacaagcuguuugagagaaccaaaaagcagcuucgcgaaaaugcggaggacaugggaaacggcugcuucaagaucuaccacaaaugugauaaugccugcauuggguccauccggaacggcacauaugaccaugacguguacagagaugaggcucugaauaaccgcuuucagauuaagggaguugaacucaaaagcggcuacaaggacuggauccuguggauuucuuucgccaucuccugcuuucuucuguguguggcccuccugggguucaucaugugggcuugccagaaaggaaauauucgguguaacaucugcauuuga

SEQ ID NO: 198865 - RNA, 1701 nt, Artificial Sequence
  derived and/or modified CDS sequence (opt5) from hemagglutinin__InfluenzaA__AEG65626
augaagaccaucauugcccugagcuacauccucugccugguguucgcucagaaacuucccggcaacgacaauuccacagccacgcugugucucgggcaccaugcggucccuaacggaaccauuguuaagacaaucaccaaugaucaaauugaggugacaaacgcuaccgaacuggugcagucuagcuccacaggcgggaucugcgacucuccgcaccagauccuugauggagagaauuguacccugauugacgcccuccugggcgauccccagugcgacggguuucaaaacaaaaagugggaucuguucgucgaaagaagcaaagccuauuccaauuguuacccuuaugacgugcccgauuacgcuucucuccggagccugguugccuccagcggaacgcuugaguuuaacaaugaaucuuucaacuggaccggcgugacacagaauggcaccuccagcgcuugcaagcgcaagucuaacaauuccuuuuucagcagacugaacuggcucacacaucugaaauuuaaguauccugcccuuaaugucaccaugcccaacaacaaaaaguucgacaaacuguacaucuggggagugcaccauccugggacggauaaugaccagauuucucucuaugcgcaggccuccggccggaucacaguuagcaccaagcgcucccaacagacagugauuccgaacaucgggucuagaccccggguccgcgauauuccuagcagaaucuccaucuacuggaccauugugaagcccggagacaugcugcugaucaauagcaccggcaaccucauugcuccucggggguacuuuaaaauccgcucuggaaaguccagcauuaugagaucugacgcccccaucggcaaauguaauagcgagugcaucacaccgaacggcuccauuccuaaugauaagcccuuccagaacgugaaucggaucacguauggggcuuguccucgcuacgucaaacagaacacccugaagcuggccacaggaaugagaaauguucccgagaaacaaacccggggcauuuuuggggcgaucgccggauucauugaaaacggcugggaggggaugguggacggaugguauggcuuucgccaccaaaauucugaaggcacagggcaggcugccgaucuuaagagcacccaggcugccaucaaccagaucaauggaaagcucaacagacugauuggcaaaacgaacgagaaguuccaccagaucgagaaagaguucuccgaaguggaagggcggauucaggaccuugagaaguacgucgaagauacaaaaaucgaccuguggagcuauaaugccgagcuccugguggcucuggagaaccaacauaccauugaucucaccgacucugaaaugaauaagcuguuugagagaacaaagaaacagcuucgcgaaaacgcggaggauaugggaaauggcugcuucaagaucuaccacaaaugugacaacgccugcauuggguccauccggaauggcaccuaugaucaugacguuuacagagacgaagcucugaacaaucgcuuucagaucaagggaguggagcucaaaagcggcuacaaggauuggauucuguggaucucuuucgccauuuccugcuuucuucugugugucgcccuccugggguucaucaugugggcuugccagaagggaaacauucgguguaauaucugcaucuga

SEQ ID NO: 198866 - RNA, 1701 nt, Artificial Sequence
  derived and/or modified CDS sequence (opt5) from hemagglutinin__InfluenzaA__AEG65637
augaagaccaucauugcccugagcuacauccucugccugguguucgcucagaaacuucccggcaacgacaauuccacagccacgcugugucucgggcaccaugcggucccuaacggaaccauuguuaagacaaucaccaaugaucaaauugaggugacaaacgcuaccgaacuggugcagucuagcuccacaggcgggaucugcgacucuccgcaccagauccuugauggagagaauuguacccugauugacgcccuccugggcgauccccagugcgacggguuucaaaacaaaaagugggaucuguucgucgaaagaagcaaagccuauuccaauuguuacccuuaugacgugcccgauuacgcuucucuccggagccugguugccuccagcggaacgcuugaguuuaacaaugaaucuuucaacuggaccggcgugacacagaauggcaccuccagcgcuugcaagcgcaagucuaacaauuccuuuuucagcagacugaacuggcucacacaucugaaauuuaaguauccugcccuuaaugucaccaugcccaacaacaaaaaguucgacaaacuguacaucuggggagugcaccauccugggacggauaaugaccagauuucucucuaugcgcaggccuccggccggaucacaguuagcaccaagcgcucccaacagacagugauuccgaacaucgggucuagaccccggguccgcgauauuccuagcagaaucuccaucuacuggaccauugugaagcccggagacaugcugcugaucaauagcaccggcaaccucauugcuccucggggguacuuuaaaauccgcucuggaagauccagcauuaugcggucugacgcccccaucggcaaguguaauagcgagugcaucacaccgaacggcuccauuccuaaugauaaacccuuccagaacgugaaucgcaucacguauggggcuuguccuagauacgucaagcagaacacccugaaacuugccacaggaaugcggaauguucccgagaagcaaacccgcggcauuuuuggggcgaucgccggauucauugaaaacggcugggaggggaugguggacggaugguauggcuuuagacaccaaaauucugaaggcacagggcaggcugccgaucugaaaagcacccaggcugccaucaaccagaucaauggaaagcucaaccggcugauuggcaagacgaacgagaaauuccaccagaucgagaaggaguucuccgaaguggaagggcgcauucaggaccuugagaaauacgucgaagauacaaagaucgaccuguggagcuauaaugccgagcuccugguggcucuggagaaccaacauaccauugaucucaccgacucugaaaugaauaaacuguuugagagaacaaagaagcagcuucgggaaaacgcggaggauaugggaaauggcugcuucaaaaucuaccacaagugugacaacgccugcauuggguccaucagaaauggcaccuaugaucaugacguuuaccgcgacgaagcucugaacaaucgguuucagaucaaaggaguggagcucaagagcggcuacaaagauuggauucuguggaucucuuucgccauuuccugcuuucuucugugugucgcccuccugggguucaucaugugggcuugccagaagggaaacauuagauguaauaucugcaucuga

SEQ ID NO: 198867 - RNA, 1701 nt, Artificial Sequence; identical to SEQ ID NO: 192103
  derived and/or modified CDS sequence (opt5) from hemagglutinin__InfluenzaA__AEG65648

SEQ ID NO: 198868 - RNA, 1701 nt, Artificial Sequence; identical to SEQ ID NO: 193867
  derived and/or modified CDS sequence (opt5) from hemagglutinin__InfluenzaA__AEG65659

SEQ ID NO: 198869 - RNA, 1701 nt, Artificial Sequence; identical to SEQ ID NO: 193867
  derived and/or modified CDS sequence (opt5) from hemagglutinin__InfluenzaA__AEG65670

SEQ ID NO: 198870 - RNA, 1701 nt, Artificial Sequence; identical to SEQ ID NO: 193867
  derived and/or modified CDS sequence (opt5) from hemagglutinin__InfluenzaA__AEG65681

SEQ ID NO: 198871 - RNA, 1701 nt, Artificial Sequence; identical to SEQ ID NO: 198842
  derived and/or modified CDS sequence (opt5) from hemagglutinin__InfluenzaA__AEG65692

SEQ ID NO: 198872 - RNA, 1701 nt, Artificial Sequence; identical to SEQ ID NO: 192702
  derived and/or modified CDS sequence (opt5) from hemagglutinin__InfluenzaA__AEG65703

SEQ ID NO: 198873 - RNA, 1701 nt, Artificial Sequence
  derived and/or modified CDS sequence (opt5) from hemagglutinin__InfluenzaA__AEG65747
augaagaccaucauugcccugagcuacauccucugccugguguucgcucagaaacuucccggcaacgacaauuccacagccacgcugugucucgggcaccauaccgucccuaacggaacaauuguuaagaccaucacaaaugaucaaauugaggugaccaacgcgacagaacuggugcagucuagcuccaccggcgagaucugcgacucuccgcaccagauccuugauggggaaaauuguacgcugauugacgcucuccugggagauccccagugcgacggcuuucaaaacaaaaagugggaucuguucgucgagagaagcaaagccuauuccaauuguuacccuuaugacgugcccgauuacgccucucuccggagccugguugcuuccagcgggacccuugaauuuaacaaugagucuuucaacuggacaggagugacccagaauggcacauccagcgccugcaagcgcagaucuaacaauuccuuuuucagccggcugaacuggcucacccaucugaaguuuaaauauccugcucuuaaugucacgaugcccaacaacgagaaguucgacaaacuguacaucuggggcgugcaccauccugggacagauaaugaccagauuuuucucuaugcccaggcgucuggacgcaucaccguuuccacaaagagaagccaacagaccgugauuccgaacaucggcucccggccccgcgucagaaauauuccuucucggaucagcaucuacuggaccauugugaaacccggggauauccugcugauuaacuccacaggaaaucucaucgccccucgcggcuacuucaagauuagaagcgggaagucuuccaucaugcggagcgacgcucccaucggaaaauguaacucugaaugcauuacgccgaauggcagcaucccuaacgacaagcccuuucagaaugugaaccgcauuaccuauggcgccuguccuagauacgucaaacagaauacacugaaacuugcuaccgggaugcggaacguucccgagaagcaaacacgcggaaucuucggcgccauugcgggguuuaucgaaaauggaugggagggcaugguggaugggugguauggauucagacaccagaacuccgagggcaccggccaggccgcugaccugaagucuacgcaagccgcuaucaaucagauuaacgggaaacucaaccggcugaucggaaagacaaaugaaaaguuccaccagauugagaaagaauuuagcgagguggaaggcagaauccaggaucuugagaaguacgucgaggacaccaaaauugaucugugguccuauaacgccgaacuccugguggcccuggagaaucaacauaccaucgaccucacagauagcgaaaugaacaagcuguucgagcgcaccaaaaagcagcuucgggaaaaugcugaggacauggggaacggaugcuuuaagauuuaccacaaaugugauaaugcgugcaucggcucuaucagaaacgggacauaugaccaugauguuuaccgcgacgaggcccugaauaaccgguuccagauuaagggcguggaacucaaauccggauacaaggacuggauccuguggauuagcuuugcuaucucuugcuuccuucugugugucgcccuccugggcuuuauuaugugggccugccagaaagggaauaucagauguaacaucugcauuuga

SEQ ID NO: 198874 - RNA, 1701 nt, Artificial Sequence
  derived and/or modified CDS sequence (opt5) from hemagglutinin__InfluenzaA__AEG65758
augaagaccaucauugcccugagcuacauccucugccugguguccgcucagaaacuucccggcaacgacaauucuacagccacgcugugucucgggcaccaugcggucccuaacggaaccauuguuaagacaaucaccaaugaucaaauugaggugacaaacgcuaccgaacuggugcagagcuccucuacaggcgggaucugcgacagcccgcaccagauccuugauggagagaauuguacccugauugacgcccuccugggcgauccccagugcgacggguuccaaaacaaaaagugggaucuguuugucgaaagauccaaagccuauucuaauuguuacccuuaugacgugcccgauuacgcuagccuccggucccugguugccagcucuggaacgcuugaguucaacaaugaauccuuuaacuggaccggcgugacacagaauggcaccagcucugcuugcaagcgcagauccaacaauagcuucuuuucucggcugaacuggcucacacaucugaaguucaaauauccugcccuuaaugucaccaugcccaacaacgagaaguuugacaaacuguacaucuggggagugcaccauccugggacggauaaugaccagauuuuccucuaugcgcaggccuccggccgcaucacaguuagcaccaagagaucccaacagacagugauuccgaacaucgggucucggccccgcgucagaaauauuccuagccggaucuccaucuacuggaccauugugaaacccggagauauccugcugauuaacagcaccggcaaucucaucgcuccucgcggguacuuuaagauuagaucuggaaaguccagcaucaugcggucugacgcccccaucggcaaauguaacagcgagugcauuacaccgaauggcuccaucccuaacgacaagcccuuccagaaugugaaccgcauuacguauggggcuuguccuagauacgucaaacagaauacccugaagcuggccacaggaaugcggaacguucccgaaaaacaaacccgcggcaucuuuggggcgauugccggauucaucgagaauggcugggaagggaugguggauggaugguauggcuuuagacaccagaacucugagggcaucgggcaggcugccgaccuuaagagcacacaagcugccauuaaucagaucaacggaaaacucaaccggcugauuggcaagaccaaugagaaguuccaccagaucgaaaaagaguucuccgaaguggaggggcgcauucaggaucuugaaaaguacgucgaggacacgaaaaucgaucuguggagcuauaacgccgagcuccugguggcucuggaaaaucaacauacaauugaccucaccgauucugagaugaacaagcuguuugaaagaaccaaaaagcagcuucgggagaaugcggaagacaugggaaacggcugcuucaagaucuaccacaaaugugauaaugccugcaucggguccauuagaaacggcacauaugaccaugauguuuaccgcgacgaggcucugaauaaccgguuucagaucaagggaguggagcucaaaagcggcuacaaggacuggauucuguggaucucuuucgccauuuccugcuuucuucugugugucgcccuccugggguucaucaugugggcuugccagaaaggaaauaucagauguaacauuugcaucuga

SEQ ID NO: 198875 - RNA, 1701 nt, Artificial Sequence; identical to SEQ ID NO: 192353
  derived and/or modified CDS sequence (opt5) from hemagglutinin__InfluenzaA__AEG65769

SEQ ID NO: 198876 - RNA, 1701 nt, Artificial Sequence
  derived and/or modified CDS sequence (opt5) from hemagglutinin__InfluenzaA__AEG65780
augaagaccaucauugcccugagcuacauccucugccugguguucgcucagaaacuucccggcaacgacaauuccacagccacgcugugucucgggcaccaugcggucccuaacggaaccauuguuaagacaaucaccaaugauaaaauugaggugacaaacgcuaccgaacuggugcaaucuagcuccacaggcgagaucugcaauucuccgcaccagauccuugacggggaaaacuguacccugauugaugcccuccugggagacccccagugcgauggcuuucagaauaagaaaugggaccuguucgucgagagaagcaaggcccauuccaacuguuauccuuacgaugugcccgacuaugcuucucuccggagccugguugccgcuuccgggacgcuugaauuuaauaacgagagcuucaauuggaccggagugacacaaaacggcaccucuuccgccugcauccgcagaagcaauaacuccuuuuucucucggcugaauuggcucacacaccugaacuuuaaguacccugcgcuuaacgucaccaugcccaauaacgagcaguucgauaaacuguauauuuggggcgugcaucacccugggacggacaaggaucagaucuuucucuacgcccaggcugccggacgcauuacaguuagcaccaaaagaucucaacaggcugugaucccgaauauuggcucccggccccgcgucagaaacaucccuagccggguguccaucuauuggacaauugugaagcccggggacauccugcugauuaauucuaccggaaaccucaucgccccucgcggcuacuucaaaauuagaagcgggaaguccagcaucaugcggucugaugcgcccaucggaaaguguaauuccgccugcauuaccccgaacggcagcaucccuaaugacaaacccuuucagaacgucaaucgcauuacauacggcgcuuguccuagauauguuaagcagaacacgcugaaacuugccaccgggaugcggaaugugcccgaaaagcaaacacgcggaaucuucggcgcuauugccggguuuaucgagaacggaugggaaggcaugguggacgggugguacggauucagacaccaaaauucugagggccggggccaggccgcugaucugaaaagcacccaggcggccaucgaccagauuaacgggaagcucaacagacugaucggaaaaacaaaugagaaguuccaucagauugaaaaggaguuuuccgaagucgagggccgcauccaggaucuugaaaaauauguggaggacaccaagauugaucuguggucuuacaacgcugagcuccugguugcccuggaaaaucaacacacgaucgaccucacagauagcgagaugaacaaacuguucgaaaagaccaaaaagcagcuucgggagaaugccgaagacauggggaacggaugcuuuaagauuuaucauaaaugugauaaugcuugcaucggcuccaucagaaacgggaccuacgaccacgauguguaucgcgacgaggcccugaauaaccgguuccagauuaagggcgucgagcucaaaagcggauacaaggacuggauccuguggauuucuuuugcgaucuccugcuuccuucuguguguggcucuccugggcuuuauuaugugggccugccagaaagggaauaucagauguaacaucugcauuuga

SEQ ID NO: 198877 - RNA, 1701 nt, Artificial Sequence
  derived and/or modified CDS sequence (opt5) from hemagglutinin__InfluenzaA__AEG65813
augaagaccaucauugcccugagcuacauccucugccugguguucgcucagaaacuucccggcaacgacaauuccacagccacgcugugucucgggcaccaugcggucccuaacggaaccauuguuaagacaaucaccaaugaucaaauugaggugacaaacgcuaccgaacuggugcagucuagcuccacaggcgagaucugcaauucuccgcaccagauccuugacggggaaaacuguacccugauugaugcccuccugggagacccccagugcgauggcuuucaaaauaaaaagugggaccuguucgucgagagaagcaaagcccauuccaacuguuauccuuacgaugugcccgacuaugcuucucuccggagccugguugccuccagcgggacgcuugaauuuaauaacgagucuuucaauuggaccggagugacacagaacggcaccuccagcgcuugcauccgcagaucuaauaacuccuuuuucagccggcugaauuggcucacacaccugaacuuuaaguacccugcccuuaacgucaccaugcccaauaacgagcaguucgauaagcuguauauuuggggcgugcaucacccugggacggacaaagaucagaucuuucucuacgcgcaagccgcuggacgcauuacaguuucuaccaagagaucccagcaggccgugaucccgaauauuggcagccggccccgcgucagaaacaucccuucccgggugucuaucuauuggacaauugugaaacccggggacauccugcugauuaauagcaccggaaaccucaucgcuccucgcggcuacuucaagauuagauccgggaaaagcucuaucaugcgguccgaugcccccaucggaaaguguaauagcgcgugcauuaccccgaacggcucuaucccuaaugacaagcccuuucagaacgucaaucgcauuacauacggcgccuguccuagauauguuaaacaaaacacgcugaaacuugcuaccgggaugcggaaugugcccgaaaaacagacacgcggaaucuucggcgccauugcuggguuuaucgagaacggaugggaaggcaugguggacgggugguacggauucagacaccagaauagcgagggccggggccaagccgccgaucugaaguccacccaggcugcgaucgaccagauuaacgggaaacucaacagacugaucggaaagacaaaugagaaauuccaucagauugaaaaggaguuuucugaagucgagggccgcauccaagaucuugaaaaguauguggaggacaccaaaacggaucuguggagcuacaacgccgagcuccugguugcucuggaaaaucagcacacaauugaccucaccgauuccgagaugaacaagcuguucgaaaagaccaagaaacagcuucgggagaaugccgaagacauggggaacggaugcuuuaagaucuaucauaagugugauaaugccugcauuggcagcaucagaaacgggacauacgaccacgauguguaucgcgacgaggcucugaauaaccgguuccagaucaaaggcgucgagcucaagucuggauacaaagacuggauucuguggaucuccuuugccauuagcugcuuccuucuguguguggcgcuccugggcuuuaucaugugggcuugccaaaaggggaauauuagauguaacaucugcaucuga

SEQ ID NO: 198878 - RNA, 1701 nt, Artificial Sequence
  derived and/or modified CDS sequence (opt5) from hemagglutinin__InfluenzaA__AEG79801
augaaggccauccuggugguccuccuguacaccuucgcuacagccaacgcggacacgcuuugcauuggcuaucacgcuaauaacagcaccgauacaguugacaccgugcuggagaaaaaugugacagucacccauuccgugaaccuccuggaagauaagcacaaugggaaacuuuguaagcugagaggaguugcuccccuccaucugggcaaaugcaacaucgccggguggauucugggaaauccugagugugaaucucucagcacagccuccucuuggagcuacaucguggagaccuccucuagcgacaacggcacgugcuauccgggggauuuuauuaauuacgaagaacugcgggagcagcuuuccagcgucucuuccuucgaacgcuuugagaucuuccccaagaccagcucuuggccuaaccacgacuccaauaagggagugacagccgcuuguccccaugccggcgcgaaaucuuuuuauaagaaccugaucuggcucguuaaaaagggcaauagcuacccuaaacuguccaagagcuauauuaacgauaaggggaaagaagugcuuguccuguggggaauccaccaccccuccaccacagccgaccaacagucucucuaccagaaugcugaugccuacguguucgugggcaccagcagauauuccaagaaauuuaagccugagauugcuauccggccgaaaguccgcgacagagaggggcggaugaacuacuauuggacgcugguugaacccggagauaagauuacauucgaggccaccggcaaccugguggugccucgcuacgcguuugccauggaaagaaaugcugggagcggaaucauuaucucugacacacccguccaugauugcaacaccaccugucagacaccuaaaggcgccaucaauacgucccuccccuuccaaaacauucacccgaucaccauuggcaagugcccuaaguaugugaaaagcacaaagcugcggcuugcuaccgggcugcgcaauguucccucuauccagagcagaggacucuuuggcgccauugccggguucaucgagggaggcuggacagggaugguggacggaugguacggcuaucaucaccagaacgaacagggcuccggguacgcugcggaccugaaaucuacccaaaaugccaucgauaagauuacgaacaaagucaauagcgugaucgagaagaugaacacacaguuuaccgcuguuggaaaggaguucaaucaccuugaaaaacggauugagaaccugaauaagaaaguggacgauggcuuccucgacaucuggaccuacaacgccgaacugcugguccuccuggagaaugaacgcacacuugauuaucaugacuccaacgugaagaaccuguacgagaaagucagaaaucagcucaagaacaaugccaaggagauugggaacggauguuuugaguucuaucacaaaugcgauaauaccuguauggagagcgugaagaacggcacauacgacuauccuaaauacucugaagaggcuaagcugaaucgggaagagaucgaugggguuaaacuugaguccacgcgcaucuaucagauucuggccaucuacagcaccguggcgucuucccucguccuggugguuagccugggcgcuauuuccuuuuggaugugcucuaacggaagccuccaaugcagaaucuguauuuga

SEQ ID NO: 198879 - RNA, 1701 nt, Artificial Sequence
  derived and/or modified CDS sequence (opt5) from hemagglutinin__InfluenzaA__AEG79807
augaaggccauccuggugguccuccuguacaccuucgcuacagccaacgcggacacgcuuugcauuggcuaucacgcuaauaacagcaccgauacaguugacaccgugcuggagaaaaaugugacagucacccauuccgugaaccuccuggaagauaagcacaaugggaaacuuuguaagcugagaggaguugcuccccuccaucugggcaaaugcaacaucgccggguggauucugggaaauccugagugugaaucucucagcacagccuccucuuggagcuacaucguggagaccuccucuagcgacaacggcacgugcuauccgggggauuuuauuaauuacgaagaacugcgggagcagcuuuccagcgucucuuccuucgaacgcuuugagaucuuccccaagaccagcucuuggccuaaccacgacuccaauaagggagugacagccgcuuguccccaugccggcgcgaaaucuuuuuauaagaaccugaucuggcucguuaaaaaggaaaauagcuacccuaaacuguccaagagcuauauuaacgauaagggcaaagaggugcuuguccugugggggauccaccaccccuccaccacagccgaccaacagucuauuuaccagaaugcugaugccuacguguucgugggaaccagcagauauuccaagaaauuuaagccugagaucgcuauucggccgaaaguccgcgaccaggaaggcagaaugaacuacuauuggacgcucguugagcccggggauaagaucacauucgaagccaccggaaaccugguggugccucgguacgcguuugccauggagcgcaaugcuggcagcgggauuaucaucucugacacacccguccaugauugcaacaccaccugucaaacaccuaaaggagccauuaauacgucccugcccuuccagaacauccacccgauuaccaucggcaagugcccuaaguaugugaaaagcacaaagcucagacuggcuaccggccuucggaauguucccucuauucagagccgcgggcuguuuggagccaucgccggcuucaucgaagggggauggacaggcaugguggacgggugguacggauaucaucaccagaacgagcaaggcuccggcuacgcugcggaccucaaaucuacccagaaugccauugauaagaucacgaacaaagucaauagcgugauugagaagaugaacacacaguuuaccgcuguugggaaggaguucaaucaccuggagaaaagaaucgaaaaccuuaauaagaaaguggacgauggauuccuggacauuuggaccuacaacgccgagcuccugguccugcucgaaaaugagcggacacuggauuaucaugacuccaacgugaagaaccuuuacgagaaaguccgcaaucagcugaagaacaaugccaaggaaaucggcaacggguguuuugaguucuaucacaaaugcgauaauaccuguauggaaagcgugaagaacggaacauacgacuauccuaaauacucugaggaagcuaagcucaauagagaggagaucgauggcguuaaacuggaauccacgcggauuuaucaaauccuugccauuuacagcaccguggcgucuucccugguccucgugguuagccugggggcuaucuccuuuuggaugugcucuaacggcagccugcagugccgcauuuguaucuga

SEQ ID NO: 198880 - RNA, 1701 nt, Artificial Sequence
  derived and/or modified CDS sequence (opt5) from hemagglutinin__InfluenzaA__AEG79835
augaaggccauccuggugguccuccuguacaccuucgcuacagccaacgcggacacgcuuugcauuggcuaucacgcuaauaacagcaccgauacaguugacaccgugcuggagaaaaaugugacagucacccauuccgugaaccuccuggaagauaagcacaaugggaaacuuuguaagcugagaggaguugcuccccuccaucugggcaaaugcaacaucgccggguggauucugggaaauccugagugugaaucucucagcacagccuccucuuggagcuacaucguggagaccuccucuagcgacaacggcacgugcuauccgggggauuuuauugacuacgaagaacugcgggagcagcuuuccagcgucucuuccuucgaacgcuuugagaucuuccccaagaccagcucuuggccuaaucacgauuccaacaagggagugacagccgcuuguccccaugccggcgcgaaaggcuuuuauaagaaucugaucuggcucguuaaaaaggggaacagcuacccuaaacugucuaaguccuauauuaaugacaagggaaaagaagugcuuguccuguggggcauccaccaccccagcaccacagccgaucaacaguccauuuaccagaacgcugacaccuacguguucguggggacgucuagauauagcaagaaauuuaagccugagaucgccauucggccgaaaguccgcgaucaggagggaagaaugaauuacuauuggacacucguugaacccggcgacaagaucaccuucgaggcuacagggaaccugguggugccucgguacgccuuugcgauggaacgcaacgccggauccggcauuaucaucagcgauacccccguccaugacugcaauaccacaugucaaacgccuaaaggcgcuauuaacaccucucugcccuuccagaauauccacccgauuacaaucgggaagugcccuaaguaugugaaauccaccaagcucagacuggccacaggacuucggaacguucccagcauucagucucgcggccuguuuggggcuaucgccggauucaucgagggcggguggaccggaaugguggacggcugguacggcuaucaucaccagaaugaacaagggagcggauacgccgcugaucucaaauccacgcagaacgcgauugacaagaucacaaauaaagucaacucugugauugagaagaugaauacccaguuuaccgccguuggcaaggaguucaaccaccuggagaaaagaaucgagaaucuuaacaagaaaguggaugacggguuccuggauauuuggacauacaaugcugaacuccugguccugcucgagaacgaacggacccuggacuaucaugauagcaaugugaagaaccuuuacgagaaaguccgcaaccagcugaagaauaacgccaaggagaucggaaauggcuguuuugaguucuaucacaaaugcgacaacacauguauggaauccgugaagaaugggacguacgauuauccuaaauacagcgaagaggccaagcucaacagagaagagaucgacggcguuaaacuggagucuacccggauuuaucaaauccuugcuauuuacuccacaguggccagcucucugguccucgugguuucccugggagcgaucagcuuuuggaugugcuccaauggcucucugcagugccgcauuuguaucuga

SEQ ID NO: 198881 - RNA, 1701 nt, Artificial Sequence
  derived and/or modified CDS sequence (opt5) from hemagglutinin__InfluenzaA__AEH59363
augaaggccauccuggugguccuccuguacaccuucgcuacagccaacgcggacacgcuuugcauuggcuaucacgcuaauaacagcaccgauacaguugacaccgugcuggagaaaaaugugacagucacccauuccgugaaccuccuggaagauaagcacaaugggaaacuuuguaagcugagaggaguugcuccccuccaucugggcaaaugcaacaucgccggguggauucugggaaauccugagugugaaucucucagcacagccuccucuuggagcuacaucguggagaccuccucuagcgacaacggcacgugcuauccgggggauuuuauuaauuacgaggaacugcgggagcagcuuuccagcgucucuuccuucgaacgcuuugagaucuuccccaagaccagcucuuggccuaaccacgacuccaauaagggagugacagccgcuuguccccaagccggcgcgaaaucuuuuuauaagaaccugaucuggcucguuaaaaagggcaauagcuacccuaaacuguccaagagcuauauuaacgauaaggggaaagaagugcuuguccuguggggaauccaucaccccuccaccucugccgaccagcagagccucuaccagaaugcugaugccuacguguucgugggcacauccaaguauagcaaaaaguuuaaaccugagauugcugucagaccgaagguucgggaccaagaggggcgcaugaacuacuauuggacccugguggaacccggagauaaaaucacguucgaggccacaggcaaccugcucgugccuagauacgcguuugccauggaacggaaugcugggucuggaauuaucauuuccgacacccccguccacgauugcaacacaaccugucagaccccuaagggcgccaucaauacaagccugcccuuccagaacauccauccgauuacgaucggcaagugcccuaaauaugugaagucuaccaaacuucgccuggcuacagggcucagaaauguucccagcauucagucccggggacuguuuggcgccaucgccggguucauugagggaggcuggaccgggaugguggacggaugguacggcuaucaccaucaaaacgcucagggcucuggguacgcggccgaccuuaagagcacacagaaugcuaucgauaaaaucaccaacaaggucaauuccgugauugaaaagaugaacacgcaguuuacagccguuggaaaagaguucaaucaccuggagaagcgcaucgaaaaccucaauaaaaagguggacgauggcuuccuggacauuuggaccuacaacgccgagcugcucguccugcuugaaaaugagagaacccuggauuaucacgacagcaacgugaaaaaccucuacgaaaagguccggucucaacugaagaauaacgcuaaagagaucgggaauggauguuuugaguucuaucauaagugcgauaacacauguauggaauccgugaaaaauggcaccuacgacuauccuaaguacagcgaggaagccaaacuuaaccgcgaggaaauugaugggguuaagcuggagucuacaagaaucuaucagauccucgcgauuuacuccacgguggcuagcucccugguccuggugguuucucucggcgccaucagcuuuuggaugugcuccaauggaucucugcagugccggauuuguaucuga

SEQ ID NO: 198882 - RNA, 1701 nt, Artificial Sequence
  derived and/or modified CDS sequence (opt5) from hemagglutinin__InfluenzaA__AEH59367
augaaggccauccuggugguccuccuguacaccuucgcuacagccaacgcggacacgcuuugcauuggcuaucacgcuaauaacagcaccgauacaguugacaccgugcuggagaaaaaugugacagucacccauuccgugaaccuccuggaagauaagcacaaugggaaacuuuguaagcugagaggaguugcuccccuccaucugggcaaaugcaacaucgccggguggauucugggaaauccugagugugaaucucucagcacagccuccucuuggagcuacaucguggagaccuccucuagcgacaacggcacgugcuauccgggggauuuuauuaauuacgaagaacugcgggagcagcuuuccagcgucucuuccuucgaacgcuuugagaucuuccccaagaccagcucuuggccuaaccacgacuccaauaagggagugacagccgcuuguccccaugccggcgcgaaaucuuuuuauaagaaccugaucuggcucguuaaaaagggcaauagcuacccuaaacuguccaagagcuauauuaacgauaaggggaaagaagugcuuguccuguggggaauccaccaccccuccaccacagccgaccaacagucucucuaccagaaugcugaugccuacguguucgugggcaccagcagauauuccaagaaauuuaagccugagauugcuauccggccgaaaguccgcgaccaggaggggagaaugaacuacuauugggcccugguugaacccggagauaagauuacguucgaggcgacaggcaaccugguggugccucgguacgccuuugcuauggaacgcaaugccgggagcggaaucauuaucucugacacccccguccaugauugcaacacaaccugucaaaccccuaaaggcgcuaucaauacaucccuccccuuccagaacauucacccgaucacgauuggcaagugcccuaaguaugugaaaagcaccaagcugagacuugccacagggcugcggaauguucccucuauccagagccgcggacucuuuggcgccauugcuggguucaucgagggaggcuggaccgggaugguggacggaugguacggcuaucaucaccagaacgaacaaggcuccggguacgcggccgaccugaaaucuacacagaaugcuaucgauaagauuaccaacaaagucaauagcgugaucgagaagaugaacacgcaguuuacagccguuggaaaggaguucaaucaccuugagaaaagaauugagaaccugaauaagaaaguggacgauggcuuccucgacaucuggaccuacaacgccgaacugcugguccuccuggagaaugaacggacccuugauuaucaugacuccaacgugaagaaccuguacgagaaaguccgcaaucagcucaagaacaaugcuaaggagauugggaacggauguuuugaguucuaucacaaaugcgauaauacauguauggaaagcgugaagaacggcaccuacgacuauccuaaauacucugaagaggccaagcugaauagagaagagaucgaugggguuaaacuugaguccacacggaucuaucaaauucuggcgaucuacagcacgguggcuucuucccucguccuggugguuagccugggcgccauuuccuuuuggaugugcucuaacggaagccuccagugccgcaucuguauuuga

SEQ ID NO: 198883 - RNA, 1701 nt, Artificial Sequence
  derived and/or modified CDS sequence (opt5) from hemagglutinin__InfluenzaA__AEH59369
augaaggccauccuggugguccuccuguacaccuucgcuacagccaacgcggacacgcuuugcauuggcuaucacgcuaauaacagcaccgauacaguugacaccgugcuggagaaaaaugugacagucacccauuccgugaaccuccuggaagauaagcacaaugggaaacuuuguaagcugagaggaguugcuccccuccaucugggcaaaugcaacaucgccggguggauucugggaaauccugagugugaaucucucagcacagccuccucuuggagcuacaucguggagaccuccucuagcgacaacggcacgugcuauccgggggauuuuauugacuacgaagaacugcgggagcagcuuuccagcgucucuuccuucgaacgcuuugagaucuuccccaaggccagcucuuggccuaaucacgauuccaacaagggagugaccgcugccuguccccaugcgggcgccaaaggcuuuuauaagaaucugaucuggcucguuaaaaaggggaacagcuacccuaaacugucuaaguccuauauuaaugacaagggaaaagaagugcuuguccuguggggcauccaccaccccagcacaaccgcugaucaacagucccucuaccagaacgccgacacauacguguucguggggaccucuagauauagcaagaaauuuaagccugagauugcuauccggccgaaaguccgcgaucaggagggaagaaugaauuacuauuggacgcugguugaacccggcgacaagauuacauucgaggccaccgggaaccugguggugccucgguacgcguuugccauggaacgcaacgcuggauccggcaucauuaucagcgauacacccguccaugacugcaauaccaccugucaaacaccuaaaggcgccaucaacacgucucuccccuuccagaauauucacccgaucaccauugggaagugcccuaaguaugugaaauccacaaagcugagacuugcuaccggacugcggaacguucccagcauccagucucgcggccucuuuggggccauugccggauucaucgagggcggguggacaggaaugguggacggcugguacggcuaucaucaccagaaugaacaagggagcggauacgcugcggaucugaaauccacccagaacgccaucgacaagauuacgaauaaagucaacucugugaucgagaagaugaauacacaguuuaccgcuguuggcaaggaguucaaccaccuugagaaaagaauugagaaucugaacaagaaaguggaugacggguuccucgauaucuggaccuacaaugccgaacugcugguccuccuggagaacgaacggacacuugacuaucaugauagcaaugugaagaaccuguacgagaaaguccgcaaccagcucaagaauaacgccaaggagauuggaaauggcuguuuugaguucuaucacaaaugcgacaacaccuguauggaauccgugaagaaugggacauacgauuauccuaaauacagcgaagaggcuaagcugaacagagaagagaucgacggcguuaaacuugagucuacgcggaucuaucaaauucuggccaucuacuccaccguggcgagcucucucguccuggugguuucccugggagcuauuagcuuuuggaugugcuccaauggcucucuccagugccgcaucuguauuuga

SEQ ID NO: 198884 - RNA, 1701 nt, Artificial Sequence; identical to SEQ ID NO: 198881
  derived and/or modified CDS sequence (opt5) from hemagglutinin__InfluenzaA__AEH59371

SEQ ID NO: 198885 - RNA, 1701 nt, Artificial Sequence
  derived and/or modified CDS sequence (opt5) from hemagglutinin__InfluenzaA__AEH59373
augaaggccauccuggugguccuccuguacaccuucgcuacagccaacgcggacacgcuuugcauuggcuaucacgcuaauaacagcaccgauacaguugacaccgugcuggagaagaaugugacagucacccauuccgugaaccuccuggaagauaagcacaaugggaaacuuuguaagcugagagagguugcuccccuccaucugggaaaaugcaacaucgccggcuggauucuggggaauccugaaugugagucucucagcacagccuccucuuggagcuacaucguggaaaccuccucuagcgacaacggaacgugcuauccgggcgauuuuauugacuacgaggagcugcgggaacagcuuuccagcgucucuuccuucgagcgcuuugaaaucuuccccaagaccagcucuuggccuaaucacgauuccaacaagggggugacagccgcuuguccccaugccggagcgaaaggcuuuuauaagaaucugaucuggcucguuaaaaagggcaacagcuacccuaaacugucuaaguccuauauuaaugacaaggggaaagaggugcuuguccuguggggaauccaccaccccagcaccacagccgaucaacagucccucuaccagaacgcugacaccuacguguucgugggcacgucuagauauagcaagaaauuuaagccugagauugccauccggccgaaaguccgcgaucaggaagggagaaugaauuacuauuggacacugguugagcccggagacaagauuaccuucgaagcuacaggcaaccugguggugccucgguacgccuuugcgauggagcgcaacgccggguccggaaucauuaucagcgauacccccguccaugacugcaauaccacaugucaaacgccuaaaggcgcuaucaacaccucucuccccuuccagaauauucacccgaucacaauuggcaagugcccuaaguaugugaaauccaccaagcugagacuugccacagggcugcggaacguucccagcauccagucucgcggacucuuuggcgcuauugccggguucaucgaaggaggcuggaccgggaugguggacggaugguacggcuauagacaucagaaugagcaaggcagcggguacgccgcugaucugaaauccacgcagaacgcgaucgacaagauuacaaauaaagucaacucugugaucgagaagaugaauacccaguuuaccgccguuggaaaggaguucaaccaccuugaacggcgcauugaaaaucugaacaaaaagguggaugacggcuuccucgauaucuggacauacaaugcugagcugcugguccuccuggaaaacgagagaacccuugacuaucacgauagcaaugugaaaaaccuguacgagaagguccggaaccagcucaaaaauaacgccaaggaaauugggaauggauguuuugaguucuaucauaagugcgacaacacauguauggaauccgugaaaaauggcacguacgauuauccuaaguacagcgaggaagccaaacugaaccgcgaggagaucgacgggguuaaacuugaaucuaccagaaucuaucaaauucuggcuaucuacuccacaguggccagcucucucguccuggugguuucccugggcgcgauuagcuuuuggaugugcuccaauggaucucuccagugccggaucuguauuuga

SEQ ID NO: 198886 - RNA, 1701 nt, Artificial Sequence; identical to SEQ ID NO: 198881
  derived and/or modified CDS sequence (opt5) from hemagglutinin__InfluenzaA__AEH59375

SEQ ID NO: 198887 - RNA, 1701 nt, Artificial Sequence
  derived and/or modified CDS sequence (opt5) from hemagglutinin__InfluenzaA__AEH59379
augaaggccauccuggugguccuccuguacaccuucgcuacagccaacgcggacacgcuuugcauuggcuaucacgcuaauaacagcaccgauacaguugacaccgugcuggagaaaaaugugacagucacccauuccgugaaccuccuggaagauaagcacaaugggaaacuuuguaagcugagaggaguugcuccccuccaucugggcaaaugcaacaucgccggguggauucugggaaauccugagugugaaucucucagcacagccuccucuuggagcuacaucguggagaccuccucuagcgacaacggcacgugcuauccgggggauuuuauugacuacgaagaacugcgggagcagcuuuccagcgucucuuccuucgaacgcuuugagaucuuccccaagaccagcucuuggccuaaucacgauuccaacaagggagugacagccgcuuguccccaugccggcgcgaaaucuuuuuauaagaaucugaucuggcucguuaaaaagggcaacagcuacccuaaacuguccaagagcuauauuaaugacaaggggaaagaagugcuuguccuguggggaauccaccaccccuccaccacagccgaucaacagucucucuaccagaacgcugacaccuacguguucgugggcacgagcagauauuccaagaaauuuaagccugagauugccauccggccgaaaguccgcgaucaggaggggagaaugaauuacuauuggacacugguugaacccggagacaagauuaccuucgaggcuacaggcaaccugguggugccucgguacgccuuugcgauggaacgcaacgccgggagcggaaucauuaucucugauacccccguccaugacugcaauaccacaugucaaacgccuaaaggcgcuaucaacaccucccuccccuuccagaauauucacccgaucacaauuggcaagugcccuaaguaugugaaaagcaccaagcugagacuugccacagggcugcggaacguucccucuauccagagccgcggacucuuuggcgcuauugccggguucaucgagggaggcuggaccgggaugguggacggaugguacggcuaucaucaccagaaugaacaaggcuccggguacgccgcugaucugaaaucuacgcagaacgcgaucgacaagauuacaaauaaagucaacagcgugaucgagaagaugaauacccaguuuaccgccguuggaaaggaguucaaccaccuugagaaaagaauugagaaucugaacaagaaaguggaugacggcuuccucgauaucuggacauacaaugcugaacugcugguccuccuggagaacgaacggacccuugacuaucaugauuccaaugugaagaaccuguacgagaaaguccgcaaccagcucaagaauaacgccaaggagacagggaauggauguuuugaguucuaucacaaaugcgacaacacguguauggaaagcgugaagaauggcaccuacgauuauccuaaauacucugaagaggccaagcugaacagagaagagauugacgggguuaaacuugaguccacacggaucuaucaaauccuggcuauuuacagcaccguggccucuucccucguccuggugguuagccugggcgcgaucuccuuuuggaugugcucuaauggaagccuccagugccgcauuuguaucuga

SEQ ID NO: 198888 - RNA, 1701 nt, Artificial Sequence; identical to SEQ ID NO: 198881
  derived and/or modified CDS sequence (opt5) from hemagglutinin__InfluenzaA__AEH59381

SEQ ID NO: 198889 - RNA, 1701 nt, Artificial Sequence
  derived and/or modified CDS sequence (opt5) from hemagglutinin__InfluenzaA__AEH59383
augaaggccauccuggugguccuccuguacaccuucgcuacagccaacgcggacacgcuuugcauuggcuaucacgcuaauaacagcaccgauacaguugacaccgugcuggagaagaaugugacagucacccauuccgugaaccuccuggaagauaagcacaaugggaaacuuuguaagcugagaggaguugcuccccuccaucugggcaaaugcaacaucgccggguggauucugggaaauccugagugugaaucucucagcacagccuccucuuggagcuacaucguggagaccuccucuagcgacaacggcacgugcuauccgggggauuuuauugacuacgaagaacugcgggagcagcuuuccagcgucucuuccuucgaacgcuuugagaucuuccccaagaccagcucuuggccuaaucacgauuccaacaagggagugacagccgcuuguccccaugccggcgcgaaaggcuuuuauaagaaucugaucuggcucguuaaaaaggggaacagcuacccuaaacugucuauuuccuauaucaaugacaagggaaaggaagugcuuguccuguggggcauucaccaccccagcaccacagccgaucaacagucccucuaccagaacgcugacaccuacguguucguggggacgucuagauauagcaaaaaguuuaaaccugagaucgccauucggccgaagguccgcgaucaggagggaagaaugaauuacuauuggacacugguugaacccggcgacaaaaucaccuucgaggcuacagggaaccugguggugccucgguacgccuuugcgauggaacgcaacgccggauccggcauuaucaucagcgauacccccguccaugacugcaauaccacaugucaaacgccuaagggcgcuauuaacaccucucuccccuuccagaauauccacccgauuacaaucgggaaaugcccuaaguaugugaaguccaccaaacugagacuugccacaggacugcggaacguucccagcauucagucucgcggccucuuuggggcuaucgccggauucaucgagggcggguggaccggaaugguggacggcugguacggcuaucaucaccagaaugaacaagggagcggauacgccgcugaucugaaguccacgcagaacgcgauugacaaaaucacaaauaaggucaacucugugauugagaaaaugaauacccaguuuaccgccguuggcaaggaguucaaccaccuugaaaagagaaucgagaaucugaacaaaaagguggaugacggguuccucgauauuuggacauacaaugcugaacugcugguccuccuggagaacgaacggacccuugacuaucaugauagcaaugugaaaaaccuguacgagaagguccgcaaccagcucaaaaauaacgccaaggagaucggaaauggcuguuuugaguucuaucacaagugcgacaacacauguauggaguccgugaaaaaugggacguacgauuauccuaaguacagcgaagaggccaaacugaacagagaagagaucgacggcguuaaacuugagucuacccggauuuaucaaauccuggcuauuuacuccacaguggccagcucucucguccuggugguuucccugggagcgaucagcuuuuggaugugcuccaauggcucucuccagugccgcauuuguaucuga

SEQ ID NO: 198890 - RNA, 1701 nt, Artificial Sequence
  derived and/or modified CDS sequence (opt5) from hemagglutinin__InfluenzaA__AEH59385
augaaggccauccuggugguccuccuguacaccuucgcuacagccaacgcggacacgcuuugcauuggcuaucacgcuaauaacagcaccgauacaguugacaccgugcuggagaaaaaugugacagucacccauuccgugaaccuccuggaagauaagcacaaugggaaacuuuguaagcugagaggaguugcuccccuccaucugggcaaaugcaacaucgccggguggauucugggaaauccugagugugaaucucucagcacagccuccucuuggagcuacaucguggagaccuccucuagcgacaacggcacgugcuauccgggggauuuuauugacuacgaagaacugcgggagcagcuuuccagcgucucuuccuucgaacgcuuugagaucuuccccaagaccagcucuuggccuaaucacgauuccaacaagggagugacagccgcuuguccccaugccggcgcgaaaucuuuuuauaagaaucugaucuggcucguuaaaaagggcaacagcuacccuaaacuguccaagagcuauauuaaugacaaggggaaagaagugcuuguccuguggggaauccaccaccccuccaccacagccgaucaacagucucucuaccagaacgcugacgccuacauuuucgugggcaccagcagauauuccaagaaauuuaagccugagaucgcuauucggccgaaagugcgcgaucaggaggggagaaugaauuacuauuggacgcuggucgaacccggagacaagaucacauucgaggccaccggcaaccugguugugccucgguacgcguuugccauggaacgcaacgcugggagcggaauuaucaucucugauacacccgugcaugacugcaauaccaccugucaaacaccuaaaggcgccauuaacacgucccuccccuuccagaauauccacccgauuaccaucggcaagugcccuaaguaugucaaaagcacaaagcugagacuugcuaccgggcugcggaacgugcccucuauucagagccgcggacucuuuggcgccaucgccggguucaucgagggaggcuggacagggaugguugacggaugguacggcuaucaucaccagaaugaacaaggcuccggguacgcugcggaucugaaaucuacccagaacgccauugacaagaucacgaauaaagugaacagcgucauugagaagaugaauacacaguuuaccgcugugggaaaggaguucaaccaccuugagaaaagaaucgagaaucugaacaagaaaguugaugacggcuuccucgauauuuggaccuacaaugccgaacugcuggugcuccuggagaacgaacggacacuugacuaucaugauuccaaugucaagaaccuguacgagaaagugcgcaaccagcucaagaauaacgccaaggagaucgggaauggauguuuugaguucuaucacaaaugcgacaacaccuguauggaaagcgucaagaauggcacauacgauuauccuaaauacucugaagaggcuaagcugaacagagaagagaucgacggggugaaacuugaguccacgcggauuuaucaaauccuggccauuuacagcaccguugcgucuucccucgugcuggucgugagccugggcgcuaucuccuuuuggaugugcucuaauggaagccuccagugccgcauuuguaucuga

SEQ ID NO: 198891 - RNA, 1701 nt, Artificial Sequence; identical to SEQ ID NO: 198881
  derived and/or modified CDS sequence (opt5) from hemagglutinin__InfluenzaA__AEH59387

SEQ ID NO: 198892 - RNA, 1701 nt, Artificial Sequence
  derived and/or modified CDS sequence (opt5) from hemagglutinin__InfluenzaA__AEH59393
augaaggccauccugguggucauucucuacaccuucgcuacagccaacgcggacacgcugugcaucggcuaucacgcuaauaacagcaccgauacaguugacaccgugcuugagaaaaaugugacagucacccauuccgugaaccugcucgaagauaagcacaaugggaaacuguguaaacuuagaggaguugcuccccugcaucucggcaaaugcaacauugccggguggauccugggaaauccugagugugaaucucugagcacagccuccucuuggagcuacauuguggagaccuccucuagcgacaacggcacgugcuauccgggggauuuuaucgacuacgaagaacuccgggagcagcuguccagcgucucuuccuucgaacgcuuugagaucuuccccaagaccagcucuuggccuaaucacgauuccaacaagggagugacagccgcuuguccccaugccggcgcgaaaggcuuuuauaagaaucuuauuuggcugguuaaaaaggggaacagcuacccuaaacucucuaaguccuauaucaaugacaagggaaaagaagugcugguccuuuggggcauucaccaccccagcaccacagccgaucaacagucccuguaccagaacgcugacaccuacguguucguggggacgucuagauauagcaagaaauuuaagccugagaucgccauucggccgaaaguccgcgaucaggagggaagaaugaauuacuauuggacacucguugaacccggcgacaagaucaccuucgaggcuacagggaaccugguggugccucgguacgccuuugcgauggaacgcaacgccggauccggcauuaucaucagcgauacccccguccaugacugcaauaccacaugucaaacgccuaaaggcgcuauuaacaccucucugcccuuccagaauauccacccgauuacaaucgggaagugcccuaaguaugugaaauccaccaagcucagacuggccacaggacuucggaacguucccagcauucagucucgcggccuguuuggggcuaucgccggauucaucgagggcggguggaccggaaugguggacggcugguacggcuaucaucaccagaaugaacaagggagcggauacgccgcugaucucaaauccacgcagaacgcgauugacaagaucacaaauaaagucaacucugugauugagaagaugaauacccaguuuaccgccguuggcaaggaguucaaccaccuggaaaagagaaucgagaaucuuaacaagaaaguggaugacggguuccuggauauuuggacauacaaugcugaacuccugguccugcucgagaacgaacggacccuggacuaucaugauagcaaugugaagaaccuuuacgagaaaguccgcaaccagcugaagaauaacgccaaggagaucggaaauggcuguuuugaguucuaucacaaaugcgacaacacauguauggaguccgugaagaaugggacguacgauuauccuaaauacagcgaagaggccaagcucaacagagaagagaucgacggcguuaaacuggagucuacccggauuuaucaaauccuugcuauuuacuccacaguggccagcucucugguccucgugguuucccugggagcgaucagcuuuuggaugugcuccaauggcucucugcagugccgcauuuguaucuga

SEQ ID NO: 198893 - RNA, 1701 nt, Artificial Sequence
  derived and/or modified CDS sequence (opt5) from hemagglutinin__InfluenzaA__AEH59397
augaaggccauccuggugguccuccuguacaccuucgcuacagccaacgcggacacgcuuugcauuggcuaucacgcuaauaacagcaccgauacaguugacaccgugcuggagaaaaaugugacagucacccauuccgugaaccuccuggaagauaagcacaaugggaaacuuuguaagcugagaggaguugcuccccuccaucugggcaaaugcaacaucgccggguggauucugggaaauccugagugugaaucucucagcacagccuccucuuggagcuacaucguggagaccuccucuagcgacaacggcacgugcuauccgggggauuuuauuaauuacgaggaacugcgggagcagcuuuccagcgucucuuccuucgaacgcuuugagaucuuccccaagaccagcucuuggccuucccacgacagcaacaagggagugacagccgcuuguccccaugccggcgcgaaaucuuuuuauaagaaucugaucuggcucguuaaaaagggcaacuccuacccuaaacugagcaaguccuauauuaaugauaaggggaaagaagugcuuguccuguggggaauccaccaccccucuaccagcgccgaccaacagucccucuaccagaacgcugaugccuacguguucgugggcacaagcaaguauucuaaaaaguuuaaaccugagauugcugucagaccgaagguucgggaccaggaggggcgcaugaauuacuauuggacccugguggaacccggagauaaaaucacguucgaggccacaggcaaccugcucgugccuagauacgcguuugccauggaacggaacgcuggguccggaauuaucauuagcgacacccccguccaugauugcaauacaaccugucaaaccccuaagggcgccaucaacacaucucugcccuuccagaauauccacccgauuacgaucggcaagugcccuaaauauguuaagagcaccaaacuucgccuggcuacagggcucagaaacgugcccuccauucagucucggggacuguuuggcgccaucgccggguucauugagggaggcuggaccgggaugguggacggaugguacggcuaucaucaccagaaugaacaaggcagcggguacgcugcggaccuuaaguccacacagaacgccaucgauaaaaucaccaauaaggucaacagcgugauugagaagaugaauacgcaguuuacagcuguuggaaaagaguucaaccaccuggaaaagcgcaucgagaaucucaacaaaaagguggacgauggcuuccuggacauuuggaccuacaaugccgaacugcucguccugcuugagaacgaaagaacccuggauuaucaugacucuaaugugaaaaaccucuacgagaagguccggucccagcugaagaacaaugccaaagagaucgaaaacggguguuuugaguucuaucacaagugcgauaauacauguauggaaagcgugaaaaacggaaccuacgacuauccuaaguacucugaggaagcuaaacuuaaucgcgaggagauugauggcguuaagcuggaauccacaagaaucuaucaaauccucgccauuuacagcacgguggcguccucucugguccuggugguuagccucggggcuaucuccuuuuggaugugcucuaacggcagccugcagugccggauuuguaucuga

SEQ ID NO: 198894 - RNA, 1701 nt, Artificial Sequence
  derived and/or modified CDS sequence (opt5) from hemagglutinin__InfluenzaA__AEH59399
augaaggccauccuggugguccuccuguacaccuucgcuacagccaacgcggacacgcuuugcauuggcuaucacgcuaauaacagcaccgauacaguugacaccgugcuggagaaaaaugugacagucacccauuccgugaaccuccuggaagauaagcacaaugggaaacuuuguaagcugagaggaguugcuccccuccaucugggcaaaugcaacaucgccggguggauucugggaaauccugagugugaaucucucagcacagccuccucuuggagcuacaucguggagaccuccucuagcgacaacggcacgugcuauccgggggauuuuauugacuacgaagaacugcgggagcagcuuuccagcgucucuuccuucgaacgcuuugagaucuuccccaagaccagcucuuggccuaaucacgauuccaacaagggagugacagccgcuuguccccaugccggcgcgaaaggcuuuuauaagaaucugaucuggcucguuaaaaaggggaacagcuacccuaaacugucuaaguccuauauuaaugacaagggaaaagaagugcuuguccuguggggcauccaccaccccagcaccacagccgaucaacagucccucuaccagaacgcugacaccuacguguucguggggacgucuagauauagcaagaaauuuaagccugagauugccauccggccgaaaguccgcgaucaggagggaagaaugaauuacuauuggacaauuguugaacccggcgacaagaucaccuucgaggcuacagggaaccugguggugccucgguacgccuuugcgauggaacgcaacgccggauccggcauuaucaucagcgauacccccguccaugacugcaauaccacaugucaaacgccuaaaggcgcuauuaacaccucucugcccuuccagaauauccacccgauuacaaucgggaagugcccuaaguaugugaaauccaccaagcucagacuggccacaggacuucggaacguucccagcauucagucucgcggccuguuuggggcuaucgccggauucaucgagggcggguggaccggaaugguggacggcugguacggcuaucaucaccagaaugaacaagggagcggauacgccgcugaucucaaauccacgcagaacgcgauugacaagaucacaaauaaagucaacucugugauugagaagaugaauacccaguuuaccgccguuggcaaggaguucaaccaccuggagaaaagaaucgagaaucuuaacaagaaaguggaugacggguuccuggauauuuggacauacaaugcugaacuccugguccugcucgagaacgaacggacccuggacuaucaugauagcaaugugaagaaccuuuacgagaaaguccgcaaccagcugaagaauaacgccaaggagaucggaaauggcuguuuugaguucuaucacaaaugcgacaacacauguauggaauccgugaagaaugggacguacgauuauccuaaauacagcgaagaggccaagcucaacagagaagagaucgacggcguuaaacuggagucuacccggauuuaucaaauccuugcuauuuacuccacaguggccagcucucugguccucgugguuucccugggagcgaucagcuuuuggaugugcuccaauggcucucugcagugccgcauuuguaucuga

SEQ ID NO: 198895 - RNA, 1701 nt, Artificial Sequence
  derived and/or modified CDS sequence (opt5) from hemagglutinin__InfluenzaA__AEH59403
augaaggccauccuggugguccuccuguacaccuucgcuacagccaacgcggacacgcuuugcauuggcuaucacgcuaauaacagcaccgauacaguugacaccgugcuggagaaaaaugugacagucacccauuccgugaaccuccuggaagauaagcacaaugggaaacuuuguaagcugagaggaguugcuccccuccaucugggcaaaugcaacaucgccggguggauucugggaaauccugagugugaaucucucagcacagccuccucuuggagcuacaucguggagaccuccucuagcgacaacggcacgugcuauccgggggauuuuauugacuacgaggaacugcgggagcagcuuuccagcgucucuuccuucgaacgcuuugagaucuuccccaagaccagcucuuggccuaaucacgauuccaacaagggagugacagccgcuuguccccaugccggcgcgaaaggcuuuuauaagaaucugaucuggcucguuaaaaaggggaacagcuacccuaaacugucuaaguccuauauuaaugacaagggaaaagaagugcuuguccuguggggcauccaccaccccagcaccacagccgaucaacagucccucuaccagaacgcugacaccuacguguucguggggacgucuagauauagcaagaaauuuaagccugagauugccauccggccgaaaguccgcgaucaggagggaagaaugaauuacuauuggacacugguugcucccggcgacaagauuaccuucgaagccacagggaaccugguggugccucgguacgcguuugccauggagcgcaacgcuggauccggcaucauuaucagcgauacccccguccaugacugcaauaccacaugucaaacgccuaaaggcgccaucaacaccucucuccccuuccagaauauucacccgaucacaauugggaagugcccuaaguaugugaaauccaccaagcugagacuugcuacaggacugcggaacguucccagcauccagucucgcggccucuuuggggccauugccggauucaucgaaggcggguggaccggaaugguggacggcugguacggcuaucaucaccagaaugagcaagggagcggauacgcugcggaucugaaauccacgcagaacgccaucgacaagauuacaaauaaagucaacucugugaucgaaaagaugaauacccaguuuaccgcuguuggcaaggaguucaaccaccuugagaaaagaauugaaaaucugaacaagaaaguggaugacggguuccucgauaucuggacauacaaugccgagcugcugguccuccuggaaaacgagcggacccuugacuaucaugauagcaaugugaagaaccuguacgaaaaaguccgcaaccagcucaagaauaacgccaaggagauuggaaauggcuguuuugaguucuaucacaaaugcgacaacacauguauggaauccgugaagaaugggacguacgauuauccuaaauacagcgaggaagcuaagcugaacagagaggaaaucgacggcguuaaacuugagucuacccggaucuaucaaauucuggccaucuacuccacaguggcgagcucucucguccuggugguuucccugggagcuauuagcuuuuggaugugcuccaauggcucucuccagugccgcaucuguauuuga

SEQ ID NO: 198896 - RNA, 1701 nt, Artificial Sequence
  derived and/or modified CDS sequence (opt5) from hemagglutinin__InfluenzaA__AEH59407
augaaggccauccugguggucaugcucuacaccuucgcuacagccaacgcggacacgcugugcauuggcuaucacgcuaauaacagcaccgauacaguugacaccgugcuugagaaaaaugugacagucacccauuccgugaaccugcucgaagauaagcacaaugggaaacuguguaaacuuagaggaguugcuccccugcaucucggcaaaugcaacaucgccggguggauucugggaaauccugagugugaaucucugagcacagccuccucuuggagcuacaucguggagaccuccucuagcgacaacggcacgugcuauccgggggauuuuauugacuacgaagaacuccgggagcagcuguccagcgucucuuccuucgaacgcuuugagaucuuccccaagaccagcucuuggccuaaucacgauuccaacaagggagugacagccgcuuguccccaugccggcgcgaaaggcuuuuauaagaaucuuaucuggcugguuaaaaaggggaacagcuacccuaaacucucuaaguccuauauuaaugacaagggaaaagaagugcugguccuuuggggcauccaccaccccagcaccacagccgaucaacagucccuguaccagaacgcugacaccuacguguucguggggacgucuagauauagcaagaaauuuaagccugagauugccauccggccgaaaguccgcgaucaggagggaagaaugaauuacuauuggacacucguugaacccggcgacaagauuaccuucgaggcuacagggaaccugguggugccucgguacgccuuugcgauggaacgcaacgccggauccggcaucauuaucagcgauacccccguccaugacugcaauaccacaugucaaacgccuaaaggcgcuaucaacaccucucugcccuuccagaauauucacccgaucacaauugggaagugcccuaaguaugugaaauccaccaagcucagacuggccacaggacuucggaacguucccagcauccagucucgcggccuguuuggggcuauugccggauucaucgagggcggguggaccggaaugguggacggcugguacggcuaucaucaccagaaugaacaagggagcggauacgccgcugaucucaaauccacgcagaacgcgaucgacaagauuacaaauaaagucaacucugugaucgagaagaugaauacccaguuuaccgccguuggcaaggaguucaaccaccuggaaaagagaauugagaaucuuaacaagaaaguggaugacggguuccuggauaucuggacauacaaugcugaacuccugguccugcucgagaacgaacggacccuggacuaucaugauagcaaugugaagaaccuuuacgagaaaguccgcaaccagcugaagaauaacgccaaggagauuggaaauggcuguuuugaguucuaucacaaaugcgacaacacauguauggaguccgugaagaaugggacguacgauuauccuaaauacagcgaagaggccaagcucaacagagaagagaucgacggcguuaaacuggagucuacccggaucuaucaaauucuugcuaucuacuccacaguggccagcucucugguccucgugguuucccugggagcgauuagcuuuuggaugugcuccaauggcucucugcagugccgcaucuguauuuga

SEQ ID NO: 198897 - RNA, 1701 nt, Artificial Sequence; identical to SEQ ID NO: 198896
  derived and/or modified CDS sequence (opt5) from hemagglutinin__InfluenzaA__AEH59409

SEQ ID NO: 198898 - RNA, 1701 nt, Artificial Sequence
  derived and/or modified CDS sequence (opt5) from hemagglutinin__InfluenzaA__AEH59411
augaaggccauccuggugguccuccuguacaccuucgcuacagccaacgcggacacgcuuugcauuggcuaucacgcuaauaacagcaccgauacaguugacaccgugcuggagaaaaaugugacagucacccauuccgugaaccuccuggaagauaagcacaaugggaaacuuuguaagcugagaggaguugcuccccuccaucugggcaaaugcaacaucgccggguggauucugggaaauccugagugugaaucucucagcacagccuccucuuggagcuacaucguggagaccuccucuagcgacaacggcacgugcuauccgggggauuuuauugacuacgaggaacugcgggagcagcuuuccagcgucucuuccuucgaacgcuuugagaucuuccccaagaccagcucuuggccuaaucacgauuccaacaagggagugacagccgcuuguccccaugccggcgcgaaaggcuuuuauaagaaucugaucuggcucguuaaaaaggggaacagcuacccuaaacugucuaaguccuauauuaaugacaagggaaaagaagugcuuguccuguggggcauccaccaccccagcaccacagccgaucaacagucccucuaccagaacgcugacaccuacguguucguggggacgucuagauauagcaagaaauuuaagccugagauugccauccggccgaaaguccgcgaucaggagggaagaaugaauuacuauuggacacugguugaacccggcgacaagauuaccuucgaggcuacagggaaccugguggugccucgguacgccuuugcgauggaucgcaacgccggauccggcaucauuaucagcgacacccccguccaugacugcaauaccacaugucaaacgccuaaaggcgcuaucaacaccucucuccccuuccagaauauucacccgaucacaauugggaagugcccuaaguaugugaaauccaccaagcugagacuugccacaggacugcggaacguucccagcauccagucucgcggccucuuuggggcuauugccggauucaucgaaggcggguggaccggaaugguggauggcugguacggcuaucaucaccagaaugagcaagggagcggauacgccgcugaccugaaauccacgcagaacgcgaucgauaagauuacaaauaaagucaacucugugaucgaaaagaugaauacccaguuuaccgccguuggcaaggaguucaaccaccuugagaaaagaauugaaaaucugaacaagaaaguggacgauggguuccucgacaucuggacauacaaugcugagcugcugguccuccuggaaaacgagcggacccuugauuaucaugacagcaaugugaagaaccuguacgaaaaaguccgcaaccagcucaagaauaacgccaaggagauuggaaauggcuguuuugaguucuaucacaaaugcgauaacacauguauggaauccgugaagaaugggacguacgacuauccuaaauacagcgaggaagccaagcugaacagagaggaaaucgauggcguuaaacuugagucuacccggaucuaucaaauucuggcuaucuacuccacaguggccagcucucucguccuggugguuucccugggagcgauuagcuuuuggaugugcuccaauggcucucuccagugccgcaucuguauuuga

SEQ ID NO: 198899 - RNA, 1701 nt, Artificial Sequence
  derived and/or modified CDS sequence (opt5) from hemagglutinin__InfluenzaA__AEH59413
augaaggccauccuggugguccuccuguacaccuucgcuauugccaacgcggacacacuuugcaucggcuaucacgcuaauaacagcacggauaccguugacacagugcuggagaaaaaugugaccgucacacauuccgugaaccuccuggaagauaagcacaaugggaaacuuuguaagcugagaggaguugcuccccuccaucugggcaaaugcaacauugccggguggauccugggaaauccugagugugaaucucucagcaccgccuccucuuggagcuacauuguggagacauccucuagcgacaacggaaccugcuauccgggggauuuuaucaauuacgaagaacugcgggagcagcuuuccagcgucucuuccuucgaacgcuuugagaucuuccccaagacgagcucuuggccuaaccacgacuccaauaagggagugaccgccgcuuguccccaugccggcgcgaaaucuuuuuauaagaaccugauuuggcucguuaaaaagggcaauagcuacccuaaacuguccaagagcuauaucaacgauaaggggaaagaagugcuuguccuguggggcauucaccaccccuccacaucugccgaccaacagagccucuaccagaaugcugaugccuacguguucgugggcaccuccaaguauagcaaaaaguuuaaaccugagaucgcugucagaccgaagguucgggaccaggaggggcgcaugaacuacuauuggacacugguggaacccggagauaaaauuaccuucgaggccacgggcaaccugcucgugccuagauacgcguuugccauggaacggaaugcugggucuggaaucauuaucuccgacacacccguccaugauugcaacaccacaugucaaaccccugagggcgccaucaauaccagccugcccuuccagaacauucacccgaucacaauuggcaagugcccuaaguaugugaaaucuacgaaacuucgccuggcuaccgggcucagaaauguucccagcauccagucccggggacuguuuggcgccauugccggguucaucgaaggaggcuggacagggaugguggacggaugguacggcuaucaucaccagaacgagcaaggcucuggguacgcugcggaccuuaagagcacccagaaugccaucgauaagauuacaaacaaagucaauuccgugaucgagaagaugaacacccaguuuacggcuguuggaaaggaguucaaucaccuggagaaacgcauugaaaaccucaauaagaaaguggacgauggcuuccuggacaucuggacauacaacgccgagcugcucguccugcuugaaaaugagagaacccuggauuaucaugacagcaacgugaagaaccucuacgagaaaguccggucucagcugaagaauaacgccaaggaaauugggaauggauguuuugaguucuaucacaaaugcgauaacaccuguauggaauccgugaagaauggcacauacgacuauccuaaauacagcgaggaagcuaaacuuaaccgcgaggagaucgaugggguuaagcuggaaucuaccagaaucuaucaaauucucgccaucuacuccacaguggcgagcucccugguccuggugguuucucucggcgcuauuagcuuuuggaugugcuccaauggaucucugcagugccggaucuguauuuga

SEQ ID NO: 198900 - RNA, 1701 nt, Artificial Sequence
  derived and/or modified CDS sequence (opt5) from hemagglutinin__InfluenzaA__AEH59585
augaaggccauccuggugguccuccuguacaccuucgcuacagccaacgcggacacgcuuugcauuggcuaucacgcuaauaacagcaccgauacaguugacaccgugcuggagaagaaugugacagucacccauuccgugaaccuccuggaagauaagcacaaugggaaacuuuguaagcugagaggaguugcuccccuccaucugggcaaaugcaacaucgccggguggauucugggaaauccugagugugaaucucucagcacagccuccucuuggagcuacaucguggagaccuccucuagcgacaacggcacgugcuauccgggggauuuuauugacuacgaagaacugcgggagcagcuuuccagcgucucuuccuucgaacgcuuugagaucuuccccaagaccagcucuuggccuaaucacgaucccaacaagggagugacagccgcuuguccucaugccggcgcgaaauccuuuuauaagaaucugaucuggcucguuaaaaagggcaacagcuaccccaaacugucuaaguccuauauuaaugacaaggggaaagaagugcuuguccuguggggaauccaccacccuagcaccuccgccgaucaacagucucucuaccagaacgcugacgccuacguguucgugggcacaagcagauauuccaagaaauuuaagccggagauugcuauccggcccaaaguccgcgaucaggaggggagaaugaauuacuauuggacccugguugaaccuggagacaagauuacguucgaggccacaggcaaccugguggugccccgguacgcguuugccauggaacgcaacgcugggagcggaaucauuaucucugauaccccuguccaugacugcaauacaaccugucaaacccccaaaggcgccaucaacacaucccucccguuccagaauauucacccuaucacgauuggcaagugccccaaguaugugaaaagcaccaagcugagacuugcuacagggcugcggaacguuccuucuauccagagccgcggacucuuuggcgccauugccggguucaucgagggaggcuggaccgggaugguggacggaugguacggcuaucaucaccagaaugaacaaggcuccggguacgcugcggaucugaaaucuacacagaacgccaucgacgagauuaccaauaaggucaacagcgugaucgagaaaaugaauacgcaguuuacaguugugggaaaggaguucaaccaccuugagaagagaauugaaaaucugaacaaaaaggucgaugacggcuuccucgauaucuggaccuacaaugcugagcugcuggugcuccuggaaaacgagcggacccuugacuaucaugauuccaaugucaaaaaccuguacgagaaggugcgcagccagcucaaaaacaaugccaaggaaauugggaacggauguuuugaguucuaucacaagugcgacaauacauguauggaaucuguuaaaaacggcaccuacgauuaucccaaguacuccgaggaagccaaacugaauagagaggagaucgacggggugaaacuugaaagcacacggaucuaucaaauucuggcuaucuacucuacggucgccuccagccucgugcugguugugucccugggcgcgauuucuuuuuggaugugcagcaacggaucccuccagugccgcaucuguauuuga

SEQ ID NO: 198901 - RNA, 1701 nt, Artificial Sequence
  derived and/or modified CDS sequence (opt5) from hemagglutinin__InfluenzaA__AEH59587
augaaggccauccuggugguccuccuguacaccuucgcuacagccaacgcggacacgcuuugcauuggcuaucacgcuaauaacagcaccgauacaguugacaccgugcuggagaaaaaugugacagucacccauuccgugaaccuccuggaagauaagcacaaugggaaacuuuguaagcugagaggaguugcuccccuccaucugggcaaaugcaacaucgccggguggauucugggaaauccugagugugaaucucucagcacagccuccucuuggagcuacaucguggagaccuccucuagcgacaacggcacgugcuauccgggggauuuuauugacuacgaagaacugcgggagcagcuuuccagcgucucuuccuucgaacgcuuugagaucuuccccaagaccagcucuuggccuaaucacgaauccaacaagggagugacagccgcuuguccccaugccggcgcgaaaucuuuuuauaagaaucugaucuggcucguuaaaaagggcaacagcuacccuaaacuguccaagagcuauauuaaugauaaggggaaagaggugcuuguccuguggggaauccaccaccccuccaccucugccgaccaacagagccucuaccagaacgcugaugccuacguguucgugggcacauccagauauagcaagaaauuuaagccugagauugcuauccggccgaaaguccgcgaccaggaagggagaaugaauuacuauuggacccugguugagcccggagauaagauuacguucgaagccacaggcaaccugguggugccucgguacgcguuugccauggagcgcaacgcugggucuggaaucauuaucuccgacacccccguccaugauugcaauacaaccugucaaaccccuaaaggcgccaucaacacaagccuccccuuccagaauauucacccgaucacgauuggcaagugcccuaaguaugugaaaucuaccaagcugagacuugcuacagggcugcggaacguucccuuuauccagagccgcggacucuucggcgccauugccggguuuaucgaaggaggcuggaccgggaugguggacggaugguacggcuaucaucaccagaaugagcaaggcuccggguacgcugcggaccugaaaucuacacagaacgccaucgauaagauuaccaauaaagucaacagcgugaucgagaagaugaauacgcaguucacaguugugggaaaggaguucaacccucuugagaaaagaauugaaaaucugaacaagaaagucgacgauggcuuucucgacaucuggaccuacaaugcugagcugcuggugcuccuggaaaacgagcggacccuugauuaucacgacuccaaugucaagaaccuguacgagaaagugcgcagccagcucaagaacaaugccaaggaaauugggaacggauguuucgaguuuuaucauaaaugcgauaauacauguauggaaucuguuaagaacggcaccuacgacuaucccaaauacuccgaggaagccaagcugaauagagaggagaucgauggggugaaacuugaaagcacacggaucuaucaaauucuggcuaucuacucuacggucgccuccagccucgugcugguugugucccugggcgcgauuucuuucuggaugugcagcaacggaucccuccagugccgcaucuguauuuga

SEQ ID NO: 198902 - RNA, 1701 nt, Artificial Sequence; identical to SEQ ID NO: 195905
  derived and/or modified CDS sequence (opt5) from hemagglutinin__InfluenzaA__AEH59589

SEQ ID NO: 198903 - RNA, 1701 nt, Artificial Sequence
  derived and/or modified CDS sequence (opt5) from hemagglutinin__InfluenzaA__AEH59591
augaaggccauccuggugguccuccuguacaccuucgcuacagccaacgcggacacgcuuugcauuggcuaucacgcuaauaacagcaccgauacaguugacaccgugcuggagaaaaaugugacagucacccauuccgugaaccuccuggaagauaagcacaaugggaaacuuuguaagcugagaggaguugcuccccuccaucugggcaaaugcaacaucgccggguggauucugggaaauccugagugugaaucucucagcacagccuccucuuggagcuacaucguggagaccuccucuagcgacaacggcacgugcuauccgggggauuuuauugacuacgaagaacugcgggagcagcuuuccagcgucucuuccuucgaacgcuuugagaucuuccccaagaccagcucuuggccuaaucacgauuccaacaagggagugacagccgcuuguccccaugccggcgcgaaaucuuuuuauaagaaucugaucuggcucguuaaaaagggcaacagcuacccuaaacuguccaagagcuauauuaaugacaaggggaaagaagugcuuguccuguggggaauccaccaccccuccaccucugccgaucaacagagccucuaccagaacgcugacgccuacguguucgugggcacauccagauauagcaagaaauuuaagccugagauugcuauccggccgaaaguccgcgaucaggaggggagaaugaauuacuauuggacccugguugaacccggagacaagauuacguucgaggccacaggcaaccugguggugccucgguacgcguuugccauggaacgcaacgcugggucuggaaucauuaucuccgauacccccguccaugacugcaauacaaccugucaaaccccuaaaggcgccaucaacacaagccuccccuuccagaauauucacccgaucacgauuggcaagugcccuaaguaugugaaaucuaccaagcugagacuugcuacagggcugcggaacguucccagcauccagucccgcggacucuuuggcgccauugccggguucaucgagggaggcuggaccgggaugguggacggaugguacggcuaucaucaccagaaugaacaaggcucuggguacgcugcggaucugaaaagcacacagaacgccaucgacaagauuaccaauaaagucaacuccgugaucgagaagaugaauacgcaguuuacaguugugggaaaggaguucaaccaccuugagaaaagaauugagaaucugaacaagaaagucgaugacggcuuccucgauaucuggaccuacaaugcugaacugcuggugcuccuggagaacgaacggacccuugacuaucaugauagcaaugucaagaaccuguacgagaaagugcgcucucagcucaagaacaaugccaaggagauugggaacggauguuuugaguucuaucacaaaugcgacaauacauguauggaauccguuaagaacggcaccuacgauuauccuaaauacagcgaagaggccaagcugaauagagaagagaucgacggggugaaacuugagucuacacggaucuaucaaauucuggcuaucuacuccacggucgccagcucccucgugcugguugugucucugggcgcgauuagcuuuuggaugugcuccaacggaucucuccagugccgcaucuguauuuga

SEQ ID NO: 198904 - RNA, 1701 nt, Artificial Sequence
  derived and/or modified CDS sequence (opt5) from hemagglutinin__InfluenzaA__AEH59593
augaaggccauccuggugguccuccuguacaccuucgcuacagccaacgcggacacgcuuugcauuggcuaucacgcuaauaacagcaccgauacaguugacaccgugcuggagaaaaaugugacagucacccauuccgugaaccuccuggaagauaagcacaaugggaaacuuuguaagcugagaggaguugcuccccuccaucugggcaaaugcaacaucgccggguggauucugggaaauccugagugugaaucucucagcacagccuccucuuggagcuacaucguggagaccuccucuagcgacaacggcacgugcuauccgggggauuuuauugacuacgaagaacugcgggagcagcuuuccagcgucucuuccuucgaacgcuuugagaucuuccccaagaccagcucuuggccuaaucacgaauccaacaagggagugacagccgcuuguccccaugccggcgcgaaaucuuuuuauaagaaucugaucuggcucguuaaaaagggcaacagcuacccuaaacuguccaagagcuauauuaaugauaaggggaaagaggugcuuguccuguggggaauccaccaccccuccaccucugccgaccaacagagcauuuaccagaacgcugaugccuacguguucgugggcacauccagauauagcaagaaauuuaagccugagaucgcuauucggccgaaaguccgcgaccaggaagggagaaugaauuacuauuggacccucguugagcccggagauaagaucacguucgaagccacaggcaaccugguggugccucgguacgcguuugccauggagcgcaacgcugggucuggaauuaucaucuccgacacccccguccaugauugcaauacaaccugucaaaccccuaaaggcgccauuaacacaagccugcccuuccagaauauccacccgauuacgaucggcaagugcccuaaguaugugaaaucuaccaagcucagacuggcuacagggcuucggaacguucccagcauucagucccgcggacuguuuggcgccaucgccggguucaucgaaggaggcuggaccgggaugguggacggaugguacggcuaucaucaccagaaugagcaaggcucuggguacgcugcggaccucaaaagcacacagaacgccauugauaagaucaccaauaaagucaacuccgugauugagaagaugaauacgcaguuuacagcuguuggaaaggaguucaaccaccuggagaaaagaaucgaaaaucuuaacaagaaaguggacgauggcuuccuggacauuuggaccuacaaugccgagcuccugguccugcucgaaaacgagcggacccuggauuaucaugacagcaaugugaagaaccuuuacgagaaaguccgcucucagcugaagaacaaugccaaggaaaucgggaacggauguuuugaguucuaucacaaaugcgauaauacauguauggaauccgugaagaacggcaccuacgacuauccuaaauacagcgaggaagcuaagcucaauagagaggagaucgaugggguuaaacuggaaucuacacggauuuaucaaauccuugccauuuacuccacgguggcgagcucccugguccucgugguuucucugggcgcuaucagcuuuuggaugugcuccaacggaucucugcagugccgcauuuguaucuga

SEQ ID NO: 198905 - RNA, 1701 nt, Artificial Sequence; identical to SEQ ID NO: 195539
  derived and/or modified CDS sequence (opt5) from hemagglutinin__InfluenzaA__AEH59595

SEQ ID NO: 198906 - RNA, 1701 nt, Artificial Sequence; identical to SEQ ID NO: 195905
  derived and/or modified CDS sequence (opt5) from hemagglutinin__InfluenzaA__AEH59597

SEQ ID NO: 198907 - RNA, 1701 nt, Artificial Sequence; identical to SEQ ID NO: 198900
  derived and/or modified CDS sequence (opt5) from hemagglutinin__InfluenzaA__AEH59599

SEQ ID NO: 198908 - RNA, 1701 nt, Artificial Sequence
  derived and/or modified CDS sequence (opt5) from hemagglutinin__InfluenzaA__AEH59601
augaaggccauccuggugguccuccuguacaccuucgcuacagccaacgcggacacgcuuugcauuggcuaucacgcuaauaacagcaccgauacaguugacaccgugcuggagaaaaaugugacagucacccauuccgugaaccuccuggaagauaagcacaaugggaaacuuuguaagcugagaggaguugcgccccuccaucugggcaacugcaauaucgccggguggauucugggaaacccugagugugaaucucucagcacagcuuccucuuggagcuacaucguggagaccuccucuagcgacaauggcacgugcuauccgggggauuuuauugacuacgaagaacugcgggagcagcuuuccagcgucucuuccuucgaacgcuuugagaucuuccccaaaaccagcucuuggccuaaccacgauuccaauaagggagugacagccgcuuguccccaugccggcgccaagagcuuuuauaaaaaccugaucuggcucguuaagaaaggcaauucuuacccuaagcuguccaaaagcuauauuaacgacaaggggaaggaagugcuuguccuguggggaauccaccaccccuccaccucugccgaucaacagagccucuaccagaaugcugacgccuacguguucgugggcacauccagauauagcaaaaaguuuaaaccugagauugcuauccggccgaagguccgcgaucaggaggggagaaugaacuacuauuggacccugguugaacccggagacaaaauuacguucgaggccacaggcaaccugguggugccucgguacgcguuugccauggaacgcaaugcugggucuggaaucauuaucuccgauacccccguccaugacugcaacacaaccugucaaaccccuaagggcgccaucaauacaagccuccccuuccagaacauucacccgaucacgauuggcaaaugcccuaaguaugugaagucuaccaaacugagacuugcuacagggcugcggaauguucccagcauccagucccgcggacucuuuggcgccauugccggguucaucgagggaggcuggaccgggaugguggacggaugguacggcuaucaucaccagaacgaacaaggcucuggguacgcugcggaucuuaagagcacacagaaugccaucgacaaaauuaccaacaaggucaauuccgugaucgagaaaaugaacacgcaguuuacaguugugggaaaggaguucaaucaccuugaaaagagaauugagaaccugaauaaaaaggucgaugacggcuuccucgauaucuggaccuacaacgcugaacugcuggugcuccuggagaaugaacggacccuugacuaucaugauagcaacgucaaaaaccuguacgagaaggugcgcucucagcucaaaaauaacgccaaggagauugggaauggauguuuugaguucuaucacaagugcgacaacacauguauggaguccguuaaaaauggcaccuacgauuauccuaaguacagcgaagaggccaaacugaacagagaagagaucgacggggugaagcuggagucuacacggaucuaucaaauucuggcuaucuacuccacggucgccagcucccucgugcugguugugucucugggcgcgauuagcuuuuggaugugcuccaauggaucucuccagugccgcaucuguauuuga

SEQ ID NO: 198909 - RNA, 1701 nt, Artificial Sequence; identical to SEQ ID NO: 195539
  derived and/or modified CDS sequence (opt5) from hemagglutinin__InfluenzaA__AEH59604

SEQ ID NO: 198910 - RNA, 1701 nt, Artificial Sequence; identical to SEQ ID NO: 195539
  derived and/or modified CDS sequence (opt5) from hemagglutinin__InfluenzaA__AEH59614

SEQ ID NO: 198911 - RNA, 1701 nt, Artificial Sequence
  derived and/or modified CDS sequence (opt5) from hemagglutinin__InfluenzaA__AEH59624
augaaggccauccuggugguccuccuguacaccuucgcuacagccaacgcggacacgcuuugcauuggcuaucacgcuaauaacagcaccgauacaguugacaccgugcuggagaaaaaugugacagucacccauuccgugaaccuccuggaagauaagcacaaugggaaacuuuguaagcugagaggaguugcuccccuccaucugggcaaaugcaacaucgccggguggauucugggaaauccugagugugaaucucucagcacagccuccucuuggagcuacaucguggagaccuccucuagcgacaacggcacgugcuauccgggggauuuuauugacuacgaagaacugcgggagcagcuuuccagcgucucuuccuucgaacgcuuugagaucuuccccaagaccagcucuuggccuaaucacgaucccaacaagggagugacagccgcuuguccucaugccggcgcgaaauccuuuuauaagaaucugaucuggcucguuaaaaagggcaacagcuaccccaaacugucuaaguccuauauuaaugacaaggggaaagaagugcuuguccuguggggaauccaccacccuagcaccuccgccgaucaacagucuuucuaccagaacgcugacgccuacguguuugugggcacaagcagauauuccaagaaauucaagccggagauugcuauccggcccaaaguccgcgaucaggaggggagaaugaauuacuauuggacccucguugaaccuggagacaagauuacguuugaggccacaggcaaccugguggugccccgguacgcguucgccauggaacgcaacgcugggagcggaaucauuaucucugauaccccuguccaugacugcaauacaaccugucaaacccccaaaggcgccaucaacacaucccugccguuucagaauauucacccuaucacgauuggcaagugccccaaguaugugaaaagcaccaagcucagacuggcuacagggcuucggaacguuccuucuauccagagccgcggacuguucggcgccauugccggguuuaucgagggaggcuggaccgggaugguggacggaugguacggcuaucaucaccagaaugaacaaggcuccggguacgcugcggaucucaaaucuacacagaacgccaucgacgagauuaccaauaaggucaacagcgugaucgagaaaaugaauacgcaguucacagcuguuggaaaggaguucaaccaccuggagaagagaauugaaaaucuuaacaaaaagguggaugacggcuuucuggauaucuggaccuacaaugccgagcuccugguccugcucgaaaacgagcggacccuggacuaucaugauuccaaugugaaaaaccuuuacgagaagguccgcagccagcugaaaaacaaugccaaggaaauugggaacggauguuucgaguuuuaucacaagugcgacaauacauguauggaaucugugaaaaacggcaccuacgauuaucccaaguacuccgaggaagcuaaacucaauagagaggagaucgacgggguuaagcuggaaagcacacggaucuaucaaauucuugccaucuacucuacgguggcguccagccugguccucgugguuucccugggcgcuauuucuuucuggaugugcagcaacggaucccugcagugccgcaucuguauuuga

SEQ ID NO: 198912 - RNA, 1698 nt, Artificial Sequence
  derived and/or modified CDS sequence (opt5) from hemagglutinin__InfluenzaA__AEH77259
augaaggugaaacugcucguccugcuuugcaccuucacagccacguacgcugacaccaucuguauuggcuaucacgccaacaauagcacagauaccguugacacagugcuggagaagaacgugaccgucacacauuccgugaaucuccuggaaaacucucacaaugggaaacuuugccugcucaagggaaucgcgccccugcagcugggcaacuguagcguugcuggguggauucucggaaauccugagugcgaacugcuuaucuccaaagagucuuggagcuacauuguggaaaagccgaaccccgagaauggcaccuguuauccugggcauuuugccgauuacgaggaacugagagagcaacucuccucugucagcuccuucgaacgguuugagauguuccccaaggagagcucuuggccuaaccacacggugaccggaguuuccgccagcugcucucauaauggcgaauccagcuuuuaucgcaaccugcuuuggcugacagagaaaaauggccucuaccccaaccugucuaaguccuaugcuaauaacaaagaaaaggaggugcugguccucuggggagugcaccacccuccgagcaucuccgaccagaaaacccuguaccauacagaaaacgccuacgugucugucguuagcucccacuauagcagaaaguucacccccgagaucgcuaagcggccuaaagugcgcgaucaggaggggagaauuaauuacuauuggacgcuucuggaacccggcgacacaaucauuuuugaggccaacgggaaucucaucgcgccucgguacgccuucgcucugucucgcggauuuggcuccgggauuaucaacagcaaugcccccauggauaagugugacgcuaaaugccagaccccgcaaggagccauuaacucuagccuuccuuuccagaaugugcaucccgucacaaucggcgaauguccuaaguaugugagauccgcgaaacugcggaugguuaccggccuccgcaacauccccucuauucagagcagagggcuguuuggagccaucgcuggcuucauugaagggggauggaccggcaugguggaugggugguacggauaucaccaccagaaugagcaaggcuccggcuacgccgcugaccaaaagagcacacagaacgccaucaaugggauuacgaacaaagucaauucugugaucgagaagaugaacacccaguuuacagccguuggaaaggaguucaauaaacuggaacggcgcauggagaaccucaacaagaaaguggaugacggcuucaucgauauuuggaccuacaaugcugaacugcuuguccugcucgagaacgaaagaacacuggacuuucaugacuccaaugugaagaaccuuuaugagaaagucaagaaucagcugaagaacaaugcgaaagagaucgggaacggaugcuucgaauuuuaccacaaguguaaugaugagugcauggaaagcgugaaaaacggcaccuaugacuaccccaaguauucugaggaguccaaacucaaucgggaaaagauugaugggguuaagcuggagagcaugggcguguaccagauccuggccauuuauuccacggucgcuucuagccucguguuccugguuucccuuggagccaucucuuuuuggaugugcagcaacggcucccugcagugucgcaucugcauuuga

SEQ ID NO: 198913 - RNA, 1701 nt, Artificial Sequence; identical to SEQ ID NO: 194728
  derived and/or modified CDS sequence (opt5) from hemagglutinin__InfluenzaA__AEH77270

SEQ ID NO: 198914 - RNA, 1701 nt, Artificial Sequence; identical to SEQ ID NO: 192104
  derived and/or modified CDS sequence (opt5) from hemagglutinin__InfluenzaA__AEH77279

SEQ ID NO: 198915 - RNA, 1701 nt, Artificial Sequence; identical to SEQ ID NO: 195843
  derived and/or modified CDS sequence (opt5) from hemagglutinin__InfluenzaA__AEI29215

SEQ ID NO: 198916 - RNA, 1701 nt, Artificial Sequence; identical to SEQ ID NO: 194741
  derived and/or modified CDS sequence (opt5) from hemagglutinin__InfluenzaA__AEI29225

SEQ ID NO: 198917 - RNA, 1701 nt, Artificial Sequence
  derived and/or modified CDS sequence (opt5) from hemagglutinin__InfluenzaA__AEI29591
augaagaccaucauugcccugagcuacaucuucugccucguguuugcucaggaccugcccggcaacgauaauuccacagccacgcuuugucuggggcaccaugcggucccuaacggaacccucguuaaaacaauuaccaaugaccaaaucgaggugacaaacgcuaccgaacuggugcagucuagcuccacaggcaagauuugcgauaauccgcacagaauccuugacgggaucaacuguacccugauugaugcccuccugggagacccccauugcgauggcuuccagaaugagaaaugggaccuguuugucgaacggucuaaggccuucagcaacuguuauccuuacgaugugcccgacuaugcuucccuccgcucucugguugccagcuccgggacgcuugaguuuaucaaugaaggauucaacuggaccggcgugacacagaauggcgggagcucugcuugcaaaagaggaccugauaacggcuuuuucucccggcugaauuggcucuacaagagcgggucuaccuaucccguccaaaacgugacaaugccuaauaacgacaacuccgauaagcuguacauuuggggaguucaccauccgagcaccgacaaagagcagacgaaucuuuaugugcaggccucuggcaaggucacaguguccaccaaacgcagccagcaaacagugauccccaacgucggguccagaccuuggguucggggacugucuagccgcguguccauuuacuggaccaucgugaagcccggcgacauucucgucaucaauagcaacggcaaucugaucgcgccuagaggguacuauaaaaugcggaccggaaagucuuccauuaugcgcagcgaugcccccaucggcacauguucuagcgagugcauuacgccgaacggguccaucccuaaugacaagcccuuucagaacgugaauaaaauuaccuacggagcuuguccuaaguauguuaaacagaacacacugaagcucgccaccggcaugagaaaugugcccgaaaaacagacacgggggaucuucggagcuaucgccggcuuuauugagaacggcugggaagggaugaucgauggaugguacggcuuccgccaccaaaauucugaggggaccggacaggcggccgaccuuaagagcacgcaggcugccauugaucaaaucaacggcaaacugaauagagucauugagaagacaaacgaaaaguuucaccagaucgagaaagaguucuccgaaguggaagggcggauccaggaccuggagaaguauguugaggauaccaaaauugaccucuggagcuacaacgcugaacugcuuguggcccuggagaaucagcauaccaucgaucucacagacucugaaaugaacaagcuguucgagaaaacccgcagacaacugcgggaaaaugccgaggauaugggcaacggaugcuuuaagauuuaucacaagugugacaaugcuugcaucggcuccauuagaaacgggacauacgaccaugaugucuaccgcgacgaggcgcucaauaaccgguuccagaucaaaggaguggaacuuaagagcggcuauaaagauuggauucuguggaucucuuuugccaucuccugcuuccugcucugugucgugcugcuuggguuuauuaugugggcuugccagaagggaaauaucagauguaacauuugcaucuga

SEQ ID NO: 198918 - RNA, 1701 nt, Artificial Sequence; identical to SEQ ID NO: 192104
  derived and/or modified CDS sequence (opt5) from hemagglutinin__InfluenzaA__AEI54347

SEQ ID NO: 198919 - RNA, 1701 nt, Artificial Sequence; identical to SEQ ID NO: 192190
  derived and/or modified CDS sequence (opt5) from hemagglutinin__InfluenzaA__AEI54358

SEQ ID NO: 198920 - RNA, 1701 nt, Artificial Sequence; identical to SEQ ID NO: 192705
  derived and/or modified CDS sequence (opt5) from hemagglutinin__InfluenzaA__AEI54369

SEQ ID NO: 198921 - RNA, 1701 nt, Artificial Sequence; identical to SEQ ID NO: 192588
  derived and/or modified CDS sequence (opt5) from hemagglutinin__InfluenzaA__AEI54380

SEQ ID NO: 198922 - RNA, 1701 nt, Artificial Sequence; identical to SEQ ID NO: 198851
  derived and/or modified CDS sequence (opt5) from hemagglutinin__InfluenzaA__AEI54391

SEQ ID NO: 198923 - RNA, 1701 nt, Artificial Sequence
  derived and/or modified CDS sequence (opt5) from hemagglutinin__InfluenzaA__AEI54402
augaagaccaucauugcccugagcuacauccucugccugguguucgcucagaaacuucccggcaacgacaauuccacagccacgcugugucucgggcaccaugcggucccuaacggaaccauuguuaagacaaucaccaaugaucaaauugaggugacaaacgcuaccgaacuggugcagucuagcuccacaggcgagaucugcuauucuccgcaccagauccuugacggggaaaauuguacccugauugaugcccuccugggagacccccagugcgauggcuuucaaaacaaaaagugggaccuguucgucgagagaagcaaagccuacuccaauuguuauccuuacgaugugcccgacuaugcuucucuccggagccugguugccuccagcgggacgcuugaauuuaacaaugagucuuucaacuggaccggagugacacagaauggcaccuccagcgcuugcauccgcagaucuaacaauuccuuuuucagccggcugaacuggcucacacaucugaaguuuaaguacccugcccuuaaugucaccaugcccaacaacgagaaauucgauaagcuguauauuuggggcgugcaccauccugggacggacaaugaucagaucuuucucuacgcgcaggccucuggacgcauuacaguuuccaccaaaagaagccaacagacagugaucccgaacauuggcucccggccccgcgucagaaauaucccuucucggaucagcauuuacuggaccaucgugaagcccggggacauucugcugaucaacuccaccggaaaucucauugcuccucgcggcuauuucaaaaucagaagcgggaagucuuccaucaugcggagcgaugcccccauuggaaaguguaacucugaaugcaucacaccgaauggcagcauuccuaacgacaaacccuuucagaaugugaaccgcaucacguacggcgcuuguccuagauaugucaagcagaauacccugaaacuugccacagggaugcggaacguucccgagaagcaaacccgcggaauuuucggcgcgaucgccggguuuaucgaaaauggaugggagggcaugguggacgggugguacggauucagacaccagaacuccgagggcauuggccaggcugccgaucugaaaucuacacaagcugccaucgaccagauuaaugggaagcucaaccggcugaucggaaaaaccaacgaaaaguuccaccagauugagaaggaauuuagcgagguggaaggcagaauccaggaucuugagaaauaugucgaggacacgaagauugaucugugguccuacaaugccgaacuccugguggcucuggagaaccaacauacaaucgaccucaccgauagcgaaaugaauaaacuguucgagaagaccaaaaagcagcuucgcgaaaacgcggaggacauggggaauggaugcuuuaagaucuaucacaaaugugauaacgccugcauuggcucuauccggaaugggacauacgaccaugauguuuacagagacgaggcucugaacaaucgcuuccagauuaagggcguggaacucaaauccggauauaaggacuggauccuguggauuagcuuugccaucucuugcuuccuucugugugucgcccuccugggcuuuaucaugugggcuugccagaaagggaacauucgguguaauaucugcauuuga

SEQ ID NO: 198924 - RNA, 1701 nt, Artificial Sequence; identical to SEQ ID NO: 194000
  derived and/or modified CDS sequence (opt5) from hemagglutinin__InfluenzaA__AEI54413

SEQ ID NO: 198925 - RNA, 1701 nt, Artificial Sequence; identical to SEQ ID NO: 192353
  derived and/or modified CDS sequence (opt5) from hemagglutinin__InfluenzaA__AEI54424

SEQ ID NO: 198926 - RNA, 1701 nt, Artificial Sequence
  derived and/or modified CDS sequence (opt5) from hemagglutinin__InfluenzaA__AEI54446
augaagaccaucauugcccugagcuacauccucugccugguguucgcucagaaacuucccgagaacgacaauuccacagccacgcugugucucggccaccaugcggucccuaacgggaccauuguuaagacaaucaccaaugaucaaauugaagugacaaacgcuaccgagcuggugcagucuagcuccacaggagaaaucugcaauucuccgcaccagauccuugacggcgagaacuguacccugauugaugcccuccugggggacccccagugcgauggauuucaaaauaaaaagugggaccuguucgucgaaagaagcaaagcccauuccaacuguuauccuuacgaugugcccgacuaugcuucucuccggagccugguugccuccagcggcacgcuugaguuuaauaacgagucuuucaauuggaccggggugacacagaacggaaccuccagcgcuugcauccgcagaucuaauaacuccuuuuucagccggcugaauuggcucacacaccugaacuuuaaguacccugcccuuaacgucaccaugcccaauaacgaacaguucgauaagcuguauauuuggggcgugcaucacccuggcacggacaaagaucagaucuuucucuacgcgcaagccgcugggcgcauuacaguuucuaccaagagaucccagcaggccgugaucccgaauauuggaagccggccccgcgucagaaacaucccuucccgggugucuaucuauuggacaauugugaaacccggcgacauccugcugauuaauagcaccgggaaccucaucgcuccucgcggauacuucaagauuagauccggcaaaagcucuaucaugcgguccgaugcccccaucgggaaguguaauagcgcgugcauuaccccgaacggaucuaucccuaaugacaagcccuuucagaacgucaaucgcauuacauacggcgccuguccuagauauguuaaacaaaacacgcugaaacuugcuaccggcaugcggaaugugcccgagaagcagacacgcgggaucuucggagccauugcuggcuuuaucgaaaacgggugggagggaaugguggacggcugguacggguucagacaccagaauagcgagggacggggccaagccgccgaucugaaguccacccaggcugcgaucgaccagauuaacggcaaacucaacagacugaucgggaagacaaaugaaaaauuccaucagauugagaaggaauuuucugaggucgaaggacgcauccaagaucuugagaaguauguggaggacaccaaaauugaucuguggagcuacaacgccgaacuccugguugcucuggagaaucagcacacgaucgaccucacagauuccgaaaugaacaagcuguucgagaaaaccaagaaacagcuucgggaaaaugccgaggacaugggcaacgggugcuuuaagauuuaucauaagugugauaaugccugcaucggaagcaucagaaacggcaccuacgaccacgauguguaucgcgacgaggcucugaauaaccgguuccagauuaaaggggucgaacucaagucuggcuacaaagacuggauccuguggauuuccuuugccaucagcugcuuccuucuguguguggcgcuccugggauuuauuaugugggcuugccaaaagggcaauaucagauguaacaucugcauuuga

SEQ ID NO: 198927 - RNA, 1701 nt, Artificial Sequence
  derived and/or modified CDS sequence (opt5) from hemagglutinin__InfluenzaA__AEI54457
augaagaccaucauugcccugagcuacauccucugccugguguucgcucagaaacuucccggcaacgacaauuccacagccacgcugugucucgggcaccaugcggucccuaacggaaccauuguuaagacaaucaccaaugaucaaauugaggugacaaacgcuaccgaacuggugcagucuagcuccacaggcgagaucugcaauucuccgcaccagauccuugacggggaaaacuguacccugauugaugcccuccugggagacccccagugcgauggcuuucaaaauaaaaagugggaccuguucgucgagagaagcaaagcccauuccaacuguuauccuuacgaugugcccgacuaugcuucucuccggagccugguugccuccagcgggacgcuugaauuuaauaacgagucuuucaauuggaccggagugacacagaacggcaccuccagcgcuugcauccgcagaucuaauaacuccuuuuucagccggcugaauuggcucacacaccugaacuuuaaguacccugcccuuaacgucaccaugcccaauaacgagcaguucgauaagcuguauauuuggggcgugcaucacccugggacggacaaagaucagaucuuucucuacgcgcaagccgcuggacgcauuacaguuucuaccaagagaucccagcaggccgugaucccgaauauuggcagccggccccgcgucagaaacaucccuucccgggugucuaucuauuggacaauugugaaacccggggacauccugcugauuaauagcaccggaaaccucaucgcuccucgcggcuacuucaagauuagauccgggaaaagcucuaucaugcgguccgaugcccccaucggaaaguguaauagcgcgugcauuaccccgaacggcucuaucccuaaugacaagcccuuucagaacgucaaucgcauuacauacggcgccuguccuagauauguuaaacaaaacacgcugaaacuugcuaccgggaugcggaaugugcccgaaaaacagacacgcggaaucuucggcgccauugcuggguuuaucgagaacggaugggaaggcaugguggacgggugguacggauucagacaccagaauagcgagggccggggccaagccgccgaucugaaguccacccaggcugcgaucgaccagauuaacgggaaacucaacagacugaucggaaagacaaaugagaaauuccaucagauugaaaaggaguuuucugaagucgagggccgcauccaagaucuugaaaaguauguggaggacaccaaaauugaucuguggagcuacaacgccgagcuccugguugcucuggaaaaucagcacacgaucgaccucacagauuccgagaugaacaagcuguucgaaaagaccaagaaacagcuucgggagaaugccgaagacauggggaacggaugcuuuaagauuuaucauaagugugauaaugccugcaucggcagcaucagaaacgggaccuacgaccacgauguguaucgcgacgaggcucugaauaaccgguuccagauuaaaggcgucgagcucaagucuggauacaaagacuggauccuguggauuuccuuugccaucagcugcuuccuucuguguguggcgcuccugggcuuuauuaugugggcuugccaaaaggggaauaucagauguaacaucugcauuuga

SEQ ID NO: 198928 - RNA, 1701 nt, Artificial Sequence; identical to SEQ ID NO: 197605
  derived and/or modified CDS sequence (opt5) from hemagglutinin__InfluenzaA__AEI54468

SEQ ID NO: 198929 - RNA, 1701 nt, Artificial Sequence; identical to SEQ ID NO: 197605
  derived and/or modified CDS sequence (opt5) from hemagglutinin__InfluenzaA__AEI54479

SEQ ID NO: 198930 - RNA, 1701 nt, Artificial Sequence; identical to SEQ ID NO: 198927
  derived and/or modified CDS sequence (opt5) from hemagglutinin__InfluenzaA__AEI54490

SEQ ID NO: 198931 - RNA, 1701 nt, Artificial Sequence; identical to SEQ ID NO: 198926
  derived and/or modified CDS sequence (opt5) from hemagglutinin__InfluenzaA__AEI54501

SEQ ID NO: 198932 - RNA, 1701 nt, Artificial Sequence
  derived and/or modified CDS sequence (opt5) from hemagglutinin__InfluenzaA__AEI59979
augaagaccaucauugcccugagcuacauccucugccugguguucgcucagaaacuucccggcaacgacaauuccacagccacgcugugucucgggcaccaugcggucccuaacggaaccauuguuaagacaaucaccaaugaucaaauugaggugacaaacgcuaccgaacuggugcagaucucuagcacaggcgagaucugcgacuccccgcaccagauucuugauggggaaaauuguacccugaucgacgcccuccugggagauccccagugcgacggcuuucaaaacaaaaagugggaucuguucgucgagagaucuaaagccuauagcaauuguuacccuuaugacgugcccgauuacgcuucccuccggucucugguugccagcuccgggacgcuugaauuuaacaaugagagcuucaacuggaccggagugacacagaauggcaccucuuccgcuugcauucgcagaagcaacaauuccuuuuucucucggcugaacuggcucacacaucugaaguuuaaguauccugcccuuaaugucaccaugcccaacaacgagcaguucgacaaacuguacaucuggggcgugcaccauccugggacggauaaugaccagauuuuucucuaugcgcaagccagcggacgcaucacaguuucuaccaagagaucccagcagacagugauuccgaacaucggcagccggccccgcgucagaaauaucccuucccggauuucuaucuacuggaccauugugaaacccggggauauccugcugauuaacagcaccggaaaucucaucgcuccucgcggcuacuucaagaucagauccgggaaaagcucuauuaugcgguccgacgcccccaucggaaaguguaacagcgaaugcauuacaccgaauggcucuaucccuaacgacaagcccuuucagaaugugaaccgcauuacguauggcgcuuguccuagauacgucaaacaaaauacccugaaacuugccacagggaugcggaacguucccgagaaacagacccgcggaaucuucggcgcgaucgccggguuuauugaaaauggaugggagggcaugguggaugggugguauggauucagacaccagaacagcgagggccggggccaagcugccgaccugaaguccacacaggcugccaucgaucagauuaaugggaaacucaacagacugaucgaaaagaccaacgagaaauuccaccagauugaaaaggaguuuucugaaguggagggacgcauccaagaccuugagaaguacgucgaagauacgaaaauugaccuguggagcuauaaugccgagcuccugguggcucuggaaaaccagcauacaaucgaucucaccgacuccgagaugaauaagcuguucgaaaagaccaagaaacagcuucgggagaacgcggaggauaugggcaaugggugcuuuaagaucuaccacaagugugacaacgccugcauuggaagcaucagaaauggcacauaugaucaugacguuuaccgcgacgaagcucugaacaaucgguuccagauuaaagggguggagcucaagucuggcuacaaagauuggauccuguggauuuccuuugccaucagcugcuuccuucugugugucgcccuccugggauuuaucaugugggcuugccaaaagggcaacauuagauguaauaucugcauuuga

SEQ ID NO: 198933 - RNA, 1698 nt, Artificial Sequence; identical to SEQ ID NO: 198029
  derived and/or modified CDS sequence (opt5) from hemagglutinin__InfluenzaA__AEI59990

SEQ ID NO: 198934 - RNA, 1698 nt, Artificial Sequence; identical to SEQ ID NO: 198031
  derived and/or modified CDS sequence (opt5) from hemagglutinin__InfluenzaA__AEI60001

SEQ ID NO: 198935 - RNA, 1701 nt, Artificial Sequence
  derived and/or modified CDS sequence (opt5) from hemagglutinin__InfluenzaA__AEI60012
augaagaccaucauugcccugagcuacauccucugccugguguucgcucagaaacuucccggcaacgacaauuccacagccacgcugugucucgggcaccaugcggucccuaacggaaccauuguuaagacaaucaccaaugaucaaauugaggugacaaacgcuaccgaacuggugcagucuagcuccacaggcgagaucugcgacucuccgcaccagauccuugauggggaaaauuguacccugauugacgcccuccugggagauccccagugcgacggcuuucaaaacaaaaagugggaucuguucgucgagagaagcaaagccuauuccaauuguuacccuuaugacgugcccgauuacgcuucucuccggagccugguugccuccagcgggacgcuugaauuuaacaaugagucuuucaacuggaccggagugacacagaauggcaccuccagcgcuugcaucagaucuuccaacaauagcuuuuucucucgccugaacuggcucacacaucugaaguuuaaguauccugcccuuaaugucaccaugcccaacaacgagcaguucgacaaacuguacauuuggggcgugcaccauccugggacggauaaugaccagaucuuucucuaugcgcaagccuccggacggauuacaguuagcaccaagcgcucccagcagacagugaucccgaacauuggcucuagaccccggguccgcaauaucccuagcagaaucuccauuuacuggaccaucgugaaacccggggauauucugcugaucaacagcaccggaaaucucauugcuccucggggcuacuucaagauccgcucugggaaauccagcaucaugagaucugacgcccccauuggaaaguguaacagcgaaugcaucacaccgaauggcuccauuccuaacgacaagcccuuucagaaugugaaccggaucacguauggcgcuuguccucgcuacgucaaacaaaauacccugaagcuggccacagggaugagaaacguucccgagaaacagacccggggaauuuucggcgcgaucgccggguuuaucgaaaauggaugggagggcaugguggaugggugguauggauuccgccaccagaacucugagggcagaggccaagcugccgaccuuaagagcacacaggcugccauugaucagaucaaugggaaacucaaccggcugauuggaaagaccaacgaaaaauuccaccagaucgagaaggaauuuuccgagguggaaggcaagauucaagaccuugagaaauacgucgaggauacgaagaucgaccuguggagcuauaaugccgaacuccugguggcucuggagaaccagcauacaauugaucucaccgacucugaaaugaauaaacuguucgagaagaccaaaaagcagcuuagagaaaacgcggaggauauggggaauggaugcuuuaagaucuaccacaaaugugacaacgccugcaucggcuccauucgcaaugggacauauaaccaugauguuuaccgggacgaggcucugaauaacagauuccagaucaagggcguggaacucaaaagcggauacaaggacuggauucuguggaucucuuuugccauuuccugcuuccuucugugugucgcccuccugggcuuuaucaugugggcuugccaaaaagggaauauccgcuguaacauuugcaucuga

SEQ ID NO: 198936 - RNA, 1701 nt, Artificial Sequence; identical to SEQ ID NO: 194506
  derived and/or modified CDS sequence (opt5) from hemagglutinin__InfluenzaA__AEI60023

SEQ ID NO: 198937 - RNA, 1701 nt, Artificial Sequence
  derived and/or modified CDS sequence (opt5) from hemagglutinin__InfluenzaA__AEI60034
augaagaccaucauugcccugagcuacauccucugccugguguucgcucagaaacuucccggcaacgacaauuccacagccacgcugugucucgggcaccaugcggucccuaacggaaccauuguuaagacaaucaccaaugaucaaauugaggugacaaacgcuaccgaacuggugcagucuagcuccacaggcgagaucugcgacucuccgcaccagauccuugaugggaaaaauuguacccugauugacgcccuccugggagauccccagugcgacggcuuucaaaacaagaaaugggaucuguucgucgaaagaagcaaggccuauuccaauuguuacccuuaugacgugcccgauuacgcuucucuccggagccugguugccuccagcgggacgcuugaguuuaacaaugaaucuuucaacuggaccggagugacacagaauggcaccuccagcgcuugcauccgcagaucuaacaauuccuuuuucagccggcugaacuggcucacacaucugaaguuuaaauauccugcccuuaaugucaccaugcccaacaacgagcaguucgacaagcuguacauuuggggcgugcaccauccugggacggauaaagaccagaucuuucucuaugcgcaagccucuggacgcauuacaguuuccaccaagagaagccagcagacagugaucccgaauauuggcucccggccccgcgucagaaacaucccuucucggaucagcauuuacuggaccaucgugaaacccggggauauucugcugaucaauuccaccggaaaccucauugcuccucgcggcuacuucaagaucagaagcgggaagucuuccaucaugcggagcgacgcccccauuggaaaauguaauucugagugcaucacaccgaacggcagcauuccuaaugacaagcccuuucagaacgugaaucgcaucacguauggcgcuuguccuagauacgucaaacaaaacacccugaaacuugccacagggaugcggaauguucccgaaaaacagacccgcggaauuuucggcgcgaucgccggguuuaucgagaacggaugggaaggcaugguggaugggugguauggauucagacaccaaaauuccgagggccggggccaggcugccgaccugaagucuacacaggcugccauugaucagaucaacgggaaacucaauagacugauuggaaagaccaacgagaaguuccaccagaucgaaaaagaguuuagcgaaguggagggccgcauucaagaccuugaaaaguacgucgaggauacgaaaaucgaccugugguccuauaacgccgagcuccugguggcucuggaaaaucagcauacaauugaucucaccgacagcgagaugaacaagcuguucgaaaagaccaagaagcagcuucgggagaaugcggaagauauggggaacggaugcuuuaaaaucuaccacaagugugacaaugccugcaucggcucuauuagaaacgggacauaugaucaugacguuuaccgcgacgaggcucugaauaaccgguuccagaucaaaggcguggagcucaaguccggauacaaagauuggauucuguggaucagcuuugccauuucuugcuuccuucugugugucgcccuccugggcuuuaucaugugggcuugccaaaaggggaauaucagauguaacauuugcaucuga

SEQ ID NO: 198938 - RNA, 1701 nt, Artificial Sequence
  derived and/or modified CDS sequence (opt5) from hemagglutinin__InfluenzaA__AEI60045
augaagaccaucauugcccugagcuacauccucugccugguguucgcucagaaacuucccggcaacgacaauuccacagccacgcugugucucgggcaccaugcggucccuaacggaaccauuguuaagacaaucaugaaugaucaaauugaggugaccaacgcuacagaacuggugcagucuagcuccaccggcgagaucugcgacucuccgcaccagauccuugaugggaaaaauuguacacugauugacgcccuccugggagauccccagugcgacggcuuucaaaacaagaaaugggaucuguucgucgaaagaagcaaggccuauuccaauuguuacccuuaugacgugcccgauuacgcuucucuccggagccugguugccuccagcgggacccuugaguuuaacaaugaaucuuucaacuggacgggagugacccagaauggcacauccagcgcuugcauccgcagaucuaagaacuccuuuuucagccggcugaauuggcucacccaucugaacuuuaaauauccugcccuuaaugucacaaugcccaacaacgagcaguucgacaagcuguacauuuggggcgugcaccauccugggaccgauaaagaccagaucuuucucuaugcgcaagccucuggacgcauuacgguuuccacaaagagaagccagcagaccgcuaucccgaauauuggcuaccggccccgcgugagaaacaucccuucccggaucucuauuuacuggacaaucgucaaacccggggauauucugcugaucaauagcaccggaaaccucauugccccucgcggcuauuucaagaucagauccggaaagagcucuaucaugcgguccgacgcucccauugggaaauguaauagcgagugcaucaccccgaacggcucuauuccuaaugacaagcccuuucagaacgugaaucgcaucacauacggcgccuguccuagauaugugaaacaaaacacgcugaaacuugcgaccgggaugcggaauguccccgaaaaacagacacgcggaauuuucggcgccaucgcuggguuuaucgagaacggaugggaaggcaugguugaugggugguacggauucagacaccagaauagcgagggccggggccaagccgcugaccugaaguccacccaggccgccauugaucagaucaacgggaaacucaauagacugauuggaaagacaaacgagaaguuccaccagaucgaaaaagaguuuucugaaguggagggccgcauucaagaccuugaaaaguauguggaggauaccaaaaucgaccuguggagcuacaacgcugagcuccuggucgcgcuggaaaaucagcauacgauugaucucacagacuccgagaugaacaagcuguucgaaaagaccaagaagcagcuucgggagaaugccgaagauauggggaacggaugcuuuaaaaucuaucacaagugugacaaugcuugcaucggcagcauuagaaacgggaccuacgaucaugacguguaccgcgacgaggcccugaauaaccgguuccagaucaaaggcguugagcucaagucuggauauaaagauuggauucuguggaucuccuuugccauuagcugcuuccuucuguguguggcucuccugggcuuuaucaugugggccugccaaaaggggaauaucagauguaacauuugcaucuga

SEQ ID NO: 198939 - RNA, 1701 nt, Artificial Sequence
  derived and/or modified CDS sequence (opt5) from hemagglutinin__InfluenzaA__AEI60086
augaaggccauccuggugguccuccuguacaccuucgcuacagccaacgcggacacgcuuugcauuggcuaucacgcuaauaacagcaccgauacaguugacaccgugcuggagaaaaaugugacagucacccauuccgugaaccuccuggaagauaagcacaaugggaaacuuuguaagcugagaggaguugcuccccuccaucugggcaaaugcaacaucgccggguggauucugggaaauccugagugugaaucucucagcacagccuccucuuggagcuacaucguggagaccuccucuagcgacaacggcacgugcuauccgggggauuuuauuaauuacgaagaacugcgggagcagcuuuccagcgucucuuccuucgaacgcuuugagaucuuccccaagaccagcucuuggccuaaccacgacuccaauaagggagugacagccgcuuguccccaugccggcgcgaaaucuuuuuauaagaaccugaucuggcucguuaaaaagggcaauagcuacccuaaacuguccaagagcuauauuaacgauaaggggaaagaagugcuuguccuguggggaauccaccaccccuccaccacagccgaccaacagucucucuaccagaaugcugaugccuacguguucgugggcaccagcagauauuccaagaaauuuaagccugagauugcuauccggccgaaaguccgcgaccaggaggggagaaugaacuacuauuggacgcugguugaacccggagauaagauuacauucgaggccaccggcaaccugguggugccucgguacgcguuugccauggaacgcaaugcugggagcggaaucauuaucucugacacacccguccaugauugcaacaccaccugucaaacaccuaaaggcgccaucaauacgucccuccccuuccagaacauucacccgaucaccauuggcaagugcccuaaguaugugaaaagcacaaagcugagacuugcuaccgggcugcggaauguucccucuauccagagccgcggacucuuuggcgccauugccggguucaucgagggaggcuggacagggaugguggacggaugguacggcuaucaucaccagaacgaacaaggcuccggguacgcugcggaccugaaaucuacccagaaugccaucgauaagauuacgaacaaagucaauagcgugaucgagaagaugaacacacaguuuaccgcuguuggaaaggaguucaaucaccuugagaaaagaauugagaaccugaauaagaaaguggacgauggcuuccucgacaucuggaccuacaacgccgaacugcugguccuccuggagaaugaacggacacuugauuaucaugacuccaacgugaagaaccuguacgagaaaguccgcaaucagcucaagaacaaugccaaggagauugggaacggauguuuugaguucuaucacaaaugcgauaauaccuguauggaaagcgugaagaacggcacauacgacuauccuaaauacucugaagaggcuaagcugaauagagaagagaucgaugggguuaaacuugaguccacgcggaucuaucaaauucuggccaucuacagcaccguggcgucuucccucguccuggugguuagccugggcgcuauuuccuuuuggaugugcucuaacggaagccuccagugccgcaucuguauuuga

SEQ ID NO: 198940 - RNA, 1701 nt, Artificial Sequence
  derived and/or modified CDS sequence (opt5) from hemagglutinin__InfluenzaA__AEI60109
augaagaccacaaucgcccugagcuacauucucugccugguguucgcucagaaacuucccggcaacgacaauuccacggccacccugugucucgggcaccaugcggucccuaacggaacacugguuaagaccaucacaaaugaucaaauugaggugaccaacgcuacagaacuugugcaaaauucuagcaccggcagaaucugcgacuccccgcaccagauucuggauggggagaacuguacgcucaucgacgcccugcugggagauccccauugcgacggcuuucagaauaaagaaugggaucucuucgucgagcggucuaaggccuauagcaacuguuacccuuauaaugugcccgacuacguuucccugcgcucucuuguggcuagcuccgggacccuggaauuuaacaaugagagcuucaacuggacaggagucgcccaggaugggucuuccuaugcuugcaaaagacggagcaauaaguccuuuuucucucgccucaacuggcugcaccagcuuaauuacaaguauccugcccugaacgugaccaugcccaacaaugagaacuuugacaaacucuacaucuggggcguucaucacccuggcacagauagcgaccagauuucucuguacgcgcaggccuccggaagagugaccgucagcacgaagcggucccaacagacagugaucccgaauauuggcuaucgccccugggugagaggggucucuagcaucauuuccaucuacuggaccauuguuaaaccuggagauauccugcucaucaacagcacaggcaaucugauugcuccccggggguauuucaagauccgcucuggaaaauccagcauuaugagaucugacgccccuaucggcaaguguaacagcgaaugcauuacccccaauggcuccaucccgaacgacaagccuuuucagaaugugaaccggaucaccuacgggcccuguccucgcuaugugaaacagaauacacuuaagcuggcuacgggaaugagaaacguccccgagaaacaaacccggggcauuuucggggccaucgcgggauuuauugaaaauggcugggaggggaugaaggauggaugguacggcuuccgccaccagaacucugagggcacagggcaggccgcugacaucaaaagcacccaagccgcuauuaaucagaucaacggaaagcucaacagacugaucgagaaaacaaaugaaaaguuucaucagauugaaaaggaguucuccgaaguggagggccggauccaggaucuugagaaauauguugaagacaccaagauugaucuguggagcuacaacgccgagcuccugguggcccuggaaaaucaacacacgaucgaccucacagauucugagaugaacaaacuguucgaaagaaccaagaaacagcuucgcgagaaugcugaggacauggggaacggaugcuuuaagauuuaccauaagugugauaauaccugcaucggcuccauucggaacgggacauaugaccacgaugucuacagagacgaagcgcugaauaaccgcuuccacaucaaaggcguggagcucaagagcggauauaaagacuggauccuguggauuucuuuugccaccuccugcuuccuucuguguaucguucuccugggcuuuauuaugugggcuugccagaaggggaauauccgguguaacauuugcaucuga

SEQ ID NO: 198941 - RNA, 1701 nt, Artificial Sequence
  derived and/or modified CDS sequence (opt5) from hemagglutinin__InfluenzaA__AEI86734
augaaggccauccuggugguccuccuguacaccuucgcuacagccaacgcggacacgcuuugcguuggcuaucacgcuaauaacagcaccgauacaguggacaccgugcuggagaaaaaugucacagugacccauuccguuaaccuccuggaagauaagcacaaugggaaacuuuguaagcugagaggaguggcuccccuccaucugggcaaaugcaacauugccggguggauccugggaaauccugagugugaaucucucagcacagccuccucuuggagcuacauugucgagaccuccaacucugacaauggcacgugcuauccgggggauuuuaucgacuacgaagaacugcgggagcagcuuagcuccgugagcucuuucgaacgcuuugagauuuuccccaagaccuccagcuggccuaaccacgauucuaauaagggaguuacagccgcuuguccccaugccggcgcgaaauccuuuuauagaaaccugaucuggcucgugaagaaaggcaauagcuacccuaagcugucuaaauccuauaucaacgacaaggggaaggaaguccuugugcuguggggcauucaccaccccagcaccuccgccgaucaacagucucucuaccagaaugcugacacauacguguucgucggaaccagccgguauuccaaaaaguuuaaaccugagaucgccauucgcccgaagguuagagaucaggaggggcggaugaacuacuauuggacgcugguggaacccggagacaaaaucacauucgaggcuaccggcaaccugguggucccucgcuacgccuuugcgauggaaagaaaugccgggagcggaauuaucauuucugauacacccgugcaugacugcaacaccaccugucaaacaccuaagggcgcuaucaauacgucccuccccuuccagaacauccacccgauuaccaucggcaaaugcccuaaguauguuaagagcacaaaacugcggcuugccaccgggcugcgcaaugugcccucuauucagagcagaggacucuuuggcgcuaucgccggguucauugagggaggcuggacagggauggucgacggaugguacggcuaucaucaccagaacgaacaaggcuccggguacgccgcugaucugaagucuacccagaaugcgaucgacgagaucacgaacaaagugaauagcguuauugagaagaugaacacacaguuuaccgccgugggaaaagaguucaaucaccuugagaagcggaucgaaaaccugaauaagaaagucgaugacggcuuccucgauauuuggaccuacaacgcugagcugcuggugcuccuggaaaaugagcgcacacuugacuaucaugauuccaacgucaagaaccuguacgagaaagugagaagccagcucaagaauaacgccaaagaaaucgggaauggauguuuugaguucuaucacaagugcgacaacaccuguauggaaucuguuaagaauggcacauacgauuauccuaaauacuccgaggaagccaagcugaaccgggaggagauugacggggugaaacuugaaagcacgcgcaucuaucaaauccuggcuauuuacucuaccgucgccuccagccucgugcugguugugucccugggcgcgaucucuuuuuggaugugcagcaauggaucccuccagugcagaauuuguaucuga

SEQ ID NO: 198942 - RNA, 1701 nt, Artificial Sequence
  derived and/or modified CDS sequence (opt5) from hemagglutinin__InfluenzaA__AEI86764
augaaggccauccuggugguccuccuguacaccuucgcuacagccaacgcggacacgcuuugcauuggcuaucacgcuaauaacagcaccgauacaguugacaccgugcuggagaaaaaugugacagucacccauuccgugaaccuccuggaagauaagcacaaugggaaacuuuguaagcugagaggaguugcuccccuccaucugggcaaaugcaacaucgccggguggauucugggaaauccugagugugaaucucucagcacagccuccucuuggagcuacaucguggagaccuccucuagcgacaacggcacgugcuauccgggggauuuuauugacuacgaagaacugcgggagcagcuuuccagcgucucuuccuucgaacgcuuugagaucuuccccaagaccagcucuuggccugaucacgacuccaauaagggagugacagccgcuuguccccaugccggcgcgaaaucuuuuuauaagaaccugaucuggcucguuaaaaagggcaauagcuacccuaaacuguccaagagcuauauuaacgauaaggggaaagaagugcuuguccuguggggaauccaccaccccuccaccucugccgaccaacagagccucuaccagaaugcugaugccuacguguucgugggcacauccagauauagcaagaaauuuaagccugagauugcuauccggccgaaaguccgcgaccaggaggggagaaugaacuacuauuggacccugguugaacccggagauaagauuacguucgaggccacaggcaaucugguggugccucgguacgcguuugccauggaacgcaacgcugggucuggaaucauuaucuccgacacccccguccaugacugcaacacaaccugucaaaccccuaaaggcgccaucaauacaagccuccccuuccagaacauucacccgaucacgauuggcaagugcccuaaguaugugaaaucuaccaagcugagacuugcuacagggcugcggaauguucccagcauccagucccgcggacucuuuggcgccauugccggguucaucgagggaggcuggaccgggaugguggauggaugguacggcuaucaucaccagaacgaacaaggcucuggguacgcugcggaccugaaaagcacacagaaugccaucgauaagauuaccaacaaagucaauuccgugaucgagaagaugaacacgcaguuuacagcuguuggaaaggaguucaaucaccuugaaaagagaauugagaaccugaauaagaaaguggacgauggcuuccucgacaucuggaccuacaacgccgaacugcugguccuccuggagaaugaacggacccuugauuaucaugacagcaacgugaagaaucuguacgagaaaguccgcucucagcucaagaacaacgccaaggagauugggaauggauguuuugaguucuaucacaaaugcgauaacacauguauggaguccgugaagaauggcaccuacgacuauccuaaauacagcgaagaggcuaagcugaacagagagaaaaucgaugggguuaaacuugaaucuacacggaucuaucaaauucuggccaucuacuccacgguggcgagcucccucguccuggugguuucucugggcgcuauuagcuuuuggaugugcuccaauggaucucuccagugccgcaucuguauuuga

SEQ ID NO: 198943 - RNA, 1701 nt, Artificial Sequence; identical to SEQ ID NO: 198942
  derived and/or modified CDS sequence (opt5) from hemagglutinin__InfluenzaA__AEI86774

SEQ ID NO: 198944 - RNA, 1701 nt, Artificial Sequence
  derived and/or modified CDS sequence (opt5) from hemagglutinin__InfluenzaA__AEI86784
augaaggugauccuggucguucuccuguacaccuucgccacagcuaacgccgacacgcuuugcauuggcuaucacgcgaauaacagcaccgauacaguggacaccgugcuggagaaaaaugucacagugacccauuccguuaaccuccuggaagauaagcacaaugggaaacuuuguaagcugagaggaguggcuccccuccaucugggcaaaugcaacaucgccggguggauucugggaaauccugagugugaaucucucagcacagccuccucuuggagcuacaucgucgagaccuccucuagcgacaacggcacgugcuauccgggggauuuuauugacuacgaggaacugcgggagcagcuuuccagcgugucuuccuucaagcgcuuugaaaucuuccccaagaccagcucuuggccuaaucacgauuccaacaaaggaguuacagcugccuguccccaugcuggcgccaagagcuuuuauaaaaaucugaucuggcucgugaagaaaggcaacucuuacccuaagcuguccaagagcuauauuaaugacaaagggaaggagguccuugugcuguggggaauccaccaccccuccaccucugcggaucaacagagccucuaccagaacgccgacgcuuacguguucgucggcacauccagauauagcaaaaaguuuaaaccugaaauugccauccggccgaagguucgcgaucaggaggggagaaugaauuacuauuggacccugguggagcccggagacaaaauuacguucgaagcuacaggcaaccugguggucccucgguacgccuuugcgauggagcgcaacgccgggucuggaaucauuaucuccgauacccccgugcaugacugcaauacaaccugucaaaccccuaagggcgcuaucaacacaagccuccccuuccagaauauucacccgaucacgauuggcaagugcccuaaauauguuaagucuaccaaacugagacuugccacagggcugcggaacgugcccagcauccagucccgcggacucuuuggcgcuauugccggguucaucgaaggaggcuggaccgggauggucgacggaugguacggcuaucaucaccagaaugagcaaggcucuggguacgccgcugaucuuaagagcacacagaacgcgaucgacaaaauuaccaauaaggugaacuccguuaucgaaaagaugaauacgcaguuuacagccgugggaaaagaguucaaccaccuugagaagagaauugaaaaucugaacaaaaaggucgaugacggcuuccucgauaucuggaccuacaaugcugagcugcuggugcuccuggaaaacgagcggacccuugacuaucaugauagcaaugucaaaaaccuguacgaaaaggugcgcucucagcucaagaacaaugccaaagagauugggaacggauguuuugaguucuaucacaagugcgacaauacauguauggaauccguuaaaaacggcaccuacgauuauccuaaguacagcgaggaagccaaacugaauagagaggaaaucgacggggugaagcuggagucuacacggaucuaucaaauucuggcuaucuacuccacggucgccagcucccucgugcugguugugucucugggcgcgauuagcuuuuggaugugcuccaacggaucucuccagugccgcaucuguauuuga

SEQ ID NO: 198945 - RNA, 1701 nt, Artificial Sequence
  derived and/or modified CDS sequence (opt5) from hemagglutinin__InfluenzaA__AEI86794
augaagaccauccuggugguccuccuguacacauucgccacggcuaacgccgacacccuuugcauuggcuaucacgcgaauaacagcacagauaccguugacacagugcuggagaaaaaugugaccgucacacauuccgugaaccuccuggaagauaagcacaaugggaaacuuuguaagcugagaggaguugcuccccuccaucugggcaaaugcaacaucgccggguggauucugggaaauccugagugugaaucucucagcaccgccuccucuuggagcuacaucguggagacguccucuagcgacaacgggaccugcuauccgggcaauuuuauugauuacgaagaacugcgggagcagcuuuccagcgucucuuccuucgaacgcuuugagaucuuccccaagacaagcucuuggccugaccacgauuccaacaagggagugaccgcugccuguccccaugcuggcgccaagagcuuuuauaagaaucugaucuggcucguuaaaaagggcaacucuuacccuaaacuguccaagagcuauauuaaugacaaggggaaagaagugcuuguccuguggggaauccaccaccccuccacaucugcggaucaacagagccucuaccagaacgccgacgcuuacguguucgugggcaccuccaaguauagcaaaaaguuuaaaccugagauugccaucagaccgaagguccgggaucaggaggggcgcaugaauuacuauuggacgcugguugaacccggagacaaaauuacauucgaggcuaccggcaaccugguggccccuagauacgcguuugccauggaacggaacgcugggucuggaaucauuaucuccgauacacccgugcaugacugcaauaccaccugucaaacaccuaagggcgccaucaacacgagccuccccuuccagaauauucacccgaucaccauuggcaagugcccuaaauaugucaagucuacaaaacugcgccuugcuaccgggcugagaaacgugcccagcauccagucccggggacucuuuggcgccauugccggguucaucgagggaggcuggacagggaugguugacggaugguacggcuaucaucaccagaaugaacaaggcucuggguacgcugcggaucuuaagagcacccagaacgccaucgacaaaauuacgaauaaggugaacuccgucaucgagaagaugaauacacaguuuaccgcugugggaaaagaguucaaccaccuggaaaagcgcauugagaaucugaacaaaaagguugaugacggcuuccucgauaucuggaccuacaaugccgaacugcuggugcuccuggagaacgaaagaacacuugacuaucaugauagcaaugucaaaaaccuguacgagaaggugcggucucagcucaagaacaaugccaaagagauugggaacggauguuuugaguucuaucacaagugcgacaauaccuguauggaguccgucaaaaacggcacauacgauuauccuaaguacagcgaagaggcuaaacugaaucgcgaagagaucgacggggugaaacuugagucuacgagaaucuaucaaauucuggccaucuacuccaccguugcgagcucccucgugcuggucgugucucugggcgcuauuagcuuuuggaugugcuccaacggaucucuccagugccggaucuguauuuga

SEQ ID NO: 198946 - RNA, 1701 nt, Artificial Sequence
  derived and/or modified CDS sequence (opt5) from hemagglutinin__InfluenzaA__AEI86804
augaaggccauccuggugguccuccuguacaccuucgcuacagccaacgcggacacgcuuugcauuggcuaucacgcuaauaacagcaccgauacaguugacaccgugcuggagaaaaaugugacagucacccauuccgugaaccuccuggaagauaagcacaaugggaaacuuuguaagcugagaggaguugcuccccuccaucugggcaaaugcaacaucgccggguggauucugggaaauccugagugugaaucucucagcacagccuccucuuggagcuacaucguggagaccuccucuagcgacaacggcacgugcuauccgggggauuuuauuaauuacgaagaacugcgggagcagcuuuccagcgucucuuccuucgaacgcuuugagaucuuccccaagaccagcucuuggccugaccacgauuccaacaagggagugacagccgcuuguccccaugccggcgcgaaaucuuuuuauaagaaucugauguggcucguuaaaaagggcaacagcuacccuaaacuguccaagagcuauaucaaugacaaggggaaagaagugcuuguccuguggggcauucaccaccccuccaccucugccgaucaacagagccucuaccagaacgcugacgccuacguguucgugggaacauccagauauagcaagaaauuuaagccugagaucgcuauucggccgaaaguccgcgaucaggaggggagaaugaauuacuauuggacccugguugaacccggagacaagaucacguucgaggccacaggcaaccugguggugccucgguacgcguuugccauggaacgcaacgcugggucuggaauuaucauuuccgauacccccguccaugacugcaauacaaccugucaaaccccuaaaggcgccaucaacacaagccuccccuuccagaauauccacccgauuacgaucggcaagugcccuaaguaugugaaaucuaccaagcugagacuugcuacagggcugcggaacguucccagcauucagucccgcggacucuuuggcgccaucgccggguucauugagggaggcuggaccgggaugguggacggaugguacggcuaucaucaccagaaugaacaaggcucuggguacgcugcggaucugaaaagcacacagaacgccaucgacaagaucaccaauaaagucaacuccgugauugagaagaugaauacgcaguuuacagcuguuggaaaggaguucaaccaccuugagaaaagaaucgagaaucugaacaagaaaguggaugacggcuuccucgauauuuggaccuacaaugccgaacugcugguccuccuggagaacgaacggacccuugacuaucaugauagcaaugugaagaaccuguacgagaaaguccgcucucagcucaagaacaaugccaaggagaucgggaacggauguuuugaguucuaucacaaaugcgacaauacauguauggaauccgugaagaacggcaccuacgauuauccuaaauacagcgaagaggcuaagcugaauagagaagagauugacgggguuaaacuugagucuacacggaucuaucaaauccuggccauuuacuccgcgguggcuagcucccucguccuggugguuucucugggcgccaucagcuuuuggaugugcuccaacggaucucuccagugccgcauuuguaucuga

SEQ ID NO: 198947 - RNA, 1701 nt, Artificial Sequence; identical to SEQ ID NO: 198942
  derived and/or modified CDS sequence (opt5) from hemagglutinin__InfluenzaA__AEI86814

SEQ ID NO: 198948 - RNA, 1701 nt, Artificial Sequence
  derived and/or modified CDS sequence (opt5) from hemagglutinin__InfluenzaA__AEI86824
augaaggccauccuggugguccuccuguacaccuucgcuacagccaacgcggacacgcuuugcauuggcuaucacgcuaauaacagcaccgauacaguugacaccgugcuggagaaaaaugugacagucacccauuccgugaaccuccuggaagauaagcacaaugggaaacuuuguaagcugagaggaguugcuccccuccaucugggcaaaugcaacaucgccggguggauucugggaaauccugagugugaaucucucagcacagccuccucuuggagcuacaucguggagaccuccucuagcgacaacggcacgugcuauccgggggauuuuauugacuacgaagaacugcgggagcagcuuuccagcgucucuuccuucgaacgcuuugagaucuuccccaagaccagcucuuggccugaucacgacuccaauaagggagugacagccgcuuguccccaugccggcgcgaaaucuuuuuauaagaaccugaucuggcucguuaaaaagggcaauagcuacccuaaacuguccaagagcuauauuaacgauaaggggaaagaagugcuuguccuguggggaauccaccaccccuccaccucugccgaccaacagagccucuaccagaaugcugaugccuacguguucgugggcacauccagauauagcaagaaauuuaagccugagauugcuauccggccgaaaguccgcgaccaggaggggagaaugaacuacuauuggacccugguugaacccggagauaagauuacguucgaggccacaggcaaucugguggugccucgguacgcguuugccauggaacgcaacgcugggucuggaaucauuaucuccgacacccccguccaugacugcaacacaaccugucaaaccccuaaaggcgccaucaauacaagccuccccuuccagaacauucacccgaucacgauuggcaagugcccuaaguaugugaaaucuaccaagcugagacuugcuacagggcugcggaauguucccagcauccagucccgcggacucuuuggcgccauugccggguucaucgagggaggcuggaccgggaugguggauggaugguacggcuaucaucaccagaacgaacaaggcucuggguacgcugcggaccugaaaagcacacaggaugccaucgacaagauuaccaauaaagucaacuccgugaucgagaagaugaauacgcaguuuacagcuguuggaaaggaguucaaccaccuugaaaagagaauugagaaucugaacaagaaaguggaugacggcuuccucgauaucuggaccuacaaugccgaacugcugguccuccuggagaacgaacggacccuugacuaucaugauagcaaugugaagaaccuguacgagaaaguccgcucucagcucaagaauaacgccaaggagauugggaacggauguuuugaguucuaucacaaaugcgacaauacauguauggaguccgugaagaacggcaccuacgauuauccuaaauacagcgaagaggcuaagcugaauagagagaaaaucgacgggguuaaacuugaaucuacacggaucuaucaaauucuggccaucuacuccacgguggcgagcucccucguccuggugguuucucugggcgcuauuagcuuuuggaugugcuccaacggaucucuccagugccgcaucuguauuuga

SEQ ID NO: 198949 - RNA, 1701 nt, Artificial Sequence
  derived and/or modified CDS sequence (opt5) from hemagglutinin__InfluenzaA__AEI86834
augaaggccauccuggugguccuccuguacaccuucgcuacagccaacgcggacacgcuuugcauuggcuaucacgcuaauaacagcaccgauacaguugacaccgugcuggagaaaaaugugacagucacccauuccgugaaccuccuggaagauaagcacaaugggaaacuuuguaagcugagaggaguugcuccccuccaucugggcaaaugcaacaucgccggguggauucugggaaauccugagugugaaucucucagcacagccuccucuuggagcuacaucguggagaccuccucuagcgacaacggcacgugcuauccggggaauuuuauugauuacgaagaacugcgggagcagcuuuccagcgucucuuccuucgaacgcuuugagaucuuccccaagaccagcucuuggccugaccacgauuccaacaagggagugacagccgcuuguccccaugccggcgcgaaaucuuuuuauaagaaucugaucuggcucguuaaaaagggcaacagcuacccuaaacuguccaagagcuauauuaaugacaaggggaaagaagugcuuguccuguggggaauccaccaccccuccaccucugccgaucaacagagccucuaccagaacgcugacgccuacguguucgugggcacauccagauauagccggaaguuuaaaccugagauugcuauccgcccgaaggucagagaucaggaggggcggaugaauuacuauuggacccugguugaacccggagacaaaauuacguucgaggccacaggcaaccugguggcgccucgcuacgccuuugcuauggaaagaaacgccgggucuggaaucauuaucuccgauacccccgugcaugacugcaauacaaccugucaaaccccuaagggcgcuaucaacacaagccuccccuuccagaauauucacccgaucacgauuggcaaaugcccuaaguaugucaagucuaccaaacugcggcuugccacagggcugcgcaacgugcccagcauccaguccagaggacucuuuggcgccauugcuggguucaucgagggaggcuggaccgggaugguugacggaugguacggcuaucaucaccagaaugaacaaggcucuggguacgcggccgaucuuaagagcacacagaacgcuaucgacaaaauuaccaauaaggugaacuccgucaucgagaaaaugaauacgcaguuuacagccgugggaaaggaguucaaccaccuugaaaagcggauugagaaucugaacaaaaagguugaugacggcuuccucgauaucuggaccuacaaugccgaacugcuggugcuccuggagaacgaacgcacccuugacuaucaugauagcaaugucaaaaaccuguacgagaaggugagaucucagcucaaaaacaaugcuaaggagauugggaacggauguuuugaguucuaucacaagugcgacaauacauguauggaguccgucaaaaacggcaccuacgauuauccuaaguacagcgaagaggccaaacugaaucgggaagagaucgacggggugaagcuggagucuacacgcaucuaucaaauucuggcgaucuacuccacgguugcuagcucccucgugcuggucgugucucugggcgccauuagcuuuuggaugugcuccaacggaucucuccagugcagaaucuguauuuga

SEQ ID NO: 198950 - RNA, 1701 nt, Artificial Sequence; identical to SEQ ID NO: 197656
  derived and/or modified CDS sequence (opt5) from hemagglutinin__InfluenzaA__AEI86854

SEQ ID NO: 198951 - RNA, 1701 nt, Artificial Sequence
  derived and/or modified CDS sequence (opt5) from hemagglutinin__InfluenzaA__AEI86864
augaaggccauccugguggcucuccuguacaccuucgccacagcgaacgcugacacgcuuugcauuggcuaucacgccaauaacagcaccgauacagucgacaccguucuggagaaaaaugugacagugacccauuccgucaaccuccuggaagauaagcacaaugggaaacuuuguaagcugagaggaguggcuccccuccaucugggcaaaugcaacaucgccggguggauucugggaaauccugagugugaaucucucagcacagccuccucuuggagcuacaucguugagaccuccucuagcgacaacggcacgugcuauccgggggauuuuauuaauuacgaagaacugcgggagcagcuuuccagcgugucuuccuucgaacgcuuugagaucuuccccaagaccagcucuuggccuaaccacgacuccaauaagggagucacagcugccuguccccaugcgggcgccaagagcuuuuauaaaaaccugaucuggcucgugaaaaagggcaauucuuacccuaaacuguccaagagcuauauuaacgauaaggggaaagaaguucuugugcuguggggaauccaccaccccuccaccacagcugaccaacagucucucuaccagaaugccgaugcuuacgucuucgugggcaccagcagauauuccaagaaauuuaagccugagauugccauccggccgaaagugcgcgaccaggaggggagaaugaacuacuauuggacgcuggucgaacccggagauaagauuacauucgaggcgaccggcaaccugguugugccucgguacgccuuugcuauggaacgcaaugccgggagcggaaucauuaucucugacacacccgugcaugauugcaacaccaccugucaaacaccuaaaggcgcuaucaauacgucccuccccuuccagaacauucacccgaucaccauuggcaagugcccuaaguaugucaaaagcacaaagcugagacuugccaccgggcugcggaaugugcccucuauccagagccgcggacucuuuggcgccauugcuggguucaucgagggaggcuggacagggaugguugacggaugguacggcuaucaucaccagaacgaacaaggcuccggguacgcggccgaccugaaaucuacccagaaugcuaucgauaagauuacgaacaaagugaauagcgucaucgagaagaugaacacacaguuuaccgccgugggaaaggaguucaaucaccuugagaaaagaauugagaaccugaauaagaaaguugacgauggcuuccucgacaucuggaccuacaacgccgaacugcuggugcuccuggagaaugaacggacacuugauuaucaugacuccaacgucaagaaccuguacgagaaagugcgcaaucagcucaagaacaaugcuaaggagauugggaacggauguuuugaguucuaucacaaaugcgauaauaccuguauggaaagcgucaagaacggcacauacgacuauccuaaauacucugaagaggccaagcugaauagagaagagaucgauggggugaaacuugaguccacgcggaucuaucaaauucuggcgaucuacagcaccguugcuucuucccucgugcuggucgugagccugggcgccauuuccuuuuggaugugcucuaacggaagccuccagugccgcaucuguauuuga

SEQ ID NO: 198952 - RNA, 1701 nt, Artificial Sequence; identical to SEQ ID NO: 198942
  derived and/or modified CDS sequence (opt5) from hemagglutinin__InfluenzaA__AEI86874

SEQ ID NO: 198953 - RNA, 1701 nt, Artificial Sequence
  derived and/or modified CDS sequence (opt5) from hemagglutinin__InfluenzaA__AEI86894
augaaggccauccuggugguccuccuguacaccuucgcuacagccaacgcggacacgcuuugcauuggcuaucacgcuaauaacagcaccgauacaguugacaccgugcuggagaaaaaugugacagucacccauuccgugaaccuccuggaagauaagcacaaugggaaacuuuguaagcugagaggaguugcuccccuccaucugggcaaaugcaacaucgccggguggauucugggaaauccugagugugaaucucucagcacagccuccucuuggagcuacaucguggagaccuccucuagcgacaacggcacgugcuauccggggaauuuuauugauuacgaagaacugcgggagcagcuuuccagcgucucuuccuucgaacgcuuugagaucuuccccaagaccagcucuuggccugaccacgauuccaacaagggagugacagccgcuuguccccaugccggcgcgaaaucuuuuuauaagaaucugaucuggcucguuaaaaagggcaacagcuacccuaaacuguccaagagcuauauuaaugacaaggggaaagaagugcuuguccuguggggaauccaccaccccuccaccucugccgaucaacagagccucuaccagaacgcugacgccuacguguucgugggcacauccagauauagcaagaaauuuaagccugagauugcuauccggccgaaaguccgcgaucaggaggggagaaugaauuacuauuggacccugguugaacccggagacaagauuacguucgaggccacaggcaaccugguggcgccucgguacgccuuugcuauggaacgcaacgccgggucuggaaucauuaucuccgauacccccgugcaugacugcaauacaaccugucaaaccccuaaaggcgcuaucaacacaagccuccccuuccagaauauucacccgaucacgauuggcaagugcccuaaguaugucaaaucuaccaagcugagacuugccacagggcugcggaacgugcccagcauccagucccgcggacucuuuggcgccauugcuggguucaucgagggaggcuggaccgggaugguugacggaugguacggcuaucaucaccagaaugaacaaggcucuggguacgcggccgaucugaaaagcacacagaacgcuaucgacaagauuaccaauaaagugaacuccgucaucgagaagaugaauacgcaguuuacagccgugggaaaggaguucaaccaccuugagaaaagaauugagaaucugaacaagaaaguugaugacggcuuccucgauaucuggaccuacaaugccgaacugcuggugcuccuggagaacgaacggacccuugacuaucaugauagcaaugucaagaaccuguacgagaaagugcgcucucagcucaagaacaaugcuaaggagauugggaacggauguuuugaguucuaucacaaaugcgacaauacauguauggaauccgucaagaacggcaccuacgauuauccuaaauacagcgaagaggccaagcugaauagagaagagaucgacggggugaaacuugagucuacacggaucuaucaaauucuggcgaucuacuccacgguugcuagcucccucgugcuggucgugucucugggcgccauuagcuuuuggaugugcuccaacggaucucuccagugccgcaucuguauuuga

SEQ ID NO: 198954 - RNA, 1701 nt, Artificial Sequence
  derived and/or modified CDS sequence (opt5) from hemagglutinin__InfluenzaA__AEI86904
augaaggccauccuggugguccuccuguacaccuucacaacggcuaacgccgacacccuuugcauuggcuaucacgcgaauaacagcacagauaccguugacacagugcuggagaaaaaugugaccgucacacauuccgugaaccuccuggaagauaagcacaaugggaaacuuuguaagcugagaggaguugcuccccuccaucugggcaaaugcaacaucgccggguggauucugggaaauccugagugugaaucucucagcaccgccuccucuuggagcuacaucguggagacguccucuagcgacaacgggaccugcuauccgggcgauuuuauugacuacgaagaacugcgggagcagcuuuccagcgucucuuccuucgaacgcuuugagaucuuccccaagacaagcucuuggccuaaucacgauuccaacaagggagugaccgcugccuguccccaugcuggcgccaagagcuuuuauaaaaaucugaucuggcucguuaaaaagggcaacucuuacccuaaacuguccaagagcuauauuaaugacaaggggaaagaagugcuuguccuguggggaauccaccaccccuccacaaccgcggaucaacagucucucuaccagaacgccgacgcuuacguguucgugggcacgagcagauauuccaagaaauuuaagccugagauugccauccggccgaaaguccgcgaucaggaggggagaaugaauuacuauuggacacugguugaacccggagacaagauuaccuucgaggcuacaggcaaccugguggugccucgguacgccuuugcgauggaacgcaacgccgggagcggaaucauuaucucugauacccccguccaugacugcaauaccacaugucaaacgccuaaaggcgcuaucaacaccucccuccccuuccagaauauucacccgaucacaauuggcaagugcccuaaguaugugaaaagcaccaagcugagacuugccacagggcugcggaacguucccucuauccagagccgcggacucuuuggcgcuauugccggguucaucgagggaggcuggaccgggaugguggacggaugguacggcuaucaucaccagaaugaacaaggcuccggguacgccgcugaucugaaaucuacgcagaacgcgaucgacaagauuacaaauaaagucaacagcgugaucgagaagaugaauacccaguuuaccgccguuggaaaggaguucaaccaccuugagaaaagaauugagaaucugaacaagaaaguggaugacggcuuccucgauaucuggacauacaaugcugaacugcugguccuccuggagaacgaacggacccuugacuaucaugauuccaaugugaagaaccuguacgagaaaguccgcaaccagcucaagaauaacgccaaggagauugggaauggauguuuugaguucuaucacaaaugcgacaacacauguauggaaagcgugaagaauggcacguacgauuauccuaaauacucugaagaggccaagcugaacagagaagagaucgacgggguuaaacuugaguccacccggaucuaucaaauucuggcuaucuacagcacaguggccucuucccucguccuggugguuagccugggcgcgauuuccuuuuggaugugcucuaauggaagccuccagugccgcaucuguauuuga

SEQ ID NO: 198955 - RNA, 1701 nt, Artificial Sequence
  derived and/or modified CDS sequence (opt5) from hemagglutinin__InfluenzaA__AEI86914
augaaggccauccuggugguccuccuguacaccuucgcuacagccaacgcggacacgcuuugcauuggcuaucacgcuaauaacagcaccgauacaguugacaccgugcuggagaagaaugugacagucacccauuccgugaaccuccuggaagauaagcacaaugggaaacuuuguaagcugagaggaguugcuccccuccaucugggcaaaugcaacaucgccggguggauucugggaaauccugagugugaaucucucagcacagccuccucuuggagcuacaucguggagaccuccucuagcgacaacggcacgugcuauccgggggauuuuauuaauuacgaagaacugcgggagcagcuuuccagcgucucuuccuucgaacgcuuugagaucuuccccaagaccagcucuuggccuaaccacgacuccaauaagggagugacagccgcuuguccccaugccggcgcgaaaucuuuuuauaagaaccugaucuggcucguuaaaaagggcaauagcuacccuagacuguccaaaagcuauauuaacgauaaggggaaggaagugcuuguccuguggggaauccaccaccccuccaccacagccgaccaacagucucucuaccagaaugcugaugccuacguguucgugggcaccagccgguauuccaaaaaguuuaaaccugagauugcuauccgcccgaaggucagagaccaggaggggcggaugaacuacuauuggacgcugguugaacccggagauaaaauuacauucgaggccaccggcaaccugguggugccucgcuacgcguuugccauggaaagaaaugcugggagcggaaucauuaucucugacacacccguccaugauugcaacaccaccugucaaacaccuaagggcgccaucaauacgucccuccccuuccagaacauucacccgaucaccauuggcaaaugcccuaaguauguuaagagcacaaaacugcggcuugcuaccgggcugcgcaaugugcccucuauccagagcagaggacucuuuggcgccauugccggguucaucgagggaggcuggacagggaugguggacggaugguacggcuaucaucaccagaacgaacaaggcuccggguacgcugcggaccugaagucuacccagaaugccaucgauaaaauuacgaacaaggucaauagcgugaucgagaaaaugaacacacaguuuaccgcuguuggaaaggaguucaaucaccuugaaaagcggauugagaaccugaauaaaaagguggacgauggcuuccucgacaucuggaccuacaacgccgaacugcugguccuccuggagaaugaacgcacacuugauuaucaugacuccaacgugaaaaaccuguacgagaaggucagaaaucagcucaaaaacaaugccaaggagauugggaacggauguuuugaguucuaucacaagugcgauaauaccuguauggagagcgugaaaaacggcacauacgacuauccuaaguacucugaagaggcuaaacugaaucgggaagagaucgaugggguuaaacuugaguccacgcgcaucuaucaaauucuggccaucuacagcaccguggcgucuucccucguccuggugguuagccugggcgcuauuuccuuuuggaugugcucuaacggaagccuccagugcagaaucuguauuuga

SEQ ID NO: 198956 - RNA, 1701 nt, Artificial Sequence
  derived and/or modified CDS sequence (opt5) from hemagglutinin__InfluenzaA__AEI86924
augaaggccauccuggugguccuccuguacaccuucgcuacagccaacgcggacacgcuuugcauuggcuaucacgcuaauaacagcaccgauacaguugacaccgugcuggagaaaaaugugacagucacccauuccgugaaccuccuggaagauaagcacaaugggaaacuuuguaagcugagaggaguugcuccccuccaucugggcaaaugcaacaucgccggguggauucugggaaauccugagugugaaucucucagcacagccuccucuuggagcuacaucguggagaccuccucuagcgacaacggcacgugcuauccgggggucuuuauugauuacgaagaacugcgggagcagcuuuccagcgugucuuccuucgaacgcuuugagaucuuccccaagaccagcucuuggccuaaucacgacuccaacaagggaguuacagccgcuuguccccaugccggcgcgaaaucuuuuuauaagaaucugaucuggcucauuaaaaagggcaacagcuacccuaaacuguccaagagcuauaucaaugauaaggggaaagaagugcuuguccuguggggcauucaccaccccuccaccacagccgaccaacagucucucuaccagaacgcugaugccuacguguucgugggaaccagcagauauuccaagaaauuuaagccugagaucgcuguccggccgaaaguucgcgaccaggaggggagaaugaauuacuauuggacgcugguggaacccggagauaagauuacauucgaggccaccggcaaccugguggucccucgguacgcguuugccauggaacgcaacgcugggagcggaaucauuaucucugacacacccgugcaugauugcaauaccaccugucaaacaccuaaaggcgccaucaacacgucccuccccuuccagaauauucacccgaucaccauuggcaagugcccuaaguauguuaaaagcacaaagcugagacuugcuaccgggcugcggaacgugcccucuauccagagccgcggacucuuuggcgccauugccggguucaucgagggaggcuggacagggauggucgacggaugguacggcuaucaucaccagaaugaacaaggcuccggguacgcugcggaccugaaaucuacccagaacgccaucgauaagauuacgaauaaagugaacagcguuaucgagaagaugaauacacaguuuaccgcugugggaaaggaguucaaccaccuugagaaaagaauugagaaucugaacaagaaagucgacgauggcuuccucgacaucuggaccuacaaugccgaacugcuggugcuccuggagaacgaacggacacuugauuaucaugacuccaaugucaagaaccuguacgagaaagugcgcaaccagcucaagaauaacgccaaggagauugggaauggauguuuugaguucuaucacaaaugcgauaacaccuguauggaaagcguuaagaauggcacauacgacuauccuaaauacucugaagaggcuaagcugaacagagaagagaucgauggggugaaacuugaguccacgcggaucuaucaaauucuggccaucuacagcaccgucgcgucuucccucgugcugguugugagccugggcgcuauuuccuuuuggaugugcucuaauggaagccuccagugccgcaucuguauuuga

SEQ ID NO: 198957 - RNA, 1701 nt, Artificial Sequence; identical to SEQ ID NO: 198942
  derived and/or modified CDS sequence (opt5) from hemagglutinin__InfluenzaA__AEI86934

SEQ ID NO: 198958 - RNA, 1701 nt, Artificial Sequence; identical to SEQ ID NO: 197656
  derived and/or modified CDS sequence (opt5) from hemagglutinin__InfluenzaA__AEI86944

SEQ ID NO: 198959 - RNA, 1701 nt, Artificial Sequence
  derived and/or modified CDS sequence (opt5) from hemagglutinin__InfluenzaA__AEI86964
augaaggccauccuggugguccuccuguacaccuucgcuacagccaacgcggacacgcuuugcauuggcuaucacgcuaauaacagcaccgauacaguugacaccgugcuggagaaaaaugugacagucacccauuccgugaaccuccuggaagauaagcacaaugggaaacuuuguaagcugagaggaguugcuccccuccaucugggcaaaugcaacaucgccggguggauucugggaaauccugagugugaaucucucagcacagccuccucuuggagcuacaucguggagaccuccucuagcgacaacggcacgugcuauccgggggucuuuauugauuacgaagaacugcgggagcagcuuuccagcgugucuuccuucgaacgcuuugagaucuuccccaagaccagcucuuggccuaaucacgacuccaacaagggaguuacagccgcuuguccccaugccggcgcgaaaucuuuuuauaagaaucugaucuggcucgugaaaaagggcaacagcuacccuaaacuguccaagagcuauauuaaugauaaggggaaagaaguccuugugcuguggggaauccaccaccccuccaccacagccgaccaacagucucucuaccagaacgcugaugccuacguguucgucggcaccagcagauauuccaagaaauuuaagccugagauugcuguucggccgaaagugcgcgaccaggaggggagaaugaauuacuauuggacgcugguggaacccggagauaagaucacauucgaggccaccggcaaccuggucgugccucgguacgcguuugccauggaacgcaacgcugggagcggaauuaucauuucugacacacccguucaugauugcaauaccaccugucaaacaccuaaaggcgccaucaacacgucccuccccuuccagaauauccacccgauuaccaucggcaagugcccuaaguaugugaaaagcacaaagcugagacuugcuaccgggcugcggaacguccccucuauucagagccgcggacucuuuggcgccaucgccggguucauugagggaggcuggacagggaugguggacggaugguacggcuaucaucaccagaaugaacaaggcuccggguacgcugcggaccugaaaucuacccagaacgccaucgauaagaucacgaauaaaguuaacagcgugauugagaagaugaauacacaguuuaccgcugucggaaaggaguucaaccaccuugagaaaagaaucgagaaucugaacaagaaaguggacgauggcuuccucgacauuuggaccuacaaugccgaacugcugguccuccuggagaacgaacggacacuugauuaucaugacuccaaugugaagaaccuguacgagaaaguucgcaaccagcucaagaauaacgccaaggagaucgggaauggauguuuugaguucuaucacaaaugcgauaacauguguauggaaagcgugaagaauggcaccuacgacuauccuaaauacucugaagaggcuaagcugaacagagaagagauugauggggucaaacuugaguccacacggaucuaucaaauccuggccauuuacagcacgguggcgucuucccucguucugguggucagccugggcgcuaucuccuuuuggaugugcucuaauggaagccuccagugccgcauuuguaucuga

SEQ ID NO: 198960 - RNA, 1701 nt, Artificial Sequence; identical to SEQ ID NO: 197898
  derived and/or modified CDS sequence (opt5) from hemagglutinin__InfluenzaA__AEI86974

SEQ ID NO: 198961 - RNA, 1701 nt, Artificial Sequence; identical to SEQ ID NO: 197656
  derived and/or modified CDS sequence (opt5) from hemagglutinin__InfluenzaA__AEI86984

SEQ ID NO: 198962 - RNA, 1701 nt, Artificial Sequence; identical to SEQ ID NO: 197656
  derived and/or modified CDS sequence (opt5) from hemagglutinin__InfluenzaA__AEI86994

SEQ ID NO: 198963 - RNA, 1701 nt, Artificial Sequence
  derived and/or modified CDS sequence (opt5) from hemagglutinin__InfluenzaA__AEI87004
augaaggccauccuggugguccuccuguacaccuucgcuacagccaacgcggacacgcuuugcauuggcuaucacgcuaauaacagcaccgauacaguugacaccgugcuggagaagaaugugacagucacccauuccgugaaccuccuggaagauaagcacaaugggaaacuuuguaagcugaaaggaguugcgccccuccaucugggcaagugcaacaucgccggguggauucugggaaauccugagugugaaucucucagcacagcuuccucuuggagcuacaucguggagaccuccucuagcgacaacggcacgugcuauccggggaauuuuauugauuacgaagaacugagagagcagcuuuccagcgucucuuccuucgaacgguuugagaucuuccccaagaccagcucuuggccugaccacgauuccaacaaaggagugacagccgcuuguccccaugccggcgccaagagcuuuuauaaaaaucugaucuggcucguuaagaaaggcaacucuuacccuaagcuguccaagagcuauauuaaugacaaagggaaggaagugcuuguccuguggggaauccaccaccccuccaccucugccgaucaacagggccucuaccagaacgcugacgccuacguguucguggggacaagccgcuauuccaaaaaguuuaaaccugagauugcuaucagaccgaagguccgggaucaggagggacgcaugaauuacuauuggacccugguugaacccggcgacaaaauuacguucgaggccacagggaaccugguggcgccuagauacgccuuugcuauggaacggaacgccggaagcggcaucauuaucucugauacccccgugcaugacugcaauacaaccugucaaaccccuaagggcgcuaucaacacaucccuccccuuccagaauauucacccgaucacgauugggaagugcccuaaauaugucaagagcaccaaacugcgccuugccacaggacugagaaacgugcccucuauccagagccggggccucuuuggggccauugcuggauucaucgagggcggguggaccggaaugguugacggcugguacggcuaucaucaccagaaugaacaaggguccggauacgcggccgaucugaagucuacacagaacgcuaucgacaaaauuaccaauaaggugaacagcgucaucgagaagaugaauacgcaguuuacagccgugggcaaagaguucaaccaccuugaaaagcgcauugagaaucugaacaaaaagguugaugacggguuccucgauaucuggaccuacaaugccgaacugcuggugcuccuggagaacgaaagaacccuugacuaucaugauuccaaugucaaaaaccuguacgagaaggugcggagccagcucaagaacaaugcuaaagagauuggaaacggcuguuuugaguucuaucacaagugcgacaauacauguauggagucugucaaaaacgggaccuacgauuauccuaaguacuccgaagaggccaaacugaaucgcgaagagaucgacggcgugaaacuugagagcacaagaaucuaucaaauucuggcgaucuacucuacgguugcuuccagccucgugcuggucgugucccugggagccauuucuuuuuggaugugcagcaacggcucccuccagugccggaucuguauuuga

SEQ ID NO: 198964 - RNA, 1701 nt, Artificial Sequence
  derived and/or modified CDS sequence (opt5) from hemagglutinin__InfluenzaA__AEI87014
augaaggccauccuggugguccuccuguacaccuucgcuacagccaacgcggacacgcuuugcauuggcuaucacgcuaauaacagcaccgauacaguugacaccgugcuggagaaaaaugugacagucacccauuccgugaaccuccuggaagauaagcacaaugggaaacuuuguaagcugagaggaguugcuccccuccaucugggcaaaugcaacaucgccggguggauucugggaaauccugagugugaaucucucagcacagccuccucuuggagcuacaucguggagaccuccucuagcgacaacggcacgugcuauccgggggauuuuauugacuacgaagaacugcgggagcagcuuuccagcgucucuuccuucgaacgcuuugagaucuuccccaagaccagcucuuggccuaaucacgauuccaacaagggagugacagccgcuuguccccaugccggcgcgaaaucuuuuuauaagaaucugaucuggcucguuaaaaagggcaacagcuacccuaaacuguccaagagcuauauuaaugacaaggggaaagaagugcuuguccuguggggaauccaccaccccuccaccucugccgaucaacagagccucuaccagaacgcugacgccuacguguucgugggcacauccagauauagcaagaaauuuaagccugagauugcuauccggccgaaaguccgcgaucaggaggggagaaugaauuacuauuggacccugguugaacccggagacaagauuacguucgaggccacaggcaaccugguggugccucgguacgcguuugccauggaacgcaacgcugggucuggaaucauuaucuccgauacccccguccaugacugcaauacaaccugucaaaccccuaaaggcgccaucaacacaagccuccccuuccagaauauucacccgaucacgauuggcaagugcccuaaguaugugaaaucuaccaagcugagacuugcuacagggcugcggaacguucccagcauccagucccgcggacucuuuggcgccauugccggguucaucgagggaggcuggaccgggaugguggacggaugguacggcuaucaucaccagaaugaacaaggcucuggguacgcugcggaucugaaaagcacacagaacgccaucgacaagauuaccaauaaagucaacuccgugaucgagaagaugaauacgcaguuuacagcuguuggaaaggaguucaaccaccuugagaaaagaauugagaaucugaacaagaaaguggaugacggcuuccucgauaucuggaccuacaaugccgaacugcugguccuccuggagaacgaacggacccuugacuaucaugauagcaaugugaagaaccuguacgagaaaguccgcucucagcucaagaacaaugccaaggagauugggaacggauguuuugaguucuaucacaaaugcgacaauacauguauggaauccgugaagaacggcaccuacgauuauccuaaauacagcggggaagcuaagcugaauagagaggaaaucgacggcguuaaacuugagucuacacggaucuaucaaauucuggccaucuacuccacgguggcgagcucccucguccuggugguuucucugggagcuauuagcuuuuggaugugcuccaacggcucucuccagugccgcaucuguauuuga

SEQ ID NO: 198965 - RNA, 1701 nt, Artificial Sequence
  derived and/or modified CDS sequence (opt5) from hemagglutinin__InfluenzaA__AEI87034
augaaggccauccuggugguccuccuguacaccuucgcuacagccaacgcggacacgcuuugcauuggcuaucacgcuaauaacagcaccgauacaguugacaccgugcuggagaaaaaugugacagucacccauuccgugaaccuccuggaagauaagcacaaugggaaacuuuguaagcugagaggaguugcuccccuccaucugggcaaaugcaacaucgccggguggauucugggaaauccugagugugaaucucucagcacagccuccucuuggagcuacaucguggagaccuccucuagcgacaacggcacgugcuauccgggggauuuuauugacuacgaagaacugcgggagcagcuuuccagcgucucuuccuucgaacgcuuugagaucuuccccaagaccagcucuuggccugaucacgacuccaauaagggagugacagccgcuuguccccaugccggcgcgaaaucuuuuuauaagaaccugaucuggcucguuaaaaagggcaauagcuacccuaaacuguccaagagcuauauuaacgauaaggggaaagaagugcuuguccuguggggaauccaccaccccuccaccucugccgaccaacagagccucuaccagaaugcugaugccuacguguucgugggcacauccagauauagcaagaaauuuaagccugagauugcuauccggccgaaaguccgcgaccaggaggggagaaugaacuacuauuggacccugguugaacccggagauaagauuacguucgaggccacaggcaaucugguggugccucgguacgcguuugccauggaacgcaacgcugggucuggaaucauuaucuccgacacccccguccaugacugcaacacaaccugucaaaccccuaaaggcgccaucaauacaagccuccccuuccagaacauucacccgaucacgauuggcaagugcccuaaguaugugaaaucuaccaagcugagacuugcuacagggcugcggaauguucccagcauccagucccgcggacucuuuggcgccauugccggguucaucgagggaggcuggaccgggaugguggauggaugguacggcuaucaucaccagaacgaacaaggcucuggguacgcugcggaccugaaaagcacacagaaugccaucgauaagauuaccaacaaagucaauuccgugaucgagaagaugaacacgcaguuuacagcuauuggaaaggaguucaaucaccuugagaaaagaaucgagaaccugaauaagaaaguugacgauggcuuccucgacauuuggaccuacaacgccgaacugcuggugcuccuggagaaugaacggacccuugauuaucaugacagcaacgucaagaaucuguacgagaaagugcgcucucagcucaagaacaacgccaaggagaucgggaauggauguuuugaguucuaucacaaaugcgauaacacauguauggaauccgucaagaauggcaccuacgacuauccuaaauacagcgaagaggcuaagcugaacagagaagagaucgauggggugaaacuugagucuacacggauuuaucaaauccuggccauuuacuccacgguugcgagcucccucgugcuggucgugucucugggcgcuaucagcuuuuggaugugcuccaauggaucucuccagugccgcauuuguaucuga

SEQ ID NO: 198966 - RNA, 1701 nt, Artificial Sequence; identical to SEQ ID NO: 197656
  derived and/or modified CDS sequence (opt5) from hemagglutinin__InfluenzaA__AEI87044

SEQ ID NO: 198967 - RNA, 1701 nt, Artificial Sequence; identical to SEQ ID NO: 195905
  derived and/or modified CDS sequence (opt5) from hemagglutinin__InfluenzaA__AEI87054

SEQ ID NO: 198968 - RNA, 1701 nt, Artificial Sequence
  derived and/or modified CDS sequence (opt5) from hemagglutinin__InfluenzaA__AEI87064
augaaggccauccuggugguccuccuguacaccuucgcuacagccaacgcggacacgcuuugcauuggcuaucacgcuaauaacagcaccgauacaguugacaccgugcuggagaaaaaugugacagucacccauuccgugaaccuccuggaagauaagcacaaugggaaacuuuguaagcugagaggaguugcuccccuccaucugggcaaaugcaacaucgccggguggauucugggaaauccugagugugaaucucucagcacagccuccucuuggagcuacaucguggagaccuccucuagcgacaacggcacgugcuauccgggggauuuuauugacuacgaagaacugcgggagcagcuuuccagcgucucuuccuucgaacgcuuugagaucuuccccaagaccagcucuuggccuaaucacgauuccaacaagggagugacagccgcuuguccccaugccggcgcgaaaucuuuuuauaagaaucugaucuggcucguuaaaaagggcaacagcuacccuaaacuguccaagagcuauauuaaugacaaggggaaagaagugcuuguccuguggggaauccaccaccccuccaccacagccgaucaacagucucucuaccagaacgcugacaccuacguguucgugggcacgagcagauauuccaagaaauuuaagccugagauugccauccggccgaaaguccgcgaucaggaggggagaaugaauuacuauuggacacugguugaacccggagacaagauuaccuucgaggcuacaggcaaccugguggugccucgguacgccuuugcgauggaacgcaacgccgggagcggaaucauuaucucugauacccccguccaugacugcaauaccacaugucaaacgccuaaaggcgcuaucaacaccucccuccccuuccagaauauucacccgaucacaauuggcaagugcccuaaguaugugaaaagcaccaagcugagacuugccacagggcugcggaacguucccucuauccagagccgcggacucuuuggcgcuauugccggguucaucgagggaggcuggaccgggaugguggacggaugguacggcuaucaucaccagaaugaacaaggcuccggguacgccgcugaucugaaaucuacgcagaacgcgaucgacaagauuacaaauaaagucaacagcgugaucgagaagaugaauacccaguuuaccgccguuggaaaggaguucaaccaccuugagaaaagaauugagaaucugaacaagaaaguggaugacggcuuccucgauaucuggacauacaaugcugaacugcugguccuccuggagaacgaacggacccuugacuaucaugauuccaaugugaagaaccuguacgagaaaguccgcaaccagcucaagaauaacgccaaggagauugggaauggauguuuugaguucuaucacaaaugcgacaacacauguauggaaagcgugaagaauggcacguacgauuauccuaaauacucugaagaggccaagcugaacagagaagagaucgacgggguuaaacuugaguccacccggaucuaucaaauucuggcuaucuacagcacagccgcgucuucccucgugcuggucgugagccugggcgcuauuuccuuuuggaugugcucuaauggaagccuccagugccgcaucuguauuuga

SEQ ID NO: 198969 - RNA, 1701 nt, Artificial Sequence
  derived and/or modified CDS sequence (opt5) from hemagglutinin__InfluenzaA__AEI87074
augaaggccacccuggugguccuccuguacacauucgcuacggccaacgcggacacccuuugcaucggcuaucacgcuaauaacagcacagauaccguugacacagugcuggagaaaaaugugaccgucacacauuccgugaaccuccuggaagauaagcacaaugggaaacuuuguaagcugagaggaguugcuccccuccaucugggcaaaugcaacauugccggguggauccugggaaauccugagugugaaucucucagcaccgccuccucuuggagcuacauuguggagacguccucuagcgacaacggaaccugcuauccgggggauuuuaucaauuacgaagaacugcgggagcagcuuuccagcgucucuuccuucgaacgcuuugagauuuuccccaagacaagcucuuggccuaaccacgacuccaauaagggagugaccgccgcuuguccccaugccggcgcgaaaucuuuuuauaagaaccugaucuggcucguuaaaaagggcaauagcuacccuaaacuguccaagagcuauaucaacgauaaggggaaagaagugcuuguccuguggggcauucaccaccccuccacaaccgccgaccaacagucucucuaccagaaugcugaugccuacguguucgugggcacgagcagauauuccaagaaauuuaagccugagaucgcuauucggccgaaaguccgcgaccaggaggggagaaugaacuacuauuggacacugguugaacccggagauaagaucaccuucgaggccacaggcaaccugguggugccucgguacgcguuugccauggaacgcaaugcugggagcggaauuaucauuucugacacccccguccaugauugcaacaccacaugucaaacgccuaaaggcgccaucaauaccucccuccccuuccagaacauccacccgauuacaaucggcaagugcccuaaguaugugaaaagcaccaagcugagacuugcuacagggcugcggaauguucccucuauucagagccgcggacucuuuggcgccaucgccggguucauugagggaggcuggaccgggaugguggacggaugguacggcuaucaucaccagaacgaacaaggcuccggguacgcugcggaccugaaaucuacgcagaaugccaucgauaagaucacaaacaaagucaauagcgugauugagaagaugaacacccaguuuaccgcuguuggaaaggaguucaaucaccuugagaaaagaaucgagaaccugaauaagaaaguggacgauggcuuccucgacauuuggacauacaacgccgaacugcugguccuccuggagaaugaacggacccuugauuaucaugacuccaacgugaagaaccuguacgagaaaguccgcaaucagcucaagaacaaugccaaggagaucgggaacggauguuuugaguucuaucacaaaugcgauaauacauguauggaaagcgugaagaacggcacguacgacuauccuaaauacucugaagaggcuaagcugaauagagaagagauugaugggguuaaacuugaguccacccggaucuaucaaauccuggccauuuacagcacaguggcgucuucccucguccuggugguuagccugggcgcuaucuccuuuuggaugugcucuaacggaagccuccagugccgcauuuguaucuga

SEQ ID NO: 198970 - RNA, 1701 nt, Artificial Sequence
  derived and/or modified CDS sequence (opt5) from hemagglutinin__InfluenzaA__AEI87094
augaaggccauccuggugguccuccuguacaccuucgcuacagccaacgcggacacgcuuugcauuggcuaucacgcuaauaacagcaccgauacaguugacaccgugcuggagaaaaaugugacagucacccauuccgugaaccuccuggaagauaagcacaaugggaaacuuuguaagcugagaggaguugcuccccuccaucugggcaaaugcaacaucgccggguggauucugggaaauccugagugugaaucucucagcacagccuccucuuggagcuacaucguggagaccuccucuagcgacaacggcacgugcuauccgggggauuuuauugacuacgaagaacugcgggagcagcuuuccagcgucucuuccuucgaacgcuuugagaucuuccccaagaccagcucuuggccugaucacgacuccaauaagggagugacagccgcuuguccccaugccggcgcgaaaucuuuuuauaagaaccugaucuggcucguuaaaaagggcaauagcuacccuaaacuguccaagagcuauauuaacgauaaggggaaagaagugcuuguccuguggggaauccaccaccccuccaccucugccgaccaacagagccucuaccagaaugcugaugccuacguguucgugggcacauccagauauagcaagaaauuuaagccugagauugcuauccggccgaaaguccgcgaccaggaggggagaaugaacuacuauuggacccugguugaacccggagauaagauuacguucgaggccacaggcaaucugguggugccucgguacgcguuugccauggaacgcaacaccgggucuggaaucauuaucuccgacacacccguccaugacugcaacaccaccugucaaacaccuaaaggcgcuaucaauacgagccuccccuuccagaacauucacccgaucaccauuggcaagugcccuaaguaugugaaaucuacaaagcugagacuugccaccgggcugcggaauguucccagcauccagucccgcggacucuuuggcgcuauugccggguucaucgagggaggcuggacagggaugguggauggaugguacggcuaucaucaccagaacgaacaaggcucuggguacgccgcugaccugaaaagcacccagaaugcgaucgauaagauuacgaacaaagucaauuccgugaucgagaagaugaacacacaguuuaccgccguuggaaaggaguucaaucaccuugaaaagagaauugagaaccugaauaagaaaguggacgauggcuuccucgacaucuggaccuacaacgcugaacugcugguccuccuggagaaugaacggacacuugauuaucaugacagcaacgugaagaaucuguacgagaaaguccgcucucagcucaagaacaacgccaaggagauugggaauggauguuuugaguucuaucacaaaugcgauaacaccuguauggaguccgugaagaauggcacauacgacuauccuaaauacagcgaagaggccaagcugaacagagagaaaaucgaugggaucaaacuugaaucuacgcggauuuaucaaauccuggcuauuuacuccaccguugccagcucccucgugcuggucgugucucugggcgcgaucagcuuuuggaugugcuccaauggaucucuccagugccgcauuuguaucuga

SEQ ID NO: 198971 - RNA, 1701 nt, Artificial Sequence; identical to SEQ ID NO: 198970
  derived and/or modified CDS sequence (opt5) from hemagglutinin__InfluenzaA__AEI87104

SEQ ID NO: 198972 - RNA, 1698 nt, Artificial Sequence; identical to SEQ ID NO: 195698
  derived and/or modified CDS sequence (opt5) from hemagglutinin__InfluenzaA__AEI91963

SEQ ID NO: 198973 - RNA, 1701 nt, Artificial Sequence; identical to SEQ ID NO: 195905
  derived and/or modified CDS sequence (opt5) from hemagglutinin__InfluenzaA__AEI91977

SEQ ID NO: 198974 - RNA, 1701 nt, Artificial Sequence; identical to SEQ ID NO: 197429
  derived and/or modified CDS sequence (opt5) from hemagglutinin__InfluenzaA__AEI91978

SEQ ID NO: 198975 - RNA, 1701 nt, Artificial Sequence; identical to SEQ ID NO: 196371
  derived and/or modified CDS sequence (opt5) from hemagglutinin__InfluenzaA__AEI91998

SEQ ID NO: 198976 - RNA, 1701 nt, Artificial Sequence
  derived and/or modified CDS sequence (opt5) from hemagglutinin__InfluenzaA__AEI91999
augaagaccaucauugcccugagcuacauccucugccugguguucgcucagaaacuucccggcaacgacaauuccacagccacgcugugucucgggcaccaugcggucccuaacggaaccauuguuaagacaaucaccaaugaucaaauugaggugacaaacgcuaccgaacuggugcagucuagcuccacaggcgagaucugcaauucuccgcaccagauccuugacggggaaaacuguacccugauugaugcccuccugggagacccccagugcgauggcuuucaaaauaaaaagugggaccuguucgucgagagaagcaaagccuauuccaacuguuacccuuaugaugugcccgacuacgcuucucuccggagccugguugccuccagcgggacgcuugaauuuaauaacgagucuuucaauuggaccggagugacacagaacggcaccuccagcgcuugcauccgcagaucuaauaacuccuuuuucagccggcugaauuggcucacacaucugaacuuuaaguauccugcccuuaacgucaccaugcccaauaacgagcaguucgauaagcuguacauuuggggcgugcaccauccugggacggacaaagaucagaucuuucucuaugcgcaagccucuggacgcauuacaguuuccaccaagagaagccagcaggcugugaucccgaauauuggcucccggccccgcgucagaaacaucccuucucggaucagcauuuacuggacaaucgugaaacccggggacauucugcugaucaauuccaccggaaaccucauugccccucgcggcuacuucaagaucagaagcgggaaaucuuccaucaugcggagcgaugcucccauuggaaaguguaauucugaaugcaucaccccgaacggcagcauucugaaugacaagccuuuucagaacgugaaucgcaucacauauggcgccugucccagauacgucaaacaaaacacgcuuaagcuggcgaccgggaugcggaauguuccugagaaacagacacgcggaauuuucggcgccaucgcuggguuuaucgaaaacggaugggagggcaugguggacgggugguauggauucagacaccaaaauuccgagggccggggccaggccgcugaucucaagucuacccaggccgccauugaccagaucaacgggaaacugaacagacuuauuggaaagacaaaugaaaaauuccaccagaucgagaaggaauuuagcgagguggaaggccgcauucaagaucuggagaaguacgucgaggacaccaaaaucgaucucugguccuauaacgcugaacugcugguggcgcucgagaaucagcauacgauugaccugacagauagcgaaaugaacaaacuuuucgagaagaccaagaaacagcugcgggaaaaugccgaggacauggggaacggaugcuuuaagaucuaccacaagugugauaaugcuugcaucggcucuauuagaaacgggaccuaugaccaugauguuuaccgcgacgaggcccucaauaaccgguuccagaucaaaggcguggaacugaaguccggauacaaagacuggauucuuuggaucagcuuugccauuucuugcuuccugcucugugucgcucugcugggcuuuaucaugugggccugccaaaaggggaauaucagauguaacauuugcaucuga

SEQ ID NO: 198977 - RNA, 1698 nt, Artificial Sequence
  derived and/or modified CDS sequence (opt5) from hemagglutinin__InfluenzaA__AEI92018
augaaggugaaacugcucguccugcuuugcaccuucacagccacguacgcugacaccaucuguauuggcuaucacgccaacaauagcacagauaccguugacacagugcuggagaagaacgugaccgucacacauuccgugaaucuccuggaaaacucucacaaugggaaacuuugccugcucaagggaaucgcgccccugcagcugggcaacuguagcguugcuggguggauucucggaaauccugagugcgaacugcuuaucuccaaagagucuuggagcuacauuguggaaaagccgaaccccgagaauggcaccuguuauccugggcauuuugccgauuacgaggaacugagagagcaacucuccucugucagcuccuucgaacgguuugagaucuuccccaaggagagcucuuggccuaaccacacggugaccggaguuuccgccagcugcucucauaauggcgaauccagcuuuuaucgcaaccugcuuuggcugacaggcaaaaaugggcucuaccccaaccugucuaaguccuaugcuaauaacaaagagaaggaagugcugguccucuggggagugcaccacccuccgaacaucgccgaccagaaaacccuguaccauacagagaaugcuuacgugagcgucguuuccucucacuauagcagaaaguucacccccgaaauugccaagcggccuaaagugcgcgaucaggagggcagaaucaacuacuauuggacgcuucuggagcccggggacacaauuaucuuugaagcgaauggaaaccucauugccccucgguacgcuuucgcccugucccgcggcuuugggagcggaaucauuaauucuaacgcucccauggauaagugugacgccaaaugccagaccccgcaaggcgcgaucaauuccagccuuccuuuccagaacgugcaucccgucacaaucggcgaguguccuaaguaugugagaucugccaaacugcggaugguuaccgggcuccgcaauauucccagcauccaguccagaggacuguuuggcgcuauugccggguucaucgaaggaggcuggaccgggaugguggauggaugguacggcuaucaccaccagaacgagcaaggcucuggguacgcugccgaccaaaagagcacacagaaugccauuaacggaaucacgaauaaagucaacuccgugaucgaaaagaugaauacccaguuuacagcuguuggcaaggaguucaacaaacuggagcggcgcauggaaaaccucaauaagaaaguggaugacggguucauugauaucuggaccuacaacgcggagcugcuuguccugcucgaaaaugagagaacacuggacuuucaugacagcaacgugaagaaucuuuaugaaaaagucaagucucagcugaagaacaaugccaaagagauuggaaacggcugcuucgaguuuuaccacaaguguaaugaugaaugcauggaguccgugaaaaacgggaccuaugacuaccccaaguauagcgaagagucuaaacucaaucgggagaagaucgauggcguuaagcuggaauccaugggaguguaccagauucuggcuaucuauagcacggucgccuccucucucgugcugcuuguuagccugggcgccaucuccuucuggaugugcucuaacgggagccuccagugucgcauuugcaucuga

SEQ ID NO: 198978 - RNA, 1701 nt, Artificial Sequence; identical to SEQ ID NO: 198953
  derived and/or modified CDS sequence (opt5) from hemagglutinin__InfluenzaA__AEJ10400

SEQ ID NO: 198979 - RNA, 1701 nt, Artificial Sequence
  derived and/or modified CDS sequence (opt5) from hemagglutinin__InfluenzaA__AEJ10410
augaagaccauccuggugguccuccuguacacauucgccacggcuaacgccgacacccuuugcauuggcuaucacgcgaauaacagcacagauaccaucgacacaguucuggagaaaaaugugaccgugacacauuccgucaaccuccuggaagauaagcacaaugggaaacuuuguaagcugagaggaguggcuccccuccaucugggcaaaugcaacauugccggguggauccugggaaauccugagugugaaucucucagcaccgccuccucuuggagcuacauuguugagacguccucuagcgacaacggaaccugcuauccggggaauuuuaucgauuacgaagaacugcgggagcagcuuuccagcgugucuuccuucgaacgcuuugagaucuuccccaagacaagcucuugguccgaccacgauagcaacaagggagucaccgcugccuguccucaugcuggcgccaaaucuuuuuauaagaaucugauuuggcucgugaaaaagggcaacuccuaccccaaacugagcaaguccuauaucaaugacaaggggaaagaaguucuugugcuguggggcauucaccacccuucuacaagcgcggaucaacagucccucuaccagaacgccgacgcuuacgucuucgugggcaccagcagauauucuaagaaauuuaagcccgagaucgccauucggccuaaagugcgcgaucaggaggggagaaugaauuacuauuggacgcuggucgaaccgggagacaagaucacauucgaggcuaccggcaaccugguugcccccagauacgcguuugccauggaacgcaacgcuggguccggaauuaucaucagcgauacaccugugcaugacugcaauaccaccugucaaacacccaaaggcgccauuaacacgucucucccuuuccagaauauccaccccauuaccaucggcaagugcccgaaguaugugaaaagcacaaagcugagacuugcuaccgggcugcggaacgucccuuccauucagucucgcggacucuuuggcgccaucgccggguucaucgagggaggcuggacagggaugguggacggaugguacggcuaucaucaccagaaugaacaaggcagcggguacgcugcggaucugaaauccacccagaacgccauugacaagaucacgaauaaaguuaacagcgugauugagaagaugaauacacaguuuaccgcugucggaaaggaguucaaccaccuugaaaaacggaucgagaaucugaacaagaaaguggaugacggcuuccucgauauuuggaccuacaaugccgaacugcugguucuccuggagaacgaacggacacuugacuaucaugauucuaaugugaagaaccuguacgagaaaguccgcucccagcucaagaacaaugccaaggagaucgggaacggauguuuugaguucuaucacaaaugcgacaauaccuguauggagagcgugaagaacggcacauacgauuaucccaaauacucugaagaggcuaagcugaauagagaagagaucgacggggucaaacuugaguccacgcggauuuaucaaauccuggccauuuacagcaccguggcguccucucucguucugguggucagccugggcgcuaucuccuuuuggaugugcucuaacggaagccuccagugccgcauuuguaucuga

SEQ ID NO: 198980 - RNA, 1701 nt, Artificial Sequence
  derived and/or modified CDS sequence (opt5) from hemagglutinin__InfluenzaA__AEJ10420
augaaggccauccuggugguccuccuguacaccuucgcuacagccaacgcggacacgcuuugcauuggcuaucacgcuaauaacagcaccgauacaguugacaccgugcuggagaagaaugugacagucacccauuccgugaaccuccuggaagauagacacaaugggaagcuguguaaacugcggggaguugcgccccuccaucugggcaagugcaacaucgccggguggauucugggaaauccugagugugaaucucucagcacagcuuccucuuggagcuacaucguggagaccuccucuagcgacaacggcacgugcuauccgggggauuuuauugacuacgaagaacugcgcgagcagcuuuccagcgucucuuccuucgaaagauuugagaucuuccccaaaaccagcucuuggccugaucacgacuccaauaagggagugacagccgcuuguccccaugccggcgccaagagcuuuuauaaaaaccugaucuggcucguuaagaaaggcaauucuuacccuaagcuguccaaaagcuauauuaacgauaaggggaaggaagugcuuguccuguggggaauccaccaccccuccaccucugccgaccaacagagccucuaccagaaugcugaugccuacguguucgugggcacaucccgguauagcaaaaaguuuaaaccugagauugcuauccgcccgaaggucagagaccaggaggggcggaugaacuacuauuggacccugguugaacccggagauaaaauuacguucgaggccacaggcaaucugguggugccucgcuacgcguuugccauggaaagaaacgcugggucuggaaucauuaucuccgacacccccguccaugacugcaacacaaccugucaaaccccuaagggcgccaucaauacaagccuccccuuccagaacauucacccgaucacgauuggcaaaugcccuaaguaugugaagucuaccaaacugcggcuugcuacagggcugcgcaauguucccagcauccaguccagaggacucuuuggcgccauugccggguucaucgagggaggcuggaccgggaugguggauggaugguacggcuaucaucaccagaacgaacaaggcucuggguacgcugcggaccuuaagagcacacagaaugccaucgauaaaauuaccaacaaggucaauuccgugaucgagaaaaugaacacgcaguuuacagcuguuggaaaggaguucaaucaccuugaaaagcggauugagaaccugaauaaaaagguggacgauggcuuccucgacaucuggaccuacaacgccgaacugcugguccuccuggagaaugaacgcacccuugauuaucaugacagcaacgugaaaaaucuguacgagaaggucagaucucagcucaaaaacaacgccaaggagauugggaauggauguuuugaguucuaucacaagugcgauaacacauguauggaguccgugaaaaauggcaccuacgacuauccuaaguacagcgaagaggcuaaacugaaccgggaagagaucgaugggguuaaacuugagucuacacgcaucuaucaaauucuggccaucuacuccacgguggcgagcucccucguccuggugguuucucugggcgcuauuagcuuuuggaugugcuccaauggaucucuccagugcagaaucuguauuuga

SEQ ID NO: 198981 - RNA, 1701 nt, Artificial Sequence
  derived and/or modified CDS sequence (opt5) from hemagglutinin__InfluenzaA__AEJ10430
augaaggccauccuggugguccuccuguacaccuucgcuacagccaacgcggacacgcuuugcauuggcuaucacgcuaauaacagcaccgauacaguugacaccgugcuggagaaaaaugugacagucacccauuccgugaaccuccuggaagauaagcacaaugggaaacuuuguaagcugagaggaguugcuccccuccaucugggcaaaugcaacaucgccggguggauucugggaaauccugagugugaaucucucagcacagccuccucuuggagcuacaucguggagaccuccucuagcgacaacggcacgugcuauccgggggauuuuauugacuacgaagaacugcgggagcagcuuuccagcgucucuuccuucgaacgcuuugagaucuuccccaagaccagcucuuggccuaaucacgauuccaacaagggagugacaaccgccuguccccaugcuggcgccaagagcuuuuauaagaaucugaucuggcucguuaaaaagggcaacucuuacccuaaacuguccaagagcuauauuaaugacaaggggaaagaagugcuuguccuguggggaauccaccaucccccuacauccgcggaucaacagucucucuaccagaacgccgacgcuuacguguucgugggcaccagcagauauuccaagaaauuuaagccggagauugccauccggcccaaaguccgcgaucaggaggggagaaugaauuacuauuggacgcugguugaaccuggagacaagauuacauucgaggcuaccggcaaccugguggugccccgguacgccuuugcgauggaacgcaacgccgggagcggaaucauuaucucugauacaccuguccacgacugcaauaccaccugucaaacacccaaaggcgcuaucaacacgucccucccguuccagaauauucacccuaucaccauuggcaagugccccaaguaugugaaaagcacaaagcugagacuugccaccgggcugcggaacguuccuucuauccagagccgcggacucuuuggcgcuauugccggguucaucgagggaggcuggacagggaugguggacggaugguacggcuaucaucaccagaaugaacaaggcuccggguacgccgcugaucugaaaucuacccagaacgcgaucgacgagauuacgaauaaggucaacagcgugaucgagaaaaugaauacacaguuuaccgccguuggaaaggaguucaaccaccuugagaagagaauugaaaaucugaacaaaaagguggaugacggcuuccucgauaucuggaccuacaaugcugagcugcugguccuccuggaaaacgagcggacacuugacuaucaugauuccaaugugaaaaaccuguacgagaagguccgcagccagcucaaaaacaaugccaaggaaauugggaacggauguuuugaguucuaucacaagugcgacaauaccuguauggaaucugugaaaaacggcacauacgauuaucccaaguacuccgaggaagccaaacugaauagagaggagaucgacgggguuaaacuugaaagcacgcggaucuaucaaauucuggcuaucuacucuaccguggccuccagccucguccuggugguuucccugggcgcgauuucuuuuuggaugugcagcaacggaucccuccagugccgcaucuguauuuga

SEQ ID NO: 198982 - RNA, 1701 nt, Artificial Sequence
  derived and/or modified CDS sequence (opt5) from hemagglutinin__InfluenzaA__AEJ10440
augaaggccauccuggugguccuccuguacaccuucgcuacagccaacgcggacacgcuuugcauuggcuaucacgcuaauaacagcaccgauacaguugacaccgugcuggagaaaaaugugacagucacccauuccgugaaccuccuggaagauaagcacaaugggaaacuuuguaagcugagaggaguugcuccccuccaucugggcaaaugcaacaucgccggguggauucugggaaauccugagugugaaucucucagcacagccuccucuuggagcuacaucguggagaccuccucuagcgacaacggcacgugcuauccgggggauuuuauugacuacgaagaacugcgggagcagcuuuccagcgucucuuccuucgaacgcuuugagaucuuccccaagaccagcucuuggccuaaucacgauuccaacaagggagugacagccgcuuguccccaugccggcgcgaaaucuuuuuauaagaaucugaucuggcucguuaaaaagggcaacagcuacccuaaacuguccaagagcuauauuaaugacaaggggaaagaagugcuuguccuguggggaauccaccaccccuccaccacagccgaucaacagauucucuaccagaacgcugacaccuacguguucgugggcacgucuagauauagcaagaaauuuaagccugagaucgccauucggccgaaaguccgcgaucaggaggggagaaugaauuacuauuggacacugguugaacccggagacaagaucaccuucgaggcuacaggcaaccugguggugccucgguacgccuuugcgauggaacgcaacgccggguccggaauuaucaucagcgauacccccguccaugacugcaauaccacaugucaaacgccuaaaggcgcuauuaacaccucucuccccuuccagaauauccacccgauuacaaucggcaagugcccuaaguaugugaaauccaccaagcugagacuugccacagggcugcggaacguucccagcauucagucucgcggacucuuuggcgcuaucgccggguucaucgagggaggcuggaccgggaugguggacggaugguacggcuaucaucaccagaaugaacaaggcagcggguacgccgcugaucugaaauccacgcagaacgcgauugacaagaucacaaauaaagucaacucugugauugagaagaugaauacccaguuuaccgccguuggaaaggaguucaaccaccuugagaaaagaaucgagaaucugaacaagaaaguggaugacggcuuccucgauauuuggacauacaaugcugaacugcugguccuccuggagaacgaacggacccuugacuaucaugauagcaaugugaagaaccuguacgagaaaguccgcaaccagcucaagaauaacgccaaggagaucgggaauggauguuuugaguucuaucacaaaugcgacaacacauguauggaauccgugaagaauggcacguacgauuauccuaaauacagcgaagaggccaagcugaacagagaagagaucgacgggguuaaacuugagucuacccggauuuaucaaauccuggcuauuuacuccacaguggccagcucucucguccuggugguuucccugggcgcgaucagcuuuuggaugugcuccaauggaucucuccagugccgcauuuguaucuga

SEQ ID NO: 198983 - RNA, 1701 nt, Artificial Sequence; identical to SEQ ID NO: 198896
  derived and/or modified CDS sequence (opt5) from hemagglutinin__InfluenzaA__AEJ10450

SEQ ID NO: 198984 - RNA, 1701 nt, Artificial Sequence
  derived and/or modified CDS sequence (opt5) from hemagglutinin__InfluenzaA__AEJ10480
augaaggccauccuggugguccuccuguacaccuucgcuacagccaacgcggacacgcuuugcauuggcuaucacgcuaauaacagcaccgauacaguugacaccgugcuggagaaaaaugugacagucacccauuccgugaaccuccuggaagauaagcacaaugggaaacuuuguaagcugagaggaguugcuccccuccaucugggcaaaugcaacaucgccggguggauucugggaaauccugagugugaaucucucagcacagccuccucuuggagcuacaucguggagaccuccucuagcgacaacggcacgugcuauccgggggauuuuauuaauuacgaggaacugcgggagcagcuuuccagcgucucuuccuucgaacgcuuugagaucuuccccaagaccagcucuuggccuaaccacgacuccaauaagggagugacagccgcuuguccccaagccggcgcgaaaucuuuuuauaagaaccugaucuggcucguuaaaaagggcaauagcuacccuaaacuguccaagagcuauauuaacgauaaggggaaagaagugcuuguccuguggggaauccaucaccccuccaccucugccgaccagcagagccucuaccaguccgcugaugccuacguguucgugggcacaagcaaguauucuaaaaaguuuaaaccugagauugcugucagaccgaagguucgggaccaagaggggcgcaugaauuacuauuggacccugguggaacccggagauaaaaucacguucgaggccacaggcaaccugcucgugccuagauacgcguuugccauggaacggaacgcuggguccggaauuaucauuagcgacacccccguccacgauugcaauacaaccugucagaccccuaagggcgccaucaacacaucucugcccuuccagaauauccauccgauuacgaucggcaagugcccuaaauauguuaagagcaccaaacuucgccuggcuacagggcucagaaacgugcccuccauucagucucggggacuguuuggcgccaucgccggguucauugagggaggcuggaccgggaugguggacggaugguacggcuaucaccaucaaaaugcucagggcagcggguacgcggccgaccuuaaguccacacagaacgcuaucgauaaaaucaccaauaaggucaacagcgugauugaaaagaugaauacgcaguuuacagccguuggaaaagaguucaaccaccuggagaagcgcaucgaaaaucucaacaaaaagguggacgauggcuuccuggacauuuggaccuacaaugccgagcugcucguccugcuugaaaacgagagaacccuggauuaucacgacucuaaugugaaaaaccucuacgaaaagguccggucccaacugaagaacaaugcuaaagagaucgggaacggauguuuugaguucuaucauaagugcgauaauacauguauggaaagcgugaaaaacggcaccuacgacuauccuaaguacucugaggaagccaaacuuaaucgcgaggaaauugaugggguuaagcuggaguccacaagaaucuaucagauccucgcgauuuacagcacgguggcuuccucucugguccuggugguuagccucggcgccaucuccuuuuggaugugcucuaacggaagccugcagugccggauuuguaucuga

SEQ ID NO: 198985 - RNA, 1701 nt, Artificial Sequence
  derived and/or modified CDS sequence (opt5) from hemagglutinin__InfluenzaA__AEJ10490
augaaggccauccuggugguccuccuguacaccuucgcuacagccaacgcggacacgcuuugcauuggcuaucacgcuaauaacagcaccgauacaguugacaccgugcuggagaaaaaugugacagucacccauuccgugaaccuccuggaagauaagcacaaugggaaacuuuguaagcugagaggaguugcuccccuccaucugggcaaaugcaacaucgccggguggauucugggaaauccugagugugaaucucucagcacagccuccucuuggagcuacaucguggagaccuccucuagcgacaacggcacgugcuauccgggggauuuuauugacuacgaagaacugcgggagcagcuuuccagcgucucuuccuucgaacgcuuugagaucuuccccaagaccagcucuuggccuaaucacgauuccaacaagggagugacaaccgccuguccccaugcuggcgccaagagcuuuuauaagaaucugaucuggcucguuaaaaagggcaacucuuacccuaaacuguccaagagcuauauuaaugacaaggggaaagaagugcuuguccuguggggaauccaccaucccccuacauccgcggaucaacagucucucuaccagaacgccgacgcuuacguguucgugggcaccagcagauauuccaagaaauuuaagccggagauugccauccggcccaaaguccgcgaucaggaggggagaaugaauuacuauuggacgcugguugaaccuggagacaagauuacauucgaggcuaccggcaaccugguggugccccgguacgccuuugcgauggaacgcaacgccgggagcggaaucauuaucucugauacaccuguccacgacugcaauaccaccugucaaacacccaaaggcgcuaucaacacgucccucccguuccagaauauucacccuaucaccauuggcagaugccccaaguaugugaaaagcacaaaacugcggcuugccaccgggcugcgcaacguuccuucuauccagagcagaggacucuuuggcgcuauugccggguucaucgagggaggcuggacagggaugguggacggaugguacggcuaucaucaccagaaugaacaaggcuccggguacgccgcugaucugaagucuacccagaacgcgaucgacggaauuacgaauaaagucaacagcgugaucgagaagaugaauacacaguuuaccgccguuggcaaagaguucaaccaccuugaaaagcggauugagaaucugaacaagaaaguggaugacggguuccucgauaucuggaccuacaaugcugaacugcugguccuccuggagaacgaacgcacacuugacuaucaugauuccaaugugaagaaccuguacgagaaagucagaagccagcucaagaacaaugccaaagagauuggaaacggcuguuuugaguucuaucacaagugcgacaauaccuguauggagucugugaagaacgggacauacgauuaucccaaauacuccgaagaggccaagcugaaucgggaagagaucgacggcguuaaacuugagagcacgaugaucuaucaaauucuggcuaucuacucuaccguggccuccagccucguccugauugugucccugggagcgaucucuuuuuggaugugcagcaacggcucccuccagugccgcauuuguaucuga

SEQ ID NO: 198986 - RNA, 1701 nt, Artificial Sequence
  derived and/or modified CDS sequence (opt5) from hemagglutinin__InfluenzaA__AEJ10500
augaaggccauccuggugguccuccuguacaccuucgcuacagccaacgcggacacgcuuugcauuggcuaucacgcuaauaacagcaccgauacaguugacaccgugcuggagaaaaaugugacagucacccauuccgugaaccuccuggaagggaagcacaauggaaaacuuuguaagcugagaggcguugcuccccuccaucuggggaaaugcaacaucgccggauggauucugggcaauccugagugugaaucucucagcacagccuccucuuggagcuacaucguggagaccuccucuagcgauaacgggacgugcuauccgggagacuuuauugauuacgaagaacugcgggagcagcuuuccagcgucucuuccuucgaacgcuuugagaucuuccccaagaccagcucuuggccuaaucacgacuccaacaagggcgugacagccgcuuguccccaugccggcgcgaaaggguuuuauaagaaucugaucuggcucguuaaaaagggaaacagcuacccuaaacugaauaagucuuauauuaacgauaagggcaaagaagugcuuguccugugggggauccaccaccccuccaccacagccgaccaacagagccucuaccagaaugcugauaccuacguguucgugggaacguccagauauucuaagaaauuuaagccugagauugccauccggccgaaaguccgcgaccaggagggcagaaugaacuacuauuggacacugguugaacccggggauaagauuaccuucgaggcuacaggaaaccugguggugccucgguacgccuuugcgauggaacgcaaugccggcagcggcaucauuaucuccgacacccccguccaugauugcaacaccacaugucaaacgccuaaaggggcuaucaauaccagccuccccuuccagaacauucacccgaucacaauuggaaagugcccuaaguaugugaaaucuaccaagcugagacuugccacaggccugcggaauguucccuccauccagagccgcgggcucuuuggagcuauugccggcuucaucgaagggggauggaccggcaugguggacggcugguacggguaucaucaccagaacgaacaaggaucuggcuacgccgcugaccugaaaagcacgcagaaugcgaucgauaagauuacaaacaaagucaauuccgugaucgagaagaugaacacccaguuuaccgccguugggaaggaguucaaucaccuugagaaaagaauugagaaccugaauaagaaaguggacgauggauuccucgacaucuggacauacaacgcugaacugcugguccuccuggagaaugaacggacccuugauuaucaugacucuaacgugaagaaccuguacgagaaaguccgcaaucagcucaagaacaaugccaaggagauuggcaacggguguuuugaguucuaucacaaaugcgauaauacauguauggagagcgugaagaacggcacguacgacuauccuaaauacuccgaagaggccaagcugaauagagaagagaucgauggaguuaaacuugagagcacccggaucuaucaaauucuggcuaucuacucuacaguggccuccagccucguccuggugguuucucugggcgcgauuuccuuuuggaugugcagcaacgggucccuccagugccgcaucuguauuuga

SEQ ID NO: 198987 - RNA, 1701 nt, Artificial Sequence; identical to SEQ ID NO: 198939
  derived and/or modified CDS sequence (opt5) from hemagglutinin__InfluenzaA__AEJ10510

SEQ ID NO: 198988 - RNA, 1701 nt, Artificial Sequence
  derived and/or modified CDS sequence (opt5) from hemagglutinin__InfluenzaA__AEJ10520
augaaggccauccuggugguccuccuguacaccuucgcuacagccaacgcggacacgcuuugcauuggcuaucacgcuaauaacagcaccgauacaguugacaccgugcuggagaagaaugugacagucacccauuccgugaaccuccuggaagauaagcacaaugggaaacuuuguaagcugagaggaguugcuccccuccaucugggcaaaugcaacaucgccggguggauucugggaaauccugagugugaaucucucagcacagccuccucuuggagcuacaucguggagaccuccucuagcgacaacggcacgugcuauccgggggauuuuauugacuacgaagaacugcgggagcagcuuuccagcgucucuuccuucgaacgcuuugagaucuuccccaagaccagcucuuggccuaauuaugauuccaacaagggagugacagccgcuuguccccacgccggcgcgaaaucuuuuuacaagaaucugaucuggcucguuaaaaagggcaacagcuauccuaaacuguccaagagcuacauuaaugacaaggggaaagaagugcuuguccuguggggaauccaucaccccuccaccucugccgaucaacagagccucuaccagaacgcugacgccuauguguucgugggcacauccagauacagcaagaaauuuaagccugagauugcuauccggccgaaaguccgcgaucaggaggggagaaugaauuauuacuggacccugguugaacccggagacaagauuacguucgaggccacaggcaaccugguggugccucgguaugcguuugccauggaacgcaacgcugggucuggaaucauuaucuccgauacccccguccacgacugcaauacaaccugucaaaccccuaaaggcgccaucaacacaagccuccccuuccagaauauucauccgaucacgauuggcaagugcucuaaguacgugaaaagcaccaagcugagacuugcuacagggcugcggaacguuccuuccauccagucucgcggacucuuuggcgccauugccggguucaucgagggaggcuggaccgggaugguggacggaugguauggcuaccaccaucagaaugaacaaggcagcggguacgcugcggaucugaaauccacacagaacgccaucgacgagauuaccaauaaggucaacagcgugaucgagaaaaugaauacgcaguuuacagcuguuggaaaggaguucaaccaccuugagaagagaauugaaaaucugaacaaaaagguggaugacggcuuccucgauaucuggaccuauaaugccgagcugcugguccuccuggaaaacgagcggacccuugacuaccacgauucuaaugugaaaaaccuguaugagaagguccgcucccagcucaaaaacaaugccaaggaaauugggaacggauguuuugaguucuaccauaagugcgacaauacauguauggaaagcgugaaaaacggcaccuaugauuaccccaaguauucugaggaagcuaaacugaauagagaggagaucgacgggguuaaacuugaauccacacggaucuaccaaauucuggccaucuacagcacgguggcguccucucucguccuggugguuagccugggcgcuauuuccuuuuggaugugcucuaacggaagccuccagugccgcaucuguauuuga

SEQ ID NO: 198989 - RNA, 1701 nt, Artificial Sequence; identical to SEQ ID NO: 194741
  derived and/or modified CDS sequence (opt5) from hemagglutinin__InfluenzaA__AEJ10530

SEQ ID NO: 198990 - RNA, 1701 nt, Artificial Sequence; identical to SEQ ID NO: 194741
  derived and/or modified CDS sequence (opt5) from hemagglutinin__InfluenzaA__AEJ10540

SEQ ID NO: 198991 - RNA, 1701 nt, Artificial Sequence; identical to SEQ ID NO: 194741
  derived and/or modified CDS sequence (opt5) from hemagglutinin__InfluenzaA__AEJ10550

SEQ ID NO: 198992 - RNA, 1701 nt, Artificial Sequence
  derived and/or modified CDS sequence (opt5) from hemagglutinin__InfluenzaA__AEJ10570
augaaggccauccuggugguccuccuguacacccuugcuacagccaacgcggacacgcugugcauuggcuaucacgcuaauaacagcaccgauacaguugacaccgugcucgagaaaaaugugacagucacccauuccgugaaccugcuugaagauaagcacgacgggaaacuguguaagcucagaggaguugcuccccugcaucugggcaaaugcaauaucgccggguggauucucggaaacccugagugugaaucucugagcacagccuccucuuggagcuacaucguggagaccuccucuagcgauaauggcacgugcuauccgggggacuucauugauuacgaggaacuucgggagcagcuguccagcgucucuuccuuugaacgcuucgagaucuuucccaagaccagcucuuggccuaaccacgacuccaauaagggagugacagccgcuuguccccaugccggcgcgaaaucuuucuauaagaaccucaucuggcugguuaaaaagggcaauagcuacccuaaacuuuccaagagcuauauuaacgauaaggggaaagaagugcugguccucuggggaauccaccaccccuccaccucugccgaccaacagagccuguaccagaaugcugaugccuacguguuugugggcacauccagauauagcaagaaauucaagccugagauugcuauccggccgaaaguccgcgaccaggaggggagaaugaacuacuauuggacccugguugaacccggagauaagauuacguuugaggccacaggcaaucucguggugccucgguacgcguucgccauggaacgcaacgcugggucuggaaucauuaucuccgacacccccguccaugacugcaacgccacaugucaaaccccuaaaggcgcuaucaauaccagccugcccuuucagaacauucacccgaucacaauuggcaagugcccuaaguaugugaaaucuacgaaacuuagacuggccaccgggcuccggaauguucccagcauccagucccgcggacuguucggcgccauugcuggguuuaucgagggaggcuggacagggaugguggauggaugguacggcuaucaucaccagaacgaacaaggcucuggguacgcggccgaccuuaaaagcacccagaaugcuaucgauaagauuacaaacaaagucaauuccgugaucgagaagaugaacacccaguucacggccguuggaaaggaguuuaaucaccuggaaaagagaauugagaaccucaauaagaaaguggacgauggcuuccuggacaucuggacauacaacgccgaacugcucguccugcuugagaaugaacggacccuggauuaucaugacagcaacgugaagaaucucuacgagaaaguccgcucucagcugaagaacaacgcuaaggagauugggaauggauguuucgaauuuuaucacaaaugcgauaacaccuguauggaguccgugaagaauggcacauacgacuauccuaaauacagcgaagaggccaaacuuaacagagaagagaucgaugggguuaagcuggagucuacccggaucuaucaaauucucgcgaucuacuccacaguggcuagcucccugguccuggugguuucucucggcgccauuagcuucuggaugugcuccaauggaucucugcagugccgcaucuguauuuga

SEQ ID NO: 198993 - RNA, 1701 nt, Artificial Sequence; identical to SEQ ID NO: 198992
  derived and/or modified CDS sequence (opt5) from hemagglutinin__InfluenzaA__AEJ10580

SEQ ID NO: 198994 - RNA, 1701 nt, Artificial Sequence
  derived and/or modified CDS sequence (opt5) from hemagglutinin__InfluenzaA__AEJ36302
augaaggccauccuggugguccuccuguacaccuucgcuacagccaacgcggacacgcuuugcauuggcuaucacgcuaauaacagcaccgauacaguugacaccgugcuggagaagaaugugacagucacccauuccgugaaccuccuggaagauaagcacaaugggaaacuuuguaagcugagaggaguugcuccccuccaucugggcaaaugcaacaucgccggguggauucugggaaauccugagugugaaucucucagcacagccuccucuuggagcuacaucguggagaccuccucuagcuauaacggcacgugcuacccgggggacuuuauugauuaugaagaacugcgggagcagcuuuccagcgucucuuccuucgaacgcuuugagaucuuccccaagaccagcucuuggccuaaucacgaccccaacaagggagugacagccgcuuguccucaugccggcgcgaaauccuuuuacaagaaucugaucuggcucguuaaaaagggcaacagcuaucccaaacugucuaaguccuacauuaaugauaaggggaaagaagugcuuguccuguggggaauccaccacccuagcaccuccgccgaccaacagagacucuaccagaacgcugaugccuaugcuuucgugggcacaucucgguacagcaagaaauuuaagccggagauugccauccgccccaaagugagagaccaggaggggcggaugaauuauuacuggacccuggucgaaccuggagauaagauuacguucgaggcgacaggcaaccugguugugccccgcuaugccuuugcuauggaaagaaacgccggguccggaaucauuaucagcgacaccccugcucaugauugcaauacaaccugucaaacccccaaaggcgccaucaacacaucucucccguuccagaaugugcacccuauuacgaucggcaagugccccaaguacgucaaauccaccaagcugcggcuugccacagggcugcgcaacgugccuagcauucagucuagaggacucuuuggcgcuaucgcgggguucauugagggaggcuggaccgggaugguugacggaugguauggcuaccaucaccagaaugaacaaggcagcggguacgccgcugaccugaaauccacacagaacgccuuugaugagaucaccaauaaggugaacucugucaucgagaaaaugaauacgcaguucacagccgugggaaaggaguucaaccaccuugagaagcggauugaaaaucugaacaaaaagguugacgauggcuuucucgacaucuggaccuauaaugcugagcugcuggugcuccuggaaaacgagcgcacccuugauuaccaugacagcaaugucaaaaaccuguaugagaaggugagaucccagcucaaaaacaaugccaaggaaacagggaacggauguuucgaguuuuaccacaagugcgauaauaccuguauggaaagcgucaaaaacggcacauaugacuaccccaaguauucugaggaagcgaaacugaaucgggaggagauugauggggugaaacuugaauccacgcgcaucuaccaaauucuggcuaucuacagcaccguugccucuucccucgugcuggucgugagccugggcgccaucuccuucuggaugugcucuaacggaagccuccagugcagaauuuguaucuga

SEQ ID NO: 198995 - RNA, 1701 nt, Artificial Sequence
  derived and/or modified CDS sequence (opt5) from hemagglutinin__InfluenzaA__AEJ36312
augaaggccauccuggugguccuccuguacaccuucgcuacagccaacgcggacacgcuuugcauuggcuaucacgcuaauaacagcaccgauacaguugacaccgugcuggagaaaaaugugacagucacccauuccgugaaccuccuggaagauaagcacaaugggaaacuuuguaagcugagaggaguugcuccccuccaucugggcaaaugcaacaucgccggguggauucugggaaauccugagugugaaucucucagcacagccuccucuuggagcuacaucguggagaccuccucuagcgacaacggcacgugcuauccgggggauuuuauugacuacgaagaacugcgggagcagcuuuccagcgucucuuccuucgaacgcuuugagaucuuccccaagaccagcucuuggccugaucacgacuccaauaagggagugacagccgcuuguccccaugccggcgcgaaaucuuuuuauaagaaccugaucuggcucguuaaaaagggcaauagcuacccuaaacuguccaagagcuauauuaacgauaaggggaaagaagugcuuguccuguggggaauccaccaccccuccaccucugccgaccaacagagccucuaccagaaugcugaugccuacguguucgugggcacauccagauauagcaagaaauuuaagccugagauugcuauccggccgaaaguccgcgaccaggaggggagaaugaacuacuauuggacccugguugaacccggagauaagauuacguucgaggccacaggcaaucugguggugccucgguacgcguuugccauggaacgcaacgcugggucuggaaucauuaucuccgacacccccguccaugacugcaacacaaccugucaaaccccuaaaggcgccaucaauacaagccuccccuuccagaacauucacccgaucacgauuggcaagugcccuaaguaugugaaaucuaccaagcugagacuugcuacagggcugcggaauguucccagcauccagucccgcggacucuuuggcgccauugccggguucaucgagggaggcuggaccgggaugguggauggaugguacggcuaucaucaccagaacgaacaaggcucuggguacgcugcggaccugaaaagcacacagaaugccaucgauaagauuaccaacaaagucaauuccgugaucgagaagaugaacauucaguuuacggcuguuggaaaggaguucaaucaccuugagaaaagaaucgagaaccugaauaagaaaguggacgauggcuuccucgacauuuggacauacaacgccgaacugcugguccuccuggagaaugaacggacccuugauuaucaugacagcaacgugaagaaucuguacgagaaaguccgcucucagcucaagaacaacgccaaggagaucgggaauggauguuuugaguucuaucacaaaugcgauaacaccuguauggaauccgugaagaauggcacauacgacuauccuaaauacagcgaagaggcuaagcugaacagagaagagaucgaugggguuaaacuugagucuacccggauuuaucaaauccuggccauuuacuccacaguggcgagcucccucguccuggugguuucucugggcgcuaucagcuuuuggaugugcuccaauggaucucuccagugccgcauuuguaucuga

SEQ ID NO: 198996 - RNA, 1701 nt, Artificial Sequence
  derived and/or modified CDS sequence (opt5) from hemagglutinin__InfluenzaA__AEJ37853
augaaggccauccuggugguccuccuguacaccuucgcuacagccaacgcggacacgcuuugcauuggcuaucacgcuaauaacagcaccgauacaguugacaccgugcuggagaaaaaugugacagucacccauuccgugaaccuccuggaagauaagcacaaugggaaacuuuguaagcugagaggaguugcuccccuccaucugggcaaaugcaacaucgccggguggauucugggaaauccugagugugaaucucucagcacagccuccucuuggagcuacaucguggaggccuccucuagcgacaacgggaccugcuauccgggcgauuuuauugacuacgaagaacugcgggagcagcuuuccagcgucucuuccuucgaacgcuuugagaucuuccccaagacgagcucuuggccuaaucacgauuccaacaagggagugaccgcugccuguccccaugcgggcgccaagagcuuuuauaaaaaucugaucuggcucguuaaaaagggcaacucuuacccuaaacuguccaagagcuauauuaaugacaaggggaaagaagugcuuguccuguggggaauccaccaccccuccacaucugcugaucaacagagccucuaccagaacgccgacgcuuacguguucgugggcaccuccagauauagcaagaaauuuaagccugagauugccauccggccgaaaguccgcgaucaggaggggagaaugaauuacuauuggacacugguugaacccggagacaagauuaccuucgaggcgacgggcaaccugguggugccucgguacgccuuugcuauggaacgcaacgccgggucuggaaucauuaucuccgauacacccguccaugacugcaauaccacaugucaaaccccuaaaggcgcuaucaacaccagccuccccuuccagaauauucacccgaucacaauuggcaagugcccuaaguaugugaaaucuacgaagcugagacuugccaccgggcugcggaacguucccagcauccagucccgcggacucuuuggcgccauugcuggguucaucgagggaggcuggacagggaugguggacggaugguacggcuaucaucaccagaaugaacaaggcucuggguacgcggccgaucugaaaagcacccagaacgcuaucgacaagauuacaaauaaagucaacuccgugaucgagaagaugaauacccaguuuacggccguuggaaaggaguucaaccaccuugagaaaagaauugagaaucugaacaagaaaguggaugacggcuuccucgauaucuggacauacaaugccgaacugcugguccuccuggagaacgaacggacccuugacuaucaugauagcaaugugaagaaccuguacgagaaaguccgcucucagcucaagaacaaugcuaaggagauugggaacggauguuuugaguucuaucacaaaugcgacaauauguguauggaauccgugaagaacggcaccuacgauuauccuaaauacagcgaagaggccaagcugaauagagaagagaucgacgggguuaaacuugagucuacacggaucuaucaaauucuggcgaucuacuccaccguggcuagcucccucguccuggugguuucucugggcgccauuagcuuuuggaugugcuccaacggaucucuccagugccgcaucuguauuuga

SEQ ID NO: 198997 - RNA, 1701 nt, Artificial Sequence
  derived and/or modified CDS sequence (opt5) from hemagglutinin__InfluenzaA__AEJ37863
augaaggccauccuggugguccuccuguacaccuucgcuacagccaacgcggacacgcuuugcauuggcuaucacgcuaauaacagcaccgauacaguugacaccgugcuggagaaaaaugugacagucacccauuccgugaaccuccuggaagauaagcacaaugggaaacuuuguaagcugagaggaguugcuccccuccaucugggcaaaugcaacaucgccggguggauucugggaaauccugagugugaaucucucagcacagccuccucuuggagcuacaucguggagaccuccucuagcgacaacggcacgugcuauccgggggauuuuauugacuacgaagaacugcgggagcagcuuuccagcgucucuuccuucgaacgcuuugagaucuuccccaagaccagcucuuggccuaaucacgauuccaacaagggagugacagccgcuuguccccaugccggcgcgaaaucuuuuuauaagaaucugaucuggcucguuaaaaagggcaacagcuacccuaaacuguccaagagcuauauuaaugacaaggggaaagaagugcuuguccuguggggaauccaccaccccuccaccucugccgaucaacagagccucuaccagaacgcugacgccuacguguucgugggcacauccagauauagcaagaaauuuaagccugagauugcuauccggccgaaacugcgcgaucaggaggggagaaugaauuacuauuggacccuggucgaacccggagacaagauuacguucgaggccacaggcaaccucguugugccucgguacgcguuugccauggaacgcaacgcugggucuggaaucauuaucuccgauacccccgugcaugacugcaauacaaccugucaaaccccuaaaggcgccaucaacacaagccugcccuuccagaauauucacccgaucacgauuggcaagugcccuaaguaugucaaaucuaccaaacuuagacuggcuacagggcuccggaacgugcccagcauccagucccgcggacuguuuggcgccauugccggguucaucgagggaggcuggaccgggaugguugacggaugguacggcuaucaucaccagaaugaacaaggcucuggguacgcugcggaucuuaaaagcacacagaacgccaucgacaagauuaccaauaaagugaacuccgucaucgagaagaugaauacgcaguuuacagcugugggaaaggaguucaaccaccuggaaaagagaauugagaaucucaacaagaaaguugaugacggcuuccuggauaucuggaccuacaaugccgaacugcucgugcugcuugagaacgaacggacccuggacuaucaugauagcaaugucaagaaccucuacgagaaagugcgcucucagcugaagaacaaugccaaggagauugggaacggauguuuugaguucuaucacaaaugcgacaauacauguauggaguccgucaagaacggcaccuacgauuauccuaaauacagcgaagaggcuaaacuuaauagagaagagaucgacggggugaagcuggagucuacacggaucuaucaaauucucgccaucuacuccacgguugcgagcucccuggugcuggucgugucucucggcgcuauuagcuuuuggaugugcuccaacggaucucugcagugccgcaucuguauuuga

SEQ ID NO: 198998 - RNA, 1701 nt, Artificial Sequence; identical to SEQ ID NO: 195905
  derived and/or modified CDS sequence (opt5) from hemagglutinin__InfluenzaA__AEJ37873

SEQ ID NO: 198999 - RNA, 1701 nt, Artificial Sequence; identical to SEQ ID NO: 198953
  derived and/or modified CDS sequence (opt5) from hemagglutinin__InfluenzaA__AEJ37883

SEQ ID NO: 199000 - RNA, 1701 nt, Artificial Sequence
  derived and/or modified CDS sequence (opt5) from hemagglutinin__InfluenzaA__AEJ37893
augaaggccauccuggugguccuccuguacaccuucgcuacaacgaacgccgacacccuuugcauuggcuaucacgcgaauaacagcacagauaccguugacacagugcuggagaaaaaugugaccgucacacauuccgugaaccuccuggaagauaagcacaaugggaaacuuuguaagcugagaggaguugcuccccuccaucugggcaaaugcaacaucgccggguggauucugggaaauccugagugugaaucucucagcaccgccuccucuuggagcuacaucguggagacguccucuagcgacaacgggaccugcuauccgggcaauuuuauugauuacgaagaacugcgggagcagcuuuccagcgucucuuccuucgaacgcuuugagaucuuccccaagacaagcucuuggccugaccacgauuccaacaagggagugaccgcugccuguccccaugcuggcgccaagagcuuuuauaagaaucugaucuggcucguuaaaaagggcaacucuuacccuaaacuguccaagagcuauauuaaugacaaggggaaagaagugcuuguccuguggggaauccaccaccccuccacaucugcggaucaacagagccucuaccagaacgccgacgcuuacguguucgugggcaccuccagauauagcaagaaauuuaagccugagauugccauccggccgaaaguccgcgaucaggaggggagaaugaauuacuauuggacgcugguugaacccggagacaagauuacauucgaggcuaccggcaaccugguggccccucgguacgcguuugccauggaacgcaacgcugggucuggaaucauuaucuccgauaaacccgugcaugacugcaauacaaccugucaaaccccuaagggcgccaucaacacaagccuccccuuccagaauauucacccgaucacgauuggcaagugcccuaaauaugucaagucuaccaaacugagacuugcuacagggcugcggaacgugcccagcauccagucccgcggacucuuuggcgccauugccggguucaucgagggaggcuggaccgggaugguugacggaugguacggcuaucaucaccagaaugaacaaggcucuggguacgcugcggaucuuaagagcacacagaacgccaucgacaaaauuaccaauaaggugaacuccgucaucgagaagaugaauacgcaguuuacagcugugggaaaagaguucaaccaccuggaaaagagaauugagaaucugaacaaaaagguugaugacggcuuccucgauaucuggaccuacaaugccgaacugcuggugcuccuggagaacgaacggacccuugacuaucaugauagcaaugucaaaaaccuguacgagaaggugcgcucucagcucaagaacaaugccaaagagauugggaacggauguuuugaguucuaucacaagugcgacaauacauguauggaguccgucaaaaacggcaccuacgauuauccuaaguacagcgaagaggcuaaacugaauagagaagagaucgacggggugaaacuugagucuacacggaucuaucaaauucuggccaucuacuccacgguugcgagcucccucgugcuggucgugucucugggcgcuauuagcuuuuggaugugcuccaacggaucucuccagugccgcaucuguauuuga

SEQ ID NO: 199001 - RNA, 1701 nt, Artificial Sequence; identical to SEQ ID NO: 198953
  derived and/or modified CDS sequence (opt5) from hemagglutinin__InfluenzaA__AEJ37903

SEQ ID NO: 199002 - RNA, 1701 nt, Artificial Sequence
  derived and/or modified CDS sequence (opt5) from hemagglutinin__InfluenzaA__AEJ37923
augaaggccauccuggugguccuccuguacaccuucgcuacagccaacgcggacacgcuuugcauuggcuaucacgcuaauaacagcaccgauacaguugacaccgugcuggagaaaaaugugacagucacccauuccgugaaccuccuggaagauaagcacaaugggaaacuuuguaagcugagaggaguugcuccccuccaucugggcaaaugcaacaucgccggguggauucugggaaauccugagugugaaucucucagcacagccuccucuuggagcuacaucguggagaccuccucuagcgacaacggcacgugcuauccggggaauuuuauugauuacgaagaacugcgggagcagcuuuccagcgucucuuccuucgaacgcuuugagaucuuccccaagaccagcucuuggccugaccacgauuccaacaagggagugacagccgcuuguccccaugccggcgcgaaauccuuuuauaagaaucugaucuggcucguuaaaaagggcaacucuuacccuaaacuguccaagagcuauauuaaugacaaggggaaagaagugcuuguccuguggggaauccaccaccccuccaccucugccgaucaacagagccucuaccagaacgcugacgccuacguguucgugggcacauccagauauagcaagaaauuuaagccugagauugcuauccggccgaaaguccgcgaucaggaggggagaaugaauuacuauuggacccugguugaacccggagacaagauuacguucgaggccacaggcaaccugguggcgccucgguacgccuuugcuaucgaacgcauggccgggucuggaauuaucaucuccgauacccccgugcaugacugcaacacaaccugucaaaccccuaaaggcgcuauuaauacaagccuccccuuccagaacauccacccgauuacgaucggcaagugcccuaaguaugucaaaucuaccaagcugagacuugccacagggcugcggaaugugcccagcauucagucccgcggacucuuuggcgccaucgcuggguucaucgagggaggcuggaccgggaugguugacggaugguacggcuaucaucaccagaacgaacaaggcucuggguacgcggccgaucugaaaagcacacagaaugcuauugacaagaucaccaacaaagugaauagcgucauugagaagaugaacacgcaguuuacagccgugggaaaggaguucaaucaccuugagaaaagaaucgagaaccugaauaagaaaguugaugacggcuuccucgauauuuggaccuacaacgccgaacugcuggugcuccuggagaaugaacggacccuugacuaucaugauagcaacgucaagaaucuguacgagaaagugcgcucucagcucaagaacaacgcuaaggagaucgggaauggauguuuugaguucuaucacaaaugcgacaacacauguauggaauccgucaagaauggcaccuacgauuauccuaaauacagcgaagaggccaagcugaacagagaagagaucgacggggugaaacuugagucuacacggauuuaucaaauccuggcgauuuacuccacgguugcuagcucccucgugcuggucgugucucugggcgccaucagcuuuuggaugugcuccaauggaucucuccagugccgcauuuguaucuga

SEQ ID NO: 199003 - RNA, 1701 nt, Artificial Sequence
  derived and/or modified CDS sequence (opt5) from hemagglutinin__InfluenzaA__AEJ37943
augaaggccauccuggugguccuccuguacaccuucgcuacagccaacgcggacacgcuuugcauuggcuaucacgcuaauaacagcaccgauacaguugacaccgugcuggagaaaaaugugacagucacccauuccgugaaccuccuggaagauaagcacaaugggaaacuuuguaagcugagaggaguugcuccccuccaucugggcaaaugcaacaucgccggguggauucugggaaauccugagugugaaucucucagcacagccuccucuuggagcuacaucguggagaccuccucuagcgacaacggcacgugcuauccgggggauuuuauugacuacgaagaacugcgggagcagcuuuccagcgucucuuccuucgaacgcuuugagaucuuccccaagaccagcucuuggccuaaucacgauuccaacaagggagugacagccgcuuguccccaugccggcgcgaaaucuuuuuauaagaaucugaucuggcucguuaaaaagggcaacagcuacccuaaacuguccaagagcuauauuaaugacaaggggaaagaagugcuuguccuguggggaauccaccaccccuccaccucugccgaucaacagagccucuaccagaacgcugacgccuacguguucgugggcacauccagauauagcaagaaauuuaagccugagauugcuauccggccgaaaguccgcgaucaggaggggagaaugaauuaccauuggacccugguugaacccggagacaagauuacguucgaggccacaggcaaccugguggugccucgguaugcguuugccauggaacgcaacgcugggucuggaaucauuaucuccgauacccccguccacgacugcaauacaaccugucaaaccccuaaaggcgccaucaacacaagccuccccuuccagaauauucauccgaucacgauuggcaagugcccuaaguacgugaaaucuaccaagcugagacuugcuacagggcugcggaacguucccagcauccagucccgcggacucuuuggcgccauugccggguucaucgagggaggcuggaccgggaugguggacggaugguauggcuaccaccaccagaaugaacaaggcucuggguaugcugcggaucugaaaagcacacagaacgccaucgacaagauuaccaauaaagucaacuccgugaucgagaagaugaauacgcaguuuacagcuguuggaaaggaguucaaccaucuugagaaaagaauugagaaucugaacaagaaaguggaugacggcuuccucgauaucuggaccuacaaugccgaacugcugguccuccuggagaacgaacggacccuugacuaccacgauagcaaugugaagaaccuguaugagaaaguccgcucucagcucaagaacaaugccaaggagauugggaacggauguuuugaguucuaccauaaaugcgacaauacauguauggaauccgugaagaacggcaccuaugauuacccuaaauauagcgaagaggcuaagcugaauagagaagagaucgacgggguuaaacuugagucuacacggaucuaccaaauucuggccaucuauuccacgguggcgagcucccucguccuggugguuucucugggcgcuauuagcuuuuggaugugcuccaacggaucucuccagugccgcaucuguauuuga

SEQ ID NO: 199004 - RNA, 1701 nt, Artificial Sequence; identical to SEQ ID NO: 198953
  derived and/or modified CDS sequence (opt5) from hemagglutinin__InfluenzaA__AEJ37953

SEQ ID NO: 199005 - RNA, 1701 nt, Artificial Sequence
  derived and/or modified CDS sequence (opt5) from hemagglutinin__InfluenzaA__AEJ37963
augaaggccauccuggugguccuccuguacaccuucgcuacagccaacgcggacacgcuuugcauuggcuaucacgcuaauaacagcaccgauacaguugacaccgugcuggagaaaaaugugacagucacccauuccgugaaccuccuggaagauaagcacaaugggaaacuuuguaagcugagaggaguugcuccccuccaucugggcaaaugcaacaucgccggguggauucugggaaauccugagugugaaucucucagcacagccuccucuuggagcuacaucguggagaccuccucuagcgacaacggcacgugcuauccggggaauuuuauugauuacgaagaacugcgggagcagcuuuccagcgucucuuccuucgaacgcuuugagaucuuccccaagaccagcucuuggccugaccacgauuccaacaagggagugacagccgcuuguccccaugccggcgcgaaaucuuuuuauaagaaucugaucuggcucguuaaaaagggcaacagcuacccuaaacuguccaagagcuauauuaaugacaaggggaaagaagugcuuguccuguggggaauccaccaccccuccaccucugccgaucaacagagccucuaccagaacgcugacgccuacguguucgugggcacauccagauauagcaagaaauuuaagccugagauugcuauccggccgaaaguccgcgaucaggaggggagaaugaauuacuauuggacccugguugaacccggagacaagauuacguucgaggccacaggcaaccugguggcgccucgguacgccuuugcuauggaacgcaacgccgggucuggaaucauuaucuccgauacccccgugcaugacugcaauacaaccugucaaaccccuaaaggcgcuacaaacacgagccuccccuuccagaauauccacccgauuaccaucggcaagugcccuaaguaugucaaaucuacaaagcugagacuugccaccgggcugcggaacgugcccagcauucagucccgcggacucuuuggcgccaucgcuggguucauugagggaggcuggacagggaugguugacggaugguacggcuaucaucaccagaaugaacaaggcucuggguacgcggccgaucugaaaagcacccagaacgcuaucgacaagaucacgaauaaagugaacuccgucauugagaagaugaauacacaguuuaccgccgugggaaaggaguucaaccaccuugagaaaagaaucgagaaucugaacaagaaaguugaugacggcuuccucgauauuuggaccuacaaugccgaacugcuggugcuccuggagaacgaacggacacuugacuaucaugauagcaaugucaagaaccuguacgagaaagugcgcucucagcucaagaacaaugcuaaggagaucgggaacggauguuuugaguucuaucacaaaugcgacaauaccuguauggaauccgucaagaacggcacauacgauuauccuaaauacagcgaagaggccaagcugaauagagaagagauugacggggugaaacuugagucuacgcggaucuaucaaauccuggcgauuuacuccaccguugcuagcucccucgugcuggucgugucucugggcgccaucagcuuuuggaugugcuccaacggaucucuccagugccgcauuuguaucuga

SEQ ID NO: 199006 - RNA, 1701 nt, Artificial Sequence; identical to SEQ ID NO: 195905
  derived and/or modified CDS sequence (opt5) from hemagglutinin__InfluenzaA__AEJ37973

SEQ ID NO: 199007 - RNA, 1701 nt, Artificial Sequence; identical to SEQ ID NO: 198953
  derived and/or modified CDS sequence (opt5) from hemagglutinin__InfluenzaA__AEJ37983

SEQ ID NO: 199008 - RNA, 1701 nt, Artificial Sequence; identical to SEQ ID NO: 197605
  derived and/or modified CDS sequence (opt5) from hemagglutinin__InfluenzaA__AEK21369

SEQ ID NO: 199009 - RNA, 1698 nt, Artificial Sequence; identical to SEQ ID NO: 195688
  derived and/or modified CDS sequence (opt5) from hemagglutinin__InfluenzaA__AEK21380

SEQ ID NO: 199010 - RNA, 1701 nt, Artificial Sequence
  derived and/or modified CDS sequence (opt5) from hemagglutinin__InfluenzaA__AEK21396
augaaggccauccuggugguccuccuguacaccuucgcuacagccaacgcggacacgcuuugcauuggcuaucacgcuaauaacagcaccgauacaguugacaccgugcuggagaaaaaugugacagucacccauuccguggaucuccuggaagacaagcacaacgggaaacuuuguaagcugagaggaguugcuccccuccaucugggcaaaugcaauaucgccggguggauucugggaaacccugagugugaaucucucagcacagccuccucuuggagcuacaucguggagaccuccucuagcgauaauggcacgugcuauccgggggacuuuauugauuacgaagaacugcgggagcagcuuuccagcgucucuuccuucgaacgcuuugagaucuuccccaagaccagcucuuggccuaaccacgacuccaauaagggagugacagccgcuuguccccaugccggcgcgaaaucuuuuuauaagaaccugaucuggcucguuaaaaagggcaauagcuacccuaaacuguccaagagcuauauuaacgauaaggggaaagaagugcuuguccuguggggaauccaccaccccuccaccucugccgaccaacagagccucuaccagaaugcugaugccuacguguucgugggcacauccaaguauagcaaaaaguuuaaaccugagauugcuaucagaccgaagguccgggaccaggaggggcgcaugaacuacuauuggacccugguugaacccggagauaaaauuacguucgaggccacaggcaaucugcucgugccuagauacgcguuugaaauggagcggaagucuggguccggaaucauuaucagcgacacccccgugcaugacugcaacacaaccugucaaaccccuaagggcgccaucaacacaucucugcccuuccagaauauucacccgaucacgauuggcaaaugcccuaaguaugucaaaagcaccaaacuucgccuggcuacagggcucagaaacgugcccuccauccagucucggggacuguuuggcgccauugcuggguucaucgaaggaggcuggaccgggaugguugauggaugguacggcuaucaucaccagaaugagcaaggcagcggguacgccgccgaccuuaaguccacacagaacgcuaucgaugagauuaccaauaaggugaacagcgucaucgaaaagaugaauacgcaguuuacagcggugggaaaagaguucaaccaccuggaaaagcgcauugagaaucucaacaaaaagguugacgauggcuuccuggacaucuggaccuacaaugccgaacugcucgugcugcuugagaacgagagaacccuggauuaucaugacucuaaugucaaaaaccucuacgaaaaggugcggucccagcugaagaauaacgcuaaagagauugggaacggauguuuugaguucuaucacaagugcgauaauacauguauggagagcgucaaaaacggcaccuacgacuauccuaaguacucugaagaggccaaacuuaaucgcgagaagaucgauggggugaagcuggaauccacaagaaucuaucaaauucucgccaucuacagcacgguugcuuccucucuggugcuggucgugagccucggcgccauuuccuuuuggaugugcucuaacggaagccugcagugccggaucuguauuuga

SEQ ID NO: 199011 - RNA, 1701 nt, Artificial Sequence
  derived and/or modified CDS sequence (opt5) from hemagglutinin__InfluenzaA__AEK21406
augaaggccauccuggugguccuccuguacaccuucgcuacagccaacgcggacacgcuuugcauuggcuaucacgcuaauaacagcaccgauacaguugacaccgugcuggagaaaaaugugacagucacccauuccgugaaccuccuggaagauaagcacaaugggaaacuuuguaagcugagaggaguugcuccccuccaucugggcaaaugcaacaucgccggguggauucugggaaauccugagugugaaucucucagcacagccuccucuuggagcuacaucguggagaccuccucuagcgacaacggcacgugcuauccgggggauuuuauugacuacgaagaacugcgggagcagcuuuccagcaugucuuccuucgaacgcuuugagaucuuccccaagaccagcucuuggccugaucacgacuccaauaagggagucacagccgcuuguccccaugccggcgcgaaauccuuuuauaagaaccugaucuggcucgugaaaaagggcaauucuuacccuaaacuguccaagagcuauauuaacgauaaggggaaagaaguucuugugcuguggggaauccaccaccccuccaccucugccgaccaacagagccucuaccagaaugcugaugccuacgucuucgugggcacauccagauauagcaagaaauuuaagccugagauugcuauccggccgaaagugcgcgaccaggaggggagaaugaacuacuauuggacccuggucgaacccggagauaagauuacguucgaggccacaggcaaucugguugugccucgguacgcguuugccauggaacgcaacgcugggucuggaaucauuaucuccgacacccccgugcaugacugcaacacaaccugucaaaccccuaaaggcgccaucaauacaagccuccccuuccagaacauucacccgaucacgauuggcaagugcccuaaguaugucaaaucuaccaagcugagacuugcuacagggcugcggaaugugcccagcauccagucccgcggacucuuuggcgccauugccggguucaucgagggaggcuggaccgggaugguugauggaugguacggcuaucaucaccagaacgaacaaggcucuggguacgcugcggaccugaaaagcacacagaaugccaucgauaagauuaccaacaaagugaauagcgucaucgagaagaugaacacgcaguuuacagcugugggaaaggaguucaaucaccuugagaaaagaauugagaaccugaauaagaaaguugacgauggcuuccucgacaucuggaccuacaacgccgaacugcuggugcuccuggagaaugaacggacccuugauuaucaugacagcaacgucaagaaucuguacgagaaagugcgcucucagcucaagaacaacgccaaggagauugggaauggauguuuugaguucuaucacaaaugcgauaacacauguauggaauccgucaagaauggcaccuacgacuauccuaaauacagcgaagaggcuaagcugaacagagaagagaucgauggggugaaacuugagucuacacggaucuaucaaauucuggccaucuacuccacgguugcgagcucccucgugcuggucgugucucugggcgcuauuagcuuuuggaugugcuccaauggaucucuccagugccgcaucuguauuuga

SEQ ID NO: 199012 - RNA, 1701 nt, Artificial Sequence
  derived and/or modified CDS sequence (opt5) from hemagglutinin__InfluenzaA__AEK21416
augaaggccauccuggugguccuccuguacaccuucgcuacagccaacgcggacacgcuuugcauuggcuaucacgcuaauaacagcaccgauacaguugacaccgugcuggagaaaaaugugacagucacccauuccgugaaccuccuggaagauaagcacaaugggaaacuuuguaagcugagaggaguugcuccccuccaucugggcaaaugcaacaucgccggguggauucugggaaauccugagugugaaucucucagcacagccuccucuuggagcuacaucguggagaccuccucuagcgacaacggcacgugcuauccgggggucuuuauugauuacgaagaacugcgggagcagcuuuccagcgugucuuccuucgaacgcuuugagaucuuccccaagaccagcucuuggccuaaucacgacuccaacaagggaguuacagccgcuuguccccaugccggcgcgaaaucuuuuuauaagaaucugaucuggcucgugaaaaagggcaacagcuacccuaaacuguccaagagcuauauuaaugauaaggggaaagaaguccuugugcuguggggaauccaccaccccuccaccacagccgaccaacagucucucuaccagaacgcugaugccuacguguucgucggcaccagcagauauuccaagaaauuuaagccugagauugcuguucggccgaaagugcgcgaccaggaggggagaaugaauuacuauuggacgcugguggaacccggagauaagaucacauucgaggccaccggcaaccuggucgugccucgguacgcguuugccauggaacgcaacgcugggagcggaauuaucauuucugacacacccguucaugauugcaauaccaccugucaaacaccuaaaggcgccaucaacacgucccuccccuuccagaauauccacccgauuaccaucggcaagugcccuaaguaugugaaaagcacaaagcugagacuugcuaccgggcugcggaacguccccucuauucagagccgcggacucuuuggcgccaucgccggguucauugagggaggcuggacagggaugguggacggaugguacggcuaucaucaccagaaugaacaaggcuccggguacgcugcggaccugaaaucuacccagaacgccaucgauaagaucacgaauaaaguuaacagcgugauugagaagaugaauacacaguuuaccgcugucggaaaggaguucaaccaccuugagaaaagaaucgagaaucugaacaagaaaguggacgauggcuuccucgacauuuggaccuacaaugccgaacugcugguccuccuggagaacgaacggacacuugauuaucaugacuccaaugugaagaaccuguacgagaaaguucgcaaccagcucaagaauaacgccaaggagaucgggaauggauguuuugaguucuaucacaaaugcgauaacaccuguauggaaagcgugaagaauggcacauacgacuauccuaaauacucugaagaggcuaagcugaacagagaagagauugauggggucaaacuugaguccacgcggaucuaucaaauccuggccauuuacagcaccguggcgucuucccucguucugguggucagccugggcgcuaucuccuuuuggaugugcucuaauggaagccuccagugccgcauuuguaucuga

SEQ ID NO: 199013 - RNA, 1701 nt, Artificial Sequence
  derived and/or modified CDS sequence (opt5) from hemagglutinin__InfluenzaA__AEK21426
augaaggccauccuggugguccuccuguacaccuucgcuacagccaacgcggacacgcuuugcauuggcuaucacgcuaauaacagcaccgauacaguugacaccgugcuggagaaaaaugugacagucacccauuccgugaaccuccuggaagauaagcacaaugggaaacuuuguaagcugagaggaguugcuccccuccaucugggcaaaugcaacaucgccggguggauucugggaaauccugagugugaaucucucagcacagccuccucuuggagcuacaucguggagaccuccucuagcgacaacggcacgugcuauccggggaauuuuauugauuacgaagaacugcgggagcagcuuuccagcgucucuuccuucgaacgcuuugagaucuuccccaagaccagcucuuggccugaccacgauuccaacaagggagugacagccgcuuguccccaugccggcgcgaaaucuuuuuauaagaaucugaucuggcucguuaaaaagggcaacagcuacccuaaacuguccaagagcuauauuaaugacaaggggaaagaagugcuuguccuguggggaauccaccaccccuccaccucugccgaucaacagagccucuaccagaacgcugacgccuacguguucgugggcacauccagauauagcaagaaauuuaagccugagauugcuauccggccgaaaguccgcgaucaggaggggagaaugaauuacuauuggacccugguugaacccggagacaagauuacguucgaggccacaggcaaccugguggcgccucgguacgccuuugcuauggaacgcaacgccgggucuggaaucauuaucuccgauacccccgugcaugacugcaauacaaccugucaaaccccuaaaggcgcuaucaacacaagccuccccuuccagaauauucacccgaucacgauuggcaagugcccuaaguaugucagaucuaccaaacugcggcuugccacagggcugcgcaacgugcccagcauccaguccagaggacucuuuggcgccauugcuggguucaucgagggaggcuggaccgggaugguugacggaugguacggcuaucaucaccagaaugaacaaggcucuggguacgcggccgaucuuaagagcacacagaacgcuaucgacaaaauuaccaauaaggugaacuccgucaucgagaaaaugaauacgcaguuuacagccgugggaaaggaguucaaccaccuugaaaagcggauugagaaucugaacaaaaagguugaugacggcuuccucgauaucuggaccuacaaugccgaacugcuggugcuccuggagaacgaacgcacccuugacuaucaugauagcaaugucaaaaaccuguacgagaaggugagaucucagcucaaaaacaaugcuaaggagauugggaacggauguuuugaguucuaucacaagugcgacaauacauguauggaguccgucaaaaacggcaccuacgauuauccuaaguacagcgaagaggccaaacugaaucgggaagagaucgacggggugaagcuggagucuacacgcaucuaucaaauucuggcgaucuacuccacgguugcuagcucccucgugcuggucgugucucugggcgccauuagcuuuuggaugugcuccaacggaucucuccagugcagaaucuguauuuga

SEQ ID NO: 199014 - RNA, 1701 nt, Artificial Sequence; identical to SEQ ID NO: 195905
  derived and/or modified CDS sequence (opt5) from hemagglutinin__InfluenzaA__AEK21436

SEQ ID NO: 199015 - RNA, 1701 nt, Artificial Sequence
  derived and/or modified CDS sequence (opt5) from hemagglutinin__InfluenzaA__AEK21456
augaaggccauccuggugguccuccuguacaccuucgcuacagccaacgcggacacgcuuugcauuggcuaucacgcuaauaacagcaccgauacaguugacaccgugcuggagaaaaaugugacagucacccauuccgugaaccuccuggaagauaagcacaaugggaaacuuuguaagcugagaggaguugcuccccuccaucugggcaaaugcaacaucgccggguggauucugggaaauccugagugugaaucucucagcacagccuccucuuggagcuacaucguggagaccuccucuagcgacaacggcacgugcuauccgggggauuuuauugacuacgaagaacugcgggagcagcuuuccagcgucucuuccuucgaacgcuuugagaucuuccccaagaccagcucuuggccuaaucacgauuccaacaagggagugacagccgcuuguccccaugccggcgcgaaaucuuuuuauaagaaucugaucuggcucguuaaaaagggcaacagcuacccuaaacuguccaagagcuauauuaaugacaaggggaaagaagugcuuguccuguggggaauccaccaccccuccaccucugccgaucaacagagccucuaccagaacgcugacgccuacguguucgugggcacauccagauauagcaagaaauuuaagccugagauugcuauccggccgaaaguccgcgaucaggaggggagaaugaauuacuauuggacccugguugaacccggagacaagauuacguucgaggccacaggcaaccugguggugccucgguacgcguuugccauggaacgcaacgcugggucuggaaucauuaucuccgauacccccguccaugacugcaauacaaccugucaaaccccuaaaggcgccaucaacacaagccuccccuuccagaauauucacccgaucacgauuggcaagugcccuaaguaugugaaaucuaccaagcugagacuugcuacagggcugcggaacguucccagcauccagucccgcggacucuuuggcgccauugccggguucaucgagggaggcuggaccgggaugguggacggaugguacggcuaucaucaccagaaugaacaaggcucuggguacgcugcggaucugaaaagcacacagaacgccaucgacaagauuaccaauaaagucaacuccgugaucgagaagaugaauacgcaguuuacagcuguuggaaaggaguucaaccaccuugagaaaagaauugagaaucugaacaagaaaguggaugacggcuuccucgauaucuggaccuacaaugccgaacugcugguccuccuggagaacgaacggacccuugacuaucaugauagcaaugugaagaaccuguacgagaaaguccgcucucagcucaagaacaaugccaaggagauugggaacggauguuuugaguucuaucacaaaugcgacaauacauguauggaaaacgugaagaauggcaccuacgauuauccuaaauacuccgaagaggcuaagcugaacagagaagagaucgacgggguuaaacuugagagcacacggaucuaucaaauucuggccaucuacucuacgguggcguccagccucguccuggugguuucccugggcgcuauuucuuuuuggaugugcagcaauggaucccuccagugccgcaucuguauuuga

SEQ ID NO: 199016 - RNA, 1701 nt, Artificial Sequence; identical to SEQ ID NO: 198953
  derived and/or modified CDS sequence (opt5) from hemagglutinin__InfluenzaA__AEK21466

SEQ ID NO: 199017 - RNA, 1701 nt, Artificial Sequence; identical to SEQ ID NO: 198953
  derived and/or modified CDS sequence (opt5) from hemagglutinin__InfluenzaA__AEK21476

SEQ ID NO: 199018 - RNA, 1701 nt, Artificial Sequence; identical to SEQ ID NO: 195905
  derived and/or modified CDS sequence (opt5) from hemagglutinin__InfluenzaA__AEK21486

SEQ ID NO: 199019 - RNA, 1701 nt, Artificial Sequence
  derived and/or modified CDS sequence (opt5) from hemagglutinin__InfluenzaA__AEK28774
augaagaccaucauugcccugagcuacauccucugccugguguucgcucagaaacuucccggcaacgacaauuccacagccacgcugugucucgggcaccaugcggucccuaacggaaccauuguuaagacaaucaccaaugaucaaauugaggugacaaacgcuaccgaacuggugcagucuagcuccacaggcgagaucugcgacucuccgcaccagauccuugaugggaaaaauuguacccugauugacgcccuccugggagauccccagugcgacggcuuucaaaacaagaaaugggaucuguucgucgaaagaagcaaggccuauuccaauuguuacccuuaugacgugcccgauuacgcuucucuccggagccugguugccuccagcgggacgcuugaguuuaacaaugaaucuuucaacuggaccggagugacacagaauggcaccuccagcgcuugcauccgcagaucuaagaacuccuuuuucagccggcugaauuggcucacacaucugaacuuuaaauauccugcccuuaaugucaccaugcccaacaacgagcaguucgacaagcuguacauuuggggcgugcaccauccugggacggauaaagaccagaucuuucucuaugcgcaagccucuggacgcauuacaguuuccaccaagagaagccagcagacagcuaucccgaauauuggcucccggccccgcgugagaaacaucccuucucggaucagcauuuacuggaccaucgucaaacccggggauauucugcugaucaauuccaccggaaaccucauugccccucgcggcuacuucaagaucagaagcgggaagucuuccaucaugcggagcgacgcucccauuggaaaauguaauucugagugcaucacaccgaacggcagcauuccuaaugacaagcccuuucagaacgugaaucgcaucacguauggcgccuguccuagauacgugaaacaaaacacccugaaacuugcgacagggaugcggaauguccccgaaaaacagacccgcggaauuuucggcgccaucgcuggguuuaucgagaacggaugggaaggcaugguugaugggugguauggauucagacaccaaaauuccgagggccggggccaggccgcugaccugaagucuacacaggccgccauugaucagaucaacgggaaacucaauagacugauuggaaagaccaacgagaaguuccaccagaucgaaaaagaguuuagcgaaguggagggccgcauucaagaccuugaaaaguacguggaggauacgaaaaucgaccugugguccuauaacgcugagcuccuggucgcgcuggaaaaucagcauacaauucaccucaccgauagcgagaugaacaagcuguucgaaaagaccaagaagcagcuucgggagaaugccgaagacauggggaacggaugcuuuaaaaucuaccauaagugugauaaugcuugcaucggcucuauuagaaacgggacauaugaccacgauguguaccgcgacgaggcccugaauaaccgguuccagaucaaaggcguugagcucaaguccggauacaaagacuggauucuguggaucagcuuugccauuucuugcuuccuucuguguguggcucuccugggcuuuaucaugugggccugccaaaaggggaauaucagauguaacauuugcaucuga

SEQ ID NO: 199020 - RNA, 1701 nt, Artificial Sequence
  derived and/or modified CDS sequence (opt5) from hemagglutinin__InfluenzaA__AEK28785
augaagaccaucauugcccugagcuacauccucugccugguguucgcucagaaccuucccggcaaugacaacuccgccgcgacacugugucucgggcaccaugcugucccuaauggaacgauuguuaaaaccaucacaaacgaucaaguggaggugaccaaugccacagaacugguccagaacucuagcaccggcgagauuugcgacuccccgcaccagauccuugauggggaaaauuguacacugaucgacgcccuccugggagauccccagugcgacggcuuucaaaacaagaaaugggaucuguucguggagagaucuaaggcuuauagcaauuguuacccuuaugacguucccgauuacgccucccuccggucucugguggcuagcuccgggacccuugaauuuaacaaugagagcuucaacuggacgggagucacccagaauggcacaucuuccgccugcauucgcagaagcaacaauuccuuuuucucucggcugaacuggcucacccaucugaacuuuaaauauccugcgcuuaaugugacaaugcccaacaaugagcaguucgacaagcuguacaucuggggcguucaccauccugggaccgauaaggaccagauuuuucucuaugcccaagcuagcggacgcaucacggugucuacaaaaagaucccagcaggccgucauuccgaacaucggcagccggccccgcgugagaaauauuccuucccggaucucuaucuacuggaccauugugaagcccggggauauccugcugauuaacagcacaggaaaucucaucgcuccucgcggcuacuucaaaauuagauccgggaaaagcucuaucaugcgguccgacgcccccaucggaaaauguaacagcgaaugcauuaccccgaauggcucuaucccuaacgacaagcccuuucagaaugucaaccgcauuaccuauggcgcguguccuagauacguuaagcaaaauacacugaaacuugccacggggaugcggaacgugcccgagaagcagacccgcggaaucuucggcgcuauugccggguuuaucgaaaauggaugggagggcaugguggaugggugguauggauucagacaccagaacagcgagggccggggccaagcugccgaccugaaauccacacaggccgcuaucgaucagauuaacgggaagcucaauagacugaucggaaaaaccaacgaaaaguuccaccagauugagaaagaauuuucugaggucgaaggccgcauccaagaccuugagaaguacguggaggauacaaagauugaccuguggagcuauaaugcggaacuccugguugcccuggagaaccagcauaccauccaccucacggauuccgaaaugaauaaacuguucgagaagacaaagaagcagcuucgggaaaacgcugaggacauggggaauggaugcuuuaaaauuuaccauaagugugauaacgccugcaucggcagcaucagaaaugggaccuaugaccacgauguguaccgcgacgaggcccugaacaaucgguuccagauuaagggcgucgaacucaaaucuggauacaaggacuggauccuguggauuuccuuugcuaucagcugcuuccuucuguguguggcccuccugggcuuuauuaugugggcgugccaaaaagggaacaucagauguaauaucugcauuuga

SEQ ID NO: 199021 - RNA, 1701 nt, Artificial Sequence
  derived and/or modified CDS sequence (opt5) from hemagglutinin__InfluenzaA__AEK28796
augaagaccaucauugcccugagcuacauccucugccugguguucgcucagaaacuucccggcaacgacaauuccacagccacgcugugucucgggcaccaugcggucccuaacggaaccauuguuaagacaaucaccaaugauaaaauugaggugacaaacgcuaccgaacuggugcaaucuagcuccacaggcgagaucugcgacucuccgcaccagauccuugaugggaagaauuguacccugauugacgcccuccugggagauccccagugcgacggcuuucagaacaaaaagugggaucuguucgucgaaagaagcaaggccuauuccaauuguuacccuuaugacgugcccgauuacgcuucucuccggagccugguugccuccagcgggacgcuugaguuuaacaaugaaucuuucaacuggaccggagugacacaagacggcaccuccagcgcuugcauccgcggcucuaaaaauuccuuuuucagcagacugaacuggcucacacaucugaauuuuaaguauccugcccuuaacgucaccaugcccaauaacgagcaguucgauaaacuguacauuuggggagugcaccauccugggacggacaaggaucagaucuuucucuaugcgcaggccucuggccggauuacaguuuccaccaaacgcagccaacaggcugccaucccgaacauuggguccagaccccgggugcgcaauaucccuucuagaaucagcauuuacuggacaaucgucaagcccggagacauucugcugaucaacuccaccggcaaucucauugcuccucggggguacuucaagauccgcagcggaaaaucuuccaucaugagaagcgacgcccccauuggcaaguguaacucugagugcaucaccccgaauggcagcauuccuaacgauaaacccuuucagaaugugaaccggaucacauauggggcguguccucgcuacgugaagcagaauacgcugaaacuugccaccggaaugagaaacguccccgaaaagcaaacacggggcauuuucggggcuaucgccggauuuaucgagaauggcugggaagggaugguugacggaugguauggcuuccgccaccagaacuccgagggcagagggcaggcugccgaucugaaaucuacccaagccgcuauugaccagaucaauggaaagcucaaccggcugauuggcaagacaaaugagaaauuccaccagaucgaaaaggaguuuagcgaaguggaggggcgcauucaggaucuugaaaaauacguggaggacaccaagaucgaucugugguccuauaacgcggagcuccuggucgcccuggaaaaccaacauacgauucaccucacagacagcgagaugaauaaacuguucgaaaagaccaagaaacagcuuagagagaacgcugaagauaugggaaauggcugcuuuaagaucuaccauaaaugugacaacgccugcaucgggucuauucggaauggcaccuaugaucacgacguguacagagacgaggcccugaacaaucgcuuccagaucaagggaguugagcucaaauccggcuacaaggauuggauucuguggaucagcuuugcuauuucuugcuuccuucuguguguggcccuccugggguuuaucaugugggcgugccagaagggaaacauccgguguaauauuugcaucuga

SEQ ID NO: 199022 - RNA, 1701 nt, Artificial Sequence
  derived and/or modified CDS sequence (opt5) from hemagglutinin__InfluenzaA__AEK28807
augaagaccaucauugcccugagcuacauccucugccugguguucgcucagaaacuucccggcaacgacaauuccacagccacgcugugucucgggcaccaugcggucccuaacggaaccauuguuaagacaaucaccaaugaucaaauugaggugacaaacgcuaccgaacuggugcagucuagcuccacaggcgagaucugcgacucuccgcaccagauccuugauggggaaaauuguacccugauugacgcccuccugggagauccccagugcgacggcuuucaaaacaaaaagugggaucuguucgucgagagaagcaaagccuaugggaauuguuacccuuaugacgugcccgauuacgcuucccuccggucucugguugccagcuccggaacgcuugaauuuaacaaugagagcuucaacuggaccggcgugacacagaauggcaccucuuccgcuugcauccgcaagagcaacaauuccuuuuucucuagacugaacuggcucacacaucugaaguuuaaauauccugcccuuaaugucaccaugcccaacaacgagcaguucgacaagcuguacauuuggggagugcaccauccugggacggauaaugaccagaucuuucucuaugcgcaagccagcggccggauuacaguuucuaccaaacgcucccagcagacagugaucccgaacauugggagcagaccccggguccgcaauaucccuuccagaaucucuauuuacuggaccaucgugaagcccggagauauucugcugaucaacagcaccggcaaucucauugcuccucggggguacuucaaaauccgcuccggaaagagcucuaucaugagauccgacgcccccauuggcaaguguaacagcgaaugcaucacaccgaauggcucuauuccuaacgacaaacccuuucagaaugugaaccggaucacguauggggcuuguccucgcuacgucaagcaaaauacccugaaacuugccacaggaaugagaaacguucccgagaagcagacccggggcauuuucggggcgaucgccggauuuaucgaaaauggcugggaggggaugguggauggaugguauggcuuccgccaccagaacagcgagggcagagggcaagcugccgaccugaaauccacacaggcugccauugaucagaucaauggaaagcucaaccggcugauuggcaaaaccaacgaaaaguuccaccagaucgagaaggaauuuucugagguggaagggcgcauucaagaccuugagaaauacgucgaggauacgaagaucgaccuguggagcuauaaugccgaacuccugguggcucuggagaaccagcauacaauucaccucaccgauuccgaaaugaauaaacuguucgagaagaccaaaaagcagcuuagagaaaacgcggaggacaugggaaauggcugcuuuaagaucuaccauaaaugugauaacgccugcaucgggagcauucggaauggcacauaugaccacgauguuuacagagacgaggcucugaacaaucgcuuccagaucaagggaguggaacucaaaucuggcuacaaggacuggauucuguggaucuccuuugccauuagcugcuuccuucugugugucgcccuccugggguuuaucaugugggcuugccaaaaaggaaacauccgguguaauauuugcaucuga

SEQ ID NO: 199023 - RNA, 1701 nt, Artificial Sequence
  derived and/or modified CDS sequence (opt5) from hemagglutinin__InfluenzaA__AEK28818
augaagaccaucauugcccugagcuacauccucugccugguguucgcucagaaacuucccggcaacgacaauuccacagccacgcugugucucgggcaccaugcggucccuaacggaaccauuguuaagacaaucaccaaugaucaaauugaggugacaaacgcuaccgaacuggugcagucuagcuccacaggcgagaucugcgacucuccgcaccagauccuugaugggaaaaauuguacccugauugacgcccuccugggagauccccagugcgacggcuuucaaaacaagaaaugggaucuguucgucgaaagaagcaaggccuauuccaauuguuacccuuaugacgugcccgauuacgcuucucuccggagccugguugccuccagcgggacgcuugaguuuaacaaugaaucuuucaacuggaccggagugacacagaauggcaccuccagcgcuugcauccgcagaucuaagaacuccuuuuucagccggcugaauuggcucacacaucugaacuuuaaauauccugcccuuaaugucaccaugcccaacaacgagcaguucgacaagcuguacauuuggggcgugcaccauccugggacggauaaagaccagaucuuucucuaugcgcaagccucuggacgcauuacaguuuccaccaagagaagccagcagacagugaucccgaauauuggcucccggccccgcgucagaaacaucccuucucggaucagcauuuacuggaccaucgugaaacccggggauauucugcugaucaauaacaccggaaaucucauugcuccucgcggcuacuucaagaucagauccggaaagagcucuaucaugcgguccgacgcccccauugggaaauguaacagcgagugcaucacaccgaauggcucuauuccuaacgacaagcccuuucagaaugugaaccgcaucacguauggcgcuuguccuagauacgucaaacaaaauacccugaaacuugccacagggaugcggaacguucccgaaaaacagacccgcggaauuuucggcgcgaucgccggguuuaucgagaauggaugggaaggcaugguggaugggugguauggauucagacaccagaacagcgagggccggggccaagcugccgaccugaaguccacacaggcugccauugaucagaucaaugggaaacucaacagacugauuggaaagaccaacgagaaguuccaccagaucgaaaaagaguuuucugaaguggagggccgcauucaagaccuugaaaaguacgucgaggauacgaaaaucgaccuguggagcuauaaugccgagcuccugguggcucuggaaaaccagcauacaauucaccucaccgauuccgagaugaauaagcuguucgaaaagaccaagaagcagcuucgggagaacgcggaagacauggggaauggaugcuuuaaaaucuaccauaagugugauaacgccugcaucggcagcauuagaaaugggacauaugaccacgauguuuaccgcgacgaggcucugaacaaucgguuccagaucaaaggcguggagcucaagucuggauacaaagacuggauucuguggaucuccuuugccauuagcugcuuccuucugugugucgcccuccugggcuuuaucaugugggcuugccaaaaggggaacaucagauguaauauuugcaucuga

SEQ ID NO: 199024 - RNA, 1701 nt, Artificial Sequence
  derived and/or modified CDS sequence (opt5) from hemagglutinin__InfluenzaA__AEK28828
augaagaccaucauugcccugagcuacauccucugccugguguucgcucagaaacuucccggcaacgacaauuccacagccacgcugugucucgggcaccaugcggucccuaacggaaccauuguuaagacaaucaccaaugaucaaauugaggugacaaacgcuaccgaacuggugcagucuagcuccacaggcgagaucugcgacucuccgcaccagauccuugaugggaaaaauuguacccugauugacgcccuccugggagauccccagugcgacggcuuucaaaacaagaaaugggaucuguucgucgaaagaagcaaggccuauuccaauuguuacccuuaugacgugcccgauuacgcuucucuccggagccugguugccuccagcgggacgcuugaguuuaacaaugaaucuuucaacuggaccggagugacacagaauggcaccuccagcgcuugcauccgcagaucuaagaacuccuuuuucagccggcugaauuggcucacacaucugaacuuuaaauauccugcccuuaaugucaccaugcccaacaacgagcaguucgacaagcuguacauuuggggcgugcaccauccugggacggauaaagaccagaucuuucucuaugcgcaagccucuggacgcauuacaguuuccaccaagagaagccagcagacagugaucccgaauauuggcucccggccccgcgucagagauaucccuucucggaucagcauuuacuggaccaucgugaaacccggggacauucugcugaucaacuccaccggaaaucucauugcuccucgcggcuacuucaagaucagaagcgggaagucuuccaucaugcggagcgacgcccccauuggaaaauguaacucugagugcaucacaccgaauggcagcauuccuaacgauaagcccuuucagaaugugaaccgcaucacguauggcgcuuguccuagauacgucaaacaaaauacccugaaacuugccacagggaugcggaacguucccgaaaaacagacccgcggaauuuucggcgcgaucgccggguuuaucgagaauggaugggaaggcaugguggacgggugguauggauucagacaccagaacuccgagggccggggccaagcugccgaucugaagucuacacaggcugccauugaccagaucaaugggaaacucaacagacugauuggaaagaccaaugagaaguuccaccagaucgaaaaagaguuuagcgaaguggagggccgcauucaagaucuugaaaaguacgucgaggacacgaaaaucgaucugugguccuauaacgccgagcuccugguggcucuggaaaaccagcauacaauucaccucaccgacagcgagaugaauaagcuguucgaaaagaccaagaagcagcuucgggagaacgcggaagauauggggaauggaugcuuuaaaaucuaccauaagugugacaacgccugcaucggcucuauuagaaaugggacauaugaucacgacguuuaccgcgacgaggcucugaacaaucgguuccagaucaaaggcguggagcucaaguccggauacaaagauuggauucuguggaucagcuuugccauuucuugcuuccuucugugugucgcccuccugggcuuuaucaugugggugugccaaaaggggaacaucagauguaauauuugcaucuga

SEQ ID NO: 199025 - RNA, 1701 nt, Artificial Sequence; identical to SEQ ID NO: 194506
  derived and/or modified CDS sequence (opt5) from hemagglutinin__InfluenzaA__AEK28839

SEQ ID NO: 199026 - RNA, 1701 nt, Artificial Sequence
  derived and/or modified CDS sequence (opt5) from hemagglutinin__InfluenzaA__AEK28850
augaagaccaucauugcccugagcuacauccucugccugguguucgcucagaaacuucccggcaacgacaauuccacagccacgcugugucucgggcaccaugcggucccuaacggaaccauuguuaagacaaucaccaaugaucaaauugaggugacaaacgcuaccgaacuggugcagucuagcuccacaggcgagaucugcgacucuccgcaccagauccuugauggggaaaauuguacccugauugacgcccuccugggagauccccagugcgacggcuuucaaaacaaaaagugggaucuguucgucgagagaagcaaagccuauuccaauuguuacccuuaugacgugcccgauuacgcuucucuccggagccugguugccuccagcgggacgcuugaauuuaacaaugagucuuucaacuggaccggagugacacagaauggcaccuccagcgcuugcauccgcagaucuaacaauuccuuuuucagccggcugaacuggcucacacaucugaaguuuaaguauccugcccuuaaugucaccaugcccaacaacgagcaguucgacaaacuguacauuuggggcgugcaccauccugggacggauaaugaccagaucuuucucuaugcgcaagccucuggacgcauuacaguuuccaccaagagaagccagcagacagugaucccgaacauuggcucccggcugcgcgucagaaauauccccucucggaucagcauuuacuggaccaucgugaaaccuggggauauucugcucaucaacuccaccggaaaucugauugcuccccgcggcuacuucaagaucagaagcgggaaaucuuccaucaugcggagcgacgccccuauuggaaaguguaacucugaaugcaucacacccaauggcagcauuccgaacgacaagccuuuucagaaugugaaccgcaucacguauggcgcuugucccagauacgucaaacaaaauacccuuaagcuggccacagggaugcggaacguuccugagaaacagacccgcggaauuuucggcgcgaucgccggguuuaucgaaaauggaugggagggcaugguggaugggugguauggauucagacaccagaacuccgagggccggggccaagcugccgaccucaagucuacacaggcugccauugaucagaucaaugggaaacugaacagacuuauuggaaagaccaacgaaaaauuccaccagaucgagaaggaauuuagcgagguggaaggccgcauucaagaccuggagaaguacgucgaggauacgaaaaucgaccucugguccuauaaugccgaacugcugguggcucucgagaaccagcauacaauugaucugaccgacagcgaaaugaauaaacuuuucgagaagaccaagaaacagcugcgggaaaacgcggaggauauggggaauggaugcuuuaagaucuaccacaagugugacaacgccugcaucggcucuauuagaaaugggacauaugaucaugacguuuaccgcgacgaggcucucaacaaucgguuccagaucaaaggcguggaacugaaguccggauacaaagauuggauucuuuggaucagcuuugccauuucuugcuuccugcucugugucgcccugcugggcuuuaucaugugggcuugccaaaaggggaacaucagauguaauauuugcaucuga

SEQ ID NO: 199027 - RNA, 1701 nt, Artificial Sequence
  derived and/or modified CDS sequence (opt5) from hemagglutinin__InfluenzaA__AEK28861
augaagaccaucauugcccugagcuacauccucugccugguguucgcucagaaacuucccggcaacgacaauuccacagccacgcugugucucgggcaccaugcggucccuaacggaaccauuguuaagacaaucaccaaugaucaaauugaggugacaaacgcuaccgaacuggugcagucuagcuccacaggcgagaucugcgacucuccgcaccagauccuugauggggaaaauuguacccugauugacgcccuccugggagauccccagugcgacggcuuucaaaacaaaaagugggaucuguucgucgagagaagcaaagccuauuccaauuguuacccuuaugacgugcccgauuacgcuucucuccggagccugguugccuccagcgggacgcuugaauuuaacaaugagucuuucaacuggaccggagugacacagaauggcaccuccagcgcuugcauccgcagaucuaacaauuccuuuuucagccggcugaacuggcucacacaucugaaguuuaaguauccugcccuuaaugucaccaugcccaacaacgagcaguucgacaaacuguacauuuggggcgugcaccauccugggacggauaaugaccagaucuuucucuaugcgcaagccucuggacgcauuacaguuuccaccaagagaagccagcagacagugaucccgaacauuggcucccggccccgcgucagaaauaucccuucucggaucagcauuuacuggaccaucgugaaacccggggauauucugcugaucaacuccaccggaaaucucauugcuccucgcggcuacuucaagaucagaagcgggaaaucuuccaucaugcggagcgacgcccccauuggaaaguguaacucugaaugcaucacaccgaauggcagcauuccuaacgacaagcccuuucagaaugugaaccgcaucacguauggcgcuuguccuagauacgucaaacaaaauacccugaaacuugccacagggaugcggaacguucccgagaagcagacccgcggaauuuucggcgcgaucgccggguuuaucgaaaauggaugggagggcaugguggaugggugguauggauucagacaccagaacuccgagggccggggccaagcugccgaccugaagucuacacaggcugccauugaucagaucaaugggaaacucaacagacugauuggaaagaccaacgaaaaauuccaccagaucgagaaggaauuuagcgagguggaaggccgcauucaagaccuugagaaguacgucgaggauacgaaaaucgaccugugguccuauaaugccgaacuccugguggcucuggagaaccagcauacaauugaucucaccgacagcgaaaugaauaagcuguucgagaaaaccaagaaacagcuuaaggaaaacgcggaggauauggggaauggaugcuuuaagaucuaccacaaaugugacaacgccugcaucggcucuauucggaaugggacauaugaucaugacguuuacagagacgaggcucugaacaaucgcuuccacaucaagggcguggaacucaaauccggauacaaggauuggauucuguggaucagcuuugccaccucuugcuuccuucugugugucgcccuccugggcuuuauuaugugggcuugccagaaagggaacauccgguguaauaucugcauuuga

SEQ ID NO: 199028 - RNA, 1701 nt, Artificial Sequence
  derived and/or modified CDS sequence (opt5) from hemagglutinin__InfluenzaA__AEK28872
augaagaccaucauugcccugagcuacauccucugccugguguucgcucagaaacuucccggcaacgacaauuccacagccacgcugugucucgggcaccaugcggucccuaacggaaccauuguuaagacaaucaccaaugaucaaauugaggugacaaacgcuaccgaacuggugcagucuagcuccacaggcgagaucugcgacucuccgcaccagauccuugauggggaaaauuguacccugauugacgcccuccugggagauccccagugcgacggcuuucaaaacaaaaagugggaucuguucgucgagagaagcaaagccuauuccaauuguuacccuuaugacgugcccgauuacgcuucucuccggagccugguugccuccagcgggacgcuugaauuuaacaaugagucuuucaacuggaccggagugacacagaauggcaccuccagcgcuugcauccgcagaucuaacaauuccuuuuucagccggcugaacuggcucacacaucugaaguuuaaguauccugcccuuaaugucaccaugcccaacaacgagcaguucgacaaacuguacauuuggggcgugcaccauccugggacggauaaugaccagaucuuucucuaugcgcaagccucuggacgcauuacaguuuccaccaagagaagccagcagacagugaucccgaacauuggcucccggccccgcgucagagauaucccuucucggaucagcauuuacuggaccaucgugaaacccggggacauucugcugaucaauuccaccggaaaccucauugcuccucgcggcuacuucaagaucagaagcgggaaaucuuccaucaugcggagcgacgcccccauuggaaaguguaauucugaaugcaucacaccgaacggcagcauuccuaaugauaagcccuuucagaacgugaaucgcaucacguauggcgcuuguccuagauacgucaaacaaaacacccugaaacuugccacagggaugcggaauguucccgagaagcagacccgcggaauuuucggcgcgaucgccggguuuaucgaaaacggaugggagggcaugguggacgggugguauggauucagacaccaaaauuccgagggccggggccaggcugccgaucugaagucuacacaggcugccauugaccagaucaacgggaaacucaauagacugauuggaaagaccaacgaaaaauuccaccagaucgagaaggaauuuagcgagguggaaggccgcauucaagaucuugagaaguacgucgaggacacgaaaaucgaucugugguccuauaacgccgaacuccugguggcucuggagaaucagcauacaauucaccucaccgacagcgaaaugaacaagcuguucgagaaaaccaagaaacagcuucgggaaaaugcggaggauauggggaacggaugcuuuaagaucuaccauaagugugacaaugccugcaucggcucuauuagaaacgggacauaugaucacgacguuuaccgcgacgaggcucugaauaaccgguuccagaucaaaggcguggaacucaaguccggauacaaagauuggauucuguggaucagcuuugccauuucuugcuuccuucugugugucgcccuccugggcuuuaucaugugggcuugccaaaaggggaauaucagauguaacauuugcaucuga

SEQ ID NO: 199029 - RNA, 1701 nt, Artificial Sequence
  derived and/or modified CDS sequence (opt5) from hemagglutinin__InfluenzaA__AEK28883
augaagaccaucauugcccugagcuacauccucugccugguguucgcucagaaacuucccggcaacgacaauuccacagccacgcugugucucgggcaccaugcggucccuaacggaaccauuguuaagacaaucaccaaugaucaaauugaggugacaaacgcuaccgaacuggugcagucuagcuccacaggcgagaucugcgacucuccgcaccagauccuugauggggaaaauuguacccugauugacgcccuccugggagauccccagugcgacggcuuucaaaacaaaaagugggaucuguucgucgagagaagcaaagccuauuccaauuguuacccuuaugacgugcccgauuacgcuucucuccggagccugaucgccuccagcgggacgcuugaauuuaacaaugagucuuucaacuggaccggaguuacacagaauggcaccuccagcgcuugcauucgcagaucuuccaacagcuuuuucucucggcugaauuggcucacacaucugaaguuuaaguauccugcccuuaacgugaccaugcccaauaacgagcaguucgacaaacuguacaucuggggcguccaccauccugggacggauaacgaccagauuuuucucuaugcgcaagccuccggacgcaucacagugagcaccaagagaucccagcagacaguuauuccgaauaucggcucucggccccgcgugagaaacaucccuagccggauuuccaucuacuggaccauugucaaacccggggauauccugcugauuaauagcaccggaaaccucaucgcuccucgcggcuacuucaagaucagaucugggaaauccagcauuaugcggucugacgcccccaucggaaaguguaauagcgaaugcauuacaccgaacggcuccaucccuaaugacaagcccuuucagaacgugaaucgcauuacguauggcgcuuguccuagauacgugaaacaaaacacccugaagcuggccacagggaugcggaauguccccgagaaacagacccgcggaaucuucggcgcgaucgccggguuuauugaaaacggaugggagggcaugguugaugggugguauggauucagacaccaaaauucugagggccggggccaggcugccgaccuuaagagcacacaggcugccaucgaucagauuaacgggaaacucaauagacugaucggaaagaccaacgaaaaauuccaccagauugagaaggaauuuuccgagguggaaggccgcauccaagaccuugagaaguacguggaggauacgaaaauugaccuguggagcuauaacgccgaacuccuggucgcucuggagaaucagcauacaauccaccucaccgauucugaaaugaacaagcuguucgagaaaaccaagaaacagcuucgggaaaaugcggaggacauggggaacggaugcuuuaagaucuaccauaagugugauaaugccugcauuggcuccaucagaaacgggacauaugaccacgauguguaccgcgacgaggcucugaauaaccgguuccagauuaaaggcguugaacucaagagcggauacaaagacuggauccuguggauuucuuuugccaucuccugcuuccuucuguguguggcccuccugggcuuuaucaugugggcuugccaaaaggggaauauuagauguaacaucugcauuuga

SEQ ID NO: 199030 - RNA, 1701 nt, Artificial Sequence
  derived and/or modified CDS sequence (opt5) from hemagglutinin__InfluenzaA__AEK28894
augaagaccaucauugcccugagcuacauccucugccugguguucgcucagaaacuucccggcaacgacaauuccacagccacgcugugucucgggcaccaugcggucccuaacggaaccauuguuaagacaaucaccaaugaucaaauugaggugacaaacgcuaccgaacuggugcagucuagcuccacaggcgagaucugcgacucuccgcaccagauccuugauggggaaaauuguacccugauugacgcccuccugggagauccccagugcgacggcuuucaaaacaaaaagugggaucuguucgucgagagaagcaaagccuauuccaauuguuacccuuaugacgugcccgauuacgcuucucuccggagccugguugccuccagcgggacgcuugaauuuaacaaugagucuuucaacuggaccggagugacacagaauggcaccuccagcgcuugcauccgcagaucuaacaauuccuuuuucagccggcugaacuggcucacacaucugaaguuuaaguauccugcccuuaaugucaccaugcccaacaacgagcaguucgacaaacuguacauuuggggcgugcaccauccugggacggauaaugaccagaucuuucucuaugcgcaagccucuggacgcauuacaguuuccaccaagagaagccagcagacagugaucccgaacauuggcucccggccccgcgucagaaauaucccuucucggaucagcauuuacuggaccaucgugaaacccggggauauucugcugaucaacuccaccggaaaucucauugcuccucgcggcuacuucaagaucagaagcgggaaaucuuccaucaugcggagcgacgcccccauuggaaaguguaacucugaaugcaucacaccgaauggcagcauuccuaacgacaagcccuuucagaaugugaaccgcaucacguauggcgcuuguccuagauacgucaaacaaaauacccugaaacuugccacagggaugcggaacguucccgagaagcagacccgcggaauuuucggcgcgaucgccggguuuaucgaaaauggaugggagggcaugguggaugggugguauggauucagacaccagaacuccgagggccggggccaagcugccgaccugaagucuacacaggcugccauugaucagaucaaugggaaacucaacagacugauuggaaagaccaacgaaaaauuccaccagaucgagaaggaauuuagcgagguggaaggccgcauucaagaccuugagaaguacgucgaggauacgaaaaucgaccugugguccuauaaugccgaacuccugguggcucuggagaaccagcauacaauucaccucaccgauagcgaaaugaauaagcuguucgagaaaaccaagaaacagcuucgggaaaacgcggaggacauggggaauggaugcuuuaagaucuaccauaagugugauaacgccugcaucggcucuauuagaaaugggacauaugaccacgauguuuaccgcgacgaggcucugaacaaucgguuccagaucaaaggcguggaacucaaguccggauacaaagacuggauucuguggaucagcuuugccauuucuugcuuccuucugugugucgcccuccugggcuuuaucaugugggcuugccaaaaggggaacaucagauguaauauuugcaucuga

SEQ ID NO: 199031 - RNA, 1701 nt, Artificial Sequence
  derived and/or modified CDS sequence (opt5) from hemagglutinin__InfluenzaA__AEK28905
augaagaccaucauugcccugagcuacauccucugccugguguucgcucagaaacuucccggcaacgacaauuccacagccacgcugugucucgggcaccaugcggucccuaacggaaccauuguuaagacaaucaccaaugaucaaauugaggugacaaacgcuaccgaacuggugcagucuagcuccacaggcgagaucugcgacucuccgcaccagauccuugauggggaaaauuguacccugauugacgcccuccugggagauccccagugcgacggcuuucaaaacaaaaagugggaucuguucgucgagagaagcaaagccuauuccaauuguuacccuuaugacgugcccgauuacgcuucucuccggagccugguugccuccagcgggacgcuugaauuuaacaaugagucuuucaacuggaccggagugacacagaauggcaccuccagcgcuugcauccgcagaucuaacaauuccuuuuucagccggcugaacuggcucacacaucugcgcuuuaaguauccugcccuuaaugucaccaugcccaacaacgagcaguucgacaagcuguacauuuggggcgugcaccauccugggacggauaaugaccagaucuuuccguaugcgcaagccucuggaagaauuacaguuuccaccaaacggagccagcagacagugauccccaacauuggcucccgcccuagaguccggaauauccccucucgcaucagcauuuacuggaccaucgugaagccuggggauauucuccugaucaacuccaccggaaaucugauugcucccagaggcuacuucaaaauccggagcgggaagucuuccaucaugcgcagcgacgccccgauuggaaaauguaacucugaaugcaucacaccuaauggcagcauucccaacgacaagccuuuucagaaugugaacagaaucacguauggcgcuuguccccgguacgucaagcaaaauacccucaaacuggccacagggaugcgcaacguucccgagaagcagaccagaggaauuuucggcgcgaucgccggguuuaucgaaaauggaugggagggcaugguggaugggugguauggauuccggcaccagaacuccgagggcagaggccaagcugccgaccuuaaaucuacacaggcugccauugaucagaucaaugggaagcugaaccgccucauuggaaaaaccaacgaaaaguuccaccagaucgagaaagaauuuagcgagguggaaggccggauucaagaccuggagaaguacgucgaggauacgaagaucgaccuuugguccuauaaugccgaacugcucguggcucuggagaaccagcauacaauugaucugaccgacagcgaaaugaauaaacucuucgagaagaccaaaaagcagcugagagaaaacgcggaggauauggggaauggaugcuuuaaaaucuaccacaagugugacaacgccugcaucggcucuauucgcaaugggacauaugaucaugacguuuaccgggacgaggcucuuaacaauagauuccagaucaagggcguggaacugaaauccggauacaaggauuggauucucuggaucagcuuugccauuucuugcuuccugcuuugugucgcccugcucggcuuuaucaugugggcuugccaaaaagggaacauccgcuguaauauuugcaucuga

SEQ ID NO: 199032 - RNA, 1701 nt, Artificial Sequence
  derived and/or modified CDS sequence (opt5) from hemagglutinin__InfluenzaA__AEK28916
augaagaccaucauugcccugagcuacauccucugccugguguucgcucagaaacuucccggcaacgacaauuccacagccacgcugugucucgggcaccaugcggucccuaacggaaccauuguuaagacaaucaccaaugaucaaauugaggugacaaacgcuaccgaacuggugcagucuagcuccacaggcgagaucugcgacucuccgcaccagauccuugauggggaaaauuguacccugauugacgcccuccugggagauccccagugcgacggcuuucaaaacaaaaagugggaucuguucgucgagagaagcaaagccuauuccaauuguuacccuuaugacgugcccgauuacgcuucucuccggagccugguugccuccagcgggacgcuugaauuuaacaaugagucuuucaacuggaccggagugacacagaauggcaccuccagcgcuugcauccgcagaucuaacaauuccuuuuucagccggcugaacuggcucacacaucugaaguuuaaguauccugcccuuaaugucaccaugcccaacaacgagcaguucgacaaacuguacauuuggggcgugcaccauccugggacggauaaugaccagaucuuucucuaugcgcaagccucuggacgcauuacaguuuccaccaagagaagccagcagacagugaucccgaacauuggcucccggccccgcaucagaaauaucccuucucggauuagcaucuacuggaccauugucaaacccggggauauccugcugauuaacuccaccggaaaucucaucgcuccucgcggcuacuucaagaucagaagcgggaaaucuuccgugaugcggagcgacgcccccauuggaaaguguaacucugaaugcaucacaccgaauggcagcauuccuaacgacaagcccuuucagaaugugaaccgcaucacguauggcgcuuguccuagauacgucaaacaaaauacccugaaacuugccacagggaugcggaacguucccgagaagcagacccgcggaauuuucggcgcgaucgccggguuuaucgaaaauggaugggagggcaugguggaugggugguauggauucagacaccagaacuccgagggccggggccaagcugccgaccugaagucuacacaggcugccauugaucagaucaaugggaaacucaacagacugauuggaaagaccaacgaaaaauuccaccagaucgagaaggaauuuagcgagguggaaggccgcauucaagaccuugagaaguacgucgaggauacgaaaaucgaccugugguccuauaaugccgaacuccugguggcucuggagaaccagcauacaauugaucucaccgacagcgaaaugaauaagcuguucgagaaaaccaagaaacagcuucgggaaaacgcggaggauauggggaauggaugcuuuaagaucuaccacaagugugacaacgccugcaucggcucuauuagaaaugggacauaugaucaugacguuuaccgcgacgaggcucugaacaaucgguuccagaucaaaggcguggaacucaaguccggauacaaagauuggauucuguggaucagcuuugccauuucuugcuuccuucugugugucgcccuccugggcuuuaucaugugggcuugccaaaaggggaacaucagauguaauauuugcaucuga

SEQ ID NO: 199033 - RNA, 1701 nt, Artificial Sequence
  derived and/or modified CDS sequence (opt5) from hemagglutinin__InfluenzaA__AEK28927
augaagaccaucauugcccugagcuacauccucugccugguguucgcucagaaacuucccggcaacgacaauuccacagccacgcugugucucgggcaccaugcggucccuaacggaaccauuguuaagacaaucaccaaugaucaaauugaggugacaaacgcuaccgaacuggugcagucuagcuccacaggcgagaucugcgacucuccgcaccagauccuugauggggaaaauuguacccugauugacgcccuccugggagauccccagugcgacggcuuucaaaacaaaaagugggaucuguucgucgagagaagcaaagccuauuccaauuguuacccuuaugacgugcccgauuacgcuucucuccggagccugaucgccuccagcgggacgcuugaauuuaacaaugagucuuucaacuggaccggaguuacacagaauggcaccuccagcgcuugcauucgcagaucuaacaauuccuuuuucagccggcugaacuggcucacacaucugaaguuuaaguauccugcccuuaaugugaccaugcccaacaacgagcaguucgacaaacuguacaucuggggcguccaccauccugggacggauaaugaccagauuuuucucuaugcgcaagccucuggacgcaucacaguguccaccaagagaagccagcagacaguuauuccgaacaucggcucccggccccgcgugagaaauaucccuucucggauuagcaucuacuggaccauugucaaacccggggauauccugcugauuaacuccaccggaaaucucaucgcuccucgcggcuacuucaagaucagaagcgggaaaucuuccauuaugcggagcgacgcccccaucggaaaguguaacucugaaugcauuacaccgaauggcagcaucccuaacgacaagcccuuucagaaugugaaccgcauuacguauggcgcuuguccuagauacgugaaacaaaauacccugaaacuugccacagggaugcggaacguccccgagaagcagacccgcggaaucuucggcgcgaucgccggguuuauugaaaauggaugggagggcaugguugaugggugguauggauucagacaccagaacuccgagggccggggccaagcugccgaccugaagucuacacaggcugccaucgaucagauuaaugggaaacucaacagacugaucggaaagaccaacgaaaaauuccaccagauugagaaggaauuuagcgagguggaaggccgcauccaagaccuugagaaguacguggaggauacgaaaauugaccugugguccuauaaugccgaacuccuggucgcucuggagaaccagcauacaauccaccucaccgauagcgaaaugaauaagcuguucgagaaaaccaagaaacagcuucgggaaaacgcggaggacauggggaauggaugcuuuaagaucuaccauaagugugauaacgccugcauuggcucuaucagaaaugggacauaugaccacgauguguaccgcgacgaggcucugaacaaucgguuccagauuaaaggcguugaacucaaguccggauacaaagacuggauccuguggauuagcuuugccaucucuugcuuccuucuguguguggcccuccugggcuuuaucaugugggcuugccaaaaggggaacauuagauguaauaucugcauuuga

SEQ ID NO: 199034 - RNA, 1701 nt, Artificial Sequence
  derived and/or modified CDS sequence (opt5) from hemagglutinin__InfluenzaA__AEK28949
augaagaccaucauugcccugagcuacauccucugccugguguucgcucagaaacuucccggcaacgacaauuccacagccacgcugugucucgggcaccaugcggucccuaacggaaccauuguuaagacaaucaccaaugaucaaauugaggugacaaacgcuaccgaacuggugcagucuagcuccacaggcgagaucugcgacucuccgcaccagauccuugauggggaaaauuguacccugauugacgcccuccugggagauccccagugcgacggcuuucaaaacaaaaagugggaucuguucgucgagagaagcaaagccuauuccaauuguuacccuuaugacgugcccgauuacgcuucucuccggagccugguugccuccagcgggacgcuugaauuuaacaaugagucuuucaacuggaccggagugacacagaauggcaccuccagcgcuugcauccgcagaucuaacaauuccuuuuucagccggcugaacuggcucacacaucugaaguuuaaguauccugcccuuaaugucaccaugcccaacaacgagcaguucgacaaacuguacauuuggggcgugcaccauccugggacggauaaugaccagaucuuucucuaugcgcaagccucuggacgcauuacaguuuccaccaagagaagccagcagacagugaucccgaacauuggcucccggccccgcgucagaaauaucccuucucggaucagcauuuacuggaccaucgugaaacccggggauauucugcugaucaacuccaccggaaaucucauugcuccucgcggcuacuucaagaucagaagcgggaaaucuuccaucaugcggagcgacgcccccauuggaaaguguaacucugaaugcaucacaccgaauggcagcauuccuaacgacaagcccuuucagaaugugaaccgcaucacguauggcgcuuguccuagauacgucaaacaaaauacccugaaacuugccacagggaugcggaacguucccgagaagcagacccgcggaauuuucggcgcgaucgccggguuuaucgaaaauggaugggagggcaugguggaugggugguauggauucagacaccagaacuccgagggccggggccaagcugccgaccugaagucuacacaggcugccauugaucagaucaaugggaaacucaacagacugauuggaaagaccaacgaaaaauuccaccagaucgagaaggaauuuagcgagguggaaggccgcauucaagaccuugagaaguacgucgaggauacgaaaaucgaccugugguccuauaaugccgaacuccugguggcucuggagaaccagcauacaauugaucucaccgacagcgaaaugaauaagcuguucgagaaaaccaagaaacagcuucgggaaaacgcggaggauauggggaauggaugccugaagaucuaccacaagugugacaacgccugcaucggcucuauuagaaaugggacauaugaucaugacguuuaccgcgacgaggcucucaacaaucgguuucagaucaaaggcguggaacugaaguccggauacaaagauuggauucuuuggaucagcuucgccauuucuugcuuucugcucugugucgcccugcugggcuucaucaugugggcuugccaaaaggggaacaucagauguaauauuugcaucuga

SEQ ID NO: 199035 - RNA, 1701 nt, Artificial Sequence; identical to SEQ ID NO: 194506
  derived and/or modified CDS sequence (opt5) from hemagglutinin__InfluenzaA__AEK28960

SEQ ID NO: 199036 - RNA, 1701 nt, Artificial Sequence; identical to SEQ ID NO: 194506
  derived and/or modified CDS sequence (opt5) from hemagglutinin__InfluenzaA__AEK28971

SEQ ID NO: 199037 - RNA, 1701 nt, Artificial Sequence
  derived and/or modified CDS sequence (opt5) from hemagglutinin__InfluenzaA__AEK28982
augaagaccaucauugcccugagcuacauccucugccugguguucgcucagaaacuucccggcaacuauaauuccacagccacgcugugucucgggcaccaugcggucccuaacggaaccauuguuaagacaaucaccaaugaccaaauugaggugacaaacgcuaccgaacuggugcagucuagcuccacaggcgagaucugcgauucuccgcaccagauccuugacggggaaaauuguacccugauugaugcccuccugggagacccccagugcgauggcuuucaaaacaaaaagugggaccuguucgucgagagaagcaaagccuacuccaauuguuauccuuacgaugugcccgacuaugcuucucuccggagccugguugccuccagcgggacgcuugaauuuaacaaugagucuuucaacuggaccggagugacacagaauggcaccuccagcgcuugcauccgcagaucuaacaauuccuuuuucagccggcugaacuggcucacacaucugaaguuuaaguacccugcccuuaaugucaccaugcccaacaacgagcaguucgauaaacuguauauuuggggcgugcaccauccugggacggacaaugaucagaucuuucucuacgcgcaagccucuggacgcauuacaguuuccaccaagagaagccagcagacagugaucccgaacauuggcucccggccccgcgucagaaauaucccuucucggaucagcauuuacuggaccaucgugaaacccggggacauucugcugaucaacuccaccggaaaucucauugcuccucgcggcuauuucaagaucagaagcgggaaaucuuccaucaugcggagcgaugcccccauuggaaaguguaacucugaaugcaucacaccgaauggcagcauuccuaacgacaagcccuuucagaaugugaaccgcaucacguacggcgcuuguccuagauaugucaaacaaaauacccugaaacuugccacagggaugcggaacguucccgagaagcagacccgcggaauuuucggcgcgaucgccggguuuaucgaaaauggaugggagggcaugguggacgggugguacggauucagacaccagaacuccgagggccggggccaagcugccgaucugaagucuacacaggcugccauugaccagaucaaugggaaacucaacagacugauuggaaagaccaacgaaaaauuccaccagaucgagaaggaauuuagcgagguggaaggccgcauucaagaucuugagaaguaugucgaggacacgaaaaucgaucugugguccuacaaugccgaacuccugguggcucuggagaaccagcauacaauucaccucaccgacagcgaaaugaauaagcuguucgagaaaaccaagaaacagcuucgggaaaacgcggaggauauggggaauggaugcuuuaagaucuaucauaagugugacaacgccugcaucggcucuauuagaaaugggacauacgaucacgacguuuaccgcgaugaggcucugaacaaucgguuccagaucaaaggcguggaacucaaguccggauauaaagacuggauucuguggaucagcuuugccauuucuugcuuccuucugugugucgcccuccugggcuuuaucaugugggcuugccaaaaggggaacaucagauguaauauuugcaucuga

SEQ ID NO: 199038 - RNA, 1701 nt, Artificial Sequence
  derived and/or modified CDS sequence (opt5) from hemagglutinin__InfluenzaA__AEK28993
augaagaccaucauugcccugagcuacauccucugccugguguucgcucagaaacuucccggcaacuauaauuccacagccacgcugugucucgggcaccaugcggucccuaacggaaccauuguuaagacaaucaccaaugaccaaauugaggugacaaacgcuaccgaacuggugcagucuagcuccacaggcgagaucugcgauucuccgcaccagauccuugacggggaaaauuguacccugauugaugcccuccugggagacccccagugcgauggcuuucaaaacaaaaagugggaccuguucgucgagagaagcaaagccuacuccaauuguuauccuuacgaugugcccgacuaugcuucucuccggagccugguugccuccagcgggacgcuugaauuuaacaaugagucuuucaacuggaccggagugacacagaauggcaccuccagcgcuugcauccgcagaucuaacaauuccuuuuucagccggcugaacuggcucacacaucugaaguuuaaguacccugcccuuaaugucaccaugcccaacaacgagcaguucgauaaacuguauauuuggggcgugcaccauccugggacggacaaugaucagaucuuucucuacgcgcaagccucuggacgcauuacaguuuccaccaagagaagccagcagacagugaucccgaacauuggcucccggccccgcgucagaaauaucccuucucggaucagcauuuacuggaccaucgugaaacccggggacauucugcugaucaacuccaccggaaaucucauugcuccucgcggcuauuucaagaucagaagcgggaaaucuuccaucaugcggagcgaugcccccauuggaaaguguaacucugaaugcaucacaccgaauggcagcauuccuaacgacaagcccuuucagaaugugaaccgcaucacguacggcgcuuguccuagauaugucaaacaaaauacccugaaacuugccacagggaugcggaacguucccgagaagcagacccgcggaauuuucggcgcgaucgccggguuuaucgaaaauggaugggagggcaugguggacgggugguacggauucagacaccagaacuccgagggccggggccaagcugccgaucugaagucuacacaggcugccauugaccagaucaaugggaaacucaacagacugauuggaaagaccaacgaaaaauuccaccagaucgagaaggaauuuagcgagguggaaggccgcauucaagaucuugagaaguaugucgaggacacgaaaaucgaucugugguccuacaaugccgaacuccugguggcucuggagaaccagcauacaauugaccucaccgauagcgaaaugaauaagcuguucgagaaaaccaagaaacagcuucgggaaaacgcggaggacauggggaauggaugcuuuaagaucuaucacaagugugauaacgccugcaucggcucuauuagaaaugggacauacgaccaugauguuuaccgcgacgaggcucugaacaaucgguuccagaucaaaggcguggaacucaaguccggauauaaagacuggauucuguggaucagcuuugccauuucuugcuuccuucugugugucgcccuccugggcuuuaucaugugggcuugccaaaaggggaacaucagauguaauauuugcaucuga

SEQ ID NO: 199039 - RNA, 1701 nt, Artificial Sequence
  derived and/or modified CDS sequence (opt5) from hemagglutinin__InfluenzaA__AEK29004
augaagaccaucauugcccugagcuacauccucugccugguguucgcucagaaacuucccggcaacgacaauuccacagccacgcugugucucgggcaccaugcggucccuaacggaaccauuguuaagacaaucaccaaugaucaaauugaggugacaaacgcuaccgaacuggugcagucuagcuccacaggcgagaucugcaauucuccgcaccagauccuugacggggaaaacuguacccugauugaugcccuccugggagacccccagugcgauggcuuucaaaauaaaaagugggaccuguucgucgagagaagcaaagcccauuccaacuguuauccuuacgaugugcccgacuauguuucucuccggagccugguggcuuccagcgggacgcuugaauuuaauaacgagucuuucaauuggaccggagucacacagaacggcaccuccagcgccugcauccgcagaucuaauaacuccuuuuucagccggcugaauuggcucacacaccugaacuuuaaguacccugcucuuaacgugaccaugcccaauaacgagcaguucgauaagcuguauauuuggggcguucaucacccugggacggacaaagaucagaucuuucucuacgcccaagcgucuggacgcauuacaguguccaccaagagaagccagcaggccgucaucccgaauauuggcucccggccccgcgugagaaacaucccuucucgggugagcaucuauuggacaauugucaaacccggggacauccugcugauuaauuccaccggaaaccucaucgcuccucgcggcuacuucaagauuagaagcgggaaaucuuccaucaugcggagcgaugcccccaucggaaaguguaauucugcuugcauuaccccgaacggcagcaucccuaaugacaagcccuuucagaacguuaaucgcauuacauacggcgccuguccuagauaugugaaacaaaacacgcugaaacuugcgaccgggaugcggaaugugcccgaaaaacagacacgcggaaucuucggcgccauugcuggguuuaucgagaacggaugggaaggcauggucgacgggugguacggauucagacaccaaaauuccgagggccggggccaggccgcugaucugaagucuacccaggccgccaucgaccagauuaacgggaaacucaacagacugaucggaaagacaaaugagaaauuccaucagauugaaaaggaguuuagcgaaguggagggccgcauccaagaucuugaaaaguauguugaggacaccaaaauugaucugugguccuacaacgcugagcuccugguggcgcuggaaaaucagcacacgaucgaccucacagauagcgagaugaacaagcuguucgaaaagaccaagaaacagcuucgggagaaugccgaagacauggggaacggaugcuuuaagauuuaucauaagugugauaaugcuugcaucggcucuaucagaaacgggaccuacgaccacgaugucuaucgcgacgaggcccugaauaaccgguuccagauuaaaggcguggagcucaaguccggauacaaagacuggauccuguggauuagcuuugccaucucuugcuuccuucuguguguugcucuccugggcuuuauuaugugggccugccaaaaggggaauaucagauguaacaucugcauuuga

SEQ ID NO: 199040 - RNA, 1701 nt, Artificial Sequence
  derived and/or modified CDS sequence (opt5) from hemagglutinin__InfluenzaA__AEK29026
augaagaccaucauugcccugagcuacauccucugccugguguucgcucagaaacuucccggcaacgacaauuccacagccacgcugugucucgggcaccaugcggucccuaacggaaccauuguuaagacaaucaccaaugaucaaauugaggugacaaacgcuaccgaacuggugcagucuagcuccacaggcgagaucugcgacucuccgcaccagauccuugaugggaaaaauuguacccugauugacgcccuccugggagauccccagugcgacggcuuucaagauaagaaaugggaccuguucgucgaaagaagcaaggccuauuccaacuguuacccuuaugaugugcccgacuacgcuucucuccggagccugguugccuccagcgggacgcuugaguuuaauaacgaaucuuucaauuggaccggagugacacagaacggcaccuccagcgcuugcauccgcagaucuaaaaauuccuuuuucagccggcugaacuggcucacacaucugaauuuuaaauauucugcccuuaacgucaccaugccuaauaacgagcaguucgauaagcuguacauuuggggcgugcaccaucccgggacggacaaagaucagaucuuucucuaugcgcaagccuccggacgcauuacaguuagcaccaagagaucccagcagacagugaucccuaacauuggcucucggccgcgcgucagaaauauccccagccggaucuccauuuacuggaccaucgugaaaccuggggacauucugcugaucaacagcaccggaaaucucauugcuccccgcggcuacuucaagaugcagucugggaaguccagcaucaugagaucugacgccccuaucggaaaauguaacagcgagugcauuacacccaauggcuccaucccgaacgauaagccuuuucaaaaugugaaccggauuacguauggcgcuuguccccgcuacgucaaacagaauacccugaagcuggccacagggaugagaaacguuccugaaaaacagacccggggaaucuucggcgcgauugccggguuuaucgagaauggaugggaaggcaugguggacgggugguauggauuccgccaccaaaacucugagggcagaggccaggcugccgaucuuaagagcacacaggcugccaucgaccagauuaaugggaaacucaaccggcugaucggaaagaccaaugagaaguuccaccaaauugaaaaagaguuuuccgaaguggagggcagaauccaggaucuugaaaaguacgucgaggacacgaaaauugaucuguggagcuauaacgccgagcuccugguggcucuggaaaaccagcauacaaucgaccucaccgauucugagaugaauaagcuguucgaaaagaccaagaagcagcuucgcgagaacgcggaagacauggggaauggaugcuuuaaaauuuaccacaagugugauaacgccugcaucggcuccauccggaaugggacauaugaccaugacguuuacagagaugaggcucugaacaaucgcuuccaaauuaaaggcguggagcucaagagcggauacaaagacuggauccuguggauuucuuuugccaucuccugcuuccuucugugugucgcccuccugggcuuuauuaugugggcuugccagaaggggaacauccgguguaauaucugcauuuga

SEQ ID NO: 199041 - RNA, 1701 nt, Artificial Sequence
  derived and/or modified CDS sequence (opt5) from hemagglutinin__InfluenzaA__AEK29048
augaagaccaucauugcccugagcuacauccucugccugguguucgcucagaaacuucccggcaacgacaauuccacagccacgcugugucucgggcaccaugcggucccuaacggaaccauuguuaagacaaucaccaaugaucaaauugaggugacaaacgcuaccgaacuggugcagucuagcuccacaggcgagaucugcaauucuccgcaccagauccuugacggggaaaacuguacccugauugaugcccuccugggagacccccagugcgauggcuuucaaaauaaaaagugggaccuguucgucgagagaagcaaagcccauuccaacuguuauccuuacgaugugcccgacuaugcuucucuccggagccugguugccuccagcgggacgcuugaauuuaauaacgagucuuucaauuggaccggaguggcucagaacggcacauccagcgccugcauccgcagaucuaauaacuccuuuuucagccggcugaauuggcucacccaccugaacuuuaaguacccugcgcuuaacgucacaaugcccaauaacgagcaguucgauaagcuguauauuuggggcgugcaucacccugggaccgacaaagaucagaucuuucucuacgcccaagcugccggacgcauuacgguuucuacaaagagaucccagcaggcugugaucccgaauauuggcagccggccccgcgucagaaacaucccuucccgggugucuaucuauuggaccauugugaaacccggggacauccugcugauuaauagcacaggaaaccucaucgccccucgcggcuacuucaagauuagauccgggaaaagcucuaucaugcgguccgaugcgcccaucggaaaguguaauagcgccugcauuaccccgaacggcucuaucccuaaugacaagcccuuucagaacgucaaucgcauuaccuacggcgcuuguccuagauauguuaaacaaaacacacugaaacuugccacggggaugcggaaugugcccgaaaaacagacccgcggaaucuucggcgcuauugccggguuuaucgagaacggaugggaaggcaugguggacgggugguacggauucagacaccagaauagcgagggccggggccaagccgcugaucugaaguccacacaggcggccaucgaccagauuaacgggaaacucaacagacugaucggaaagaccaaugagaaauuccaucagauugaaaaggaguuuucugaagucgagggccgcauccaagaucuugaaaaguauguggaggacacaaaaauugaucuguggagcuacaacgcugagcuccugguugcccuggaaaaucagcacaccaucgaccucacggauuccgagaugaacaagcuguucgaaaagacaaagaaacagcuucgggagaaugccgaagacauggggaacggaugcuuuaagauuuaucauaagugugauaaugcuugcaucggcagcaucagaaacgggaccuacgaccacgauguguaucgcgacgaggcccugaauaaccgguuccagauuaaaggcgucgagcucaagucuggauacaaagacuggauccuguggauuuccuuugcgaucagcugcuuccuucuguguguggcucuccugggcuuuauuaugugggccugccaaaaggggaauaucagauguaacaucugcauuuga

SEQ ID NO: 199042 - RNA, 1701 nt, Artificial Sequence
  derived and/or modified CDS sequence (opt5) from hemagglutinin__InfluenzaA__AEK29070
augaagaccaucauugcccugagcuacauccucugccugguguucgcucagaaacuucccggcaacgacaauuccacagccacgcugugucucgggcaccaugcggucccuaacggaaccauuguuaagacaaucaccaaugaucaaauugaggugacaaacgcuaccgaacuggugcagucuagcuccacaggcgagaucugcgacucuccgcaccagauccuugauggggaaaauuguacccugauugacgcccuccugggagauccccagugcgacggcuuucaaaacaaaaagugggaucuguucgucgagagaagcaaagccuauuccaauuguuacccuuaugacgugcccgauuacgcuucucuccggagccugguugccuccagcgggacgcuugaauuuaacaaugagucuuucaacuggaccggagugacacagaauggcaccuccagcgcuugcauccgcagaucuaacaauuccuuuuucagccggcugaacuggcucacacaucugaauuuuaaguauccugcccuuaacgucaccaugcccaacaaugagcaguucgacaagcuguacauuuggggcgugcaccauccugggacggauaaagaccagaucuuucucuaugcgcaagccucuggacgcauuacaguuuccaccaagagaagccagcaggcugugaucccgaacauuggcucccggccccgcgucagaaauaucccuucucggaucagcauuuacuggacaaucgugaaacccggggauauucugcugaucaacuccaccggaaaucucauugccccucgcggcuacuucaagaucagaagcgggaaaucuuccaucaugcggagcgacgcucccauuggaaaguguaacucugaaugcaucaccccgaauggcagcauuccuaacgacaagcccuuucagaaugugaaccgcaucacauauggcgccuguccuagauacgucaaacaaaauacgcugaaacuugcgaccgggaugcggaacguucccgagaagcagacacgcggaauuuucggcgccaucgcuggguuuaucgaaaauggaugggagggcaugguggaugggugguauggauucagacaccagaacuccgagggccggggccaagccgcugaccugaagucuacccaggccgccauugaucagaucaaugggaaacucaacagacugauuggaaagacaaacgaaaaauuccaccagaucgagaaggaauuuagcgagguggaaggccgcauucaagaccuugagaaguacgucgaggauaccaaaaucgaccugugguccuauaaugcugaacuccugguggcgcuggagaaccagcauacgauucaccucacagauagcgaaaugaauaagcuguucgagaaaaccaagaaacagcuucgggaaaacgccgaggacauggggaauggaugcuuuaagaucuaccauaagugugauaacgcuugcaucggcucuauuagaaaugggaccuaugaccacgauguuuaccgcgacgaggcccugaacaaucgguuccagaucaaaggcguggaacucaaguccggauacaaagacuggauucuguggaucagcuuugccauuucuugcuuccuucugugugucgcucuccugggcuuuaucaugugggccugccaaaaggggaacaucagauguaauauuugcaucuga

SEQ ID NO: 199043 - RNA, 1701 nt, Artificial Sequence
  derived and/or modified CDS sequence (opt5) from hemagglutinin__InfluenzaA__AEK29081
augaagaccaucauugcccugagcuacauccucugccugguguucgcucagaaacuucccggcaacgacaauuccacagccacgcugugucucgggcaccaugcggucccuaacggaaccauuguuaagacaaucaccaaugaucaaauugaggugacaaacgcuaccgaacuggugcagucuagcuccacaggcgagaucugcgacucuccgcaccagauccuugauggggaaaauuguacccugauugacgcccuccugggagauccccagugcgacggcuuucaaaacaaaaagugggaucuguucgucgagagaagcaaagccuauuccaauuguuacccuuaugacgugcccgauuacgcuucucuccggagccugguugccuccagcgggacgcuugaauuuaacaaugagucuuucaacuggaccggagugacacagaauggcaccuccagcucuugcauccgcagauccaacaauagcuuuuucucucggcugaacuggcucacacaucugaauuuuaaguauccugcucuuaacgucaccaugcccaacaaugagcaguucgacaagcuguacauuuggggcgugcaccauccugggacggauaaagaccagaucuuucucuaugcccaagcguccggacgcauuacaguuagcaccaagagaucccagcaggccgugaucccgaacauuggcucucggccccgcgucagaaauaucccuagccggaucuccauuuacuggacaaucgugaaacccggggauauucugcugaucaacagcaccggaaaucucauugcuccucgcggcuacuucaagaucagaucugggaaauccagcaucaugcggucugacgcccccauuggaaaguguaacagcgaaugcaucaccccgaauggcuccauuccuaacgacaagcccuuucagaaugugaaccgcaucacauauggcgcuuguccuagauacgucaaacaaaauacgcugaagcuggccaccgggaugcggaacguucccgagaaacagacacgcggaauuuucggcgcgaucgccggguuuaucgaaaauggaugggagggcaugguggaugggugguauggauucagacaccagaacucugagggccggggccaagcugccgaccuuaagagcacccaggcugccauugaucagaucaaugggaaacucaacagacugauuggaaagacaaacgaaaaauuccaccagaucgagaaggaauuuuccgagguggaaggccgcauucaagaccuugagaaguacgucgaggauaccaaaaucgaccuguggagcuauaaugccgaacuccugguggcucuggagaaccagcauacgauucaccucacagauucugaaaugaauaagcuguucgagaaaaccaagaaacagcuucgggaaaacgcggaggacauggggaauggaugcuuuaagaucuaccauaagugugauaacgccugcaucggcuccauuagaaaugggaccuaugaccacgauguuuaccgcgacgaggcucugaacaaucgguuccagaucaaaggcguggaacucaagagcggauacaaagacuggauucuguggaucucuuuugccauuuccugcuuccuucugugugucgcccuccugggcuuuaucaugugggcuugccaaaaggggaacaucagauguaauauuugcaucuga

SEQ ID NO: 199044 - RNA, 1701 nt, Artificial Sequence; identical to SEQ ID NO: 197605
  derived and/or modified CDS sequence (opt5) from hemagglutinin__InfluenzaA__AEK29092

SEQ ID NO: 199045 - RNA, 1701 nt, Artificial Sequence; identical to SEQ ID NO: 198927
  derived and/or modified CDS sequence (opt5) from hemagglutinin__InfluenzaA__AEK29125

SEQ ID NO: 199046 - RNA, 1701 nt, Artificial Sequence; identical to SEQ ID NO: 198927
  derived and/or modified CDS sequence (opt5) from hemagglutinin__InfluenzaA__AEK29136

SEQ ID NO: 199047 - RNA, 1701 nt, Artificial Sequence; identical to SEQ ID NO: 198927
  derived and/or modified CDS sequence (opt5) from hemagglutinin__InfluenzaA__AEK29169

SEQ ID NO: 199048 - RNA, 1701 nt, Artificial Sequence; identical to SEQ ID NO: 198927
  derived and/or modified CDS sequence (opt5) from hemagglutinin__InfluenzaA__AEK29180

SEQ ID NO: 199049 - RNA, 1701 nt, Artificial Sequence; identical to SEQ ID NO: 198927
  derived and/or modified CDS sequence (opt5) from hemagglutinin__InfluenzaA__AEK29191

SEQ ID NO: 199050 - RNA, 1701 nt, Artificial Sequence; identical to SEQ ID NO: 198927
  derived and/or modified CDS sequence (opt5) from hemagglutinin__InfluenzaA__AEK29202

SEQ ID NO: 199051 - RNA, 1701 nt, Artificial Sequence; identical to SEQ ID NO: 198927
  derived and/or modified CDS sequence (opt5) from hemagglutinin__InfluenzaA__AEK29213

SEQ ID NO: 199052 - RNA, 1701 nt, Artificial Sequence; identical to SEQ ID NO: 198927
  derived and/or modified CDS sequence (opt5) from hemagglutinin__InfluenzaA__AEK29224

SEQ ID NO: 199053 - RNA, 1701 nt, Artificial Sequence; identical to SEQ ID NO: 198927
  derived and/or modified CDS sequence (opt5) from hemagglutinin__InfluenzaA__AEK29235

SEQ ID NO: 199054 - RNA, 1701 nt, Artificial Sequence
  derived and/or modified CDS sequence (opt5) from hemagglutinin__InfluenzaA__AEK29268
augaagaccaucauugcccugagcuacauccucugccugguguucgcucagaaacuucccggcaacgacaauuccacagccacgcugugucucgggcaccaugcggucccuaacggaaccauuguuaagacaaucaccaaugaucaaauugaggugacaaacgcuaccgaacuggugcagucuagcuccacaggcgagaucugcaauucuccgcaccagauccuugacggggaaaacuguacccugauugaugcccuccugggagacccccagugcgauggcuuucaaaauaaaaagugggaccuguucgucgagagaagcaaagcccauuccaacuguuauccuuacgaugugcccgacuaugcuucucuccggagccugguugccuccagcgggacgcuugaauuuaauaacgagucuuucaauuggaccggagugacacagaacggcaccuccagcgcuugcauccgcagaucuaauaacuccuuuuucagccggcugaauuggcucacacaccugaacuuuaaguacccugcccuuaacgucaccaugcccaauaacgagcaguucgauaagcuguauauuuggggcgugcaucacccugggacggacaaagaucagaucuuucucuacgcgcaagccucuggacgcauuacaguuuccaccaagagaagccagcaggcugugaucccgaauauuggcucccggccccgcgucagaaacaucccuucucgggugagcaucuauuggacaauugugaaacccggggacauccugcugauuaauuccaccggaaaccucaucgccccucgcggcuacuucaagauuagaagcgggaaaucuuccaucaugcggagcgaugcucccaucggaaaguguaauucugccugcauuaccccgaacggcagcaucccuaaugacaagcccuuucagaacgucaaucgcauuacauacggcgcguguccuagauauguuaaacaaaacacgcugaaacuugccaccgggaugcggaaugugcccgaaaaacagacacgcggaaucuucggcgcuauugccggguuuaucgagaacggaugggaaggcaugguggacgggugguacggauucagacaccaaaauuccgagggccggggccaggcugccgaucugaagucuacccaggccgcuaucgaccagauuaacgggaaacucaacagacugaucggaaagacaaaugagaaauuccaucagauugaaaaggaguuuagcgaagucgagggccgcauccaagaucuugaaaaguauguggaggacaccaaaauugaucugugguccuacaacgcggagcuccugguugcccuggaaaaucagcacacgaucgaccucacagauagcgagaugaacaagcuguucgaaaagaccaagaaacagcuucgggagaaugcugaagacauggggaacggaugcuuuaagauuuaucauaagugugauaaugccugcaucggcucuaucagaaacgggaccuacgaccacgauguguaucgcgacgaggcccugaauaaccgguuccagauuaaaggcgucgagcucaaguccggauacaaagacuggauccuguggauuagcuuugcuaucucuugcuuccuucuguguguggcccuccugggcuuuauuaugugggcgugccaaaaggggaauaucagauguaacaucugcauuuga

SEQ ID NO: 199055 - RNA, 1698 nt, Artificial Sequence
  derived and/or modified CDS sequence (opt5) from hemagglutinin__InfluenzaA__AEK59838
augaaggugaaacugcucguccugcuuugcaccuucacagccacguacgcugacaccaucuguauuggcuaucacgccaacaauagcacagauaccguugacacagugcuggagaagaacgugaccgucacacauuccgugaaucuccuggaagauucucacaacgggaaacuuugccugcucaagggaaucgcgccccugcagcugggcaauuguagcguugcuggguggauucucggaaacccugagugcgaacugcuuaucuccaaagagucuuggagcuacauuguggaaaagccggaccccgagaauggcaccuguuauccugggcauuuugccgauuacgaggaacugagagagcaacucuccucugucagcuccuucgaacgguuugagaucuuccccaaggagagcucuuggccuaaccacacggugaccggaguuuccgccagcugcucucauaauggcaaauccagcuuuuauaagaaccugcuuuggcugacaggcaaaaaugggcucuaccccaaccugucuaaguccuaugcuaauaacaaagaaaaggaggugcugguccucuggggagugcaccacccuccgaauaucggcgaccagaaggcccuguaccauaccgaaaacgcuuacgugagcgucguuuccucucacuauagcaaaaaguucacacccgagauugccaaacgcccuaaggugagagaucaggaagggcggaucaacuacuauuggacccuucuggagcccggaaauacgauuaucuuugaggcgaacggcaaucucauugccccucgcuacgcuuucgcccuguccagaggguuuggaagcggcaucauuaacucuaaugcucccauggacaaaugugaugccaagugccagacaccgcaaggcgcgaucaacuccagccuuccuuuccagaaugugcaucccgucaccaucggggaauguccuaaauaugugcggucugccaagcugcgcaugguuacaggacucagaaacauucccagcauccagucccggggccuguuuggggcuauugccggauucaucgagggcggguggaccggaaugguggacggcugguacggcuaucaccaccagaaugaacaagggucuggauacgcugccgaucaaaagagcacccagaacgccauuaauggcaucacaaacaaagucaauuccgugaucgagaagaugaacacgcaguuuaccgcuguugggaaagaguucaauaagcuggaacgcagaauggagaaccucaacaaaaagguggacgauggauucauugacaucuggacauacaaugcggaacugcuuguccugcucgagaacgaacggacccuggacuuucaugauagcaaugugaagaaccuuuaugagaaagucaagucucagcugaaaaauaacgccaaggaaauuggcaaugggugcuucgaguuuuaccacaaauguaacgacgagugcauggaauccgugaagaauggcacauaugauuaccccaaguauagcgaggaaucuaaacucaaccgcgagaagaucgacggaguuaaacuggaguccaugggcguguaccagauucuggcuaucuauagcaccgucgccuccucucucgugcugcuuguuagccugggggccaucuccuucuggaugugcucuaauggaagccuccaguguagaauuugcaucuga

SEQ ID NO: 199056 - RNA, 1701 nt, Artificial Sequence
  derived and/or modified CDS sequence (opt5) from hemagglutinin__InfluenzaA__AEK98378
augaagaccaucauugcccugagcuacauccucugccugguguucgcucagaaacuucccggcaacgacaauuccacagccacgcugugucucgggcaccaugcggucccuaacggaaccauuguuaagacaaucaccaaugaucaaauugaggugacaaacgcuaccgaacuggugcagucuagcuccacaggcgagaucugcgacucuccgcaccagauccuugauggggaaaauuguacccugauugacgcccuccugggagauccccagugcgacggcuuucaaaacaaaaagugggaucuguucgucgagagaagcaaagccuauuccaauuguuacccuuaugacgugcccgauuacgcuucucuccggagccugguugccuccagcgggacgcuugaauuuaacaaugagucuuucaacuggaccggagugacacagaauggcaccuccagcgcuugcauccgcagaucuaacaauuccuuuuucagccggcugaacuggcucacacaucugaaguuuaaguauccugcccuuaaugucaccaugcccaacaacgagaaauucgacaagcuguacauuuggggcgugcaccauccugggacggauaaugaccagaucuuuccguaugcgcaggccucuggacgcauuacaguuuccaccaaaagaagccaacagacagugauccccaacauuggcucccggccucgcgucagaaauauccccucucggaucagcauuuacuggaccaucgugaagccuggggauauucuccugaucaacuccaccggaaaucugauugcuccccgcggcuacuucaaaauccagagcgggaagucuuccaucaugagaagcgacgccccgauuggaaaguguaacucugaaugcaucacaccuaauggcagcauucccaacgacaaaccuuuucagaaugugaaccggaucacguauggcgcuuguccccgcuacgucaagcaaaauacccucaaacuggccacagggaugagaaacguucccgagaagcagacccggggaauuuucggcgcgaucgccggguuuaucgaaaauggaugggagggcaugguggaugggugguauggauuccgccaccagaacuccgagggcauuggccaagcugccgaccuuaaaucuacacaggcugccaucgaucagauuaaugggaagcugaacagacucaucggaaaaaccaacgaaaaguuccaccagauugagaaggaauuuagcgagguggaaggccggauccaagaccuggagaaauacgucgaggauacgaagauugaccuuugguccuauaaugccgaacugcucguggcucuggagaaccagcauacaaucgaucugaccgacagcgaaaugaauaaacucuucgagaagaccaaaaagcagcugagagaaaacgcggaggauauggggaauggaugcuuuaagaucuaccacaaaugugacaacgccugcauuggcucuauccgcaaugggacauaugaucaugacguuuaccgggacgaggcucuuaacaauagauuccagauuaagggcguggaacugaaauccggauacaaggauuggauccucuggauuagcuuugccaucucuugcuuccugcuuugugucgcccugcucggcuuuaucaugugggcuugccaaaaagggaacauucgcuguaauaucugcauuuga

SEQ ID NO: 199057 - RNA, 1701 nt, Artificial Sequence; identical to SEQ ID NO: 193987
  derived and/or modified CDS sequence (opt5) from hemagglutinin__InfluenzaA__AEK98380

SEQ ID NO: 199058 - RNA, 1701 nt, Artificial Sequence
  derived and/or modified CDS sequence (opt5) from hemagglutinin__InfluenzaA__AEK98382
augaagaccaucauugcccugagcuacauccucugccugguguucgcucagaaacuucccggcaacgacaauuccacagccacgcugugucucgggcaccaugcggucccuaacggaaccauuguuaagacaaucaccaaugaucaaauugaggugacaaacgcuaccgaacuggugcaaaauucuagcacaggcgagaucugcgacuccccgcaccagauccuugauggggaaaacuguacccugauugacgcccuccugggagauccccagugcgacggcuuucagaauaaaaagugggaucuguucgucgagagaucuaaagccuauagcaacuguuacccuuaugacgugcccgauuacgcuucccuccggucucugguugccagcuccgggacgcuugaauuuaauaacgagagcuucaauuggaccggagugacacagaacggcaccucuuccgcuugcauccgcagaagcaauaacuccuuuuucucucggcugaauuggcucacacaucugaaguuuaaguauccugcccuuaacgucaccaugcccaacaaugagaaauucgacaagcuguacauuuggggcgugcaccauccugggacggauaacgaccagaucuuucucuaugcgcaggccagcggacgcauuacaguuucuaccaaaagaucccaacagacagugaucccgaauauuggcagccggccccgcaucagaaacaucccuucccggauuucuaucuacuggaccauugucaagcccggggauauccugcugauuaauagcaccggaaaccucaucgcuccucgcggcuacuucaaaauccagauugggaaguccagcaucaugagaucugacgcccccauuggaaaguguaauuccgaaugcaucacaccgaacggcagcauuccuaaugacaaacccuuucagaacgugaaucggaucacguauggcgcuuguccucgcuacgugaagcaaaacacccugaaacuugccacagggaugagaaauguccccgagaagcagacccggggaaucuucggcgcgauugccggguuuaucgaaaacggaugggagggcaugguugaugggugguauggauuccgccaccaaaauucugagggcauuggccaggcugccgaccugaaaagcacacaggcugccaucgaucagauuaacgggaagcucaacagacugaucggaaaaaccaaugaaaaguuccaccagauugagaaggaauuuuccgagguggaaggccggauccaagaccuugagaaauacguggaggauacgaagaucgaccuguggucuuauaacgccgaacuccuggucgcucuggagaaucagcauacaauugaucucaccgacagcgaaaugaacaaacuguucgagaagaccaaaaagcagcuuagagaaaaugcggaggauauggggaacggaugcuuuaagaucuaccacaaaugugacaaugccugcauuggcuccauccgcaacgggacauaugaucaugacguguaccgggacgaggcucugaauaacagauuccagauuaagggcguugaacucaaaagcggauacaaggauuggauccuguggaucucuuuugccauuuccugcuuccuucuguguguggcccuccugggcuuuaucaugugggcuugccaaaaagggaauauucgcuguaacaucugcauuuga

SEQ ID NO: 199059 - RNA, 1701 nt, Artificial Sequence
  derived and/or modified CDS sequence (opt5) from hemagglutinin__InfluenzaA__AEK98386
augaagaccaucauugcccugagcuacauccucugccugguguucgcucagaaacuucccggcaacgacaauuccacagccacgcugugucucgggcaccaugcggucccuaacggaaccauuguuaagacaaucaccaaugaucaaauugaggugacaaacgcuaccgaacuggugcagucuagcuccacaggcgagaucugcaauucuccgcaccagauccuugacggggaaaacuguacccugauugaugcccuccugggagacccccagugcgauggcuuucaaaauaaaaagugggaccuguucgucgagagaagcaaagcccauuccaacuguuauccuuacgaugugcccgacuaugcuucucuccggagccugguugccuccagcgggacgcuugaauuuaauaacgagucuuucaauuggaccggagugacacagaacggcaccuccagcgcuugcauccgcagaucuaauaacuccuuuuucagccggcugaauuggcucacacaccugaacuuuaaguacccugcccuuaacgucaccaugcccaauaacgagcaguucgauaagcuguauauuuggggcgugcaucacccugggacggacaaagaucagaucuuucucuacgcgcaagccucuggacgcauuacaguuuccaccaagagaagccagcaggcugugaucccgaauauuggcucccggacacgcgucagaaacauccccucucgggugagcaucuauuggaccauugugaaaccuggggacauccugcugauuaauuccaccggaaaccucaucgcuccccgcggcuacuucaagauuagaagcgggaaaucuuccaucaugcggagcgaugccccuaucggaaaguguaauucugccugcauuacacccaacggcagcaucccgaaugacaagccuuuucagaacgucaaucgcauuacguacggcgcgugucccagauauguuaaacaaaacacccugaaacuugccacagggaugcggaaugugccugaaaaacagacccgcggaaucuucggcgcuauugccggguuuaucgagaacggaugggaaggcaugguggacgggugguacggauucagacaccaaaauuccgagggccggggccaggcugccgaucugaagucuacacaggccgcuaucgaccagauuaacgggaaacucaacagacugaucggaaagaccaaugagaaauuccaucagauugaaaaggaguuuagcgaagucgagggccgcauccaagaucuugaaaaguauguggaggacacgaaaauugaucugugguccuacaacgcggagcuccugguugcccuggaaaaucagcacacaaucgaccucaccgauagcgagaugaacaagcuguucgaaaagaccaagaaacagcuucgggagaaugcugaagacauggggaacggaugcuuuaagauuuaucauaagugugauaaugccugcaucggcucuaucagaaacgggacauacgaccacgauguguaucgcgacgaggcccugaauaaccgguuccagauuaaaggcgucgagcucaaguccggauacaaagacuggauccuguggauuagcuuugcuaucucuugcuuccuucuguguguggcccuccugggcuuuauuaugugggcgugccaaaaggggaauaucagauguaacaucugcauuuga

SEQ ID NO: 199060 - RNA, 1701 nt, Artificial Sequence
  derived and/or modified CDS sequence (opt5) from hemagglutinin__InfluenzaA__AEK98388
augaagaccaucauugcccugagcuacauccucugccugguguucgcucagaaacuucccggcaacgacaauuccacagccacgcugugucucgggcaccaugcggucccuaacggaaccauuguuaagacaaucaccaaugaucaaauugaggugacaaacgcuaccgaacuggugcagucuagcuccacaggcgagaucugcgacucuccgcaccagauccuugaugggaaaaauuguacccugauugacgcccuccugggagauccccagugcgacggccugcaaaacaagaaaugggaucucuuugucgaaagaagcaaggccuauuccaauuguuacccuuaugacgugcccgauuacgcuucucugcggagccuuguugccuccagcgggacgcuggaguucaacaaugaaucuuuuaacuggaccggagugacacagaauggcaccuccagcgcuugcauccgcagaucuaagaacuccuucuuuagccggcucaauuggcugacacaucuuaacuucaaauauccugcccugaaugucaccaugcccaacaacgagcaguuugacaagcucuacauuuggggcgugcaccauccugggacggauaaagaccagaucuuccuguaugcgcaagccucuggacgcauuacaguuuccaccaagagaagccagcagacagcuaucccgaauauuggcucccggccccgcgugagaaacaucccuucucggaucagcauuuacuggaccaucgucaaacccggggauauucugcucaucaauuccaccggaaaccugauugccccucgcggcuacuuuaagaucagaagcgggaagucuuccaucaugcggagcgacgcucccauuggaaaauguaauucugagugcaucacaccgaacggcagcauuccuaaugacaagcccuuccagaacgugaaucgcaucacguauggcgccuguccuagauacgugaaacaaaacacccuuaagcuggcgacagggaugcggaauguccccgaaaaacagacccgcggaauuuuuggcgccaucgcuggguucaucgagaacggaugggaaggcaugguugaugggugguauggauuuagacaccaaaauuccgagggccggggccaggccgcugaccucaagucuacacaggccgccauugaucagaucaacgggaaacugaauagacuuauuggaaagaccaacgagaaguuccaccagaucgaaaaagaguucagcgaaguggagggccgcauucaagaccuggaaaaguacguggaggauacgaaaaucgaccucugguccuauaacgcugagcugcuggucgcgcucgaaaaucagcauacaauugaucugaccgacagcgagaugaacaaacuuuuugaaaagaccaagaagcagcugcgggagaaugccgaagauauggggaacggaugcuucaaaaucuaccacaagugugacaaugcuugcaucggcucuauuagaaacgggacauaugaucaugacguguaccgcgacgaggcccucaauaaccgguuucagaucaaaggcguugagcugaaguccggauacaaagauuggauucuuuggaucagcuucgccauuucuugcuuucugcucuguguggcucugcugggcuucaucaugugggccugccaaaaggggaauaucagauguaacauuugcaucuga

SEQ ID NO: 199061 - RNA, 1701 nt, Artificial Sequence
  derived and/or modified CDS sequence (opt5) from hemagglutinin__InfluenzaA__AEK98390
augaagaccaucauugcccugagcuacauccucugccugguguucgcucaggagcuucccggcaacgacaauuccacagccacgcugugucucgggcaccaugcggucccuaacggaaccauuguuaaaacaaucaccaaugaucaaauugaagugacaaacgcuaccgagcuggugcagucuagcuccacaggcgaaaucugcaauucuccgcaccagauccuugacggggagaacuguacccugauugaugcccuccugggagacccccagugcgauggcuuucaaaauaagaaaugggaccuguucgucgaaagaagcaaggcccauuccaacuguuauccuuacgaugugcccgacuaugcuucucuccggagccugguugccuccagcgggacgcuugaguuuaauaacgagucuuucaauuggaccggagugacacagaacggcaccuccagcgcuugcauccgcagaucuaauaacuccuuuuucagccggcugaauuggcucacacaccugaacuuuaaauacccugcccuuaacgucaccaugcccaauaacgaacaguucgauaagcuguauauuuggggcgugcaucacccugggacggacaaggaucagaucuuucucuacgcgcaagccucuggacgcauuacaguuuccaccaaaagaagccagcaggcugugaucccgaauauuggcucccggccccgcgucagaaacaucccuucucgggugagcaucuauuggacaauugugaagcccggggacauccugcugauuaauuccaccggaaaccucaucgccccucgcggcuacuucaaaauuagaagcgggaagucuuccaucaugcggagcgaugcucccaucggaaaauguaagucugccugcauuaccccgaauggcagcaucccuaacgacaagacauuucagaaugucaaccgcauuacguacggcgcgugucccagauauguuaaacaaaauacccugaaacuugccacagggaugcggaacgugccugagaagcagacccgcggaaucuucggcgcuauugccggguuuaucgaaaauggaugggagggcaugguggacgggugguacggauucagacaccagaacuccgagggccggggccaagcugccgaucugaagucuacacaggccgcuaucgaccagauuaaugggaaacucaacagacugaucggaaagaccaacgaaaaauuccaucagauugagaaggaauuuagcgaggucgaaggccgcauccaagaucuugagaaguauguggaggacacgaaaauugaucugugguccuacaaugcggaacuccugguugcccuggagaaccagcacacaaucgaccucaccgauagcgaaaugaauaagcuguucgagaaaaccaagaaacagcuucgggaaaacgcugaggacauggggaauggaugcuuuaagauuuaucauaagugugauaacgccugcaucggcucuaucagaaaugggacauacgaccacgauguguaucgcgacgaggcccugaacaaucgguuccagauuaaaggcgucgaacucaaguccggauacaaagacuggauccuguggauuagcuuugcuaucucuugcuuccuucuguguguggcccuccugggcuuuauuaugugggcgugccaaaaggggaacaucagauguaauaucugcauuuga

SEQ ID NO: 199062 - RNA, 1701 nt, Artificial Sequence
  derived and/or modified CDS sequence (opt5) from hemagglutinin__InfluenzaA__AEK98392
augaagaccaucauugcccugagcuacauccucugccugguguucgcucagaaacuucccggcaacgacaauuccacagccacgcugugucucgggcaccaugcggucccuaacggaaccauuguuaagacaaucaccgaugaccaaauugaggugacaaaugcuaccgaacuggugcagucuagcuccacaggcgagaucugcaacucuccgcaccagauccuugauggggaaaauuguacccugauugacgcccuccugggagauccccagugcgacggcuuucaaaacaaaaagugggaucuguucgucgagagaagcaaagcccauuccaauuguuauccuuacgacgugcccgauuaugcuucucuccggagccugguugccuccagcgggacgcuugaauuuaacaaugagaacuucaauuggaccggagugacacagaacggcaccucuuccgcuugcauccgcagaagcaauaacuccuuuuucucucggcugaauuggcucacacaccugaacuuuaaguacccugcccuuaacgucaccaugcccaauaacgagcaguucgacaagcuguauauuuggggcgugcaucacccugggacggauaaagaccagaucuuucucuacgcgcaagccagcggacgcauuacaguuucuaccaagagaucccagcaggcugugaucccgaauauuggcagccggcugcgcgucagaaacauccccucccgggugucuaucuauuggacaauugugaaaccuggggauauccugcucauuaauagcaccggaaaccugaucgcuccccgcggcuacuucaagauuagauccgggaaaagcucuaucaugcgguccgacgccccuaucggaaaguguaauagcgccugcauuacccccaacggcucuaucccgaaugacaagccuuuucagaacgucaaucgcauuacauacggcgcgugucccagauauguuaaacaaaacacgcuuaagcuggccaccgggaugcggaaugugccugaaaaacagacacgcggaaucuucggcgcuauugccggguuuaucgagaacggaugggaaggcaugguggaugggugguacggauucagacaccagaauagcgagggccggggccaagcugccgaccucaaguccacccaggccgcuaucgaucagauuaacgggaaacugaacagacuuaucggaaagacaaaugagaaauuccaucagauugaaaaggaguuuucugaagucgagggccgcauccaagaccuggaaaaguauguggaggauaccaaaauugaccucuggagcuacaacgcggagcugcugguugcccucgaaaaucagcacacgaucgaucugacagacuccgagaugaacaaacuuuucgaaaagaccaagaaacagcugcgggagaaugcugaagauauggggaacggaugcuuuaagauuuaucauaagugugacaaugccugcaucggcagcaucagaaacgggaccuacgaucacgacguguaucgcgacgaggcccucaauaaccgguuccagauuaaaggcgucgagcugaagucuggauacaaagauuggauccuuuggauuuccuuugcuaucagcugcuuccugcucuguguggcccugcugggcuuuauuaugugggcgugccaaaaggggaauaucagauguaacaucugcauuuga

SEQ ID NO: 199063 - RNA, 1701 nt, Artificial Sequence
  derived and/or modified CDS sequence (opt5) from hemagglutinin__InfluenzaA__AEK98394
augaagaccaucauugcccugagcuacauccucugccugguguucgcucagaaacuucccggcaacgacaauuccacagccacgcugugucucgggcaccaugcggucccuaacggaaccauuguuaagacaaucaccaaugaucaaauugaggugacaaacgcuaccgaacuggugcagucuagcuccacaggcgagaucugcaauucuccgcaccagauccuugacggggaaaacuguacccugauugaugcccuccugggagacccccagugcgauggcuuucaaaauaaaaagugggaccuguucgucgagagaagcaaagcccauuccaacuguuauccuuacgaugugcccgacuaugcuucucuccggagccugguugccuccagcgggacgcuugaauuuaauaacgagucuuucaauuggaccggagugacacagaacggcaccuccagcgcuugcauccgcagaucuaauaacuccuuuuucagccggcugaauuggcucacacaccugaacuuuaaguacccugcccuuaacgucaccaugcccaauaacgagcaguucgauaagcuguauauuuggggcgugcaucacccugggacggacaaagaucagaucuuucucuacgcgcaagccucuggacgcauuacaguuuccaccaagagaagccagcaggcugugaucccgaauauuggcucccggcugcgcgucagaaacauccccucucgggugagcaucuauuggacaauugugaaaccuggggacauccugcucauuaauuccaccggaaaccugaucgcuccccgcggcuacuucaagauuagaagcgggaaaucuuccaucaugcggagcgaugccccuaucggaaaguguaauucugccugcauuacccccaacggcagcaucccgaaugacaagccuuuucagaacgucaaucgcauuacauacggcgcgugucccagauauguuaaacaaaacacgcuuaagcuggccaccgggaugcggaaugugccugaaaaacagacacgcggaaucuucggcgcuauugccggguuuaucgagaacggaugggaaggcaugguggacgggugguacggauucagacaccaaaauuccgagggccggggccaggcugccgaucucaagucuacccaggccgcuaucgaccagauuaacgggaaacugaacagacuuaucggaaagacaaaugagaaauuccaucagauugaaaaggaguuuagcgaagucgagggccgcauccaagaucuggaaaaguauguggaggacaccaaaauugaucucugguccuacaacgcggagcugcugguugcccucgaaaaucagcacacgaucgaccugacagauagcgagaugaacaaacuuuucgaaaagaccaagaaacagcugcgggagaaugcugaagacauggggaacggaugcuuuaagauuuaucauaagugugauaaugccugcaucggcucuaucagaaacgggaccuacgaccacgauguguaucgcgacgaggcccucaauaaccgguuccagauuaaaggcgucgagcugaaguccggauacaaagacuggauccuuuggauuagcuuugcuaucucuugcuuccugcucuguguggcccugcugggcuuuauuaugugggcgugccaaaaggggaauaucagauguaacaucugcauuuga

SEQ ID NO: 199064 - RNA, 1701 nt, Artificial Sequence
  derived and/or modified CDS sequence (opt5) from hemagglutinin__InfluenzaA__AEK98396
augaagaccaucauugcccugagcuacauccucugccugguguucgcucagaaacuucccggcaacgacaauuccacagccacgcugugucucgggcaccaugcggucccuaacggaaccauuguuaagacaaucaccaaugaucaaauugaggugacaaacgcuaccgaacuggugcagucuagcuccacaggcgagaucugcgacucuccgcaccagauccuugauggggaaaauuguacccugauugacgcccuccugggagauccccagugcgacggcuuucaaaacaaaaagugggaucuguucgucgagagaagcaaagccuauuccaauuguuacccuuaugacgugcccgauuacgcuucucuccggagccugguugccuccagcgggacgcuugaauuuaacaaugagucuuucaacuggaccggagugacacagaauggcaccuccagcgcuugcauccgcagaucuaacaaguccuuuuucagccggcugaauuggcucacacaucugaaguuuaaauauccugcccuuaacgucaccaugcccaauaacgagcaguucgacaagcuguacauuuggggcgugcaccauccugggacggauaacgaccagaucucucucuaugcgcaagccuccggacgcauuacaguuagcaccaaaagaucccagcagacagugaucccgaauauuggcucucggccccgcgucagaaacaucccuagccggaucuccauuuacuggaccaucgugaagcccggggauauucugcugaucaauagcaccggaaaccucauugcuccucgcggcuacuuuaaaaucagaucugggaaguccagcaucaugcggucugacgcccccauuggaaaguguaauagcgaaugcaucacaccgaacggcuccauuccuaaugacaaacccuuccagaacgugaaucgcaucacguauggcgcuuguccuagauacgucaagcaaaacacccugaaacuugccacagggaugcggaauguucccgagaagcagacccgcggaauuuuuggcgcgaucgccggguucaucgaaaacggaugggagggcaugguggaugggugguauggauuuagacaccaaaauucugagggccggggccaggcugccgaccugaaaagcacacaggcugccauugaucagaucaacgggaagcucaauagacugauuggaaaaaccaacgaaaaguuccaccagaucgagaaggaguucuccgaaguggaaggccgcauucaagaccuugagaaauacgucgaggauacgaagaucgaccuguggagcuauaacgccgaacuccugguggcucuggagaaucagcauacaauugaucucaccgacucugaaaugaacaaacuguuugagaagaccaaaaagcagcuucgggaaaaugcggaggauauggggaacggaugcuucaagaucuaccacaaaugugacaaugccugcaucggcuccauuagaaacgggacauaugaucaugacguuuaccgcgacgaggcucugaauaaccgguuucagaucaagggcguggaacucaaaagcggauacaaggauuggauucuguggaucucuuucgccauuuccugcuuucuucuguguaucgcccuccugggcuucaucaugugggcuugccaaaaagggaauauuagauguaacaucugcauuuga

SEQ ID NO: 199065 - RNA, 1701 nt, Artificial Sequence
  derived and/or modified CDS sequence (opt5) from hemagglutinin__InfluenzaA__AEK98398
augaagaccaucauugcccugagcuacauccucugccugguguucgcucagaaacuucccggcaacgacaauuccacagccacgcugugucucgggcaccaugcggucccuaacggaaccauuguuaagacaaucaccaaugaucaaauugaggugacaaacgcuaccgaacuggugcagucuagcuccacaggcgagaucugcgacucuccgcaccagauccuugaugggaaaaauuguacccugauugacgcccuccugggagauccccagugcgacggccugcaaaacaagaaaugggaucucuuugucgaaagaagcaaggccuauuccaauuguuacccuuaugacgugcccgauuacgcuucucugcggagccuuguugccuccagcgggacgcuggaguucaacaaugaaucuuuuaacuggaccggagugacacagaauggcaccuccagcgcuugcauccgcagaucuaagaacuccuucuuuagccggcucaauuggcugacacaucuuaacuucaaauauccugcccugaaugucaccaugcccaacaacgagcaguuugacaagcucuacauuuggggcgugcaccauccugggacggauaaagaccagaucuuccuguaugcgcaagccucuggacgcauuacaguuuccaccaagagaagccagcagacagcuaucccgaauauuggcucccggccccgcgugagaaacaucccuucucggaucagcauuuacuggaccaucgucaaacccggggauauucugcucaucaauuccaccggaaaccugauugccccucgcggcuacuuuaagaucagaagcgggaagucuuccaucaugcggagcgacgcucccauuggaaaauguaauucugagugcaucacaccgaacggcagcauuccuaaugacaagcccuuccagaacgugaaucgcaucacguauggcgccuguccuagauacgugaaacaaaacacccuuaagcuggcgacagggaugcggaauauucccgaaaaacagacccgcggaaucuuuggcgccaucgcuggguucauugagaacggaugggaaggcauggucgaugggugguauggauuuagacaccaaaauuccgagggccggggccaggccgcugaccucaagucuacacaggccgccaucgaucagauuaacgggaaacugaauagacuuaucggaaagaccaacgagaaguuccaccagauugaaaaagaguucagcgaaguugagggccgcauccaagaccuggaaaaguacguggaggauacgaaaauugaccucugguccuauaacgcugagcugcugguggcgcucgaaaaucagcauacaaucgaucugaccgacagcgagaugaacaaacuuuuugaaaagaccaagaagcagcugcgggagaaugccgaagauauggggaacggaugcuucaaaaucuaccacaagugugacaaugcuugcauuggcucuaucagaaacgggacauaugaucaugacgucuaccgcgacgaggcccucaauaaccgguuucagauuaaaggcguggagcugaaguccggauacaaagauuggaucauuuggaucagcuucgccaucucuugcuuucuucuguguguugcucuccugggcuucauuaugugggccugccaaaaggggaauaucagauguaacauuugcaucuga

SEQ ID NO: 199066 - RNA, 1701 nt, Artificial Sequence
  derived and/or modified CDS sequence (opt5) from hemagglutinin__InfluenzaA__AEK98400
auggagaccaucauugcccugagcuacauccucucccugguguucgcucagaagcugcccggcaacgacaauucuacagccacgcugugccucgggcaccaugcggucccuaacggaaccauuguuaaaacaaucaccaaugaucaaauugaagugacaaacgcuaccgagcuggugcagagcuccucuacaggcgaaaucugugacagcccgcaccagauccuugauggggagaauugcacccugauugacgcccuccugggagauccccagugugacggcuuucaaaacaagaaaugggaucuguucgucgaaagauccaaggccuauucuaauugcuacccuuaugacgugcccgauuacgcuagccuccggucccugguugccagcucugggacgcuugaguuuaacaaugagaacuucaauuggaccggagugacacagaacggcaccuccagcgcuuguauccgcagaucuaauaacuccuuuuucagccggcugaauuggcucacacaucugcgcuuuaaauauccugcccuuaacgucaccaugcccaacaaugaagaguucgacaagcuguacauuuggggcgugcaccauccugggacggauaacgaccagaucuuucucuaugcgcaggccucuggaagaauuacaguuuccaccaagcggagccaacagacagugaucccgaauauuggcucccgccccagaguccggaacaucccuucucgcaucagcauuuacuggaccaucgugaaacccggggauauucugcugaucaauuccaccggaaaccucauugcuccuagaggcuacuucaagauccggagcgggaaaucuuccaucaugcgcagcgacgcccccauuggaaagugcucuagcgaauguaucacaccgaauggcuccauuccuaacgacaaacccuuucagaaugugaacagaaucacguauggcgcuugcccucgguacgucaagcagaauacccugaaacuugccacagggaugcgcaacguucccgagaagcaaaccagaggaauuuucggcgcgaucgccggguuuaucgagaauggaugggaaggcaugguggaugggugguauggauuccggcaccagaacucugagggcauuggccaggcugccgaccuuaagagcacacaagcugccaucgaucagauuaaugggaaacucaacagacugaucggaaagaccaacgaaaaauuccaccagauugagaaggaauuuuccgagaucgagggccgcauucaggaccuugaaaaauacguggaggauacgaagaucgaccuguggagcuauaaugccgaacuccuggucgcucuggagaaccaacauacaaucgaucucaccgacucugaaaugaauaagcuguucgagaaaaccaagaaacagcuucgggagaacgcggaagauauggggaauggauguuuuaagauuuaccacaaaugcgacaacgccuguaucggcuccauuagaaaugggacauaugaucaugacguguaccgcgacgaggcucugaacaaucgguuccagaucaagggcguugaacucaagagcggauacaaagauuggauucuguggaucucuuuugccaucuccugcuuccuucugugcguggcccuccugggcuuuauuaugugggcuugucagaaggggaacaucagaugcaauauuuguaucuga

SEQ ID NO: 199067 - RNA, 1701 nt, Artificial Sequence
  derived and/or modified CDS sequence (opt5) from hemagglutinin__InfluenzaA__AEK98402
augaagaccaucauugcccugagcuacauccucugccugggcuucgcucagaaacuucccgggaacgacaauuccacagccacgcugugucucggacaccaugcggugccuaacggcaccauugucaagacaaucaccaaugaucaaauugagguuacaaacgcuaccgaacuggugcagucuagcuccacaggggagaucugcgacucuccgcaccagauccuugaugggaaaaauuguacccugauugacgcccuccugggcgauccccagugcgacggguuucaaaacaagaaaugggaucuguucguggaaagaagcaaggccuauuccaauuguuacccuuaugacguccccgauuacgcuucucuccggagccugguggccuccagcggaacgcuugaguuuaacaaugaaucuuucaacuggaccggcguuacacagaauggcaccuccagcgcuugcauccgcagaucuaagaacuccuuuuucagccggcugaauuggcucacacaucugaacuuuaaauauccugcccuuaaugugaccaugcccaacaacgagcaguucgacaagcuguacauuuggggaguccaccauccuggaacggauaaagaccagaucuuucucuaugcgcaagccucuggccgcauuacaguguccaccaagagaagccagcagacagcuaucccgaauauugggucccggccccgcguuagaaacaucccuucucggaucagcauuuacuggaccaucgugaaacccggagauauucugcugaucaauuccaccggcaaccucauugccccucgcggguacuucaagaucagaagcggaaagucuuccaucaugcggagcgacgcucccauuggcaaauguaauucugagugcaucacaccgaacggcagcauuccuaaugacaagcccuuucagaacgucaaucgcaucacguauggggccuguccuagauacgugaaacaaaacacccugaaacuugcgacaggaaugcggaaugugcccgaaaaacagacccgcggcauuuucggggccaucgcuggauuuaucgagaacggcugggaagggauggucgauggaugguauggcuucagacaccaaaauuccgagggccgggggcaggccgcugaccugaagucuacacaggccgccauuaaccagaucaauggaaaacucaacagacugauuggcaagaccaacgagaaguuccaccagaucgaaaaagaguuuagcgaaguugaggggcgcauucaagaucuugaaaaguacguggaggacacgaaaaucgaucugugguccuauaaugcugagcuccugguggcgcuggaaaaccagcauacaauugaccucaccgauagcgagaugaauaagcuguucgaaaagaccaagaagcagcuucgggagaacgccgaagacaugggaaauggcugcuuuaaaaucuaccacaagugugauaacgcuugcaucgggucuauuagaaauggcacauaugaccaugaugucuaccgcgacgaggcccugaacaaucgguuccagaucaaaggaguggagcucaaguccggcuacaaagacuggauucuguggaucagcuuugccauuucuugcuuccuucuguguguugcucuccugggguuuaucaugugggccugccaaaagggaaacaucagauguaauauuugcaucuga

SEQ ID NO: 199068 - RNA, 1701 nt, Artificial Sequence
  derived and/or modified CDS sequence (opt5) from hemagglutinin__InfluenzaA__AEK98404
augaagaccaucauugcccugagcuacauccucucccugguguucgcucagaaacuucccggcaacgacaauucuacagccacgcugugccucgggcaccaugcggucccuaacggaaccauuguuaagacaaucaccaaugaucaaauugaggugacaaacgcuaccgaacuggugcagagcuccucuacaggcgagaucugugacagcccgcaccagauccuugauggggaaaauugcacccugauugacgcccuccugggagauccccagugugacggcuuucaaaacaaaaagugggaucuguucgucgagagauccaaagccuauucuaauugcuacccuuaugacgugcccgauuacgcuagccuccggucccugguugccagcucugggacgcuugaauuuaacaaugagaacuucaauuggaccggagugacacagaacggcaccuccagcgcuuguauccgcagaucuaauaacuccuuuuucagccggcugaauuggcucacacaucugcgcuuuaaguauccugcccuuaacgucaccaugcccaacaaugaggaguucgacaagcuguacauuuggggcgugcaccauccugggacggauaacgaccagaucuuucucuaugcgcaggccucuggaagaauuacaguuuccaccaaacggagccaacagacagugaucccgaauauuggcucccgccccagaguccggaacaucccuucucgcaucagcauuuacuggaccaucgugaagcccggggauauucugcugaucaauuccaccggaaaccucauugcuccuagaggcuacuucaaaaugcggagcgggaagucuuccaucaugcgcagcgacgcccccaucggaaaaugcaauucugaauguauuacaccgaacggcagcaucccuaaugacaagcccuuucagaacgugaauagaauuacguauggcgcuugcccucgguacgucaagcagaacacccugaaacuugccacagggaugcgcaauguucccgaaaagcaaaccagaggaaucuucggcgcgauugccggguuuaucgagaacggaugggagggcaugguggaugggugguauggauuccggcaccaaaauuccgaaggcaucggccaggcugccgaccugaaaucuacacaggcugccauugaucagaucaacgggaagcucaacagacugauuggaaaaaccaaugagaaguuccaccagaucgaaaaagaguuuagcgaaguggagggccgcauucaggaccuugagaaguacgucgaagauacgaagaucgaccugugguccuauaacgccgagcuccugguggcucuggaaaaucaacauacaauugaucucaccgacagcgagaugaacaaacuguucgaaaagaccaaaaagcagcuucgggagaaugcggaggauauggggaacggauguuuuaaaaucuaccacaagugcgacaaugccuguaucggcucuauuagaaacgggacauaugaucaugacguuuaccgcgacgaagcucugaauaaccgguuccagaucaagggcguggagcucaaauccggauacaaggauuggauucuguggaucagcuuugccauuucuugcuuccuucugugcgucgcccuccugggcuuuaucaugugggcuugucagaaagggaauaucagaugcaacauuuguaucuga

SEQ ID NO: 199069 - RNA, 1701 nt, Artificial Sequence
  derived and/or modified CDS sequence (opt5) from hemagglutinin__InfluenzaA__AEK98406
augaagaccaucauugcccugagcuacauccucucccugguguucgcucagaaacuucccggcaacgacaauucuacagccacgcugugccucgggcaccaugcggucccuaacggaaccauuguuaagacaaucaccaaugaucaaauugaggugacaaacgcuaccgaacuggugcagagcuccucuacaggcgagaucugugacagcccgcaccagauccuugauggggaaaauugcacccugauugacgcccuccugggagauccccagugugacggcuuucaaaacaaaaagugggaucuguucgucgagagauccaaagccuauucuaauugcuacccuuaugacgugcccgauuacgcuagccuccggucccugguugccagcucugggacgcuugaauuuaacaaugagaacuucaauuggaccggagugacacagaacggcaccuccagcgcuuguauccgcagaucuaauaacuccuuuuucagccggcugaauuggcucacacaucugcgcuuuaaguauccugcccuuaacgucaccaugcccaacaaugaggaacuggacaagcucuacauuuggggcgugcaccauccugggacggauaacgaccagaucuuccuguaugcgcaggccucuggaagaauuacaguuuccaccaaacggagccaacagacagugaucccgaauauuggcucccgccccagaguccggaacaucccuucucgcaucagcauuuacuggaccaucgugaagcccggggauauucugcucaucaauuccaccggaaaccugauugcuccuagaggcuacuuuaaaauccggagcgggaagucuuccaucaugcgcagcgacgcccccauuggaaaaugcaauucugaguguaucacaccgaacggcagcauuccuaaugacaagcccuuccagaacgugaauagaaucacguauggcgcuugcccucgguacgucaagcagaacacccuuaaacuggccacagggaugcgcaauguucccgaaaagcaaaccagaggaauuuuuggcgcgaucgccggguucaucgagaacggaugggagggcaugguggaugggugguauggauuucggcaccaaaauuccgaaggcauuggccaggcugccgaccucaaaucuacacaggcugccaucgaucagauuaacgggaagcugaacagacuuaucggaaaaaccaaugagaaguuccaccagauugaaaaagaguucagcgaaguggagggccgcauccaggaccuggagaaguacgucgaagauacgaagauugaccucugguccuauaacgccgagcugcugguggcucucgaaaaucaacauacaaucgaucugaccgacagcgagaugaacaaacuuuuugaaaagaccaaaaagcagcugcgggagaaugcggaggauauggggaacggauguuucaaaaucuaccacaagugcgacaaugccuguauuggcucuaucagaaacgggacauaugaucaugacguuuaccgcgacgaagcucucaauaaccgguuucagauuaagggcguggagcugaaauccggauacaaggauuggauccuuuggauuagcuucgccaucucuugcuuucugcucugcgucgcccugcugggcuucgugaugugggcuugucagaaagggaauaucagaugcaacauuuguaucuga

SEQ ID NO: 199070 - RNA, 1701 nt, Artificial Sequence
  derived and/or modified CDS sequence (opt5) from hemagglutinin__InfluenzaA__AEL11687
augaagaccaucauugcccugagcuacauccucugccugguguucgcucagaaacuucccggcaacgacaauuccacagccacgcugugucucgggcaccaugcggucccuaacggaaccauuguuaagacaaucaccaaugaucaaauugaggugacaaacgcuaccgaacuggugcagucuagcuccacaggcgggaucugcgacucuccgcaccagauccuugauggagagaauuguacccugauugacgcccuccugggcgauccccagugcgacggguuucaaaacaaaaagugggaucuguucgucgaaagaagcaaagccuauuccaauuguuacccuuaugacgugcccgauuacgcuucucuccggagccugguugccuccagcggaacgcuugaguuuaacaaugaaucuuucaacuggaccggcgugacacagaauggcaccuccagcucuugcaagcgcagauccaacaauagcuuuuucucucggcugaacuggcucacacaucugaaguuuaaauauccugcucuuaaugucaccaugcccaacaacgagaaguucgacaaacuguacaucuggggagugcaccauccuguuacggauaaugaccagauucgccucuaugcccaggcguccgggagaaucacagugagcaccaagcggucccaacagacagucauuccgaacaucggcuaccgccccagagugcgggauauuccuucucgcaucagcaucuacuggaccauugugaaacccggggacauccugcugauuaauuccaccggaaaccucaucgccccuagaggcuauuuuaagauucggagcgggaagucuuccaucaugcgcagcgacgcucccaucggaaaauguaauucugagugcauuacaccgaacggcagcaucccuaaugauaagcccuuccagaacgucaauagaauuacguacggcgccuguccucgguauguuaaacagaacacccugaaacuugcuacagggaugcgcaaugugcccgaaaagcaaaccagaggaaucuuuggcgccauugcgggguucaucgagaacggaugggaaggcaugguggacgggugguacggauuucggcaccaaaauuccgagggcaucggccaggccgcugaucugaagucuacacaggccgcuauuaaccagaucaaugggaaacucaacagacugauuggaaagaccaacgagaaguuccaccagaucgaaaaagaguucagcgaagucgagggccgcauucaggaccuugaaaaguauguggaggauacgaaaaucgaccugugguccuacaaugccgagcuccugguugcccuggaaaaccaacauacaauugaucucaccgacagcgagaugaauaagcuguuugaacggaccaaaaagcagcuuagagagaacgcugaagauauggggaauggaugcuucaagaucuaucacaaaugugacaacgcgugcaucggcucuauucgcaaugggacauacgaucaugacguguaccgggacgaggcccugaacaauagauuucagaucaagggcgucgagcucaaauccggauauaaggauuggauucuguggaucagcuucgcuauuucuugcuuucuucugugugugguucuccugggcuucaucaugugggccugccagaaagggaacauccgcuguaauauuugcaucuga

SEQ ID NO: 199071 - RNA, 1692 nt, Artificial Sequence
  derived and/or modified CDS sequence (opt5) from hemagglutinin__InfluenzaA__AEL31632
auggagaagaucgugcugcuccuggccauugucagccuuguuaaauccgaccagaucugcauuggcuaccacgcuaacaauucuaccgaacaaguggauacaaucauggagaagaacgugacggucacccaugcccaggacauucuggaaaagacacacaaugggaagcucuguaaccuggauggagugaaaccccuuauccugagagacugcagcguugcgggcuggcuccuggggaauccuaugugugaugaguuccugaacgugccggaaugguccuauaucgucgagaagauuaaucccgcuaacgaccucugcuacccuggaaauuuuaacgauuaugaggaacugaagcaucuucugucucggaucaaucacuucgagaaaauucagaucauucccaagagcuccuggucugaccaugaagccagcggcguguccagcguuuguccuuaccaggggagaucuuccuuuuuccgcaacguggucuggcucaccaaaaaggauaaugccuaucccacaaucaaacggagcuacaacaauaccaaccaagaggaccugcuugugcuguggggcauucaccacccuaacgaugcugccgagcagacacgccucuaucagaauccgaccacguacaucucugugggaaccuccacacugaaccagagacugguccccaagaucgcuacccggagcaagguuaauggccaaucugggcgcauggaauuuuucuggacaauucucaaauccaacgacgccaucaauuuugagagcaacggaaauuucauugcgccugaaaacgccuacaagaucgugaaaaagggcgauuccaccauuaugaaaucugagcuggaauaugggaauugcaacacgaagugucagacacccaucggagcuaucaauagcuccaugccuuuucauaacauucacccccuuaccaucggcgagugcccgaaauacgugaaaagcaauagacugguccucgccacagggcugcggaacucuccucagggagagacccgcggccuuuucggcgcuauugccggguuuaucgaaggaggcuggcaggggaugguggacggaugguauggcuaccaucacuccaaugagcaagggagcggauaugcggccgacaaggaaucuacccagaaagcuauugauggcguuacaaacaaggugaacagcaucaucgacaaaaugaauacgcaguucgaggccgucggcagagaauuuaacaaucuggagcggcgcauugagaaccucaauaagaaaauggaagauggguuccuggacguguggaccuacaacgcugagcugcucguucugauggaaaaugagagaacacuugauuuccacgacuccaacgugaagaaucuguaugauaagguccggcuccaacugcgcgacaacgccaaagaacuuggaaauggcuguuuugaguucuaccauagaugcgauaacgaguguauggaaucugugcggaaugggaccuacgacuauccccaguacagcgaggaagccagacugaagcgcgaggagaucuccggagucaaacucgaaagcauuggcacauaucagauccugucuauuuacuccaccguggcuagcucucuggcgcucgccaucaugguugcugggcuguuucuuuggaugugcuccaacggcagccugcagugccggauuuguaucuga

SEQ ID NO: 199072 - RNA, 1701 nt, Artificial Sequence; identical to SEQ ID NO: 198992
  derived and/or modified CDS sequence (opt5) from hemagglutinin__InfluenzaA__AEL89297

SEQ ID NO: 199073 - RNA, 1701 nt, Artificial Sequence; identical to SEQ ID NO: 198992
  derived and/or modified CDS sequence (opt5) from hemagglutinin__InfluenzaA__AEL89307

SEQ ID NO: 199074 - RNA, 1701 nt, Artificial Sequence; identical to SEQ ID NO: 198992
  derived and/or modified CDS sequence (opt5) from hemagglutinin__InfluenzaA__AEL89317

SEQ ID NO: 199075 - RNA, 1701 nt, Artificial Sequence; identical to SEQ ID NO: 198992
  derived and/or modified CDS sequence (opt5) from hemagglutinin__InfluenzaA__AEL89327

SEQ ID NO: 199076 - RNA, 1701 nt, Artificial Sequence; identical to SEQ ID NO: 198992
  derived and/or modified CDS sequence (opt5) from hemagglutinin__InfluenzaA__AEL89337

SEQ ID NO: 199077 - RNA, 1701 nt, Artificial Sequence; identical to SEQ ID NO: 198992
  derived and/or modified CDS sequence (opt5) from hemagglutinin__InfluenzaA__AEL89347

SEQ ID NO: 199078 - RNA, 1701 nt, Artificial Sequence; identical to SEQ ID NO: 198992
  derived and/or modified CDS sequence (opt5) from hemagglutinin__InfluenzaA__AEL89357

SEQ ID NO: 199079 - RNA, 1701 nt, Artificial Sequence; identical to SEQ ID NO: 198992
  derived and/or modified CDS sequence (opt5) from hemagglutinin__InfluenzaA__AEL89367

SEQ ID NO: 199080 - RNA, 1701 nt, Artificial Sequence; identical to SEQ ID NO: 198992
  derived and/or modified CDS sequence (opt5) from hemagglutinin__InfluenzaA__AEL89391

SEQ ID NO: 199081 - RNA, 1701 nt, Artificial Sequence; identical to SEQ ID NO: 198992
  derived and/or modified CDS sequence (opt5) from hemagglutinin__InfluenzaA__AEL89401

SEQ ID NO: 199082 - RNA, 1701 nt, Artificial Sequence; identical to SEQ ID NO: 198992
  derived and/or modified CDS sequence (opt5) from hemagglutinin__InfluenzaA__AEL89411

SEQ ID NO: 199083 - RNA, 1701 nt, Artificial Sequence; identical to SEQ ID NO: 198992
  derived and/or modified CDS sequence (opt5) from hemagglutinin__InfluenzaA__AEL89421

SEQ ID NO: 199084 - RNA, 1701 nt, Artificial Sequence; identical to SEQ ID NO: 198992
  derived and/or modified CDS sequence (opt5) from hemagglutinin__InfluenzaA__AEL89441

SEQ ID NO: 199085 - RNA, 1701 nt, Artificial Sequence; identical to SEQ ID NO: 198992
  derived and/or modified CDS sequence (opt5) from hemagglutinin__InfluenzaA__AEL89451

SEQ ID NO: 199086 - RNA, 1701 nt, Artificial Sequence; identical to SEQ ID NO: 198992
  derived and/or modified CDS sequence (opt5) from hemagglutinin__InfluenzaA__AEL89461

SEQ ID NO: 199087 - RNA, 1701 nt, Artificial Sequence; identical to SEQ ID NO: 198992
  derived and/or modified CDS sequence (opt5) from hemagglutinin__InfluenzaA__AEL89471

SEQ ID NO: 199088 - RNA, 1701 nt, Artificial Sequence
  derived and/or modified CDS sequence (opt5) from hemagglutinin__InfluenzaA__AEL89481
augaaggugauccuggucguucuccuguacaccuucgccacagcuaacgccgacacgcuuugcauuggcuaucacgcgaauaacagcaccgauacaguggacaccgugcuggagaaaaaugucacagugacccauuccguuaaccuccuggaagauaagcacaaugggaaacuuuguaagcugagaggaguggcuccccuccaucugggcaaaugcaacaucgccggguggauucugggaaauccugagugugaaucucucagcacagccuccucuuggagcuacaucgucgagaccuccucuagcgacaacggcacgugcuauccgggggauuuuauugacuacgaagaacugcgggagcagcuuuccagcgugucuuccuucgaacgcuuugagaucuuccccaagaccagcucuuggccuaaucacgauuccaacaagggaguuacagcugccuguccccaugcuggcgccaagagcuuuuauaaaaaucugaucuggcucgugaaaaagggcaacucuuacccuaaacuguccaagagcuauauuaaugacaaggggaaagaaguccuugugcuguggggaauccaccaccccuccaccucugcggaucaacagagccucuaccagaacgccgacgcuuacguguucgucggcacauccagauauagcaagaaauuuaagccugagauugccauccggccgaaaguucgcgaucaggaggggagaaugaauuacuauuggacccugguggaacccggagacaagauuacguucgaggcuacaggcaaccugguggucccucgguacgccuuugcgauggaacgcaacgccgggucuggaaucauuaucuccgauacccccgugcaugacugcaauacaaccugucaaaccccuaaaggcgcuaucaacacaagccuccccuuccagaauauucacccgaucacgauuggcaagugcccuaaguauguuaaaucuaccaagcugagacuugccacagggcugcggaacgugcccagcauccagucccgcggacucuuuggcgcuauugccggguucaucgagggaggcuggaccgggauggucgacggaugguacggcuaucaucaccagaaugaacaaggcucuggguacgccgcugaucugaaaagcacacagaacgcgaucgacaagauuaccaauaaagugaacuccguuaucgagaagaugaauacgcaguuuacagccgugggaaaggaguucaaccaccuugagaaaagaauugagaaucugaacaagaaagucgaugacggcuuccucgauaucuggaccuacaaugcugaacugcuggugcuccuggagaacgaacggacccuugacuaucaugauagcaaugucaagaaccuguacgagaaagugcgcucucagcucaagaacaaugccaaggagauugggaacggauguuuugaguucuaucacaaaugcgacaauacauguauggaauccguuaagaacggcaccuacgauuauccuaaauacagcgaagaggccaagcugaauagagaagagaucgacggggugaaacuugagucuacacggaucuaucaaauucuggcuaucuacuccacggucgccagcucccucgugcugguugugucucugggcgcgauuagcuuuuggaugugcuccaacggaucucuccagugccgcaucuguauuuga

SEQ ID NO: 199089 - RNA, 1701 nt, Artificial Sequence; identical to SEQ ID NO: 197656
  derived and/or modified CDS sequence (opt5) from hemagglutinin__InfluenzaA__AEL89491

SEQ ID NO: 199090 - RNA, 1701 nt, Artificial Sequence
  derived and/or modified CDS sequence (opt5) from hemagglutinin__InfluenzaA__AEL89501
augaaggccauccuggugguccuccuguacaccuucgcuacagccaacgcggacacgcuuugcauuggcuaucacgcuaauaacagcaccgauacaguugacaccgugcuggagaaaaaugugacagucacccauuccgugaaccuccuggaagauaagcacaaugggaaacuuuguaagcugagaggaguugcuccccuccaucugggcaaaugcaacaucgccggguggauucugggaaauccugagugugaaucucucagcacagccuccucuuggagcuacaucguggagaccuccucuagcgacaacggcacgugcuauccgggggauuuuauugacuacgaagaacugcgggagcagcuuuccagcgucucuuccuucgaacgcuuugagaucuuccccaagaccagcucuuggccugaucacgacuccaauaagggagugacagccgcuuguccccaugccggcgcgaaaucuuuuuauaagaaccugaucuggcucguuaaaaagggcaauagcuacccuaaacuguccaagagcuauauuaacgaugaagggaaggaggugcuuguccuguggggaauccaccaccccuccaccucugccgaccaacagagccucuaccagaaugcugaugccuacguguucgugggcacauccagauauagcaaaaaguuuaaaccugagauugcuauccggccgaagguccgcgaccaggaagggagaaugaacuacuauuggacccugguugagcccggagauaaaauuacguucgaagccacaggcaaucugguggugccucgguacgcguuugccauggagcgcaacgcugggucuggaaucauuaucuccgacacccccguccaugacugcaacacaaccugucaaaccccuaagggcgccaucaauacaagccuccccuuccagaacauucacccgaucacgauuggcaaaugcccuaaguaugugaagucuaccaaacugagacuugcuacagggcugcggaauguucccagcauccagucccgcggacucuuuggcgccauugccggguucaucgaaggaggcuggaccgggaugguggauggaugguacggcuaucaucaccagaacgagcaaggcucuggguacgcugcggaccuuaagagcacacagaaugccaucgauaaaauuaccaacaaggucaauuccgugaucgagaaaaugaacacgcaguuuacagcuguuggaaaggaguucaaucaccuugagaagagaauugaaaaccugaauaaaaagguggacgauggcuuccucgacaucuggaccuacaacgccgagcugcugguccuccuggaaaaugagcggacccuugauuaucaugacagcaacgugaaaaaucuguacgagaagguccgcucucagcucaaaaacaacgccaaggaaauugggaauggauguuuugaguucuaucacaagugcgauaacacauguauggaauccgugaaaaauggcaccuacgacuauccuaaguacagcgaggaagcuaaacugaacagagaggagaucgaugggguuaagcuggaaucuacacggaucuaucaaauucuggccaucuacuccacgguggcgagcucccucguccuggugguuucucugggcgcuauuagcuuuuggaugugcuccaauggaucucuccagugccgcaucuguauuuga

SEQ ID NO: 199091 - RNA, 1701 nt, Artificial Sequence; identical to SEQ ID NO: 195905
  derived and/or modified CDS sequence (opt5) from hemagglutinin__InfluenzaA__AEL89511

SEQ ID NO: 199092 - RNA, 1701 nt, Artificial Sequence; identical to SEQ ID NO: 197656
  derived and/or modified CDS sequence (opt5) from hemagglutinin__InfluenzaA__AEL89521

SEQ ID NO: 199093 - RNA, 1701 nt, Artificial Sequence
  derived and/or modified CDS sequence (opt5) from hemagglutinin__InfluenzaA__AEL89531
augaaggccauccuggugguccuccuguacaccuucacaacggcuaacgccgacacccuuugcauuggcuaucacgcgaauaacagcacagauaccguugacacagugcuggagaaaaaugugaccgucacacauuccgugaaccuccuggaagauaagcacaaugggaaacuuugucagcugagaggaguugcuccccuccaucugggcaagugcaacaucgccggguggauucugggaaauccugagugugaaucucucagcaccgccuccucuuggagcuacaucguggagacguccucuagcgacaacggaaccugcuauccgggggauuuuauugacuacgaagaacugcgggagcaacuuuccagcgucucuuccuucgaacgcuuugagauguuccccaaaacaagcucuuggccuaaucacgauuccaacaagggagugaccgcugccuguccccaugcuggcgccaagagcuuuuauaaaaaucugaucuggcucguuaagaaaggcaacucuuacccuaagcuguccaaaagcuauaucaaugacaaggggaaggaagugcuuguccuguggggcauucaccaccccuccacaucugcggaucagcagagccucuaccagaacgccgacgcuuacguguucgugggcaccuccagauauagcaaaaaguuuaaaccugagaucgccauucggccgaagguccgcgaucaagaggggagaaugaauuacuauuggacgcugguugaacccggagacaaaaucacauucgaggcuaccggcaaccugguggugccucgguacgccuuugcgauggaacgcaacgccgggucuggaauuaucauuuccgauacacccguccaugacugcaauaccaccugucagacaccuaagggcgcuaucaacacgagccuccccuuccagaauauccacccgauuaccaucggcaaaugcccuaaguaugugaagucuacaaaacugagacuugccaccgggcugcggaacguucccagcauucagucccgcggacucuuuggcgcuaucgccggguucauugagggaggcuggacagggaugguggacggaugguacggcuaucaucaccaaaaugaacagggcucuggguacgccgcugaucuuaagagcacccagaacgcgaucgacaaaaucacgaauaaggucaacuccgugauugagaaaaugaauacacaguuuaccgccguuggaaaggaguucaaccaccuugaaaagagaaucgagaaucugaacaaaaagguggaugacggcuuccucgauauuuggaccuacaaugcugaacugcugguccuccuggagaacgaacggacacuugacuaucaugauagcaaugugaaaaaccuguacgagaagguccgcucucaacucaaaaacaaugccaaggagaucgggaacggauguuuugaguucuaucacaagugcgacaauaccuguauggaguccgugaaaaacggcacauacgauuauccuaaguacagcgaagaggccaaacugaauagagaagagauugacgggguuaagcuggagucuacgcggaucuaucagauccuggcuauuuacuccaccguggccagcucccucguccuggugguuucucugggcgcgaucagcuuuuggaugugcuccaacggaucucuccagugccgcauuuguaucuga

SEQ ID NO: 199094 - RNA, 1701 nt, Artificial Sequence; identical to SEQ ID NO: 197656
  derived and/or modified CDS sequence (opt5) from hemagglutinin__InfluenzaA__AEL89541

SEQ ID NO: 199095 - RNA, 1701 nt, Artificial Sequence
  derived and/or modified CDS sequence (opt5) from hemagglutinin__InfluenzaA__AEL89551
augaaggccauccuggugguccuccuguacaccuucgcuacagccaacgcggacacgcuuugcauuggcuaucacgcuaauaacagcaccgauacaguugacaccgugcuggagaaaaaugugacagucacccauuccgugaaccuccuggaagauaagcacaaugggaaacuuuguaagcugagaggaguugcuccccuccaucugggcaaaugcaacaucgccggguggauucugggaaauccugagugugaaucucucagcacagccuccucuuggagcuacaucguggagaccuccucuagcgacaacggcacgugcuauccgggggauuuuauugacuacgaagaacugcgggagcagcuuuccagcgucucuuccuucgaacgcuuugagaucuuccccaagaccagcucuuggccugaucacgacuccaauaagggagugacagccgcuuguccccaugccggcgcgaaauccuuuuauaagaaccugaucuggcucguuaaaaagggcaauucuuacccuaaacuguccaagagcuauauuaacgauaaggggaaagaagugcuuguccuguggggaauccaccaccccuccaccucugccgaccaacagagccucuaccagaaugcugaugccuacguguucgugggcacauccagauauagcaagaaauuuaagccugagauugcuauccggccgaaaguccgcgaccaggaggggagaaugaacuacuauuggacccugguugaacccggagauaagauuacguucgaggccacaggcaaucugguggugccucgguacgcguuugccauggaacgcaacgcugggucuggaaucauuaucuccgacacccccgcccaugacugcaacacaaccugucaaaccccuaaaggcgcuaucaauacaagccuccccuuccagaacauucacccgaucacgauuggcaagugcccuaaguaugucaaaucuaccaagcugagacuugccacagggcugcggaaugugcccagcauccagucccgcggacucuuuggcgccauugcuggguucaucgagggaggcuggaccgggaugguugauggaugguacggcuaucaucaccagaacgaacaaggcucuggguacgcggccgaccugaaaagcacacagaaugcuaucgauaagauuaccaacaaagugaauagcgucaucgagaagaugaacacgcaguuuacagccgugggaaaggaguucaaucaccuugagaaaagaauugagaaccugaauaagaaaguugacgauggcuuccucgacaucuggaccuacaacgccgaacugcuggugcuccuggagaaugaacggacccuugauuaucaugacagcaacgucaagaaucuguacgagaaagugcgcucucagcucaagaacaacgcuaaggagauugggaauggauguuuugaguucuaucacaaaugcgauaacacauguauggaauccgucaagaauggcaccuacgacuauccuaaauacagcgaagaggccaagcugaacagagaagagaucgauggggugaaacuugagucuacacggaucuaucaaauucuggcgaucuacuccacgguugcuagcucccucgugcuggucgugucucugggcgccauuagcuuuuggaugugcuccaauggaucucuccagugccgcaucuguauuuga

SEQ ID NO: 199096 - RNA, 1701 nt, Artificial Sequence
  derived and/or modified CDS sequence (opt5) from hemagglutinin__InfluenzaA__AEL89561
augaaggccauccuggugguccuccuguacaccuucgcuacagccaacgcggacacgcuuugcauuggcuaucacgcuaauaacagcaccgauacaguugacaccgugcuggagaaaaaugugacagucacccauuccgugaaccuccuggaagauaagcacaaugggaaacuuuguaagcugagaggaguugcuccccuccaucugggcaaaugcaacaucgccggguggauucugggaaauccugagugugaaucucucagcacagccuccucuuggagcuacaucguggagaccuccucuagcggcaacgggacgugcuauccgggagacuuuauugauuacgaagaacugcgggagcagcuuuccagcgucucuuccuucgaacgcuuugagaucuuccccaagaccagcucuuggccugaccacgauuccaauaagggcgugacagccgcuuguccccaugccggcgcgaaaucuuuuuauaagaaccugaucuggcucguuaaaaaggggaauagcuacccuaaacuguccaagagcuauauuaacgacaagggaaaagaagugcuuguccuguggggcauccaccaccccuccaccucugccgaucaacagagccucuaccagaaugcugacgccuacguguucguggggacauccagauauagcaagaaauuuaagccugagauugcuauccggccgaaaguccgcgaucaggagggaagaaugaacuacuauuggacccugguugaacccggcgacaagauuacguucgaggccacagggaaucugguggugccucgguacgcguuugccauggaacgcaacgcuggaucuggcaucauuaucuccgauacccccguccaugacugcaacacaaccugucaaaccccuaaaggcgccaucaauacaagccuccccuuccagaacauucacccgaucacgauugggaagugcccuaaguaugugaaaucuaccaagcugagacuugcuacaggacugcggaauguucccagcauccagucccgcggccucuuuggggccauugccggauucaucgagggcggguggaccggaaugguggacggcugguacggcuaucaucaccagaacgaacaagggucuggauacgcugcggaucugaaaagcacacagaaugccaucgacaagauuaccaacaaagucaauuccgugaucgagaagaugaacacgcaguuuacagcuguuggcaaggaguucaaucaccuugagaaaagaauugagaaccugaauaagaaaguggaugacggguuccucgauaucuggaccuacaacgccgaacugcugguccuccuggagaaugaacggacccuugacuaucaugauagcaacgugaagaaucuguacgagaaaguccgcucucagcucaagaacaacgccaaggagauuggaaauggcuguuuugaguucuaucacaaaugcgacaacacauguauggaauccgugaagaaugggaccuacgauuauccuaaauacagcgaagaggcuaagcugaacagagaagagaucgacggcguuaaacuugagucuacagaaaucuaucaaauucuggccaucuacuccacgguggcgagcucccucguccuggugguuucucugggagcuauuagcuuuuggaugugcuccaauggcucucuccagugccggaucuguauuuga

SEQ ID NO: 199097 - RNA, 1701 nt, Artificial Sequence; identical to SEQ ID NO: 197656
  derived and/or modified CDS sequence (opt5) from hemagglutinin__InfluenzaA__AEL89571

SEQ ID NO: 199098 - RNA, 1701 nt, Artificial Sequence
  derived and/or modified CDS sequence (opt5) from hemagglutinin__InfluenzaA__AEL89581
augaaggccauccuggugguccuccuguacaccuucgcuacagccaacgcggacacgcuuugcauuggcuaucacgcuaauaacagcaccgauacaguugacaccgugcuggagaaaaaugugacagucacccauuccgugaaccuccuggaagauaagcacaaugggaaacuuuguaagcugagaggaguugcuccccuccaucugggcaaaugcaacaucgccggguggauucugggaaauccugagugugaaucucucagcacagccuccucuuggagcuacaucguggagaccuccucuagcgacaacggcacgugcuauccgggggauuuuauugacuacgaagaacugcgggagcagcuuuccagcgucucuuccuucgaacgcuuugagauguuccccaagaccagcucuuggccugaucacgacuccaauaagggagugacagccgcuuguccccaugccggcgcgaaaucuuuuuauaagaaccugaucuggcucguuaaaaagggcaauagcuacccuaaacuguccaagagcuauaucaacgauaaggggaaagaagugcuuguccuguggggcauucaccaccccuccaccucugccgaccaacagagccucuaccagaaugcugaugccuacguguucgugggaacauccagauauagcaagaaauuuaagccugagaucgcuauucggccgaaaguccgcgaccaggaggggagaaugaacuacuauuggacccugguugaacccggagauaagaucacguucgaggccacaggcaaucugguggugccucgguacgcguuugccauggaacgcaacgcugggucuggaauuaucauuuccgacacccccguccaugacugcaacacaaccugucaaaccccuaaaggcgccaucaauacaagccuccccuuccagaacauccacccgauuacgaucggcaagugcccuaaguaugugaaaucuaccaagcugagacuugcuacagggcugcggaauguucccagcauucagucccgcggacucuuuggcgccaucgccggguucauugagggaggcuggaccgggaugguggauggaugguacggcuaucaucaccagaacgaacaaggcucuggguacgcugcggaccugaaaagcacacagaaugccaucgauaagaucaccaacaaagucaauuccgugauugagaagaugaacacgcaguuuacagcuguuggaaaggaguucaaucaccuugagaaaagaaucgagaaccugaauaagaaaguggacgauggcuuccucgacauuuggaccuacaacgccgaacugcugguccuccuggagaaugaacggacccuugauuaucaugacagcaacgugaagaaucuguacgagaaaguccgcucucagcucaagaacaacgccaaggagaucgggaauggauguuuugaguucuaucacaaaugcgauaacacauguauggaauccgugaagaauggcaccuacgacuauccuaaauacagcgaagaggcuaagcugaacagagaagagauugaugggguuaaacuugagucuacacggaucuaucaaauccuggccauuuacuccacgguggcgagcucccucguccuggugguuucucugggcgcuaucagcuuuuggaugugcuccaauggaucucuccagugccgcauuuguaucuga

SEQ ID NO: 199099 - RNA, 1701 nt, Artificial Sequence; identical to SEQ ID NO: 198526
  derived and/or modified CDS sequence (opt5) from hemagglutinin__InfluenzaA__AEL89591

SEQ ID NO: 199100 - RNA, 1701 nt, Artificial Sequence
  derived and/or modified CDS sequence (opt5) from hemagglutinin__InfluenzaA__AEL89601
augaaggccauccuggugguccuccuguacaccuucgcuacagccaacgcggacacgcuuugcauuggcuaucacgcuaauaacagcaccgauacaguugacaccgugcuggagaaaaaugugacagucacccauuccgugaaccuccuggaagauaagcacaaugggaaacuuuguaagcugagaggaguugcuccccuccaucugggcaaaugcaacaucgccggguggauucugggaaauccugagugugaaucucucagcacagccuccucuuggagcuacaucguggagaccuccucuagcgacaacggcacgugcuauccgggggauuuuauugacuacgaagaacugcgggagcagcuuuccagcgucucuuccuucgaacgcuuugagaucuuccccaagaccagcucuuggccuaaucacgauuccaacaagggagugacaaccgccuguccccaugcuggcgccaagagcuuuuauaaaaaucugaucuggcucguuaaaaagggcaacucuuacccuaaacuguccaagagcuauauuaaugacaaggggaaagaagugcuuguccuguggggaauccaccaucccccuacauccgcggaucaacagucucucuaccagaacgccgacgcuuacguguucgugggcaccagcagauauuccaagaaauuuaagccggagauugccauccggcccaaaguccgcgaucaggaggggagaaugaauuacuauuggacgcugguugaaccuggagacaagauuacauucgaggcuaccggcaaccugguggugccccgguacgccuuugcgauggaacgcaacgccgggagcggaaucauuaucucugauacaccuguccacgacugcaauaccaccugucaaacacccaaaggcgcuaucaacacgucccucccguuccagaauauucacccuaucaccauuggcaagugccccaaguaugugaaaagcacaaagcugagacuugccaccgggcugcggaacguuccuucuauccagagccgcggacucuuuggcgcuauugccggguucaucgagggaggcuggacagggaugguggacggaugguacggcuaucaucaccagaaugaacaaggcuccggguacgccgcugaucugaaaucuacccagaacgcgaucgacgagauuacgaauaaggucaacagcgugaucgagaaaaugaauacacaguuuaccgccguuggaaaggaguucaaccaccuugagaagagaauugaaaaucugaacaaaaagguggaugacggcuuccucgauaucuggaccuacaaugcugagcugcugguccuccuggaaaacgagcggacacuugacuaucaugauuccaaagugaagaaucuguacgagaaaguccgcagccagcucaagaacaacgccaaggaaauugggaauggauguuuugaguucuaucacaaaugcgacaacaccuguauggaaucugugaagaauggcacauacgauuaucccaaauacuccgaggaagccaagcugaacagagaggagaucgacgggguuaaacuugaaagcacgcggaucuaucaaauucuggcuaucuacucuaccguggccuccagccucguccuggugguuucccugggcgcgauuucuuuuuggaugugcagcaauggaucccuccagugccgcaucuguauuuga

SEQ ID NO: 199101 - RNA, 1701 nt, Artificial Sequence; identical to SEQ ID NO: 198526
  derived and/or modified CDS sequence (opt5) from hemagglutinin__InfluenzaA__AEL89611

SEQ ID NO: 199102 - RNA, 1701 nt, Artificial Sequence; identical to SEQ ID NO: 198968
  derived and/or modified CDS sequence (opt5) from hemagglutinin__InfluenzaA__AEL89621

SEQ ID NO: 199103 - RNA, 1701 nt, Artificial Sequence; identical to SEQ ID NO: 197656
  derived and/or modified CDS sequence (opt5) from hemagglutinin__InfluenzaA__AEL89631

SEQ ID NO: 199104 - RNA, 1701 nt, Artificial Sequence; identical to SEQ ID NO: 198992
  derived and/or modified CDS sequence (opt5) from hemagglutinin__InfluenzaA__AEL89641

SEQ ID NO: 199105 - RNA, 1701 nt, Artificial Sequence
  derived and/or modified CDS sequence (opt5) from hemagglutinin__InfluenzaA__AEL89651
augaaggccauccuggugguccuccuguacaccuucgcuacagccaacgcggacacgcuuugcauuggcuaucacgcuaauaacagcaccgauacaguugacaccgugcuggagaaaaaugugacagucacccauuccgugaaccuccuggaagauaagcacaaugggaaacuuuguaagcugagaggaguugcuccccuccaucugggcaaaugcaacaucgccggguggauucugggaaauccugagugugaaucucucagcacagccuccucuuggagcuacaucguggagaccuccucuagcgacaacggcacgugcuauccgggggucuuuauugauuacgaagaacugcgggagcagcuuuccagcgugucuuccuucgaacgcuuugagaucuuccccaagaccagcucuuggccuaaucacgacuccaacaagggaguuacagccgcuuguccccaugccggcgcgaaaucuuuuuauaagaaucugaucuggcucgugaaaaagggcaacagcuacccuaaacuguccaagagcuauauuaaugauaaggggaaagaaguccuugugcuguggggaauccaccaccccuccaccacagccgaccaacagucucucuaccagaacgcugaugccuacguguucgucggcaccagcagauauuccaagaaauuuaagccugagauugcuauccggccgaaaguucgcgaccaggaggggagaaugaauuacuauuggacgcugguggaacccggagauaagauuacauucgaggccaccggcaaccugguggucccucgguacgcguuugccauggaacgcaacgcugggagcggaaucauuaucucugacacacccgugcaugauugcaauaccaccugucaaacaccuaaaggcgccaucaacacgucccuccccuuccagaauauucacccgaucaccauuggcaagugcccuaaguuuguuaaaagcacaaagcugagacuugcuaccgggcugcggaacgugcccucuauccagagccgcggacucuucggcgccauugccggguuuaucgagggaggcuggacagggauggucgacggaugguauggcuaccaucaccagaaugaacaaggcuccggguaugcugcggaccugaaaucuacccagaacgccaucgauaagauuacgaauaaagugaacagcguuaucgagaagaugaauacacaguucaccgcugugggaaaggaguucaaccaccuugagaaaagaauugagaaucugaacaagaaagucgacgauggcuuucucgacaucuggaccuacaaugccgaacugcuggugcuccuggagaacgaacggacacuugauuaccaugacuccaaugucaagaaccuguaugagaaagugcgcaaccagcucaagaauaacgccaaggagauugggaauggauguuucgaauuuuaccacaaaugcgauaacaccuguauggagagcguuaagaauggcacauaugacuacccuaaauauucugaagaggcuaagcugaacagagaagagaucgauggggugaaacuugaguccacgcggaucuaccaaauucuggccaucuauagcaccgucgcgucuucccucgugcugguugugagccugggcgcuauuuccuucuggaugugcucuaauggaagccuccagugccgcaucuguauuuga

SEQ ID NO: 199106 - RNA, 1701 nt, Artificial Sequence; identical to SEQ ID NO: 198507
  derived and/or modified CDS sequence (opt5) from hemagglutinin__InfluenzaA__AEL89661

SEQ ID NO: 199107 - RNA, 1701 nt, Artificial Sequence
  derived and/or modified CDS sequence (opt5) from hemagglutinin__InfluenzaA__AEL89671
augaaggccauccuggugguccuccuguacaccuucgcuacagccaacgcggacacgcuuugcauuggcuaucacgcuaauaacagcaccgauacaguugacaccgugcuggagaaaaaugugacagucacccauuccgugaaccuccuggaagauaagcacaaugggaaacuuuguaagcugagaggaguugcuccccuccaucugggcaaaugcaacaucgccggguggauucugggaaauccugagugugaaucucucagcacagccuccucuuggagcuacaucguggagaccuccucuagcgacaacggcacgugcuauccgggggauuuuauugacuacgaagaacugcgggagcagcuuuccagcgucucuuccuucgaacgcuuugagaucuuccccaagaccagcucuuggccuaaucacgauuccaacaagggagugacagccgcuuguccccaugccggcgcgaaaucuuuuuauaagaaucugaucuggcucguuaaaaagggcaacagcuacccuaaacuguccaagagcuauauuaaugacaaggggaaagaagugcuuguccuguggggaauccaccaccccuccaccacagccgaucaacagucucucuaccagagcgcugacaccuacguguucgugggcacguccagauauagcaagaaauuuaagccugagauugccauccggccgaaaguccgcgaucaggaggggagaaugaacuacuauuggacacugguugaacccggagacaagauuaccuucgaggcuacaggcaaucugguggugccucgguacgccuuugcgauggaacgcaacgccgggucuggaaucauuaucuccgauacccccguccaugacugcaacaccacaugucaaacgccuaaaggcgcuaucaauaccagccuccccuuccagaacauucacccgaucacaauuggcaagugcccuaaguaugugaaaucuaccaagcugagacuugccacagggcugcggaauguucccagcauccagucccgcggacucuuuggcgcuauugccggguucaucgagggaggcuggaccgggaugguggacggaugguacggcuaucaucaccagaacgaacaaggcucuggguacgccgcugaucugaaaagcacgcagaaugcgaucgacaagauuacaaacaaagucaauuccgugaucgagaagaugaacacccaguuuaccgccguuggaaaggaguucaaucaccuugagaaaagaauugagaaccugaauaagaaaguggaugacggcuuccucgauaucuggacauacaacgcugaacugcugguccuccuggagaaugaacggacccuugacuaucaugauagcaacgugaagaaucuguacgagaaaguccgcaaccagcucaagaacaaugccaaggagauugggaacggauguuuugaguucuaucacaaaugcgacaauacauguauggaaucugugaagaacggcacguacgauuauccuaaauacuccgaagaggccaagcugaauagagaagagaucgacgggguuaaacuugagagcacccggaucuaucaaauucuggcuaucuacucuacaguggccuccagccucguccuggugguuucccugggcgcgauuucuuuuuggaugugcagcaacggaucccuccagugccgcaucuguauuuga

SEQ ID NO: 199108 - RNA, 1701 nt, Artificial Sequence; identical to SEQ ID NO: 198507
  derived and/or modified CDS sequence (opt5) from hemagglutinin__InfluenzaA__AEL89691

SEQ ID NO: 199109 - RNA, 1701 nt, Artificial Sequence
  derived and/or modified CDS sequence (opt5) from hemagglutinin__InfluenzaA__AEL89701
augaaggccauccuggugguccuccuguacaccuucgcuacagccaacgcggacacgcuuugcauuggcuaucacgcuaauaacagcaccgauacaguugacaccgugcuggagaaaaaugugacagucacccauuccgugaaccuccuggaagauaagcacaaugggaaacuuuguaagcugagaggaguugcuccccuccaucugggcaaaugcaacaucgccggguggauucugggaaauccugagugugaaucucucagcacagccuccucuuggagcuacaucguggagaccuccucuagcgacaacggcacgugcuauccgggggauuuuauugacuacgaagaacugcgggagcagcuuuccagcgucucuuccuucgaacgcuuugagaucuuccccaagaccagcucuuggccuaaucacgauuccaacaagggagugacaaccgccuguccccaugcuggcgccaagagcuuuuauaagaaucugaucuggcucguuaaaaagggcaacucuuacccuaaacuguccaagagcuauauuaaugacaaggggaaagaagugcuuguccuguggggaauccaccaucccccuacauccgcggaucaacagaaccucuaccagaaugccgacgcuuacguguucgugggcaccucuagauauagcaagaaauuuaagccggagauugccauccggcccaaaguccgcgaucaggaggggagaaugaacuacuauuggacgcugguugaaccuggagacaagauuacauucgaggcuaccggcaaccugguggugccccgguacgccuuugcgauggaacgcaaugccggguccggaaucauuaucagcgauacaccuguccacgacugcaacaccaccugucaaacacccaaaggcgcuaucaauacgucucucccguuccagaacauucacccuaucaccauuggcaagugccccaaguaugugaaauccacaaagcugagacuugccaccgggcugcggaauguuccuagcauccagucucgcggacucuuuggcgcuauugccggguucaucgagggaggcuggacagggaugguggacggaugguacggcuaucaucaccagaacgaacaaggcagcggguacgccgcugaucugaaauccacccagaaugcgaucgacggaauuacgaacaaggucaauucugugaucgagaaaaugaacacacaguuuaccgccguuggcaaggaguucaaucaccuugaaaagagaauugagaaccugaauaaaaagguggaugacggguuccucgauaucuggaccuacaacgcugaacugcugguccuccuggagaaugaacggacacuugacuaucaugauagcaacgugaaaaaccuguacgagaagguccgcucccagcucaaaaauaacgccaaggagauuggaaauggcuguuuugaguucuaucacaagugcgacaacaccuguauggagagcgugaaaaaugggacauacgauuaucccaaguacucugaagaggccaaacugaacagagaagagaucgacggcguuaaacuugaguccacgaugaucuaucaaauucuggcuaucuacagcaccguggccucuucccucguccuggugguuagccugggagcgauuuccuuuuggaugugcucuaauggcagccuccagugccggaucuguauuuga

SEQ ID NO: 199110 - RNA, 1701 nt, Artificial Sequence; identical to SEQ ID NO: 199109
  derived and/or modified CDS sequence (opt5) from hemagglutinin__InfluenzaA__AEL89711

SEQ ID NO: 199111 - RNA, 1701 nt, Artificial Sequence; identical to SEQ ID NO: 198507
  derived and/or modified CDS sequence (opt5) from hemagglutinin__InfluenzaA__AEL89721

SEQ ID NO: 199112 - RNA, 1701 nt, Artificial Sequence
  derived and/or modified CDS sequence (opt5) from hemagglutinin__InfluenzaA__AEL89741
augaaggccauccuggugguccuccuguacaccuucgcuacaacgaacgccgacacccuuugcauuggcuaucacgcgaauaacagcacagauaccguugacacagugcuggagaaaaaugugaccgucacacauuccgugaaccuccuggaagauaagcacaaugggaaacuuuguaagcugagaggaguugcuccccuccaucugggcaaaugcaacaucgccggguggauucugggaaauccugagugugaaucucucagcaccgccuccucuuggagcuacaucguggagacguccucuagcgacaacgggaccugcuauccgggcgauuuuauugacuacgaagaacugcgggagcagcuuuccagcgucucuuccuucgaacgcuuugagaucuuccccaagacaagcucuuggccuaaucacgauuccaacaagggagugaccgcugccuguccccaugcuggcgccaagagcuuuuauaaaaaucugaucuggcucguuaaaaagggcaacucuuacccuaaacuguccaagagcuauauuaaugacaaggggaaagaagugcuuguccuguggggaauccaccaccccuccacaaccgcggaucaacagucucucuaccagaacgccgacacguacguguucgugggcacaagcagauauuccaagaaauuuaagccugagauugcuauccggccgaaaguccgcgaucaggaggggagaaugaauuacuauuggacccugguugaacccggagacaagauuacauucgaggccaccggcaaccugguggugccucgguacgcuuuugccauggaacgcaacgcggggagcggaaucauuaucucugauacccccguccaugacugcaauacaacgugucaaaccccuaaaggcgccaucaacacaucccuccccuuccagaauauucacccgaucaccauuggcaagugcccuaaguaugugaaaagcacaaagcugagacuugcuaccgggcugcggaacguucccucuauccagagccgcggacucuuuggcgccauugcuggguucaucgagggaggcuggacggggaugguggacggaugguacggcuaucaucaccagaaugaacaaggcuccggguacgccgccgaucugaaaucuacacagaacgcuaucgacaagauuaccaauaaagucaacagcgugaucgagaagaugaauacccaguuuacagcgguuggaaaggaguucaaccaccuugagaaaagaauugagaaucugaacaagaaaguggaugacggcuuccucgauaucuggaccuacaaugccgaacugcugguccuccuggagaacgaacggacacuugacuaucaugauuccaaugugaagaaccuguacgagaaaguccgcaaccagcucaagaauaacgcuaaggagauugggaauggauguuuugaguucuaucacaaaugcgacaacacguguauggaaagcgugaagaauggcaccuacgauuauccuaaauacucugaagaggccaagcugaacagagaagagaucgacgggguuaaacuugaguccacacggaucuaucaaauucuggccaucuacagcaccguggcuucuucccucguccuggugguuagccugggcgccauuuccuuuuggaugugcucuaauggaagccuccagugccgcaucuguauuuga

SEQ ID NO: 199113 - RNA, 1701 nt, Artificial Sequence; identical to SEQ ID NO: 197656
  derived and/or modified CDS sequence (opt5) from hemagglutinin__InfluenzaA__AEL89751

SEQ ID NO: 199114 - RNA, 1701 nt, Artificial Sequence
  derived and/or modified CDS sequence (opt5) from hemagglutinin__InfluenzaA__AEL89761
augaaggccauccuggugguccuccuguacaccuucgcuacagccaacgcggacacgcuuugcauuggcuaucacgcuaauaacagcaccgauacaguugacaccgugcuggagaaaaaugugacagucacccauuccgugaaccuccuggaagauaagcacaaugggaaacuuuguaagcugagaggaguugcuccccuccaucugggcaaaugcaacaucgccggguggauucugggaaauccugagugugaaucucucagcacagccuccucuuggagcuacaucguggagaccuccucuagcgacaacggcacgugcuauccgggggauuuuauugacuacgaagaacugcgggagcagcuuuccagcgucucuuccuucgaacgcuuugagaucuuccccaagaccagcucuuggccuaaucacgauuccaacaagggagugacaaccgccuguccccaugcuggcgccaagagcuuuuauaagaaucugaucuggcucguuaaaaagggcaacucuuacccuaaacuguccaagagcuauauuaaugacaaggggaaagaagugcuuguccuguggggaauccaccaucccccuacauccgcggaucaacagucucucuaccagaacgccgacgcuuacguguucgugggcaccagcagauauuccaagaaauuuaagccggagauugccauccggcccaaaguccgcgaucaggaggggagaaugaauuacuauuggacgcugguugaaccuggagacaagauuacauucgaggcuaccggcaaccugguggugccccgguacgccuuugcgauggaacgcaacgccgggagcggaaucauuaucucugauacaccuguccacgacugcaauaccaccugucaaacacccaaaggcgcuaucaacacgucccucccguuccagaauauucacccuaucaccauuggcaagugccccaaguaugugaaaagcacaaagcugagacuugccaccgggcugcggaacguuccuucuauccagagccgcggacucuuuggcgcuauugccggguucaucgagggaggcuggacagggaugguggacggaugguacggcuaucaucaccagaaugaacaaggcuccggguacgccgcugaucugaaaucuacccagaacgcgaucgacggaauuacgaauaaggucaacagcgugaucgagaaaaugaauacacaguuuaccgccguuggcaaggaguucaaccaccuugaaaagagaauugagaaucugaacaaaaagguggaugacggguuccucgauaucuggaccuacaaugcugaacugcugguccuccuggagaacgaacggacacuugacuaucaugauuccaaugugaaaaaccuguacgagaagguccgcagccagcucaaaaacaaugccaaggagauuggaaacggcuguuuugaguucuaucacaagugcgacaauaccuguauggagucugugaaaaacgggacauacgauuaucccaaguacuccgaagaggccaaacugaauagagaagagaucgacggcguuaaacuugagagcacgaugaucuaucaaauucuggcuaucuacucuaccguggccuccagccucguccuggugguuucccugggagcgauuucuuuuuggaugugcagcaacggcucccuccagugccggaucuguauuuga

SEQ ID NO: 199115 - RNA, 1701 nt, Artificial Sequence; identical to SEQ ID NO: 198992
  derived and/or modified CDS sequence (opt5) from hemagglutinin__InfluenzaA__AEL89771

SEQ ID NO: 199116 - RNA, 1701 nt, Artificial Sequence; identical to SEQ ID NO: 199114
  derived and/or modified CDS sequence (opt5) from hemagglutinin__InfluenzaA__AEL89781

SEQ ID NO: 199117 - RNA, 1701 nt, Artificial Sequence; identical to SEQ ID NO: 198507
  derived and/or modified CDS sequence (opt5) from hemagglutinin__InfluenzaA__AEL89791

SEQ ID NO: 199118 - RNA, 1701 nt, Artificial Sequence
  derived and/or modified CDS sequence (opt5) from hemagglutinin__InfluenzaA__AEL89801
augaaggccauccuggugguccuccuguacaccuucgcuacagccaacgcggacacgcuuugcauuggcuaucacgcuaauaacagcaccgauacaguugacaccgugcuggagaaaaaugugacagucacccauuccgugaaccuccuggaagauaagcacaaugggaaacuuuguaagcugagaggaguugcuccccuccaucugggcaaaugcaacaucgccggguggauucugggaaauccugagugugaaucucucagcacagccuccucuuggagcuacaucguggagaccuccucuagcgacaacggcacgugcuauccgggggucuuuauugauuacgaagaacugcgggagcagcuuuccagcgugucuuccuucgaacgcuuugagaucuuccccaagaccagcucuuggccuaaucacgacuccaacaagggaguuacagccgcuuguccccaugccggcgcgaaaucuuuuuauaagaaucugaucuggcucgugaaaaagggcaacagcuacccuaaacuguccaagagcuauauuaaugauaaggggaaagaaguccuugugcuguggggaauccaccaccccuccaccacagccgaccaacagucucucuaccagaacgcugaugccuacguguucgucggcaccagcagauauuccaagaaauuuaagccugagauugcuguucggccgaaagugcgcgaccaggaggggagaaugaauuacuauuggacgcugguggaacccggagauaagaucacauucgaggccaccggcaaccuggucgugccucgguacgcguuugccauggaacgcaacgcugggagcggaauuaucauuucugacacacccguucaugauugcaauaccaccugucaaacaccuaaaggcgccaucaacacgucccuccccuuccagaauauccacccgauuaccaucggcaagugcccuaaguaugugaaaagcacaaagcugagacuugcuaccgggcugcggaacguccccucuauucagagccgcggacucuuuggcgccaucgccggguucauugagggaggcuggacagggaugguggacggaugguacggcuaucaucaccagaaugaacaaggcuccggguacgcugcggaccugaaaucuacccagaacgccaucgauaagaucacgaauaaaguuaacagcgugauugagaagaugaauacacaguuuaccgcugucggaaaggaguucaaccaccuugagaaaagaaucgagaaucugaacaagaaaguggacgauggcuuccucgacauuuggaccuacaaugccgaacugcugguccuccuggagaacgaacggacacuugauuaucaugacuccaaugugaagaaccuguacgagaaaguucgcaaccagcucaagaauaacgccaaggagaucgggaauggauguuuugaguucuaucacaaaugcgauaacaccuguauggaaagcgugaagaauggcacauacgacuauccuaaauacucugaagaggcuaagcugaacagagaagagauugauggggucaaacuugaguccacgcggaucuaucaaauccuggccauuuacagcaccguggcgucuucccucauccugguugugagccugggcgcuauuuccuuuuggaugugcucuaauggaagccuccagugccgcaucuguauuuga

SEQ ID NO: 199119 - RNA, 1701 nt, Artificial Sequence
  derived and/or modified CDS sequence (opt5) from hemagglutinin__InfluenzaA__AEL89812
augaaggccauccuggugguccuccuguacaccuucgcuacagccaacgcggacacgcuuugcauuggcuaucacgcuaauaacagcaccgauacaguugacaccgugcuggagaaaaaugugacagucacccauuccgugaaccuccuggaagauaagcacaaugggaaacuuuguaagcugagaggaguugcuccccuccaucugggcaaaugcaacaucgccggguggauucugggaaauccugagugugaaucucucagcacagccuccucuuggagcuacaucguggagaccuccucuagcgacaacggcacgugcuauccgggggauuuuauugacuacgaagaacugcgggagcagcuuuccagcgucucuuccuucgaacgcuuugagaucuuccccaagaccagcucuuggccuaaucacgauuccaacaagggagugacaaccgccuguccccaugcuggcgccaagagcuuuuauaagaaucugaucuggcucguuaaaaagggcaacucuuacccuaaacuguccaagagcuauauuaaugacaaggggaaagaagugcuuguccuguggggaauccaccaucccccuacauccgcggaucaacagucucucuaccagaacgccgacgcuuacguguucgugggcaccagcagauauuccaagaaauuuaagccggagauugccauccggcccaaaguccgcgaucaggaggggagaaugaauuacuauuggacgcugguugaaccuggagacaagauuacauucgaggcuaccggcaaccugguggugccccgguacgccuuugcgauggaacgcaacgccgggagcggaaucauuaucucugauacaccuguccacgacugcaaugcuaccugucaaacccccaaaggcgugaucaacacaucccucccguuccagaauauucacccuaucacgauuggcaagugccccaaguauguuaaaagcaccaagcugagacuugccacagggcugcggaacgugccuucuauccagagccgcggacucuuuggcgcuauugccggguucaucgagggaggcuggaccgggauggucgacggaugguacggcuaucaucaccagaaugaacaaggcuccggguacgccgcugaucugaaaucuacacagaacgcgaucgacggaauuaccaauaaggugaacagcguuaucgagaaaaugaauacgcaguuuacagccgugggcaaggaguucaaccaccuugaaaagagaauugagaaucugaacaaaaaggucgaugacggguuccucgauaucuggaccuacaaugcugaacugcuggugcuccuggagaacgaacggacccuugacuaucaugauuccaaugucaaaaaccuguacgagaaggugcgcagccagcucaaaaacaaugccaaggagauuggaaacggcuguuuugaguucuaucacaagugcgacaauacauguauggagucuguuaaaaacgggaccuacgauuaucccaaguacuccgaagaggccaaacugaauagagaagagaucgacggcgugaaacuugagagcacaaugaucuaucaaauucuggcuaucuacucuacggucgccuccagccucgugcugguugugucccugggagcgauuucuuuuuggaugugcagcaacggcucccuccagugccggaucuguauuuga

SEQ ID NO: 199120 - RNA, 1701 nt, Artificial Sequence; identical to SEQ ID NO: 198507
  derived and/or modified CDS sequence (opt5) from hemagglutinin__InfluenzaA__AEL89832

SEQ ID NO: 199121 - RNA, 1701 nt, Artificial Sequence
  derived and/or modified CDS sequence (opt5) from hemagglutinin__InfluenzaA__AEL89842
augaaggccauccuggugguccuccuguacacccuugcuacagccaacgcggacacgcugugcauuggcuaucacgcuaauaacagcaccgauacaguugacaccgugcucgagaaaaaugugacagucacccauuccgugaaccugcuugaagauaagcacgacgggaaacuguguaagcucagaggaguugcuccccugcaucugggcaaaugcaauaucgccggguggauucucggaaacccugagugugaaucucugagcacagccuccucuuggagcuacaucguggagaccuccucuagcgauaauggcacgugcuauccgggggacuucauugauuacgaggaacuucgggagcagcuguccagcgucucuuccuuugaacgcuucgagaucuuucccaagaccagcucuuggccuaaccacgacuccaauaagggagugacagccgcuuguccccaugccggcgcgaaauccuucuauaagaaccucaucuggcugguuaaaaagggcaauucuuacccuaaacuuuccaagagcuauauuaacgauaaggggaaagaagugcugguccucuggggaauccaccaccccuccaccucugccgaccaacagagccuguaccagaaugcugaugccuacguguuugugggcacauccagauauagcaagaaauucaagccugagauugcuauccggccgaaaguccgcgaccaggaggggagaaugaacuacuauuggacccugguugaacccggagauaagauuacguuugaggccacaggcaaucucguggugccucgguacgcguucgccauggaacgcaacgcugggucuggaaucauuaucuccgacacccccguccaugacugcaacgccacaugucaaaccccuaaaggcgcuaucaauaccagccugcccuuucagaacgugcacccgauuacaaucggcaagugcccuaaguauguuaaaucuacgaaacuuagacuggccaccgggcuccggaaugugcccagcauucagucccgcggacuguucggcgccaucgcuggguuuauugagggaggcuggacagggauggucgauggaugguacggcuaucaucaccagaacgaacaaggcucuggguacgcggccgaccuuaaaagcacccagaaugcuaucgauaagaucacaaacaaagugaauagcguuauugagaagaugaacacccaguucacggccgugggaaaggaguuuaaucaccuggaaaagagaaucgagaaccucaauaagaaagucgacgauggcuuccuggacauuuggacauacaacgccgaacugcucgugcugcuugagaaugaacggacccuggauuaucaugacagcaacgucaagaaucucuacgagaaagugcgcucucagcugaagaacaacgcuaaggagaucgggaauggauguuucgaauuuuaucacaaaugcgauaacaccuguauggaguccguuaagaauggcacauacgacuauccuaaauacagcgaagaggccaaacuuaacagagaagagauugauggggugaagcuggagucuacccggaucuaucaaauccucgcgauuuacuccacagucgcuagcucccuggugcugguugugucucucggcgccaucagcuucuggaugugcuccaauggaucucugcagugccgcauuuguaucuga

SEQ ID NO: 199122 - RNA, 1701 nt, Artificial Sequence
  derived and/or modified CDS sequence (opt5) from hemagglutinin__InfluenzaA__AEL89852
augaaggccauccuggugguccuccuguacaccuucgcuacagccaacgcggacacgcuuugcauuggcuaucacgcuaauaacagcaccgauacaguugacaccgugcuggagaaaaaugugacagucacccauuccgugaaccuccuggaagauaagcacaaugggaaacuuuguaagcugagaggaguugcuccccuccaucugggcaaaugcaacaucgccggguggauucugggaaauccugagugugaaucucucagcacagccuccucuuggagcuacaucguggagaccuccucuagcgacaacggcacgugcuauccgggggauuuuauuaauuacgaagaacugcgggagcagcuuuccagcgucucuuccuucgaacgcuuugagaucuuccccaagaccagcucuuggccuaaccacgacuccaauaagggagugacagccgcuuguccccaugccggcgcgaaaucuuuuuauaagaaccugaucuggcucguuaaaaagggcaauagcuacccuaaacuguccaagagcuauauuaacgauaaggggaaagaagugcuuguccuguggggaauccaccaccccuccaccucugccgaccaacagagccucuaccagaaugcugaugccuacguguucgugggcacauccaaguauagcaaaaaguuuaaaccugagauugcugucagaccgaagguucgggaccaggaggggcgcaugaacuacuauuggacccugguggaacccggagauaaaaucacguucgaggccacaggcaaccugcucgugccuagauacgcguuugccauggaacggaaugcugggucuggaauuaucauuuccgacacccccguccaugauugcaacacaaccugucaaaccccuaagggcgccaucaauacaagccugcccuuccagaacauccacccgauuacgaucggcaagugcccuaaauaugugaagucuaccaaacuucgccuggcuacagggcucagaaauguucccagcauucagucccggggacuguuuggcgccaucgccggguucauugagggaggcuggaccgggaugguggacggaugguacggcuaucaucaccagaacgaacaaggcucuggguacgcugcggaccuuaagagcacacagaaugccaucgauaaaaucaccaacaaggucaauuccgugauugagaagaugaacacgcaguuuacagcuguuggaaaagaguucaaucaccuggaaaagcgcaucgagaaccucaauaaaaagguggacgauggcuuccuggacauuuggaccuacaacgccgaacugcucguccugcuugagaaugaaagaacccuggauuaucaugacagcaacgugaaaaaccucuacgagaagguccggucucagcugaagaauaacgccaaagagaucgggaauggauguuuugaguucuaucacaagugcgauaacacauguauggaguccgugaaaaauggcaccuacgacuauccuaaguacagcgaagaggcuaaacuuaaccgcgaagagauugaugggguuaagcuggagucuacaagaaucuaucaaauccucgccauuuacuccacgguggcgagcucccugguccuggugguuucucucggcgcuaucagcuuuuggaugugcuccaauggaucucugcagugccggauuuguaucuga

SEQ ID NO: 199123 - RNA, 1701 nt, Artificial Sequence; identical to SEQ ID NO: 198526
  derived and/or modified CDS sequence (opt5) from hemagglutinin__InfluenzaA__AEL93568

SEQ ID NO: 199124 - RNA, 1701 nt, Artificial Sequence; identical to SEQ ID NO: 198507
  derived and/or modified CDS sequence (opt5) from hemagglutinin__InfluenzaA__AEL93578

SEQ ID NO: 199125 - RNA, 1701 nt, Artificial Sequence
  derived and/or modified CDS sequence (opt5) from hemagglutinin__InfluenzaA__AEL93598
augaaggccauccuggugguccuccuguacaccuucgcuacagccaacgcggacacgcuuugcauuggcuaucacgcuaauaacagcaccgauacaguugacaccgugcuggagaaaaaugugacagucacccauuccgugaaccuccuggaagauaagcacaaugggaaacuuuguaagcugagaggaguugcuccccuccaucugggcaaaugcaacaucgccggguggauucugggaaauccugagugugaaucucucagcacagccuccucuuggagcuacaucguggagaccuccucuagcgacaacggcacgugcuauccgggggucuuuauugauuacgaagaacugcgggagcagcuuuccagcgugucuuccuucgaacgcuuugagaucuuccccaagaccagcucuuggccuaaucacgacuccaacaagggaguuacagccgcuuguccccaugccggcgcgaaaucuuuuuauaagaaucugaucuggcucgugaaaaagggcaacagcuacccuaaacuguccaagagcuauauuaaugauaaggggaaagaaguccuugugcuguggggaauccaccaccccuccaccacagccgaccaacagucucucuaccagaacgcugaugccuacguguucgucggcaccagcagauauuccaagaaauuuaagccugagauugcuauccggccgaaaguucgcgaccaggaggggagaaugaauuacuauuggacgcugguggaacccggagauaagauuacauucgaggccaccggcaaccugguggucccucgguacgcguuugccauggaacgcaacgcugggagcggaaucauuaucucugacacacccgugcaugauugcaauaccaccugucaaacaccuaaaggcgccaucaacacgucccuccccuuccagaauauucacccgaucaccauuggcaagugcccuaaguauguuaaaagcacaaagcugagacuugcuaccgggcugcggaacgugcccucuauccagagccgcggacucuuuggcgccauugccggguucaucgagggaggcuggacagggauggucgacggaugguacggcuaucaucaccagaaugaacaaggcuccggguacgcugcggaccugaaaucuacccagaacgccaucgauaagauuacgaauaaagugaacagcguuaucgagaagaugaauacacaguuuaccgcugugggaaaggaguucaaccaccuugagaaaagaauugagaaucugaacaagaaagucgacgauggcuuccucgacaucuggaccuacaaugccgaacugcuggugcuccuggagaacgaacggacacuugauuaucaugacuccaaugucaagaaccuguacgagaaagugcgcaaccagcucaagaauaacgccaaggagauugggaauggauguuuugaguucuaucacaaaugcgauaacaccuguauggaaagcguuaagaauggcacauacgacuauccuaaauacucugaagaggcuaagcugaacagagaagagaucgauggggugaaacuugaguccacgcggaucuaucaaauucuggccaucuacagcaccgucgcgucuucccucgugcugguugugagccugggcgcuauuuccuuuuggaugugcucuaauggaagccuccagugccgcaucuguauuuga

SEQ ID NO: 199126 - RNA, 1701 nt, Artificial Sequence
  derived and/or modified CDS sequence (opt5) from hemagglutinin__InfluenzaA__AEL93618
augaaggccauccugguggucaugcucuacaccuucgcuacagccaacgcggacacgcugugcauuggcuaucacgcuaauaacagcaccgauacaguugacaccgugcuugagaaaaaugugacagucacccauuccgugaaccugcucgaagauaagcacaaugggaaacuguguaaacuuagaggaguugcuccccugcaucucggcaaaugcaacaucgccggguggauucugggaaauccugagugugaaucucugagcacagccuccucuuggagcuacaucguggagaccuccucuagcgacaacggcacgugcuauccgggggauuuuauugacuacgaagaacuccgggagcagcuguccagcgucucuuccuucgaacgcuuugagaucuuccccaagaccagcucuuggccuaaucacgauuccaacaagggagugacagccgcuuguccccaugccggcgcgaaaucuuuuuauaagaaucuuaucuggcugguuaaaaagggcaacagcuacccuaaacucuccaagagcuauauuaaugacaaggggaaagaagugcugguccuuuggggaauccaccaccccuccaccacagccgaucaacagucucuguaccagaacgcugacaccuacguguucgugggcacgagcagauauuccaagaaauuuaagccugagauugccauccggccgaaaguccgcgaucaggaggggagaaugaauuacuauuggacacucguugaacccggagacaagauuaccuucgaggcuacaggcaaccugguggugccucgguacgccuuugcgauggaacgcaacgccgggagcggaaucauuaucucugauacccccguccaugacugcaauaccacaugucaaacgccuaaaggcgcuaucaacaccucccugcccuuccagaauauucacccgaucacaauuggcaagugcccuaaguaugugaaaagcaccaagcucagacuggccacagggcuucggaacguucccucuauccagagccgcggacuguuuggcgcuauugccggguucaucgagggaggcuggaccgggaugguggacggaugguacggcuaucaucaccagaaugaacaaggcuccggguacgccgcugaucucaaaucuacgcagaacgcgaucgacaagauuacaaauaaagucaacagcgugaucgagaagaugaauacccaguuuaccgccguuggaaaggaguucaaccaccuggaaaagagaauugagaaucuuaacaagaaaguggaugacggcuuccuggauaucuggacauacaaugcugaacuccugguccugcucgagaacgaacggacccuggacuaucaugauuccaaugugaagaaccuuuacgagaaaguccgcaaccagcugaagaauaacgccaaggagauugggaauggauguuuugaguucuaucacaaaugcgacaacacauguauggagagcgugaagaauggcacguacgauuauccuaaauacucugaagaggccaagcucaacagagaagagaucgacgggguuaaacuggaguccacccggaucuaucaaauucuugcuaucuacagcacaguggccucuucccugguccucgugguuagccugggcgcgauuuccuuuuggaugugcucuaauggaagccugcagugccgcaucuguauuuga

SEQ ID NO: 199127 - RNA, 1701 nt, Artificial Sequence; identical to SEQ ID NO: 198507
  derived and/or modified CDS sequence (opt5) from hemagglutinin__InfluenzaA__AEL93628

SEQ ID NO: 199128 - RNA, 1701 nt, Artificial Sequence; identical to SEQ ID NO: 198942
  derived and/or modified CDS sequence (opt5) from hemagglutinin__InfluenzaA__AEL93638

SEQ ID NO: 199129 - RNA, 1701 nt, Artificial Sequence
  derived and/or modified CDS sequence (opt5) from hemagglutinin__InfluenzaA__AEL94870
augaaggccauccuggugguccuccuguacaccuucgcuacagccaacgcggacacgcuuugcauuggcuaucacgcuaauaacagcaccgauacaguugacaccgugcuggagaagaaugugacagucacccauuccgugaaccuccuggaagauaagcacaaugggaaacuuuguaagcugagaggaguugcuccccuccaucugggcaaaugcaacaucgccggguggauucugggaaauccugagugugaaucucucagcacagccuccucuuggagcuacaucguggagaccuccucuagcgacaacggcacgugcuauccgggggauuuuauugacuacgaggaacugcgggagcagcuuuccagcgucucuuccuucgaacgcuuugagaucuuccccaagaccagcucuuggccugaucacgacuccaauaagggagugacagccgcuuguccccaugccggcgcgaaauccuuuuauaagaaccugaucuggcucguuaaaaagggcaauucuuacccuaaacuguccaagagcuauauuaacgauaaggggaaagaagugcuuguccuguggggaauccaccaccccuccaccucugccgaccaacagagccucuaccagaaugcugaugccuacguguucgugggcacauccagauauagcaagaaauuuaagccugagauugcuauccggccgaaaguccgcgaccaggaggggagaaugaacuacuauuggacccugguugaacccggagauaagauuacguucgaggccacaggcaaucugguggugccucgguacgcguuugccauggaacgcaacgcugggucuggaaucauuaucuccgacacccccgcccaugacugcaacacaaccugucaaaccccuaaaggcgcuaucaauacaagccuccccuuccagaacauucacccgaucacgauuggcaagugcccuaaguaugucaaaucuaccaagcugagacuugccacagggcugcggaaugugcccagcauccagucccgcggacucuuuggcgccauugcuggguucaucgagggaggcuggaccgggaugguugauggaugguacggcuaucaucaccagaacgaacaaggcucuggguacgcggccgaccugaaaagcacacagaaugcuaucgauaagauuaccaacaaagugaauagcgucaucaagaagaugaacacgcaguuuacagccgugggaaaagaguucaaucaccuugagaagagaauugaaaaccugaauaaaaagguugacgauggcuuccucgacaucuggaccuacaacgccgagcugcuggugcuccuggaaaaugagcggacccuugauuaucaugacagcaacgucaaaaaucuguacgaaaaggugcgcucucagcucaagaacaacgcuaaagagauugggaauggauguuuugaguucuaucacaagugcgauaacacauguauggaauccgucaaaaauggcaccuacgacuauccuaaguacagcgaggaagccaaacugaacagagaggaaaucgauggggugaaacuugagucuacacggaucuaucaaauucuggcgaucuacuccacgguugcuagcucccucgugcuggucgugucucugggcgccauuagcuuuuggaugugcuccaauggaucucuccagugccgcaucuguauuuga

SEQ ID NO: 199130 - RNA, 1701 nt, Artificial Sequence
  derived and/or modified CDS sequence (opt5) from hemagglutinin__InfluenzaA__AEL95426
augaaggccauccuggugguccuccuguacaccuucgcuacagccaacgcggacacgcuuugcauuggcuaucacgcuaauaacagcaccgauacaguugacaccgugcuggagaaaaaugugacagucacccauuccgugaaccuccuggaagauaagcacaaugggaaacuuuguaagcugagaggaguugcuccccuccaucugggcaaaugcaacaucgccggguggauucugggaaauccugagugugaaucucucagcacagccuccucuuggagcuacaucguggagaccuccucuagcgacaacggcacgugcuauccgggggauuuuauugacuacgaagaacugcgggagcagcuuuccagcgucucuuccuucgaacgcuuugagaucuuccccaagaccagcucuuggccuaaucacgauuccaacaagggagugacagccgcuuguccccaugccggcgcgaaaucuuuuuauaagaaucugaucuggcucguuaaaaagggcaacagcuacccuaaacuguccaagagcuauauuaaugacaaggggaaagaagugcuuguccuguggggaauccaccaccccuccaccacagccgaucaacagucucucuaccagaacgcugacaccuacguguucgugggcacgagcagauauuccaagaaauuuaagccugagauugccacacggccgaaaguccgcgaucaggaggggagaaugaauuacuauuggacccugguugaacccggagacaagaucacauucgaggcuaccggcaaccugguggugccucgguacgccuuugcgauggaacgcaacgccgggagcggaauuaucauuucugauacccccguccaugacugcaauacaacgugucaaaccccuaaaggcgcuaucaacacaucccuccccuuccagaauauccacccgauuaccaucggcaagugcccuaaguaugugaaaagcacaaagcugagacuugccaccgggcugcggaacguucccucuauucagagccgcggacucuuuggcgcuaucgccggguucauugagggaggcuggacggggaugguggacggaugguacggcuaucaucaccagaaugaacaaggcuccggguacgccgcugaucugaaaucuacacagaacgcgaucgacaagaucaccaauaaagucaacagcgugauugagaagaugaauacccaguuuacagccguuggaaaggaguucaaccaccuugagaaaagaaucgagaaucugaacaagaaaguggaugacggcuuccucgauauuuggaccuacaaugcugaacugcugguccuccuggagaacgaacggacacuugacuaucaugauuccaaugugaagaaccuguacgagaaaguccgcaaccagcucaagaauaacgccaaggagaucgggaauggauguuuugaguucuaucacaaaugcgacaacacguguauggaaagcgugaagaauggcaccuacgauuauccuaaauacucugaagaggccaagcugaacagagaagagauugacgggguuaaacuugaguccacacggaucuaucaaauccuggcuauuuacagcaccguggccucuucccucguccuggugguuagccugggcgcgaucuccuuuuggaugugcucuaauggaagccuccagugccgcauuuguaucuga

SEQ ID NO: 199131 - RNA, 1701 nt, Artificial Sequence
  derived and/or modified CDS sequence (opt5) from hemagglutinin__InfluenzaA__AEL97631
augaaggccauccuggugguccuccuguacaccuucgcuacagccaacgcggacacgcuuugcauuggcuaucacgcuaauaacagcaccgauacaguugacaccgugcuggagaaaaaugugacagucacccauuccgugaacauccucgaagauaagcacaaugggaaacuguguaaacuuagaggaguugcgccccugcaucucggcaaaugcaacauugccggguggauccugggaaauccugagugugaaucucugagcacagcuuccucuuggagcuacauuguggagaccuccucuagcgacaacggcacgugcuauccgggggauuuuaucgacuacgaagaacuccgggagcagcuguccagcgucucuuccuucaagcgcuuugaaaucuuccccaagaccagcucuuggccuaaucacgauuccaacaaaggagugacagccgcuuguccccaugccggcgccaagagcuuuuauaaaaaucuuauuuggcugguuaagaaaggcaacucuuacccuaagcucuccaagagcuauaucaaugacaaagggaaggaggugcugguccuuuggggcauucaccaccccuccaccucugccgaucaacagagccuguaccagaacgcugacgccuacguguucgugggaacauccagauauagcaaaaaguuuaaaccugaaaucgcuauucggccgaagguccgcgaucaggaggggagaaugaauuacuauuggacccucguugagcccggagacaaaaucacguucgaagccacaggcaaccugguggugccucgguacgcguuugccauggagcgcaacgcugggucuggaauuaucaucuccgauacccccguccaugacugcaauacaaccugucaaaccccuaagggcgccauuaacacaagccugcccuuccagaauauccacccgacgaccauuggcaagugcccuaaauaugugaagucuacaaaacucagacuggcuaccgggcuucggaacguucccagcauccagucccgcggacuguuuggcgccauugccggguucaucgaaggaggcuggacagggaugguggacggaugguacggcuaucaucaccagaaugagcaaggcucuggguacgcugcggaucucaagagcacccagaacgccaucgacgaaauuacgaauaaagucaacuccgugaucgagaagaugaauacacaguuuaccgcuguuggaaaggaguucaaccaccuggaaaagagaauugagaaucuuaacaagaaaguggaugacggcuuccuggauaucuggaccuacaaugccgaacuccugguccugcucgagaacgaacggacacuggacuaucaugauagcaaugugaagaaccuuuacgagaaaguccgcucucagcugaagaacaaugccaaggagauugggaacggauguuuugaguucuaucacaaaugcgacaauaccuguauggaguccgugaagaacggcacauacgauuauccuaaauacagcgaagaggcuaagcucaauagagaagagaucgacgggguuaaacuggagucuacgcggaucuaucaaauucuugccaucuacuccaccguggcgagcucccugguccucgugguuucucugggcgcuauuagcuuuuggaugugcuccaacggaucucugcagugccgcaucuguauuuga

SEQ ID NO: 199132 - RNA, 1701 nt, Artificial Sequence
  derived and/or modified CDS sequence (opt5) from hemagglutinin__InfluenzaA__AEL99664
augaaggccauccuggugguccuccuguacaccuucgcuacagccaacgcggacacgcuuugcauuggcuaucacgcuaauaacagcaccgauacaguugacaccauccuggagaaaaaugugacagugacccauuccgucaaccuccuggaagauaagcacaaugggaaacuuuguaagcugagaggaguggcgccccuccaucugggcaaaugcaacauugccggguggauccugggaaauccugagugugaaucucucagcacagcuuccucuuggagcuacauuguugagaccuccucuagcgacaacggcacgugcuauccgggggauuuuaucgacuacgaagaacugcgggagcagcuuuccagcgugucuuccuucaagcgcuuugaaaucuuccccaagaccagcucuuggccuaaucacgauuccaacaaaggagucacagccgcuuguccccaugccggcgccaagagcuuuuauaaaaaucugauuuggcucgugaagaaaggcaacucuuacccuaagcuguccaagagcuauaucaaugacaaagggaaggagguucuugugcuguggggcauucaccaccccuccaccucugccgaucaacagagccucuaccagaacgcugacgccuacgucuucgugggaacauccagauauagcaaaaaguuuaaaccugaaaucgcuauucggccgaaggugcgcgaucaggaggggagaaugaauuacuauuggacccuggucgagcccggagacaaaaucacguucgaagccacaggcaaccugguugugccucgguacgcguuugccauggagcgcaacgcugggucuggaauuaucaucuccgauaccagcgugcaugacugcaauacaaccugucaaacccccaagggcgccauuaacacaucucucccuuuccagaauauccaccccauuacgaucggcaagugcccgaaauaugucaagagcaccaaacugagacuugcuacagggcugcggaacgugccuuccauucagucucgcggacucuuuggcgccaucgccggguucaucgaaggaggcuggaccgggaugguugacggaugguacggcuaucaucaccagaaugagcaaggcagcggguacgcugcggaucugaaguccacacagaacgccauugacgaaaucaccaauaaagugaacagcgucauugagaagaugaauacgcaguuuacagcugugggaaaggaguucaaccaccuugagaaaagaaucgagaaucugaacaagaaaguugaugacggcuuccucgauauuuggaccuacaaugccgaacugcuggugcuccuggagaacgaacggacccuugacuaucaugauucuaaugucaagaaccuguacgagaaagugcgcucccagcucaagaacaaugccaaggagaucgggaacggauguuuugaguucuaucacaaaugcgacaauacauguauggaaagcgucaagaacggcaccuacgauuaucccaaauacucugaagaggcuaagcugaauagagaagagaucgacggggugaaacuugaguccacacggauuuaucaaauccuggccauuuacagcacgguugcguccucucucgugcuggucgugagccugggcgcuaucuccuuuuggaugugcucuaacggaagccuccagugccgcauuuguaucuga

SEQ ID NO: 199133 - RNA, 1701 nt, Artificial Sequence
  derived and/or modified CDS sequence (opt5) from hemagglutinin__InfluenzaA__AEL99674
augaaggccauccuggugguccuccuguacaccuucgcuacagccaacgcggacacgcuuugcauuggcuaucacgcuaauaacagcaccgauacaguugacaccgugcuggagaagaaugugacagucacccauuccgugaaccuccuggaagauaagcacaaugggaaacuuuguaagcugagaggaguugcuccccuccaucugggcaaaugcaacaucgccggguggauucugggaaauccugagugugaaucucucagcacagccuccucuuggagcuacaucguggagaccuccucuagcgacaacggcacgugcuauccgggggauuuuauugacuacgaagaacugcgggagcagcuuuccagcgucucuuccuucgaacgcuuugagaucuuccccaagaccagcucuuggccuaaucacgauuccaacaagggagugacagccgcuuguccccaugccggcgcgaaaucuuuuuauaagaaucugaucuggcucguuaaaaagggcaacagcuacccuaaacuguccaagagcuauauuaaugacaaggggaaagaagugcuuguccuguggggaauccaccaccccuccaccucugccgaucaacagagccucuaccagaacgcugacgccuacguguucgugggcacauccagauauagcaagaaauuuaagccugagauugcuauccggccgaaaguccgcgaucaggaggggagaaugaauuacuauuggacccugguugaacccggagacaagauuaucuucgaggccacgggcaaccugguggugccucgguacgcguuugccauggaacgcaacgcugggucuggaauuaucaucuccgauacacccguccaugacugcaauaccacaugucaaaccccuaaaggcgccauuaacaccagccuccccuuccagaauauccacccgauuacaaucggcaagugcccuaaguaugugaaaucuacgaagcugagacuugcuaccgggcugcggaacguucccagcauucagucccgcggacucuuuggcgccaucgccggguucaucgagggaggcuggacagggaugguggacggaugguacggcuaucaucaccagaaugaacaaggcucuggguacgcugcggaucugaaaagcacccagaacgccauugacgagaucacaaauaaggucaacuccgugauugagaaaaugaauacccaguuuacggcuguuggaaaggaguucaaccaccuugagaagagaaucgaaaaucugaacaaaaagguggaugacggcuuccucgauauuuggacauacaaugccgagcugcugguccuccuggaaaacgagcggacccuugacuaucaugauagcaaugugaaaaaccuguacgagaagguccgcucucagcucaaaaacaaugccaaggaaaucgggaacggauguuuugaguucuaucacaagugcgacaauaccuguauggaauccgugaaaaacggcacauacgauuauccuaaguacagcgaggaagcuaaacugaauagagaggagaucgacgggguuaaacuugaaucuacccggauuuaucaaauccuggccauuuacuccacaguggcgagcucccucguccuggugguuucucugggcgcuaucagcuuuuggaugugcuccaacggaucucuccagugccgcauuuguaucuga

SEQ ID NO: 199134 - RNA, 1689 nt, Artificial Sequence; identical to SEQ ID NO: 198343
  derived and/or modified CDS sequence (opt5) from hemagglutinin__InfluenzaA__AEM53455

SEQ ID NO: 199135 - RNA, 1689 nt, Artificial Sequence; identical to SEQ ID NO: 193692
  derived and/or modified CDS sequence (opt5) from hemagglutinin__InfluenzaA__AEM53468

SEQ ID NO: 199136 - RNA, 1698 nt, Artificial Sequence; identical to SEQ ID NO: 194187
  derived and/or modified CDS sequence (opt5) from hemagglutinin__InfluenzaA__AEM60037

SEQ ID NO: 199137 - RNA, 1698 nt, Artificial Sequence
  derived and/or modified CDS sequence (opt5) from hemagglutinin__InfluenzaA__AEM60058
augaaggugaaacugcucguccugcuuugcaccuucacagccacguacgcugacaccaucuguauuggcuaucacgccaacaauagcacagauaccguugacacagugcuggagaagaacgugaccgucacacauuccgugaaucuccuggaagagucucacaacgggaaacuuugccugcucaagggaaucgcgccccugcagcugggcaauuguagcguugcuggguggauucucggaaacccugaaugcgagcugcuuaucuccaaagaaucuuggagcuacauuguggagaccccgaaucccgagaacggcacguguuauccuggguacuuugccgauuaugaagaacugagagaacaacucuccucugucagcuccuucgagcgguuugagaucuuccccaaggaaagcucuuggccuaaucauaccgugacaggaguuuccgccagcugcucucacaacggcgaguccagcuuuuaccgcaaucugcuuuggcugaccggcaagaacgggcucuaucccaaucugucuaaauccuacgcuaacaauaaggaaaaagacgugcugguccucuggggagugcaucacccuccgaacaucggcgaucagagagcccuguaccacacagagaacgcuuaugugagcgucguuuccucucauuacagccggcgcuucacccccgaaauugccaagagaccuaaagugcgggaccaggaggggcgcaucaauuauuacuggacgcuucuggagcccggagauacaauuaucuuugaagcgaacggcaaucucauugccccuagauucgcuuuugcccuggggcggggauucggcuccggcaucauuaccagcaacgcucccauggacaagugugaugccaagugccagacaccgcaaggggcgaucaauucuucccuuccuuuucagaacgugcaccccgucaccaucggagaguguccuaaauaugugcgcagcaccaagcugagaaugguuacaggccuccggaauauucccucuauccagagccgcgggcuguucggagccauugcuggcuuuaucgaagggggauggacgggcaugguggacggcugguacggguaucaucaccagaacgagcaaggauccggcuacgccgcugaucagaaaucuacccagaaugccauuaacgggaucacaaauaaggucaacagcgugaucgagaaaaugaauacccaguucacagccguuggaaaggaguucaacaaacuggagagacggauggaaaaucucaacaagaagguggacgauggcuuucuggacauuuggaccuacaacgcugagcuucugguccuccuggaaaaugagcgcacgcuugacuuccacgauuccaacgugaaaaaucuguaugaaaaggucaaaagccaacucaagaacaaugcgaaagagaucgggaacggcugcuuugaguucuaccauaaguguaaugacgaaugcauggagucugugaagaacggaacauaugauuaccccaaauauuccgaagagagcaagcugaauagagagaaaauugacggcguuaagcuggaaucuauggggguguaccagauccucgccauuuauuccaccgucgcuagcucccuggugcuucugguuucucucggagccaucagcuuuuggaugugcuccaacggcucucugcagugucggaucugcauuuga

SEQ ID NO: 199138 - RNA, 1701 nt, Artificial Sequence
  derived and/or modified CDS sequence (opt5) from hemagglutinin__InfluenzaA__AEM60069
augaagaccaucauugcccugagcuacaucuucugccucguguuugcucagaaacugcccggcaacgacaauuccacagccacgcuuugucuggggcaccaugcggucccuaacggaacccucguuaagacaauuaccaaugaucaaaucgaggugacaaacgcuaccgaacuggugcagucuagcuccacaggcagaauuugcgacucuccgcaccggauccuugaugggaaaaauuguacccugaucgacgcccuccugggagauccccauugcgacggcuuccagaacgagaagugggaucuguuugucgaacgcagcaaagccuauuccaauuguuacccuuaugacgugcccgauuacgcuucucucagaagccugguugccuccagcgggacgcuugaguucauuaacgaagacuuuaauuggaccggagugacacagucuggcggcuccuaugcuugcaagcgggggagcgucaagucuuucuuuucccgccugaacuggcuccacgagagcgaguacaaauauccugcccugaaugugaccaugcccaacaauggaaaguucgauaaacuuuacaucuggggcguucaucacccuucuacagacagagaacaaaccaaccuguacgugcgggcguccgggcgcgucacggugagcacaaagagaucccagcagaccgugauuccgaauaucggaucucggcccuggguccgcggccucagcuccagaauuagcaucuauuggacaauuguuaaaccuggggauauccugcugaucaacucuaccggaaaccucauugcuccccggggcuacuuuaagauccgcaccggcaaguccagcauuaugagaucugacgccccuaucgggacauguagcuccgagugcauuacgcccaauggaucuaucccgaacgacaaaccuuuccagaaugugaacaagaucaccuauggcgccuguccccgguacgugaaacaaaauacacugaaacuugcuaccgggaugcgcaacgucccugaaaagcagacaagaggaauuuuuggcgccaucgcgggguucauugagaauggaugggagggcaugguggauggcugguauggguuucggcaccagaacagcgaaggaaccggccaggccgcugaccugaaguccacgcaagccgcuaucgaucagauuaaugggaaacucaacagacugaucgagaagacaaaugaaaaguuccaucagaucgagaaagaguucagcgaaguugagggacgcauucaagaccuugaaaaguacguggaggauaccaaaaucgaccuguggucuuauaacgccgaacuccuggucgcccuggagaaucagcacaccauugaucucacagacuccgaaaugaacaagcuguuugagaaaacccggaagcagcuuagagagaaugcugaagauaugggcaacgggugcuucaagaucuaccauaaaugugacaacgcgugcauuggcagcauccgcaauggaacauacgaucacgacguguaucgggacgaggcccugaacaauagauuucagauuaagggcguugaacucaaaucuggguacaaggauuggauccuguggaucuccuucgcuauuagcugcuuucuucugugugugguccuccugggauucaucaugugggccugccaaaaaggcaacauucgcuguaauaucugcauuuga

SEQ ID NO: 199139 - RNA, 1701 nt, Artificial Sequence
  derived and/or modified CDS sequence (opt5) from hemagglutinin__InfluenzaA__AEM92308
augaaggccauccuggugguccuccuguacaccuucgcuacagccaacgcggacacgcuuugcauuggcuaucacgcuaauaacagcaccgauacaguugacaccgugcuggagaaaaaugugacagucacccauuccgugaaccuccuggaagauaagcacaaugggaaacuuuguaagcugagaggaguugcuccccuccaucugggcaaaugcaacaucgccggguggauucugggaaauccugagugugaaucucucagcacagccuccucuuggagcuacaucguggagaccuccucuagcgacaacggcacgugcuauccgggggauuuuauugacuacgaagaacugcgggagcagcuuuccagcgucucuuccuucgaacgcuuugagaucuuccccaagaccagcucuuggccuaaucacgauuccaacaagggagugacagccgcuuguccccaugccggcgcgaaaucuuuuuauaagaaucugaucuggcucguuaaaaagagaaacagcuacccuaaacuguccaagagcuauauuaaugacaagggcaaagaagugcuuguccugugggggauccaccaccccuccaccucugccgaucaacagagccucuaccagaacgcugacgccuacguguucgugggauccagccgguauucuaagaaauuuaagccugagauugcuauccgcccgaaagucagagaucaggagggccggaugaauuacuauuggacacugguugaacccggggacaagauuaccuucgaggccacggaaaaccugguggugccucgcuacgcguuugccauggagagaaacgcuggauccggcaucauuaucagcgauacacccguccaugacugcaauaccacaugucaaaccccuaaaggggccaucaacaccucucuccccuuccagaauauucacccgaucacaauuggaaagugcccuaaguaugugaaaagcacgaagcugcggcuugcuaccggccugcgcaacguucccuccauccagucuagaggccucuuuggggccauugccggauucaucgaaggcggguggacaggaaugguggacggcugguacggguaucaucaccagaaugagcaaggaagcggcuacgcugcggaucugaaauccacccagaacgccaucgacgagauuacaaauaaggucaacagcgugaucgaaaagaugaauacccaguuuacggcuguuggcaaggaguucaaccaccuugaaaagcggauugagaaucugaacaaaaagguggaugacggguuccucgauaucuggacauacaaugccgaacugcugguccuccuggagaacgagcgcacccuugacuaucaugauucuaaugugaaaaaccuguacgaaaaggucagaucccagcucaaaaacaaugccaaggaggugggaaacggcuguuuugaguucuaucacaagugcgacaauaccuguauggagagcguuaaaaacgggacauacgauuauccuaaguacucugaagaggcuaaacugaaucgggaggaaauugacggagugaaacuugaguccacccgcaucuaucaaauccuggccauuuacagcacagcggcuuccucucucguccuggugguuagccugggcgccaucuccuuuuggaugugcucuaacgggagccuccagugcagaauuuguaucuga

SEQ ID NO: 199140 - RNA, 1701 nt, Artificial Sequence
  derived and/or modified CDS sequence (opt5) from hemagglutinin__InfluenzaA__AEM92318
augaaggccauccuggugguccuccuguacaccuucgcuacagccaacgcggacacgcuuugcauuggcuaucacgcuaauaacagcaccgauacaguugacaccgugcuggagaaaaaugugacagucacccauuccguggaucuccuggaagacaagcacaacgggaaacuuuguaagcugagaggaguugcuccccuccaucugggcaaaugcaauaucgccggguggauucugggaaacccugagugugaaucucucagcacagccuccucuuggagcuacaucguggagaccuccucuagcgauaauggcacgugcuauccgggggacuuuauugauuacgaagaacugcgggagcagcuuuccagcgucucuuccuucgaacgcuuugagaucuuccccaagaccagcucuuggccuaaccacgacuccaauaagggagugacagccgcuuguccccaugccggcgaaaagagcuuuuauaagaaccugaucuggcucguuaaaaagggcaauucuuacccuaaacugaacaaguccuauauuaaugauaaggggaaagaggugcuuguccuguggggaauccaccaccccagcaccuccgcggaccaacagucucucuaccagaacgccgaugcuuacguguucgugggcacaagcagauauuccaagaaauuuaagccugagauugccauccggccgaaaguccgcgaccaggaagggagaaugaauuacuauuggacccugguugagcccggagauaagauuacguucgaagcuacaggcaaccugguggugccucgguacgccuuugcgauggagcgcaacgccgggagcggaaucauuaucucugacacccccauccaugacugcaauacaaccugucaaaccccuaaaggcgcuauuaacacaucccuccccuuccagaauauccacccgauuacgaucggcaagugcccuaaguaugucaaaagcaccaagcugagacuugccacagggcugcggaacgugcccucuauucagagccgcggacucuuuggcgcuaucgccggguucaucgaaggaggcuggaccgggaugguugauggaugguacggcuaucaucaccagaaugagcaaggcuccggguacgccgcugaccugaaaucuacacagaacgcgauugaugagaucaccaauaaggugaacagcgucauugagaaaaugaauacgcaguuuacagccgugggaaaggaguucaaccaccuugaaaagagaaucgagaaucugaacaaaaagguugacgauggcuuccucgacauuuggaccuacaaugcugaacugcuggugcuccuggagaacgagcggacccuugauuaucaugacuccaaugucaaaaaccuguacgaaaaggugcgcaaccagcucaaaaauaacgccaaggagaucgggaauggauguuuugaguucuaucacaagugcgauaacacauguauggaaagcgucaaaaauggcaccuacgacuauccuaaguacucugaagaggccaaacugaacagagaggaaaucgauggggugaaacuugaguccacacggauuuaucaaauccuggcuauuuacagcacgguugccucuucccucgugcuggucgugagccugggcgcgaucuccuuuuggaugugcucuaauggaagccuccagugccgcauuuguaucuga

SEQ ID NO: 199141 - RNA, 1701 nt, Artificial Sequence
  derived and/or modified CDS sequence (opt5) from hemagglutinin__InfluenzaA__AEM92328
augaaggccauccuggugguccuccuguacaccuucgcuacagccaacgcggacacgcuuugcauuggcuaucacgcuaauaacagcaccgauacaguugacaccgugcuggagaagaaugugacagucacccauuccgugaaccuccuggaagauaagcacaaugggaaacuuuguaagcugagaggaguugcuccccuccaucugggcaaaugcaacaucgccggguggauucugggaaauccugagugugaaucucucagcacagccuccucuuggagcuacaucguggagaccuccucuagcgacaacggcacgugcuauccgggggauuuuauugacuacgaagaacugcgggagcagcuuuccagcgucucuuccuucgaacgcuuugagaucuuccccaagaccagcucuuggccuaaucacgauuccaacaagggagugacagccgcuuguccccaugccggcgcgaaaucuuuuuauaagaaucugaucuggcucguuaaaaagggcaacagcuacccuaaacugaauauuuccuauaucaacgacaaggggaaggaagugcuuguccuguggggcauucaccaccccagcaccacagccgaucaacagucccucuaccagaaugcugacgccuacguguucgugggaaccucuagauauagcaaaaaguuuaaaccugagaucgcuauucggccgaagguccgcgaucaggaggggagaaugaacuacuauuggacgcugguugaacccggagacaaaaucacauucgaggccaccggcaaccugguggugccucgguacgcguuugccauggaacgcaaugcuggguccggaauuaucaucagcgauacacccguccaugacugcaacaccaccugucaaacaccuaagggcgccauuaauacgucucuccccuuccagaacauccacccgauuaccaucggcaaaugcccuaaguaugugaaguccacaaaacugagacuugcuaccgggcugcggaauguucccagcauucagucucgcggacucuuuggcgccaucgccggguucaucgagggaggcuggacagggaugguggacggaugguacggcuaucaucaccagaacgaacaaggcagcggguacgcugcggaucugaaguccacccagaaugccauugacaaaaucacgaacaaggucaauucugugauugagaaaaugaacacacaguuuaccgcuguuggaaaggaguucaaucaccuugaaaagagaaucgagaaccugaauaaaaagguggaugacggcuuccucgauauuuggaccuacaacgccgaacugcugguccuccuggagaaugaacggacacuugacuaucaugauagcaacgugaaaaaccuguacgagaagguccgcaaucagcucaaaaacaaugccaaggagaucgggaacggauguuuugaguucuaucacaagugcgacaauaccuguauggaguccgugaaaaacggcacauacgauuauccuaaguacagcgaagaggcuaaacugaauagagaagagaucgacgggguuaaacuugagucuacgcggauuuaucaaauccuggccauuuacuccaccguggcgagcucucucguccuggugguuucccugggcgcuaucagcuuuuggaugugcuccaacggaucucuccagugccgcauuuguaucuga

SEQ ID NO: 199142 - RNA, 1701 nt, Artificial Sequence
  derived and/or modified CDS sequence (opt5) from hemagglutinin__InfluenzaA__AEM92348
augaaggccauccuggugguccuccuguacaccuucgcuacagccaacgcggacacgcuuugcauuggcuaucacgcuaauaacagcaccgauacaguugacaccgugcuggagaaaaaugugacagucacccauuccguggaucuccuggaagacaagcacaacgggaaacuuuguaagcugagaggaguugcuccccuccaucugggcaaaugcaauaucgccggguggauucugggaaacccugagugugaaucucucagcacagccuccucuuggagcuacaucguggagaccuccucuagcgauaauggcacgugcuauccgggggacuuuauugauuacgaagaacugcgggagcagcuuuccagcgucucuuccuucgaacgcuuugagaucuuccccaagaccagcucuuggccuaaccacgacuccaauaagggagugacagccgcuuguccccaugccggcgaaaagagcuuuuauaagaaccugaucuggcucguuaaaaagggcaauucuuacccuaaacugaacaaguccuauauuaaugauaaggggaaagaggugcuuguccuguggggaauccaccaccccagcaccuccgcggaccaacagucucucuaccagaacgccgaugcuuacguguucgugggcacaagcagauauuccaagaaauuuaagccugagauugccauccggccgaaaguccgcgaccaggaagggagaaugaauuacuauuggacccugguugagcccggagauaagauuacguucgaagcuacaggcaaccugguggugccucgguacgccuuugcgauggagcgcaacgccgggagcggaaucauuaucucugacacccccauccaugacugcaauacaaccugucaaaccccuaaaggcgcuauuaacacaucccuccccuuccagaauauccacccgauuacgaucggcaagugcccuaaguaugucaaaagcaccaagcugagacuugccacagggcugcggaacgugcccucuauucagagccgcggacucuuuggcgcuaucgccggguucaucgaaggaggcuggaccgggaugguugauggaugguacggcuaucaucaccagaaugagcaaggcuccggguacgccgcugaccugaaaucuacacagaacgcgauugaugagaucaccaauaaggugaacagcgucauugagaaaaugaauacgcaguuuacagccgugggaaaggaguucaaccaccuugaaaagagaaucgagaaucugaacaaaaagguugacgauggcuuccucgacauuuggaccuacaaugcugaacugcuggugcuccuggagaacgagcggacccuugauuaucaugacuccaaugucaaaaaccuguacgaaaaggugaaaagccagcucaagaacaaugccaaggagaucgggaacggauguuuugaguucuaucacaaaugcgauaauacauguauggaaucugucaagaacggcaccuacgacuauccuaaauacuccgaagaggccaagcugaaucgcgagaaaaucgauggggugaaacuugaaagcacaagaauuuaucaaauccuggcuauuuacucuacgguugccuccagccucgugcuggucgugucccugggcgcgaucucuuuuuggaugugcagcaacggaucccuccagugccggauuuguaucuga

SEQ ID NO: 199143 - RNA, 1701 nt, Artificial Sequence
  derived and/or modified CDS sequence (opt5) from hemagglutinin__InfluenzaA__AEM92358
augaaggccauccuggugguccuccuguacaccuucgcuacagccaacgcggacacgcuuugcauuggcuaucacgcuaauaacagcaccgauacaguugacaccgugcuggagaagaaugugacagucacccauuccgugaaccuccuggaagauaagcacaaugggaaacuuuguaagcugagaggaguugcuccccuccaucugggcaaaugcaacaucgccggguggauucugggaaauccugagugugaaucucucagcacagccuccucuuggagcuacaucguggagaccuccucuagcgacaacggcacgugcuauccgggggauuuuauuaauuacgaagaacugcgggagcagcuuuccagcgucucuuccuucgaacgcuuugagaucuuccccaagaccagcucuuggccuaaccacgacuccaauaagggagugacagccgcuuguccccaugccggcgcgaaaucuuuuuauaagaaccugaucuggcucguuaaagaaggcaauagcuacccuaagcuguccaaaagcuauauuaacgauaaggggaaggaggugcuuguccuguggggaauccaccaccccuccaccacaaccgaccaacagucucucuaccagaaugccgaugcuuacguguucgugggcacgagcagauauuccaaaaaguuuaaaccugagauugccauccggccgaagaugcgcgaccaggaagggagaaugaacuacuauuggacacuggucgagcccggagauaaaauuaccuucgaagcuacaggcaaccugguugugccucgguacgccuuugcgauggagcgcaaugccgggagcggaaucauuaucucugacacccccgugcaugauugcaacaccacaugucaaacgccuaagggcgcuaucaauaccucccuccccuuccagaacauucacccgaucacaauuggcaaaugcccuaaguaugucaagagcaccaaacugagacuugccacagggcugcggaaugugcccucuauccagagccgcggacucuuuggcgcuauugccggguucaucgaaggaggcuggaccgggaugguugacggaugguacggcuaucaucaccagaacgagcaaggcuccggguacgccgcugaccugaagucuacgcagaaugcgaucgauaaaauuacaaacaaggugaauagcgucaucgagaaaaugaacacccaguuuaccgccgugggaaaggaguucaaucaccuugagaagagaauugaaaaccugaauaaaaagguugacgauggcuuccucgacaucuggacauacaacgcugagcugcuggugcuccuggaaaaugagcggacccuugauuaucaugacuccaacgucaaaaaccuguacgagaaggugcgcaaucagcucaaaaacaaugccaaggaaauugggaacggauguuuugaguucuaucacaagugcgauaauacauguauggaaagcgucaaaaacggcacguacgacuauccuaaguacucugaggaagccaaacugaauagagaggagaucgauggggugaaacuugaauccacccggaucuaucaaauucuggcuaucuacagcacaguugccucuucccucgugcuggucgugagccugggcgcgauuuccuuuuggaugugcucuaacggaagccuccagugccgcaucuguauuuga

SEQ ID NO: 199144 - RNA, 1701 nt, Artificial Sequence
  derived and/or modified CDS sequence (opt5) from hemagglutinin__InfluenzaA__AEM92368
augaaggccauccuggugguccuccuguacaccuucgcuacagccaacgcggacacgcuuugcauuggcuaucacgcuaauaacagcaccgauacaguugacaccgugcuggagaaaaaugugacagucacccauuccgugaaccuccuggaagauaagcacaaugggaaacuuuguaagcugagaggaguugcuccccuccaucugggcaaaugcaacaucgccggguggauucugggaaauccugagugugaaucucucagcacagccuccucuuggagcuacaucguggagaccuccucuagcgacaacggcacgugcuauccgggggauuuuauugacuacgaagaacugcgggagcagcuuuccagcgucucuuccuucgaacgcuuugagaucuuccccaagaccagcucuuggccuaaucacgauuccaacaagggagugacagccgcuuguccccaugccggcgcgaaaucuuuuuauaagaaucugaucuggcucguuaaaaagggcaacagcuacccuaaacugaauaaguccuauauuaacgacaaggggaaagaagugcuuguccuguggggaauccaccaccccagcaccacagccgaucaacagucccucuaccagaaugcugacgccuacguguucgugggcaccucuagauauagcaagaaauuuaagccugagauugcuauccggccgaaaguccgcgaucaggaggggagaaugaacuacuauuggacgcugguugaacccggagacaagauuacauucgaggccaccggcaaccugguggugccucgguacgcguuugccauggaacgcaaugcuggguccggaaucauuaucagcgauacacccguccaugacugcaacaccaccugucaaacaccuaaaggcgccaucaauacgucucuccccuuccagaacauucacccgaucaccauuggcaagugcccuaaguaugugaaauccacaaagcugagacuugcuaccgggcugcggaauguucccagcauccagucucgcggacucuuuggcgccauugccggguucaucgagggaggcuggacagggaugguggacggaugguacggcuaucaucaccagaacgaacaaggcagcggguacgcugcggaucugaaauccacccagaaugccaucgacaagauuacgaacaaagucaauucugugaucgagaagaugaacacacaguuuaccgcuguuggaaaggaguucaaucaccuugagaaaagaauugagaaccugaauaagaaaguggaugacggcuuccucgauaucuggaccuacaacgccgaacugcugguccuccuggagaaugaacggacacuugacuaucaugauagcaacgugaagaaccuguacgagaaaguccgcaaucagcucaagaacaaugccaaggagauugggaacggauguuuugaguucuaucacaaaugcgacaauaccuguauggaauccgugaagaacggcacauacgauuauccuaaauacagcgaagaggcuaagcugaauagagaagagaucgacgggguuaaacuugagucuacgcggaucuaucaaauucuggccaucuacuccaccguggcgagcucucucguccuggugguuucccugggcgcuauuagcuuuuggaugugcuccaacggaucucuccagugccgcaucuguauuuga

SEQ ID NO: 199145 - RNA, 1701 nt, Artificial Sequence
  derived and/or modified CDS sequence (opt5) from hemagglutinin__InfluenzaA__AEM92378
augaaggccauccuggugguccuccuguacaccuucgcuacagccaacgcggacacgcuuugcauuggcuaucacgcuaauaacagcaccgauacaguugacaccgugcuggagaaaaaugugacagucacccauuccgugaaccuccuggaagauaagcacaaugggaaacuuuguaagcugagaggaguugcuccccuccaucugggcaaaugcaacaucgccggguggauucugggaaauccugagugugaaucucucagcacagccuccucuuggagcuacaucguggagaccuccucuagcgacaacggcacgugcuauccgggggauuuuauugacuacgaagaacugcgggagcagcuuaauuccgucagcucuuucgaacgcuuugagaucuuccccaagaccuccagcuggccuaaccacgauucuaauaagggagugacagccgcuuguccccaugccggcgcgaaauccuuuuauaagaaccugaucuggcucguuaaaaagggcaauagcuacccuaaacugaacaagucuuauauuaaugacaaggggaaagaagugcuuguccuguggggaauccaccaccccuccaccacagccgaucaacagagccucuaccagaacgcugacgccuacguguucgugggcaccuccagauauucuaagaaauuuaagccugagauugcuauccggccgaaaguccgcgaucaggaggggagaaugaacuacuauuggacgcugguugaacccggagacaagauuacauucgaggccaccggcaaucugguggugccucgguacgcguuugccauggaacgcaacgcugggagcggaaucauuaucuccgauacacccguccaugacugcaauaccaccugucaaacaccuaaaggcgccaucaacacgagccuccccuuccagaauauucacccgaucaccauuggcaagugcccuaaguaugugaaaucuacaaagcugagacuugcuaccgggcugcggaacguucccuccauccagagccgcggacucuuuggcgccauugccggguucaucgagggaggcuggacagggaugguggacggaugguacggcuaucaucaccagaaugaacaaggcucuggguacgcugcggaucugaaaagcacccagaacgccaucgacaagauuacgaauaaagucaacuccgugaucgagaagaugaauacacaguuuaccgcuguuggaaaggaguucaaccaccuugagaaaagaauugagaaucugaacaagaaaguggaugacggcuuccucgauaucuggaccuacaaugccgaacugcugguccuccuggagaacgaacggacacuugacuaucaugauucuaacgugaagaaucuguacgagaaaguccgcaaccagcucaagaauaacgccaaggagauugggaauggauguuuugaguucuaucacaaaugcgacaacaccuguauggaaagcgugaagaauggcacauacgauuauccuaaauacuccgaagaggcuaagcugaacagagaagagaucgacgggguuaaacuugagagcacgcggaucuaucaaauucuggccaucuacucuaccguggcguccagccucguccuggugguuucucugggcgcuauuuccuuuuggaugugcagcaauggaucccuccagugccgcaucuguauuuga

SEQ ID NO: 199146 - RNA, 1701 nt, Artificial Sequence
  derived and/or modified CDS sequence (opt5) from hemagglutinin__InfluenzaA__AEM92407
augaaggccauccuggugguccuccuguacaccuucgcuacagccaacgcggacacgcuuugcauuggcuaucacgcuaauaacagcaccgauacaguugacaccgugcuggagaagaaugugacagucacccauuccgugaaccuccuggaagauaagcacaaugggaaacuuuguaagcugagaggaguugcuccccuccaucugggcaaaugcaacaucgccggguggauucugggaaauccugagugugaaucucucagcacagccaacuccuggucuuacaucguggagaccagcuccucugacaauggcacgugcuauccgggggauuuuauugacuacgaagaacugcgggagcagcuuagcuccgucagcucuuucgaacgcuuugagaucuuccccaagaccaacuccuggccuaaucacgauagcaacaagggagugacagccgcuuguccccaugccggcgcgaaaucuuuuuauaagaaucugaucuggcucguuaaaaagggcaacuccuacccuaaacugagcaagucuuauauuaaugacaaggggaaagaagugcuuguccuguggggaauccaccaccccuccaccagcacagaucaacagucccucuaccagaacgccgacgcuuacguguucgugggcaccucuagauauagcaagaaauuuaagccugagauugccauccggccgaaaguccgcaaccaggaggggagaaugaauuacuauuggacgcugguugaacccggagauaagauuacauucgaggcuaccggcaaccugguggugccucgguacgccuuuacaaucgaacgcaaugcgggguccggaauuaucaucagcgacacccccauucaugauugcaacaccacaugucaaacgccuaaaggcgccaucaauaccucucuccccuuccagaacauucacccgaucacaauuggcaagugcccuaaguaugucaaauccaccaagcugagacuugcuacagggcugcggaaugugcccagcauccagucucgcggacucuuuggcgccaucgcuggguucauugagggaggcuggaccgggaugguugacggaugguacggcuaucaucaccagaacgaacaaggcagcggguacgccgccgaccugaaauccacgcagaaugcuaucgaugagauuacaaacaaggucaauucugugaucgagaaaaugaacacccaguuuaccgcggugggaaaggaguucaaucaccuugagaagagaauugaaaaccugaauaaaaagguugacgauggcuuccucgacaucuggacacauaacgccgagcugcuggugcuccuggaaaacgagcggacccuugauuaccacgacagcaaugucaaaaaccuguaugagaaggugcgcucccagcucaaaaauaacgcuaaggaaaucgggaauggauguuuugaguucuaccauaagugcgauaacacauguauggaaagcgucaaaaauggcacguaugacuacccuaaguauucugaggaagccaaacugaacagagaggagauugauggggugaaacuugaauccacccggaucuaccaaauucuggccaucuauagcacaguugcuucuucccucgugcuggucgugagccugggcgccauuuccuuuuggaugugcucuaugggaagccuccagugccgcaucuguauuuga

SEQ ID NO: 199147 - RNA, 1701 nt, Artificial Sequence
  derived and/or modified CDS sequence (opt5) from hemagglutinin__InfluenzaA__AEM92417
augaaggccauccuggugguccuccuguacaccuucgcuacagccaacgcggacacgcuuugcauuggcuaucacgcuaauaacagcaccgauacaguugacaccgugcuggagaaaaaugugacagucacccauuccgugaacauccucgaagauaagcacaaugggaaacuguguaaacuuagaggaguugcuccccugcaucucggcaaaugcaacauugccggguggauccugggaaauccugagugugaaucucugagcacagccuccucuuggagcuacauuguggagaccuccucuagcgacaacggcacgugcuauccgggggauuuuaucgacuacgaagaacuccgggagcagcuguccagcgucucuuccuucgaacgcuuugagaucuuccccaaggccagcucuuggccuaaucacgauuccaacaagggagugaccgcugccuguccccaugcgggcgccaagagcuuuuauaagaaucuuauuuggcugguuaaaaaggaaaacucuuacccuaaacucuccaagagcuauaucaaugacaagggcaaagaggugcugguccuuugggggauucaccaccccuccacaucugcugaucaacagagccuguaccagaacgccgacgcuuacguguucgugggauccagcagauauucuaagaaauuuaagccugagaucgccauucggccgaaaguccgcgaucaggaaggcagaaugaauuacuauuggacccucguugagcccggggacaagaucacauucgaagcgaccggaaaccugguggugccucgguacgccuuugcuauggagcgcaacgccggcuccgggauuaucaucagcgauacgcccguccaugacugcaauacaaccugucaaacaccuaaaggagcuauuaacaccucucugcccuuccagaauauccacccgauuaccaucggcaagugcccuaaguaugugaaaagcacaaagcucagacuggccacgggccuucggaacguucccuccauucagucucgcgggcuguuuggagccaucgcuggcuucaucgaagggggauggaccggcaugguggacgggugguacggauaucaucaccagaaugagcaaggcagcggcuacgcggccgaucucaaauccacacagaacgcuauugacgagaucaccaauaaggucaacagcgugauugagaaaaugaauacacaguuuaccgccguugggaaggaguucaaccaccuggaaaagagaaucgagaaucuuaacaaaaagguggaugacggauuccuggauauuuggacguacaaugccgaacuccugguccugcucgagaacgagcggacacuggacuaucaugauucuaaugugaaaaaccuuuacgaaaagguccgcucccagcugaaaaacaaugcuaaggagaucggcaacggguguuuugaguucuaucacaagugcgacaauaccuguauggaaagcgugaaaaacggaaccuacgauuauccuaaguacucugaagaggccaaacucaauagagaggaaaucgacggcguuaagcuggaguccacacggauuuaucaaauccuugcgauuuacagcaccguggcuuccucucugguccucgugguuagccugggggccaucuccuuuuggaugugcucuaacggcagccugcagugccgcauuuguaucuga

SEQ ID NO: 199148 - RNA, 1701 nt, Artificial Sequence
  derived and/or modified CDS sequence (opt5) from hemagglutinin__InfluenzaA__AEM92428
augaaggccauccuggugguccuccuguacaccuucgcuacagccaacgcggacacgcuuugcauuggcuaucacgcuaauaacagcaccgauacaguugacaccgugcuggagaagaaugugacagucacccauuccgugaaccuccuggaagauaagcacaaugggaaacuuuguaagcugagaggaguugcuccccuccaucugggcaaaugcaacaucgccggguggauucugggaaauccugagugugaaucucucagcacagccuccucuuggagcuacaucguggagaccuccucuagcgacaacggcacgugcuauccgggggauuuuauugacuacgaagaacugcgggagcagcuuuccagcgucucuuccuucgaacgcuuugagaucuuccccaagaccagcucuuggccuaaucacgauuccaacaagggagugacagccgcuuguccccaugccggcgcgaaaucuuuuuauaagaaucugaucuggcucguuaaaaagggcaacagcuacccuaaacuguccaagagcuauauuaaugacaaggggaaagaagugcuuguccuguggggaauccaccaccccuccaccucugccgaucaacagagccucuaccagaacgcugacgccuacguguucgugggcacauccagauauagcaagaaauuuaagccugagauugcuauccggccgaaaguccgcgaucaggaggggagaaugaauuacuauuggacccugguugaacccggagacaagauuacguucgaggccacaggcaaccugguggugccucgguacgcguuugccauggaacgcaacgcugggucuggaaucauuaucuccgauacccccguccaugacugcaauacaaccugucaaaccccuaaaggcgccaucaacacaagccuccccuuccagaauauucacccgaucacgauuggcaagugcccuaaguaugugaaaucuaccaagcugagacuugcuacagggcugcggaacguucccagcauccagucccgcggacucuuuggcgccauugccggguucaucgagggaggcuggaccgggaugguggacggaugguacggcuaucaucaccagaaugaacaaggcucuggguacgcugcggaucugaaaagcacacagaacgccaucgacgagauuaccaauaaggucaacuccgugaucgagaaaaugaauacgcaguuuacagcuguuggaaaggaguucaaccaccuugagaagagaauugaaaaucugaacaaaaagguggaugacggcuuccucgauaucuggaccuacaaugccgagcugcugguccuccuggaaaacgagcggacccuugacuaucaugauagcaaugugaaaaaccuguacgagaagguccgcucucagcucaaaaacaaugccaaggaaauugggaacggauguuuugaguucuaucacaagugcgacaauauguguauggaauccgugaaaaacggcacauacgauuauccuaaguacagcgaggaagcuaaacugaauagagaggagaucgacgggguuaaacuugaaucuacccggaucuaucaaauucuggccaucuacuccacaguggcgagcucccucguccuggugguuucucugggcgcuauuagcuuuuggaugugcuccaacggaucucuccagugccgcaucuguauuuga

SEQ ID NO: 199149 - RNA, 1701 nt, Artificial Sequence
  derived and/or modified CDS sequence (opt5) from hemagglutinin__InfluenzaA__AEM92438
augaaggccauccuggugguccuccuguacaccuucgcuacagccaacgcggacacgcuuugcauuggcuaucacgcuaauaacagcaccgauacaguugacaccgugcuggagaaaaaugugacagucacccauuccgugaaccuccuggaagauaagcacaaugggaaacuuuguaagcugagaggaguugcuccccuccaucugggcaaaugcaacaucgccggguggauucugggaaauccugagugugaaucucucagcacagccuccucuuggagcuacaucguggagaccuccucuagcgacaacggcacgugcuauccgggggauuuuauugacuacgaagaacugcgggagcagcuuuccagcgucucuuccuucgaacgcuuugagaucuuccccaagaccagcucuuggccuaaucacgauuccaacaagggagugacagccgcuuguccccaugccggcgcgaaaggcuuuuauaagaaucugaucuggcucguuaaaaaggggaacagcuacccuaaacugucuaaguccuauauuaaugacaagggaaaagaagugcuuguccuguggggcauccaccaccccagcaccacagccgaucaacagucccucuaccagaacgcugacaccuacguguucguggggacgucuagauauagcaagaaauuuaagccugagauugccauccggccgaaaguccgcgaucaggagggaagaaugaauuacuauuggacacugguugaacccggcgacaagauuaccuucgaggcuacagggaaccugguggugccucgguacgccuuugcgauggaacgcaacgccggauccggcaucauuaucagcgauacccccguccaugacugcaauaccacaugucaaacgccuaaaggcgcuaucaacaccucucuccccuuccagaauauucacccgaucacaauugggaagugcccuaaguaugugaaauccaccaagcugagacuugccacaggacugcggaacguucccagcauccagucucgcggccucuuuggggcuauugccggauucaucgagggcggguggaccggaaugguggacggcugguacggcuaucaucaccagaaugaacaagggagcggauacgccgcugaucugaaauccacgcagaacgcgaucgacaagauuacaaauaaagucaacucugugaucgagaagaugaauacccaguuuaccgccguuggcaaggaguucaaccaccuugagaaaagaauugagaaucugaacaagaaaguggaugacggguuccucgauaucuggacauacaaugcugaacugcugguccuccuggagaacgaacggacccuugacuaucaugauagcaaugugaagaaccuguacgagaaaauucgcaaccagcucaagaauaacgccaaggagaucggaaauggcuguuuugaguucuaucacaaaugcgacaacacauguauggaauccgucaagaaugggacguacgauuauccuaaauacagcgaagaggccaagcugaacagagaagagaucgacggcgugaaacuugagucuacccggauuuaucaaauccuggcuauuuacuccacaguugccagcucucucgugcuggucgugucccugggagcgaucagcuuuuggaugugcuccaauggcucucuccagugccgcauuuguaucuga

SEQ ID NO: 199150 - RNA, 1701 nt, Artificial Sequence; identical to SEQ ID NO: 198881
  derived and/or modified CDS sequence (opt5) from hemagglutinin__InfluenzaA__AEM92448

SEQ ID NO: 199151 - RNA, 1701 nt, Artificial Sequence; identical to SEQ ID NO: 198881
  derived and/or modified CDS sequence (opt5) from hemagglutinin__InfluenzaA__AEM92458

SEQ ID NO: 199152 - RNA, 1701 nt, Artificial Sequence
  derived and/or modified CDS sequence (opt5) from hemagglutinin__InfluenzaA__AEM92468
augaaggccauccuggugguccuccuguacaccuucgcuacagccaacgcggacacgcuuugcauuggcuaucacgcuaauaacagcaccgauacaguugacaccgugcuggagaaaaaugugacagucacccauuccgugaaccuccuggaagauaagcacaaugggaaacuuuguaagcugagaggaguugcuccccuccaucugggcaaaugcaacaucgccggguggauucugggaaauccugagugugaaucucucagcacagccuccucuuggagcuacaucguggagaccuccucuagcgacaacggcacgugcuauccgggggauuuuauuaauuacgaagaacugcgggagcagcuuuccagcgucucuuccuucgaacgcuuugagaucuuccccaagaccagcucuuggccuaaccacgacuccaauaagggagugacagccgcuuguccccaugccggcgcgaaaucuuuuuauaagaaccugaucuggcucguuaaaaagggcaauagcuacccuaaacuguccaagagcuauauuaacgauaaggggaaagaagugcuuguccuguggggaauccaccaccccuccaccucugccgaccaacagagccucuaccagaaugcugaugccuacguguucgugggcacauccaaguauagcaaagaguuuaagccugagauugcugucagaccgaaaguucgggaccaggaagggcgcaugaacuacuauuggacccugguggagcccggagauaagaucacguucgaagccacaggcaaccugcucgugccuagauacgcguuugccauggagcggaaugcugggucuggaauuaucauuuccgacacccccguccaugauugcaacacaaucugucaaaccccuaaaggcgccaucaauaccagccugcccuuccagaacauucacccgaucacaauuggcaagugcccuaaguaugugaaaucuacgaaacuucgccuggcuaccgggcucagaaauguucccagcauccagucccggggacuguuuggcgccauugccggguucaucgaaggaggcuggacagggaugguggacggaugguacggcuaucaucaccagaacgagcaaggcucuggguacgcugcggaccuuaagagcacccagaaugccaucgauaagauuacaaacaaagucaauuccgugaucgagaagaugaacacccaguuuacggcuguuggaaaggaguucaaucaccuggagaaacgcauugaaaaccucaauaagaaaguggacgauggcuuccuggacaucuggacauacaacgccgagcugcucguccugcuugaaaaugagagaacccuggauuaucaugacagcaacgugaagaaccucuacgagaaaguccggucucagcugaagaauaacgccaaggaaauugggaauggauguuuugaguucuaucacaaaugcgauaacaccuguauggaauccgugaagaauggcacauacgacuauccuaaauacagcgaggaagcuaaacuuaaccgcgaggagaucgaugggguuaagcuggaaucuaccagaaucuaucaaauucucgccaucuacuccacaguggcgagcucccugguccuggugguuucucucggcgcuauuagcuuuuggaugugcuccaauggaucucugcagugccggaucuguauuuga

SEQ ID NO: 199153 - RNA, 1701 nt, Artificial Sequence
  derived and/or modified CDS sequence (opt5) from hemagglutinin__InfluenzaA__AEM92478
augaaggccauccuggugguccuccuguacaccuucgcuacagccaacgcggacacgcuuugcauuggcuaucacgcuaauaacagcaccgauacaguugacaccgugcuggagaaaaaugugacagucacccauuccgugaaccuccuggaagauaagcacaaugggaaacuuuguaagcugagaggaguugcuccccuccaucugggcaaaugcaacaucgccggguggauucugggaaauccugagugugaaucucucagcacagccuccucuuggagcuacaucguggagaccuccucuagcgacaacggcacgugcuauccgggggauuuuauuaauuacgaagaacugcgggagcagcuuuccagcgucucuuccuucgaacgcuuugagaucuuccccaagaccagcucuuggccuaaccacgacuccaauaagggagugacagccgcuuguccccaugccggcgcgaaaucuuuuuauaagaaccugaucuggcucguuaaaaagggcaauagcuacccuaaacuguccaagagcuauauuaacgauaaggggaaagaagugcuuguccuguggggaauccaccaccccuccaccucugccgaccaacagagccucuaccagaaugcugaugccuacguguucgugggcacauccaaguauagcaaaaaguuuaaaccugagauugcugucagaccgaagguucgggaccaggaggggcgcaugaacuacuauuggacccugguggaacccggagauaaaaucacguucgaggccacaggcaaccugcucgugccuagauacgcguuugccauggaacggaaugcugggucuggaauuaucauuuccgacacccccguccaugauugcaacacaaucugucaaaccccuaagggcgccaucaauaccagccugcccuuccagaacauucacccgaucacaauuggcaagugcccuaaauaugugaagucuacgaaacuucgccuggcuaccgggcucagaaauguucccagcauccagucccggggacuguuuggcgccauugccggguucaucgagggaggcuggacagggaugguggacggaugguacggcuaucaucaccagaacgaacaaggcucuggguacgcugcggaccuuaagagcacccagaaugccaucgauaaaauuacaaacaaggucaauuccgugaucgagaagaugaacacccaguuuacggcuguuggaaaagaguucaaucaccuggaaaagcgcauugagaaccucaauaaaaagguggacgauggcuuccuggacaucuggacauacaacgccgaacugcucguccugcuugagaaugaaagaacccuggauuaucaugacagcaacgugaaaaaccucuacgagaagguccggucucagcugaagaauaacgccaaagagauugggaauggauguuuugaguucuaucacaagugcgauaacaccuguauggaguccgugaaaaauggcacauacgacuauccuaaguacagcgaagaggcuaaacuuaaccgcgaagagaucgaugggguuaagcuggagucuaccagaaucuaucaaauucucgccaucuacuccacaguggcgagcucccugguccuggugguuucucucggcgcuauuagcuuuuggaugugcuccaauggaucucugcagugccggaucuguauuuga

SEQ ID NO: 199154 - RNA, 1701 nt, Artificial Sequence
  derived and/or modified CDS sequence (opt5) from hemagglutinin__InfluenzaA__AEM92498
augaaggccauccuggugguccuccuguacaccuucgcuacagccaacgcggacacgcuuugcauuggcuaucacgcuaauaacagcaccgauacaguugacaccgugcuggagaaaaaugugacagucacccauuccgugaaccuccuggaagauaagcacaaugggaaacuuuguaagcugagaggaguugcuccccuccaucugggcaaaugcaacaucgccggguggauucugggaaauccugagugugaaucucucagcacagccaacuccuggucuuacaucguggagaccagcuccucugacaauggcacgugcuauccgggggauuuuauugacuacgaagaacugcgggagcagcuuagcuccgucagcucuuucgaacgcuuugagaucuuccccaagaccaacuccuggccuaaucacgauagcaacaagggagugacagccgcuuguccccaugccggcgcgaaaucuuuuuauaagaaucugaucuggcucguuaaaaagggcaacuccuacccuaaacugagcaagucuuauauuaaugacaaggggaaagaagugcuuguccuguggggaauccaccaccccuccaccagcgccgaucaacagucccucuaccagaacgcugacgccuacguguucgugggcacaucuagauauagcaagaaauuuaagccugagauugcuauccggccgaaaguccgcgaucaggaggggagaaugaacuacuauuggacccugguugaacccggagacaagauuacguucgaggccacaggcaaucugguggugccucgguacgcguuugccauggaacgcaacgcuggguccggaaucauuaucagcgauacccccgcccaugacugcaauacaaccugucaaaccccuaaaggcgcuaucaacacaucucuccccuuccagaauauucacccgaucacgauuggcaagugcccuaaguaugucaaauccaccaagcugagacuugccacagggcugcggaacgugcccagcauccagucucgcggacucuuuggcgccauugcuggguucaucgagggaggcuggaccgggaugguugacggaugguacggcuaucaucaccagaaugaacaaggcagcggguacgcggccgaucugaaauccacacagaacgcuaucgacaagauuaccaauaaagugaacucugucaucgagaagaugaauacgcaguuuacagccgugggaaaggaguucaaccaccuugagaaaagaauugagaaucugaacaagaaaguugaugacggcuuccucgauaucuggaccuacaaugccgaacugcuggugcuccuggagaacgaacggacccuugacuaucaugauagcaacgucaagaaucuguacgagaaagugcgcucccagcucaagaacaaugcuaaggagauugggaacggauguuuugaguucuaucacaaaugcgacaauacauguauggaaagcgucaagaacggcaccuacgauuauccuaaauacucugaagaggccaagcugaauagagaagagaucgacggggugaaacuugaguccacacggaucuaucaaauucuggcgaucuacagcacgguugcuucuucccucgugcuggucgugagccugggcgccauuuccuuuuggaugugcucuaacggaagccuccagugccgcaucuguauuuga

SEQ ID NO: 199155 - RNA, 1701 nt, Artificial Sequence
  derived and/or modified CDS sequence (opt5) from hemagglutinin__InfluenzaA__AEM92518
augaaggccauccuggugguccuccuguacaccuucgcuacagccaacgcggacacgcuuugcauuggcuaucacgcuaauaacagcaccgauacaguugacaccgugcuggagaaaaaugugacagucacccauuccgugaaccuccuggaagauaagcacaaugggaaacuuuguaagcugagaggaguugcuccccuccaucugggcaaaugcaacaucgccggguggauucugggaaauccugagugugaaucucucagcacagccuccucuuggagcuacaucguggagaccuccucuagcgacaacggcacgugcuauccgggggauuuuauugacuacgaggagcugcgggagcagcuuuccagcgucucuuccuucgaacgcuuugagaucuuccccaagaccagcucuuggccuaaucacgauuccaacaagggagugacaaccgccuguccccaugcuggcgccaagagcuuuuauaaaaaucugaucuggcucguuaaaaagggcaacucuuacccuaaacuguccaagagcuauauuaaugacaagagaaaagaagugcuuguccugugggggauccaccaucccccuacauccgcggaucaacagucucucuaccagaacgccgacgcuuacguguucgugggaaccagccgguauuccaagaaauuuaagccggagauugccauccgccccaaagucagagaucaggagggccggaugaauuacuauuggacgcugguugaaccuggggacaagauuacauucgaggcuaccggaaaccugguggugccccgcuacgccuuugcgauggaaagaaacgccggcagcgggaucauuaucucugauacaccuguccacgacugcaaugcuaccugucaaacccccaaaggagccaucaacacaucccucccguuccagaauauucacccuaucacgauuggcaagugccccaaguaugugaaaagcaccaagcugcggcuugcuacaggccugcgcaacguuccuucuauccagagcagagggcucuuuggagccauugccggcuucaucgaagggggauggaccggcaugguggacgggugguacggauaucaucaccagaaugaacaaggcuccggcuacgcugcggaucugaaaucuacacagaacgccaucgacgagauuaccaauaaggucaacagcgugaucgagaaaaugaauacgcaguuuacagcuguugggaaggaguucaaccaccuugaaaagcggauugaaaaucugaacaaaaagguggaugacggauuccucgauaucuggaccuacaaugccgagcugcugguccuccuggaaaacgagcgcacccuugacuaucaugauuccaaagugaagaaucuguacgagaaagucagaagccagcucaagaacaacgccaaggaaauuggcaauggguguuuugaguucuaucacaaaugcgacaacacauguauggaaucugugaagaauggaaccuacgauuaucccaaauacuccgaggaagcuaagcugaaccgggaggagaucgacggcguuaaacuugaaagcacacgcaucuaucaaauucuggccaucuacucuacgguggcguccagccucguccuggugguuucccugggggcuauuucuuuuuggaugugcagcaauggcucccuccagugcagaaucuguauuuga

SEQ ID NO: 199156 - RNA, 1701 nt, Artificial Sequence
  derived and/or modified CDS sequence (opt5) from hemagglutinin__InfluenzaA__AEM92528
augaaggccauccuggugguccuccuguacaccuucgcuacagccaacgcggacacgcuuugcauuggcuaucacgcuaauaacagcaccgauacaguugacaccgugcuggagaaaaaugugacagucacccauuccgugaaccuccuggaagauaagcacaaugggaaacuuuguaagcugagaggaguugcuccccuccaucugggcaaaugcaacaucgccggguggauucugggaaauccugagugugaaucucucagcacagccuccucuuggagcuacaucguggagaccuccucuagcgacaacggcacgugcuauccgggggauuuuauugacuacgaggaacugcgggagcagcuuuccagcgucucuuccuucgaacgcuuugagaucuuccccaagaccagcucuuggccuaaucacgauuccaacaagggagugacagccgcuuguccccaugccggcgcgaaaucuuuuuauaagaaucugaucuggcucguuaaaaagggcaacagcuacccuaaacugaauaaguccuauauuaacgacaaggggaaagaagugcuuguccuguggggaauccaccaccccagcaccuccgccgaucaacagucucucuaccagaaugcugacgccuacguguucgugggcacaagcagauauuccaagaaauuuaagccugagauugcuauccggccgaaaguccgcgaucaggaggggagaaugaacuacuauuggacccugguugaacccggagacaagauuacguucgaggccacaggcaaccugguggugccucgguacgcguuugccauggaacgcaaugcugggagcggaaucauuaucucugauacccccguccaugacugcaacacaaccugucaaaccccuaaaggcgccaucaauacaucccuccccuuccagaacauucacccgaucacgauuggcaagugcccuaaguaugugaaaagcaccaagcugagacuugcuacagggcugcggaauguucccucuauccagagccgcggacucuuuggcgccauugccggguucaucgagggaggcuggaccgggaugguggacggaugguacggcuaucaucaccagaacgaacaaggcuccggguacgcugcggaucugaaaucuacacagaaugccaucgacaagauuaccaacaaagucaauagcgugaucgagaagaugaacacgcaguuuacagcuguuggaaaggccuucaaucaccuugagaaaagaauugaaaaccugaauaagaaaguggaugacggcuuccucgauaucuggaccuacaacgccgagcugcugguccuccuggaaaaugagcggacccuugacuaucaugauuccaacgugaagaaccuguacgaaaaaguccgcaaucagcucaagaacaaugcuaaggagauugggaacggauguuuugaguucuaucacaaaugcgacaauacauguauggaaagcgugaagaacggcaccuacgauuauccuaaauacucugaggaagccaagcugaauagagaggaaaucgacgggguuaaacuugaguccacacggaucuaucaaauucuggcgaucuacagcacgguggcuucuucccucguccuggugguuagccugggcgccauuuccuuuuggaugugcucuaacggaagccuccagugccgcaucuguauuuga

SEQ ID NO: 199157 - RNA, 1701 nt, Artificial Sequence
  derived and/or modified CDS sequence (opt5) from hemagglutinin__InfluenzaA__AEM92548
augaaggccauccuggugguccuccuguacaccuucgcuacagccacggcggacacccuuugcauuggcuaucacgcuaacaauagcacagauaccguugacacagugcuggagaaaaacgugaccgucacacauuccgugaaucuccuggaagauaagcacaacgggaaacuuuguaagcugagaggaguugcuccccuccaucugggcaaaugcaauaucgccggguggauucugggaaacccugagugugaaucucucagcaccgccuccucuuggagcuacaucguggagacguccucuagcgacaaugggaccugcuauccgggcgauuuuauuaacuacgaagaacugcgggagcagcuuuccagcgucucuuccuucgaacgcuuugagaucuuccccaagacaagcucuuggccuaaucacgacuccaacaagggagugaccgccgcuuguccccaugccggcgcgaaaucuuuuuauaagaaucugaucuggcucguuaaaaagggcaacagcuacccuaaacuguccaagagcuauauuaaugauaaggggaaagaagugcuuguccuguggggaauccaccaccccuccacaucugccgaccaacagagccucuaccagaacgcugaugccuacguguucgugggcaccuccagauauagcaagaaauuuaagccugagauugcuauccggccgaaaguccgcgaccaggaggggagaaugaauuacuauuggacgcugguugaacccggagauaagauuacauucgaggccaccggcaaccugguggugccucgguacgcguuugccauggaacgcaacgcugggucuggaaucauuaucuccgacacacccguccaugauugcaauaccaccugucaaacaccuaaaggcgccaucaacacgagccuccccuuccagaauauucacccgaucaccauuggcaagugcccuaaguaugugaaaucuacaaagcugagacuugcuaccgggcugcggaacguucccagcauccagucccgcggacucuuuggcgccauugccggguucaucgagggaggcuggacagggaugguggacggaugguacggcuaucaucaccagaaugaacaaggcucuggguacgcugcggaccugaaaagcacccagaacgccaucgauaagauuacgaauaaagucaacuccgugaucgagaagaugaauacacaguuuaccgcuguuggaaaggaguucaaccaccuugagaaaagaauugagaaucugaacaagaaaguggacgauggcuuccucgacaucuggaccuacaaugccgaacugcugguccuccuggagaacgaacggacacuugauuaucaugacagcaaugugaagaaccuguacgagaaaguccgcaaccagcucaagaauaacgccaaggagauugggaauggauguuuugaguucuaucacaaaugcgauaacaccuguauggaaucugugaagaauggcacauacgacuauccuaaauacuccgaagaggcuaagcugaacagagaagagaucgaugggguuaaacuugagagcacgcggaucuaucaaauucuggccaucuacucuaccguggcguccagccucguccuggugguuucccugggcgcuauuucuuuuuggaugugcagcaauggaucccuccagugccgcaucuguauuuga

SEQ ID NO: 199158 - RNA, 1701 nt, Artificial Sequence
  derived and/or modified CDS sequence (opt5) from hemagglutinin__InfluenzaA__AEM92558
augaaggccauccuggugguccuccuguacaccuucgcuacagccaacgcggacacgcuuugcauuggcuaucacgcuaauaacagcaccgauacaguugacaccgugcuggagaaaaaugugacagucacccauuccgugaaccuccuggaagauaagcacaaugggaaacuuuguaagcugagaggaguugcuccccuccaucugggcaaaugcucuaucgccggguggauucugggaaacccugagugugaaagccucuccacagccucuagcugguccuacaucguggagaccucuagcuccgacaauggcacgugcuauccgggggauuuuauuaacuacgaagaacugcgggagcagcuuagcucugucuccagcuucgaacgcuuugagaucuuccccaagaccucuuccuggccuaaucacgacagcaacaagggagugacagccgcuuguccccaugccggcgcgaaaucuuuuuauaagaaucugaucuggcucguuaaaaagggcaacuccuacccuaaacugagcaaguccuauauuaaugauaaggggaaagaagugcuuguccuguggggaauccaccaccccucuaccacagccgaccaacagagccucuaccagaacgcugaugccuacguguucgugggcaccuccagauauagcaagaaauuuaagccugagauugcuauccggccgaaaguccgcgaccaggaggggagaaugaauuacuauuggacgcugguugaacccggagauaagauuacauucgaggccaccggcaaccugguggugccucgguacgcguuugccauggaacgcaacgcugggucuggaaucauuaucuccgacacacccguccaugauugcaauaccaccugucaaacaccuaaaggcgccaucaacacgagccuccccuuccagaauauucacccgaucaccauuggcaagugcccuaaguaugugaaaucuacaaagcugagacuugcuaccgggcugcggaacguucccagcauccagucccgcggacucuuuggcgccauugccggguucaucgagggaggcuggacagggaugguggacggaugguacggcuaucaucaccagaaugaacaaggcucuggguacgcugcggaccugaaaagcacccagaacgccaucgauaagauuacgaauaaagucaacuccgugaucgagaagaugaauacacaguuuaccgcuguuggaaaggaguucaaccaccuugagaaaagaauugagaaucugaacaagaaaguggacgauggcuuccucgacaucuggaccuacaaugccgaacugcugguccuccuggagaacgaacggacacuugauuaucaugacagcaaugugaagaaccuguacgagaaaguccgcaaccagcucaagaauaacgccaaggagauugggaauggauguuuugaguucuaucacaaaugcgauaacaccuguauggaaucugugaagaauggcacauacgacuauccuaaauacuccgaagaggcuaagcugaacagagaagagaucgaugggguuaaacuugagagcacgcggaucuaucaaauucuggccaucuacucuaccguggcguccagccucguccuggugguuucccugggcgcuauuucuuuuuggaugugcagcaauggaucccuccagugccgcaucuguauuuga

SEQ ID NO: 199159 - RNA, 1701 nt, Artificial Sequence; identical to SEQ ID NO: 199158
  derived and/or modified CDS sequence (opt5) from hemagglutinin__InfluenzaA__AEM92568

SEQ ID NO: 199160 - RNA, 1701 nt, Artificial Sequence
  derived and/or modified CDS sequence (opt5) from hemagglutinin__InfluenzaA__AEM92578
augaaggccauccuggugguccuccuguacaccuucgcuacagccaacgcggacacgcuuugcauuggcuaucacgcuaauaacagcaccgauacaguugacaccgugcuggagaaaaaugugacagucacccauuccgugaaccuccuggaagauaagcacaaugggaaacuuuguaagcugagaggaguugcuccccuccaucugggcaaaugcaacaucgccggguggauucugggaaauccugagugugaaucucucagcacagccuccucuuggagcuacaucguggagaccuccauuucugacaacggcacgugcuauccgggggauuuuaucaauuacgaagaacugcgggagcagcuuagcuccgucagcucuuucgaacgcuuugagaucuuccccaagaccuccagcuggccuaaccacgacucuaauaagggagugacagccgcuuguccccaugccggcgcgaaauccuuuuauaagaaccugauuuggcucguuaaaaagggcaauagcuacccuaaacugucuaaguccuauaucaacgauaaggggaaagaagugcuuguccuguggggcauucaccaccccagcaccuccgccgaccaacagucucucuaccagaaugcugaugccuacguguucgugggaacaagcagauauuccaagaaauuuaagccugagaucgcuauucggccgaaaguccgcgaccaggaggggagaaugaacuacuauuggacccugguugaacccggagauaagaucacguucgaggccacaggcaaccugguggugccucgguacgcguuugccauggaacgcaaugcugggagcggaauuaucaucucugacacccccguccaugauugcaacacaaccugucaaaccccuaaaggcgccauuaauacaucccuccccuuccagaacauccacccgauuacgaucggcaagugcccuaaguaugugaaaagcaccaagcugagacuugcuacagggcugcggaauguucccucuauucagagccgcggacucuuuggcgccaucgccggguucaucgagggaggcuggaccgggaugguggacggaugguacggcuaucaucaccagaacgaacaaggcuccggguacgcugcggaccugaaaucuacacagaaugccauugauaagaucaccaacaaagucaauagcgugauugagaagaugaacacgcaguuuacagcuguuggaaaggaguucaaucaccuugagaaaagaaucgagaaccugaauaagaaaguggacgauggcuuccucgacauuuggaccuacaacgccgaacugcugguccuccuggagaaugaacggacccuugauuaucaugacuccaacgugaagaaccuguacgagaaaguccgcaaucagcucaagaacaaugccaaggagaucgggaacggauguuuugaguucuaucacaaaugcgauaauacauguauggaaagcgugaagaacggcaccuacgacuauccuaaauacucugaagaggcuaagcugaauagagaagagaucgaugggguuaaacuugaguccacacggauuuaucaaauccuggccauuuacagcacgguggcgucuucccucguccuggugguuagccugggcgcuaucuccuuuuggaugugcucuaacggaagccuccagugccgcauuuguaucuga

SEQ ID NO: 199161 - RNA, 1701 nt, Artificial Sequence
  derived and/or modified CDS sequence (opt5) from hemagglutinin__InfluenzaA__AEM92608
augaaggccauccuggugguccuccuguacaccuucgcuacagccaacgcggacacgcuuugcauuggcuaucacgcuaauaacagcaccgauacaguugacaccgugcuggagaaaaaugugacagucacccauuccgugaaccuccuggaagauaagcacaaugggaaacuuuguaagcugagaggaguugcuccccuccaucugggcaaaugcaacaucgccggguggauucugggaaauccugagugugaaucucucagcacagccuccucuuggagcuacaucguggagaccuccucuagcgacaacggcacgugcuauccgggggauuuuauugacuacgaagaacugcgggagcagcuuuccagcgucucuuccuucgaacgcuuugagaucuuccccaagaccagcucuuggccuaaucacgauuccaacaagggagugacagccgcuuguccccaugccggcgcgaaaucuuuuuauaagaaucugaucuggcucguuaaaaagggcaacagcuacccuaaacuguccaagagcuauauuaaugacaaggggaaagaagugcuuguccuguggggaauccaccaccccuccaccacagccgaucaacagucucucuaccagaacgcugacgccuacguguucgugggcaccagcagauauuccaagaaauuuaagccugagauugcuauccggccgaaaguccgcgaucaggaggggagaaugaauuacuauuggacgcugguugaacccggagacaagauuacauucgaggccaccggcaaccugguggugccucgguacgcguuugccauggaacgcaacgcugggagcggaaucauuaucucugauacacccguccaugacugcaauaccaccugucaaacaccuaaaggcgccaucaacacgucccuccccuuccagaauauucacccgaucaccauuggcaagugcccuaaguaugugaaaagcacaaagcugagacuugcuaccgggcugcggaacguucccucuauccagagccgcggacucuuuggcgccauugccggguucaucgagggaggcuggacagggaugguggacggaugguacggcuaucaucaccagaaugaacaaggcuccggguacgcugcggaucugaaaucuacccagaacgccaucgacaagauuacgaauaaagucaacagcgugaucgagaagaugaauacacaguuuaccgcuguuggaaaggaguucaaccaccuugagaaaagaauugagaaucugaacaagaaaguggaugacggcuuccucgauaucuggaccuacaaugccgaacugcugguccuccuggagaacgaacggacacuugacuaucaugauuccaaugugaagaaccuguacgagaaaguccgcaaccagcucaagaauaacgccaaggagauugggaauggauguuuugaguucuaucacaaaugcgacaacaccuguauggaaagcgugaagaauggcacauacgauuauccuaaauacucugaagaggcuaagcugaacagagaagagaucgacgggguuaaacuugaguccacgcggaucuaucaaauucuggccaucuacagcaccguggcgucuucccucguccuggugguuagccugggcgcuauuuccuuuuggaugugcucuaauggaagccuccagugccgcaucuguauuuga

SEQ ID NO: 199162 - RNA, 1701 nt, Artificial Sequence
  derived and/or modified CDS sequence (opt5) from hemagglutinin__InfluenzaA__AEM92618
augaaggccauccuggugguccuccuguacaccuucgcuacagccaacgcggacacgcuuugcauuggcuaucacgcuaauaacagcaccgauacaguugacaccgugcuggagaaaaaugugacagucacccauuccgugaaccuccuggaagauaagcacaaugggaaacuuuguaagcugagaggaguugcuccccuccaucugggcaaaugcaacaucgccggguggauucugggaaauccugagugugaaucucucagcacagccaacuccuggucuuacaucguggagaccagcuccucugacaauggcacgugcuauccgggggauuuuauugacuacgaagaacugcgggagcagcuuagcuccgucagcucuuucgaacgcuuugagaucuuccccaagaccaacuccuggccuaaucacgauagcaacaagggagugacagccgcuuguccccaugccggcgcgaaaucuuuuuauaagaaucugaucuggcucguuaaaaccggcaacuccuacccuaagcugagcaaaucuuauauuaaugacaaggggaaggaagugcuuguccuguggggaauccaccaccccuccacaagcgccgaucaacagucccucuaccagaacgcugacgccuacguguucgugggcaccucuagauauagccggaaauuuaagccugagauugcuauccgcccgaaagucagagaucaggaggggcggaugaacuacuauuggacgcugguugaacccggagacaagauuacauucgaggccaccggcaaucugguggugccucgcuacgcguuugccauggaaagaaacgcuggguccggaaucauuaucagcgauacacccgcccaugacugcaauaccaccugucaaacaccuaaaggcgcuaucaacacgucucuccccuuccagaauauucacccgaucaccauuggcaagugcccuaaauaugucaaguccacaaagcugcggcuugccaccgggcugcgcaacgugcccagcauccagucuagaggacucuuuggcgccauugcuggguucaucgagggaggcuggacagggaugguugacggaugguacggcuaucaucaccagaaugaacaaggcagcggguacgcggccgaucugaaauccacccagaacgcuaucgacaagauuacgaauaaagugaacucugucaucgagaagaugaauacacaguuuaccgccgugggaaaagaguucaaccaccuugaaaagcggauugagaaucugaacaagaaaguugaugacggcuuccucgauaucuggaccuacaaugccgaacugcuggugcuccuggagaacgaacgcacacuugacuaucaugauagcaacgucaagaaucuguacgagaaagugagaucccagcucaagaacaaugcuaaagagauugggaacggauguuuugaguucuaucacaagugcgacaauaccuguauggagagcgucaagaacggcacauacgauuauccuaaauacucugaagaggccaagcugaaucgggaagagaucgacggggugaaacuugaguccacgcgcaucuaucaaauucuggcgaucuacagcaccguugcuucuucccucgugcuggucgugagccugggcgccauuuccuuuuggaugugcucuaacggaagccuccagugcagaaucuguauuuga

SEQ ID NO: 199163 - RNA, 1701 nt, Artificial Sequence
  derived and/or modified CDS sequence (opt5) from hemagglutinin__InfluenzaA__AEM92638
augaaggccauccuggugguccuccuguacaccuucgcuacagccaacgcggacacgcuuugcauuggcuaucacgcuaauaacagcaccgauacaguugacaccgugcuggagaaaaaugugacagucacccauuccgugaacauccucgaagauaagcacaaugggaaacuguguaaacuuagaggaguugcuccccugcaucucggcaaaugcaacauugccggguggauccugggaaauccugagugugaaucucugagcacagccuccucuuggagcuacauuguggagaccuccucuagcgacaacggcacgugcuauccgggggauuuuaucgacuacgaagaacuccgggagcagcuguccagcgucucuuccuucgaacgcuuugagaucuuccccaagaccagcucuuggccuaaucacgauacaaacaagggagugaccgccgcuuguccccaugccggcgcgaaauccuuuuauaagaaucuuauuuggcugguuaaaaagggcaacagcuacccuaaacucucuaaguccuauaucaaugacaaggggaaagaagugcugguccuuuggggcauucaccaccccagcacauccgccgaucaacagucucuguaccagaacgcugacgccuacguguucgugggaagcuccagauauagcaagaaauuuaagccugagaucgcuauucggccgaaaguccgcgaucaggaggggagaaugaauuacuauuggacccucguugaacccggagacaagaucacguucgaggccacaggcaaccugguggugccucgguacgcguuugccauggaaaagaacgcugggucuggaauuaucaucuccgauacccccguccaugacugcaauacaaccugucaaaccccuaagggcgccauuaacacaagccugcccuuccagaauauccacccgauuacgaucggcaagugcccuaaauaugugaagucuaccaaacuccgccuggcuacagggcuuagaaacguucccagcauucagucccggggacuguuuggcgccaucgccggguucaucgagggaggcuggaccgggaugguggacggaugguacggcuaucaucaccagaaugaacaaggcucuggguacgcugcggaucucaagagcacacagaacgccauugacgagaucaccaauaaagucaacuccgugauugagaagaugaauacgcaguuuacagcuguuggaaaggaguucaaccaccuggagaaacgcaucgaaaaucuuaacaagaaaguggaugacggcuuccuggauauuuggaccuacaaugccgagcuccugguccugcucgaaaacgagagaacccuggacuaucaugauagcaaugugaagaaccuuuacgagaaaguccggucucagcugaagaacaaugccaaggaaguggggaacggauguuuugaguucuaucacaaaugcgacaauacauguauggaauccguuaagaacggcaccuacgauuauccuaaauacagcgaggaagcuaagcucaaucgcgaggagaucgacggggugaaacuggaaucuacaagaaucuaucaaauucuugccaucuacuccacggcggcuagcucccugguccucgugguuucucugggcgccauuagcuuuuggaugugcuccaacggaucucugcagugccggaucuguauuuga

SEQ ID NO: 199164 - RNA, 1701 nt, Artificial Sequence
  derived and/or modified CDS sequence (opt5) from hemagglutinin__InfluenzaA__AEM92648
augaaggccauccuggugguccuccuguacaccuucgcuacagccaacgcggacacgcuuugcauuggcuaucacgcuaauaacagcaccgauacaguugacaccgugcuggagaaaaaugugacagucacccauuccgugaacauccucgaagauaagcacaaugggaaacuguguaaacuuagaggaguugcuccccugcaucucggcaaaugcaacauugccggguggauccugggaaauccugagugugaaucucugagcacagccuccucuuggagcuacauuguggagaccuccucuagcgacaacggcacgugcuauccgggggauuuuaucgacuacgaagaacuccgggagcagcuguccagcgucucuuccuucgaacgcuuugagaucuuccccaagaccagcucuuggccuaaucacgauacaaacaagggagugaccgccgcuuguccccaugccggcgcgaaauccuuuuauaagaaucuuauuuggcugguuaaagaaggcaacagcuacccuaagcucucuaaauccuauaucaaugacaaggggaaggaggugcugguccuuuggggcauucaccaccccagcacauccgccgaucaacagucucuguaccagaacgcugacgccuacguguucgugggaagcuccagauauagcaaaaaguuuaaaccugagaucgcuauucggccgaagguccgcgaucaggaagggagaaugaauuacuauuggacccucguugagcccggagacaaaaucacguucgaagccacaggcaaccugguggugccucgguacgcguuugccauggagaagaacgcugggucuggaauuaucaucuccgauacccccguccaugacugcaauacaaccugucaaaccccuaaaggcgccauuaacacaagccugcccuuccagaauauccacccgauuacgaucggcaagugcccuaaguaugugaaaucuaccaagcuccgccuggcuacagggcuuagaaacguucccagcauucagucccggggacuguuuggcgccaucgccggguucaucgaaggaggcuggaccgggaugguggacggaugguacggcuaucaucaccagaaugagcaaggcucuggguacgcugcggaucucaaaagcacacagaacgccauugacgagaucaccaauaaggucaacuccgugauugaaaagaugaauacgcaguuuacagcuguuggaaaggaguucaaccaccuggaaaagcgcaucgagaaucuuaacaaaaagguggaugacggcuuccuggauauuuggaccuacaaugccgaacuccugguccugcucgagaacgagagaacccuggacuaucaugauagcaaugugaaaaaccuuuacgaaaagguccggucucagcugaaaaacaaugccaaggagguggggaacggauguuuugaguucuaucacaagugcgacaauacauguauggaguccguuaaaaacggcaccuacgauuauccuaaguacagcgaagaggcuaaacucaaucgcgaggaaaucgacggggugaagcuggagucuacaagaaucuaucaaauucuugccaucuacuccacggcggcuagcucccugguccucgugguuucucugggcgccauuagcuuuuggaugugcuccaacggaucucugcagugccggaucuguauuuga

SEQ ID NO: 199165 - RNA, 1701 nt, Artificial Sequence; identical to SEQ ID NO: 197605
  derived and/or modified CDS sequence (opt5) from hemagglutinin__InfluenzaA__AEM98407

SEQ ID NO: 199166 - RNA, 1701 nt, Artificial Sequence; identical to SEQ ID NO: 197605
  derived and/or modified CDS sequence (opt5) from hemagglutinin__InfluenzaA__AEM98418

SEQ ID NO: 199167 - RNA, 1701 nt, Artificial Sequence; identical to SEQ ID NO: 197605
  derived and/or modified CDS sequence (opt5) from hemagglutinin__InfluenzaA__AEM98429

SEQ ID NO: 199168 - RNA, 1701 nt, Artificial Sequence
  derived and/or modified CDS sequence (opt5) from hemagglutinin__InfluenzaA__AEN55398
augaaggccauccuggugguccuccuguacaccuucgcuacagccaacgcggacacgcuuugcauuggcuaucacgcuaauaacagcaccgauacaguugacaccgugcuggagaaaaaugugacagucacccauuccgugaaccuccuggaagauaagcacaaugggaaacuuuguaagcugagaggaguugcuccccuccaucugggcaaaugcaacaucgccggguggauucugggaaauccugagugugaaucucucagcacagccuccucuuggagcuacaucguggagaccuccucuagcgacaacggcacgugcuauccggggaauuuuauugauuacgaagaacugcgggagcagcuuuccagcgucucuuccuucgaacgcuuugagaucuuccccaagaccagcucuuggccugaccacgauuccaacaagggagugacagccgcuuguccccaugccggcgcgaaaucuuuuuauaagaaucugaucuggcucguuaaaaagggcaacagcuacccuaaacuguccaagagcuauauuaaugacaaggggaaagaagugcuuguccuguggggaauccaccaccccuccaccucugccgaucaacagagccucuaccagaacgcugacgccuacguguucgugggcacauccagauauagcaagaaauuuaagccugagauugcuauccggccgaaaguccgcgaucaggaggggagaaugaauuacuauuggacccugguugaacccggagacaagauuacguucgaggccacaggcaaccugguggcgccucgguacgccuuugcuauggaacgcaacgccgggucuggaaucauuaucuccgauacccccgugcaugacugcaauacaaccugucaaaccccuaaaggcgcuaucaacacaagccuccccuuccagaauauucacccgaucacgauuggcaagugcccuaaguaugucaaaucuaccaagcugagacuugugacagggcugcggaacguucccagcauccagucccgcggacucuuuggcgccauugccggguucaucgagggaggcuggaccgggaugguggacggaugguacggcuaucaucaccagaaugaacaaggcucuggguacgcugcggaucugaaaagcacacagaacgccaucgacaagauuaccaauaaagucaacuccgugaucgagaagaugaauacgcaguuuacagcuguuggaaaggaguucaaccaccuugagaaaagaauugagaaucugaacaagaaaguggaugacggcuuccucgauaucuggaccuacaaugccgaacugcugguccuccuggagaacgaacggacccuugacuaucaugauagcaaugugaagaaccuguacgagaaaguccgcucucagcucaagaacaaugccaaggagauugggaacggauguuuugaguucuaucacaaaugcgacaauacauguauggaauccgugaagaacggcaccuacgauuauccuaaauacagcgaagaggcuaagcugaauagagaagagaucgacgggguuaaacuugagucuacacggaucuaucaaauucuggccaucuacuccacgguggcgagcucccucguccuggugguuucucugggcgcuauuagcuuuuggaugugcuccaacggaucucuccagugccgcaucuguauuuga

SEQ ID NO: 199169 - RNA, 1701 nt, Artificial Sequence; identical to SEQ ID NO: 198992
  derived and/or modified CDS sequence (opt5) from hemagglutinin__InfluenzaA__AEN55408

SEQ ID NO: 199170 - RNA, 1701 nt, Artificial Sequence; identical to SEQ ID NO: 198507
  derived and/or modified CDS sequence (opt5) from hemagglutinin__InfluenzaA__AEN55418

SEQ ID NO: 199171 - RNA, 1701 nt, Artificial Sequence; identical to SEQ ID NO: 197656
  derived and/or modified CDS sequence (opt5) from hemagglutinin__InfluenzaA__AEN55463

SEQ ID NO: 199172 - RNA, 1701 nt, Artificial Sequence
  derived and/or modified CDS sequence (opt5) from hemagglutinin__InfluenzaA__AEN55473
augaaggccauccuggugguccuccuguacaccuucgcuacagccaacgcggacacgcuuugcauuggcuaucacgcuaauaacagcaccgauacaguugacaccgugcuggagaaaaaugugacagucacccauuccgugaaccuccuggaagauaagcacaaugggaaacuuuguaagcugagaggaguugcuccccuccaucugggcaaaugcaacaucgccggguggauucugggaaauccugagugugaaucucucagcacagccuccucuuggagcuacaucguggagaccuccucuagcgacaacggcacgugcuauccgggggauuuuauugacuacgaagaacugcgggagcagcuuuccagcgucucuuccuucgaacgcuuugagaucuuccccaagaccagcucuuggccuaaucacgauuccaacaagggagugacagccgcuuguccccaugccggcgcgaaaucuuuuuauaagaaucugaucuggcucguuaaaaagggcaacagcuacccuaaacuguccaagagcuauauuaaugacaaggggaaagaagugcuuguccuguggggaauccaccaccccuccaccacaaccgaucaacagucucucuaccagacggccgacacauacguguucgugggcaccagcagauauuccaagaaauuuaagccugagauugcuauccggccgaaaguccgcgaucaggaggggagaaugaacuacuauuggacacugguugaacccggagacaagauuaccuucgaggccaccggcaaucugguggugccucgguacgcuuuugccauggaacgcaacgcggggagcggaaucauuaucucugauacacccguccaugacugcaacacgaccugucaaacaccuaaaggcgccaucaauaccucccuccccuuccagaacauucacccgaucacaauuggcaagugcccuaaguaugugaaaagcaccaagcugagacuugcuacggggcugcggaauguucccucuauccagagccgcggacucuuuggcgccauugcuggguucaucgagggaggcuggacagggaugguggacggaugguacggcuaucaucaccagaacgaacaaggcuccggguacgccgccgaucugaaaucuacccagaaugcuaucgacaagauuaccaacaaagucaauagcgugaucgagaagaugaacacacaguuuaccgcgguuggaaaggaguucaaucaccuugagaaaagaauugagaaccugaauaagaaaguggaugacggcuuccucgauaucuggacauacaacgccgaacugcugguccuccuggagaaugaacggacgcuugacuaucaugauuccaacgugaagaaucuguacgagaaaguccgcaaccagcucaagaccaacgcuaaggagauugggaauggauguuuugaguucuaucacaaaugcgacaacacauguauggaaagcgugaagaauggcaccuacgauuauccuaaauacucugaagaggccaagcugaacagagaagagaucgacgggguuaaacuugaguccacacggaucuaucaaauucuggccaucuacagcaccguggcuucuucccucguccuggugguuagccugggcgccauuuccuuuuggaugugcucuaauggaagccuccagugccgcaucuguauuuga

SEQ ID NO: 199173 - RNA, 1701 nt, Artificial Sequence; identical to SEQ ID NO: 198507
  derived and/or modified CDS sequence (opt5) from hemagglutinin__InfluenzaA__AEN55483

SEQ ID NO: 199174 - RNA, 1701 nt, Artificial Sequence; identical to SEQ ID NO: 199114
  derived and/or modified CDS sequence (opt5) from hemagglutinin__InfluenzaA__AEN55493

SEQ ID NO: 199175 - RNA, 1701 nt, Artificial Sequence; identical to SEQ ID NO: 198507
  derived and/or modified CDS sequence (opt5) from hemagglutinin__InfluenzaA__AEN55503

SEQ ID NO: 199176 - RNA, 1701 nt, Artificial Sequence
  derived and/or modified CDS sequence (opt5) from hemagglutinin__InfluenzaA__AEN55513
augaaggccauccuggugguccuccuguacaccuucgcuacagccaacgcggacacgcuuugcauuggcuaucacgcuaauaacagcaccgauacaguugacaccgugcuggagaaaaaugugacagucacccauuccgugaaccuccuggaagauaagcacaaugggaaacuuuguaagcugagaggaguugcuccccuccaucugggcaaaugcaacaucgccggguggauucugggaaauccugagugugaaucucucagcacagccuccucuuggagcuacaucguggagaccuccucuagcgacaacggcacgugcuauccgggggauuuuauugacuacgaagaacugcgggagcagcuuuccagcgucucuuccuucgaacgcuuugagaucuuccccaagaccagcucuuggccuaaucacgauuccaacaagggagugacagccgcuuguccccaugccggcgcgaaaucuuuuuauaagaaucugaucuggcucguuaaaaagggcaacagcuacccuaaacuguccaagagcuauauuaaugacaaggggaaagaagugcuuguccuguggggaauccaccaccccuccaccacagccgaucaacagaaccucuaccagaaugcugacaccuacguguucgugggcacgucuagauauagcaagaaauuuaagccugagauugccauccggccgaaaguccgcgaucaggaggggagaaugaacuacuauuggacacugguugaacccggagacaagauuaccuucgaggcuacaggcaaccugguggugccucgguacgccuuugcgauggaacgcaaugccggguccggaaucauuaucagcgauacccccguccaugacugcaacaccacaugucaaacgccuaaaggcgcuaucaauaccucucuccccuuccagaacauucacccgaucacaauuggcaagugcccuaaguaugugaaauccaccaagcugagacuugccacagggcugcggaauguucccagcauccagucucgcggacucuuuggcgcuauugccggguucaucgagggaggcuggaccgggaugguggacggaugguacggcuaucaucaccagaacgaacaaggcagcggguacgccgcugaucugaaauccacgcagaaugcgaucgacaagauuacaaacaaagucaauucugugaucgagaagaugaacacccaguuuaccgccguuggaaaggaguucaaucaccuugagaaaagaauugagaaccugaauaagaaaguggaugacggcuuccucgauaucuggacauacaacgcugaacugcugguccuccuggagaaugaacggacccuugacuaucaugauagcaacgugaagaaccuguacgagaaaguccgcaaucagcucaagaacaaugccaaggagauugggaacggauguuuugaguucuaucacaaaugcgacaauacauguauggaauccgugaagaacggcacguacgauuauccuaaauacagcgaagaggccaagcugaauagagaagagaucgacgggguuaaacuugagucuacccggaucuaucaaauucuggcuaucuacuccacaguggccagcucucucguccuggugguuucccugggcgcgauuagcuuuuggaugugcuccaacggaucucuccagugccgcaucuguauuuga

SEQ ID NO: 199177 - RNA, 1701 nt, Artificial Sequence; identical to SEQ ID NO: 198507
  derived and/or modified CDS sequence (opt5) from hemagglutinin__InfluenzaA__AEN55523

SEQ ID NO: 199178 - RNA, 1701 nt, Artificial Sequence; identical to SEQ ID NO: 197296
  derived and/or modified CDS sequence (opt5) from hemagglutinin__InfluenzaA__AEN68904

SEQ ID NO: 199179 - RNA, 1701 nt, Artificial Sequence; identical to SEQ ID NO: 194741
  derived and/or modified CDS sequence (opt5) from hemagglutinin__InfluenzaA__AEN68905

SEQ ID NO: 199180 - RNA, 1701 nt, Artificial Sequence; identical to SEQ ID NO: 194741
  derived and/or modified CDS sequence (opt5) from hemagglutinin__InfluenzaA__AEN68906

SEQ ID NO: 199181 - RNA, 1701 nt, Artificial Sequence; identical to SEQ ID NO: 195843
  derived and/or modified CDS sequence (opt5) from hemagglutinin__InfluenzaA__AEN68907

SEQ ID NO: 199182 - RNA, 1701 nt, Artificial Sequence; identical to SEQ ID NO: 194741
  derived and/or modified CDS sequence (opt5) from hemagglutinin__InfluenzaA__AEN68908

SEQ ID NO: 199183 - RNA, 1701 nt, Artificial Sequence
  derived and/or modified CDS sequence (opt5) from hemagglutinin__InfluenzaA__AEN68909
augaaggccauccuggugguccuccuguacaccuucgcuacagccaacgcggacacgcuuugcguuggcuaucacgcuaauaacagcaccgauacaguggacaccgugcuggagaagaaugucacagugacccauuccguuaaccuccuggaagauaagcacaaugggaaacuuuguaagcugagaggaguggcuccccuccaucugggcaaaugcaacauugccggguggauccugggaaauccugagugugaaucucucagcacagccuccucuuggagcuacauugucgagaccuccucuagcgacaacggcacgugcuauccgggggauuuuaucgacuacgaagaacugcgggagcagcuuuccagcgugucuuccuucgaacgcuuugagauuuuccccaagaccagcucuuggccuaaucacgauuccaacaagggaguuacagccgcuuguccccaugccggcgcgaaaucuuuuuauaagaaucugaucuggcucgugaaaaagggcaacagcuacccuaaacuguccaagagcuauaucaaugacaaggggaaagaaguccuugugcuguggggcauucaccaccccuccaccucugccgaucaacagagccucuaccagaacgcugacgccuacguguucgucggaacauccagauauagcaagaaauuuaagccugagaucgcuauucggccgaaaguucgcgaucaggaggggagaaugaauuacuauuggacccugguggaacccggagacaagaucacguucgaggccacaggcaaccugguggucccucgguacgcguuugccauggaacgcaacgcugggucuggaauuaucauuuccgauacccccgugcaugacugcaauacaaccugucaaaccccuaaaggcgccaucaacacaagccuccccuuccagaauauccacccgauuacgaucggcaagugcccuaaguauguuaaaucuaccaagcugagacuugcuacagggcugcggaacgugcccagcauucagucccgcggacucuuuggcgccaucgccggguucauugagggaggcuggaccgggauggucgacggaugguacggcuaucaucaccagaaugaacaaggcucuggguacgcugcggaucugaaaagcacacagaacgccaucgacgagaucaccaauaaggugaacuccguuauugagaaaaugaauacgcaguuuacagcugugggaaaggaguucaaccaccuugagaagagaaucgaaaaucugaacaaaaaggucgaugacggcuuccucgauauuuggaccuacaaugccgagcugcuggugcuccuggaaaacgagcggacccuugacuaucaugauagcaaugucaaaaaccuguacgagaaggugcgcucucagcucaaaaacaaugccaaggaaaucgggaacggauguuuugaguucuaucacaagugcgacaauacauguauggaauccguuaaaaacggcaccuacgauuauccuaaguacagcgaggaagcuaaacugaauagagaggagauugacggggugaaacuugaaucuacacggaucuaucaaauccuggccauuuacuccacggucgcgagcucccucgugcugguugugucucugggcgcuaucagcuuuuggaugugcuccaacggaucucuccagugccgcauuuguaucuga

SEQ ID NO: 199184 - RNA, 1701 nt, Artificial Sequence
  derived and/or modified CDS sequence (opt5) from hemagglutinin__InfluenzaA__AEN68910
augaaggccauccuggugguccuccuguacaccuucgcuacagccaacgcggacacgcuuugcguuggcuaucacgcuaauaacagcaccgauacaguggacaccgugcuggagaagaaugucacagugacccauuccguuaaccuccuggaagauaagcacaaugggaaacuuuguaagcugagaggaguggcuccccuccaucugggcaaaugcaacauugccggguggauccugggaaauccugagugugaaucucucagcacagccuccucuuggagcuacauugucgagaccuccucuagcgacaacggcacgugcuauccgggggauuuuaucgacuacgaagaacugcgggagcagcuuuccagcgugucuuccuucgaacgcuuugagauuuuccccaagaccagcucuuggccuaaucacgauuccaacaagggaguuacagccgcuuguccccaugccggcgcgaaaucuuuuuauaagaaucugaucuggcucgugaaaaagggcaacagcuacccuaaacuguccaagagcuauaucaaugacaaggggaaagaaguccuugugcuguggggcauucaccaccccuccaccucugccgaucaacagagccucuaccagaacgcugacgccuacguguucgucggaacauccagauauagcaagaaauuuaagccugagaucgcuauucggccgaaaguucgcgaucaggaggggagaaugaauuacuauuggacccugguggaacccggagacaagaucacguucgaggccacaggcaaccugguggucccucgguacgcguuugccauggaacgcaacgcugggucuggaauuaucauuuccgauacccccgugcaugacugcaauacaaccugucaaaccccuaaaggcgccaucaacacaagccuccccuuccagaauauccacccgauuacgaucggcaagugcccuaaguauguuaaagggaccaagcugagacuugcuacaggacugcggaacgugcccucuauucagagccgcggccucuuuggggccaucgccggauucauugagggcggguggaccggaauggucgacggcugguacggcuaucaucaccagaaugaacaaggguccggauacgcugcggaucugaaaucuacacagaacgccaucgacgagaucaccaauaaggugaacagcguuauugagaaaaugaauacgcaguuuacagcugugggcaaggaguucaaccaccuugagaagagaaucgaaaaucugaacaaaaaggucgaugacggguuccucgauauuuggaccuacaaugccgagcugcuggugcuccuggaaaacgagcggacccuugacuaucaugauuccaaugucaaaaaccuguacgagaaggugcgcagccagcucaaaaacaaugccaaggaaaucggaaacggcuguuuugaguucuaucacaagugcgacaauacauguauggaaucuguuaaaaacgggaccuacgauuauccuaaguacuccgaggaagcuaaacugaauagagaggagauugacggcgugaaacuugaaagcacacggaucuaucaaauccuggccauuuacucuacggucgcguccagccucgugcugguugugucccugggagcuaucucuuuuuggaugugcagcaacggcucccuccagugccgcauuuguaucuga

SEQ ID NO: 199185 - RNA, 1701 nt, Artificial Sequence; identical to SEQ ID NO: 196857
  derived and/or modified CDS sequence (opt5) from hemagglutinin__InfluenzaA__AEN68911

SEQ ID NO: 199186 - RNA, 1701 nt, Artificial Sequence; identical to SEQ ID NO: 194741
  derived and/or modified CDS sequence (opt5) from hemagglutinin__InfluenzaA__AEN68912

SEQ ID NO: 199187 - RNA, 1701 nt, Artificial Sequence; identical to SEQ ID NO: 194832
  derived and/or modified CDS sequence (opt5) from hemagglutinin__InfluenzaA__AEN68913

SEQ ID NO: 199188 - RNA, 1701 nt, Artificial Sequence; identical to SEQ ID NO: 197407
  derived and/or modified CDS sequence (opt5) from hemagglutinin__InfluenzaA__AEN68914

SEQ ID NO: 199189 - RNA, 1701 nt, Artificial Sequence; identical to SEQ ID NO: 194741
  derived and/or modified CDS sequence (opt5) from hemagglutinin__InfluenzaA__AEN68915

SEQ ID NO: 199190 - RNA, 1701 nt, Artificial Sequence; identical to SEQ ID NO: 194741
  derived and/or modified CDS sequence (opt5) from hemagglutinin__InfluenzaA__AEN68916

SEQ ID NO: 199191 - RNA, 1701 nt, Artificial Sequence
  derived and/or modified CDS sequence (opt5) from hemagglutinin__InfluenzaA__AEN68917
augaaggccauccugggcgugcuccuguacaccuucgcuacagccaacgcggacacgcuuugcauuggguaucacgcuaauaacagcaccgauacagucgacaccguucuggagaaaaaugugacagugacccauuccgucaaccuccuggaagauaagcacaauggaaaacuuuguaagcugagaggcguggcuccccuccaucuggggaaaugcaacaucgccggauggauucugggcaauccugagugugaaucucucagcacagccuccucuuggagcuacaucguugagaccuccucuagcgacaacgggacgugcuauccgggagauuuuauugacuacgaagaacugcgggagcagcuuuccagcgugucuuccuucgaacgcuuugagaucuuccccaagaccagcucuuggccuaaucacgauuccaacaagggcgucacagccgcuuguccccaugccggcgcgaaaucuuuuuauaagaaucugaucuggcucgugaaaaaggggaacagcuacccuaaacuguccaagagcuauauuaaugacaagggaaaagaaguucuugugcuguggggcauccaccaccccuccaccucugccgaucaacagagccucuaccagaacgcugacgccuacgucuucguggggacauccagauauagcaagaaauuuaagccugagauugcuauccggccgaaagugcgcgaucaggagggaagaaugaauuacuauuggacccuggucgaacccggcgacaagauuacguucgaggccacagggaaccugguugugccucgguacgcguuugccauggaacgcaacgcuggaucuggcaucauuaucuccgauacccccgugcaugacugcaauacaaccugucaaaccccuaaaggcgccaucaacacaagccuccccuuccagaauauucacccggucacgaucgggaagugcccuaaguaugugaaaucuaccaagcugagacuugcuacaggacugcggaacguucccagcauucagucccgcggccucuuuggggccaucgccggauucauugagggcggguggaccggaaugguggacggcugguacggcuaucaucaccagaaugaacaagggucuggauacgcugcggaucugaaaagcacacagaacgccaucgacaagaucaccaauaaagucaacuccgugauugagaagaugaauacgcaguuuacagcuguuggcaaggaguucaaccaccuugagaaaagaaucgagaaucugaacaagaaaguggaugacggguuccucgauauuuggaccuacaaugccgaacugcugguccuccuggagaacgaacggacccuugacuaucaugauagcaaugugaagaaccuguacgagaaaguccgcucucagcucaagaacaaugccaaggagaucggaaacggcuguuuugaguucuaucacaaaugcgacaauacauguauggaauccgugaagaacgggaccuacgauuauccuaaauacagcgaagaggcuaagcugaauagagaagagauugacggcguuaaacuugagucuacacggaucuaucaaauccuggccauuuacuccacgguggcgagcucccucguccuggugguuucucugggagcuaucagcuuuuggaugugcuccaacggcucucuccagugccgcauuuguaucuga

SEQ ID NO: 199192 - RNA, 1701 nt, Artificial Sequence
  derived and/or modified CDS sequence (opt5) from hemagglutinin__InfluenzaA__AEN68918
augaaggccauccuggugguccuccuguacaccuucgcuacagccaacgcggacacgcuuugcauuggcuaucacgcuaauaacagcaccgauacaguugacaccgugcuggagaagaaugugacagucacccauuccgugaaccuccuggaagauaagaauaacgggaaacuuuguaagcugagaggaguugcuccccuccaccugggcaaaugcaauaucgccggguggauucugggaaacccugagugugaaucucucagcacagccuccucuuggagcuacaucguggagaccuccucuagcgacaauggcacgugcuauccgggggauuuuauugacuacgaagaacugcgggagcagcuuuccagcgucucuuccuucgaacgcuuugagauguuccccaagaccagcucuuggccuaaccaugauuccaauaagggagugacagccgcuuguccccacgccggcgcgaaaucuuuuuauaagaaccugaucuggcucguuaaaaagggcaauagcuacccuaaacuguccaagagcuauaucaacgacaaggggaaagaagugcuuguccuguggggcauucaucaccccuccaccucugccgaucaacagagccucuaccagaaugcugacgccuacguguucgugggaacauccagauauagcaagaaauuuaagccugagaucgcuauucggccgaaaguccgcgaucaggaggggagaaugaacuacuauuggacccugguugaacccggagacaagaucacguucgaggccacaggcaaccugguggugccucgguacgcguuugccauggaacgcaaugcugggucuggaauuaucauuuccgauacccccguccacgacugcaacacaaccugucaaaccccuaaaggcgccaucaauacaagccuccccuuccagaacauccauccgauuacgaucggcaagugcccuaaguaugugaaaucuaccaagcugagacuugcuacagggcugcggaauguucccagcauucagucccgcggacucuuuggcgccaucgccggguucauugagggaggcuggaccgggaugguggacggaugguacggcuaucaccaucagaacgaacaaggcucuggguacgcugcggaucugaaaagcacacagaaugccaucgacgagaucaccaacaaggucaauuccgugauugagaaaaugaacacgcaguuuacagcuguuggaaaggaguucaaucaccuugagaagagaaucgaaaaccugaauaaaaagguggaugacggcuuccucgauauuuggaccuacaacgccgagcugcugguccuccuggaaaaugagcggacccuugacuaucacgauagcaacgugaaaaaccuguacgagaagguccgcucucagcucaaaaauaacgccaaggaaguggggaauggauguuuugaguucuaucauaagugcgacaacacauguauggaauccguuaaaaauggcaccuacgauuauccuaaguacagcgaggaagcuaaacugaacagagaggagaucgacggggugaaacuugaaucuacacggauuuaucaaauccuggccaucuacuccacggucgcgagcucccucgugcugguugugucucugggcgcuauuagcuuuuggaugugcuccaauggaucucuccagugccgcaucuguauuuga

SEQ ID NO: 199193 - RNA, 1701 nt, Artificial Sequence; identical to SEQ ID NO: 197656
  derived and/or modified CDS sequence (opt5) from hemagglutinin__InfluenzaA__AEN68919

SEQ ID NO: 199194 - RNA, 1701 nt, Artificial Sequence; identical to SEQ ID NO: 196905
  derived and/or modified CDS sequence (opt5) from hemagglutinin__InfluenzaA__AEN68920

SEQ ID NO: 199195 - RNA, 1701 nt, Artificial Sequence; identical to SEQ ID NO: 195905
  derived and/or modified CDS sequence (opt5) from hemagglutinin__InfluenzaA__AEN68921

SEQ ID NO: 199196 - RNA, 1701 nt, Artificial Sequence; identical to SEQ ID NO: 195901
  derived and/or modified CDS sequence (opt5) from hemagglutinin__InfluenzaA__AEN68922

SEQ ID NO: 199197 - RNA, 1701 nt, Artificial Sequence; identical to SEQ ID NO: 195905
  derived and/or modified CDS sequence (opt5) from hemagglutinin__InfluenzaA__AEN68923

SEQ ID NO: 199198 - RNA, 1701 nt, Artificial Sequence; identical to SEQ ID NO: 195905
  derived and/or modified CDS sequence (opt5) from hemagglutinin__InfluenzaA__AEN68924

SEQ ID NO: 199199 - RNA, 1701 nt, Artificial Sequence
  derived and/or modified CDS sequence (opt5) from hemagglutinin__InfluenzaA__AEN68925
augaaggccauccuggugguccuccuguacaccuucgcuacagccaacgcggacacgcuuugcauuggcuaucacgcuaauaacagcaccgauacaguugacaccgugcuggagaaaaaugugacagucacccauuccgugaaccuccuggaagauaagcacaaugggaaacuuuguaagcugagaggaguugcuccccuccaucugggcaaaugcaacaucgccggguggauucugggaaauccugagugugaaucucucagcacagccuccucuuggagcuacaucguggagaccuccucuagcgacaacggcacgugcuauccgggggauuuuauugacuacgaagaacugcgggagcagcuuuccagcgucucuuccuucgaacgcuuugagaucuuccccaagaccagcucuuggccuaaucacgauuccaacaagggagugacagccgcuuguccccaugccggcgcgaaaucuuuuuauaagaaucugaucuggcucguuaaaaagggcaacagcuacccuaaacuguccaagagcuauauuaaugacaaggggaaagaagugcuuguccuguggggaauccaccaccccuccaccucugccgaucaacagagccucuaccagaacgcugacgccuacguguucguggagacauccagauauagcaagaaauuuaagccugagauugcuauccggccgaaaguccgcgaucaggaaggcagaaugaauuacuauuggacccugguugagcccggggacaagauuacguucgaagccacaggaaaccugguggugccucgguacgcguuugccauggagcgcaacgcuggcucugggaucauuaucuccgauacccccguccaugacugcaauacaaccugucaaaccccuaaaggagccaucaacacaagccuccccuuccagaauauucacccgaucacgauuggcaagugcccuaaguaugugaaaucuaccaagcugagacuugcuacaggccugcggaacguucccagcauccagucccgcgggcucuuuggagccauugccggcuucaucgaagggggauggaccggcaugguggacgggugguacggauaucaucaccagaaugagcaaggcucuggcuacgcugcggaucugaaaagcacacagaacgccaucgacaagauuaccaauaaagucaacuccgugaucgagaagaugaauacgcaguuuacagcuguugggaaggaguucaaccaccuugagaaaagaauugaaaaucugaacaagaaaguggaugacggauuccucgauaucuggaccuacaaugccgagcugcugguccuccuggaaaacgagcggacccuugacuaucaugauagcaaugugaagaaccuguacgagaaaguccgcucucagcucaagaacaaugccaaggaaauuggcaacggguguuuugaguucuaucacaaaugcgacaauacauguauggaauccgugaagaacggaaccuacgauuauccuaaauacagcgaggaagcuaagcugaauagagaggagaucgacggcguuaaacuugaaucuacacggaucuaucaaauucuggccaucuacuccacgguggcgagcucccucguccuggugguuucucugggggcuauuagcuuuuggaugugcuccaacggcucucuccagugccgcaucuguauuuga

SEQ ID NO: 199200 - RNA, 1701 nt, Artificial Sequence
  derived and/or modified CDS sequence (opt5) from hemagglutinin__InfluenzaA__AEN68926
augaaggccauccuggugguccuccuguacaccuucgcuacagccaacgcggacacgcuuugcauuggcuaucacgcuaauaacagcaccgauacaguugacaccgugcuggagaaaaaugugacagucacccauuccgugaaccuccuggaagauaagcacaaugggaaacuuuguaagcugagaggaguugcuccccuccaucugggcaaaugcaacaucgccggguggauucugggaaauccugagugugaaucucucgccacagccagcuccuggucuuacaucguggagaccagcaacuccgacaauggcacgugcuauccgggggauuuuauugacuacgaagaacugcgggagcagcuuucuagcgucuccagcuucgaacgcuuugagaucuuccccaagaccucuuccuggccuaaccacgauagcaauaagggagugacagcugccuguccccaugcgggcgccaaaucuuuuuauaagaaccugaucuggcucguuaaaaagggcaauuccuacccuaaacugagcaagucuuauauuaacgacaaggggagagaagugcuuguccuguggggaauccaccaccccuccaccagcgcugaucaacagucccucuaccagaaugccgacacauacguguucgugggcaccucucgguauagcaaaaaguuuaaaccugagauugcuauccgcccgaaggucagagaucaggaggggcggaugaacuacuauuggacgcugguugaacccggagacaaaauuacauucgaggccaccggcaaccugguggugccucgcuacgcguuugccauggaaagaaaugcuggguccggaaucauuaucagcgauacacccguccaugacugcaacaccaccugucaaacaccuaagggcgccaucaauacgucucuccccuuccagaacauucacccgaucaccauuggcaaaugcccuaaguaugugaaguccacaaaacugcggcuugcuaccgggcugcgcaauguucccagcauccagucuagaggacucuuuggcgccauugccggguucaucgagggaggcuggacagggaugguggacggaugguacggcuaucaucaccagaacgaacaaggcagcggguacgcugcggaucugaaguccacccagaaugccaucgacgagauuacgaacaaagucaauucugugaucgagaagaugaacacacaguuuaccgcuguuggaaaagaguucaaucaccuugagaagcggauugaaaaccugaauaagaaaguggaugacggcuuccucgauaucuggaccuacaacgccgagcugcugguccuccuggaaaaugagcgcacacuugacuaucaugauagcaacgugaagaaccuguacgagaaagucagaucccagcucaagaauaacgccaaagaaauugggaauggauguuuugaguucuaucacaagugcgacaacaccuguauggaaagcgugaagaauggcacauacgauuauccuaaauacucugaggaagcuaagcugaaccgggaggagaucgacgggguuaaacuugaauccacgcgcaucuaucaaauucuggccaucuacagcaccguggcgucuucccucguccuggugguuagccugggcgcuauuuccuuuuggaugugcucuaauggaagccuccagugcagaaucuguauuuga

SEQ ID NO: 199201 - RNA, 1701 nt, Artificial Sequence
  derived and/or modified CDS sequence (opt5) from hemagglutinin__InfluenzaA__AEN68927
augaaggccauccuggugguccuccuguacaccuucgcuacagccaacgcggacacgcuuugcauuggcuaucacgcuaauaacagcaccgauacaguugacaccgugcuggagaaaaaugugacagucacccauuccgugaaccuccuggaagauaagcacaaugggaaacuuuguaagcugagaggaguugcuccccuccaucugggcaaaugcaacaucgccggguggauucugggaaauccugagugugaaucucucagcacagccuccucuuggagcuacaucguggagaccuccucuagcgacaacggcacgugcuauccgggggauuuuauugacuacgaagaacugcgggagcagcuuuccagcgucucuuccuucgaacgcuuugagaucuuccccaagaccagcucuuggccugaucacgacuccaauaagggagugacagccgcuuguccccaugccggcgcgaaaucuuuuuauaagaaccugaucuggcucguuaaaaagggcaauagcuacccuaaacuguccaagagcuauauuaacgauaaggggaaagaagugcuuguccuguggggaauccaccaccccuccaccucugccgaccaacagagccucuaccagaaugcugaugccuacguguucgugggcacauccagauauagcaagaaauuuaagccugagauugcuauccggccgaaaguccgcgaccaggaggggagaaugaacuacuauuggacccugguugaacccggagauaagauuacguucgaggccacaggcaaucugguggugccucgguacgcguuugccauggaacgcaacgcugggucuggaaucauuaucuccgacacccccguccaugacugcaacacaaccugucaaaccccuaaaggcgccaucaauacaagccuccccuuccagaacauucacccgaucacgauuggcaagugcccuaaguaugugaaaucuaccaagcugagacuugcuacagggcugcggaauguucccagcauccagucccgcggacucuuuggcgccauugccggguucaucgagggaggcuggaccgggaugguggauggaugguacggcuaucaucaccagaacgaacaaggcucuggguacgcugcggaccugaaaagcacacagaaugccaucgauaagauuaccaacaaagucaauuccgugaucgagaagaugaacacgcaguuuacagcuguuggaaaggaguucaaucaccuugagaaaagaauugagaaccugaauaagaaaguggacgauggcuuccucgacaucuggaccuacaacgccgaacugcugguccuccuggagaaugaacggacccuugauuaucaugacagcaacgugaagaaucuguacgagaaaguccgcaaccagcucaagaacaaugccaaggagauugggaacggauguuuugaguucuaucacaaaugcgauaauacauguauggaaucugugaagaacggcaccuacgacuauccuaaauacuccgaagaggcuaagcugaauagagaagagaucgaugggguuaaacuugagagcacacggaucuaucaaauucuggccaucuacucuacgguggcguccagccucguccuggugguuucccugggcgcuauuucuuuuuggaugugcagcaacggaucccuccagugccgcaucuguauuuga

SEQ ID NO: 199202 - RNA, 1701 nt, Artificial Sequence; identical to SEQ ID NO: 198327
  derived and/or modified CDS sequence (opt5) from hemagglutinin__InfluenzaA__AEN68928

SEQ ID NO: 199203 - RNA, 1701 nt, Artificial Sequence
  derived and/or modified CDS sequence (opt5) from hemagglutinin__InfluenzaA__AEN68929
augaaggccauccuggugguccuccuguacaccuucgcuacagccaacgcggacacgcuuugcauuggcuaucacgcuaauaacagcaccgauacaguugacaccgugcuggagaaaaaugugacagucacccauuccgugaaccuccuggaagauaagcacaaugggaaacuuuguaagcugagaggaaucgcuccccuccaucugggcaaaugcaacauugccggguggauccugggaaauccugagugugaaucucucagcacagccuccucuuggagcuacauuguugagaccuccucuagcgacaacggcacgugcuauccgggggauuuuaucgacuacgaagaacugcgggagcagcuuuccagcgugucuuccuucgaacgcuuugagaucuuccccaagaccagcucuuggccuaaucacgauuccaacaagggagucacagccgcuuguccccaugccggcgcgaaaucuuuuuauaagaaucugauuuggcucgugaaaaagggcaacagcuacccuaaacuguccaagagcuauaucaaugacaaggggaaagaaguucuugugcuguggggcauucaccaccccuccaccucugccgaucaacagagccucuaccagaacgcugacgccuacgucuucgugggaacauccagauauagcaagaaauuuaagccugagaucgcuauucggccgaaagugcgcgaucaggaggggagaaugaauuacuauuggacccuggucgaacccggagacaagaucacguucgaggccacaggcaaccugguugugccucgguacgcguuugccauggaacgcaacgcugggucuggaauuaucaucuccgauacccccgugcaugacugcaauacaaccugucaaaccccuaaaggcgccauuaacacaagccuccccuuccagaauauccacccgauuacgaucggcaagugcccuaaguaugucaaaucuaccaagcugagacuugcuacagggcugcggaacgugcccagcauucagucccgcggacucuuuggcgccaucgccggguucaucgagggaggcuggaccgggaugguugacggaugguacggcuaucaucaccagaaugaacaaggcucuggguacgcugcggaucugaaaagcacacagaacgccauugacaagaucaccaauaaagugaacuccgucauugagaagaugaauacgcaguuuacagcugugggaaaggaguucaaccaccuugagaaaagaaucgagaaucugaacaagaaaguugaugacggcuuccucgauauuuggaccuacaaugccgaacugcuggugcuccuggagaacgaacggacccuugacuaucaugauagcaaugucaagaaccuguacgagaaagugcgcucucagcucaagaacaaugccaaggagaucgggaacggauguuuugaguucuaucacaaaugcgacaauacauguauggaauccgucaagaacggcaccuacgauuauccuaaauacagcgaagaggcuaagcugaauagagaagagaucgacggggugaaacuugagucuacacggauuuaucaaauccuggccauuuacuccacgguugcgagcucccucgugcuggucgugucucugggcgcuaucagcuuuuggaugugcuccaacggaucucuccagugccgcauuuguaucuga

SEQ ID NO: 199204 - RNA, 1701 nt, Artificial Sequence; identical to SEQ ID NO: 197656
  derived and/or modified CDS sequence (opt5) from hemagglutinin__InfluenzaA__AEN68930

SEQ ID NO: 199205 - RNA, 1701 nt, Artificial Sequence; identical to SEQ ID NO: 197656
  derived and/or modified CDS sequence (opt5) from hemagglutinin__InfluenzaA__AEN68931

SEQ ID NO: 199206 - RNA, 1701 nt, Artificial Sequence; identical to SEQ ID NO: 197656
  derived and/or modified CDS sequence (opt5) from hemagglutinin__InfluenzaA__AEN68932

SEQ ID NO: 199207 - RNA, 1701 nt, Artificial Sequence
  derived and/or modified CDS sequence (opt5) from hemagglutinin__InfluenzaA__AEN69426
augaaggccauccuggugguccuccuguacaccuucgcuacaagcaacgccgacacgcuuugcauuggcuaucacgcgaauaacuccaccgauacaguugacaccgugcuggagaaaaaugugacagucacccauucugugaaccuccuggaagauaagcacaaugggaaacuuuguaagcugagaggaguugcuccccuccaucugggcaaaugcaacaucgccggguggauucugggaaauccugagugugaaagccucuccacagccucuagcugguccuacaucguggagaccucuagcuccgacaacggcacgugcuauccggggaauuuuauugauuacgaagaacugcgggagcagcuuagcucugucuccagcuucgaacgcuuugagaucuuccccaagaccucuuccuggccugaccacgauagcaacaagggagugacagcugccuguccccaugcuggcgccaaaucuuuuuauaagaaucugaucuggcucguuaaaaagggcaacuccuacccuaaacugagcaaguccuauauuaaugacaaggggaaagaagugcuuguccuguggggaauccaccaccccucuaccagcgcggaucaacagucccucuaccagaacgccgacgcuuacguguucgugggcacaagcagauauucuaagaaauuuaagccugagauugccauccggccgaaaguccgcgaucaggaggggagaaugaauuacuauuggacccugguugaacccggagacaagauuacguucgaggcuacaggcaaccugguggccccucgguacgcguuugccauggaacgcaacgcuggguccggaaucauuaucagcgauacccccgugcaugacugcaauacaaccugucaaaccccuaaaggcgccaucaacacaucucuccccuuccagaauauucacccgaucacgauuggcaagugcccuaaguaugucaaaagcaccaagcugagacuugcuacagggcugcggaacgugcccuccauccagucucgcggacucuuuggcgccauugccggguucaucgagggaggcuggaccgggaugguugacggaugguacggcuaucaucaccagaaugaacaaggcagcggguacgcugcggaucugaaauccacacagaacgccaucgacaagauuaccaauaaagugaacagcgucaucgagaagaugaauacgcaguuuacagcugugggaaaggaguucaaccaccuugagaaaagaauugagaaucugaacaagaaaguugaugacggcuuccucgauaucuggaccuacaaugccgaacugcuggugcuccuggagaacgaacggacccuugacuaucaugauucuaaugucaagaaccuguacgagaaagugcgcucccagcucaagaacaaugccaaggagauugggaacggauguuuugaguucuaucacaaaugcgacaauacauguauggaaagcgucaagaacggcaccuacgauuauccuaaauacucugaagaggcuaagcugaauagagaagagaucgacggggugaaacuugaguccacacggaucuaucaaauucuggccaucuacagcacgguugcguccucucucgugcuggucgugagccugggcgcuauuuccuuuuggaugugcucuaacggaagccuccagugccgcaucuguauuuga

SEQ ID NO: 199208 - RNA, 1701 nt, Artificial Sequence; identical to SEQ ID NO: 198992
  derived and/or modified CDS sequence (opt5) from hemagglutinin__InfluenzaA__AEN69475

SEQ ID NO: 199209 - RNA, 1701 nt, Artificial Sequence; identical to SEQ ID NO: 198992
  derived and/or modified CDS sequence (opt5) from hemagglutinin__InfluenzaA__AEN69481

SEQ ID NO: 199210 - RNA, 1701 nt, Artificial Sequence; identical to SEQ ID NO: 194994
  derived and/or modified CDS sequence (opt5) from hemagglutinin__InfluenzaA__AEO01032

SEQ ID NO: 199211 - RNA, 1701 nt, Artificial Sequence; identical to SEQ ID NO: 195094
  derived and/or modified CDS sequence (opt5) from hemagglutinin__InfluenzaA__AEO01033

SEQ ID NO: 199212 - RNA, 1701 nt, Artificial Sequence; identical to SEQ ID NO: 195094
  derived and/or modified CDS sequence (opt5) from hemagglutinin__InfluenzaA__AEO01034

SEQ ID NO: 199213 - RNA, 1701 nt, Artificial Sequence; identical to SEQ ID NO: 194728
  derived and/or modified CDS sequence (opt5) from hemagglutinin__InfluenzaA__AEO01035

SEQ ID NO: 199214 - RNA, 1701 nt, Artificial Sequence; identical to SEQ ID NO: 195094
  derived and/or modified CDS sequence (opt5) from hemagglutinin__InfluenzaA__AEO01036

SEQ ID NO: 199215 - RNA, 1701 nt, Artificial Sequence; identical to SEQ ID NO: 194983
  derived and/or modified CDS sequence (opt5) from hemagglutinin__InfluenzaA__AEO01037

SEQ ID NO: 199216 - RNA, 1701 nt, Artificial Sequence; identical to SEQ ID NO: 195094
  derived and/or modified CDS sequence (opt5) from hemagglutinin__InfluenzaA__AEO01038

SEQ ID NO: 199217 - RNA, 1701 nt, Artificial Sequence; identical to SEQ ID NO: 194921
  derived and/or modified CDS sequence (opt5) from hemagglutinin__InfluenzaA__AEO01039

SEQ ID NO: 199218 - RNA, 1701 nt, Artificial Sequence
  derived and/or modified CDS sequence (opt5) from hemagglutinin__InfluenzaA__AEO01040
augaaggccauccuggugguccuccuguacaccuucgcuacagccaacgcggacacgcuuugcauuggcuaucacgcuaauaacagcaccgauacaguugacaccgugcuggagaaaaaugugacagucacccauuccgugaaccuccuggaagauaagcacaaugggaaacuuuguaagcugagaggaguugcuccccuccaucugggcaaaugcaacaucgccggguggauucugggaaauccugagugugaaucucucagcacagccuccucuuggagcuacaucguggagaccuccucuagcgacaacggcacgugcuauccgggggauuuuauugacuacgaagaacugcgggagcagcuuuccagcgucucuuccuucgaacgcuuugagaucuuccccaagaccagcucuuggccuaaucacgauuccaacaagggagugacagccgcuuguccccaugccggcgcgaaaucuuuuuauaagaaucugaucuggcucguuaaaaagggcaacagcuacccuaaacuguccaagagcuauauuaaugacaaggggaaaaaggugcuuguccuguggggaauccaccaccccuccaccucugccgaucaacagagccucuaccagaacgcugacgccuacguguucgugggcacauccagauauagcaaaaaguuuaaaccugaaauugcuauccggccgaagguccgcgaucaggaggggagaaugaauuacuauuggacccugauugagcccggagacaaaaucacguucgaagccacaggcaaccugguugugccucgguacgcguuuaccauggagcgcaacgccgggucuggaauuaucaucuccgauacacccgugcaugacugcaauaccaccugucaaacaccuaagggcgcuauuaacacgagccuccccuuccagaauauccacccgauuaccaucggcaagugcccuaaauaugucaagucuacaaaacugagacuugccaccgggcugcggaacgugcccagcauucagucccgcggacucuuuggcgcuaucgccggguucaucgaaggaggcuggacagggaugguugacggaugguacggcuaucaucaccagaaugagcaaggcucuggguacgccgcugaucugaaaagcacccagaacgcgauugacgaaaucacgaauaaagugaacuccgucauugagaagaugaauacacaguuuaccgccgugggaaaggaguucaaccaccuugaaaagagaaucgagaaucugaacaagaaaguugaugacggcuuccucgauauuuggaccuacaaugcugaacugcuggugcuccuggagaacgaacggacacuugacuaucaugauagcaaugucaagaaccuguacgagaaagugcgcucucagcucaagaacaaugccaaggagaucgggaacggauguuuugaguucuaucacaaaugcgacaauaccuguauggaguccgucaagaacggcacauacgauuauccuaaauacagcgaagaggccaagcugaauagagaagagaucgacggggugaaacuugagucuacgcggauuuaucaaauccuggcuauuuacuccaccguugccagcucccucgugcuggucgugucucugggcgcgaucagcuuuuggaugugcuccaacggaucucuccagugccgcauuuguaucuga

SEQ ID NO: 199219 - RNA, 1701 nt, Artificial Sequence; identical to SEQ ID NO: 194741
  derived and/or modified CDS sequence (opt5) from hemagglutinin__InfluenzaA__AEO01041

SEQ ID NO: 199220 - RNA, 1701 nt, Artificial Sequence; identical to SEQ ID NO: 195094
  derived and/or modified CDS sequence (opt5) from hemagglutinin__InfluenzaA__AEO01042

SEQ ID NO: 199221 - RNA, 1701 nt, Artificial Sequence
  derived and/or modified CDS sequence (opt5) from hemagglutinin__InfluenzaA__AEO01043
augaaggccauccuggugguccuccuguacaccuucgcuacagccaacgcggacacgcuuugcauuggcuaucacgcuaauaacagcaccgauacaguugacaccgugcuggagaaaaaugugacagucacccauuccgugaaccuccuggaagauaagcacaaugggaaacuuuguaagcugagaggaguugcuccccuccaucugggcaaaugcaacaucgccggguggauucugggaaauccugagugugaaucucucagcacagccuccucuuggagcuacaucguggagaccuccucuagcaacaauggcacgugcuauccgggggacuuuauugauuacgaagaacugcgggagcagcuuuccagcgucucuuccuucgaacgcuuugagaucuuccccaagaccagcucuuggccuaaccacgacuccaauaagggagugacagccgcuuguccccaugccggcgcgaaaucuuuuuauaagaaccugaucuggcucguuaaaaagggcaauagcuacccuaaacuguccaagagcuauauuaacgauaaggggaaagaagugcuuguccuguggggaauccaccaccccuccaccucugccgaccaacagagccucuaccagaaugcugaugccuacguguucgugggcacauccagauauagcaagaaauuuaagccugagauugcuauccggccgaaaguccgcgagcaggaagggagaaugaacuacuauuggacccugguugagcccggagacaagauuacguucgaagccacaggcaaccugguggugccucgguacgcguuugccauggagcgcaaugcugggucuggaaucauuaucuccgauacccccguccaugacugcaacacaaccugucaaaccccuaaaggcgccaucaauacaagccuccccuuccagaacauucacccgaucacgauuggcaagugcccuaaguaugugaaaucuaccaagcugagacuugcuacagggcugcggaauguucccagcauccagucccgcggacucuuuggcgccauugccggguucaucgaaggaggcuggaccgggaugguggauggaugguacggcuaucaucaccagaacgagcaaggcucuggguacgcugcggaccugaaaagcacacagaaugccaucgacgagauuaccaacaaggucaauuccgugaucgaaaagaugaacacgcaguuuacagcuguuggaaaggaguucaaucaccuugaaaagagaauugagaaccugaauaaaaagguggaugacggcuuccucgauaucuggaccuacaacgccgaacugcugguccuccuggagaaugagcggacccuugacuaucaugauagcaacgugaaaaaccuguacgaaaagguccgcucucagcucaaaaauaacgccaaggagauugggaauggauguuuugaguucuaucacaagugcgacaacacauguauggaguccgugaaaaauggcaccuacgauuauccuaaguacagcgaagaggcuaaacugaacagagaggaaaucgacgggguuaaacuugagucuacacggaucuaucaaauucuggccaucuacuccacgguggcgagcucccucguccuggugguuucucugggcgcuauuagcuuuuggaugugcuccaauggaucucuccagugccgcaucuguauuuga

SEQ ID NO: 199222 - RNA, 1701 nt, Artificial Sequence; identical to SEQ ID NO: 194741
  derived and/or modified CDS sequence (opt5) from hemagglutinin__InfluenzaA__AEO01044

SEQ ID NO: 199223 - RNA, 1701 nt, Artificial Sequence
  derived and/or modified CDS sequence (opt5) from hemagglutinin__InfluenzaA__AEO01045
augaaggccauccuggugguccuccuguacaccuucgcuacagccaacgcggacacgcuuugcauuggcuaucacgcuaauaacagcaccgauacaguugacaccgugcuggagaaaaaugugacagucacccauuccgugaaccuccuggaagauaagcacaaugggaaacuuuguaagcugagaggaguugcuccccuccaucugggcaaaugcaacaucgccggguggauucugggaaaucucgagugugaaucucugagcacagccuccucuuggagcuacaucguggagaccuccucuagcgacaacggcacgugcuauccuggggauuuuauugacuacgaagaacuucgggagcagcuguccagcgucucuuccuucgaacgcuuugagaucuucccgaagaccagcucuuggcccaaucacgauuccaacaagggagugacagccgcuuguccucaugccggcgcgaaaucuuuuuauaagaaucucaucuggcugguuaaaaagggcaacagcuaccccaaacuuuccaagagcuauauuaaugacaaggggaaagaagugcugguccucuggggaauccaccacccuuccaccucugccgaucaacagagccuguaccagaacgcugacgccuacguguucgugggcacauccagauauagcaagaaauuuaagcccgagauugcuauccggccuaaaguccgcgaucaggaggggagaaugaauuacuauuggacccugguugaaccgggagacaagauuacguucgaggccacaggcaaccucguggugccccgguacgcguuugccauggaacgcaacgcugggucuggaaucauuaucuccgauaccccuguccaugacugcaauacaaccugucaaacccccaaaggcgccaucaacacaagccugccuuuccagaauauucaccccaucacgauuggcaagugcccgaaguaugugaaaucuaccaaacuuagacuggcuacagggcuccggaacguuccuagcauccagucccgcggacuguuuggcgccauugccggguucaucgagggaggcuggaccgggaugguggacggaugguacggcuaucaucaccagaaugaacaaggcucuggguacgcugcggaucuuaagagcacacagaacgccaucgacgagauuaccaauaaggucaacuccgugaucgagaaaaugaauacgcaguuuacagcuguuggaaaggaguucaaccaccuggagaagagaauugaaaaucucaacaaaaagguggaugacggcuuccuggauaucuggaccuacaaugccgagcugcucguccugcuugaaaacgagcggacccuggacuaucaugauagcaaugugaaaaaccucuacgagaagguccgcucucagcugaaaaacaaugccaaggaaauugggaacggauguuuugaguucuaucacaagugcgacaauacauguauggaauccgugaaaaacggcaccuacgauuaucccaaguacagcgaggaagcuaaacuuaauagagaggagaucgacgggguuaagcuggaaucuacacggaucuaucaaauucucgccaucuacuccacgguggcgagcucccugguccuggugguuucucucggcgcuauuagcuuuuggaugugcuccaacggaucucugcagugccgcaucuguauuuga

SEQ ID NO: 199224 - RNA, 1701 nt, Artificial Sequence; identical to SEQ ID NO: 194741
  derived and/or modified CDS sequence (opt5) from hemagglutinin__InfluenzaA__AEO01046

SEQ ID NO: 199225 - RNA, 1701 nt, Artificial Sequence; identical to SEQ ID NO: 194741
  derived and/or modified CDS sequence (opt5) from hemagglutinin__InfluenzaA__AEO01047

SEQ ID NO: 199226 - RNA, 1701 nt, Artificial Sequence
  derived and/or modified CDS sequence (opt5) from hemagglutinin__InfluenzaA__AEO01048
augaaggccauccuggugguccuccuguacaccuucgcuacagccaacgcggacacgcuuugcauuggcuaucacgcuaauaacagcaccgauacaguugacaccgugcuggagaaaaaugugacagucacccauuccgugaaccuccuggaagauaagcacaaugggaaacuuuguaagcugagaggaguugcuccccuccaucugggcaaaugcaacaucgccggguggauucugggaaauccugagugugaaucucucagcacagccuccucuuggagcuacaucguggagaccuccucuagcgacaacggcacgugcuauccgggggauuuuauugacuacgaagaacugcgggagcagcuuuccagcgucucuuccuucgaacgcuuugagaucuuccccaagaccagcucuuggccuaaucacgauuccaacaagggagugacagccgcuuguccccaugccggcgcgaaaucuuuuuauaagaaucugaucuggcucguuaaaaagggcaacagcuacccuaaacuguccaagagcuauauuaaugacaaggggaaagaagugcuuguccuguggggaauccaccaccccuccaccucugccgaucaacagagccucuaccagaacgcugacgccuacguguucgugggcacauccagauauagcaagaaauuuaagccugagauugcuauccggccgaaaguccgcgaucaggaggggagaaugaauuacuauuggacccugguugaacccggagacaagauuacguucgaggccacaggcaaccugguggugccucgguacgcguuugccauggaacgcaacgcugggucuggaaucauuaucuccgauacccccguccaugacugcaauacaaccugucaaaccccuaaaggcgccaucaacacaagccuccccuuccagaauauucacccgaucacgauuggcaagugcccuaaguaugugaaaucuaccaagcugagacuugcuacagggcugcggaacguucccagcauccagucccgcggacucuuuggcgccauugccggguucaucgagggaggcuggaccgggaugguggacggaugguacggcuaucaucaccagaaugaacaaggcucuggguacgcugcggaucugaaaagcacacagaacgccaucgacgagauuaccaauaaggucaacuccgugaucgagaaaaugaauacgcaguuuacagcuguuggaaaggaguucaaccaccuugagaagagaauugaaaaucugaacaaaaagguggaugacggcuuccucgauaucuggaccuacaaugccgagcugcugguccuccuggaaaacgagcggacccuugacuaucaugauagcaaugugaaaaaccuguacgagaagguccgcucucagcucaaaaacaaugccaaggaaauugggaacggauguuuugaguucuaucacaagugcgacaauacauguauggaauccgugaaaaacggcaccuacgauuauccuaaguacagcgaggaagcuaaacugaauagagaggagaucgacgggguuaaacuugaaucuacacggaucuaucaaauucuggccaucuacuccacgguggcgagcucccucguccuggugguuucucugggcgcuauuagcuuuuggaugugcuccaacggaucucuccagugcaagaucuguauuuga

SEQ ID NO: 199227 - RNA, 1701 nt, Artificial Sequence; identical to SEQ ID NO: 195639
  derived and/or modified CDS sequence (opt5) from hemagglutinin__InfluenzaA__AEO01049

SEQ ID NO: 199228 - RNA, 1701 nt, Artificial Sequence; identical to SEQ ID NO: 194741
  derived and/or modified CDS sequence (opt5) from hemagglutinin__InfluenzaA__AEO01050

SEQ ID NO: 199229 - RNA, 1701 nt, Artificial Sequence; identical to SEQ ID NO: 195094
  derived and/or modified CDS sequence (opt5) from hemagglutinin__InfluenzaA__AEO01051

SEQ ID NO: 199230 - RNA, 1701 nt, Artificial Sequence
  derived and/or modified CDS sequence (opt5) from hemagglutinin__InfluenzaA__AEO01052
augaaggccaucauugugguccugcucuacaccuucgcuacagccaacgcggacacgcugugcaucggcuaucacgcuaauaacagcaccgauacaguugacaccgugcuugagaaaaaugugacagucacccauuccgugaaccugcucgaagauaagcacaaugggaaacuguguaaacuuagaggaguugcuccccugcaucucggcaaaugcaacauugccggguggauccugggaaauccugagugugaaucucugagcacagccuccucuuggagcuacauuguggagaccuccucuagcgacaacggcacgugcuauccgggggauuuuaucgacuacgaagaacuccgggagcagcuguccagcgucucuuccuucgaacgcuuugagaucuuccccaagaccagcucuuggccuaaucacgauuccaacaagggagugacagccgcuuguccccaugccggcgcgaaaucuuuuuauaagaaucuuauuuggcugguuaaaaagggcaacagcuacccuaaacucuccaagagcuauaucaaugacaaggggaaagaagugcugguccuuuggggcauucaccaccccuccaccucugccgaucaacagagccuguaccagaacgcugacgccuacguguucgugggaacauccagauauagcaagaaauuuaagccugagaucgcuauucggccgaaaguccgcgaucaggaggggagaaugaauuacuauuggacccucguugaacccggagacaagaucacguucgaggccacaggcaaccugguggugccucgguacgcguuugccauggaacgcaacgcugggucuggaauuaucaucuccgauacccccguccaugacugcaauacaaccugucaaaccccuaaaggcgccauuaacacaagccugcccuuccagaauauccacccgauuacgaucggcaagugcccuaaguaugugaaaucuaccaagcucagacuggcuacagggcuucggaacguucccagcauucagucccgcggacuguuuggcgccaucgccggguucaucgagggaggcuggaccgggaugguggacggaugguacggcuaucaucaccagaaugaacaaggcucuggguacgcugcggaucucaaaagcacacagaacgccauugacaagaucaccaauaaagucaacuccgugauugagaagaugaauacgcaguuuacagcuguuggaaaggaguucaaccaccuggaaaagagaaucgagaaucuuaacaagaaaguggaugacggcuuccuggauauuuggaccuacaaugccgaacuccugguccugcucgagaacgaacggacccuggacuaucaugauagcaaugugaagaaccuuuacgagaaaguccgcucucagcugaagaacaaugccaaggagaucgggaacggauguuuugaguucuaucacaaaugcgacaauacauguauggaguccgugaagaacggcaccuacgauuauccuaaauacagcgaagaggcuaagcucaauagagaagagaucgacgggguuaaacuggagucuacacggauuuaucaaauccuugccauuuacuccacgguggcgagcucccugguccucgugguuucucugggcgcuaucagcuuuuggaugugcuccaacggaucucugcagugccgcauuuguaucuga

SEQ ID NO: 199231 - RNA, 1701 nt, Artificial Sequence; identical to SEQ ID NO: 195094
  derived and/or modified CDS sequence (opt5) from hemagglutinin__InfluenzaA__AEO01053

SEQ ID NO: 199232 - RNA, 1701 nt, Artificial Sequence; identical to SEQ ID NO: 194741
  derived and/or modified CDS sequence (opt5) from hemagglutinin__InfluenzaA__AEO01054

SEQ ID NO: 199233 - RNA, 1701 nt, Artificial Sequence; identical to SEQ ID NO: 195553
  derived and/or modified CDS sequence (opt5) from hemagglutinin__InfluenzaA__AEO01055

SEQ ID NO: 199234 - RNA, 1701 nt, Artificial Sequence; identical to SEQ ID NO: 195094
  derived and/or modified CDS sequence (opt5) from hemagglutinin__InfluenzaA__AEO01056

SEQ ID NO: 199235 - RNA, 1701 nt, Artificial Sequence; identical to SEQ ID NO: 194741
  derived and/or modified CDS sequence (opt5) from hemagglutinin__InfluenzaA__AEO01057

SEQ ID NO: 199236 - RNA, 1701 nt, Artificial Sequence; identical to SEQ ID NO: 194741
  derived and/or modified CDS sequence (opt5) from hemagglutinin__InfluenzaA__AEO01058

SEQ ID NO: 199237 - RNA, 1701 nt, Artificial Sequence; identical to SEQ ID NO: 194741
  derived and/or modified CDS sequence (opt5) from hemagglutinin__InfluenzaA__AEO01059

SEQ ID NO: 199238 - RNA, 1701 nt, Artificial Sequence; identical to SEQ ID NO: 194741
  derived and/or modified CDS sequence (opt5) from hemagglutinin__InfluenzaA__AEO01060

SEQ ID NO: 199239 - RNA, 1701 nt, Artificial Sequence; identical to SEQ ID NO: 194741
  derived and/or modified CDS sequence (opt5) from hemagglutinin__InfluenzaA__AEO01061

SEQ ID NO: 199240 - RNA, 1701 nt, Artificial Sequence; identical to SEQ ID NO: 194741
  derived and/or modified CDS sequence (opt5) from hemagglutinin__InfluenzaA__AEO01062

SEQ ID NO: 199241 - RNA, 1701 nt, Artificial Sequence; identical to SEQ ID NO: 194741
  derived and/or modified CDS sequence (opt5) from hemagglutinin__InfluenzaA__AEO01063

SEQ ID NO: 199242 - RNA, 1701 nt, Artificial Sequence; identical to SEQ ID NO: 194741
  derived and/or modified CDS sequence (opt5) from hemagglutinin__InfluenzaA__AEO01064

SEQ ID NO: 199243 - RNA, 1701 nt, Artificial Sequence; identical to SEQ ID NO: 194983
  derived and/or modified CDS sequence (opt5) from hemagglutinin__InfluenzaA__AEO01065

SEQ ID NO: 199244 - RNA, 1701 nt, Artificial Sequence; identical to SEQ ID NO: 195094
  derived and/or modified CDS sequence (opt5) from hemagglutinin__InfluenzaA__AEO01066

SEQ ID NO: 199245 - RNA, 1701 nt, Artificial Sequence
  derived and/or modified CDS sequence (opt5) from hemagglutinin__InfluenzaA__AEO01067
augaaggccauccuggugguccuccuguacaccuucgcuacagccaacgcggacacgcuuugcauuggcuaucacgcuaauaacagcaccgauacaguugacaccgugcuggagaagaaugugacagucacccauuccgugaaccuccuggaagauaagcacaaugggaaacuuuguaagcugagaggaguugcuccccuccaucugggcaaaugcaacaucgccggguggauucugggaaauccugagugugaaucucucagcacagccuccucuuggagcuacaucguggagaccuccucuagcgacaacggcacgugcuauccgggggauuuuauugacuacgaagaacugcgggagcagcuuuccagcgucucuuccuucgaacgcuuugagaucuuccccaagaccagcucuuggccuaaucacgauuccaacaagggagugacagccgcuuguccccaugccggcgcgaaaucuuuuuauaagaaucugaucuggcucguuaaaaagggcaacagcuacccuaaacuguccaagagcuauauuaaugacaaggggaaagaagugcuuguccuguggggaauccaccaccccuccaccucugccgaucaacagagccucuaccagaacgcugacgccuacguguucgugggcacauccagauauagcaagaaauuuaagccugagauggcuauucggccgaaaguccgcgaucaggaggggagaaugaauuacuauuggacccugguugaacccggagacaagaucacguucgaggccacaggcaaccugguggugccucgguacgcguuugccauggaacgcaacgcugggucuggaauuaucauuuccgauacccccguccaugacugcaauacaaccugucaaaccccuaaaggcgccaucaacacaagccuccccuuccagaauauccacccgauuacgaucggcaagugcccuaaguaugugaaaucuaccaagcugagacuugcuacagggcugcggaacguucccagcauucagucccgcggacucuuuggcgccaucgccggguucauugagggaggcuggaccgggaugguggacggaugguacggcuaucaucaccagaaugaacaaggcucuggguacgcugcggaucugaaaagcacacagaacgccaucgacgagaucaccaauaaggucaacuccgugauugagaaaaugaauacgcaguuuacagcuguuggaaaggaguucaaccaccuugagaagagaaucgaaaaucugaacaaaaagguggaugacggcuuccucgauauuuggaccuacaaugccgagcugcugguccuccuggaaaacgagcggacccuugacuaucaugauagcaaugugaaaaaccuguacgagaagguccgcucucagcucaaaaacaaugccaaggaaaucgggaacggauguuuugaguucuaucacaagugcgacaauacauguauggaauccgugaaaaacggcaccuacgauuauccuaaguacagcgaggaagcuaaacugaauagagaggagauugacgggguuaaacuugaaucuacacggaucuaucaaauccuggccauuuacuccacgguggcgagcucccucguccuggugguuucucugggcgcuaucagcuuuuggaugugcuccaacggaucucuccagugccgcauuuguaucuga

SEQ ID NO: 199246 - RNA, 1701 nt, Artificial Sequence; identical to SEQ ID NO: 195094
  derived and/or modified CDS sequence (opt5) from hemagglutinin__InfluenzaA__AEO01068

SEQ ID NO: 199247 - RNA, 1701 nt, Artificial Sequence; identical to SEQ ID NO: 194741
  derived and/or modified CDS sequence (opt5) from hemagglutinin__InfluenzaA__AEO01069

SEQ ID NO: 199248 - RNA, 1701 nt, Artificial Sequence; identical to SEQ ID NO: 195094
  derived and/or modified CDS sequence (opt5) from hemagglutinin__InfluenzaA__AEO01070

SEQ ID NO: 199249 - RNA, 1701 nt, Artificial Sequence; identical to SEQ ID NO: 194741
  derived and/or modified CDS sequence (opt5) from hemagglutinin__InfluenzaA__AEO01071

SEQ ID NO: 199250 - RNA, 1701 nt, Artificial Sequence
  derived and/or modified CDS sequence (opt5) from hemagglutinin__InfluenzaA__AEO01073
augaaggccauccuggugguccuccuguacaccuucgcuacagccaacgcggacacgcuuugcauuggcuaucacgcuaauaacagcaccgauacaguugacaccgugcuggagaagaaugugacagucacccauuccgugaaccuccuggaagauaagcacaaugggaaacuuuguaagcugagaggaguugcuccccuccaucugggcaaaugcaacaucgccggguggauucugggaaauccugagugugaaucucucagcacagccuccucuuggagcuacaucguggagaccuccucuagcgacaacggcacgugcuauccgggggauuuuauugacuacgaagaacugcgggagcagcuuuccagcgucucuuccuucgaacgcuuugagaucuuccccaagaccagcucuuggccuaaucacgauuccaacaagggagugacagccgcuuguccccaugccggcgcgaaaucuuuuuauaagaaucugaucuggcucguuaaaaagggcaacagcuacccuaaacuguccaagagcuauauuaaugacaaggggaaagaagugcuuguccuguggggaauccaccaccccuccaccucugccgaucaacagagccucuaccagaacgcugacgccuacguguucgugggcacauccagauauagcaagaaauuuaagccugagauugcuauccggccgaaaguccgcgaucaggaggggagaaugaauuacuauuggacccugguugaacccggagacaagauuacguucgaggccacaggcaaccugguggugccucgguacgcguuugccauggaacgcaacgcugggucuggaaucauuaucuccgauacccccguccaugacugcaauacaaccugucaaaccccuaaaggcgccgugaacacaagccuccccuuccagaauauccacccgauuacgaucggcaagugcccuaaguauguuaaaucuaccaagcugagacuugcuacagggcugcggaacgugcccagcauucagucccgcggacucuuuggcgccaucgccggguucauugagggaggcuggaccgggauggucgacggaugguacggcuaucaucaccagaaugaacaaggcucuggguacgcugcggaucugaaaagcacacagaacgccaucgacgagaucaccaauaaggugaacuccguuauugagaaaaugaauacgcaguuuacagcugugggaaaggaguucaaccaccuugagaagagaaucgaaaaucugaacaaaaaggucgaugacggcuuccucgauauuuggaccuacaaugccgagcugcuggugcuccuggaaaacgagcggacccuugacuaucaugauagcaaugucaaaaaccuguacgagaaggugcgcucucagcucaaaaacaaugccaaggaaaucgggaacggauguuuugaguucuaucacaagugcgacaauacauguauggaauccguuaaaaacggcaccuacgauuauccuaaguacagcgaggaagcuaaacugaauagagaggagauugacggggugaaacuugaaucuacacggaucuaucaaauccuggccauuuacuccacggucgcgagcucccucgugcugguugugucucugggcgcuaucagcuuuuggaugugcuccaacggaucucuccagugccgcauuuguaucuga

SEQ ID NO: 199251 - RNA, 1701 nt, Artificial Sequence; identical to SEQ ID NO: 194983
  derived and/or modified CDS sequence (opt5) from hemagglutinin__InfluenzaA__AEO01074

SEQ ID NO: 199252 - RNA, 1701 nt, Artificial Sequence; identical to SEQ ID NO: 195094
  derived and/or modified CDS sequence (opt5) from hemagglutinin__InfluenzaA__AEO01075

SEQ ID NO: 199253 - RNA, 1701 nt, Artificial Sequence; identical to SEQ ID NO: 195094
  derived and/or modified CDS sequence (opt5) from hemagglutinin__InfluenzaA__AEO01076

SEQ ID NO: 199254 - RNA, 1701 nt, Artificial Sequence
  derived and/or modified CDS sequence (opt5) from hemagglutinin__InfluenzaA__AEO01077
augaaggccauccuggugguccuccuguacaccuucgcuacagccaacgcggacacgcuuugcauuggcuaucacgcuaauaacagcaccgauacaguugacaccgugcuggagaaaaaugugacagucacccauuccgugaaccuccuggaagauaagcacaaugggaaacuuuguaagcugagaggaguugcuccccuccaucugggcaaaugcaacaucgccggguggauucugggaaauccugagugugaaucucucagcacagccuccucuuggagcuacaucguggagaccuccucuagcgacaacggcacgugcuauccgggggauuuuauugacuacgaagaacugcgggagcagcuuuccagcgucucuuccuucgaacgcuuugagaucuuccccaagaccagcucuuggccuaaucacgauuccaacaagggagugacagccgcuuguccccaugccggcgcgaaaucuuuuuauaagaaucugaucuggcucguuaaaaagggcaacagcuacccuaaacuguccaagagcuauauuaaugacaaggggaaagaagugcuuguccuguggggaauccaccaccccuccaccucugccgaucaacagagccucuaccagaacgcugacgccuacguguucgugggcacauccagauauagcaagaaauuuaagccugagauugcuauccggccgaaaguccgcgagcaggaagggagaaugaauuacuauuggacccugguugagcccggagauaagauuacguucgaagccacaggcaaccugguggugccucgguacgcguuugccauggagcgcaacgcugggucuggaaucauuaucuccgacacccccguccaugauugcaauacaaccugucaaaccccuaaaggcgccaucaacacaagccuccccuuccagaauauucacccgaucacgauuggcaagugcccuaaguaugugaaaucuaccaagcugagacuugcuacagggcugcggaacguucccagcauccagucccgcggacucuuuggcgccauugccggguucaucgaaggaggcuggaccgggaugguggacggaugguacggcuaucaucaccagaaugagcaaggcucuggguacgcugcggaccugaaaagcacacagaacgccaucgaugagauuaccaauaaggucaacuccgugaucgaaaagaugaauacgcaguuuacagcuguuggaaaggaguucaaccaccuugaaaagagaauugagaaucugaacaaaaagguggacgauggcuuccucgacaucuggaccuacaaugccgaacugcugguccuccuggagaacgagcggacccuugauuaucaugacagcaaugugaaaaaccuguacgaaaagguccgcucucagcucaaaaacaaugccaaggagauugggaacggauguuuugaguucuaucacaagugcgauaauacauguauggagaacgugaaaaauggcaccuacgacuauccuaaguacuccgaagaggcuaaacugaacagagaggaaaucgaugggguuaaacuugagagcacacggaucuaucaaauucuggccaucuacucuacgguggcguccagccucguccuggugguuucccugggcgcuauuucuuuuuggaugugcagcaauggaucccuccagugccgcaucuguauuuga

SEQ ID NO: 199255 - RNA, 1701 nt, Artificial Sequence; identical to SEQ ID NO: 194741
  derived and/or modified CDS sequence (opt5) from hemagglutinin__InfluenzaA__AEO01078

SEQ ID NO: 199256 - RNA, 1701 nt, Artificial Sequence; identical to SEQ ID NO: 194741
  derived and/or modified CDS sequence (opt5) from hemagglutinin__InfluenzaA__AEO01079

SEQ ID NO: 199257 - RNA, 1701 nt, Artificial Sequence; identical to SEQ ID NO: 194741
  derived and/or modified CDS sequence (opt5) from hemagglutinin__InfluenzaA__AEO01080

SEQ ID NO: 199258 - RNA, 1701 nt, Artificial Sequence; identical to SEQ ID NO: 195094
  derived and/or modified CDS sequence (opt5) from hemagglutinin__InfluenzaA__AEO01081

SEQ ID NO: 199259 - RNA, 1701 nt, Artificial Sequence; identical to SEQ ID NO: 194741
  derived and/or modified CDS sequence (opt5) from hemagglutinin__InfluenzaA__AEO01082

SEQ ID NO: 199260 - RNA, 1701 nt, Artificial Sequence; identical to SEQ ID NO: 194741
  derived and/or modified CDS sequence (opt5) from hemagglutinin__InfluenzaA__AEO01083

SEQ ID NO: 199261 - RNA, 1701 nt, Artificial Sequence; identical to SEQ ID NO: 194741
  derived and/or modified CDS sequence (opt5) from hemagglutinin__InfluenzaA__AEO01084

SEQ ID NO: 199262 - RNA, 1701 nt, Artificial Sequence; identical to SEQ ID NO: 195094
  derived and/or modified CDS sequence (opt5) from hemagglutinin__InfluenzaA__AEO01085

SEQ ID NO: 199263 - RNA, 1701 nt, Artificial Sequence; identical to SEQ ID NO: 194741
  derived and/or modified CDS sequence (opt5) from hemagglutinin__InfluenzaA__AEO01086

SEQ ID NO: 199264 - RNA, 1701 nt, Artificial Sequence; identical to SEQ ID NO: 195094
  derived and/or modified CDS sequence (opt5) from hemagglutinin__InfluenzaA__AEO01087

SEQ ID NO: 199265 - RNA, 1701 nt, Artificial Sequence; identical to SEQ ID NO: 194921
  derived and/or modified CDS sequence (opt5) from hemagglutinin__InfluenzaA__AEO01088

SEQ ID NO: 199266 - RNA, 1701 nt, Artificial Sequence; identical to SEQ ID NO: 195094
  derived and/or modified CDS sequence (opt5) from hemagglutinin__InfluenzaA__AEO01089

SEQ ID NO: 199267 - RNA, 1701 nt, Artificial Sequence; identical to SEQ ID NO: 195094
  derived and/or modified CDS sequence (opt5) from hemagglutinin__InfluenzaA__AEO01090

SEQ ID NO: 199268 - RNA, 1701 nt, Artificial Sequence; identical to SEQ ID NO: 195094
  derived and/or modified CDS sequence (opt5) from hemagglutinin__InfluenzaA__AEO01091

SEQ ID NO: 199269 - RNA, 1701 nt, Artificial Sequence
  derived and/or modified CDS sequence (opt5) from hemagglutinin__InfluenzaA__AEO01092
augaaggccauccuggugguccuccuguacaccuucgcuacagccaacgcggacacgcuuugcauuggcuaucacgcuaauaacagcaccgauacaguugacaccgugcuggagaaaaaugugacagucacccauuccgugaaccuccuggaagauaagcacaaugggaaacuuuguaagcugagaggaguugcuccccuccaucugggcaaaugcaacaucgccggguggauucugggaaauccugagugugaaucucucagcacagccuccucuuggagcuacaucguggagaccuccucuagcgacaacggcacgugcuauccgggggauuuuauugacuacgaagaacugcgggagcagcuuuccagcgucucuuccuucgaacgcuuugagaucuuccccaagaccagcucuuggccuaaucacgauuccaacaagggagugacagccgcuuguccccaugccggcgcgaaaucuuuuuauaagaaucugaucuggcucguuaaaaagggcaacagcuacccuaaacuguccaagagcuauauuaaugacaaggggaaagaagugcuuguccuguggggaauccaccaccccuccaccucugccgaucaacagagccucuaccagaacgcugacgccuacguguucgugggcacauccagauauagcaagaaauuuaagccugagauugcuauccggccgaaaguccgcgaucaggaggggagaaugaauuacuauuggacccugguugaacccggagacaagauuacguucgaggccacaggcaaccugguggugccucgguacgcguuugccauggaacgcaacgcugggucuggaaucauuaucuccgauacccccguccaugacugcaauacaaccugucaaaccccuaaaggcgccaucaacacaagccuccccuuccagaauauucacccgaucacgauuggcaagugcccuaaguaugugaaaucuaccaagcugagacuugcuacagggcugcggaacguucccagcauccagucccgcggacucuuuggcgccauugccggguucaucgagggaggcuggaccgggaugguggacggaugguacggcuaucaucaccagaaugaacaaggcucuggguacgcugcggaucugaaaagcacacagaacgccaucgacgagauuaccaauaaggucaacuccgugaucgagaaaaugaauacgcaguuuacagcuguuggaaaggaguucaaccaccuugagaagagaauugaaaaucugaacaaaaagguggaugacggcuuccucgauaucuggaccuacaaugccgagcugcugguccuccuggaaaacgagcggacccuugacuaucaugauagcaaugugaaaaaccuguacgagcgcgucagaucucagcucaagaacaaugccaaagaaauugggaacggauguuuugaguucuaucacaagugcgacaauacauguauggaauccgugaagaacggcaccuacgauuauccuaaauacagcgaggaagcuaagcugaaucgggaggagaucgacgggguuaaacuugaaucuacacgcaucuaucaaauucuggccaucuacuccacgguggcgagcucccucguccuggugguuucucugggcgcuauuagcuuuuggaugugcuccaacggaucucuccagugcagaaucuguauuuga

SEQ ID NO: 199270 - RNA, 1701 nt, Artificial Sequence; identical to SEQ ID NO: 194741
  derived and/or modified CDS sequence (opt5) from hemagglutinin__InfluenzaA__AEO01093

SEQ ID NO: 199271 - RNA, 1701 nt, Artificial Sequence; identical to SEQ ID NO: 194741
  derived and/or modified CDS sequence (opt5) from hemagglutinin__InfluenzaA__AEO01094

SEQ ID NO: 199272 - RNA, 1701 nt, Artificial Sequence; identical to SEQ ID NO: 197948
  derived and/or modified CDS sequence (opt5) from hemagglutinin__InfluenzaA__AEO01095

SEQ ID NO: 199273 - RNA, 1701 nt, Artificial Sequence; identical to SEQ ID NO: 195094
  derived and/or modified CDS sequence (opt5) from hemagglutinin__InfluenzaA__AEO01096

SEQ ID NO: 199274 - RNA, 1701 nt, Artificial Sequence; identical to SEQ ID NO: 195094
  derived and/or modified CDS sequence (opt5) from hemagglutinin__InfluenzaA__AEO01097

SEQ ID NO: 199275 - RNA, 1701 nt, Artificial Sequence; identical to SEQ ID NO: 195094
  derived and/or modified CDS sequence (opt5) from hemagglutinin__InfluenzaA__AEO01098

SEQ ID NO: 199276 - RNA, 1701 nt, Artificial Sequence; identical to SEQ ID NO: 194741
  derived and/or modified CDS sequence (opt5) from hemagglutinin__InfluenzaA__AEO01099

SEQ ID NO: 199277 - RNA, 1701 nt, Artificial Sequence; identical to SEQ ID NO: 194983
  derived and/or modified CDS sequence (opt5) from hemagglutinin__InfluenzaA__AEO01100

SEQ ID NO: 199278 - RNA, 1701 nt, Artificial Sequence; identical to SEQ ID NO: 194741
  derived and/or modified CDS sequence (opt5) from hemagglutinin__InfluenzaA__AEO01101

SEQ ID NO: 199279 - RNA, 1701 nt, Artificial Sequence; identical to SEQ ID NO: 194741
  derived and/or modified CDS sequence (opt5) from hemagglutinin__InfluenzaA__AEO01102

SEQ ID NO: 199280 - RNA, 1701 nt, Artificial Sequence; identical to SEQ ID NO: 195094
  derived and/or modified CDS sequence (opt5) from hemagglutinin__InfluenzaA__AEO01103

SEQ ID NO: 199281 - RNA, 1701 nt, Artificial Sequence; identical to SEQ ID NO: 195094
  derived and/or modified CDS sequence (opt5) from hemagglutinin__InfluenzaA__AEO01104

SEQ ID NO: 199282 - RNA, 1701 nt, Artificial Sequence
  derived and/or modified CDS sequence (opt5) from hemagglutinin__InfluenzaA__AEO01105
augaaggccauccuggugguccuccuguacaccuucgcuacagccaacgcggacacgcuuugcauuggcuaucacgcuaauaacagcaccgauacaguugacaccgugcuggagaagaaugugacagucacccauuccgugaaccuccuggaagauaagcacaaugggaaacuuuguaagcugagaggaguugcuccccuccaucugggcaaaugcaacaucgccggguggauucugggaaauccugagugugaaucucucagcacagccuccucuuggagcuacaucguggagaccuccucuagcgacaacggcacgugcuauccgggggauuuuauugacuacgaagaacugcgggagcagcuuuccagcgucucuuccuucgaacgcuuugagaucuuccccaagaccagcucuuggccuaaucacgauuccagcaagggagugacagccgcuuguccccaugccggcgcgaaaucuuuuuauaagaaccugaucuggcucguuaaaaagggcaauuccuacccuaaacugagcaaguccuauauuaacgacaaggggaaagaagugcuuguccuguggggaauccaccaccccucuaccagcgccgaucaacagucccucuaccagaaugcugacgccuacguguucgugggcacaagcagauauucuaagaaauuuaagccugagauugcuauccggccgaaaguccgcgaucaggaggggagaaugaacuacuauuggacccugguugaacccggagacaagauuacguucgaggccacaggcaaucugguggugccucgguacgcguuugccauggaacgcaacgcuggguccggaaucauuaucagcgauacccccguccaugacugcaacacaaccugucaaaccccuaaaggcgccaucaauacaucucuccccuuccagaacauucacccgaucacgauuggcaagugcccuaaguaugugaaaagcaccaagcugagacuugcuacagggcugcggaauguucccuccauccagucucgcggacucuuuggcgccauugccggguucaucgagggaggcuggaccgggaugguggacggaugguacggcuaucaucaccagaacgaacaaggcagcggguacgcugcggaucugaaauccacacagaaugccaucgacgagauuaccaacaaggucaauagcgugaucgagaaaaugaacacgcaguuuacagcuguuggaaaggaguucaaucaccuugagaagagaauugaaaaccugaauaaaaagguggaugacggcuuccucgauaucuggaccuacaacgccgagcugcugguccuccuggaaaaugagcggacccuugacuaucaugauucuaacgugaaaaaucuguacgagaagguccgcucccagcucaaaaacaacgccaaggaaauugggaauggauguuuugaguucuaucacaagugcgacaacacauguauggaaagcgugaaaaauggcaccuacgauuauccuaaguacucugaggaagcuaaacugaacagagaggagaucgacgggguuaaacuugaauccacacggaucuaucaaauucuggccaucuacagcacgguggcguccucucucguccuggugguuagccugggcgcuauuuccuuuuggaugugcucuaauggaagccuccagugccgcaucuguauuuga

SEQ ID NO: 199283 - RNA, 1701 nt, Artificial Sequence; identical to SEQ ID NO: 195094
  derived and/or modified CDS sequence (opt5) from hemagglutinin__InfluenzaA__AEO01106

SEQ ID NO: 199284 - RNA, 1701 nt, Artificial Sequence; identical to SEQ ID NO: 194741
  derived and/or modified CDS sequence (opt5) from hemagglutinin__InfluenzaA__AEO01107

SEQ ID NO: 199285 - RNA, 1701 nt, Artificial Sequence; identical to SEQ ID NO: 194741
  derived and/or modified CDS sequence (opt5) from hemagglutinin__InfluenzaA__AEO01108

SEQ ID NO: 199286 - RNA, 1701 nt, Artificial Sequence; identical to SEQ ID NO: 194741
  derived and/or modified CDS sequence (opt5) from hemagglutinin__InfluenzaA__AEO01109

SEQ ID NO: 199287 - RNA, 1701 nt, Artificial Sequence; identical to SEQ ID NO: 194741
  derived and/or modified CDS sequence (opt5) from hemagglutinin__InfluenzaA__AEO01110

SEQ ID NO: 199288 - RNA, 1701 nt, Artificial Sequence; identical to SEQ ID NO: 194741
  derived and/or modified CDS sequence (opt5) from hemagglutinin__InfluenzaA__AEO01111

SEQ ID NO: 199289 - RNA, 1701 nt, Artificial Sequence; identical to SEQ ID NO: 194741
  derived and/or modified CDS sequence (opt5) from hemagglutinin__InfluenzaA__AEO01112

SEQ ID NO: 199290 - RNA, 1701 nt, Artificial Sequence
  derived and/or modified CDS sequence (opt5) from hemagglutinin__InfluenzaA__AEO01113
augaaggccauccuggugguccuccuguacaccuucgcuacagccaacgcggacacgcuuugcauuggcuaucacgcuaauaacagcaccgauacaguugacaccgugcuggagaaaaaugugacagucacccauuccgugaaccuccuggaagauaagcacaaugggaaacuuuguaagcugagaggaguugcuccccuccaucugggcaaaugcaacaucgccggguggauucugggaaauccugagugugaaucucucagcacagccuccucuuggagcuacaucguggagaccuccucuagcgacaacggcacgugcuauccgggggauuuuauugacuacgaagaacugcgggagcagcuuuccagcgucucuuccuucgaacgcuuugagaucuuccccaagaccagcucuuggccuaaucacgauuccaacaagggagugacagccgcuugucugcaugccggcgcgaaaucuuuuuauaagaaucucaucuggcugguuaaaaagggcaacagcuaccccaaacuuuccaagagcuauauuaaugacaaggggaaagaagugcugguccucuggggaauccaccacccuuccaccucugccgaucaacagagccuguaccagaacgcugacgccuacguguucgugggcacauccagauauagcaagaaauuuaagcccgagauugcuauccggccuaaaguccgcgaucaggaggggagaaugaauuacuauuggacccugguugaaccgggagacaagauuacguucgaggccacaggcaaccucguggugccccgguacgcguuugccauggaacgcaacgcugggucuggaaucauuaucuccgauaccccuguccaugacugcaauacaaccugucaaacccccaaaggcgccaucaacacaagccugccuuuccagaauauucaccccaucacgauuggcaagugcccgaaguaugugaaaucuaccaaacuuagacuggcuacagggcuccggaacguuccuagcauccagucccgcggacuguuuggcgccauugccggguucaucgagggaggcuggaccgggaugguggacggaugguacggcuaucaucaccagaaugaacaaggcucuggguacgcugcggaucuuaagagcacacagaacgccaucgacgagauuaccaauaaggucaacuccgugaucgagaaaaugaauacgcaguuuacagcuguuggaaaggaguucaaccaccuggagaagagaauugaaaaucucaacaaaaagguggaugacggcuuccuggauaucuggaccuacaaugccgagcugcucguccugcuugaaaacgagcggacccuggacuaucaugauagcaaugugaaaaaccucuacgagaagguccgcucucagcugaaaaacaaugccaaggaaauugggaacggauguuuugaguucuaucacaagugcgacaauacauguauggaauccgugaaaaacggcaccuacgauuaucccaaguacagcgaggaagcuaaacuuaauagagaggagaucgacgggguuaagcuggaaucuacacggaucuaucaaauucucgccaucuacuccacgguggcgagcucccugguccuggugguuucucucggcgcuauuagcuuuuggaugugcuccaacggaucucugcagugccgcaucuguauuuga

SEQ ID NO: 199291 - RNA, 1701 nt, Artificial Sequence; identical to SEQ ID NO: 194983
  derived and/or modified CDS sequence (opt5) from hemagglutinin__InfluenzaA__AEO01114

SEQ ID NO: 199292 - RNA, 1701 nt, Artificial Sequence
  derived and/or modified CDS sequence (opt5) from hemagglutinin__InfluenzaA__AEO01115
auggaggccauccuggugguccuccuguacaccuucgcuacagccaacgcggacacgcuuugcauuggcuaucacgcuaauaacagcaccgauacaguugacaccgugcuggaaaagaaugugacagucacccauuccgugaaccuccuggaggauaaacacaaugggaaacuuuguaagcugagaggaguugcgccccuccaucugggcaagugcaacaucgccggguggauucugggaaauccugaaugugagucucucagcacagcuuccucuuggagcuacaucguggaaaccuccucuagcgacaacggcacgugcuauccgggggauuuuauugacuacgaggagcugcgggaacagcuuuccagcgucucuuccuucgagcgcuuugaaaucuuccccaaaaccagcucuuggccuaaucacgauuccaacaagggagugacagccgcuugucugcaugccggcgccaagagcuuuuauaaaaaucucaucuggcugguuaagaaaggcaacucuuaccccaaacuuuccaagagcuauauuaaugacaaggggaaggaggugcugguccucuggggaauccaccacccuuccaccucugccgaucaacagagccuguaccagaacgcugacgccuacguguucgugggcacauccagauauagcaaaaaguuuaaacccgagauugcuauccggccuaagguccgcgaucaggaagggagaaugaauuacuauuggacccugguugagccgggagacaaaauuacguucgaagccacaggcaaccucguggugccccgguacgcguuugccauggagcgcaacgcugggucuggaaucauuaucuccgauaccccuguccaugacugcaauacaaccugucaaacccccaagggcgccaucaacacaagccugccuuuccacaauauucaucccaucacgauuggcaaaugcccgaaguaugugaagucuaccaaacuuagacuggcuacagggcuccggaacguuccuagcauccagucccgcggacuguuuggcgccauugccggguucaucgaaggaggcuggaccgggaugguggacggaugguacggcuaucaccaccagaaugagcagggcucuggguacgcugcggaucuuaagagcacacaaaacgccaucgacgagauuaccaauaaagucaacuccgugaucgaaaagaugaauacgcaguuuacagcuguuggaaaagaguucaaccaucuggaaaagagaauugagaaucucaacaagaaaguggaugacggcuuccuggauaucuggaccuacaaugccgaacugcucguccugcuugagaacgagcggacccuggacuaucacgauagcaaugugaagaaccucuacgaaaaaguccgcucucagcugaagaacaaugccaaagagauugggaacggauguuuugaguucuaucauaagugcgacaauacauguauggaauccgugaagaacggcaccuacgauuaucccaaauacagcgaagaggcuaaacuuaauagagaggaaaucgacgggguuaagcuggagucuacacggaucuaucagauucucgccaucuacuccacgguggcgagcucccugguccuggugguuucucucggcgcuauuagcuuuuggaugugcuccaacggaucucugcaaugccgcaucuguauuuga

SEQ ID NO: 199293 - RNA, 1701 nt, Artificial Sequence; identical to SEQ ID NO: 194741
  derived and/or modified CDS sequence (opt5) from hemagglutinin__InfluenzaA__AEO01116

SEQ ID NO: 199294 - RNA, 1701 nt, Artificial Sequence; identical to SEQ ID NO: 194741
  derived and/or modified CDS sequence (opt5) from hemagglutinin__InfluenzaA__AEO01117

SEQ ID NO: 199295 - RNA, 1701 nt, Artificial Sequence; identical to SEQ ID NO: 195607
  derived and/or modified CDS sequence (opt5) from hemagglutinin__InfluenzaA__AEO01118

SEQ ID NO: 199296 - RNA, 1701 nt, Artificial Sequence; identical to SEQ ID NO: 194741
  derived and/or modified CDS sequence (opt5) from hemagglutinin__InfluenzaA__AEO01119

SEQ ID NO: 199297 - RNA, 1701 nt, Artificial Sequence
  derived and/or modified CDS sequence (opt5) from hemagglutinin__InfluenzaA__AEO01120
augaaggccauccuggugguccuccuguacaccuucgcuacagccaacgcggacacgcuuugcauuggcuaucacgcuaauaacagcaccgauacaguugacaccgugcuggagaaaaaugugacagucacccauuccgugaaccuccuggaagauaagcacaaugggaaacuuuguaagcugagaggaguugcuccccuccaucugggcaaaugcaacaucgccggguggauucugggaaauccugagugugaaucucucagcacagccuccucuuggagcuacaucguggagaccuccucuagcgacaacggcacgugcuauccgggggauuuuauugacuacgaagaacugcgggagcagcuuuccagcgucucuuccuucgaacgcuuugagaucuuccccaagaccagcucuuggccuaaucacgauuccaacaagggagugacagccgcuuguccccaugccggcgcgaaaucuuuuuauaagaaucugaucuggcucguuaaaaagggcaacagcuacccuaaacuguccaagagcuauauuaaugacaaggggaaagaagugcuuguccuguggggaauccaccaccccuccaccucugccgaucaacagagccucuaccagaacgcugacgccuacguguucgugggcacauccagauauagcaagaaauuuaagccugagauugcuauccggccgaaaguccgcgagcaggaagggagaaugaauuacuauuggacccugguugagcccggagauaagauuacguucgaagccacaggcaaccugguggugccucgguacgcguuugccauggagcgcaacgcugggucuggaaucauuaucuccgacacccccguccaugauugcaauacaaccugucaaaccccuaaaggcgccaucaacacaagccuccccuuccagaauauucacccgaucacgauuggcaagugcccuaaguaugugaaaucuaccaagcugagacuugcuacagggcugcggaacauccccagcauucagucccgcggacucuuuggcgccaucgccggguucaucgaaggaggcuggaccgggaugguugacggaugguacggcuaucaucaccagaaugagcaaggcucuggguacgcugcggaccugaaaagcacacagaacgccauugaugagaucaccaauaaggugaacuccgucauugaaaagaugaauacgcaguuuacagcugugggaaaggaguucaaccaccuugaaaagagaaucgagaaucugaacaaaaagguugacgauggcuuccucgacguguggaccuacaaugccgaacugcugguccuccuggagaacgagcggacccuugauuaucaugacagcaaugugaaaaaccuguacgaaaagguccgcucucagcucaaaaacaaugccaaggagauugggaacggauguuuugaguucuaucacaagugcgauaauacauguauggaguccgugaaaaacggcaccuacgacuauccuaaguacagcgaagaggcuaaacugaauagagaggaaaucgaugggguuaaacuugagucuacacggaucuaucaaauucuggccaucuacuccacgguggcgagcucccucguccuggugguuucucugggcgcuauuagcuuuuggaugugcuccaacggaucucuccagugccgcaucuguauuuga

SEQ ID NO: 199298 - RNA, 1701 nt, Artificial Sequence; identical to SEQ ID NO: 194741
  derived and/or modified CDS sequence (opt5) from hemagglutinin__InfluenzaA__AEO01121

SEQ ID NO: 199299 - RNA, 1701 nt, Artificial Sequence; identical to SEQ ID NO: 195094
  derived and/or modified CDS sequence (opt5) from hemagglutinin__InfluenzaA__AEO01122

SEQ ID NO: 199300 - RNA, 1701 nt, Artificial Sequence; identical to SEQ ID NO: 194741
  derived and/or modified CDS sequence (opt5) from hemagglutinin__InfluenzaA__AEO01123

SEQ ID NO: 199301 - RNA, 1701 nt, Artificial Sequence; identical to SEQ ID NO: 194741
  derived and/or modified CDS sequence (opt5) from hemagglutinin__InfluenzaA__AEO01124

SEQ ID NO: 199302 - RNA, 1701 nt, Artificial Sequence; identical to SEQ ID NO: 195094
  derived and/or modified CDS sequence (opt5) from hemagglutinin__InfluenzaA__AEO01125

SEQ ID NO: 199303 - RNA, 1701 nt, Artificial Sequence
  derived and/or modified CDS sequence (opt5) from hemagglutinin__InfluenzaA__AEO01126
augaaggccacccuggugguccuccuguacacauucgcuacggccaacgcggacacccuuugcaucggcuaucacgcuaauaacagcacagauaccguugacacagugcuggagaaaaaugugaccgucacacauuccgugaaccuccuggaagauaagcacaaugggaaacuuuguaagcugagaggaguugcuccccuccaucugggcaaaugcaacauugccggguggauccugggaaauccugagugugaaucucucagcaccgccuccucuuggagcuacauuguggagacguccucuagcgacaacggaaccugcuauccgggggauuuuaucgacuacgaagaacugcgggagcagcuuuccagcgucucuuccuucgaacgcuuugagauuuuccccaagacaagcucuuggccuaaucacgauuccaacaagggagugaccgccgcuuguccccaugccggcgcgaaaucuuuuuauaagaaucugaucuggcucguuaaaaagggcaacagcuacccuaaacuguccaagagcuauaucaaugacaaggggaaagaagugcuuguccuguggggcauucaccaccccuccacaucugccgaucaacagagccucuaccagaacgcugacgccuacguguucgugggcaccuccagauauagcaagaaauuuaagccugagaucgcuauucggccgaaaguccgcgagcaggaagggagaaugaauuacuauuggacgcugguugagcccggagauaagaucacauucgaagccaccggcaaccugguggugccucgguacgcguuugccauggagcgcaacgcugggucuggaauuaucauuuccgacacacccguccaugauugcaauaccaccugucaaacaccuaaaggcgccaucaacacgagccuccccuuccagaauauccacccgauuaccaucggcaagugcccuaaguaugugaaaucuacaaagcugagacuugcuaccgggcugcggaacguucccagcauucagucccgcggacucuuuggcgccaucgccggguucauugaaggaggcuggacagggaugguggacggaugguacggcuaucaucaccagaaugagcaaggcucuggguacgcugcggaccugaaaagcacccagaacgccaucgaugagaucacgaauaaggucaacuccgugauugaaaagaugaauacacaguuuaccgcuguuggaaaggaguucaaccaccuugaaaagagaaucgagaaucugaacaaaaagguggacgauggcuuccucgacauuuggaccuacaaugccgaacugcugguccuccuggagaacgagcggacacuugauuaucaugacagcaaugugaaaaaccuguacgaaaagguccgcucucagcucaaaaacaaugccaaggagaucgggaacggauguuuugaguucuaucacaagugcgauaauaccuguauggaguccgugaaaaacggcacauacgacuauccuaaguacagcgaagaggcuaaacugaauagagaggaaauugaugggguuaaacuugagucuacgcggaucuaucaaauccuggccauuuacuccaccguggcgagcucccucguccuggugguuucucugggcgcuaucagcuuuuggaugugcuccaacggaucucuccagugccgcauuuguaucuga

SEQ ID NO: 199304 - RNA, 1701 nt, Artificial Sequence; identical to SEQ ID NO: 194741
  derived and/or modified CDS sequence (opt5) from hemagglutinin__InfluenzaA__AEO01127

SEQ ID NO: 199305 - RNA, 1701 nt, Artificial Sequence; identical to SEQ ID NO: 194741
  derived and/or modified CDS sequence (opt5) from hemagglutinin__InfluenzaA__AEO01128

SEQ ID NO: 199306 - RNA, 1701 nt, Artificial Sequence; identical to SEQ ID NO: 195094
  derived and/or modified CDS sequence (opt5) from hemagglutinin__InfluenzaA__AEO01129

SEQ ID NO: 199307 - RNA, 1701 nt, Artificial Sequence; identical to SEQ ID NO: 194741
  derived and/or modified CDS sequence (opt5) from hemagglutinin__InfluenzaA__AEO01130

SEQ ID NO: 199308 - RNA, 1701 nt, Artificial Sequence; identical to SEQ ID NO: 195094
  derived and/or modified CDS sequence (opt5) from hemagglutinin__InfluenzaA__AEO01131

SEQ ID NO: 199309 - RNA, 1701 nt, Artificial Sequence; identical to SEQ ID NO: 194741
  derived and/or modified CDS sequence (opt5) from hemagglutinin__InfluenzaA__AEO01132

SEQ ID NO: 199310 - RNA, 1701 nt, Artificial Sequence
  derived and/or modified CDS sequence (opt5) from hemagglutinin__InfluenzaA__AEO01133
augaaggccauccuggugguccuccuguacaccuucgcuacagccaacgcggacacgcuuugcauuggcuaucacgcuaauaacagcaccgauacaguugacaccgugcuggagaaaaaugugacagucacccauuccgugaacauccucgaagauaagcacaaugggaaacuguguaaacuuagaggaguugcuccccugcaucucggcaagugcaacauugccggguggauccugggaaauccugagugugaaucucugagcacagccuccucuuggagcuacauuguggagaccuccucuagcgacaacggcacgugcuauccgggggauuuuaucgacuacgaagaacuccgggagcagcuguccagcgucucuuccuucgaacgcuuugagaucuuccccaagaccagcucuuggccuaaucacgauuccaacaagggagugacagccgcuuguccccaugccggcgcgaaaucuuuuuauaagaaucuuauuuggcugguuaaaaagggcaacagcuacccuaaacucuccaagagcuauaucaaugacaaggggaaagaagugcugguccuuuggggcauucaccaccccuccaccucugccgaucaacagagccuguaccagaacgcugacgccuacguguucgugggauccagcagauauucuaagaaauuuaagccugagaucgcuauucggccgaaaguccgcgaucaggaggggagaaugaauuacuauuggacacucguugaacccggagacaagaucaccuucgaggccacgggcaaccugguggugccucgguacgcguuugccauggaacgcaacgcuggguccggaauuaucaucagcgauacacccguccaugacugcaauaccacaugucaaaccccuaaaggcgccauuaacaccucucugcccuuccagaauauccacccgauuacaaucggcaagugcccuaaguaugugaaaagcacgaagcucagacuggcuaccgggcuucggaacguucccuccauucagucucgcggacuguuuggcgccaucgccggguucaucgagggaggcuggacagggaugguggacggaugguacggcuaucaucaccagaaugaacaaggcagcggguacgcugcggaucucaaauccacccagaacgccauugacgagaucacaaauaaggucaacagcgugauugagaaaaugaauacccaguuuacggcuguuggaaaggaguucaaccaccuggagaagagaaucgaaaaucuuaacaaaaagguggaugacggcuuccuggauauuuggacauacaaugccgagcuccugguccugcucgaaaacgagcggacccuggacuaucaugauucuaaugugaaaaaccuuuacgagaagguccgcucccagcugaaaaacaaugccaaggaaaucgggaacggauguuuugaguucuaucacaagugcgacaauaccuguauggaaagcgugaaaaacggcacauacgauuauccuaaguacucugaggaagcuaaacucaauagagaggagaucgacgggguuaagcuggaauccaccaugauuuaucaaauccuugccauuuacagcacaguggcguccucucugguccucgugguuagccugggcgcuaucuccuuuuggaugugcucuaacggaagccugcagugccggauuuguaucuga

SEQ ID NO: 199311 - RNA, 1701 nt, Artificial Sequence; identical to SEQ ID NO: 195094
  derived and/or modified CDS sequence (opt5) from hemagglutinin__InfluenzaA__AEO01134

SEQ ID NO: 199312 - RNA, 1701 nt, Artificial Sequence; identical to SEQ ID NO: 195094
  derived and/or modified CDS sequence (opt5) from hemagglutinin__InfluenzaA__AEO01135

SEQ ID NO: 199313 - RNA, 1701 nt, Artificial Sequence; identical to SEQ ID NO: 194741
  derived and/or modified CDS sequence (opt5) from hemagglutinin__InfluenzaA__AEO01136

SEQ ID NO: 199314 - RNA, 1701 nt, Artificial Sequence; identical to SEQ ID NO: 195188
  derived and/or modified CDS sequence (opt5) from hemagglutinin__InfluenzaA__AEO01137

SEQ ID NO: 199315 - RNA, 1701 nt, Artificial Sequence; identical to SEQ ID NO: 195188
  derived and/or modified CDS sequence (opt5) from hemagglutinin__InfluenzaA__AEO01138

SEQ ID NO: 199316 - RNA, 1701 nt, Artificial Sequence; identical to SEQ ID NO: 194741
  derived and/or modified CDS sequence (opt5) from hemagglutinin__InfluenzaA__AEO01139

SEQ ID NO: 199317 - RNA, 1701 nt, Artificial Sequence; identical to SEQ ID NO: 194741
  derived and/or modified CDS sequence (opt5) from hemagglutinin__InfluenzaA__AEO01140

SEQ ID NO: 199318 - RNA, 1701 nt, Artificial Sequence; identical to SEQ ID NO: 194741
  derived and/or modified CDS sequence (opt5) from hemagglutinin__InfluenzaA__AEO01141

SEQ ID NO: 199319 - RNA, 1701 nt, Artificial Sequence; identical to SEQ ID NO: 194741
  derived and/or modified CDS sequence (opt5) from hemagglutinin__InfluenzaA__AEO01142

SEQ ID NO: 199320 - RNA, 1701 nt, Artificial Sequence
  derived and/or modified CDS sequence (opt5) from hemagglutinin__InfluenzaA__AEO01144
augaaggccauccuggugguccuccuguacaccuucgcuacagccaacgcggacacgcuuugcauuggcuaucacgcuaauaacagcaccgauacaguugacaccgugcuggagaagaaugugacagucacccauuccgugaaccuccuggaagauaagcacaaugggaaacuuuguaagcugagaggaguugcuccccuccaucugggcaaaugcaacaucgccggguggauucugggaaauccugagugugaaucucucagcacagccuccucuuggagcuacaucguggagaccuccauuucugacaacggcacgugcuauccgggggauuuuaucgacuacgaagaacugcgggagcagcuuagcuccgucagcucuuucgaacgcuuugagaucuuccccaagaccuccagcuggccuaaucacgauucuaacaagggagugacagccgcuuguccccaugccggcgcgaaaggcuuuuauaagaaucugauuuggcucguuaaaaaggggaacuccuacccuaaacugagcaagucuuauaucaaugacaagggaaaagaagugcuuguccuguggggcauucaccaccccuccaccagcgccgaucaacagucccucuaccagaacgcugacgccuacguguucguggggacaucuagauauagcaagaaauuuaagccugagaucgcuauucggccgaaaguccgcgaucaggagggaagaaugaauuacuauuggacccugguugaacccggcgacaagaucacguucgaggccacagggaaccugguggugccucgguacgcguuugccauggaacgcaacgcuggauccggcauuaucaucagcgauacccccguccaugacugcaauacaaccugucaaaccccuaaaggcgccauuaacacaucucuccccuuccagaauauccacccgauuacgaucgggaagugcccuaaguaugugaaauccaccaagcugagacuugcuacaggacugcggaacguucccagcauucagucucgcggccucuuuggggccaucgccggauucaucgagggcggguggaccggaaugguggacggcugguacggcuaucaucaccagaaugaacaagggagcggauacgcugcggaucugaaauccacacagaacgccauugacgagaucaccaauaaggucaacucugugauugagaaaaugaauacgcaguuuacagcuguuggcaaggaguucaaccaccuugagaagagaaucgaaaaucugaacaaaaagguggaugacggguuccucgauauuuggaccuacaaugccgagcugcugguccuccuggaaaacgagcggacccuugacuaucaugauagcaaugugaaaaaccuguacgagaagguccgcucccagcucaaaaacaaugccaaggaaaucggaaacggcuguuuugaguucuaucacaagugcgacaauacauguauggaaagcgugaaaaacgggaccuacgauuauccuaaguacucugaggaagcuaaacugaauagagaggagaucgacggcguuaaacuugaauccacacggauuuaucaaauccuggccauuuacagcacgguggcgucuucccucguccuggugguuagccugggagcuaucuccuuuuggaugugcucuaacggcagccuccagugccgcauuuguaucuga

SEQ ID NO: 199321 - RNA, 1701 nt, Artificial Sequence; identical to SEQ ID NO: 194921
  derived and/or modified CDS sequence (opt5) from hemagglutinin__InfluenzaA__AEO01145

SEQ ID NO: 199322 - RNA, 1701 nt, Artificial Sequence
  derived and/or modified CDS sequence (opt5) from hemagglutinin__InfluenzaA__AEO01146
augaaggccauccuggugguccuccuguacaccuucgcuacagccaacgcggacacgcuuugcauuggcuaucacgcuaauaacagcaccgauacaguugacaccgugcuggagaaaaaugugacagucacccauuccgugaaccuccuggaagauaagcacaaugggaaacuuuguaagcugagaggaguugcuccccuccaucugggcaaaugcaacaucgccggguggauucugggaaauccugagugugaaucucucagcacagccuccucuuggagcuacaucguggagaccuccucuagcgacaacggcacgugcuauccgggggauuuuauugacuacgaagaacugcgggagcagcuuuccagcgucucuuccuucgaacgcuuugagaucuuccccaagaccagcucuuggccuaaucacgauuccaacaagggagugacagccgcuuguccccaugccggcgcgaaaucuuuuuauaagaaucugaucuggcucguuaaaaagggcaacagcuacccuaaacuguccaagagcuauauuaaugacaaggggaaagaagugcuuguccuguggggaauccaccaccccuccaccucugccgaucaacagagccucuaccagaacgcugacgccuacguguucgugggcacauccagauauagcaagaaauuuaauccugagauugcuauccggccgaagguccgcgaucaggaggggagaaugaacuacuauuggacccugguugaacccggagacaaaauuacguucgaggccacaggcaaccugguggugccucgguacgcguuugccauggaacgcaaugcugggucuggaaucauuaucuccgauacccccguccaugacugcaacacaaccugucaaaccccuaagggcgccaucaauacaagccuccccuuccagaacauucacccgaucacgauuggcaaaugcccuaaguaugugaagucuaccaaacugagacuugcuacagggcugcggaauguucccagcauccagucccgcggacucuuuggcgccauugccggguucaucgagggaggcuggaccgggaugguggacggaugguacggcuaucaucaccagaacgaacaaggcucuggguacgcugcggaucuuaagagcacacagaaugccaucgacgagauuaccaacaaagucaauuccgugaucgagaagaugaacacgcaguuuacagcuguuggaaaagaguucaaucaccuggagaagagaauugaaaaccugaauaagaaaguggaugacggcuuccucgauaucuggaccuacaacgccgagcugcugguccuccuggaaaaugagcggacccuugacuaucaugauagcaacgugaagaaccuguacgagaaaguccgcucucagcucaagaauaacgccaaagaaauugggaauggauguuuugaguucuaucacaagugcgacaacacauguauggaauccgugaagaauggcaccuacgauuauccuaaauacagcgaggaagcuaagcugaacagagaggagaucgacgggguuaaacuugaaucuacacggaucuaucaaauucuggccaucuacuccacgguggcgagcucccucguccuggugguuucucugggcgcuauuagcuuuuggaugugcuccaauggaucucuccagugccgcaucuguauuuga

SEQ ID NO: 199323 - RNA, 1701 nt, Artificial Sequence; identical to SEQ ID NO: 194741
  derived and/or modified CDS sequence (opt5) from hemagglutinin__InfluenzaA__AEO01147

SEQ ID NO: 199324 - RNA, 1701 nt, Artificial Sequence; identical to SEQ ID NO: 195094
  derived and/or modified CDS sequence (opt5) from hemagglutinin__InfluenzaA__AEO01148

SEQ ID NO: 199325 - RNA, 1701 nt, Artificial Sequence; identical to SEQ ID NO: 195094
  derived and/or modified CDS sequence (opt5) from hemagglutinin__InfluenzaA__AEO01149

SEQ ID NO: 199326 - RNA, 1701 nt, Artificial Sequence; identical to SEQ ID NO: 197948
  derived and/or modified CDS sequence (opt5) from hemagglutinin__InfluenzaA__AEO01150

SEQ ID NO: 199327 - RNA, 1701 nt, Artificial Sequence; identical to SEQ ID NO: 194741
  derived and/or modified CDS sequence (opt5) from hemagglutinin__InfluenzaA__AEO01151

SEQ ID NO: 199328 - RNA, 1701 nt, Artificial Sequence
  derived and/or modified CDS sequence (opt5) from hemagglutinin__InfluenzaA__AEO01152
augaaggccauccugauugugcuccuguacaccuucgcuacagccaacgcggacacgcuuugcaucggcuaucacgcuaauaacagcaccgauacagucgacaccguucuggagaagaaugugacagugacccauuccgucaaccuccuggaagauaagcacaaugggaaacuuuguaagcugagaggaguggcuccccuccaucugggcaaaugcaacauugccggguggauccugggaaauccugagugugaaucucucagcacagccuccucuuggagcuacauuguugagaccuccucuagcgacaacggcacgugcuauccgggggauuuuaucgacuacgaagaacugcgggagcagcuuuccagcgugucuuccuucgaacgcuuugagaucuuccccaagaccagcucuuggccuaaucacgauuccaacaagggagucacagccgcuuguccccaugccggcgcgaaaucuuuuuauaagaaucugauuuggcucgugaaaaagggcaacagcuacccuaaacuguccaagagcuauaucaaugacaaggggaaagaaguucuugugcuguggggcauucaccaccccuccaccucugccgaucaacagagccucuaccagaacgcugacgccuacgucuucgugggaacauccagauauagcaagaaauuuaagccugagaucgcuauucggccgaaagugcgcgggcaggagggaagaaugaauuacuauuggacccuggucgaacccggcgauaagaucacguucgaggccacagggaaccugguugugccucgguacgcguuugccauggaacgcaacgcuggaucuggcauuaucaucuccgacacccccgugcaugauugcaauacaaccugucaaaccccuaaaggcgccauuaacacaagccuccccuuccagaauauccacccgauuacgaucgggaagugcccuaaguaugucaaaucuaccaagcugagacuugcuacaggacugcggaacgugcccagcauucagucccgcggccucuuuggggccaucgccggauucaucgagggcggguggaccggaaugguugacggcugguacggcuaucaucaccagaaugaacaagggucuggauacgcugcggaccugaaaagcacacagaacgccauugaugagaucaccaauaaggugaacuccgucauugagaaaaugaauacgcaguuuacagcugugggcaaggaguucaaccaccuugagaagagaaucgaaaaucugaacaaaaagguugacgauggguuccucgacauuuggaccuacaaugccgagcugcuggugcuccuggaaaacgagcggacccuugauuaucaugacagcaaugucaaaaaccuguacgagaaggugcgcucucagcucaaaaacaaugccaaggaaaucggaaacggcuguuuugaguucuaucacaagugcgauaauacauguauggaauccgucaaaaacgggaccuacgacuauccuaaguacagcgaggaagcuaaacugaauagagaggagaucgauggcgugaaacuugaaucuacacggauuuaucaaauccuggccauuuacuccacgguugcgagcucccucgugcuggucgugucucugggagcuaucagcuuuuggaugugcuccaacggcucucuccagugccgcauuuguaucuga

SEQ ID NO: 199329 - RNA, 1701 nt, Artificial Sequence
  derived and/or modified CDS sequence (opt5) from hemagglutinin__InfluenzaA__AEO01153
augaaggccauccuggugguccuccuguacaccuucgcuacagccaacgcggacacgcuuugcauuggcuaucacgcuaauaacagcaccgauacaguugacaccgugcuggagaagaaugugacagucacccauuccgugaaccuccuggaagauaagcacaaugggaaacuuuguaagcugagaggaguugcuccccuccaucugggcaaaugcaacaucgccggguggauucugggaaauccugagugugaaucucucagcacagccuccucuuggagcuacaucguggagaccuccucuagcgacaacggcacgugcuauccgggggauuuuauugacuacgaagaacugcgggagcagcuuuccagcgucucuuccuucgaacgcuuugagaucuuccccaagaccagcucuuggccuaaucacgauuccaacaagggagugacagccgcuuguccccaugccggcgcgaaaucuuuuuauaagaaucugaucuggcucguuaaaaagggcaacagcuacccuaaacuguccaagagcuauauuaauaacaaggggaaagaagugcuuguccuguggggaauccaccaccccuccaccucugccgaccaacagagccucuaccagaaugcugaugccuacguguucgugggcacauccagauauagcaagaaauuuaagccugagauugcuauccggccgaaaguccgcgaccaggaggggagaaugaacuacuauuggacccugguugaacccggagauaagauuacguucgaggccacaggcaaccugguggugccucgguacgcguuugccauggaacgcaaugcugggucuggaaucauuaucuccaacacccccguccaugacugcaauacaaccugucaaaccccuaaaggcgccaucaacacaagccuccccuuccagaauauucacccgaucacgauuggcaagugcccuaaguaugugaaaucuaccaagcugagacuugcuacagggcugcggaacguucccagcauccagucccgcggacucuuuggcgccauugccggguucaucgagggaggcuggaccgggaugguggauggaugguacggcuaucaucaccagaaugaacaaggcucuggguacgcugcggaccugaaaagcacacagaacgccaucgacgagauuaccaauaaggucaacuccgugaucgagaaaaugaauacgcaguuuacagcuguuggaaaggaguucaaccaccuugagaagagaauugaaaaucugaacaaaaagguggaugacggcuuccucgauaucuggaccuacaaugccgagcugcugguccuccuggaaaacgagcggacccuugacuaucaugauagcaacgugaaaaaucuguacgagaagguccgcucucagcucaaaaacaaugccaaggaaauugggaacggauguuuugaguucuaucacaagugcgacaauacauguauggaauccgugaaaaacggcaccuacgauuauccuaaguacagcgaggaagcuaaacugaauagagaggagaucgacgggguuaaacuugaaucuacacggaucuaucaaauucuggccaucuacuccacgguggcgagcucccucguccuggugguuucucugggcgcuauuagcuuuuggaugugcuccaacggaucucuccagugccgcaucuguauuuga

SEQ ID NO: 199330 - RNA, 1701 nt, Artificial Sequence; identical to SEQ ID NO: 194741
  derived and/or modified CDS sequence (opt5) from hemagglutinin__InfluenzaA__AEO01154

SEQ ID NO: 199331 - RNA, 1701 nt, Artificial Sequence; identical to SEQ ID NO: 195094
  derived and/or modified CDS sequence (opt5) from hemagglutinin__InfluenzaA__AEO01155

SEQ ID NO: 199332 - RNA, 1701 nt, Artificial Sequence; identical to SEQ ID NO: 195094
  derived and/or modified CDS sequence (opt5) from hemagglutinin__InfluenzaA__AEO01156

SEQ ID NO: 199333 - RNA, 1701 nt, Artificial Sequence; identical to SEQ ID NO: 194741
  derived and/or modified CDS sequence (opt5) from hemagglutinin__InfluenzaA__AEO01157

SEQ ID NO: 199334 - RNA, 1701 nt, Artificial Sequence; identical to SEQ ID NO: 194741
  derived and/or modified CDS sequence (opt5) from hemagglutinin__InfluenzaA__AEO01158

SEQ ID NO: 199335 - RNA, 1701 nt, Artificial Sequence; identical to SEQ ID NO: 194741
  derived and/or modified CDS sequence (opt5) from hemagglutinin__InfluenzaA__AEO01159

SEQ ID NO: 199336 - RNA, 1701 nt, Artificial Sequence
  derived and/or modified CDS sequence (opt5) from hemagglutinin__InfluenzaA__AEO01160
augaaggccauccugguggcucuccuguacaccuucgccacagcgaacgcugacacgcuuugcauuggcuaucacgccaauaacagcaccgauacagucgacaccguucuggagaaaaaugugacagugacccauuccgucaaccuccuggaagauaagcacaaugggaaacuuuguaagcugagaggaguggcuccccuccaucugggcaaaugcaacaucgccggguggauucugggaaauccugagugugaaucucucagcacagccuccucuuggagcuacaucguugagaccuccucuagcgacaacggcacgugcuauccgggggauuuuauugacuacgaagaacugcgggagcagcuuuccagcgugucuuccuucgaacgcuuugagaucuuccccaagaccagcucuuggccuaaucacgauuccaacaagggagucacagcugccuguccccaugcgggcgccaagagcuuuuauaagaaucugaucuggcucgugaaaaagggcaacucuuacccuaaacuguccaagagcuauauuaaugacaaggggaaagaaguucuugugcuguggggaauccaccaccccuccaccucugcugaucaacagagccucuaccagaacgccgacgcuuacgucuucgugggcacauccagauauagcaagaaauuuaagccugagauugccauccggccgaaagugcgcgagcaggaagggagaaugaauuacuauuggacccuggucgagcccggagauaagauuacguucgaagcgacaggcaaccugguugugccucgguacgccuuugcuauggagcgcaacgccgggucuggaaucauuaucuccgacacccccgugcaugauugcaauacaaccugucaaaccccuaaaggcgcuaucaacacaagccuccccuuccagaauauucacccgaucacgauuggcaagugcccuaaguaugucaaaucuaccaagcugagacuugccacagggcugcggaacgugcccagcauccagucccgcggacucuuuggcgccauugcuggguucaucgaaggaggcuggaccgggaugguugacggaugguacggcuaucaucaccagaaugagcaaggcucuggguacgcggccgaccugaaaagcacacagaacgcuaucgaugagauuaccaauaaggugaacuccgucaucgagaaaaugaauacgcaguuuacagccgugggaaaggaguucaaccaccuugaaaagagaauugagaaucugaacaaaaagguugacgauggcuuccucgacaucuggaccuacaaugccgaacugcuggugcuccuggagaacgagcggacccuugauuaucaugacagcaaugucaaaaaccuguacgaaaaggugcgcucucagcucaaaaacaaugcuaaggagauugggaacggauguuuugaguucuaucacaagugcgauaauacauguauggaauccgucaaaaacggcaccuacgacuauccuaaguacagcgaagaggccaaacugaauagagaggaaaucgauggggugaaacuugagucuacacggaucuaucaaauucuggcgaucuacuccacgguugcuagcucccucgugcuggucgugucucugggcgccauuagcuuuuggaugugcuccaacggaucucuccagugccgcaucuguauuuga

SEQ ID NO: 199337 - RNA, 1701 nt, Artificial Sequence; identical to SEQ ID NO: 194741
  derived and/or modified CDS sequence (opt5) from hemagglutinin__InfluenzaA__AEO01161

SEQ ID NO: 199338 - RNA, 1701 nt, Artificial Sequence; identical to SEQ ID NO: 195094
  derived and/or modified CDS sequence (opt5) from hemagglutinin__InfluenzaA__AEO01162

SEQ ID NO: 199339 - RNA, 1701 nt, Artificial Sequence; identical to SEQ ID NO: 195094
  derived and/or modified CDS sequence (opt5) from hemagglutinin__InfluenzaA__AEO01163

SEQ ID NO: 199340 - RNA, 1701 nt, Artificial Sequence; identical to SEQ ID NO: 195094
  derived and/or modified CDS sequence (opt5) from hemagglutinin__InfluenzaA__AEO01164

SEQ ID NO: 199341 - RNA, 1701 nt, Artificial Sequence
  derived and/or modified CDS sequence (opt5) from hemagglutinin__InfluenzaA__AEO01165
augaaggccauccuggugguccuccuguacaccuucgcuacagccaacgcggacacgcuuugcauuggcuaucacgcuaauaacagcaccgauacaguugacaccgugcuggagaaaaaugugacagucacccauuccgugaaccuccuggaagauaagcacaaugggaaacuuuguaagcugagaggaguugcuccccuccaucugggcaaaugcaacaucgccggguggauucugggaaauccugagugugaaucucucagcacagccuccucuuggagcuacaucguggagaccuccucuagcgacaacggcacgugcuauccgggggauuuuauugacuacgaagaacugcgggagcagcuuuccagcgucucuuccuucgaacgcuuugagaucuuccccaagaccagcucuuggccuaaucacgauuccaacaagggagugacagccgcuuguccccaugccggcgcgaaaucuuuuuauaagaaucugaucuggcucguuaaaaagggcaacagcuacccuaaauucuccaagagcuauauuaaugacaaggggaaagaagugcugguccuuuggggaauccaccaccccuccaccucugccgaucaacagagccuguaccagaacgcugacgccuacguguuugugggcacauccagauauagcaagaaauucaagccugagauugcuauccggccgaaaguccgcgaucaggaggggagaaugaauuacuauuggacccucguugaacccggagacaagauuacguuugaggccacaggcaaccugguggugccucgguacgcguucgccauggaacgcaacgcugggucuggaaucauuaucuccgauacccccguccaugacugcaauacaaccugucaaaccccuaaaggcgccaucaacacaagccugcccuuucagaauauucacccgaucacgauuggcaagugcccuaaguaugugaaaucuaccaagcucagacuggcuacagggcuucggaacguucccagcauccagucccgcggacuguucggcgccauugccggguuuaucgagggaggcuggaccgggaugguggacggaugguacggcuaucaucaccagaaugaacaaggcucuggguacgcugcggaucucaaaagcacacagaacgccaucgacgagauuaccaauaaggucaacuccgugaucgagaaaaugaauacgcaguucacagcuguuggaaaggaguucaaccaccuggagaagagaauugaaaaucuuaacaaaaagguggaugacggcuuucuggauaucuggaccuacaaugccgagcuccugguccugcucgaaaacgagcggacccuggacuaucaugauagcaaugugaaaaaccuuuacgagaagguccgcucucagcugaaaaacaaugccaaggaaauugggaacggauguuucgaguuuuaucacaagugcgacaauacauguauggaauccgugaaaaacggcaccuacgauuauccuaaguacagcgaggaagcuaaacucaauagagaggagaucgacgggguuaagcuggaaucuacacggaucuaucaaauucuugccaucuacuccacgguggcgagcucccugguccucgugguuucucugggcgcuauuagcuucuggaugugcuccaacggaucucugcagugccgcaucuguauuuga

SEQ ID NO: 199342 - RNA, 1701 nt, Artificial Sequence; identical to SEQ ID NO: 195094
  derived and/or modified CDS sequence (opt5) from hemagglutinin__InfluenzaA__AEO01166

SEQ ID NO: 199343 - RNA, 1701 nt, Artificial Sequence
  derived and/or modified CDS sequence (opt5) from hemagglutinin__InfluenzaA__AEO01167
augaaggccauccuggugguccuccuguacaccuucgcuacagccaacgcggacacgcuuugcauuggcuaucacgcuaauaacagcaccgauacaguugacaccgugcuggagaaaaaugugacagucacccauuccgugaaccuccuggaagauaagcacaaugggaaacuuuguaagcugagaggaguugcuccccuccaucugggcaaaugcaacaucgccggguggauucugggaaauccugagugugaaucucucagcacagccuccucuuggagcuacaucguggagaccuccucuagcgacaacggcacgugcuauccgggggauuuuauugacuacgaagaacugcgggagcagcuuuccagcgucucuuccuucgaacgcuuugagaucuuccccaagaccagcucuuggccuaaucacgauuccaacaagggagugacagccgcuuguccccaugccggcgcgaaaucuuuuuauaagaaucugaucuggcucguuaaaaagggcaacagcuacccuaaacuguccaagagcuauauuaaugacaaggggaaagaagugcuuguccuguggggaauccaccaccccuccaccucugccgaucaacagagccucuaccagaacgcugacgccuacguguucgugggcacauccagauauagcaagaaauuuaagccugagauugcuauccggccgaaaguccgcgagcaggaagggagaaugaauuacuauuggacccugguugagcccggagauaagauuacguucgaagccacaggcaaccugguggugccucgguacgcguuugccauggagcgcaacgcugggucuggaaucauuaucuccgacaccagcguccaugauugcaauacaaccugucaaacccccaaaggcgccaucaacacaucucucccuuuccagaauauucaccccaucacgauuggcaagugcccgaaguaugugaaaagcaccaagcugagacuugcuacagggcugcggaacguuccuuccauccagucucgcggacucuuuggcgccauugccggguucaucgaaggaggcuggaccgggaugguggacggaugguacggcuaucaucaccagaaugagcaaggcagcggguacgcugcggaccugaaauccacacagaacgccaucgaugagauuaccaauaaggucaacagcgugaucgaaaagaugaauacgcaguuuacagcuguuggaaaggaguucaaccaccuugaaaagagaauugagaaucugaacaaaaagguggacgauggcuuccucgacaucuggaccuacaaugccgaacugcugguccuccuggagaacgagcggacccuugauuaucaugacucuaaugugaaaaaccuguacgaaaagguccgcucccagcucaaaaacaaugccaaggagauugggaacggauguuuugaguucuaucacaagugcgauaauacauguauggagagcgugaaaaacggcaccuacgacuaucccaaguacucugaagaggcuaaacugaauagagaggaaaucgaugggguuaaacuugaguccacacggaucuaucaaauucuggccaucuacagcacgguggcguccucucucguccuggugguuagccugggcgcuauuuccuuuuggaugugcucuaacggaagccuccagugccgcaucuguauuuga

SEQ ID NO: 199344 - RNA, 1701 nt, Artificial Sequence; identical to SEQ ID NO: 194741
  derived and/or modified CDS sequence (opt5) from hemagglutinin__InfluenzaA__AEO01168

SEQ ID NO: 199345 - RNA, 1701 nt, Artificial Sequence; identical to SEQ ID NO: 195094
  derived and/or modified CDS sequence (opt5) from hemagglutinin__InfluenzaA__AEO01169

SEQ ID NO: 199346 - RNA, 1701 nt, Artificial Sequence; identical to SEQ ID NO: 195094
  derived and/or modified CDS sequence (opt5) from hemagglutinin__InfluenzaA__AEO01170

SEQ ID NO: 199347 - RNA, 1701 nt, Artificial Sequence; identical to SEQ ID NO: 195094
  derived and/or modified CDS sequence (opt5) from hemagglutinin__InfluenzaA__AEO01171

SEQ ID NO: 199348 - RNA, 1701 nt, Artificial Sequence; identical to SEQ ID NO: 194741
  derived and/or modified CDS sequence (opt5) from hemagglutinin__InfluenzaA__AEO01172

SEQ ID NO: 199349 - RNA, 1701 nt, Artificial Sequence
  derived and/or modified CDS sequence (opt5) from hemagglutinin__InfluenzaA__AEO01173
augaaggccauccuggugguccuccuguacaccuucgcuacagccaacgcggacacgcuuugcauuggcuaucacgcuaauaacagcaccgauacaguugacaccgugcuggagaagaaugugacagucacccauuccgugaaccuccuggaagauaagcacaaugggaaacuuuguaagcugagaggaguugcuccccuccaucugggcaaaugcaacaucgccggguggauucugggaaauccugagugugaaucucucagcacagccuccucuuggagcuacaucguggagaccuccucuagcgacaacggcacgugcuauccgggggauuuuauugacuacgaagaacugcgggagcagcuuuccagcgucucuuccuucgaacgcuuugagaucuuccccaagaccagcucuuggccuaaucacgauuccaacaagggagugacagccgcuuguccccaugccggcgcgaaaucuuuuuauaagaaucugaucuggcucguuaaaaagggcaacagcuacccuaaacuguccaagagcuauauuaaugacaaggggaaagaagugcuuguccuguggggaauccaccaccccuccaccucugccgaucaacagagccucuaccagaacgcugacgccuacguguucgugggcacauccagauauagcaagaaauuuaagccugagauugcuauccggccgaaaguccgcgaucaggaggggagaaugaauuacuauuggacccugguugaacccggaggcaagauuacguucgaggccacagggaaccugguggugccucgguacgcguuugccauggaacgcaacgcuggaucuggcaucauuaucuccgacacccccguccaugauugcaauacaaccugucaaaccccuaaaggcgccaucaacacaagccuccccuuccagaauauucacccgaucacgauugggaagugcccuaaguaugugaaaucuaccaagcugagacuugcuacaggacugcggaacguucccagcauccagucccgcggccucuuuggggccauugccggauucaucgagggcggguggaccggaaugguggacggcugguacggcuaucaucaccagaaugaacaagggucuggauacgcugcggaccugaaaagcacacagaacgccaucgaugagauuaccaauaaggucaacuccgugaucgagaaaaugaauacgcaguuuacagcuguuggcaaggaguucaaccaccuugagaagagaauugaaaaucugaacaaaaagguggacgauggguuccucgacaucuggaccuacaaugccgagcugcugguccuccuggaaaacgagcggacccuugauuaucaugacagcaaugugaaaaaccuguacgagaagguccgcucucagcucaaaaacaaugccaaggaaauuggaaacggcuguuuugaguucuaucacaagugcgauaauacauguauggaauccgugaaaaacgggaccuacgacuauccuaaguacagcgaggaagcuaaacugaauagagaggagaucgauggcguuaaacuugaaucuacacggaucuaucaaauucuggccaucuacuccacgguggcgagcucccucguccuggugguuucucugggagcuauuagcuuuuggaugugcuccaacggcucucuccagugccgcaucuguauuuga

SEQ ID NO: 199350 - RNA, 1701 nt, Artificial Sequence
  derived and/or modified CDS sequence (opt5) from hemagglutinin__InfluenzaA__AEO01174
augaaggccauccuggugguccuccuguacaccuucgcuacagccaacgcggacacgcuuugcauuggcuaucacgcuaauaacagcaccgauacaguugacaccgugcuggagaaaaaugugacagucacccauuccgugaaccuccuggaagauaagcacaaugggaaacuuuguaagcugagaggaguugcuccccuccaucugggcaaaugcaacaucgccggguggauucugggaaauccugagugugaaucucucagcacagccuccucuuggagcuacaucguggagaccuccucuagcggcaacgggacgugcuauccgggagacuuuauugauuacgaagaacugcgggagcagcuuuccagcgucucuuccuucgaacgcuuugagaucuuccccaagaccagcucuuggccuaaucacgacuccaacaagggcgugacagccgcuuguccccaugccggcgcgaaaucuuuuuauaagaaucugaucuggcucguuaaaaaggggaacagcuacccuaaacuguccaagagcuauauuaaugauaagggaaaagaagugcuuguccuguggggcauccaccaccccuccaccucugccgaccaacagagccucuaccagaacgcugaugccuacguguucguggggacauccagauauagcaagaaauuuaagccugagauugcuauccggccgaaaguccgcgagcaggaaggaagaaugaauuacuauuggacccugguugagcccggcgacaagauuacguucgaagccacagggaaccugguggugccucgguacgcguuugccauggagcgcaacgcuggaucuggcaucauuaucuccgauacccccguccaugacugcaauacaaccugucaaaccccuaaaggcgccaucaacacaagccuccccuuccagaauauucacccgaucacgauugggaagugcccuaaguaugugaaaucuaccaagcugagacuugcuacaggacugcggaacguucccagcauccagucccgcggccucuuuggggccauugccggauucaucgaaggcggguggaccggaaugguggauggcugguacggcuaucaucaccagaaugagcaagggucuggauacgcugcggaccugaaaagcacacagaacgccaucgacgagauuaccaauaaggucaacuccgugaucgaaaagaugaauacgcaguuuacagcuguuggcaaggaguucaaccaccuugaaaagagaauugagaaucugaacaaaaagguggaugacggguuccucgauaucuggaccuacaaugccgaacugcugguccuccuggagaacgagcggacccuugacuaucaugauagcaaugugaaaaaccuguacgaaaagguccgcucucagcucaaaaacaaugccaaggagauuggaaacggcuguuuugaguucuaucacaagugcgacaauacauguauggaguccgugaaaaacgggaccuacgauuauccuaaguacagcgaagaggcuaaacugaauagagaggaaaucgacggcguuaaacuugagucuacacggaucuaucaaauucuggccaucuacuccacgguggcgagcucccucguccuggugguuucucugggagcuauuagcuuuuggaugugcuccaacggcucucuccagugccgcaucuguauuuga

SEQ ID NO: 199351 - RNA, 1701 nt, Artificial Sequence; identical to SEQ ID NO: 194741
  derived and/or modified CDS sequence (opt5) from hemagglutinin__InfluenzaA__AEO01176

SEQ ID NO: 199352 - RNA, 1701 nt, Artificial Sequence; identical to SEQ ID NO: 194741
  derived and/or modified CDS sequence (opt5) from hemagglutinin__InfluenzaA__AEO01177

SEQ ID NO: 199353 - RNA, 1701 nt, Artificial Sequence; identical to SEQ ID NO: 195094
  derived and/or modified CDS sequence (opt5) from hemagglutinin__InfluenzaA__AEO01179

SEQ ID NO: 199354 - RNA, 1701 nt, Artificial Sequence; identical to SEQ ID NO: 195094
  derived and/or modified CDS sequence (opt5) from hemagglutinin__InfluenzaA__AEO01180

SEQ ID NO: 199355 - RNA, 1701 nt, Artificial Sequence; identical to SEQ ID NO: 195094
  derived and/or modified CDS sequence (opt5) from hemagglutinin__InfluenzaA__AEO01181

SEQ ID NO: 199356 - RNA, 1701 nt, Artificial Sequence; identical to SEQ ID NO: 195094
  derived and/or modified CDS sequence (opt5) from hemagglutinin__InfluenzaA__AEO01182

SEQ ID NO: 199357 - RNA, 1701 nt, Artificial Sequence; identical to SEQ ID NO: 194741
  derived and/or modified CDS sequence (opt5) from hemagglutinin__InfluenzaA__AEO01183

SEQ ID NO: 199358 - RNA, 1701 nt, Artificial Sequence; identical to SEQ ID NO: 195094
  derived and/or modified CDS sequence (opt5) from hemagglutinin__InfluenzaA__AEO01184

SEQ ID NO: 199359 - RNA, 1701 nt, Artificial Sequence; identical to SEQ ID NO: 194741
  derived and/or modified CDS sequence (opt5) from hemagglutinin__InfluenzaA__AEO01185

SEQ ID NO: 199360 - RNA, 1701 nt, Artificial Sequence; identical to SEQ ID NO: 194741
  derived and/or modified CDS sequence (opt5) from hemagglutinin__InfluenzaA__AEO01186

SEQ ID NO: 199361 - RNA, 1701 nt, Artificial Sequence; identical to SEQ ID NO: 194741
  derived and/or modified CDS sequence (opt5) from hemagglutinin__InfluenzaA__AEO01187

SEQ ID NO: 199362 - RNA, 1701 nt, Artificial Sequence; identical to SEQ ID NO: 194741
  derived and/or modified CDS sequence (opt5) from hemagglutinin__InfluenzaA__AEO01188

SEQ ID NO: 199363 - RNA, 1701 nt, Artificial Sequence; identical to SEQ ID NO: 194741
  derived and/or modified CDS sequence (opt5) from hemagglutinin__InfluenzaA__AEO01189

SEQ ID NO: 199364 - RNA, 1701 nt, Artificial Sequence; identical to SEQ ID NO: 194741
  derived and/or modified CDS sequence (opt5) from hemagglutinin__InfluenzaA__AEO01191

SEQ ID NO: 199365 - RNA, 1701 nt, Artificial Sequence; identical to SEQ ID NO: 194741
  derived and/or modified CDS sequence (opt5) from hemagglutinin__InfluenzaA__AEO01192

SEQ ID NO: 199366 - RNA, 1701 nt, Artificial Sequence; identical to SEQ ID NO: 196055
  derived and/or modified CDS sequence (opt5) from hemagglutinin__InfluenzaA__AEO01193

SEQ ID NO: 199367 - RNA, 1701 nt, Artificial Sequence; identical to SEQ ID NO: 195094
  derived and/or modified CDS sequence (opt5) from hemagglutinin__InfluenzaA__AEO01194

SEQ ID NO: 199368 - RNA, 1701 nt, Artificial Sequence; identical to SEQ ID NO: 195094
  derived and/or modified CDS sequence (opt5) from hemagglutinin__InfluenzaA__AEO01195

SEQ ID NO: 199369 - RNA, 1701 nt, Artificial Sequence; identical to SEQ ID NO: 194741
  derived and/or modified CDS sequence (opt5) from hemagglutinin__InfluenzaA__AEO01196

SEQ ID NO: 199370 - RNA, 1701 nt, Artificial Sequence; identical to SEQ ID NO: 194741
  derived and/or modified CDS sequence (opt5) from hemagglutinin__InfluenzaA__AEO01197

SEQ ID NO: 199371 - RNA, 1701 nt, Artificial Sequence; identical to SEQ ID NO: 195094
  derived and/or modified CDS sequence (opt5) from hemagglutinin__InfluenzaA__AEO01198

SEQ ID NO: 199372 - RNA, 1701 nt, Artificial Sequence; identical to SEQ ID NO: 195607
  derived and/or modified CDS sequence (opt5) from hemagglutinin__InfluenzaA__AEO01200

SEQ ID NO: 199373 - RNA, 1701 nt, Artificial Sequence
  derived and/or modified CDS sequence (opt5) from hemagglutinin__InfluenzaA__AEO01201
augaaggccauccuggugguccuccuguacaccuucgcuacagccaacgcggacacgcuuugcauuggcuaucacgcuaauaacagcaccgauacaguugacaccgugcuggagaagaaugugacagucacccauuccgugaaccuccuggaagagaagcacaaugggaaacuuuguaagcugagaggaguugcuccccuccaucugggcaaaugcaacaucgccggguggauucugggaaauccugaaugugagucucucagcacagccuccucuuggagcuacaucguggaaaccuccucuagcgauaacggcacgugcuauccgggggacuuuauugauuacgaggagcugcgggaacagcuuuccagcgucucuuccuucgagcgcuuugaaaucuuccccaagaccagcucuuggccuaaucacgacuccaacaagggagugacagccgcuuguccccaugccggcgcgaaaucuuuuuauaagaaucugaucuggcucguuaaaaagggcaacagcuacccuaaacuguccaagagcuauauuaaugauaaggggaaagaggugcuuguccuguggggaauccaccaccccuccaccucugccgaccaacagagccucuaccagaacgcugaugccuacguguucgugggcacauccagauauagcaagaaauuuaagccugagauugcuauccggccgaaaguccgcgaacaggaggggagaaugaauuacuauuggacccugguugaacccggagacaagauuacguucgaggccacaggcaaccugguggugccucgguacgcguuugccauggaacgcaacgcugggucuggaaucauuaucuccgauacccccguccaugacugcaauacaaccugucaaaccccuaaaggcgccaucaacacaagccuccccuuccagaauauucacccgaucacgauuggcaagugcccuaaguaugugaaaucuaccaagcugagacuugcuacagggcugcggaacguucccagcauccagucccgcggacucuuuggcgccauugccggguucaucgagggaggcuggaccgggaugguggauggaugguacggcuaucaucaccagaaugagcaaggcucuggguacgcugcggaccugaaaagcacacagaacgccaucgacgaaauuaccaauaaggucaacuccgugaucgagaaaaugaauacgcaguuuacagcuguuggaaaggaguucaaccaccuugaaaagagaauugaaaaucugaacaaaaagguggaugacggcuuccucgauaucuggaccuacaaugccgagcugcugguccuccuggagaacgaacggacccuugacuaucaugauagcaaugugaaaaaccuguacgagaagguccgcucucagcucaaaaacaaugccaaggaaauugggaacggauguuuugaguucuaucacaagugcgacaauacauguauggaauccgugaaaaacggcaccuacgauuauccuaaguacagcgaggaggcuaaacugaauagagaagagaucgacgggguuaaacuugaaucuacacggaucuaucaaauucuggccaucuacuccacgguggcgagcucccucguccuggugguuucucugggcgcuauuagcuuuuggaugugcuccaacggaucucuccagugccgcaucuguauuuga

SEQ ID NO: 199374 - RNA, 1701 nt, Artificial Sequence; identical to SEQ ID NO: 194741
  derived and/or modified CDS sequence (opt5) from hemagglutinin__InfluenzaA__AEO01202

SEQ ID NO: 199375 - RNA, 1701 nt, Artificial Sequence; identical to SEQ ID NO: 196377
  derived and/or modified CDS sequence (opt5) from hemagglutinin__InfluenzaA__AEO01203

SEQ ID NO: 199376 - RNA, 1701 nt, Artificial Sequence; identical to SEQ ID NO: 194741
  derived and/or modified CDS sequence (opt5) from hemagglutinin__InfluenzaA__AEO01204

SEQ ID NO: 199377 - RNA, 1701 nt, Artificial Sequence; identical to SEQ ID NO: 194741
  derived and/or modified CDS sequence (opt5) from hemagglutinin__InfluenzaA__AEO01205

SEQ ID NO: 199378 - RNA, 1701 nt, Artificial Sequence; identical to SEQ ID NO: 194741
  derived and/or modified CDS sequence (opt5) from hemagglutinin__InfluenzaA__AEO01206

SEQ ID NO: 199379 - RNA, 1701 nt, Artificial Sequence; identical to SEQ ID NO: 194741
  derived and/or modified CDS sequence (opt5) from hemagglutinin__InfluenzaA__AEO01207

SEQ ID NO: 199380 - RNA, 1701 nt, Artificial Sequence; identical to SEQ ID NO: 194741
  derived and/or modified CDS sequence (opt5) from hemagglutinin__InfluenzaA__AEO01208

SEQ ID NO: 199381 - RNA, 1701 nt, Artificial Sequence; identical to SEQ ID NO: 195094
  derived and/or modified CDS sequence (opt5) from hemagglutinin__InfluenzaA__AEO01209

SEQ ID NO: 199382 - RNA, 1701 nt, Artificial Sequence; identical to SEQ ID NO: 194741
  derived and/or modified CDS sequence (opt5) from hemagglutinin__InfluenzaA__AEO01210

SEQ ID NO: 199383 - RNA, 1701 nt, Artificial Sequence; identical to SEQ ID NO: 195094
  derived and/or modified CDS sequence (opt5) from hemagglutinin__InfluenzaA__AEO01211

SEQ ID NO: 199384 - RNA, 1701 nt, Artificial Sequence; identical to SEQ ID NO: 194741
  derived and/or modified CDS sequence (opt5) from hemagglutinin__InfluenzaA__AEO01212

SEQ ID NO: 199385 - RNA, 1701 nt, Artificial Sequence; identical to SEQ ID NO: 194741
  derived and/or modified CDS sequence (opt5) from hemagglutinin__InfluenzaA__AEO01213

SEQ ID NO: 199386 - RNA, 1701 nt, Artificial Sequence
  derived and/or modified CDS sequence (opt5) from hemagglutinin__InfluenzaA__AEO01214
augaaggccauccuggugguccuccuguacaccuucgcuacagccaacgcggacacgcuuugcauuggcuaucacgcuaauaacagcaccgauacaguugacaccgugcuggagaagaaugugacagucacccauuccgugaaccuccuggaagauaagcacaaugggaaacuuuguaagcugagaggaguugcuccccuccaucugggcaaaugcaacaucgccggguggauucugggaaauccugagugugaaucucucagcacagccuccucuuggagcuacaucguggagaccuccucuagcgacaacggcacgugcuauccgggggauuuuauugacuacgaagaacugcgggagcagcuuuccagcgucucuuccuucgaacgcuuugagaucuuccccaagaccagcucuuggccuaaucacgauuccaacaagggagugacagccgcuuguccccaugccggcgcgaaaucuuuuuauaagaaucugaucuggcucguuaaaaagggcaacagcuacccuaaacuguccaagagcuauauuaaugacaaggggaaagaagugcuuguccuguggggaauccaccaccccuccaccucugccgaucaacagagccucuaccagaacgcugacgccuacguguucgugggcacauccagauauagcaagaaauuuaagccugagauugcuauccggccgaaaguccgcgaucaggaggggagaaugaauuacuauuggacccugguugaacccggagacaagauuacguucgaggccacaggcaaccugguggcgccucgguacgccuuugcuauggaacgcaacgccgggucuggaaucauuaucuccgauacccccgugcaugacugcaauacaaccugucaaaccccuaaaggcgcuaucaacacaagccuccccuuccagaauauucacccgaucacgauuggcaagugcccuaaguaugucaaaucuaccaagcugagacuugccacagggcugcggaacgugcccagcauccagucccgcggacucuuuggcgccauugcuggguucaucgagggaggcuggaccgggaugguugacggaugguacggcuaucaucaccagaaugaacaaggcucuggguacgcggccgaucugaaaagcacacagaacgcuaucgacgagauuaccaauaaggugaacuccgucaucgagaaaaugaauacgcaguuuacagccgugggaaaggaguucaaccaccuugagaagagaauugaaaaucugaacaaaaagguugaugacggcuuccucgauaucuggaccuacaaugccgagcugcuggugcuccuggaaaacgagcggacccuugacuaucaugauagcaaugucaaaaaccuguacgagaaggugcgcucucagcucaaaaacaaugcuaaggaaauugggaacggauguuuugaguucuaucacaagugcgacaauacauguauggaauccgucaaaaacggcaccuacgauuauccuaaguacagcgaggaagccaaacugaauagagaggagaucgacggggugaaacuugaaucuacacggaucuaucaaauucuggcgaucuacuccacgguugcuagcucccucgugcuggucgugucucugggcgccauuagcuuuuggaugugcuccaacggaucucuccagugccgcaucuguauuuga

SEQ ID NO: 199387 - RNA, 1701 nt, Artificial Sequence; identical to SEQ ID NO: 195094
  derived and/or modified CDS sequence (opt5) from hemagglutinin__InfluenzaA__AEO01215

SEQ ID NO: 199388 - RNA, 1701 nt, Artificial Sequence
  derived and/or modified CDS sequence (opt5) from hemagglutinin__InfluenzaA__AEO01216
augaaggccauccuggugguccuccuguacaccuucgcuacagccaacgcggacacgcuuugcauuggcuaucacgcuaauaacagcaccgauacaguugacaccgugcuggagaaaaaugugacagucacccauuccgugaaccuccuggaagauaagcacaaugggaaacuuuguaagcugagaggaguugcuccccuccaucugggcaaaugcaacaucgccggguggauucugggaaauccugagugugaaucucucagcacagccuccucuuggagcuacaucguggagaccuccucuagcgacaacggcacgugcuauccgggggauuuuauugacuacgaagaacugcgggagcagcuuuccagcgucucuuccuucgaacgcuuugagaucuuccccaagaccagcucuuggccuaaucacgauuccaacaagggagugacagccgcuuguccccaugccggcgcgaaaucuuuuuauaagaaucugaucuggcucguuaaaaagggcaacagcuacccuaaacuguccaagagcuauauuaaugacaaggggaaagaagugcuuguccuguggggaauccaccaccccuccaccucugccgaucaacagagccucuaccagaacgcugacgccuacguguucgugggcacauccagauauagcaagaaauuuaagccugagauugcuauccggccgaaaguccgcgagcaggaagggagaaugaauuacuauuggacccugguugagcccggagauaagauuacguucgaagccacaggcaaccugguggugccucgguacgcguuugccauggagcgcaacgcugggucuggaaucauuaucuccgacacccccguccaugauugcaauacaaccugucaaaccccuaaaggcgccaucaacacaagccuccccuuccagaauauucacccgaucacgauuggcaagugcccuaaguaugugaaaucuaccaagcugagacuugcuacagggcugcggaacguucccagcauccagucccgcggacucuuuggcgccauugccggguucaucgaaggaggcuggaccgggaugguggacggaugguacggcuaucaucaccagaaugagcaaggcucuggguacgcugcggaccugaaaagcacacagaacgccaucgaugagauuaccaauaaggucaacuccgugaucgaaaagaugaauacgcaguuuacagcuguuggaaaggaguucaaccaccuugaaaagagaguggagaaucugaacaaaaaggucgacgauggcuuccucgacauuuggaccuacaaugccgaacugcuggugcuccuggagaacgagcggacccuugauuaucaugacagcaaugucaaaaaccuguacgaaaaggugcgcucucagcucaaaaacaaugccaaggagaucgggaacggauguuuugaguucuaucacaagugcgauaauacauguauggaguccguuaaaaacggcaccuacgacuauccuaaguacagcgaagaggcuaaacugaauagagaggaaauugauggggugaaacuugagucuacacggaucuaucaaauccuggccauuuacuccacggucgcgagcucccucgugcugguugugucucugggcgcuaucagcuuuuggaugugcuccaacggaucucuccagugccgcauuuguaucuga

SEQ ID NO: 199389 - RNA, 1701 nt, Artificial Sequence; identical to SEQ ID NO: 195094
  derived and/or modified CDS sequence (opt5) from hemagglutinin__InfluenzaA__AEO01217

SEQ ID NO: 199390 - RNA, 1701 nt, Artificial Sequence; identical to SEQ ID NO: 195094
  derived and/or modified CDS sequence (opt5) from hemagglutinin__InfluenzaA__AEO01218

SEQ ID NO: 199391 - RNA, 1701 nt, Artificial Sequence; identical to SEQ ID NO: 195094
  derived and/or modified CDS sequence (opt5) from hemagglutinin__InfluenzaA__AEO01219

SEQ ID NO: 199392 - RNA, 1701 nt, Artificial Sequence; identical to SEQ ID NO: 194832
  derived and/or modified CDS sequence (opt5) from hemagglutinin__InfluenzaA__AEO01220

SEQ ID NO: 199393 - RNA, 1701 nt, Artificial Sequence; identical to SEQ ID NO: 194741
  derived and/or modified CDS sequence (opt5) from hemagglutinin__InfluenzaA__AEO01221

SEQ ID NO: 199394 - RNA, 1701 nt, Artificial Sequence; identical to SEQ ID NO: 194741
  derived and/or modified CDS sequence (opt5) from hemagglutinin__InfluenzaA__AEO01222

SEQ ID NO: 199395 - RNA, 1701 nt, Artificial Sequence; identical to SEQ ID NO: 195094
  derived and/or modified CDS sequence (opt5) from hemagglutinin__InfluenzaA__AEO01223

SEQ ID NO: 199396 - RNA, 1701 nt, Artificial Sequence
  derived and/or modified CDS sequence (opt5) from hemagglutinin__InfluenzaA__AEO01224
augaaggccauccuggugguccuccuguacaccuucgcuacagccaacgcggacacgcuuugcauuggcuaucacgcuaauaacagcaccgauacaguugacaccgugcuggagaagaaugugacagucacccauuccgugaaccuccuggaagauaagcacaaugggaaacuuuguaagcugagaggaguugcuccccuccaucugggcaaaugcaacaucgccggguggauucugggaaauccugagugugaaucucucagcacagccuccucuuggagcuacaucguggagaccuccucuagcgacaacggcacgugcuauccgggggauuuuauugacuacgaagaacugcgggagcagcuuuccagcgucucuuccuucgaacgcuuugagaucuuccccaagaccagcucuuggccuaaucacgauuccaacaagggagugacagccgcuuguccccaugccggcgcgaaaucuuuuuauaagaaucugaucuggcucguuaaaaagggcaacagcuacccuaaacuguccaagagcuauauuaaugacaaggggaaagaagugcuuguccuguggggaauccaccaccccuccaccucugccgaucaacagagccucuaccagaacgcugacgccuacguguucgugggcacauccagauauagcaagaaauuuaagccugagauugcuauccggccgaaaguccgcgaucaggaggggagaaugaauuacuauuggacccugguugaacccggagacaagauuacguucgaggccacaggcaaccugguggugccucgguacgcguuugccaccgaacgcaacgcugggucuggaaucauuaucuccgauacacccguccaugacugcaauaccaccugucaaacaccuaaaggcgccaucaacacgagccuccccuuccagaauauucacccgaucaccauuggcaagugcccuaaguaugugaaaucuacaaagcugagacuugcuaccgggcugcggaacguucccagcauccagucccgcggacucuuuggcgccauugccggguucaucgagggaggcuggacagggaugguggacggaugguacggcuaucaucaccagaaugaacaaggcucuggguacgcugcggaucugaaaagcacccagaacgccaucgacgagauuacgaauaaggucaacuccgugaucgagaaaaugaauacacaguuuaccgcuguuggaaaggaguucaaccaccuugagaagagaauugaaaaucugaacaaaaagguggaugacggcuuccucgauaucuggaccuacaaugccgagcugcugguccuccuggaaaacgagcggacacuugacuaucaugauagcaaugugaaaaaccuguacgagaagguccgcucucagcucaaaaacaaugccaaggaaauugggaacggauguuuugaguucuaucacaagugcgacaauaccuguauggaauccgugaaaaacggcacauacgauuauccuaaguacagcgaggaagcuaaacugaauagagaggagaucgacgggguuaaacuugaaucuacgcggaucuaucaaauucuggccaucuacuccaccguggcgagcucccucguccuggugguuucucugggcgcuauuagcuuuuggaugugcuccaacggaucucuccagugccgcaucuguauuuga

SEQ ID NO: 199397 - RNA, 1701 nt, Artificial Sequence
  derived and/or modified CDS sequence (opt5) from hemagglutinin__InfluenzaA__AEO01225
augaaggccauccuggugguccuccuguacaccuucgcuacagccaacgcggacacgcuuugcauuggcuaucacgcuaauaacagcaccgauacaguugacaccgugcuggagaaaaaugugacagucacccauuccgugaaccuccuggaagauaagcacaaugggaaacuuuguaagcugagaggaguugcuccccuccaucugggcaaaugcaacaucgccggguggauucugggaaauccugagugugaaucucucagcacagccuccucuuggagcuacaucguggagaccuccucuagcgacaacggcacgugcuauccgggggauuuuauugacuacgaagaacugcgggagcagcuuuccagcgucucuuccuucgaacgcuuugagaucuuccccaagaccagcucuuggccuaaucacgauuccaacaagggagugacagccgcuuguccccaugccggcgcgaaaucuuuuuauaagaaucugaucuggcucguuaaaaagggcaacagcuacccuaaacuguccaagagcuauauuaaugacaaggggaaagaagugcuuguccuguggggaauccaccaccccuccaccucugccgaucaacagagccucuaccagaacgcugacgccuacguguucgugggcacauccagauauagcaagaaauuuaagccugagauugcuauccggccgaaaguccgcgaucaggaggggagaaugaauuacuauuggaccguuguggaacccggagacaagauuacguucgaggccacaggcaaccugguggucccucgguacgcguuugccauggaacgcaacgcugggucuggaaucauuaucuccgauacccccgugcaugacugcaauacaaccugucaaaccccuaaaggcgccaucaacacaagccugcccuuccagaauauucacccgaucacgauuggcaagugcccuaaguauguuaaaucuaccaagcucagacuggcuacagggcuucggaacgugcccagcauccagucccgcggacuguuuggcgccauugccggguucaucgagggaggcuggaccgggauggucgacggaugguacggcuaucaucaccagaaugaacaaggcucuggguacgcugcggaucucaaaagcacacagaacgccaucgacgagauuaccaauaaggugaacuccguuaucgagaaaaugaauacgcaguuuacagcugugggaaaggaguucaaccaccuggagaagagaauugaaaaucuuaacaaaaaggucgaugacggcuuccuggauaucuggaccuacaaugccgagcuccuggugcugcucgaaaacgagcggacccuggacuaucaugauagcaaugucaaaaaccuuuacgagaaggugcgcucucagcugaaaaacaaugccaaggaaauugggaacggauguuuugaguucuaucacaagugcgacaauacauguauggaauccguuaaaaacggcaccuacgauuauccuaaguacagcgaggaagcuaaacucaauagagaggagaucgacggggugaagcuggaaucuacacggaucuaucaaauucuugccaucuacuccacggucgcgagcucccuggugcucguugugucucugggcgcuauuagcuuuuggaugugcuccaacggaucucugcagugccgcaucuguauuuga

SEQ ID NO: 199398 - RNA, 1701 nt, Artificial Sequence
  derived and/or modified CDS sequence (opt5) from hemagglutinin__InfluenzaA__AEO01226
augaaggccauccuggugguccuccuguacaccuucgcuacagccaacgcggacacgcuuugcauuggcuaucacgcuaauaacagcaccgauacaguugacaccgugcuggagaagaaugugacagucacccauuccgugaaccuccuggaagauaagcacaaugggaaacuuuguaagcugagaggaguugcuccccuccaucugggcaaaugcaacaucgccggguggauucugggaaauccugagugugaaucucucagcacagccuccucuuggagcuacaucguggagaccuccucuagcgacaacggcacgugcuauccgggggauuuuauugacuacgaagaacugcgggagcagcuuuccagcgucucuuccuucgaacgcuuugagaucuuccccaagaccagcucuuggccuaaucacgauuccaacaagggagugacagccgcuuguccccaugccggcgcgaaaucuuuuuauaagaaucugaucuggcucguuaaaaagggcaacagcuacccuaaacuguccaagagcuauauuaaugacaaggggaaagaagugcuuguccuguggggaauccaccaccccuccaccucugccgaucaacagagccucuaccagaacgcugacgccuacguguucgugggcacauccagauauagcaagaaauuuaagccugagauugcuauccggccgaaaguccgcgaucaggaggggagaaugaauuacuauuggacccugguugaacccggagacaagauuacguucgaggccacaggcaaccugguggugccucgguacgcguuugccauggaacgcaacgaugggucuggaaucauuaucuccgacacccccguccaugacugcaauacaaccugucaaaccccuaaaggcgcuaucaacacaagccuccccuuccagaauauucacccgaucacgauuggcaagugcccuaaguaugugaaaucuaccaagcugagacuugccacagggcugcggaacguucccagcauccagucccgcggacucuuuggcgcuauugccggguucaucgagggaggcuggaccgggaugguggauggaugguacggcuaucaucaccagaaugaacaaggcucuggguacgccgcugaccugaaaagcacacagaacgcgaucgaugagauuaccaauaaggucaacuccgugaucgagaaaaugaauacgcaguuuacagccguuggaaaggaguucaaccaccuugagaagagaauugaaaaucugaacaaaaagguggacgauggcuuccucgacaucuggaccuacaaugcugagcugcugguccuccuggaaaacgagcggacccuugauuaucaugacagcaaugugaaaaaccuguacgagaagguccgcucucagcucaaaaacaaugccaaggaaauugggaacggauguuuugaguucuaucacaagugcgauaauacauguauggaauccgugaaaaacggcaccuacgacuauccuaaguacagcgaggaagccaaacugaauagagaggagaucgaugggguuaaacuugaaucuacacggaucuaucaaauucuggcuaucuacuccacgguggccagcucccucguccuggugguuucucugggcgcgauuagcuuuuggaugugcuccaacggaucucuccagugccgcaucuguauuuga

SEQ ID NO: 199399 - RNA, 1701 nt, Artificial Sequence; identical to SEQ ID NO: 196908
  derived and/or modified CDS sequence (opt5) from hemagglutinin__InfluenzaA__AEO01227

SEQ ID NO: 199400 - RNA, 1701 nt, Artificial Sequence; identical to SEQ ID NO: 194741
  derived and/or modified CDS sequence (opt5) from hemagglutinin__InfluenzaA__AEO01228

SEQ ID NO: 199401 - RNA, 1701 nt, Artificial Sequence; identical to SEQ ID NO: 194741
  derived and/or modified CDS sequence (opt5) from hemagglutinin__InfluenzaA__AEO01229

SEQ ID NO: 199402 - RNA, 1701 nt, Artificial Sequence
  derived and/or modified CDS sequence (opt5) from hemagglutinin__InfluenzaA__AEO01230
augaaggccauccuggugguccuccuguacaccuucgcuacagccaacgcggacacgcuuugcauuggcuaucacgcuaauaacagcaccgauacaguugacaccgugcuggagagaaaugugacagucacccauuccgugaaccuccuggaagauaagcacaaugggaagcuguguaaacugcggggaguugcgccccuccaucugggcaagugcaacaucgccggguggauucugggaaauccugagugugaaucucucagcacagcuuccucuuggagcuacaucguggagaccuccucuagcgacaacggcacgugcuauccgggggauuuuauugacuacgaagaacugcgcgagcagcuuuccagcgucucuuccuucgaaagauuugagaucuuccccaaaaccagcucuuggccuaaucacgauuccaacaagggagugacagccgcuuguccccaugccggcgccaagagcuuuuauaaaaaucugaucuggcucguuaagaaaggcaacucuuacccuaagcuguccaaaagcuauauuaaugacaaggggaaggaagugcuuguccuguggggaauccaccaccccuccaccucugccgaucaacagagccucuaccagaacgcugacgccuacguguucgugggcacaucccgguauagcaaaaaguuuaaaccugagauugcuauccgcccgaaggucagagaucaggaggggcggaugaauuacuauuggacccugguugaacccggagacaaaauuacguucgaggccacaggcaaccugguggugccucgcuacgcguuugccauggaaagaaacgcugggucuggaaucauuaucuccgauacccccguccaugacugcaauacaaccugucaaaccccuaagggcgccaucaacacaagccuccccuuccagaauauucacccgaucacgauuggcaaaugcccuaaguaugugaagucuaccaaacugcggcuugcuacagggcugcgcaacguucccagcauccaguccagaggacucuuuggcgccauugccggguucaucgagggaggcuggaccgggaugguggacggaugguacggcuaucaucaccagaaugaacaaggcucuggguacgcugcggaucuuaagagcacacagaacgccaucgacgagauuaccaauaaagucaacuccgugaucgagaagaugaauacgcaguuuacagcuguuggaaaagaguucaaccaccuugagaagcggauugaaaaucugaacaagaaaguggaugacggcuuccucgauaucuggaccuacaaugccgagcugcugguccuccuggaaaacgagcgcacccuugacuaucaugauagcaaugugaagaaccuguacgagaaagucagaucucagcucaagaacaaugccaaagaaauugggaacggauguuuugaguucuaucacaagugcgacaauacauguauggaauccgugaagaacggcaccuacgauuauccuaaauacagcaaggaggcuaaacugaaucgggaagagaucgacgggguuaaacuugagucuacacgcaucuaucaaauucuggccaucuacuccacgguggcgagcucccucguccuggugguuucucugggcgcuauuagcuuuuggaugugcuccaacggaucucuccagugcagaaucuguauuuga

SEQ ID NO: 199403 - RNA, 1701 nt, Artificial Sequence; identical to SEQ ID NO: 194741
  derived and/or modified CDS sequence (opt5) from hemagglutinin__InfluenzaA__AEO01231

SEQ ID NO: 199404 - RNA, 1701 nt, Artificial Sequence; identical to SEQ ID NO: 195094
  derived and/or modified CDS sequence (opt5) from hemagglutinin__InfluenzaA__AEO01232

SEQ ID NO: 199405 - RNA, 1701 nt, Artificial Sequence; identical to SEQ ID NO: 194741
  derived and/or modified CDS sequence (opt5) from hemagglutinin__InfluenzaA__AEO01233

SEQ ID NO: 199406 - RNA, 1701 nt, Artificial Sequence; identical to SEQ ID NO: 194741
  derived and/or modified CDS sequence (opt5) from hemagglutinin__InfluenzaA__AEO01234

SEQ ID NO: 199407 - RNA, 1701 nt, Artificial Sequence; identical to SEQ ID NO: 194741
  derived and/or modified CDS sequence (opt5) from hemagglutinin__InfluenzaA__AEO01235

SEQ ID NO: 199408 - RNA, 1701 nt, Artificial Sequence; identical to SEQ ID NO: 198613
  derived and/or modified CDS sequence (opt5) from hemagglutinin__InfluenzaA__AEO01236

SEQ ID NO: 199409 - RNA, 1701 nt, Artificial Sequence; identical to SEQ ID NO: 194741
  derived and/or modified CDS sequence (opt5) from hemagglutinin__InfluenzaA__AEO01237

SEQ ID NO: 199410 - RNA, 1701 nt, Artificial Sequence; identical to SEQ ID NO: 194741
  derived and/or modified CDS sequence (opt5) from hemagglutinin__InfluenzaA__AEO01238

SEQ ID NO: 199411 - RNA, 1701 nt, Artificial Sequence; identical to SEQ ID NO: 194741
  derived and/or modified CDS sequence (opt5) from hemagglutinin__InfluenzaA__AEO01240

SEQ ID NO: 199412 - RNA, 1701 nt, Artificial Sequence; identical to SEQ ID NO: 195094
  derived and/or modified CDS sequence (opt5) from hemagglutinin__InfluenzaA__AEO01241

SEQ ID NO: 199413 - RNA, 1701 nt, Artificial Sequence; identical to SEQ ID NO: 194741
  derived and/or modified CDS sequence (opt5) from hemagglutinin__InfluenzaA__AEO01242

SEQ ID NO: 199414 - RNA, 1701 nt, Artificial Sequence
  derived and/or modified CDS sequence (opt5) from hemagglutinin__InfluenzaA__AEO01244
augaaggccauccuggugguccuccuguacaccuucgcuacagccaacgcggacacgcuuugcauuggcuaucacgcuaauaacagcaccgauacaguugacaccgugcuggagaaaaaugugacagucacccauuccgugaaccuccuggaagauaagcacaaugggaaacuuuguaagcugagaggaguugcuccccuccaucugggcaaaugcaacaucgccggguggauucugggaaauccugagugugaaucucucagcacagccuccucuuggagcuacaucguggagaccuccucuagcgacaacggcacgugcuauccgggggauuuuauugacuacgaagaacugcgggagcagcuuuccagcgucucuuccuucgaacgcuuugagaucuuccccaagaccagcucuuggccuaaucacgauuccaacaagggagugacagccgcuuguccccaugccggcgcgaaaucuuuuuauaagaaucugaucuggcucguuaaaaagggcaacagcuacccuaaacuguccaagagcuauauuaaugacaaggggaaagaagugcuuguccuguggggaauccaccaccccuccaccucugccgaucaacagagccucuaccagaacgcugacgccuacguguucgugggcacauccaaguauagcaaaaaguuuaaaccugagauugcuaucagaccgaagguccgggggcaggagggacgcaugaauuacuauuggacccugguugaacccggcgauaaaauuacguucgaggccacagggaaccugguggugccuagauacgcguuugccauggaacggaacgcuggaucuggcaucauuaucuccgacacccccguccaugauugcaauacaaccugucaaaccccuaagggcgccaucaacacaagccuccccuuccagaauauucacccgaucacgauugggaagugcccuaaauaugugaagucuaccaaacugcgccuugcuacaggacugagaaacguucccagcauccagucccggggccucuuuggggccauugccggauucaucgagggcggguggaccggaaugguggacggcugguacggcuaucaucaccagaaugaacaagggucuggauacgcugcggaccuuaagagcacacagaacgccaucgaugagauuaccaauaaagucaacuccgugaucgagaagaugaauacgcaguuuacagcuguuggcaaggaguucaaccaccuggagaaacgcauugaaaaucugaacaagaaaguggacgauggguuccucgacaucuggaccuacaaugccgagcugcugguccuccuggaaaacgagagaacccuugauuaucaugacagcaaugugaagaaccuguacgagaaaguccggucucagcucaagaacaaugccaaggaaauuggaaacggcuguuuugaguucuaucacaaaugcgauaauacauguauggaauccgugaagaacgggaccuacgacuauccuaaauacagcgaggaagcuaagcugaaucgcgaggagaucgauggcguuaaacuugaaucuacaagaaucuaucaaauucuggccaucuacuccacgguggcgagcucccucguccuggugguuucucugggagcuauuagcuuuuggaugugcuccaacggcucucuccagugccggaucuguauuuga

SEQ ID NO: 199415 - RNA, 1701 nt, Artificial Sequence; identical to SEQ ID NO: 194741
  derived and/or modified CDS sequence (opt5) from hemagglutinin__InfluenzaA__AEO01245

SEQ ID NO: 199416 - RNA, 1701 nt, Artificial Sequence
  derived and/or modified CDS sequence (opt5) from hemagglutinin__InfluenzaA__AEO01247
augaaggccauccuggugguccuccuguacaccuucgcuacagccaacgcggacacgcuuugcauuggcuaucacgcuaauaacagcaccgauacaguugacaccgugcuggagaaaaaugugacagucacccauuccgugaaccuccuggaagauaagcacaaugggaaacuuuguaagcugagaggaguugcuccccuccaucugggcaaaugcaacaucgccggguggauucugggaaauccugagugugaaucucucagcacagccuccucuuggagcuacaucguggagaccuccucuagcgacaacggcacgugcuauccgggggauuuuauugacuacgaagaacugcgggagcagcuuuccagcgucucuuccuucgaacgcuuugagaucuuccccaagaccagcucuuggccuaaucacgauuccaacaagggagugacagccgcuuguccccaugccggcgcgaaaucuuuuuauaagaaucugaucuggcucguuaaaaagggcaacagcuacccuaaacuguccaagagcuauauuaaugacaaggggaaagaagugcuuguccuguggggaauccaccaccccuccaccucugccgaucaacagagccucuaccagaacgcugacgccuacguguucgugggcacauccagauauagcaagaaauuuaagccugagauugcuauccggccgaaaguccgcgaucaggaggggagaaugaauuacuauuggacccugguugaacccggagacaagauuacguucgaggccacaggcaaccugguggugccucgguacgcguuugccauggaacgcaacgcugggucuggaauccucauuuccgauacccccguccaugacugcaauacaaccugucaaaccccuaaaggcgccaucaacacaagccugcccuuccagaauauccacccgauuacgaucggcaagugcccuaaguaugugaaaucuaccaaacuuagacuggcuacagggcuccggaacguucccagcauucagucccgcggacuguuuggcgccaucgccggguucauugagggaggcuggaccgggaugguggacggaugguacggcuaucaucaccagaaugaacaaggcucuggguacgcugcggaucuuaagagcacacagcacgccaucgacgagaucaccaacaaggucaauuccgugauugagaaaaugaacacgcaguuuacagcuguuggaaaggaguucaaucaucuggagaagagaaucgaaaaccucaauaaaaagguggaugacggcuuccuggauauuuggaccuacaacgccgagcugcucguccugcuugaaaaugagcggacccuggacuaucacgauagcaacgugaaaaaucucuacgagaagguccgcucucagcugaaaaacaacgccaaggaaaucgggaauggauguuuugaguucuaucauaagugcgacaacacauguauggaauccgugaaaaauggcaccuacgauuauccuaaguacagcgaggaagcuaaacuuaacagagaggagauugacgggguuaagcuggaaucuacacggaucuaucaaauccucgccauuuacuccacgguggcgagcucccugguccuggugguuucucucggcgcuaucagcuuuuggaugugcuccaauggaucucugcagugccgcauuuguaucuga

SEQ ID NO: 199417 - RNA, 1701 nt, Artificial Sequence; identical to SEQ ID NO: 194741
  derived and/or modified CDS sequence (opt5) from hemagglutinin__InfluenzaA__AEO01248

SEQ ID NO: 199418 - RNA, 1701 nt, Artificial Sequence; identical to SEQ ID NO: 194741
  derived and/or modified CDS sequence (opt5) from hemagglutinin__InfluenzaA__AEO01249

SEQ ID NO: 199419 - RNA, 1701 nt, Artificial Sequence
  derived and/or modified CDS sequence (opt5) from hemagglutinin__InfluenzaA__AEO01250
augaaggccauccuggugguccuccuguacaccuucgcuacagccaacgcggacacgcuuugcauuggcuaucacgcuaauaacagcaccgauacaguugacaccgugcuggagaaaaaugugacagucacccauuccgugaaccuccuggaagauaagcacaaugggaaacuuuguaagcugagaggaguugcuccccuccaucugggcaaaugcaacaucgccggguggauucugggaaauccugagugugaaucucucagcacagccuccucuuggagcuacaucguggagaccuccucuagcgacaacggcacgugcuauccgggggauuuuauugacuacgaagaacugcgggagcagcuuuccagcgucucuuccuucgaacgcuuugagaucuuccccaagaccagcucuuggccuaaucacgauuccaacaagggagugacagccgcuuguccccaugccggcgcgaaaucuuuuuauaagaaucugaucuggcucguuaaaaagggcaacagcuacccuaaacuguccaagagcuauauuaaugacaaggggaaagaagugcuuguccuguggggaauccaccaccccuccaccucugccgaucaacagagccucuaccagaacgaggacgcuuacguguucgugggcacauccagauauagcaagaaauuuaagccugagauugccauccggccgaaaguccgcgaucaggaagggagaaugaauuacuauuggacccugguugagcccggagacaagauuacguucgaagcuacaggcaaccugguggugccucgguacgccuuugcgauggagcgcaacgccgggucuggaaucauuaucuccgauacccccguccaugacugcaauacaaccugucaaaccccuaaaggcgcuaucaacacaagccuccccuuccagaauauucacccgaucacgauuggcaagugcccuaaguaugugaaaucuaccaagcugagacuugccacagggcugcggaacguucccagcauccagucccgcggacucuuuggcgcuauugccggguucaucgaaggaggcuggaccgggaugguggacggaugguacggcuaucaucaccagaaugagcaaggcucuggguacgccgcugaucugaaaagcacacagaacgcgaucgacgagauuaccaauaaggucaacuccgugaucgaaaagaugaauacgcaguuuacagccguuggaaaggaguucaaccaccuugaaaagagaauugagaaucugaacaaaaagguggaugacggcuuccucgauaucuggaccuacaaugcugaacugcugguccuccuggagaacgagcggacccuugacuaucaugauagcaaugugaaaaaccuguacgaaaagguccgcucucagcucaaaaacaaugccaaggagauugggaacggauguuuugaguucuaucacaagugcgacaauacauguauggaguccgugaaaaacggcaccuacgauuauccuaaguacagcgaagaggccaaacugaauagagaggaaaucgacgggguuaaacuugagucuacacggaucuaucaaauucuggcuaucuacuccacgguggccagcucccucguccuggugguuucucugggcgcgauuagcuuuuggaugugcuccaacggaucucuccagugccgcaucuguauuuga

SEQ ID NO: 199420 - RNA, 1701 nt, Artificial Sequence; identical to SEQ ID NO: 196338
  derived and/or modified CDS sequence (opt5) from hemagglutinin__InfluenzaA__AEO01251

SEQ ID NO: 199421 - RNA, 1701 nt, Artificial Sequence; identical to SEQ ID NO: 194741
  derived and/or modified CDS sequence (opt5) from hemagglutinin__InfluenzaA__AEO01252

SEQ ID NO: 199422 - RNA, 1701 nt, Artificial Sequence; identical to SEQ ID NO: 194741
  derived and/or modified CDS sequence (opt5) from hemagglutinin__InfluenzaA__AEO01253

SEQ ID NO: 199423 - RNA, 1701 nt, Artificial Sequence
  derived and/or modified CDS sequence (opt5) from hemagglutinin__InfluenzaA__AEO01254
augaaggccauccuggugguccuccuguacaccuucgcuacagccaacgcggacacgcuuugcauuggcuaucacgcuaauaacagcaccgauacaguugacaccgugcuggagaaaaaugugacagucacccauuccgugaaccuccuggaagauaagcacaaugggaaacuuuguaagcugagaggaguugcuccccuccaucugggcaaaugcaacaucgccggguggauucugggaaauccugagugugaaucucucagcacagccuccucuuggagcuacaucguggagaccuccucuagcgacaacggcacgugcuauccgggggauuuuauugacuacgaagaacugcgggagcagcuuuccagcgucucuuccuucgaacgcuuugagaucuuccccaagaccagcucuuggccuaaucacgauuccaacaagggagugacagccgcuuguccccaugccggcgcgaaaucuuuuuauaagaaucugaucuggcucguuaaaaagggcaacagcuacccuaaacuguccaagagcuauauuaauaacaaggggaaagaagugcuuguccuguggggaauccaccaccccuccaccucugccgaccaacagagccucuaccagaaugcugaugccuacguguucgugggcacauccagauauagcaagaaauuuaagccugagauugcuauccggccgaaaguccgcgaccaggaggggagaaugaacuacuauuggacccugguugaacccggagauaagauuacguucgaggccacaggcaaccugguggugccucgguacgcguuugccauggaacgcaaugcugggucuggaaucauuaucuccgacacccccguccaugauugcaacacaaccugucaaaccccuaaaggcgccaucaauacaagccuccccuuccagaacauucacccgaucacgauuggcaagugcccuaaguaugugaaaucuaccaagcugagacuugcuacagggcugcggaauguucccagcauccagucccgcggacucuuuggcgccauugccggguucaucgagggaggcuggaccgggaugguggacggaugguacggcuaucaucaccagaacgaacaaggcucuggguacgcugcggaccugaaaagcacacagaaugccaucgauaagauuaccaacaaagucaauuccgugaucgagaagaugaacacgcaguuuacagcuguuggaaaggaguucaaucaccuugagaaaagaauugagaaccugaauaagaaaguggacgauggcuuccucgacaucuggaccuacaacgccgaacugcugguccuccuggagaaugaacggacccuugauuaucaugacagcaacgugaagaaccuguacgagaaaguccgcucucagcucaagaauaacgccaaggagauugggaauggauguuuugaguucuaucacaaaugcgauaacacauguauggaauccgugaagaauggcaccuacgacuauccuaaauacagcgaagaggcuaagcugaacagagaagagaucgaugggguuaaacuugagucuacacggaucuaucaaauucuggccaucuacuccacgguggcgagcucccucguccuggugguuucucugggcgcuauuagcuuuuggaugugcuccaauggaucucuccagugccgcaucuguauuuga

SEQ ID NO: 199424 - RNA, 1701 nt, Artificial Sequence; identical to SEQ ID NO: 195188
  derived and/or modified CDS sequence (opt5) from hemagglutinin__InfluenzaA__AEO01256

SEQ ID NO: 199425 - RNA, 1701 nt, Artificial Sequence; identical to SEQ ID NO: 198160
  derived and/or modified CDS sequence (opt5) from hemagglutinin__InfluenzaA__AEO01257

SEQ ID NO: 199426 - RNA, 1701 nt, Artificial Sequence; identical to SEQ ID NO: 194741
  derived and/or modified CDS sequence (opt5) from hemagglutinin__InfluenzaA__AEO01258

SEQ ID NO: 199427 - RNA, 1701 nt, Artificial Sequence; identical to SEQ ID NO: 199423
  derived and/or modified CDS sequence (opt5) from hemagglutinin__InfluenzaA__AEO01259

SEQ ID NO: 199428 - RNA, 1701 nt, Artificial Sequence; identical to SEQ ID NO: 197296
  derived and/or modified CDS sequence (opt5) from hemagglutinin__InfluenzaA__AEO01260

SEQ ID NO: 199429 - RNA, 1701 nt, Artificial Sequence
  derived and/or modified CDS sequence (opt5) from hemagglutinin__InfluenzaA__AEO01261
augaaggccauccuggugguccuccuguacaccuucgcuacagccaacgcggacacgcuuugcauuggcuaucacgcuaauaacagcaccgauacaguugacaccgugcuggagaaaaaugugacagucacccauuccgugaaccuccuggaagauaagcacaaugggaaacuuuguaagcugagaggaguugcuccccuccaucugggcaaaugcaacaucgccggguggauucugggaaauccugagugugaaucucucagcacagccuccucuuggagcuacaucguggagaccuccucuagcgacaacggcacgugcuauccgggggauuuuauugacuacgaagaacugcgggagcagcuuuccagcgucucuuccuucgaacgcuuugagaucuuccccaagaccagcucuuggccuaaucacgauuccaacaagggagugacagccgcuuguccccaugccggcgcgaaaucuuuuuauaagaaucugaucuggcucguuaaaaagggcaacagcuacccuaaacuguccaagagcuauauuaaugacaaggggaaagaagugcuuguccuguggggaauccaccaccccuccaccucugccgaucaacagagccucuaccagaacgcugacgccuacguguucgugggcacauccagauauagcaagaaauuuaagccugagauugcuauccggccgaaaguccgcgaucaggaggggagaaugaauuacuauuggacccugguugaacccggagacaagauuacguucgaggccacaggcaaccugguggugccucgguacgcguuugccauggaacgcaacgcugggucuggaaucauuaucuccgauacccccguccaugacugcaauacaaccugucaaaccccuaaaggcgccaucaacacaagccuccccuuccagaauauucacccgaucacgauuggcaagugcccuaaguaugugaaaucuaccaagcugagaauggcuacagggcuucggaacguucccagcauccagucccgcggacuguuuggcgccauugccggguucaucgagggaggcuggaccgggaugguggacggaugguacggcuaucaucaccagaaugaacaaggcucuggguacgcugcggaucucaaaagcacacagaacgccaucgacgagauuaccaauaaggucaacuccgugaucgagaaaaugaauacgcaguuuacagcuguuggaaaggaguucaaccaccuggagaagagaauugaaaaucuuaacaaaaagguggaugacggcuuccuggauaucuggaccuacaaugccgagcuccugguccugcucgaaaacgagcggacccuggacuaucaugauagcaaugugaaaaaccuuuacgagaagguccgcucucagcugaaaaacaaugccaaggaaauugggaacggauguuuugaguucuaucacaagugcgacaauacauguauggaauccgugaaaaacggcaccuacgauuauccuaaguacagcgaggaagcuaaacucaauagagaggagaucgacgggguuaagcuggaaucuacaggcaucuaucaaauucuugccaucuacuccacgguggcgagcucccugguccucgugguuucucugggagcuauuagcuuuuggaugugcuccaacggcucucugcagugccggaucuguauuuga

SEQ ID NO: 199430 - RNA, 1701 nt, Artificial Sequence; identical to SEQ ID NO: 194741
  derived and/or modified CDS sequence (opt5) from hemagglutinin__InfluenzaA__AEO01262

SEQ ID NO: 199431 - RNA, 1701 nt, Artificial Sequence; identical to SEQ ID NO: 196423
  derived and/or modified CDS sequence (opt5) from hemagglutinin__InfluenzaA__AEO01263

SEQ ID NO: 199432 - RNA, 1701 nt, Artificial Sequence; identical to SEQ ID NO: 195094
  derived and/or modified CDS sequence (opt5) from hemagglutinin__InfluenzaA__AEO01264

SEQ ID NO: 199433 - RNA, 1701 nt, Artificial Sequence; identical to SEQ ID NO: 194741
  derived and/or modified CDS sequence (opt5) from hemagglutinin__InfluenzaA__AEO01265

SEQ ID NO: 199434 - RNA, 1701 nt, Artificial Sequence
  derived and/or modified CDS sequence (opt5) from hemagglutinin__InfluenzaA__AEO01266
augaaggccauccuggugguccuccuguacaccuucgcuacagccaacgcggacacgcuuugcauuggcuaucacgcuaauaacagcaccgauacaguugacaccgugcuggagaagaaugugacagucacccauuccgugaaccuccuggaagauaagcacaaugggaaacuuuguaagcugagaggaguugcuccccuccaucugggcaaaugcaacaucgccggguggauucugggaaauccugagugugaaucucucagcacagccuccucuuggagcuacaucguggagaccuccucuagcgacaacggcacgugcuauccgggggauuuuauugacuacgaagaacugcgggagcagcuuuccagcgucucuuccuucgaacgcuuugagaucuuccccaagaccagcucuuggccuaaucacgauuccaacaagggagugacagccgcuuguccccaugccggcgcgaaaucuuuuuauaagaaucugaucuggcucguuaaaaagggcaacagcuacccuaaacuguccaagagcuauauuaaugacaaggggaaagaagugcuuguccuguggggaauccaccaccccuccaccucugccgaucaacagagccucuaccagaacgcugacgccuacguguucgugggcacauccagauauagcaagaaauuuaagccugagauugcuauccggccgaaaguccgcgggcaggagggaagaaugaauuacuauuggacccugguugaacccggcgauaagauuacguucgaggccacagggaaccugguggugccucgguacgcguuugccauggaacgcaacgcuggaucuggcaucauuaucuccgacgcccccguccaugauugcaauaccacaugucaaaccccuaaaggcgcuaucaacaccagccuccccuuccagaauauucacccgaucacaauugggaagugcccuaaguaugugaaaucuacgaagcugagacuugccaccggacugcggaacguucccagcauccagucccgcggccucuuuggggccauugcuggauucaucgagggcggguggacaggaaugguggacggcugguacggcuaucaucaccagaaugaacaagggucuggauacgcggccgaccugaaaagcacccagaacgcuaucgaugagauuacaaauaaggucaacuccgugaucgagaaaaugaauacccaguuuacggccguuggcaaggaguucaaccaccuugagaagagaauugaaaaucugaacaaaaagguggacgauggguuccucgacaucuggacauacaaugccgagcugcugguccuccuggaaaacgagcggacccuugauuaucaugacagcaaugugaaaaaccuguacgagaagguccgcucucagcucaaaaacaaugcuaaggaaauuggaaacggcuguuuugaguucuaucacaagugcgauaauaccuguauggaauccgugaaaaacgggacauacgacuauccuaaguacagcgaggaagccaaacugaauagagaggagaucgauggcguuaaacuugaaucuacccggaucuaucaaauucuggcgaucuacuccacaguggcuagcucccucguccuggugguuucucugggagccauuagcuuuuggaugugcuccaacggcucucuccagugccgcaucuguauuuga

SEQ ID NO: 199435 - RNA, 1701 nt, Artificial Sequence; identical to SEQ ID NO: 194741
  derived and/or modified CDS sequence (opt5) from hemagglutinin__InfluenzaA__AEO01267

SEQ ID NO: 199436 - RNA, 1701 nt, Artificial Sequence; identical to SEQ ID NO: 194741
  derived and/or modified CDS sequence (opt5) from hemagglutinin__InfluenzaA__AEO01268

SEQ ID NO: 199437 - RNA, 1701 nt, Artificial Sequence
  derived and/or modified CDS sequence (opt5) from hemagglutinin__InfluenzaA__AEO01269
augaaggccauccuggugguccuccuguacaccuucgcuacagccaacgcggacacgcuuugcauuggcuaucacgcuaauaacagcaccgauacaguugacaccgugcuggagaaaaaugugacagucacccauuccgugaaccuccuggaagauaagcacaaugggaaacuuuguaagcugagaggaguugcuccccuccaucugggcaaaugcaacaucgccggguggauucugggaaauccugagugugaaucucucagcacagccuccucuuggagcuacaucguggagaccuccucuagcgacaacggcacgugcuauccgggggauuuuauugacuacgaagaacugcgggagcagcuuuccagcgucucuuccuucgaacgcuuugagaucuuccccaagaccagcucuuggccuaaucacgauuccaacaagggagugacagccgcuuguccccaugccggcgcgaaaucuuuuuauaagaaucugaucuggcucguuaaaaagggcaacagcuacccuaaacuguccaagagcuauauuaaugacaaggggaaagaagugcuuguccuguggggaauccaccaccccuccaccucugccgaucaacagagccucuaccagaacgcugacgccuacguguucgugggcacauccagauauagcaagaaauuuaagccugagauugcuauccggccgaaaguccgcgagcaggaagggagaaugaauuacuauuggacccugguugagcccggagauaagauuacguucgaagccacaggcaaccugguggugccucgguacgcguuugccauggagcgcaacgcugggucuggaaucgucauuuccgacacccccgugcaugauugcaauacaaccugucaaaccccuaaaggcgccaucaacacaagccuccccuuccagaauauccacccgauuacgaucggcaagugcccuaaguauguuaaaucuaccaagcugagacuugcuacagggcugcggaacgugcccagcauucagucccgcggacucuuuggcgccaucgccggguucauugaaggaggcuggaccgggauggucgacggaugguacggcuaucaucaccagaaugagcaaggcucuggguacgcugcggaccugaaaagcacacagaacgccaucgaugagaucaccaauaaggugaacuccguuauugaaaagaugaauacgcaguuuacagcugugggaaaggaguucaaccaccuugaaaagagaauggagaaucugaacaaaaaggucgacgauggcuuccucgacaucuggaccuacaaugccgaacugcuggugcuccuggagaacgagcggacccuugauuaucaugacagcaaugucaaaaaccuguacgaaaaggugcgcucucagcucaaaaacaaugccaaggagauugggaacggauguuuugaguucuaucacaagugcgauaauacauguauggaguccguuaaaaacggcaccuacgacuauccuaaguacagcgaagaggcuaaacugaauagagaggaaaucgauggggugaaacuugagucuacacggauuuaucaaauccuggccaucuacuccacggucgcgagcucccucgugcugguugugucucugggcgcuauuagcuuuuggaugugcuccaacggaucucuccagugccgcaucuguauuuga

SEQ ID NO: 199438 - RNA, 1701 nt, Artificial Sequence; identical to SEQ ID NO: 195905
  derived and/or modified CDS sequence (opt5) from hemagglutinin__InfluenzaA__AEO01270

SEQ ID NO: 199439 - RNA, 1701 nt, Artificial Sequence
  derived and/or modified CDS sequence (opt5) from hemagglutinin__InfluenzaA__AEO01271
augaaggccauccuggugguccuccuguacaccuucgcuacagccaacgcggacacgcuuugcauuggcuaucacgcuaauaacagcaccgauacaguugacaccgugcuggagaagaaugugacagucacccauuccgugaaccuccuggaagauaagcacaaugggaaacuuuguaagcugagaggaguugcuccccuccaucugggcaaaugcgacaucgccggguggauucugggaaacccugagugugaaucucucagcacagccuccucuuggagcuacaucguggagaccccguccucugauaauggcacgugcuaucccggggacuuuauugauuacgaagaacugcgggagcagcuuagcuccgucagcucuuucgaacgcuuugagaucuucccuaagaccuccagcuggcccaaccacgacucuaauaagggagugacagccgcuuguccucaugccggcgcgaaauccuuuuauaagaaccugaucuggcucguuaaaaagggcaauagcuaccccaaacugucuaaguccuauauuaacgauaaggggaaagaagugcuuguccuguggggaauccaccacccuagcaccuccgccgaccaacagucucucuaccagaaugcugaugccuacguguucgugggcacaagcagauauuccaagaaauuuaagccggagauugcuauccggcccaaaguccgcgaccaggaggggagaaugaacuacuauuggacccugguugaaccuggagauaagauuacguucgaggccacaggcaaucugguggugccccgguacgcguuugccauggaacgcaacgcugggagcggaaucauuaucucugacaccccuguccaugacugcaacacaaccugucaaacccccaaaggcgccaucaauacaucccucccguuccagaacauucacccuaucacgauuggcaagugccccaaguaugugaaaagcaccaagcugagacuugcuacagggcugcggaauguuccuucuauccagagccgcggacucuuuggcgccauugccggguucaucgagggaggcuggaccgggaugguggauggaugguacggcuaucaucaccagaacgaacaaggcuccggguacgcugcggaccugaaaucuacacagcacgccaucgaugagauuaccaauaaggucaacagcgugaucgagaaaaugaauacgcaguuuacagcuguuggaaaggaguucaaccaucuugagaagagaauugaaaaucugaacaaaaagguggacgauggcuuccucgacaucuggaccuacaaugccgagcugcugguccuccuggaaaacgagcggacccuugauuaucacgacuccaaugugaaaaaccuguacgagaagguccgcagccagcucaaaaauaacgccaaggaaauugggaacggauguuuugaguucuaucauaagugcgauaauacauguauggaaucugugaaaaacggcaccuacgacuaucccaaguacuccgaggaagcuaaacugaauagagaggagaucgaugggguuaaacuugaaagcacacggaucuaucaaauucuggccaucuacucuacgguggcguccagccucguccuggugguuucccugggcgcuauuucuuuuuggaugugcagcaacggaucccuccagugccgcaucuguauuuga

SEQ ID NO: 199440 - RNA, 1701 nt, Artificial Sequence; identical to SEQ ID NO: 194741
  derived and/or modified CDS sequence (opt5) from hemagglutinin__InfluenzaA__AEO01272

SEQ ID NO: 199441 - RNA, 1701 nt, Artificial Sequence; identical to SEQ ID NO: 194741
  derived and/or modified CDS sequence (opt5) from hemagglutinin__InfluenzaA__AEO01273

SEQ ID NO: 199442 - RNA, 1701 nt, Artificial Sequence; identical to SEQ ID NO: 194741
  derived and/or modified CDS sequence (opt5) from hemagglutinin__InfluenzaA__AEO01274

SEQ ID NO: 199443 - RNA, 1701 nt, Artificial Sequence; identical to SEQ ID NO: 196909
  derived and/or modified CDS sequence (opt5) from hemagglutinin__InfluenzaA__AEO01275

SEQ ID NO: 199444 - RNA, 1701 nt, Artificial Sequence
  derived and/or modified CDS sequence (opt5) from hemagglutinin__InfluenzaA__AEO01276
augaaggccauccuggugguccuccuguacaccuucgcuacagccaacgcggacacgcuuugcauuggcuaucacgcuaauaacagcaccgauacaguugacaccgugcugaaaaagaaugugacagucacccauuccgugaaccuccuggaggauaaacacaaugggaagcuguguaaacugagaggaguugcgccccuccaucugggcaagugcaacaucgccggguggauucugggaaauccugaaugugagucucucagcacagcuuccucuuggagcuacaucguggaaaccuccucuagcgacaacggcacgugcuauccgggggauuuuauugacuacgaggaacugcgggagcagcuuuccagcgucucuuccuucgagcgcuuugaaaucuuccccaagaccagcucuuggccuaaucacgauuccaacaaaggagugacagccgcuuguccccaugccggcgccaagagcuuuuauaaaaaucugaucuggcucguuaagaaaggcaacucuuacccuaagcuguccaagagcuauauuaaugacaaagggaaggaggugcuuguccuguggggaauccaccaccccuccaccucugccgaucaacagagccucuaccagaacgcugacgccuacguguucgugggcacauccagauauagcaaaaaguuuaaaccugaaauugcuauccggccgaagguccgcgaucaggaggggagaaugaauuacuauuggacccugguugagcccggagacaaaauuacguucgaagccacaggcaaccugguggugccucgguacgcguuugccauggagcgcaacgcugggucuggaaucauuaucuccgauacccccguccaugacugcaauacaaccugucaaaccccuaagggcgccaucaacacaagccuccccuuccagaauauucacccgaucacgauuggcaagugcccuaaauaugugaagucuaccaaacugagacuugcuacagggcugcggaacguucccagcauccagucccgcggacucuuuggcgccauugccggguucaucgaaggaggcuggaccgggaugguggacggaugguacggcuaucaucaccagaaugagcaaggcucuggguacgcugcggaucuuaagagcacacagaacgccaucgacgaaauuaccaauaaagucaacuccgugaucgagaagaugaauacgcaguuuacagcuguuggaaaggaguucaaccaccuugaaaagagaauugagaaucugaacaagaaaguggaugacggcuuccucgauaucuggaccuacaaugccgaacugcugguccuccuggagaacgaacggacccuugacuaucaugauagcaaugugaagaaccuguacgagaaaguccgcucucagcucaagaacaaugccgaggaaauugggaacggauguuuugaguucuaucacaagugcgacaauacauguauggaauccgugaaaaacggcaccuacgauuauccuaaguacagcgaggaagcuaaacugaauagagaggagaucgacgggguuaaacuugaaucuacacggaucuaucaaauucuggccaucuacuccacgguggcgagcucccucguccuggugguuucucugggcgcuauuagcuuuuggaugugcuccaacggaucucuccagugccgcaucuguauuuga

SEQ ID NO: 199445 - RNA, 1701 nt, Artificial Sequence; identical to SEQ ID NO: 194741
  derived and/or modified CDS sequence (opt5) from hemagglutinin__InfluenzaA__AEO01277

SEQ ID NO: 199446 - RNA, 1701 nt, Artificial Sequence
  derived and/or modified CDS sequence (opt5) from hemagglutinin__InfluenzaA__AEO01278
augaaggccauccuggugguccuccuguacaccuucgcuacagccaacgcggacacgcuuugcauuggcuaucacgcuaauaacagcaccgauacaguugacaccgugcuggagaagaaugugacagucacccauuccgugaaccuccuggaagauaagcacaaugggaaacuuuguaagcugagaggaguugcuccccuccaucugggcaaaugcgacaucgccggguggauucugggaaacccugagugugaaucucucagcacagccuccucuuggagcuacaucguggagaccuccucuagcgauaauggcacgugcuauccgggggacuuuauugauuacgaagaacugcgggagcagcuuuccagcgucucuuccuucgaacgcuuugagaucuuccccaagaccagcucuuggccuaaccacgacuccaauaagggagugacagccgcuuguccccaugccggcgcgaaaucuuuuuauaagaaccugaucuggcucguuaaaaagggcaauagcuacccuaaacuguccaagagcuauauuaacgauaaggggaaagaagugcuuguccuguggggaauccaccaccccuccaccucugccgaccaacagagccucuaccagaaugcugaugccuacguguucgugggcacauccagauauagcaagaaauuuaagccugagauugcuauccggccgaaaguccgcgaccaggaggggagaaugaacuacuauuggacccugguugaacccggagauaagauuacguucgaggccacaggcaaucugguggugccucgguacgcguuugccauggaacgcaacgcugggucuggaaucauuaucuccgacacccccguccaugacugcaacacaaccugucaaaccccuaaaggcgccaucaauacaagccuccccuuccagaacauucacccgaucacgauuggcaagugcccuaaguaugugaaaucuaccaagcugagacuugcuacagggcugcggaauguucccagcauccagucccgcggacucuuuggcgccauugccggguucaucgagggaggcuggaccgggaugguggauggaugguacggcuaucaucaccagaacgaacaaggcucuggguacgcugcggaccugaaaagcacacagcacgccaucgaugagauuaccaauaaggucaacuccgugaucgagaaaaugaauacgcaguuuacagcuguuggaaaggaguucaaccaucuugagaagagaauugccaaucugaacaaaaagguggacgauggcuuccucgacaucuggaccuacaaugccgaacugcugguccuccuggagaacgaacggacccuugauuaucacgacagcaaugugaaaaaccuguacgagaagguccgcucucagcucaaaaauaacgcuaaggagauugggaacggauguuuugaguucuaucauaagugcgauaauacauguauggaauccgugaaaaacggcaccuacgacuauccuaaguacagcgaagaggccaaacugaauagagaagagaucgaugggguuaaacuugagucuacacggaucuaucaaauucuggcgaucuacuccacgguggcuagcucccucguccuggugguuucucugggcgccauuagcuuuuggaugugcuccaacggaucucuccagugccgcaucuguauuuga

SEQ ID NO: 199447 - RNA, 1701 nt, Artificial Sequence
  derived and/or modified CDS sequence (opt5) from hemagglutinin__InfluenzaA__AEO01279
augaaggccauccuggugguccuccuguacaccuucgcuacagccaacgcggacacgcuuugcauuggcuaucacgcuaauaacagcaccgauacaguugacaccgugcuggagaaaaaugugacagucacccauuccgugaaccuccuggaagauaagcacaaugggaaacuuuguaagcugagaggaguugcuccccuccaucugggcaaaugcaacaucgccggguggauucugggaaauccugagugugaaucucucagcacagccuccucuuggagcuacaucguggagaccuccucuagcgacaacggcacgugcuauccgggggauuuuauugacuacgaagaacugcgggagcagcuuuccagcgucucuuccuucgaacgcuuugagaucuuccccaagaccagcucuuggccuaaucacgauuccaacaagggagugacagccgcuuguccccaugccggcgcgaaaucuuuuuauaagaaucugaucuggcucguuaaaaagggcaacagcuacccuaaacuguccaagagcuauauuaaugacaaggggaaagaagugcuuguccuguggggaauccaccaccccuccaccucugccgaucaacagagccucuaccagaacgcugacgccuacguguucgugggcacauccagauauagcaagaaauuuaagccugagauugcuauccggccgaaaguccgcgaucaggaggggagaaugaauuacuauuggacccugguugaacccggagacaagauuacguucgaggccacaggcaaccugguggugccucgguacgcguuugccauggaacgcaccgcugggucuggaaucauuaucuccgauacacccguccaugacugcaacaccaccugucaaacaccuaaaggcgccaucaauacgagccuccccuuccagaacauucacccgaucaccauuggcaagugcccuaaguaugugaaaucuacaaagcugagacuugcuaccgggcugcggaauguucccagcauccagucccgcggacucuuuggcgccauugccggguucaucgagggaggcuggacagggaugguggacggaugguacggcuaucaucaccagaacgaacaaggcucuggguacgcugcggaucugaaaagcacccagaaugccaucgacaagauuacgaacaaagucaauuccgugaucgagaagaugaacacacaguuuaccgcuguuggaaaggaguucaaucaccuugagaaaagaauugagaaccugaauaagaaaguggaugacggcuuccucgauaucuggaccuacaacgccgaacugcugguccuccuggagaaugaacggacacuugacuaucaugauagcaacgugaagaaucuguacgagaaaguccgcucucagcucaagaacaacgccaaggagauugggaauggauguuuugaguucuaucacaaaugcgacaacaccuguauggaauccgugaagaauggcacauacgauuauccuaaauacagcgaagaggcuaagcugaacagagaagagaucgacgggguuaaacuugagucuacgcggaucuaucaaauucuggccaucuacuccaccguggcgagcucccucguccuggugguuucucugggcgcuauuagcuuuuggaugugcuccaauggaucucuccagugccgcaucuguauuuga

SEQ ID NO: 199448 - RNA, 1701 nt, Artificial Sequence
  derived and/or modified CDS sequence (opt5) from hemagglutinin__InfluenzaA__AEO01282
augaaggccauccuggugguccuccuguacaccuucgcuacagccaacgcggacacgcuuugcauuggcuaucacgcuaauaacagcaccgauacaguugacaccgugcuggagaaaaaugugacagucacccauuccgugaaccuccuggaagauaagcacaaugggaaacuuuguaagcugagaggaguugcuccccuccaucugggcaaaugcaacaucgccggguggauucugggaaauccugagugugaaucucucagcacagccuccucuuggagcuacaucguggagaccuccucuagcgacaacggcacgugcuauccgggggauuuuauugacuacgaagaacugcgggagcagcuuuccagcgucucuuccuucgaacgcuuugagaucuuccccaagaccagcucuuggccuaaucacgauuccaacaagggagugacagccgcuuguccccaugccggcgcgaaaucuuuuuauaagaaucugaucuggcucguuaaaaagggcaacagcuacccuaaacuguccaagagcuauauuaaugacaaggggaaagaagugcuuguccuguggggaauccaccaccccuccaccucugccgaucaacagagccucuaccagaacgcugacgccuacguguucgugggcacauccagauauagcaagaaauuuaagccugagauugcuauccggccgaaaguccgcgaucaggaggggagaaugaauuacuauuggacccugguugaacccggagacaagauuacguucgaggccacaggcaaccugguggugccucgguacgcguuugccauggaacgcaacgcugggucuggaaucauuaucuccgauacccccguccaugacugcaauacaaccugucaaaccccuaaaggcgccaucaacacaagccuccccuuccagaauauucacccgaucacgauuggcaagugcccuaaguaugugaaaucuaccaagcugagacuugcuacagggcugcggaacguucccagcauccagucccgcggacucuuuggcgccauugccggguucaucgagggaggcuggaccgggaugguggacggaugguacggcuaucaucaccagaaugaacaaggcucuggguacgcugcggaucugaaaagcacacagaacgccaucgacgagauuaccaauaaggucaacuccgugaucgagaaaaugaauacgcaguuuacagcuguuggaaaggaguucaaccaccuugagaagagaauugaaaaucugaacaaaaagguggaugacggcuuccucgauaucuggaccuacaaugccgagcugcugguccuccuggaaaacgagcggacccuugacuaucaugauagcaaugugaaaaagcuguacgagaaaguccgcucucagcucaagaacaacgccaaggaaauugggaauggauguuuugaguucuaucacaaaugcaacaauacauguauggaauccgugaagaacggcaccuacgacuauccuaaauacagcgaggaagcuaagcugaauagagaggagaucgaugggguuaaacuugaaucuacacggaucuaucaaauucuggccaucuacuccacgguggcgagcucccucguccuggugguuucucugggcgcuauuagcuuuuggaugugcuccaacggaucucuccagugccgcaucuguauuuga

SEQ ID NO: 199449 - RNA, 1701 nt, Artificial Sequence; identical to SEQ ID NO: 195843
  derived and/or modified CDS sequence (opt5) from hemagglutinin__InfluenzaA__AEO01283

SEQ ID NO: 199450 - RNA, 1701 nt, Artificial Sequence
  derived and/or modified CDS sequence (opt5) from hemagglutinin__InfluenzaA__AEO01284
augaaggccauccuggugguccuccuguacaccuucgcuauugccaacgcggacacacuuugcaucggcuaucacgcuaauaacagcacggauaccguugacacagugcuggagaagaaugugaccgucacacauuccgugaaccuccuggaagauaagcacaaugggaaacuuuguaagcugagaggaguugcuccccuccaucugggcaaaugcaacauugccggguggauccugggaaauccugagugugaaucucucagcaccgccuccucuuggagcuacauuguggagacauccucuagcgacaacggaaccugcuauccgggggauuuuaucgacuacgaagaacugcgggagcagcuuuccagcgucucuuccuucgaacgcuuugagaucuuccccaagacgagcucuuggccuaaucacgauuccaacaagggagugaccgccgcuuguccccaugccggcgcgaaaucuuuuuauaagaaucugauuuggcucguuaaaaagggcaacagcuacccuaaacuguccaagagcuauaucaaugacaaggggaaagaagugcuuguccuguggggcauucaccaccccuccacaucugccgaucaacagagccucuaccagaacgcugacgccuacguguucgugggcaccuccagauauagcaagaaauuuaagccugagaucgcuauucggccgaaaguccgcgaucaggaggggagaaugaauuacuauuggacacugguugaacccggagacaagaucaccuucgaggccacgggcaaccugguggugccucgguacgcguuugccauggaacgcaacgcugggucuggaauuaucaucuccgauacacccguccaugacugcaauaccacaugucaaaccccuaaaggcgccauuaacaccagccuccccuuccagaauauccacccgauuacaaucggcaagugcccuaaguaugugaaaucuacgaagcugagacuugcuaccgggcugcggaacguucccagcauucagucccgcggacucuuuggcgccaucgccggguucaucgagggaggcuggacagggaugguggacggaugguacggcuaucaucaccagaaugaacaaggcucuggguacgcugcggaucugaaaagcacccagcacgccauugacgagaucacaaacaaggucaauuccgugauugagaaaaugaacacccaguuuacggcuguuggaaaggaguucaaucaucuugagaagagaaucgaaaaccugaauaaaaagguggaugacggcuuccucgauauuuggacauacaacgccgagcugcugguccuccuggaaaaugagcggacccuugacuaucacgauagcaacgugaaaaaucuguacgagaagguccgcucucagcucaaaaacaacgccaaggaaaucgggaauggauguuuugaguucuaucauaagugcgacaacaccuguauggaauccgugaaaaauggcacauacgauuauccuaaguacagcgaggaagcuaaacugaacagagaggagaucaaugggguuaaacuugaaucuacccggauuuaucaaauccuggccauuuacuccacaguggcgagcucccucguccuggugguuucucugggcgcuaucagcuuuuggaugugcuccaacggaucucuccagugccgcauuuguaucuga

SEQ ID NO: 199451 - RNA, 1701 nt, Artificial Sequence; identical to SEQ ID NO: 195842
  derived and/or modified CDS sequence (opt5) from hemagglutinin__InfluenzaA__AEO01285

SEQ ID NO: 199452 - RNA, 1701 nt, Artificial Sequence; identical to SEQ ID NO: 195935
  derived and/or modified CDS sequence (opt5) from hemagglutinin__InfluenzaA__AEO01286

SEQ ID NO: 199453 - RNA, 1701 nt, Artificial Sequence
  derived and/or modified CDS sequence (opt5) from hemagglutinin__InfluenzaA__AEO01287
augaaggccauccuggugguccuccuguacaccuucgcuacagccaacagcgacacgcuuugcauuggcuaucacgcgaauaacuccaccgauacaguugacaccgugcuggagaagaaugugacagucacccauucugugaaccuccuggaagauaagcacaaugggaaacuuuguaagcugagaggaguugcuccccuccaucugggcaaaugcaacaucgccggguggauucugggaaauccugagugugaaagccucuccacagccucuagcugguccuacaucguggagaccucuagcuccgacaacggcacgugcuauccgggggauuuuauugacuacgaagaacugcgggagcagcuuagcucugucuccagcuucgaacgcuuugagaucuuccccaagaccucuuccuggccuaaucacgauagcaacaagggagugacagcugccuguccccaugcuggcgccaaaucuuuuuauaagaaucugaucuggcucguuaaaaagggcaacuccuacccuaaacugagcaaguccuauauuaaugacaaggggaaagaagugcuuguccuguggggaauccaccaccccucuaccagcgcggaucaacagucccucuaccagaacgccgacgcuuacguguucgugggcacaagcagauauucuaagaaauuuaagccugagauugccauccggccgaaaguccgcgaucaggaggggagaaugaauuacuauuggacccugguugaacccggagacaagauuacguucgaggcuacaggcaaccugguggugccucgguacgccuuugcgauggaacgcaacgccggguccggaaucauuaucagcgauacccccguccaugacugcaauacaaccugucaaaccccuaaaggcgcuaucaacacaucucuccccuuccagaauauucacccgaucacgauuggcaagugcccuaaguaugugaaaagcaccaagcugagacuugccacagggcugcggaacguucccuccauccagucucgcggacucuuuggcgcuauugccggguucaucgagggaggcuggaccgggaugguggacggaugguacggcuaucaucaccagaaugaacaaggcagcggguacgccgcugaucugaaauccacacagaacgcgaucgacgagauuaccaauaaggucaacagcgugaucgagaaaaugaauacgcaguuuacagccguuggaaaggaguucaaccaccuugagaagagaauugaaaaucugaacaaaaagguggaugacggcuuccucgauaucuggaccuacaaugcugagcugcugguccuccuggaaaacgagcggacccuugacuaucaugauucuaaugugaaaaaccuguacgagaagguccgcucccagcucaaaaacaaugccaaggaaauugggaacggauguuuugaguucuaucacaagugcgacaauacauguauggaaagcgugaaaaacggcaccuacgauuauccuaaguacucugaggaagccaaacugaauagagaggagaucgacgggguuaaacuugaauccacacggaucuaucaaauucuggcuaucuacagcacgguggccuccucucucguccuggugguuagccugggcgcgauuuccuuuuggaugugcucuaacggaagccuccagugccgcaucuguauuuga

SEQ ID NO: 199454 - RNA, 1701 nt, Artificial Sequence; identical to SEQ ID NO: 195094
  derived and/or modified CDS sequence (opt5) from hemagglutinin__InfluenzaA__AEO01288

SEQ ID NO: 199455 - RNA, 1701 nt, Artificial Sequence; identical to SEQ ID NO: 194741
  derived and/or modified CDS sequence (opt5) from hemagglutinin__InfluenzaA__AEO01289

SEQ ID NO: 199456 - RNA, 1701 nt, Artificial Sequence
  derived and/or modified CDS sequence (opt5) from hemagglutinin__InfluenzaA__AEO01290
augaaggccauccuggugguccuccuguacaccuucgcuacagccaacgcggacacgcuuugcauuggcuaucacgcuaauaacagcaccgauacaguugacaccgugcuggagaagaaugugacagucacccauuccgugaaccuccuggaagauaagcacaaugggaaacuuuguaagcugagaggaguugcuccccuccaucugggcaaaugcaacaucgccggguggauucugggaaauccugagugugaaucucucagcacagccuccucuuggagcuacaucguggagaccuccucuagcgacaacggcacgugcuauccgggggauuuuauugacuacgaagaacugcgggagcagcuuuccagcgucucuuccuucgaacgcuuugagaucuuccccaagaccagcucuuggccuaaucacgauuccaacaagggagugacagccgcuuguccccaugccggcgcgaaaucuuuuuauaagaaucugaucuggcucguuaaaaagggcaacagcuacccuaaacuguccaagagcuauauuaaugacaaggggaaagaagugcuuguccuguggggaauccaccaccccuccaccucugccgaucaacagagccucuaccagaacgcugacgccuacguguucgugggcacauccagauauagcaagaaauuuaagccugagauugcuauccggccgaaaguccgcgaucaggaggggagaaugaauuacuauuggacccugguugaacccggagacaagauuacguucgaggccacaggcaaccugguggugccucgguacgcguuugccauggaacgcaacgcugggucuggaaucauuaucuccgauacccccguccaugacugcaauacaaccugucaaaccccuaaaggcgccaucaacacaagccucucuuuccagaauauucaccccaucacgauuggcaagugcccgaaguaugugaaaagcaccaagcugagacuugcuacagggcugcggaacguuccuuccauccagucucgcggacucuuuggcgccauugccggguucaucgagggaggcuggaccgggaugguggacggaugguacggcuaucaucaccagaaugaacaaggcagcggguacgcugcggaucugaaauccacacagaacgccaucgacgagauuaccaauaaggucaacagcgugaucgagaaaaugaauacgcaguuuacagcuguuggaaaggaguucaaccaccuugagaagagaauugaaaaucugaacaaaaagguggaugacggcuuccucgauaucuggaccuacaaugccgagcugcugguccuccuggaaaacgagcggacccuugacuaucaugauucuaaugugaaaaaccuguacgagaagguccgcucccagcucaaaaacaaugccaaggaaauugggaacggauguuuugaguucuaucacaagugcgacaauacauguauggaaagcgugaaaaacggcaccuacgauuaucccaaguacucugaggaagcuaaacugaauagagaggagaucgacgggguuaaacuugaauccacacggaucuaucaaauucuggccaucuacagcacgguggcguccucucucguccuggugguuagccugggcgcuauuuccuuuuggaugugcucuaacggaagccuccagugccgcaucuguauuuga

SEQ ID NO: 199457 - RNA, 1701 nt, Artificial Sequence; identical to SEQ ID NO: 194741
  derived and/or modified CDS sequence (opt5) from hemagglutinin__InfluenzaA__AEO01291

SEQ ID NO: 199458 - RNA, 1701 nt, Artificial Sequence; identical to SEQ ID NO: 194741
  derived and/or modified CDS sequence (opt5) from hemagglutinin__InfluenzaA__AEO01292

SEQ ID NO: 199459 - RNA, 1701 nt, Artificial Sequence
  derived and/or modified CDS sequence (opt5) from hemagglutinin__InfluenzaA__AEO01294
augaaggccauccuggugguccuccuguacaccuucgcuacagccaacgcggacacgcuuugcauuggcuaucacgcuaauaacagcaccgauacaguugacaccgugcuggagaagaaugugacagucacccauuccgugaaccuccuggaagauaagcacaaugggaaacuuuguaagcugagaggaguugcuccccuccaucugggcaaaugcgacaucgccggguggauucugggaaacccugagugugaaucucucagcacagccuccucuuggagcuacaucguggagaccuccucuagcgauaauggcacgugcuauccgggggacuuuauugauuacgaagaacugcgggagcagcuuuccagcgucucuuccuucgaacgcuuugagaucuuccccaagaccagcucuuggccuaaccacgacuccaauaagggagugacagccgcuuguccccaugccggcgcgaaaucuuuuuauaagaaccugaucuggcucguuaaaaagggcaauagcuacccuaaacuguccaagagcuauauuaacgauaaggggaaagaagugcuuguccuguggggaauccaccaccccuccaccucugccgaccaacagagccucuaccagaaugcugaugccuacguguucgugggcacauccagauauagcaagaaauuuaagccugagauugcuauccggccgaaaguccgcgaccaggaggggagaaugaacuacuauuggacccugguugaacccggagauaagauuacguucgaggccacaggcaaucugguggugccucgguacgcguuugccauggaacgcaacgcugggucuggaaucauuaucuccgacacccccguccaugacugcaacacaaccugucaaaccccuaaaggcgccaucaauacaagccuccccuuccagaacauucacccgaucacgauuggcaagugcccuaaguaugugaaaucuaccaagcugagacuugcuacagggcugcggaauguucccagcauccagucccgcggacucuuuggcgccauugccggguucaucgagggaggcuggaccgggaugguggauggaugguacggcuaucaucaccagaacgaacaaggcucuggguacgcugcggaccugaaaagcacacagcacgccaucgaugagauuaccaauaaggucaacuccgugaucgagaaaaugaauacgcaguuuacagcuguuggaaaggaguucaaccaucuugagaagagaauugaaaaucugaacaaaaagguggacgauggcuuccucgacaucuggaccuacaaugccgagcugcugguccuccuggaaaacgagcggacccuugauuaucacgacagcaaugugaaaaaccuguacgagaagguccgcucucagcucaaaaauaacgccaaggaaauugggaacggauguuuugaguucuaucauaagugcgauaauacauguauggaauccgugaaaaacggcaccuacgacuauccuaaguacagcgaggaagcuaaacugaauagagaggagaucgaugggguuaaacuugaaucuacacggaucuaucaaauucuggccaucuacuccacgguggcgagcucccucguccuggugguuucucugggcgcuauuagcuuuuggaugugcuccaacggaucucuccagugccgcaucuguauuuga

SEQ ID NO: 199460 - RNA, 1701 nt, Artificial Sequence
  derived and/or modified CDS sequence (opt5) from hemagglutinin__InfluenzaA__AEO01295
augaaggccauccuggugguccuccuguacaccuucgcuacagccaacgcggacacgcuuugcauuggcuaucacgcuaauaacagcaccgauacaguugacaccgugcuggagaaaaaugugacagucacccauuccgugaaccuccuggaagauaagcacaaugggaaacuuuguaagcugagaggaguugcuccccuccaucugggcaaaugcaacaucgccggguggauucugggaaauccugagugugaaucucucagcacagccuccucuuggagcuacaucguggagaccuccaacucugacaauggcacgugcuauccgggggauuuuauugacuacgaagaacugcgggagcagcuuagcuccgucagcucuuucgaacgcuuugagaucuuccccaagaccuccagcuggccuaaccacgauucuaauaagggagugacagccgcuuguccccaugccggcgcgaaauccuuuuauaagaaccugaucuggcucguuaaaaagggcaauagcuacccuaaacugucuaaguccuauauuaacgacaaggggaaagaagugcuuguccuguggggaauccaccaccccagcaccuccgccgaucaacagucucucuaccagaaugcugacgccuacguguucgugggcacaagcagauauuccaagaaauuuaagccugagauugcuauccggccgaaaguccgcgaucaggaggggagaaugaacuacuauuggacccugguugaacccggagacaagauuacguucgaggccacaggcaaccugguggugccucgguacgcguuugccauggaacgcaaugcugggagcggaaucauuaucucugauacccccguccauuauugcaacacaaccugucaaaccccuaaaggcgccaucaauacaucccuccccuuccagaacauucacccgaucacgauuggcaagugcccuaaguacgugaaaagcaccaagcugagacuugcuacagggcugcggaauguucccucuauccagagccgcggacucuuuggcgccauugccggguucaucgagggaggcuggaccgggaugguggacggaugguauggcuaccaucaccagaacgaacaaggcuccggguacgcugcggaccugaaaucuacacagaaugccaucgauaagauuaccaacaaagucaauagcgugaucgagaagaugaacacgcaguuuacagcuguuggaaaggaguucaaucaccuugagaaaagaauugagaaccugaauaagaaaguggacgauggcuuccucgacaucuggaccuauaacgccgaacugcugguccuccuggagaaugaacggacccuugauuaccaugacuccaacgugaagaaccuguaugagaaaguccgcagccagcucaagaauaacgccaaggagauugggaauggauguuuugaguucuaccacaaaugcgauaacacauguauggaaucugugaagaauggcaccuaugacuacccuaaauauuccgaagaggcuaagcugaacagagaagagaucgaugggguuaaacuugagagcacacggaucuaccaaauucuggccaucuacucuacgguggcguccagccucguccuggugguuucccugggcgcuauuucuuuuuggaugugcagcaauggaucccuccagugccgcaucuguauuuga

SEQ ID NO: 199461 - RNA, 1701 nt, Artificial Sequence; identical to SEQ ID NO: 194741
  derived and/or modified CDS sequence (opt5) from hemagglutinin__InfluenzaA__AEO01296

SEQ ID NO: 199462 - RNA, 1701 nt, Artificial Sequence; identical to SEQ ID NO: 196423
  derived and/or modified CDS sequence (opt5) from hemagglutinin__InfluenzaA__AEO01297

SEQ ID NO: 199463 - RNA, 1701 nt, Artificial Sequence; identical to SEQ ID NO: 196428
  derived and/or modified CDS sequence (opt5) from hemagglutinin__InfluenzaA__AEO01298

SEQ ID NO: 199464 - RNA, 1701 nt, Artificial Sequence; identical to SEQ ID NO: 194741
  derived and/or modified CDS sequence (opt5) from hemagglutinin__InfluenzaA__AEO01299

SEQ ID NO: 199465 - RNA, 1701 nt, Artificial Sequence; identical to SEQ ID NO: 194741
  derived and/or modified CDS sequence (opt5) from hemagglutinin__InfluenzaA__AEO01300

SEQ ID NO: 199466 - RNA, 1701 nt, Artificial Sequence; identical to SEQ ID NO: 194741
  derived and/or modified CDS sequence (opt5) from hemagglutinin__InfluenzaA__AEO01301

SEQ ID NO: 199467 - RNA, 1701 nt, Artificial Sequence; identical to SEQ ID NO: 194741
  derived and/or modified CDS sequence (opt5) from hemagglutinin__InfluenzaA__AEO01302

SEQ ID NO: 199468 - RNA, 1701 nt, Artificial Sequence; identical to SEQ ID NO: 196338
  derived and/or modified CDS sequence (opt5) from hemagglutinin__InfluenzaA__AEO01303

SEQ ID NO: 199469 - RNA, 1701 nt, Artificial Sequence
  derived and/or modified CDS sequence (opt5) from hemagglutinin__InfluenzaA__AEO01304
augaaggccauccuggugguccuccuguacaccuucgcuacagccaacgcggacacgcuuugcauuggcuaucacgcuaauaacagcaccgauacaguugacaccgugcuggagaaaaaugugacagucacccauuccgugaaccuccuggaagauaagcacaaugggaaacuuuguaagcugagaggaguugcuccccuccaucugggcaaaugcaacaucgccggguggauucugggaaauccugagugugaaucucucagcacagccuccucuuggagcuacaucguggagaccuccucuagcgacaacggcacgugcuauccgggggauuuuauugacuacgaagaacugcgggagcagcuuuccagcgucucuuccuucgaacgcuuugagaucuuccccaaggccagcucuuggccuaaucacgauuccaacaagggagugaccgcugccuguccccaugcgggcgccaagagcuuuuauaagaaucugaucuggcucguuaaaaagggcaacucuuacccuaaacuguccaagagcuauauuaaugacaaggggaaaggagugcuuguccuguggggcauccaccaccccuccacaucugcugaucaacagagccucuaccagaacgccgacgcuuacguguucguggggaccuccagauauagcaagaaauuuaagccugaaauugccauccggccgaaaguccgcgaucaggagggaagaaugaauuacuauuggacacugguugagcccggcgacaagauuaccuucgaagcgacggggaaccugguggugccucgguacgccuuugcuauggagcgcaacgccggaucuggcaucauuaucuccgauacacccguccaugacugcaauaccacaugucaaaccccuaaaggcgcuaucaacaccagccuccccuuccagaauauucacccgaucacaauugggaagugcccuaaguaugugaaaucuacgaagcugagacuugccaccggacugcggaacguucccagcauccagucccgcggccucuuuggggccauugcuggauucaucgaaggcggguggacaggaaugguggacggcugguacggcuaucaucaccagaaugagcaagggucuggauacgcggccgaucugaaaagcacccagaacgcuaucgacgaaauuacaaauaaggucaacuccgugaucgagaaaaugaauacccaguuuacggccguuggcaaggaguucaaccaccuugaaaagagaauugagaaucugaacaaaaagguggaugacggguuccucgauaucuggacauacaaugccgaacugcugguccuccuggagaacgaacggacccuugacuaucaugauagcaaugugaaaaaccuguacgagaagguccgcucucagcucaaaaacaaugcuaaggagauuggaaacggcuguuuugaguucuaucacaagugcgacaauaccuguauggaguccgugaaaaacgggacauacgauuauccuaaguacagcgaagaggccaaacugaauagagaagagaucgacggcguuaaacuugagucuacccggaucuaucaaauucuggcgaucuacuccacaguggcuagcucccucguccuggugguuucucugggagccauuagcuuuuggaugugcuccaacggcucucuccagugccgcaucuguauuuga

SEQ ID NO: 199470 - RNA, 1701 nt, Artificial Sequence
  derived and/or modified CDS sequence (opt5) from hemagglutinin__InfluenzaA__AEO01305
augaaggccauccuggugguccuccuguacaccuucgcuacagccagcgcggacacgcuuugcauuggcuaucacgcuaacaauuccaccgauacaguugacaccgugcuggagaagaacgugacagucacccauucugugaaucuccuggaagauaagcacaacgggaaacuuuguaagcugagaggaguugcuccccuccaucugggcaaaugcaauaucgccggguggauucugggaaacccugagugugaaagccucuccacagccucuagcugguccuacaucguggagaccucuagcuccgacaauggcacgugcuauccgggggauuuuauugacuacgaagaacugcgggagcagcuuagcucugucuccagcuucgaacgcuuugagaucuuccccaagaccucuuccuggccuaaccacgauagcaauaagggagugacagccgcuuguccccaugccggcgcgaaaucuuuuuauaagaaccugaucuggcucguuaaaaagggcaauuccuacccuaaacugagcaaguccuauauuaacgacaaggggaaagaagugcuuguccuguggggaauccaccaccccucuaccagcgccgaucaacagucccucuaccagaaugcugacgccuacguguucgugggcacaagcagauauucuaagaaauuuaagccugagauugcuauccggccgaaaguccgcgaucaggaggggagaaugaacuacuauuggacccugguugaacccggagacaagauuacguucgaggccacaggcaaucugguggugccucgguacgcguuugccauggaacgcaacgcuggguccggaaucauuaucagcgauacccccguccaugacugcaacacaaccugucaaaccccuaaaggcgccaucaauacaucucuccccuuccagaacauucacccgaucacgauuggcaagugcccuaaguaugugaaaagcaccaagcugagacuugcuacagggcugcggaauguucccuccauccagucucgcggacucuuuggcgccauugccggguucaucgagggaggcuggaccgggaugguggacggaugguacggcuaucaucaccagaacgaacaaggcagcggguacgcugcggaucugaaauccacacagaaugccaucgacgagauuaccaacaaggucaauagcgugaucgagaaaaugaacacgcaguuuacagcuguuggaaaggaguucaaucaccuugagaagagaauugaaaaccugaauaaaaagguggaugacggcuuccucgauaucuggaccuacaacgccgagcugcugguccuccuggaaaaugagcggacccuugacuaucaugauucuaacgugaaaaaucuguacgagaagguccgcucccagcucaaaaacaacgccaaggaaauugggaauggauguuuugaguucuaucacaagugcgacaacacauguauggaaagcgugaaaaauggcaccuacgauuauccuaaguacucugaggaagcuaaacugaacagagaggagaucgacgggguuaaacuugaauccacacggaucuaucaaauucuggccaucuacagcacgguggcguccucucucguccuggugguuagccugggcgcuauuuccuuuuggaugugcucuaauggaagccuccagugccgcaucuguauuuga

SEQ ID NO: 199471 - RNA, 1701 nt, Artificial Sequence; identical to SEQ ID NO: 194741
  derived and/or modified CDS sequence (opt5) from hemagglutinin__InfluenzaA__AEO01306

SEQ ID NO: 199472 - RNA, 1701 nt, Artificial Sequence; identical to SEQ ID NO: 194741
  derived and/or modified CDS sequence (opt5) from hemagglutinin__InfluenzaA__AEO01307

SEQ ID NO: 199473 - RNA, 1701 nt, Artificial Sequence; identical to SEQ ID NO: 194741
  derived and/or modified CDS sequence (opt5) from hemagglutinin__InfluenzaA__AEO01308

SEQ ID NO: 199474 - RNA, 1701 nt, Artificial Sequence
  derived and/or modified CDS sequence (opt5) from hemagglutinin__InfluenzaA__AEO01309
augaaggccauccuggugguccuccuguacaccuucgcuauugccaacgcggacacacuuugcaucggcuaucacgcuaauaacagcacggauaccguugacacagugcuggagaaaaaugugaccgucacacauuccgugaaccuccuggaagauaagcacaaugggaaacuuuguaagcugagaggaguugcuccccuccaucugggcaaaugcaacauugccggguggauccugggaaauccugagugugaaucucucagcaccgccuccucuuggagcuacauuguggagacauccucuagcgacaacggaaccugcuauccgggggauuuuaucgacuacgaagaacugcgggagcagcuuuccagcgucucuuccuucgaacgcuuugagaucuuccccaagacgagcucuuggccuaaucacgauuccaacaagggagugaccgccgcuuguccccaugccggcgcgaaaucuuuuuauaagaaucugauuuggcucguuaaaaagggcaacagcuacccuaaacuguccaagagcuauaucaaugacaaggggaaagaagugcuuguccuguggggcauucaccaccccuccacaucugccgaucaacagagccucuaccagaacgcugacgccuacguguucgugggcaccuccagauauagcaagaaauuuaagccugagaucgcuauucggccgaaaguccgcgaucaggaggggagaaugaauuacuauuggacacugguugaacccggagacaagaucaccuucgaggccacgggcaaccugguggugccucgguacgcguuugccauggaacgcaacgcugggucuggaauuaucaucuccgauacacccguccaugacugcaauaccacaugucaaaccccuaaaggcgccauuaacaccagccuccccuuccagaauauccacccgauuacaaucggcaagugcccuaaguaugugaaaucuacgaagcugagacuugcuaccgggcugcggaacguucccagcauucagucccgcggacucuuuggcgccaucgccggguucaucgagggaggcuggacagggaugguggacggaugguacggcuaucaucaccagaaugaacaaggcucuggguacgcugcggaucugaaaagcacccagcacgccauugacgagaucacaaacaaggucaauuccgugauugagaaaaugaacacccaguuuacggcuguuggaaaggaguucaaucaucuugagaagagaaucgaaaaccugaauaaaaagguggaugacggcuuccucgauauuuggacauacaacgccgagcugcugguccuccuggaaaaugagcggacccuugacuaucacgauagcaacgugaaaaaucuguacgagaagguccgcucucagcucaaaaacaacgccaaggaaaucgggaauggauguuuugaguucuaucauaagugcgacaacaccuguauggaauccgugaaaaauggcacauacgauuauccuaaguacagcaaagaggcuaagcugaacagagaagagaucaaugggguuaaacuugagucuacccggauuuaucaaauccuggccauuuacuccacaguggcgagcucccucguccuggugguuucucugggcgcuaucagcuuuuggaugugcuccaacggaucucuccagugccgcauuuguaucuga

SEQ ID NO: 199475 - RNA, 1701 nt, Artificial Sequence
  derived and/or modified CDS sequence (opt5) from hemagglutinin__InfluenzaA__AEO01310
augaaggccauccuggugguccuccuguacaccuucgcuacagccaacgcggacacgcuuugcauuggcuaucacgcuaauaacagcaccgauacaguugacaccgugcuggagaaaaaugugacagucacccauuccgugaaccuccuggaagauaagcacaaugggaaacuuuguaagcugagaggaguugcuccccuccaucugggcaaaugcaacaucgccggguggauucugggaaauccugagugugaaucucucagcacagccuccucuuggagcuacaucguggagaccuccucuagcgacaacggcacgugcuauccgggggauuuuauugacuacgaagaacugcgggagcagcuuuccagcgucucuuccuucgaacgcuuugagaucuuccccaagaccagcucuuggccuaaucacgauuccaacaagggagugacagccgcuuguccccaugccggcgcgaaaucuuuuuauaagaaucugaucuggcucguuaaaaagggcaacagcuacccuaaacuguccaagagcuauauuaaugacagagggaaggaagugcuuguccuguggggaauccaccaccccuccaccucugccgaucaacagagccucuaccagaacgcugacgccuacguguucgugggcacaucccgguauagcaaaaaguuuaaaccugagauugcuauccgcccgaaggucagagaucaggaggggcggaugaauuacuauuggacccugguugaacccggagacaaaauuacguucgaggccacaggcaaccugguggugccucgcuacgcguuugccauggaaagaaacgcugggucuggaaucauuaucuccgauacccccguccaugacugcaauacaaccugucaaaccccuaagggcgccaucaacacaagccuccccuuccagaauauucacccgaucacgauuggcaaaugcccuaaguaugugaagucuaccaaacugcggcuugcuacagggcugcgcaacguucccagcauccaguccagaggacucuuuggcgccauugccggguucaucgagggaggcuggaccgggaugguggacggaugguacggcuaucaucaccagaaugaacaaggcucuggguacgcugcggaucuuaagagcacacagaacgccaucgacgagauuaccaauaaagucaacuccgugaucgagaagaugaauacgcaguuuacagcuguuggaaaagaguucaaccaccuggagaagcggauugaaaaucugaacaagaaaguggaugacggcuuccucgauaucuggaccuacaaugccgagcugcugguccuccuggaaaacgagcgcacccuugacuaucaugauagcaaugugaagaaccuguacgagaaagucagaucucagcucaagaacaaugccaaagaaauugggaacggauguuuugaguucuaucacaagugcgacaauacauguauggaauccgugaagaacggcaccuacgauuauccuaaauacagcgaggaagcuaagcugaaucgggaggagaucgacgggguuaaacuugaaucuacacgcaucuaucaaauucuggccaucuacuccacgguggcgagcucccucguccuggugguuucucugggcgcuauuagcuuuuggaugugcuccaacggaucucuccagugcagaaucuguauuuga

SEQ ID NO: 199476 - RNA, 1701 nt, Artificial Sequence; identical to SEQ ID NO: 194741
  derived and/or modified CDS sequence (opt5) from hemagglutinin__InfluenzaA__AEO01311

SEQ ID NO: 199477 - RNA, 1701 nt, Artificial Sequence
  derived and/or modified CDS sequence (opt5) from hemagglutinin__InfluenzaA__AEO01312
augaaggccauccuggugguccuccuguacaccuucgcuacagccaacgcggacacgcuuugcauuggcuaucacgcuaauaacagcaccgauacaguugacaccgugcuggagaagaaugugacagucacccauuccgugaaccuccuggaagauaagcacaaugggaaacuuuguaagcugagaggaguugcuccccuccaucugggcaaaugcaacaucgccggguggauucugggaaauccugagugugaaucucucagcacagccuccucuuggagcuacaucguggagaccuccucuagcgacaacggcacgugcuauccgggggauuuuauugacuacgaagaacugcgggagcagcuuuccagcgucucuuccuucgaacgcuuugagaucuuccccaagaccagcucuuggccuaaucacgauuccaacaagggagugacagccgcuuguccccaugccggcgcgaaaucuuuuuauaagaaucugaucuggcucguuaaaaagggcaacagcuacccuaaacuguccaagagcuauauuaaugacaaggggaaagaagugcuuguccuguggggaauccaccaccccuccaccucugccgaucaacagagccucuaccagaacgcugacgccuacguguucgugggcacauccagauauagcaagaaauuuaagccugagauugcuauccggccgaaaguccgcgaucaggaggggagaaugaauuacuauuggacccugguugaacccggagacaagauuacguucgaggccacaggcaaccugguggugccucgguacgcguuugccauggaacgcaacgcugggucuggaaucauuaucuccgauacccccguccaugacugcaauacaaccugucaaaccccuaaaggcgccaucaacacaagccuccccuuccagaauauucacccgaucacgauuggcaagugcccuaaguaugugaaaucuaccaagcugagacuugcuacagggcugcggaacguucccagcauccagucccgcggacucuuuggcgccauugccggguucaucgagggaggcuggaccgggaucguggacggaugguacggcuaucaucaccagaaugaacaaggcucuggguacgcugcggaucugaaaagcacacagaacgccauugacgagaucaccaauaaggucaacuccgugauugagaaaaugaauacgcaguuuacagcuguuggaaaggaguucaaccaccuugagaagagaaucgaaaaucugaacaaaaagguggaugacggcuuccucgauauuuggaccuacaaugccgagcugcugguccuccuggaaaacgagcggacccuugacuaucaugauagcaaugugaaaaaccuguacgagaagguccgcucucagcucaaaaacaaugccaaggaaaucgggaacggauguuuugaguucuaucacaagugcgacaauacauguauggaauccgugaaaaacggcaccuacgauuauccuaaguacagcgaggaagcuaaacugaauagagaggagaucgacgggguuaaacuugaaucuacacggauuuaucaaauccuggccauuuacuccacgguggcgagcucccucguccuggugguuucucugggcgcuaucagcuuuuggaugugcuccaacggaucucuccagugccgcauuuguaucuga

SEQ ID NO: 199478 - RNA, 1701 nt, Artificial Sequence; identical to SEQ ID NO: 195094
  derived and/or modified CDS sequence (opt5) from hemagglutinin__InfluenzaA__AEO01313

SEQ ID NO: 199479 - RNA, 1701 nt, Artificial Sequence; identical to SEQ ID NO: 195905
  derived and/or modified CDS sequence (opt5) from hemagglutinin__InfluenzaA__AEO01314

SEQ ID NO: 199480 - RNA, 1701 nt, Artificial Sequence
  derived and/or modified CDS sequence (opt5) from hemagglutinin__InfluenzaA__AEO01315
augaaggccauccuggugguccuccuguacaccuucgcuacagccaacgcggacacgcuuugcauuggcuaucacgcuaauaacagcaccgauacaguugacaccgugcuggagaagaaugugacagucacccauuccgugaaccuccuggaagauaagcacaauagaaaacuuuguaagcugcgcgggguugcuccccuccaucugggaaaaugcaacaucgccggcuggauucuggggaauccugagugugaaucucucagcacagccuccucuuggagcuacaucguggagaccuccucuagcgacaacggaacgugcuauccgggcgauuuuauugacuacgaggagcugcgggagcagcuuuccagcgucucuuccuucgaaagauuugagaucuuccccaagaccagcucuuggccuaaucacgauuccaacaagggggugacagccgcuuguccccaugccggagcgaaaucuuuuuauaagaaucugaucuggcucguuaaaaagggcaacagcuacccuaaacuguccaagagcuauauuaaugacaagggcaaagaagugcuuguccugugggggauccaccaccccuccaccucugccgaucaacagagccucuaccagaacgcugacgccuacguguucgugggaacaucccgguauagcaagaaauuuaagccugagauugcuauccgcccgaaagucagagaucaggagggccggaugaauuacuauuggacccugguugaacccggggacaagauuacguucgaggccacaggaaaccugguggugccucgcuacgcguuugccauggaaagaaacgcuggcucugggaucauuaucuccgauacccccguccaugacugcaauacaaccugucaaaccccuaaaggagccaucaacacaagccuccccuuccagaauauucacccgaucacgauuggcaagugcccuaaguaugugaaaucuaccaagcugcggcuugcuacaggccugcgcaacguucccagcauccaguccagagggcucuuuggagccauugccggcuucaucgaagggggauggaccggcaugguggacgggugguacggauaucaucaccagaaugaacaaggcucuggcuacgcugcggaucugaaaagcacacagaacgccaucgacgagauuaccaauaaggucaacuccgugaucgagaaaaugaauacgcaguuuacagcuguugggaaggaguucaaccaccuugaaaagcggauugaaaaucugaacaaaaagguggaugacggauuccucgauaucuggaccuacaaugccgagcugcugguccuccuggaaaacgagcgcacccuugacuaucaugauagcaaugugaaaaaccuguacgagaaggucagaucucagcucaaaaacaaugccaaggaaauuggcaacggguguuuugaguucuaucacaagugcgacaauacauguauggaauccgugaaaaacggaaccuacgauuauccuaaguacagcgaggaagcuaaacugaaucgggaggagaucgacggcguuaaacuugaaucuacacgcaucuaucaaauucuggccaucuacuccacgguggcgagcucccucguccuggugguuucucugggggcuauuagcuuuuggaugugcuccaacggcucucuccagugcagaaucuguauuuga

SEQ ID NO: 199481 - RNA, 1701 nt, Artificial Sequence; identical to SEQ ID NO: 194741
  derived and/or modified CDS sequence (opt5) from hemagglutinin__InfluenzaA__AEO01316

SEQ ID NO: 199482 - RNA, 1701 nt, Artificial Sequence; identical to SEQ ID NO: 194741
  derived and/or modified CDS sequence (opt5) from hemagglutinin__InfluenzaA__AEO01317

SEQ ID NO: 199483 - RNA, 1701 nt, Artificial Sequence; identical to SEQ ID NO: 194741
  derived and/or modified CDS sequence (opt5) from hemagglutinin__InfluenzaA__AEO01318

SEQ ID NO: 199484 - RNA, 1701 nt, Artificial Sequence; identical to SEQ ID NO: 194741
  derived and/or modified CDS sequence (opt5) from hemagglutinin__InfluenzaA__AEO01319

SEQ ID NO: 199485 - RNA, 1701 nt, Artificial Sequence
  derived and/or modified CDS sequence (opt5) from hemagglutinin__InfluenzaA__AEO01321
augaaggccauccuggugguccuccuguacaccuucgcuacagccaacgcggacacgcuuugcauuggcuaucacgcuaauaacagcaccgauacaguugacaccgugcuggagaaaaaugugacagucacccauuccgugaacauccucgaagauaagcacaaugggaaacuguguaaacuuagaggaguugcuccccugcaucucggcaagugcaacauugccggguggauccugggaaauccugagugugaaucucugagcacagccuccucuuggagcuacauuguggagaccuccucuagcgacaacggcacgugcuauccgggggauuuuaucgacuacgaagaacuccgggagcagcuguccagcgucucuuccuucgaacgcuuugagaucuuccccaagaccagcucuuggccuaaucacgauuccaacaagggagugacagccgcuuguccccaugccggcgcgaaaucuuuuuauaagaaucuuauuuggcugguuaaaaagggcaacagcuacccuaaacucuccaagagcuauaucaaugacaaggggaaagaagugcugguccuuuggggcauucaccaccccuccaccucugccgaucaacagagccuguaccagaacgcugacgccuacguguucgugggaacauccagauauagcaagaaauuuaagccugagaucgcuauucggccgaaaguccgcgaucaggaggggagaaugaauuacuauuggacccucguugaacccggagacaagaucacguucgaggccacaggcaaccugguggugccucgguacgcguuugccauggaacgcaacgcugggucuggaauuaucaucuccgauacccccguccaugacugcaauacaaccugucaaaccccuaaaggcgccauuaacacaagccugcccuuccagaauauccacccgauuacgaucggcaagugcccuaaguaugugaaaucuaccaagcucagacuggcuacagggcuucggaacguucccagcauucagucccgcggacuguuuggcgccaucgccggguucaucgagggaggcuggaccgggaugguggacggaugguacggcuaucaucaccagaaugaacaaggcucuggguacgcugcggaucucaaaagcacacagaacgccauugacgagaucaccaauaaggucaacuccgugauugagaaaaugaauacgcaguuuacagcuguuggaaaggaguucaaccaccuggagaagagaaucgaaaaucuuaacaaaaagguggaugacggcuuccuggauauuuggaccuacaaugccgagcuccuggcccugcucgaaaacgagcggacccuggacuaucaugauagcaaugucaaaaaccuuuacgagaaggugcgcucucagcugaaaaacaaugcuaaggaaaucgggaacggauguuuugaguucuaucacaagugcgacaauacauguauggaauccgucaaaaacggcaccuacgauuauccuaaguacagcgaggaagccaaacucaauagagaggagaucgacggggugaagcuggaaucuacacggauuuaucaaauccuugcgauuuacuccacgguugcuagcucccuggugcucgucgugucucugggcgccaucagcuuuuggaugugcuccaacggaucucugcagugccgcauuuguaucuga

SEQ ID NO: 199486 - RNA, 1701 nt, Artificial Sequence; identical to SEQ ID NO: 194741
  derived and/or modified CDS sequence (opt5) from hemagglutinin__InfluenzaA__AEO01322

SEQ ID NO: 199487 - RNA, 1701 nt, Artificial Sequence; identical to SEQ ID NO: 196423
  derived and/or modified CDS sequence (opt5) from hemagglutinin__InfluenzaA__AEO01323

SEQ ID NO: 199488 - RNA, 1701 nt, Artificial Sequence; identical to SEQ ID NO: 196338
  derived and/or modified CDS sequence (opt5) from hemagglutinin__InfluenzaA__AEO01324

SEQ ID NO: 199489 - RNA, 1701 nt, Artificial Sequence; identical to SEQ ID NO: 194741
  derived and/or modified CDS sequence (opt5) from hemagglutinin__InfluenzaA__AEO01325

SEQ ID NO: 199490 - RNA, 1701 nt, Artificial Sequence
  derived and/or modified CDS sequence (opt5) from hemagglutinin__InfluenzaA__AEO01326
augaaggccauccuggugguccuccuguacaccuucgcuacagccaacgcggacacgcuuugcauuggcuaucacgcuaauaacagcaccgauacaguugacaccgugcuggagaagaaugugacagucacccauuccgugaaccuccuggaagauaagcacaaugggaaacuuuguaagcugagaggaguugcuccccuccaucugggcaaaugcaacaucgccggguggauucugggaaauccugagugugaaucucucagcacagccuccucuuggagcuacaucguggagaccuccucuagcgacaacggcacgugcuauccgggggauuuuauugacuacgaagaacugcgggagcagcuuuccagcgucucuuccuucgaacgcuuugagaucuuccccaagaccagcucuuggccuaaucacgauuccaacaagggagugacagccgcuuguccccaugccggcgcgaaaucuuuuuauaagaaucugaucuggcucguuaaaaagggcaacagcuacccuaaacuguccaagagcuauauuaaugacaaggggaaagaagugcuuguccuguggggaauccaccaccccuccaccucugccgaucaacagagccucuaccaggacgcugaugccuacguguucgugggcacauccagauauagcaagaaauuuaagccugagauugcuauccggccgaaaguccgcgaccaggaggggagaaugaacuacuauuggacccugguugaacccggagauaagauuacguucgaggccacaggcaaucugguggugccucgguacgcguuugccauggaacgcaacgcugggucuggaaucauuaucuccgacacccccguccaugacugcaacacaaccugucaaaccccuaaaggcgccaucaauacaagccuccccuuccagaacauucacccgaucacgauuggcaagugcccuaaguaugugaaaucuaccaagcugagacuugcuacagggcugcggaauguucccagcauccagucccgcggacucuuuggcgccauugccggguucaucgagggaggcuggaccgggaugguggauggaugguacggcuaucaucaccagaacgaacaaggcucuggguacgcugcggaccugaaaagcacacagaaugccaucgaugagauuaccaacaaggucaauuccgugaucgagaaaaugaacacgcaguuuacagcuguuggaaaggaguucaaucaccuugagaagagaauugaaaaccugaauaaaaagguggacgauggcuuccucgacaucuggaccuacaacgccgagcugcugguccuccuggaaaaugagcggacccuugauuaucaugacagcaacgugaaaaaucuguacgagaagguccgcucucagcucaaaaacaacgccaaggaaauugggaauggauguuuugaguucuaucacaagugcgauaacacauguauggaauccgugaaaaauggcaccuacgacuauccuaaguacagcgaggaagcuaaacugaacagagaggagaucgaugggguuaaacuugaaucuacacggaucuaucaaauucuggccaucuacuccacgguggcgagcucccucguccuggugguuucucugggcgcuauuagcuuuuggaugugcuccaauggaucucuccagugccgcaucuguauuuga

SEQ ID NO: 199491 - RNA, 1701 nt, Artificial Sequence; identical to SEQ ID NO: 194741
  derived and/or modified CDS sequence (opt5) from hemagglutinin__InfluenzaA__AEO01327

SEQ ID NO: 199492 - RNA, 1701 nt, Artificial Sequence; identical to SEQ ID NO: 199450
  derived and/or modified CDS sequence (opt5) from hemagglutinin__InfluenzaA__AEO01328

SEQ ID NO: 199493 - RNA, 1701 nt, Artificial Sequence; identical to SEQ ID NO: 194741
  derived and/or modified CDS sequence (opt5) from hemagglutinin__InfluenzaA__AEO01330

SEQ ID NO: 199494 - RNA, 1701 nt, Artificial Sequence
  derived and/or modified CDS sequence (opt5) from hemagglutinin__InfluenzaA__AEO01331
augaaggccauccuggugguccuccuguacaccuucgcuacagccaacgcggacacgcuuugcauuggcuaucacgcuaauaacagcaccgauacaguugacacccugcucgagaaaaaugugacagugacccauuccgucaaccugcuugaagauaagcacaaugggaaacuguguaagcucagaggaguggcuccccugcaucugggcaaaugcaacaucgccggguggauucucggaaauccugagugugaaucucugagcacagccuccucuuggagcuacaucguugagaccuccucuagcgacaacggcacgugcuauccgggggauuuuauugacuacgaagaacuucgggagcagcuguccagcgugucuuccuucgaacgcuuugagaucuuccccaagaccagcucuuggccuaaucacgauuccaacaagggagucacagccgcuuguccccaugccggcgcgaaaucuuuuuauaagaaucucaucuggcuggugaaaaagggcaacagcuacccuaaacuuuccaagagcuauauuaaugacaaggggaaagaaguucuggugcucuggggaauccaccaccccuccaccucugccgaucaacagagccuguaccagaacgcugacgccuacgucuucgugggcacauccagauauagcaagaaauuuaagccugagauugcuauccggccgaaagugcgcgaucaggaggggagaaugaauuacuauuggacccuggucgaacccggagacaagauuacguucgaggccacaggcaaccucguugugccucgguacgcguuugccauggaacgcaacgcugggucuggaaucauuaucuccgauacccccgugcaugacugcaauacaaccugucaaaccccuaaaggcgccaucaacacaagccugcccuuccagaauauucacccgaucacgauuggcaagugcccuaaguaugucaaaucuaccaaacuuagacuggcuacagggcuccggaacgugcccagcauccagucccgcggacuguuuggcgccauugccggguucaucgagggaggcuggaccgggaugguugacggaugguacggcuaucaucaccagaaugaacaaggcucuggguacgcugcggaucuuaagagcacacagaacgccaucgacgagauuaccaauaaggugaacuccgucaucgagaaaaugaauacgcaguuuacagcugugggaaaggaguucaaccaccuggagaagagaauugaaaaucucaacaaaaagguugaugacggcuuccuggauaucuggaccuacaaugccgagcugcucgugcugcuugaaaacgagcggacccuggacuaucaugauagcaaugucaaaaaccucuacgagaaggugcgcucucagcugaaaaacaaugccaaggaaauugggaacggauguuuugaguucuaucacaagugcgacaauacauguauggaauccgucaaaaacggcaccuacgauuauccuaaguacagcgaggaagcuaaacuuaauagagaggagaucgacggggugaagcuggaaucuacacggaucuaucaaauucucgccaucuacuccacgguugcgagcucccuggugcuggucgugucucucggcgcuauuagcuuuuggaugugcuccaacggaucucugcagugccgcaucuguauuuga

SEQ ID NO: 199495 - RNA, 1701 nt, Artificial Sequence
  derived and/or modified CDS sequence (opt5) from hemagglutinin__InfluenzaA__AEO01332
augaaggccauccuggugguccuccuguacaccuucgcuacagccaacgcggacacgcuuugcauuggcuaucacgcuaauaacagcaccgauacaguugacaccgugcuggagaaaaaugugacagucacccauuccgugaaccuccuggaagauaagcacaaugggaaacuuuguaagcugagaggaguugcuccccuccaucugggcaaaugcaacaucgccggguggauucugggaaauccugagugugaaucucucagcacagccuccucuuggagcuacaucguggagaccuccucuagcgacaacggcacgugcuauccgggggauuuuauugacuacgaagaacugcgggagcagcuuuccagcgucucuuccuucgaacgcuuugagaucuuccccaagaccagcucuuggccuaaucacgauuccaacaagggagugacagccgcuuguccccaugccggcgcgaaaucuuuuuauaagaaucugaucuggcucguuaaaaagggcaacagcuacccuaaacuguccaagagcuauauuaaugacaaggggaaagaagugcuuguccuguggggaauccaccaccccuccaccucugccgaucaacagagccucuaccagaacgcugacgccuacguguucgugggccuguccagauauagcaagaaauuuaagccugagauugcuauccggccgaaaguccgcgagcaggaagggagaaugaauuacuauuggacacugguugagcccggagauaagauuaccuucgaagccacgggcaaccucguggugccucgguacgcguuugccauggagcgcaacgcugggucuggaaucgucauuuccgacacacccgugcaugauugcaauaccacaugucaaaccccuaaaggcgccaucaacaccagccugcccuuccagaauauccacccgauuacaaucggcaagugcccuaaguauguuaaaucuacgaaacuuagacuggcuaccgggcuccggaacgugcccagcauucagucccgcggacuguuuggcgccaucgccggguucauugaaggaggcuggacagggauggucgacggaugguacggcuaucaucaccagaaugagcaaggcucuggguacgcugcggaccuuaaaagcacccagaacgccaucgaugagaucacaaauaaggugaacuccguuauugaaaagaugaauacccaguuuacggcugugggaaaggaguucaaccaccuggaaaagagaauggagaaucucaacaaaaaggucgacgauggcuuccuggacaucuggacauacaaugccgaacugcucgugcugcuugagaacgagcggacccuggauuaucaugacagcaaugucaaaaaccucuacgaaaaggugcgcucucagcugaaaaccaacgccaaggagauugggaauggauguuuugaguucuaucacaagugcgauaacacauguauggaguccguuaaaaauggcaccuacgacuauccuaaguacagcgaagaggcuaaacuuaacagagaggaaaucgauggggugaagcuggagucuacacggauuuaucaaauccucgccaucuacuccacggucgcgagcucccuggugcugguugugucucucggcgcuauuagcuuuuggaugugcuccaauggaucucugcagugccgcaucuguauuuga

SEQ ID NO: 199496 - RNA, 1701 nt, Artificial Sequence; identical to SEQ ID NO: 196909
  derived and/or modified CDS sequence (opt5) from hemagglutinin__InfluenzaA__AEO01333

SEQ ID NO: 199497 - RNA, 1701 nt, Artificial Sequence
  derived and/or modified CDS sequence (opt5) from hemagglutinin__InfluenzaA__AEO01334
augaaggccauccuggugguccuccuguacaccuucgcuacagccaacgcggacacgcuuugcauuggcuaucacgcuaauaacagcaccgauacaguugacaccauccuggagaagaaugugacagugacccauuccgucaaccuccuggaagauaagcacaaugggaaacuuuguaagcugagaggaguggcuccccuccaucugggcaaaugcaacauugccggguggauccugggaaauccugagugugaaucucucagcacagccuccucuuggagcuacauuguugagaccuccucuagcgacaacggcacgugcuauccgggggauuuuaucgacuacgaagaacugcgggagcagcuuuccagcgugucuuccuucgaacgcuuugagaucuuccccaagaccagcucuuggccuaaucacgauuccaacaagggagucacagccgcuuguccccaugccggcgcgaaaucuuuuuauaagaaucugauuuggcucgugaaaaagggcaacagcuacccuaaacuguccaagagcuauaucaaugacaaggggaaagaaguucuugugcuguggggcauucaccaccccuccaccucugccgaucaacagagccucuaccagaacgcugacgccuacgucuucgugggaacauccagauauagcaagaaauuuaagccugagaucgcuauucggccgaaagugcgcgaucaggaggggagaaugaauuacuauuggacccuggucgaacccggagacaagaucacguucgaggccacaggcaaccugguugugccucgguacgcguuugccauggaacgcaacgcugggucuggaauuaucaucuccgauacccccgugcaugacugcaauacaaccugucaaaccccuaaaggcgccauuaacacaagccuccccuuccagaauauccacccgauuacgaucggcaagugcccuaaguaugucaaaucuaccaagcugagacuugcuacagggcugcggaacgugcccagcauucagucccgcggacucuuuggcgccaucgccggguucaucgagggaggcuggaccgggaugguugacggaugguacggcuaucaucaccagaaugaacaaggcucuggguacgcugcggaucugaaaagcacacagaacgccauugacgagaucaccaauaaggugaacuccgucauugagaaaaugaauacgcaguuuacagcugugggaaaggaguucaaccaccuugagaagagaaucgaaaaucugaacaaaaagguugaugacggcuuccucgauauuuggaccuacaaugccgagcugcuggugcuccuggaaaacgagcggacccuugacuaucaugauagcaaugucaaaaaccuguacgagaaggugcgcucucagcucaaaaacaaugccaaggaaaucgggaacggauguuuugaguucuaucacaagugcgacaauacauguauggaauccgucaaaaacggcaccuacgauuauccuaaguacagcgaggaagcuaaacugaauagagaggagaucgacggggugaaacuugaaucuacacggauuuaucaaauccuggccauuuacuccacgguugcgagcucccucgugcuggucgugucucugggcgcuaucagcuuuuggaugugcuccaacggaucucuccagugccgcauuuguaucuga

SEQ ID NO: 199498 - RNA, 1701 nt, Artificial Sequence; identical to SEQ ID NO: 196338
  derived and/or modified CDS sequence (opt5) from hemagglutinin__InfluenzaA__AEO01335

SEQ ID NO: 199499 - RNA, 1701 nt, Artificial Sequence
  derived and/or modified CDS sequence (opt5) from hemagglutinin__InfluenzaA__AEO01336
augaaggccauccuggugguccuccuguacaccuucgcuacagccaacgcggacacgcuuugcauuggcuaucacgcuaauaacagcaccgauacaguugacaccgugcuggagaagaaugugacagucacccauuccgugaaccuccuggaagauaagcacaaugggaaacuuuguaagcugagaggaguugcuccccuccaucugggcaaaugcaacaucgccggguggauucugggaaauccugagugugaaucucucagcacagccuccucuuggagcuacaucguggagaccuccucuagcgacaacggcacgugcuauccgggggauuuuauugacuacgaagaacugcgggagcagcuuuccagcgucucuuccuucgaacgcuuugagaucuuccccaagaccagcucuuggccuaaucacgauuccaacaagggagugacagccgcuuguccccaugccggcgcgaaaucuuuuuauaagaaucugaucuggcucguuaaaaagggcaacagcuacccuaaacugaauaaguccuauauuaacgacaaggggaaagaagugcuuguccuguggggaauccaccaccccagcaccuccgccgaucaacagucucucuaccagaaugcugacgccuacguguucgugggcacaagcagauauuccaagaaauuuaagccugagauugcuauccggccgaaaguccgcgaucaggaggggagaaugaacuacuauuggacccugguugaacccggagacaagauuacguucgaggccacaggcaaccugguggugccucgguacgcguuugccauggaacgcaaugcugggagcggaaucauuaucucugauacccccguccaugacugcaacacaaccugucaaaccccuaaaggcgccaucaauacaucccuccccuuccagaacauucacccgaucacgauuggcgagugcccuaaguauguuaagagcaccaaacugagacuugcuacagggcugcggaaugugcccucuauccagagccgcggacucuuuggcgccauugccggguucaucgaaggaggcuggaccgggaugguggacggaugguacggcuaucaucaccagaacgagcaaggcuccggguacgcugcggaucugaagucuacacagaaugccaucgacaaaauuaccaacaaggucaauagcgugaucgagaaaaugaacacgcaguuuacagcuguuggaaaggaguucaaucaccuugagaagagaauugaaaaccugaauaaaaagguggaugacggcuuccucgauaucuggaccuacaacgccgagcugcugguccuccuggaaaaugagcggacccuugacuaucaugauuccaacgugaaaaaccuguacgagaagguccgcagccagcucaaaaauaacgccaaggaaauugggaauggauguuuugaguucuaucacaagugcgacaacacauguauggaaucugugaaaaauggcaccuacgauuauccuaaguacuccgaggaagcuaaacugaacagagaggagaucgacgggguuaaacuugaaagcacacggaucuaucaaauucuggccaucuacucuacgguggcguccagccucguccuggugguuucccugggcgcuauuucuuuuuggaugugcagcaauggaucccuccagugccgcaucuguauuuga

SEQ ID NO: 199500 - RNA, 1701 nt, Artificial Sequence
  derived and/or modified CDS sequence (opt5) from hemagglutinin__InfluenzaA__AEO01337
augaaggccauccuggugguccuccuguacaccuucgcuacagccaacgcggacacgcuuugcauuggcuaucacgcuaauaacagcaccgauacaguugacaccgugcuggagaagaaugugacagucacccauuccgugaaccuccuggaagauaagcacaaugggaaacuuuguaagcugagaggaguugcuccccuccaucugggcaaaugcaacaucgccggguggauucugggaaauccugagugugaaucucucagcacagccuccucuuggagcuacaucguggagaccuccucuagcgacaacggcacgugcuauccgggggauuuuauugacuacgaagaacugcgggagcagcuuuccagcgucucuuccuucgaacgcuuugagaucuuccccaagaccagcucuuggccuaaucacgauuccaacaagggagugacagccgcuuguccccaugccggcgcgaaaucuuuuuauaagaaucugaucuggcucguuaaaaagggcaacagcuacccuaaacuguccaagagcuauauuaaugacaaggggaaagaagugcuuguccuguggggaauccaccaccccuccaccucugccgaucaacagagccucuaccagaacgcugacgccuacguguucgugggcacauccagauauagcaagaaauuuaagccugagauugcuauccggccgaaaguccgcgaucaggaggggagaaugaauuaccauuggacccugguugaacccggagacaagauuacguucgaggccacaggcaaccugguggugccucgguaugcguuugccauggaacgcaacgcugggucuggaaucauuaucuccgauacccccguccacgacugcaauacaaccugucaaaccccuaaaggcgccaucaacacaagccuccccuuccagaauauucauccgaucacgauuggcaagugcccuaaguacgugaaaucuaccaagcugagacuugcuacagggcugcggaacguucccagcauccagucccgcggacucuuuggcgccauugccggguucaucgagggaggcuggaccgggaugguggacggaugguauggcuaccaccaccagaaugaacaaggcucuggguaugcugcggaucugaaaagcacacagcaugccaucgacgagauuaccaacaaggucaauuccgugaucgagaaaaugaacacgcaguuuacagcuguuggaaaggaguucaaucaccuugagaagagaauugaaaaccugaauaaaaagguggaugacggcuuccucgauaucuggaccuacaacgccgagcugcugguccuccuggaaaaugagcggacccuugacuaccaugauagcaacgugaaaaaucuguaugagaagguccgcucucagcucaaaaacaacgccaaggaaauugggaauggauguuuugaguucuaccacaagugcgacaacacauguauggaauccgugaaaaauggcaccuaugauuacccuaaguauagcgaggaagcuaaacugaacagagaggagaucgacgggguuaaacuugaaucuacacggaucuaccaaauucuggccaucuauuccacgguggcgagcucccucguccuggugguuucucugggcgcuauuagcuuuuggaugugcuccaauggaucucuccagugccgcaucuguauuuga

SEQ ID NO: 199501 - RNA, 1701 nt, Artificial Sequence; identical to SEQ ID NO: 194741
  derived and/or modified CDS sequence (opt5) from hemagglutinin__InfluenzaA__AEO01338

SEQ ID NO: 199502 - RNA, 1701 nt, Artificial Sequence; identical to SEQ ID NO: 198613
  derived and/or modified CDS sequence (opt5) from hemagglutinin__InfluenzaA__AEO01339

SEQ ID NO: 199503 - RNA, 1701 nt, Artificial Sequence; identical to SEQ ID NO: 199459
  derived and/or modified CDS sequence (opt5) from hemagglutinin__InfluenzaA__AEO01340

SEQ ID NO: 199504 - RNA, 1701 nt, Artificial Sequence; identical to SEQ ID NO: 199459
  derived and/or modified CDS sequence (opt5) from hemagglutinin__InfluenzaA__AEO01341

SEQ ID NO: 199505 - RNA, 1701 nt, Artificial Sequence; identical to SEQ ID NO: 194741
  derived and/or modified CDS sequence (opt5) from hemagglutinin__InfluenzaA__AEO01342

SEQ ID NO: 199506 - RNA, 1701 nt, Artificial Sequence
  derived and/or modified CDS sequence (opt5) from hemagglutinin__InfluenzaA__AEO01343
augaaggccauccuggugguccuccuguacaccuucgcuacagccaacgcggacacgcuuugcauuggcuaucacgcuaauaacagcaccgauacaguugacaccgugcuggagaaaaaugugacagucacccauuccgugaaccuccuggaagauaagcacaaugggaaacuuuguaagcugagaggaguugcuccccuccaucugggcaaaugcaacaucgccggguggauucugggaaauccugagugugaaucucucagcacagccuccucuuggagcuacaucguggagaccuccaacucugacaauggcacgugcuauccgggggauuuuauugacuacgaagaacugcgggagcagcuuagcuccgucagcucuuucgaacgcuuugagaucuuccccaagaccuccagcuggccuaaccacgauucuaauaagggagugacagccgcuuguccccaugccggcgcgaaauccuuuuauaagaaccugaucuggcucguuaaaaagggcaauagcuacccuaaacugucuaaguccuauauuaacgacaaggggaaagaagugcuuguccuguggggaauccaccaccccagcaccuccgccgaucaacagucucucuaccagaaugcugacgccuacguguucgugggcacaagcagauauuccaagaaauuuaagccugagauugcuauccggccgaaaguccgcgaucaggaggggagaaugaacuacuauuggacccugguugaacccggagacaagauuacguucgaggccacaggcaaccugguggugccucgguacgcguuugccauggaacgcaaugcugggagcggaaucauuaucucugauacccccguccaugacugcaacacaaccugucaaaccccuaaaggcgccaucaauacaucccuccccuuccagaacauucacccgaucacgauuggcaagugcccuaaguaugugaaaagcaccaagcugagacuugcuacagggcugcggaauguucccucuauccagagccgcggacucuuuggcgccauugccggguucaucgagggaggcuggaccgggaugguggacggaugguacggcuaucaucaccagaacgaacaaggcuccggguacgcugcggaucugaaaucuacacagaaugccaucgacaagauuaccaacaaagucaauagcgugaucgagaagaugaacacgcaguuuacagcuguuggaaaggaguucaaucaccuugagaaaagaauugagaaccugaauaagaaaguggaugacggcuuccucgauaucuggaccuacaacgccgaacugcugguccuccuggagaaugaacggacccuugacuaucaugauuccaacgugaagaaccuguacgagaaaguccgcagccagcucaagaauaacgccaaggagauugggaauggauguuuugaguucuaucacaaaugcgacaacacauguauggaaucugugaagaauggcaccuacgauuauccuaaauacuccgaagaggcuaagcugaacagagaagagaucgacgggguuaaacuugagagcacacggaucuaucaaauucuggccaucuacucuacgguggcguccagccucguccuggugguuucccugggcgcuauuucuuuuuggaugugcagcaauggaucccuccagugccgcaucuguauuuga

SEQ ID NO: 199507 - RNA, 1701 nt, Artificial Sequence
  derived and/or modified CDS sequence (opt5) from hemagglutinin__InfluenzaA__AEO01344
augaaggccauccuggugguccuccuguacaccuucgcuacagccaacgcggacacgcuuugcauuggcuaucacgcuaauaacagcaccgauacaguugacaccgugcuggagaaaaaugugacagucacccauuccgugaacauccucgaagauaagcacaaugggaaacuguguaaacuuagaggaguugcuccccugcaucucggcaagugcaacauugccggguggauccugggaaauccugagugugaaucucugagcacagccuccucuuggagcuacauuguggagaccuccucuagcgacaacggcacgugcuauccgggggauuuuaucgacuacgaagaacuccgggagcagcuguccagcgucucuuccuucgaacgcuuugagaucuuccccaagaccagcucuuggccuaaucacgauuccaacaagggagugacagccgcuuguccccaugccggcgcgaaaucuuuuuauaagaaucuuauuuggcugguuaaaaagggcaacagcuacccuaaacucuccaagagcuauaucaaugacaaggggaaagaagugcugguccuuuggggcauucaccaccccuccaccucugccgaucaacagagccuguaccagaacgcugacgccuacguguucgugggaacauccaaguauagcaaaaaguuuaaaccugagaucgcuauuagaccgaagguccgggaucaggaggggcgcaugaauuacuauuggacccucguugaacccggagacaaaaucacguucgaggccacaggcaaccugguggugccuagauacgcguuugccauggaacggaacgcugggucuggaauuaucaucuccgauacccccguccaugacugcaauacaaccugucaaaccccuaagggcgccauuaacacaagccugcccuuccagaauauccacccgauuacgaucggcaagugcccuaaauaugugaagucuaccaaacuccgccuggcuacagggcuuagaaacguucccagcauucagucccggggacuguuuggcgccaucgccggguucaucgagggaggcuggaccgggaugguggacggaugguacggcuaucaucaccagaaugaacaaggcucuggguacgcugcggaucucaagagcacacagaacgccauugacgagaucaccaauaaagucaacuccgugauugagaagaugaauacgcaguuuacagcuguuggaaaggaguucaaccaccuggagaaacgcaucgaaaaucuuaacaagaaaguggaugacggcuuccuggauauuuggaccuacaaugccgagcuccugguccugcucgaaaacgagagaacccuggacuaucaugauagcaaugugaagaaccuuuacgagaaaguccggucucagcugaagaacaaugccaaggaaaucgggaacggauguuuugaguucuaucacaaaugcgacaauacauguauggaauccgugaagaacggcaccuacgauuauccuaaauacagcgaggaagcuaagcucaaucgcgaggagaucgacgggguuaaacuggaaucuacaagaauuuaucaaauccuugccauuuacuccacgguggcgagcucccugguccucgugguuucucugggcgcuaucagcuuuuggaugugcuccaacggaucucugcagugccggauuuguaucuga

SEQ ID NO: 199508 - RNA, 1701 nt, Artificial Sequence; identical to SEQ ID NO: 198613
  derived and/or modified CDS sequence (opt5) from hemagglutinin__InfluenzaA__AEO01345

SEQ ID NO: 199509 - RNA, 1701 nt, Artificial Sequence; identical to SEQ ID NO: 194741
  derived and/or modified CDS sequence (opt5) from hemagglutinin__InfluenzaA__AEO01346

SEQ ID NO: 199510 - RNA, 1701 nt, Artificial Sequence
  derived and/or modified CDS sequence (opt5) from hemagglutinin__InfluenzaA__AEO01347
augaaggccauccuggugguccuccuguacaccuucgcuacagccaacgcggacacgcuuugcauuggcuaucacgcuaauaacagcaccgauacaguugacaccgugcuggagaaaaaugugacagucacccauuccgugaaccuccuggaagauaagcacaaugggaaacuuuguaagcugagaggaguugcuccccuccaucugggcaaaugcaacaucgccggguggauucugggaaauccugagugugaaucucucagcacagccuccucuuggagcuacaucguggagaccuccucuagcgacaacggcacgugcuauccgggggauuuuauugacuacgaagaacugcgggagcagcuuuccagcgucucuuccuucgaacgcuuugagaucuuccccaagaccagcucuuggccuaaucacgauuccaacaagggagugacagccgcuuguccccaugccggcgcgaaaucuuuuuauaagaaucugaucuggcucguuaaaaagggcaacagcuacccuaaacuguccaagagcuauauuaaugacaaggggaaagaagugcuuguccuguggggaauccaccaccccuccaccucugccgaucaacagagccucuaccagaacgcugacgccuacguguucgugggcacauccagauauagcaagaaauuuaagccugagauugcuauccggccgaaaguccgcgaucaggaggggagaaugaauuacuauuggacccugguugaacccggagacaagauuacguucgaggccacaggcaaccugguggugccucgguacgcguuugccauggaacgcaacgcugggucuggaaucauuaucuccgauacccccguccaugacugcaauacaaccugucaaaccccuaaaggcgccaucaacacaagccuccccuuccagaauauucacccgaucacgauuggcgagugcccuaaguaugugaagucuaccaaacugagacuugcuacagggcugcggaacguucccagcauccagucccgcggacucuuuggcgccauugccggguucaucgaaggaggcuggaccgggaugguggacggaugguacggcuaucaucaccagaaugagcaaggcucuggguacgcugcggaucuuaagagcacacagaacgccaucgacaaaauuaccaauaaggucaacuccgugaucgagaaaaugaauacgcaguuuacagcuguuggaaaggaguucaaccaccuugagaagagaauugaaaaucugaacaaaaagguggaugacggcuuccucgauaucuggaccuacaaugccgagcugcugguccuccuggaaaacgagcggacccuugacuaucaugauagcaaugugaaaaaccuguacgagaagguccgcucucagcucaaaaacaaugccaaggaaauugggaacggauguuuugaguucuaucacaagugcgacaauacauguauggaauccgugaaaaacggcaccuacgauuauccuaaguacagcgaggaagcuaaacugaauagagaggagaucgacgggguuaagcuggaaucuacacggaucuaucaaauucuggccaucuacuccacgguggcgagcucccucguccuggugguuucucugggcgcuauuagcuuuuggaugugcuccaacggaucucuccagugccgcaucuguauuuga

SEQ ID NO: 199511 - RNA, 1701 nt, Artificial Sequence
  derived and/or modified CDS sequence (opt5) from hemagglutinin__InfluenzaA__AEO01348
augaaggccauccuggugguccuccuguacaccuucgcuauugccaacgcggacacacuuugcaucggcuaucacgcuaauaacagcacggauaccguugacacagugcuggagaaaaaugugaccgucacacauuccgugaaccuccuggaagauaagcacaaugggaaacuuuguaagcugagaggaguugcuccccuccaucugggcaaaugcaacauugccggguggauccugggaaauccugagugugaaucucucagcaccgccuccucuuggagcuacauuguggagacauccucuagcgacaacggaaccugcuauccgggggauuuuaucgacuacgaagaacugcgggagcagcuuuccagcgucucuuccuucgaacgcuuugagaucuuccccaagacgagcucuuggccuaaucacgauuccaacaagggagugaccgccgcuuguccccaugccggcgcgaaaucuuuuuauaagaaucugauuuggcucguuaaaaagggcaacagcuacccuaaacuguccaagagcuauaucaaugacaaggggaaagaagugcuuguccuguggggcauucaccaccccuccacaucugccgaucaacagagccucuaccagaacgcugacgccuacguguucgugggcaccuccagauauagcaagaaauuuaagccugagaucgcuauucggccgaaaguccgcgagcaggaagggagaaugaauuacuauuggacacugguugagcccggagauaagaucaccuucgaagccacgggcaaccugguggugccucgguacgcguuugccauggagcgcaacgcugggucuggaauuaucaucuccgacacacccguccaugauugcaauaccacaugucaaaccccuaaaggcgccauuaacaccagccuccccuuccagaauauccacccgauuacaaucggcaagugcccuaaguaugugaaaucuacgaagcugagacuugcuaccgggcugcggaacguucccagcauucagucccgcggacucuuuggcgccaucgccggguucaucgaaggaggcuggacagggaugguggacggaugguacggcuaucaucaccagaaugagcaaggcucuggguacgcugcggaccugaaaagcacccagaacgccauugaugagaucacaaauaaggucaacuccgugauugaaaagaugaauacccaguuuacggcuguuggaaaggaguucaaccaccuugaaaagagaaucgagaaucugaacaaaaagguggacgauggcuuccucgacauuuggacauacaaugccgaacugcugguccuccuggagaacgagcggacccuugauuaucaugacagcaaugugaaaaaccuguacgaaaagguccgcucucagcucaaaaacaaugccaaggagaucgggaacggauguuuugaguucuaucacaagugcgauaauaccuguauggaguccgugaaaaacggcacauacgacuauccuaaguacagcgaagaggcuaaacugaauagagaggaaaucgaugggguuaaacuugagucuacccggauuuaucaaauccuggccauuuacuccacaguggcgagcucccucguccuggugguuucucugggcgcuaucagcuuuuggaugugcuccaacggaucucuccagugccgcauuuguaucuga

SEQ ID NO: 199512 - RNA, 1701 nt, Artificial Sequence
  derived and/or modified CDS sequence (opt5) from hemagglutinin__InfluenzaA__AEO01349
augaaggccauccuggugguccuccuguacaccuucgcuacagccaacgcggacacgcuuugcauuggcuaucacgcuaauaacagcaccgauacaguugacaccgugcuggagaaaaaugugacagucacccauuccgugaaccuccuggaagauaagcacaaugggaaacuuuguaagcugagaggaguugcuccccuccaucugggcaaaugcaacaucgccggguggauucugggaaauccugagugugaaucucucagcacagccuccucuuggagcuacaucguggagaccuccucuagcgaaaacggcacgugcuauccgggggacuuuauugauuacgaggagcugcgggaacagcuuuccagcgucucuuccuucgagcgcuuugaaaucuuccccaagaccagcucuuggccuaaucacgacuccaacaagggagugacagccgcuuguccccaugccggcgcgaaaucuuuuuauaagaaucugaucuggcucguuaaaaagggcaacagcuacccuaaacuguccaagagcuauauuaaugauaaggggaaagaggugcuuguccuguggggaauccaccaccccuccaccucugccgaccaacagagccucuaccagaacgcugaugccuacguguucgugggcacauccagauauagcaagaaauuuaagccugagauugcuauccggccgaaaguccgcgaccaggaagggagaaugaauuacuauuggacccugguugagcccggagauaagauuacguucgaagccacaggcaaccugguggugccucgguacgcguuugccauggagcgcaacgcugggucuggaaucauuaucuccgacacccccguccaugauugcaauacaaccugucaaaccccuaaaggcgccaucaacacaagccuccccuuccagaauauucacccgaucacgauuggcaagugcccuaaguaugugaaaucuaccaagcugagacuugcuacagggcugcggaacguucccagcauccagucccgcggacucuuuggcgccauugccggguucaucgaaggaggcuggaccgggaugguggacggaugguacggcuaucaucaccagaaugagcaaggcucuggguacgcugcggaccugaaaagcacacagaacgccaucgaugagauuaccaauaaggucaacuccgugaucgaaaagaugaauacgcaguuuacagcuguuggaaaagaguucaaccaccuugaaaagagaauugagaaucugaacaaaaagguggacgauggcuuccucgacaucuggaccuacaaugccgaacugcugguccuccuggagaacgagcggacccuugauuaucaugacagcaaugugaaaaaccuguacgaaaagguccgcucucagcucaaaaacaaugccaaggagauugggaacggauguuuugaguucuaucacaagugcgauaauacauguauggaauccgugaaaaacggcaccuacgacuauccuaaguacagcaaagaagcuaagcugaauagagaggagaucgaugggguuaaacuugaaucuacacggaucuaucaaauucuggccaucuacuccacgguggcgagcucccucguccuggugguuucucugggcgcuauuagcuuuuggaugugcuccaacggaucucuccagugccgcaucuguauuuga

SEQ ID NO: 199513 - RNA, 1701 nt, Artificial Sequence
  derived and/or modified CDS sequence (opt5) from hemagglutinin__InfluenzaA__AEO01350
augaaggccauccuggugguccuccuguacaccuucgcuacaacgaacgccgacacccuuugcauuggcuaucacgcgaauaacagcacagauaccguugacacagugcuggagaaaaaugugaccgucacacauuccgugaaccuccuggaagauaagcacaaugggaaacuuuguaagcugagaggaguugcuccccuccaucugggcaaaugcaacaucgccggguggauucugggaaauccugagugugaaucucucagcaccgccuccucuuggagcuacaucguggagacguccucuagcgacaacgggaccugcuauccgggcgauuuuauugacuacgaagaacugcgggagcagcuuuccagcgucucuuccuucgaacgcuuugagaucuuccccaagacaagcucuuggccuaaucacgauuccaacaagggagugaccgcugccuguccccaugcuggcgccaagagcuuuuauaagaaucugaucuggcucguuaaaaagggcaacucuuacccuaaacuguccaagagcuauauuaaugacaaggggaaagaagugcuuguccuguggggaauccaccaccccuccacaucugcggaucaacagagccucuaccagaacgccgacgcuuacguguucgugggcaccuccagauauagcaagaaauuuaagccugagauugccauccggccgaaaguccgcgaucaggaggggagaaugaauuacuauuggacgcugguugaacccggagacaagauuacauucgaggcuaccggcaaccugguggugccucgguacgccuuugcgauggaacgcaacgccgggucuggaaucauuaucuccgauacacccguccaugacugcaauaccaccugucaaacaccuaaaggcgcuaucaacacgagccuccccuuccagaauauucacccgaucaccauuggcaagugcccuaaguaugugaaaucuacaaagcugagacuugccaccgggcugcggaacguucccagcauccagucccgcggacucuuuggcgcuauugccggguucaucgagggaggcuggacagggaugguggacggaugguacggcuaucaucaccagaaugaacaaggcucuggguacgccgcugaucugaaaagcacccagcacgcgaucgacgagauuacgaacaaggucaauuccgugaucgagaaaaugaacacacaguuuaccgccguuggaaaggaguucaaucaucuugagaagagaauugaaaaccugaauaaaaagguggaugacggcuuccucgauaucuggaccuacaacgcugagcugcugguccuccuggaaaaugagcggacacuugacuaucacgauagcaacgugaaaaaucuguacgagaagguccgcucucagcucaaaaacaacgccaaggaaauugggaauggauguuuugaguucuaucauaagugcgacaacaccuguauggaauccgugaaaaauggcacauacgauuauccuaaguacagcgaggaagccaaacugaacagagaggagaucgacgggguuaaacuugaaucuacgcggaucuaucaaauucuggcuaucuacuccaccguggccagcucccucguccuggugguuucucugggcgcgauuagcuuuuggaugugcuccaauggaucucuccagugccgcaucuguauuuga

SEQ ID NO: 199514 - RNA, 1701 nt, Artificial Sequence; identical to SEQ ID NO: 194741
  derived and/or modified CDS sequence (opt5) from hemagglutinin__InfluenzaA__AEO01351

SEQ ID NO: 199515 - RNA, 1701 nt, Artificial Sequence; identical to SEQ ID NO: 195905
  derived and/or modified CDS sequence (opt5) from hemagglutinin__InfluenzaA__AEO01352

SEQ ID NO: 199516 - RNA, 1701 nt, Artificial Sequence
  derived and/or modified CDS sequence (opt5) from hemagglutinin__InfluenzaA__AEO01353
augaaggccauccuggugguccuccuguacaccuucgcuacagccaacgcggacacgcuuugcauuggcuaucacgcuaauaacagcaccgauacaguugacaccgugcuggagaagaaugugacagucacccauuccgugaaccuccuggaagauaagcacaaugggaaacuuuguaagcugagaggaguugcuccccuccaucugggcaaaugcaacaucgccggguggauucugggaaauccugagugugaaucucucagcacagccuccucuuggagcuacaucguggagaccuccucuagcgacaacggcacgugcuauccgggggauuuuauugacuacgaagaacugcgggagcagcuuuccagcgucucuuccuucgaacgcuuugagaucuuccccaagaccagcucuuggccuaaucacgauuccaacaagggagugacagccgcuuguccccaugccggcgcgaaaucuuuuuauaagaaucugaucuggcucguuaaaaagggcaacagcuacccuaaacuguccaagagcuauauuaaugacaaggggaaagaagugcuuguccuguggggaauccaccaccccuccaccucugccgaucaacagagccucuaccagaacgcugacgccuacguguucgugggcacauccagauauagcaagaaauuuaagccugagauugcuauccggccgaaaguccgcgaucaggaggggagaaugaauuacuauuggacccugguugaacccggagacaagauuacguucgaggccacaggcaaccugguggugccucgguacgcguuugccauggaacgcaacgcugggucuggaaucauuaucuccgauacccccguccaugacugcaauacaaccugucaaaccccuaaaggcgccaucaacacaagccuccccuuccagaauauucacccgaucacgauuggcaagugcccuaaguaugugaaaucuaccaagcugagacuugcuacagggcugcggaacguucccagcauccagucccgcggacucuuuggcgccauugccggguucaucgagggaggcuggaccgggaugguggacggaugguacggcuaucaucaccagaaugaacaaggcucuggguacgcugcggaucugaaaagcacacagaacgccaucgacgagauuaccaauaaggucaacuccgugaucgagaaaaugaauacgcaguuuacagcuguuggaaaggaguucaaccaccuugagaagagaauugaaaaucugaacaaaaagguggaugacggcuuccucgauaucuggaccuacaaugccgagcugcugguccuccuggaaaacgagcggacccuugacuaucaugauagcaaugugaaaaaccuguacgagaagguccgcucucagcucaaaaacaaugccaaggaaauugggaacggauguuuugaguucuaucacaagugcgacaauacauguauggaauccgugaaaaacggcaccuacgauuauccuaaguacagcgaggaagcuaaacugaauagagaggagaucgacgggguuaaacuugaaucuacacggaucuaucaaauucuggccaucuacuccacgguggcgagcucccucguccuggugguuuuucugggcgcuauuucuuucuggaugugcagcaacggaucccuccagugccgcaucuguauuuga

SEQ ID NO: 199517 - RNA, 1701 nt, Artificial Sequence
  derived and/or modified CDS sequence (opt5) from hemagglutinin__InfluenzaA__AEO01354
augaaggccauccuggugguccuccuguacaaauucgcuaccgccaacgcggacacacuuugcauuggcuaucacgcuaauaacagcacggauaccguugacacagugcuggagaagaaugugaccgucacacauuccgugaaccuccuggaagauaaacacaaugggaagcuguguaaacugagaggaguugcgccccuccaucugggcaagugcaacaucgccggguggauucugggaaauccugagugugaaucucucagcaccgcuuccucuuggagcuacaucguggagacauccucuagcgacaacgggaccugcuauccgggcgauuuuauugacuacgaagaacugcgggagcagcuuuccagcgucucuuccuucgaacgcuuugagaucuuccccaagacgagcucuuggccuaaucacgauuccaacaaaggagugaccgccgcuuguccccaugccggcgccaagagcuuuuauaaaaaucugaucuggcucguuaagaaaggcaacucuuacccuaagcuguccaagagcuauauuaaugacaaagggaaggaagugcuuguccuguggggaauccaccaccccuccacaucugccgaucaacagagccucuaccagaacgcugacgccuacguguucgugggcaccuccagauauagcaaaaaguuuaaaccugagauugcuauccggccgaagguccgcgaucaggaggggagaaugaauuacuauuggacacugguugaacccggagacaaaauuaccuucgaggccacgggcaaccugguggugccucgguacgcguuugccauggaacgcaacgcugggucuggaaucauuaucuccgauacacccguccaugacugcaauaccacaugucaaaccccuaagggcgccaucaacaccagccuccccuuccagaauauucacccgaucacaauuggcaagugcccuaaauaugugaagucuacgaaacugagacuugcuaccgggcugcggaacguucccagcauccagucccgcggacucuuuggcgccauugccggguucaucgagggaggcuggacagggaugguggacggaugguacggcuaucaucaccagaaugaacaaggcucuggguacgcugcggaucuuaagagcacccagaacgccaucgacgagauuacaaauaaagucaacuccgugaucgagaagaugaauacccaguuuacggcuguuggaaaggaguucaaccaccuugagaaaagaauugaaaaucugaacaagaaaguggaugacggcuuccucgauaucuggacauacaaugccgagcugcugguccuccuggaaaacgagcggacccuugacuaucaugauagcaaugugaagaaccuguacgagaaaguccgcucucagcucaagaacaaugccaaggaaauugggaacggauguuuugaguucuaucacaaaugcgacaauaccuguauggaauccgugaagaacggcacauacgauuauccuaaauacagcgaggaagcuaagcugaauagagaggagaucgacgggguuaaacuugaaucuacccggaucuaucaaauucuggccaucuacuccacaguggcgagcucccucguccuggugguuucucugggcgcuauuagcuuuuggaugugcuccaacggaucucuccagugccgcaucuguauuuga

SEQ ID NO: 199518 - RNA, 1701 nt, Artificial Sequence; identical to SEQ ID NO: 196161
  derived and/or modified CDS sequence (opt5) from hemagglutinin__InfluenzaA__AEO01355

SEQ ID NO: 199519 - RNA, 1701 nt, Artificial Sequence; identical to SEQ ID NO: 194741
  derived and/or modified CDS sequence (opt5) from hemagglutinin__InfluenzaA__AEO01356

SEQ ID NO: 199520 - RNA, 1701 nt, Artificial Sequence
  derived and/or modified CDS sequence (opt5) from hemagglutinin__InfluenzaA__AEO01358
augaaggccauccuggugguccuccuguacaccuucgcuacagccaacgcggacacgcuuugcguuggcuaucacgcuaauaacagcaccgauacaguggacaccgugcuggagaagaaugucacagugacccauuccguuaaccuccuggaagauaagcacaaugggaaacuuuguaagcugagaggaguggcuccccuccaucugggcaaaugcaacauugccggguggauccugggaaauccugagugugaaucucucagcacagccuccucuuggagcuacauugucgagaccuccucuagcgacaacggcacgugcuauccgggggauuuuaucgacuacgaagaacugcgggagcagcuuuccagcgugucuuccuucgaacgcuuugagauuuuccccaagaccagcucuuggccuaaucacgauuccaacaagggaguuacagccgcuuguccccaugccggcgcgaaaucuuuuuauaagaaucugaucuggcucgugaaaaagggcaacagcuacccuaaacuguccaagagcuauaucaaugacaaggggaaagaaguccuugugcuguggggcauucaccaccccuccaccucugccgaucaacagagccucuaccagaacgcugacgccuacguguucgucggaacauccagauauagcaagaaauuuaagccugagaucgcuauucggccgaaaguucgcgaucaggaggggagaaugaauuacuauuggacccugguggaacccggagacaagaucacguucgaggccacaggcaaccugguggucccucgguacgcguuugccauggaacgcaacgcugggucuggaauuaucauuuccgauacccccgcccaugacugcaauacaaccugucaaaccccuaaaggcgcuaucaacacaagccuccccuuccagaauauccacccgauuacgaucggcaagugcccuaaguaugugaaaucuaccaagcugagacuugccacagggcugcggaacguucccagcauucagucccgcggacucuuuggcgccaucgcuggguucauugagggaggcuggaccgggaugguggacggaugguacggcuaucaucaccagaaugaacaaggcucuggguacgcggccgaucugaaaagcacacagaacgcuaucgacgagaucaccaauaaggucaacuccgugauugagaaaaugaauacgcaguuuacagccguuggaaaggaguucaaccaccuugagaagagaaucgaaaaucugaacaaaaagguggaugacggcuuccucgauauuuggaccuacaaugccgagcugcugguccuccuggaaaacgagcggacccuugacuaucaugauagcaaugugaaaaaccuguacgagaagguccgcucucagcucaaaaacaaugcuaaggaaaucgggaacggauguuuugaguucuaucacaagugcgacaauacauguauggaauccgugaaaaacggcaccuacgauuauccuaaguacagcgaggaagccaaacugaauagagaggagauugacgggguuaaacuugaaucuacacggaucuaucaaauccuggcgauuuacuccacgguggcuagcucccucguccuggugguuucucugggcgccaucagcuuuuggaugugcuccaacggaucucuccagugccgcauuuguaucuga

SEQ ID NO: 199521 - RNA, 1701 nt, Artificial Sequence; identical to SEQ ID NO: 196161
  derived and/or modified CDS sequence (opt5) from hemagglutinin__InfluenzaA__AEO01359

SEQ ID NO: 199522 - RNA, 1701 nt, Artificial Sequence; identical to SEQ ID NO: 199494
  derived and/or modified CDS sequence (opt5) from hemagglutinin__InfluenzaA__AEO01360

SEQ ID NO: 199523 - RNA, 1701 nt, Artificial Sequence; identical to SEQ ID NO: 195094
  derived and/or modified CDS sequence (opt5) from hemagglutinin__InfluenzaA__AEO01361

SEQ ID NO: 199524 - RNA, 1701 nt, Artificial Sequence; identical to SEQ ID NO: 199494
  derived and/or modified CDS sequence (opt5) from hemagglutinin__InfluenzaA__AEO01362

SEQ ID NO: 199525 - RNA, 1701 nt, Artificial Sequence; identical to SEQ ID NO: 195905
  derived and/or modified CDS sequence (opt5) from hemagglutinin__InfluenzaA__AEO01363

SEQ ID NO: 199526 - RNA, 1701 nt, Artificial Sequence
  derived and/or modified CDS sequence (opt5) from hemagglutinin__InfluenzaA__AEO01365
augaaggccauccuggugguccuccuguacaccuucgcuacagccaacgcggacacgcuuugcauuggcuaucacgcuaauaacagcaccgauacaguugacaccgugcugaaaaagaaugugacagucacccauuccgugaacauccucgaggauaaacacaaugggaagcuguguaaacuuagaggaguugcgccccugcaucucggcaagugcaacauugccggguggauccugggaaauccugaaugugagucucugagcacagcuuccucuuggagcuacauuguggaaaccuccucuagcgacaacggcacgugcuauccgggggauuuuaucgacuacgaggaacuccgggagcagcuguccagcgucucuuccuucgagcgcuuugaaaucuuccccaagaccagcucuuggccuaaucacgauuccaacaaaggagugacagccgcuuguccccaugccggcgccaagagcuuuuauaaaaaucuuauuuggcugguuaagaaaggcaacucuuacccuaagcucuccaagagcuauaucaaugacaaagggaaggaggugcugguccuuuggggcauucaccaccccuccaccucugccgaucaacagagccuguaccagaacgcugacgccuacguguucgugggaacauccagauauagcaaaaaguuuaaaccugaaaucgcuauucggccgaagguccgcgaucaggaggggagaaugaauuacuauuggacccucguugagcccggagacaaaaucacguucgaagccacaggcaaccugguggugccucgguacgcguuugccauggagcgcucugcuggguccggaauuaucaucagcgauacccccguccaugacugcaacacaaccugucaaaccccuaagggcgccauuaauacaucucugcccuuccagaacauccacccgauuacgaucggcaagugcccuaaauaugugaaaagcaccaaacucagacuggcuacagggcuucggaauguucccuccauucagucucgcggacuguuuggcgccaucgccggguucaucgaaggaggcuggaccgggaugguggacggaugguacggcuaucaucaccagaacgagcaaggcagcggguacgcugcggaucucaaguccacacagaaugccauugacgaaaucaccaacaaagucaauagcgugauugagaagaugaacacgcaguuuacagcuguuggaaaggaguucaaucaccuggaaaagagaaucgagaaccuuaauaagaaaguggaugacggcuuccuggauauuuggaccuacaacgccgaacuccugguccugcucgagaaugaacggacccuggacuaucaugauucuaacgugaagaaucuuuacgagaaaguccgcucccagcugaagaacaacgccaaggagaucgggaauggauguuuugaguucuaucacaaaugcgacaacacauguauggaaagcgugaagaauggcaccuacgauuauccuaaauacucugaagaggcuaagcucaacagagaagagaucgacgggguuaaacuggaguccacacggauuuaucaaauccuugccauuuacagcacgguggcguccucucugguccucgugguuagccugggcgcuaucuccuuuuggaugugcucuaauggaagccugcagugccgcauuuguaucuga

SEQ ID NO: 199527 - RNA, 1701 nt, Artificial Sequence
  derived and/or modified CDS sequence (opt5) from hemagglutinin__InfluenzaA__AEO01366
augaaggccauccuggugguccuccuguacaccuucgcuacagccaacgcggacacgcuuugcauuggcuaucacgcuaauaacagcaccgauacaguugacaccgugcuggagaagaaugugacagucacccauuccgugaaccuccuggaagauaagcacaaugggaaacuuuguaagcugagaggaguugcuccccuccaucugggcaaaugcaacaucgccggguggauucugggaaauccugagugugaaucucucagcacagccuccucuuggagcuacaucguggagaccuccucuagcgacaacggcacgugcuauccgggggauuuuauugacuacgaagaacugcgggagcagcuuuccagcgucucuuccuucgaacgcuuugagaucuuccccaagaccagcucuuggccuaaucacgauuccaacaagggagugacagccgcuuguccccaugccggcgcgaaaucuuuuuauaagaaucugaucuggcucguuaaaaagggcaacagcuacccuaaacuguccaagagcuauauuaaugacaaggggaaagaagugcuuguccuguggggaauccaccaccccuccaccucugccgaucaacagagccucuaccagaacgcugacgccuacguguucgugggcacauccagauauagcaagaaauuuaagccugagauugcuauccggccgaaaguccgcgaucaggaggggagaaugaauuacuauuggacccugguugaacccggagacaagauuacguucgaggccacaggcaaccugguggugccucgguacgcguuugccauggaacgcaacgcugggucuggaaucauuaucuccgauacccccguccaugacugcagcacaaccugucaaaccccuaaaggcgccaucaauacaucucuccccuuccagaacgugcacccgauuacgaucggcaagugcccuaaguauguuaaaagcaccaagcugagacuugcuacagggcugcggaaugugcccuccauucagucucgcggacucuuuggcgccaucgccggguucauugagggaggcuggaccgggauggucgacggaugguacggcuaucaucaccagaacgaacaaggcagcggguacgcugcggaucugaaauccacacagaaugccaucgacgagaucaccaacaaggugaauagcguuauugagaaaaugaacacgcaguuuacagcugugggaaaggaguucaaucaccuugagaagagaaucgaaaaccugaauaaaaaggucgaugacggcuuccucgauauuuggaccuacaacgccgagcugcuggugcuccuggaaaaugagcggacccuugacuaucaugauucuaacgucaaaaaucuguacgagaaggugcgcucccagcucaaaaacaacgccaaggaaaucgggaauggauguuuugaguucuaucacaagugcgacaacacauguauggaaagcguuaaaaauggcaccuacgauuauccuaaguacucugaggaagcuaaacugaacagagaggagauugacggggugaaacuugaauccacacggaucuaucaaauccuggccauuuacagcacggucgcguccucucucgugcugguugugagccugggcgcuaucuccuuuuggaugugcucuaauggaagccuccagugccgcauuuguaucuga

SEQ ID NO: 199528 - RNA, 1701 nt, Artificial Sequence; identical to SEQ ID NO: 199499
  derived and/or modified CDS sequence (opt5) from hemagglutinin__InfluenzaA__AEO01367

SEQ ID NO: 199529 - RNA, 1701 nt, Artificial Sequence
  derived and/or modified CDS sequence (opt5) from hemagglutinin__InfluenzaA__AEO01368
augaaggccauccuggugguccuccuguacaccuucgcuacagccaacgcggacacgcuuugcauuggcuaucacgcuaauaacagcaccgauacaguugacaccgugcuggagaaaaaugugacagucacccauuccgugaaccuccuggaagauaagcacaaugggaaacuuuguaagcugagaggaguugcgccccuccaucugggcaaaugcaacaucgccggguggauucugggaaauccugagugugaaucucucagcacagcuuccucuuggagcuacaucguggagaccuccucuagcgacaacggcacgugcuauccgggggauuuuauugacuacgaagaacugcgggagcagcuuuccagcgucucuuccuucgaacgcuuugagaucuuccccaauaccagcucuuggccuaaccacgauuccaauaagggagugacagccgcuuguccccaugccggcgccaagagcuuuuauaaaaaccugaucuggcucguuaagaaaggcaauucuuacccuaagcuguccaaaagcuauauuaacgacaaggggaaggaagugcuuguccuguggggaauccaccaccccuccaccucugccgaucaacagagccucuaccagaaugcugacgccuacguguucgugggcacauccagauauagcaaaaaguuuaaaccugagauugcuauccggccgaagguccgcgaucaggaggggagaaugaacuacuauuggacccugguugaacccggagacaaaauuacguucgaggccacaggcaaccugguggugccucgguacgcguuugccauggaacgcaaugcugggucuggaaucauuaucuccgauacccccguccaugacugcaacacaaccugucaaaccccuaagggcgccaucaauacaagccuccccuuccagaacauucacccgaucacgauuggcaaaugcccuaaguaugugaagucuaccaaacugagacuugcuacagggcugcggaauguucccagcauccagucccgcggacucuuuggcgccauugccggguucaucgagggaggcuggaccgggaugguggacggaugguacggcuaucaucaccagaacgaacaaggcucuggguacgcugcggaucuuaagagcacacagaaugccaucgacaaaauuaccaacaaggucaauuccgugaucgagaaaaugaacacgcaguuuacagcuguuggaaaggaguucaaucaccuugaaaagagaauugagaaccugaauaaaaagguggaugacggcuuccucgauaucuggaccuacaacgccgaacugcugguccuccuggagaaugaacggacccuugacuaucaugauagcaacgugaaaaaccuguacgagaagguccgcucucagcucaaaaauaacgccaaggagauugggaauggauguuuugaguucuaucacaagugcgacaacacauguauggaguccgugaaaaauggcaccuacgauuauccuaaguacagcgaagaggcuaaacugaacagagaagagaucgacgggguuaagcuggagucuacacggaucuaucaaauucuggccaucuacuccacgguggcgagcucccucguccuggugguuucucugggcgcuauuagcuuuuggaugugcuccaauggaucucuccagugccgcaucuguauuuga

SEQ ID NO: 199530 - RNA, 1701 nt, Artificial Sequence; identical to SEQ ID NO: 194741
  derived and/or modified CDS sequence (opt5) from hemagglutinin__InfluenzaA__AEO01369

SEQ ID NO: 199531 - RNA, 1701 nt, Artificial Sequence; identical to SEQ ID NO: 199459
  derived and/or modified CDS sequence (opt5) from hemagglutinin__InfluenzaA__AEO01370

SEQ ID NO: 199532 - RNA, 1701 nt, Artificial Sequence; identical to SEQ ID NO: 199506
  derived and/or modified CDS sequence (opt5) from hemagglutinin__InfluenzaA__AEO01371

SEQ ID NO: 199533 - RNA, 1701 nt, Artificial Sequence; identical to SEQ ID NO: 196338
  derived and/or modified CDS sequence (opt5) from hemagglutinin__InfluenzaA__AEO01372

SEQ ID NO: 199534 - RNA, 1701 nt, Artificial Sequence; identical to SEQ ID NO: 196338
  derived and/or modified CDS sequence (opt5) from hemagglutinin__InfluenzaA__AEO01373

SEQ ID NO: 199535 - RNA, 1701 nt, Artificial Sequence
  derived and/or modified CDS sequence (opt5) from hemagglutinin__InfluenzaA__AEO01374
augaaggccauccuggugguccuccuguacaccuucgcuacagccaacgcggacacgcuuugcauuggcuaucacgcuaauaacagcaccgauacaguugacaccgugcuggagaagaaugugacagucacccauuccgugaaccuccuggaagauaagcacaaugggaaacuuuguaagcugagaggaguugcuccccuccaucugggcaaaugcgacaucgccggguggauucugggaaacccugagugugaaucucucagcacagccuccucuuggagcuacaucguggagaccuccucuagcgauaauggcacgugcuauccgggggacuuuauugauuacgaagaacugcgggagcagcuuuccagcgucucuuccuucgaacgcuuugagaucuuccccaagaccagcucuuggccuaaccacgacuccaauaagggagugacagccgcuuguccccaugccggcgcgaaaucuuuuuauaagaaccugaucuggcucguuaaaaagggcaauagcuacccuaaacuguccaagagcuauauuaacgauaaggggaaagaagugcuuguccuguggggaauccaccaccccuccaccucugccgaccaacagagccucuaccagaaugcugaugccuacguguucgugggcacauccagauauagcaagaaauuuaagccugagauugcuauccggccgaaaguccgcgaccaggaggggagaaugaacuacuauuggacccugguugaacccggagauaagauuacguucgaggccacaggcaaucugguggugccucgguacgcguuugccauggaacgcaacgcugggucuggaaucauuaucuccgacacccccguccaugacugcaacacaaccugucaaaccccuaaaggcgccaucaauacaagccuccccuuccagaacauucacccgaucacgauuggcaagugcccuaaguauaucaaaucuaccaagcugagacuugcuacagggcugcggaaugugcccagcauucagucccgcggacucuuuggcgccaucgccggguucaucgagggaggcuggaccgggaugguugauggaugguacggcuaucaucaccagaacgaacaaggcucuggguacgcugcggaccugaaaagcacacagcacgccauugaugagaucaccaauaaggugaacuccgucauugagaaaaugaauacgcaguuuacagcugugggaaaggaguucaaccaucuugagaagagaaucgaaaaucugaacaaaaagguugacgauggcuuccucgacauuuggaccuacaaugccgagcugcuggugcuccuggaaaacgagcggacccuugauuaucacgacagcaaugucaaaaaccuguacgagaaggugcgcucucagcucaaaaauaacgccaaggaaaucgggaacggauguuuugaguucuaucauaagugcgauaauacauguauggaauccgucaaaaacggcaccuacgacuauccuaaguacagcgaggaagcuaaacugaauagagaggagaucgauggggugaaacuugaaucuacacggauuuaucaaauccuggccauuuacuccacgguugcgagcucccucgugcuggucgugucucugggcgcuaucagcuuuuggaugugcuccaacggaucucuccagugccgcauuuguaucuga

SEQ ID NO: 199536 - RNA, 1701 nt, Artificial Sequence; identical to SEQ ID NO: 199510
  derived and/or modified CDS sequence (opt5) from hemagglutinin__InfluenzaA__AEO01375

SEQ ID NO: 199537 - RNA, 1701 nt, Artificial Sequence; identical to SEQ ID NO: 194741
  derived and/or modified CDS sequence (opt5) from hemagglutinin__InfluenzaA__AEO01376

SEQ ID NO: 199538 - RNA, 1701 nt, Artificial Sequence; identical to SEQ ID NO: 196909
  derived and/or modified CDS sequence (opt5) from hemagglutinin__InfluenzaA__AEO01377

SEQ ID NO: 199539 - RNA, 1701 nt, Artificial Sequence
  derived and/or modified CDS sequence (opt5) from hemagglutinin__InfluenzaA__AEO01378
augaaggccauccuggugguccuccuguacaccuucgcuacagccaacgcggacacgcuuugcauuggcuaucacgcuaauaacagcaccgauacaguugacaccgugcuggagaagaaugugacagucacccauuccgugaaccuccuggaagauaagcacaaugggaaacuuuguaagcugagaggaguugcuccccuccaucugggcaaaugcaacaucgccggguggauucugggaaauccugagugugaaucucucagcacagccuccucuuggagcuacaucguggagaccccguccucugacaacggcacgugcuaucccggggauuuuauugacuacgaagaacugcgggagcagcuuagcuccgucagcucuuucgaacgcuuugagaucuucccuaagaccuccagcuggcccaaucacgauucuaacaagggagugacagccgcuuguccucaugccggcgcgaaauccuuuuauaagaaucugaucuggcucguuaaaaagggcaacagcuaccccaaacugucuaaguccuauauuaaugacaaggggaaagaagugcuuguccuguggggaauccaccacccuagcaccuccgccgaucaacagucucucuaccagaacgcugacgccuacguguucgugggcacaagcagauauuccaagaaauuuaagccggagauugcuauccggcccaaaguccgcgaucaggaggggagaaugaauuacuauuggacccugguugaaccuggagacaagauuacguucgaggccacaggcaaccugguggugccccgguacgcguuugccauggaacgcaacgcugggagcggaaucauuaucucugauaccccuguccaugacugcaauacaaccugucaaacccccaaaggcgccaucaacacaucccucccguuccagaauauucacccuaucacgauuggcaagugccccaaguaugugaaaagcaccaagcugagacuugcuacagggcugcggaacguuccuucuauccagagccgcggacucuuuggcgccauugccggguucaucgagggaggcuggaccgggaugguggacggaugguacggcuaucaucaccagaaugaacaaggcuccggguacgcugcggaucugaaaucuacacagaacgccaucgacgagauuaccaauaaggucaacagcgugaucgagaaaaugaauacgcaguuuacagcuguuggaaaggaguucaaccaccuugagaagagaauugaaaaucugaacaaaaagguggaugacggcuuccucgauaucuggaccuacaaugccgagcugcugguccuccuggaaaacgagcggacccuugacuaucaugauuccaaugugaaaaaccuguacgagaagguccgcagccagcucaaaaacaaugccaaggaaauugggaacggauguuuugaguucuaucacaagugcgacaauacauguauggaaucugugaaaaacggcaccuacgauuaucccaaguacuccgaggaagcuaaacugaauagagaggagaucgacgggguuaaacuugaaagcacacggaucuaucaaauucuggccaucuacucuacgguggcguccagccucguccuggugguuucccugggcgcuauuucuuuuuggaugugcagcaacggaucccuccagugccgcaucuguauuuga

SEQ ID NO: 199540 - RNA, 1701 nt, Artificial Sequence; identical to SEQ ID NO: 195905
  derived and/or modified CDS sequence (opt5) from hemagglutinin__InfluenzaA__AEO01379

SEQ ID NO: 199541 - RNA, 1701 nt, Artificial Sequence; identical to SEQ ID NO: 199510
  derived and/or modified CDS sequence (opt5) from hemagglutinin__InfluenzaA__AEO01380

SEQ ID NO: 199542 - RNA, 1701 nt, Artificial Sequence; identical to SEQ ID NO: 199510
  derived and/or modified CDS sequence (opt5) from hemagglutinin__InfluenzaA__AEO01381

SEQ ID NO: 199543 - RNA, 1701 nt, Artificial Sequence; identical to SEQ ID NO: 195905
  derived and/or modified CDS sequence (opt5) from hemagglutinin__InfluenzaA__AEO01382

SEQ ID NO: 199544 - RNA, 1701 nt, Artificial Sequence; identical to SEQ ID NO: 196338
  derived and/or modified CDS sequence (opt5) from hemagglutinin__InfluenzaA__AEO01383

SEQ ID NO: 199545 - RNA, 1701 nt, Artificial Sequence
  derived and/or modified CDS sequence (opt5) from hemagglutinin__InfluenzaA__AEO01384
augaaggccauccuggugguccuccuguacaccuucgcuacagccaacgcggacacgcuuugcauuggcuaucacgcuaauaacagcaccgauacaguugacaccgugcuggagaagaaugugacagucacccauuccgugaaccuccuggaagauaagcacaaugggaaacuuuguaagcugagaggaguuucuccccuccaucugggcaaaugcaacaucgccggguggauucugggaaauccugagugugaaagccucuccacagccucuagcugguccuacaucguggagaccucuagcuccgacaacggcacgugcuauccgggggauuuuauugacuacgaagaacugcgggagcagcuuagcucugucuccagcuucgaacgcuuugagaucuuccccaagaccucuuccuggccuaaucacgauagcaacaagggagugacagcugccuguccccaugcuggcgccaaaucuuuuuauaagaaucugaucuggcucguuaaaaagggcaacuccuacccuaaacugagcaaguccuauauuaaugacaaggggaaagaagugcuuguccuguggggaauccaccaccccucuaccagcgcggaucaacagucccucuaccagaacgccgacgcuuacguguucgugggcacaagcagauauucuaagaaauuuaagccugagauugccauccggccgaaaguccgcgaucaggaggggagaaugaauuacuauuggacccugguugaacccggagacaagauuacguucgaggcuacaggcaaccugguggugccucgguacgccuuugcgauggaacgcaacgccggguccggaaucauuaucagcgauacccccguccaugacugcaauacaaccugucaaaccccuaaaggcgcuaucaacacaucucuccccuuccagaauauucacccgaucacgauuggcaagugcccuaaguaugugaaaagcaccaagcugagacuugccacagggcugcggaacguucccuccauccagucucgcggacucuuuggcgcuauugccggguucaucgagggaggcuggaccgggaugguggacggaugguacggcuaucaucaccagaaugaacaaggcagcggguacgccgcugaucugaaauccacacagaacgcgaucgacgagauuaccaauaaggucaacagcgugaucgagaaaaugaauacgcaguuuacagccguuggaaaggaguucaaccaccuugagaagagaauugaaaaucugaacaaaaagguggaugacggcuuccucgauaucuggaccuacaaugcugagcugcugguccuccuggaaaacgagcggacccuugacuaucaugauucuaaugugaaaaaccuguacgagaagguccgcucccagcucaaaaacaaugccaaggaaauugggaacggauguuuugaguucuaucacaagugcgacaauacauguauggaaagcgugaaaaacggcaccuacgauuauccuaaguacucugaggaagccaaacugaauagagaggagaucgacgggguuaaacuugaauccacacggaucuaucaaauucuggcuaucuacagcacgguggccuccucucucguccuggugguuagccugggcgcgauuuccuuuuggaugugcucuaacggaagccuccagugccgcaucuguauuuga

SEQ ID NO: 199546 - RNA, 1701 nt, Artificial Sequence
  derived and/or modified CDS sequence (opt5) from hemagglutinin__InfluenzaA__AEO01385
augaaggccauccuggugguccuccuguacaccuucgcuacagccaacgcggacacgcuuugcauuggcuaucacgcuaauaacagcaccgauacaguugacaccgugcuggagaaaaaugugacagucacccauuccgugaacauccucgaagauaagcacaaugggaaacuguguaaacuuagaggaguugcuccccugcaucucggcaagugcaacauugccggguggauccugggaaauccugagugugaaucucugagcacagccuccucuuggagcuacauuguggagaccuccucuagcgacaacggcacgugcuauccgggggauuuuaucgacuacgaagaacuccgggagcagcuguccagcgucucuuccuucgaacgcuuugagaucuuccccaagaccagcucuuggccuaaucacgauuccaacaagggagugacagccgcuuguccccaugccggcgcgaaaucuuuuuauaagaaucuuauuuggcugguuaaaaagggcaacagcuacccuaaacucuccaagagcuauaucaaugacaaggggaaagaagugcugguccuuuggggcauucaccaccccuccaccucugccgaucaacagagccuguaccagaacgcuaaugccuacguguucgugggaacauccagauauagcaagaaauuuaagccugagaucgcuauucggccgaaaguccgcgaccaggaggggagaaugaacuacuauuggacccucguugaacccggagauaagaucacguucgaggccacaggcaaccugguggugccucgguacgcguuugccauggaacgcaaugcugggucuggaauuaucaucuccgacacccccguccaugauugcaacacaaccugucaaaccccuaaaggcgccauuaauacaagccugcccuuccagaacauccacccgauuacgaucggcaagugcccuaaguaugugaaaucuaccaagcucagacuggcuacagggcuucggaauguucccagcauucagucccgcggacuguuuggcgccaucgccggguucaucgagggaggcuggaccgggaugguggacggaugguacggcuaucaucaccagaacgaacaaggcucuggguacgcugcggaccucaaaagcacacagaaugccauugaugagaucaccaacaaggucaauuccgugauugagaaaaugaacacgcaguuuacagcuguuggaaaggaguucaaucaccuggagaagagaaucgaaaaccuuaauaaaaagguggacgauggcuuccuggacauuuggaccuacaacgccgagcuccugguccugcucgaaaaugagcggacccuggauuaucaugacagcaacgugaaaaaccuuuacgagaagguccgcucucagcugaaaaauaacgccaaggaaaucgggaauggauguuuugaguucuaucacaagugcgauaacacauguauggaauccgugaaaaauggcaccuacgacuauccuaaguacagcgaggaagcuaaacucaacagagaggagaucgaugggguuaagcuggaaucuacacggauuuaucaaauccuugccauuuacuccacgguggcgagcucccugguccucgugguuucucugggcgcuaucagcuuuuggaugugcuccaauggaucucugcagugccgcauuuguaucuga

SEQ ID NO: 199547 - RNA, 1701 nt, Artificial Sequence; identical to SEQ ID NO: 199450
  derived and/or modified CDS sequence (opt5) from hemagglutinin__InfluenzaA__AEO01386

SEQ ID NO: 199548 - RNA, 1701 nt, Artificial Sequence
  derived and/or modified CDS sequence (opt5) from hemagglutinin__InfluenzaA__AEO01387
augaaggccauccuggugguccuccuguacaccuucgcuacagccaacgcggacacgcuuugcauuggcuaucacgcuaauaacagcaccgauacaguugacaccgugcuggagaaaaaugugacagucacccauuccgugaacauccucgaagauaagcacaaugggaaacuguguaaacuuagaggaguugcuccccugcaucucggcaagugcaacauugccggguggauccugggaaauccugagugugaaucucugagcacagccuccucuuggagcuacauuguggagaccuccucuagcgacaacggcacgugcuauccgggggauuuuaucgacuacgaagaacuccgggagcagcuguccagcgucucuuccuucgaacgcuuugagaucuuccccaagaccagcucuuggccuaaucacgauuccaacaagggagugacagccgcuuguccccaugccggcgcgaaaucuuuuuauaagaaucuuauuuggcugguuaaaaagggcaacagcuacccuaaacucuccaagagcuauaucaaugacaaggggaaagaagugcugguccuuuggggcauucaccaccccuccaccucugccgaucaacagagccuguaccagaacgcugacgccuacguguucgugggaacauccagauauagcaagaaauuuaagccugagaucgcuauucggccgaaaguccgcgaucaggaggggagaaugaauuacuauuggacccucguugaacccggagacaagaucacguucgaggccacaggcaaccugguggugccucgguacgcguuugccauggaacgcaacgcugggucuggaauuaucaucuccgauacccccguccaugacugcaauacaaccugucaaaccccuaaaggcgccauuaacacaagccugcccuuccagaauauccacccgauuacgaucggcaagugcccuaaguaugugaaaucuaccaagcucagacuggcuacagggcuucggaacguucccagcauucagucccgcggacuguuuggcgccaucgccggguucaucgagggaggcuggaccgggaugguggacggaugguacggcuaucaucaccagaaugaacaaggcucuggguacgcugcggaucucaaaagcacacagaacgccauugacgagaucaccaauaaggucaacuccgugauugagaaaaugaauauccaguuuacggcuguuggaaaggaguucaaccaccuggagaagagaauugaaaaucuuaacaaaaagguggaugacggcuuccuggauaucuggacauacaaugccgagcuccugguccugcucgaaaacgagcggacccuggacuaucaugauagcaaugugaaaaaccuuuacgagaagguccgcucucagcugaaaaacaaugccaaggaaaucgggaacggauguuuugaguucuaucacaagugcgacaauaccuguauggaauccgugaaaaacggcacauacgauuauccuaaguacagcgaggaagcuaaacucaauagagaggagauugacgggguuaagcuggaaucuacccggaucuaucaaauucuugccaucuacuccacaguggcgagcucccugguccucgugguuucucugggcgcuauuagcuuuuggaugugcuccaacggaucucugcagugccgcaucuguauuuga

SEQ ID NO: 199549 - RNA, 1701 nt, Artificial Sequence
  derived and/or modified CDS sequence (opt5) from hemagglutinin__InfluenzaA__AEO01388
augaaggccauccuggugguccuccuguacaccuucgcuacagccaacgcggacacgcuuugcauuggcuaucacgcuaauaacagcaccgauacaguugacaccgugcuggagaaaaaugugacagucacccauuccgugaaccuccuggaagauaagcacaaugggaaacuuuguaagcugagaggaguugcgccccuccaucugggcaaaugcaacaucgccggguggauucugggaaauccugagugugaaucucucagcacagcuuccucuuggagcuacaucguggagaccuccucuagcgacaacggcacgugcuauccgggggauuuuauugacuacgaagaacugcgggagcagcuuuccagcgucucuuccuucgaaaaguuugagaucuuccccaagaccagcucuuggccuaaucacgauuccaacaaaggagugacagccgcuuguccccaugccggcgccaagagcuuuuauaaaaaucugaucuggcucguuaagaaaggcaacucuuacccuaagcuguccaagagcuauauuaaugacaaagggaaggaagugcuuguccuguggggaauccaccaccccuccaccucugccgaucaacagagccucuaccagaacgcugacgccuacguguucgugggcacaucccgcuauagcaaaaaguuuaaaccugagauugcuaucagaccgaagguccgggaucaggaggggcgcaugaauuacuauuggacccugguugaacccggagacaaaauuacguucgaggccacaggcaaccugguggugccuagauacgcguuugccauggaacggaacgcugggucuggaaucauuaucuccgauacccccguccaugacugcaauacaaccugucaaaccccuaagggcgccaucaacacaagccuccccuuccagaauauucacccgaucacgauuggcaagugcccuaaauaugugaagucuaccaaacugcgccuugcuacagggcugagaaacguucccagcauccagucccggggacucuuuggcgccauugccggguucaucgagggaggcuggaccgggaugguggacggaugguacggcuaucaucaccagaaugaacaaggcucuggguacgcugcggaucuuaagagcacacagaacgccaucgacaaaauuaccaauaaggucaacuccgugaucgagaagaugaauacgcaguuuacagcuguuggaaaagaguucaaccaccuugaaaagcgcauugagaaucugaacaaaaagguggaugacggcuuccucgauaucuggaccuacaaugccgaacugcugguccuccuggagaacgaaagaacccuugacuaucaugauagcaaugugaaaaaccuguacgagaagguccggucucagcucaagacaaacgccaaagagauugggaauggauguuuugaguucuaucacaagugcgacaacaccuguauggaguccgugaaaaauggcacauacgauuauccuaaguacagcgaagaggcuaaacugaaccgcgaagagaucgacgggguuaagcuggagucuacgagaaucuaucaaauucuggccaucuacuccaccguggcgagcucccucguccuggugguuucucugggcgcuauuagcuuuuggaugugcuccaauggaucucuccagugccggaucuguauuuga

SEQ ID NO: 199550 - RNA, 1701 nt, Artificial Sequence
  derived and/or modified CDS sequence (opt5) from hemagglutinin__InfluenzaA__AEO01389
augaaggccauccuggugguccuccuguacaccuucgcuacagccaacgcggacacgcuuugcauuggcuaucacgcuaauaacagcaccgauacaguugacaccgugcuggagaaaaaugugacagucacccauuccgugaaccuccuggaagauaagcacaaugggaaacuuuguaagcugagaggaguugcuccccuccaucugggcaaaugcaacaucgccggguggauucugggaaauccugagugugaaucucucagcacagccuccucuuggagcuacaucguggagaccuccucuagcgacaacggcacgugcuauccgggggauuuuauugacuacgaagaacugcgggagcagcuuuccagcgucucuuccuucgaacgcuuugagaucuuccccaagaccagcucuuggccuaaucacgauuccaacaagggagugacagccgcuuguccccaugccggcaccaagagcuuuuauaaaaaucugaucuggcucguuaaaaagggcaacucuuacccuaaacuguccaagagcuauauuaaugacaaggggaaagaagugcuuguccuguggggaauccaccaccccuccacaucugcggaucaacagagccucuaccagaacgccgacgcuuacguguucgugggcaccuccagauauagcaagaaauuuaagccugagauugccauccggccgaaaguccgcgaucaggaggggagaaugaauuacuauuggacgcugguugaacccggagacaagauuacauucgaggcuaccggcaaccugguggugccucgguacgccuuugcgauggaacgcaacgccgggucuggaaucauuaucuccgauacacccguccaugacugcaauaccaccugucaaacaccuaaaggcgcuaucaacacgagccuccccuuccagaauauucacccgaucaccauuggcaagugcccuaaguaugugaaaucuacaaagcugagacuugccaccgggcugcggaacguucccagcauccagucccgcggacucuuuggcgcuauugccggguucaucgagggaggcuggacagggaugguggacggaugguacggcuaucaucaccagaaugaacaaggcucuggguacgccgcugaucugaaaagcacccagaacgcgaucgacaagauuacgaauaaagucaacuccgugaucgagaagaugaauacacaguuuaccgccguuggaaaggaguucaaccaccuugagaaaagaauugagaaucugaacaagaaaguggaugacggcuuccucgauaucuggaccuacaaugcugaacugcugguccuccuggagaacgaacggacacuugacuaucaugauagcaaugugaagaaccuguacgagaaaguccgcucucagcucaagaacaaugccaaggagauugggaacggauguuuugaguucuaucacaaaugcgacaauaccuguauggaauccgugaagaacggcacauacgauuauccuaaauacagcgaagaggccaagcugaauagagaagagaucgacgggguuaaacuugagucuacgcggaucuaucaaauucuggcuaucuacuccaccguggccagcucccucguccuggugguuucucugggcgcgauuagcuuuuggaugugcuccaacggaucucuccagugccgcaucuguauuuga

SEQ ID NO: 199551 - RNA, 1701 nt, Artificial Sequence
  derived and/or modified CDS sequence (opt5) from hemagglutinin__InfluenzaA__AEO01390
augaaggccauccuggugguccuccuguacaccuucgcuauugccaacgcggacacacuuugcaucggcuaucacgcuaauaacagcacggauaccguugacacagugcuggagaaaaaugugaccgucacacauuccgugaaccuccuggaagauaagcacaaugggaaacuuuguaagcugagaggaguugcuccccuccaucugggcaaaugcaacauugccggguggauccugggaaauccugagugugaaucucucagcaccgccuccucuuggagcuacauuguggagacauccucuagcgacaacggaaccugcuauccgggggauuuuaucgacuacgaggaacugcgggagcagcuuuccagcgucucuuccuucgaacgcuuugagaucuuccccaagacgagcucuuggccuaaucacgauuccaacaagggagugaccgccgcuuguccccaugccggcgcgaaauccuuuuauaagaaucugauuuggcucguuaaaaagggcaacucuuacccuaaacuguccaagagcuauaucaaugacaaggggaaagaagugcuuguccuguggggcauucaccaccccuccacaucugccgaucaacagagccucuaccagaacgcugacgccuacguguucguggagaccuccagauauagcaagaaagucaagccugagaucgcuauucggccgcgcguuagagaucaggaaggccggaugaauuacuauuggacacugguggagcccggggacaaaaucaccuuugaagccacgggaaaccugguggucccucgcuacgcguucgccauggagagaaacgcuggcucugggauuaucaucuccgauacacccgugcaugacugcaauaccacaugucaaaccccuaagggagccauuaacaccagccuccccuuucagaauauccacccgauuacaaucggcaaaugcccuaaguauguuaagucuacgaaacugcggcuugcuaccggccugcgcaacgugcccagcauucaguccagagggcuguucggagccaucgccggcuuuaucgaagggggauggacaggcauggucgacgggugguacggauaucaucaccagaaugagcaaggcucuggcuacgcugcggaucucaagagcacccagcacgccauugacgagaucacaaacaaagugaauagcguuauugaaaagaugaacacccaguucacggcuguggggaaagaguuuaaucaucuugaaaagcggaucgagaaccugaauaagaaagucgaugacggauuccucgauauuuggacauacaacgccgaacugcuggugcuccuggagaaugagcgcacccuugacuaucacgauagcaacgucaagaaucuguacgaaaaagugagaucucagcucaagaacaacgccaaagagaucggcaauggguguuucgaauuuuaucauaagugcgacaacaccuguauggaguccguuaagaauggaacauacgauuauccuaaauacagcgaaguggcuaagcugaaccgggaggagaucaauggcgucaaacuugaaucuacccgcauuuaucaaauccuggccauuuacuccacaguggcgagcucccucguucugguggucucucugggggcuaucagcuucuggaugugcuccaacggcucucuccagugcagaauuuguaucuga

SEQ ID NO: 199552 - RNA, 1701 nt, Artificial Sequence; identical to SEQ ID NO: 199450
  derived and/or modified CDS sequence (opt5) from hemagglutinin__InfluenzaA__AEO01391

SEQ ID NO: 199553 - RNA, 1701 nt, Artificial Sequence; identical to SEQ ID NO: 199459
  derived and/or modified CDS sequence (opt5) from hemagglutinin__InfluenzaA__AEO01392

SEQ ID NO: 199554 - RNA, 1701 nt, Artificial Sequence; identical to SEQ ID NO: 196338
  derived and/or modified CDS sequence (opt5) from hemagglutinin__InfluenzaA__AEO01393

SEQ ID NO: 199555 - RNA, 1701 nt, Artificial Sequence; identical to SEQ ID NO: 195842
  derived and/or modified CDS sequence (opt5) from hemagglutinin__InfluenzaA__AEO01394

SEQ ID NO: 199556 - RNA, 1701 nt, Artificial Sequence
  derived and/or modified CDS sequence (opt5) from hemagglutinin__InfluenzaA__AEO01395
augaaggccauccuggugguccuccuguacaccuucgcuacagccaacgcggacacgcuuugcauuggcuaucacgcuaauaacagcaccgauacaguugacaccgugcuggagaaaaaugugacagucacccauuccgugaaccuccuggaagauaagcacaaugggaaacuuuguaagcugagaggaguugcuccccuccaucugggcaaaugcaacaucgccggguggauucugggaaauccugagugugaaucucucagcacagccuccucuuggagcuacaucguggagaccuccucuagcgacaacggcacgugcuauccgggggauuuucuggacuacgaagaacuucgggagcagcuguccagcgucucuuccuucgaacgcuuugagauuuuccccaagaccagcucuuggccuaaucacgauuccaacaagggagugacagccgcuuguccccaugccggcgcgaaaucuuuuuauaagaaucucaucuggcugguuaaaaagggcaacagcuacccuaaacuuuccaagagcuauaucaaugacaaggggaaagaagugcugguccucuggggcauucaccaccccuccaccucugccgaucaacagagccuguaccagaacgcugacgccuacguguucgugggaacauccagauauagcaagaaauuuaagccugagaucgcuauucggccgaaaguccgcgagcaggaagggagaaugaauuacuauuggacccugguugagcccggagauaagaucacguucgaagccacaggcaaccucguggugccucgguacgcguuugccauggagcgcaacgcugggucuggaauuaucauuuccgacacccccguccaugauugcaauacaaccugucaaaccccuaaaggcgccaucaacacaagccugcccuuccagaauauccacccgauuacgaucggcaagugcccuaaguaugugaaaucuaccaaacuuagacuggcuacagggcuccggaacguucccagcauucagucccgcggacuguuuggcgccaucgccggguucauugaaggaggcuggaccgggaugguggacggaugguacggcuaucaucaccagaaugagcaaggcucuggguacgcugcggaccuuaaaagcacacagaacgccaucgaugagaucaccaauaaggucaacuccgugauugaaaagaugaauacgcaguuuacagcuguuggaaaggaguucaaccaccuggaaaagagaaucgagaaucucaacaaaaagguggacgauggcuuccuggacauuuggaccuacaaugccgaacugcucguccugcuugagaacgagcggacccuggauuaucaugacagcaaugugaaaaaccucuacgaaaagguccgcucucagcugaaaaacaaugccaaggagaucgggaacggauguuuugaguucuaucacaagugcgauaauacauguauggaguccgugaaaaacggcaccuacgacuauccuaaguacagcgaagaggcuaaacuuaauagagaggaaauugaugggguuaagcuggagucuacacggaucuaucaaauccucgccauuuacuccacgguggcgagcucccugguccuggugguuucucucggcgcuaucagcuuuuggaugugcuccaacggaucucugcagugccgcauuuguaucuga

SEQ ID NO: 199557 - RNA, 1701 nt, Artificial Sequence; identical to SEQ ID NO: 195842
  derived and/or modified CDS sequence (opt5) from hemagglutinin__InfluenzaA__AEO01396

SEQ ID NO: 199558 - RNA, 1701 nt, Artificial Sequence
  derived and/or modified CDS sequence (opt5) from hemagglutinin__InfluenzaA__AEO01397
augaaggccauccuggugguccuccuguacaccuucgcuacagccaacgcggacacgcuuugcauuggcuaucacgcuaauaacagcaccgauacaguugacaccgugcuggagaaaaaugugacagucacccauuccgugaacauccucgaagauaagcacaaugggaaacuguguaaacuuagaggaguugcuccccugcaucucggcaagugcaacauugccggguggauccugggaaauccugagugugaaucucugagcacagccuccucuuggagcuacauuguggagaccuccucuagcgacaacggcacgugcuauccgggggauuuuaucgacuacgaagaacuccgggagcagcuguccagcgucucuuccuucgaacgcuuugagaucuuccccaagaccagcucuuggccuaaucacgauuccaacaagggagugacagccgcuuguccccaugccggcgcgaaaucuuuuuauaagaaucuuauuuggcugguuaaaaagggcaacagcuacccuaaacucuccaagagcuauaucaaugacaaggggaaagaagugcugguccuuuggggcauucaccaccccuccaccucugccgaucaacagagccuguaccagaacacagacgcuuacguguucgugggaaccuccagauauagcaagaaauuuaagccugagaucgccauucggccgaaaguccgcgaucaggaggggagaaugaauuacuauuggacgcucguugaacccggagacaagaucacauucgaggcuaccggcaaccugguggugccucgguacgccuuugcgauggaacgcaacgccgggucuggaauuaucaucuccgauacacccguccaugacugcaauaccaccugucaaacaccuaaaggcgcuauuaacacgagccugcccuuccagaauauccacccgauuaccaucggcaagugcccuaaguaugugaaaucuacaaagcucagacuggccaccgggcuucggaacguucccagcauucagucccgcggacuguuuggcgcuaucgccggguucaucgagggaggcuggacagggaugguggacggaugguacggcuaucaucaccagaaugaacaaggcucuggguacgccgcugaucucaaaagcacccagaacgcgauugacgagaucacgaauaaggucaacuccgugauugagaaaaugaauacacaguuuaccgccguuggaaaggaguucaaccaccuggagaagagaaucgaaaaucuuaacaaaaagguggaugacggcuuccuggauauuuggaccuacaaugcugagcuccugguccugcucgaaaacgagcggacacuggacuaucaugauagcaaugugaaaaaccuuuacgagaagguccgcucucagcugaaaaacaaugccaaggaaaucgggaacggauguuuugaguucuaucacaagugcgacaauaccuguauggaauccgugaaaaacggcacauacgauuauccuaaguacagcgaggaagccaaacucaauagagaggagaucgacgggguuaagcuggaaucuacgcggauuuaucaaauccuugcuauuuacuccaccguggccagcucccugguccucgugguuucucugggcgcgaucagcuuuuggaugugcuccaacggaucucugcagugccgcauuuguaucuga

SEQ ID NO: 199559 - RNA, 1701 nt, Artificial Sequence
  derived and/or modified CDS sequence (opt5) from hemagglutinin__InfluenzaA__AEO01398
augaaggccauccuggugguccuccuguacaccuucgcuacagccaacgcggacacgcuuugcauuggcuaucacgcuaauaacagcaccgauacaguugacaccgugcuggagaagaaugugacagucacccauuccgugaaccuccuggaagauaagcacaaugggaaacuuuguaagcugagaggaguugcuccccuccaucugggcaaaugcaacaucgccggguggauucugggaaauccugagugugaaucucucagcacagccuccucuuggagcuacaucguggagaccuccucuagcgacaacggcacgugcuauccgggggauuuuauugacuacgaagaacugcgggagcagcuuuccagcgucucuuccuucgaacgcuuugagaucuuccccaagaccagcucuuggccuaaucacgauuccaacaagggagugacagccgcuuguccccaugccggcgcgaaaucuuuuuauaagaaucugaucuggcucguuaaaaagggcaacagcuacccuaaacuguccaagagcuauauuaaugacaaggggaaagaagugcuuguccuguggggaauccaccaccccuccaccucugccgaucaacagagccucuaccagaacgcugacgccaauguguucgugggcacauccagauacagcaagaaauuuaagccugagauugcuauccggccgaaaguccgcgggcaggagggaagaaugaacuauuacuggacccugguugaacccggcgauaagauuacguucgaggccacagggaaccugguggugccucgguaugcguuugccauggaacgcaaugcuggaucuggcaucauuaucuccgacacccccguccaugauugcaacacaaccugucaaaccccuaaaggcgccaucaauacaagccuccccuuccagaacauucacccgaucacgauugggaagugcccuaaguacgugaaaucuaccaagcugagacuugcuacaggacugcggaauguucccagcauccagucccgcggccucuuuggggccauugccggauucaucgagggcggguggaccggaaugguggacggcugguauggcuaccaucaccagaacgaacaagggucuggauaugcugcggaccugaaaagcacacagaaugccaucgaugagauuaccaacaaggucaauuccgugaucgagaaaaugaacacgcaguuuacagcuguuggcaaggaguucaaucaccuugagaagagaauugaaaaccugaauaaaaagguggacgauggguuccucgacaucuggaccuacaacgccgagcugcugguccuccuggaaaaugagcggacccuugauuaccaugacagcaacgugaaaaaccuguaugagaagguccgcaaucagcucaaaaacaaugccaaggaaauuggaaacggcuguuuugaguucuaccacaagugcgauaauacauguauggaaucugugaaaaacgggaccuaugacuacccuaaguauuccgaggaagcuaaacugaauagagaggagaucgauggcguuaaacuugaaagcacacggaucuaccaaauucuggccaucuauucuacgguggcguccagccucguccuggugguuucccugggagcuauuucuuuuuggaugugcagcaacggcucccuccagugccgcaucuguauuuga

SEQ ID NO: 199560 - RNA, 1701 nt, Artificial Sequence; identical to SEQ ID NO: 199459
  derived and/or modified CDS sequence (opt5) from hemagglutinin__InfluenzaA__AEO01399

SEQ ID NO: 199561 - RNA, 1701 nt, Artificial Sequence; identical to SEQ ID NO: 194741
  derived and/or modified CDS sequence (opt5) from hemagglutinin__InfluenzaA__AEO01402

SEQ ID NO: 199562 - RNA, 1701 nt, Artificial Sequence; identical to SEQ ID NO: 195905
  derived and/or modified CDS sequence (opt5) from hemagglutinin__InfluenzaA__AEO01403

SEQ ID NO: 199563 - RNA, 1701 nt, Artificial Sequence; identical to SEQ ID NO: 194741
  derived and/or modified CDS sequence (opt5) from hemagglutinin__InfluenzaA__AEO01404

SEQ ID NO: 199564 - RNA, 1701 nt, Artificial Sequence
  derived and/or modified CDS sequence (opt5) from hemagglutinin__InfluenzaA__AEO01405
augaaggccauccuggugguccuccuguacaccuucgcuacagccaacgcggacacgcuuugcauuggcuaucacgcuaauaacagcaccgauacaguugacaccgugcuggagaagaaugugacagucacccauuccgugaaccuccuggaagauaagcacaaugggaaacuuuguaagcugagaggaguugcuccccuccaucugggcaaaugcaacaucgccggguggauucugggaaauccugagugugaaucucucagcacagccuccucuuggagcuacaucguggagaccuccucuagcgacaacggcacgugcuauccgggggauuuuauugacuacgaagaacugcgggagcagcuuuccagcgucucuuccuucgaacgcuuugagaucuuccccaagaccagcucuuggccuaaucacgauuccaacaagggagugacagccgcuuguccccaugccggcgcgaaaucuuuuuauaagaaucugaucuggcucguuaaaaagggcaacagcuacccuaaacuguccaagagcuauauuaaugacaaggggaaagaagugcuuguccuguggggaauccaccaccccuccaccucugccgaucaacagagccucuaccagaacgcugacgccuacguguucgugggcacauccagauauagcaagaaauuuaagccugagauugcuauccggccgaaaguccgcgaucaggaggggagaaugaauuacuauuggacccugguugaacccggagacaagauuacguucgaggccacaggcaaccugguggugccucgguacgcguuugccauggaacgcaacgcugggucuggaaucauuaucuccgauacccccguccaugacugcaauacaaccugucaaaccccuaaaggcgccaucaacacaagccuccccuuccagaauauucacccgaucacgauuggcaagugcccuaaguaugugaaaucuaccaagcugagacuugcuacagggcugcggaacguucccagcauccagucccgcggacucuuuggcgccauugccggguucaucgagggaggcuggaccgggaugguggacggaugguacggcuaucaucaccagaaugaacaaggcucuggguacgcugcggaucugaaaagcacacagaacgccaucgacgagauuaccaauaaggucaacuccgugaucgagaaaaugaauacgcaguuuacagcuguuggaaaggaguucaaccaccuugagaagagaauugaaaaucugaacaaaaagguggaugacggcuuccucgauaucuggaccuacaaugccgagcugcugguccuccuggaaaacgagcggacccuugacuaucaugauagcaaugugaaaaaccuguacgagaagguccgcucucagcucaaaaacaaugccaaggaaauugggaacggauguuuugaguucuaucacaagugcgacaauacauguauggaauccgugaaaaacggcaccuacgauuauccuaaguacagcgaggaagcuaaacugaauagagaggagaucgacgggguuaaacuugaaucuacaaugaucuaucaaauucuggccaucuacuccacgguggcgagcucccucguccuggugguuucucugggcgcuauuagcuuuuggaugugcuccaacggaucucuccagugccggaucuguauuuga

SEQ ID NO: 199565 - RNA, 1701 nt, Artificial Sequence
  derived and/or modified CDS sequence (opt5) from hemagglutinin__InfluenzaA__AEO01407
augaaggccauccuggugguccuccuguacaccuucgcuacagccaacgcggacacgcuuugcauuggcuaucacgcuaauaacagcaccgauacaguugacaccgugcuggagaagaaugugacagucacccauuccgugaaccuccuggaagauaagcacaaugggaaacuuuguaagcugagaggaguugcuccccuccaucugggcaaaugcaacaucgccggguggauucugggaaauccugagugugaaucucucagcacagccuccucuuggagcuacaucguggagaccuccucuagcgacaacggcacgugcuauccgggggauuuuauugacuacgaagaacugcgggagcagcuuuccagcgucucuuccuucgaacgcuuugagaucuuccccaagaccagcucuuggccuaaucacgauuccaacaagggagugacagccgcuuguccccaugccggcgcgaaaucuuuuuauaagaaucugaucuggcucguuaaaaagggcaacagcuacccuaaacuguccaagagcuauauuaaugacaaggggaaagaagugcuuguccuguggggaauccaccaccccuccaccucugccgaucaacagagccucuaccagaacgcugacgccuacguguucgugggcacauccagauauagcaagaaauuuaagccugagauugcuauccggccgaaaguccgcgaucaggaggggagaaugaauuacuauuggacccugguugaacccggagacaagauuacguucgaggccacaggcaaccugguggugccucgguacgcguuugccauggaacgcaacgcugggucuggaaucauuaucuccgauacccccguccaugacugcaauacaaccugucaaaccccuaaaggcgccaucaacacaagccuccccuuccagaauauucacccgaucacgauuggcaagugcccuaaguaugugaaaucuaccaagcugagacuugcuacagggcugcggaacguucccagcauccagucccgcggacucuuuggcgccauugccggguucaucgagggaggcuggaccgggaugguggacggaugguacggcuaucaucaccagaaugaacaaggcucuggguacgcugcggaucugaaaagcacacagcacgccaucgacgagauuaccaacaaggucaauuccgugaucgagaaaaugaacacgcaguuuacagcuguuggaaaggaguucaaucaucuugagaagagaauugaaaaccugaauaaaaagguggaugacggcuuccucgauaucuggaccuacaacgccgagcugcugguccuccuggaaaaugagcggacccuugacuaucacgauagcaacgugaaaaaucuguacgagaagguccgcucucagcucaaaaacaacgccaaggaaauugggaauggauguuuugaguucuaucauaagugcgacaacacauguauggaauccgugaaaaauggcaccuacgauuauccuaaguacagcgaggaagcuaaacugaacagagaggagaucaaugggguuaaacuugaaucuacacggaucuaucaaauucuggccaucuacuccacgguggcgagcucccucguccuggugguuucucugggcgcuauuagcuuuuggaugugcuccaacggaucucuccagugccgcaucuguauuuga

SEQ ID NO: 199566 - RNA, 1701 nt, Artificial Sequence
  derived and/or modified CDS sequence (opt5) from hemagglutinin__InfluenzaA__AEO01408
augaaggccauccuggugguccuccuguacaccuucgcuacagccaacgcggacacgcuuugcauuggcuaucacgcuaauaacagcaccgauacaguugacaccgugcuggagaaaaaugugacagucacccauuccgugaaccuccuggaagauaagcacaaugggaaacuuuguaagcugagaggaguugcuccccuccaucugggcaaaugcaacaucgccggguggauucugggaaauccugagugugaaucucucagcacagccuccucuuggagcuacaucguggagaccuccucuagcgacaacggcacgugcuauccgggggauuuuauugacuacgaagaacugcgggagcagcuuuccagcgucucuuccuucgaacgcuuugagaucuuccccaagaccagcucuuggccuaaucacgauuccaacaagggagugacagccgcuuguccccaugccggcgcgaaaucuuuuuauaagaaucugaucuggcucguuaaaaagggcaacagcuacccuaaacuguccaagagcuauauuaaugacaaggggaaagaagugcuuguccuguggggaauccaccaccccuccaccucugccgaucaacagagccucuaccagaacgcugacgccuacguguucgugggcacauccagauauagcaagaaauuuaagccugagauugcuauccggccgaaaguccgcgagcaggaagggagaaugaauuacuauuggacccugguugagcccggagauaagauuacguucgaagccacaggcaaccugguggugccucgguacgcguuugccauggagcgcaacgcugggucuggaaucauuaucuccgacacccccguccaugauugcaauacaaccugucaaaccccuaaaggcgccaucaacacaagccuccccuuccagaauauucacccgaucacgauuggcaagugcccuaaguaugugaaaucuaccaagcugagacuugcuacagggcugcggaacguucccagcauccagucccgcggacucuuuggcgccauugccggguucaucgaaggaggcuggaccgggaugguggacggaugguacggcuaucaucaccagaaugagcaaggcucuggguacgcugcggaccugaaaagcacacagaacgccaucgaugagauuaccaauaaggucaacuccgugaucgaaaagaugaauacgcaguuuacagcuguuggaaaggaguucaaccaccuugaaaagagaauugagaaucugaacaaaaagaucgacgauggcuuccucgacauuuggaccuacaaugccgaacugcuggugcuccuggagaacgagcggacccuugauuaucaugacagcaaugucaaaaaccuguacgaaaaggugcgcucucagcucaaaaacaaugccaaggagaucgggaacggauguuuugaguucuaucacaagugcgauaauacauguauggaguccgucaaaaacggcaccuacgacuauccuaaguacagcgaagaggcuaaacugaauagagaggaaaucgauggggugaaacuugagucuacacggauuuaucaaauccuggccauuuacuccacgguugcgagcucccucgugcuggucgugucucugggcgcuaucagcuuuuggaugugcuccaacggaucucuccagugccgcauuuguaucuga

SEQ ID NO: 199567 - RNA, 1701 nt, Artificial Sequence; identical to SEQ ID NO: 195843
  derived and/or modified CDS sequence (opt5) from hemagglutinin__InfluenzaA__AEO01409

SEQ ID NO: 199568 - RNA, 1701 nt, Artificial Sequence; identical to SEQ ID NO: 199459
  derived and/or modified CDS sequence (opt5) from hemagglutinin__InfluenzaA__AEO01410

SEQ ID NO: 199569 - RNA, 1701 nt, Artificial Sequence; identical to SEQ ID NO: 198160
  derived and/or modified CDS sequence (opt5) from hemagglutinin__InfluenzaA__AEO01411

SEQ ID NO: 199570 - RNA, 1701 nt, Artificial Sequence; identical to SEQ ID NO: 195094
  derived and/or modified CDS sequence (opt5) from hemagglutinin__InfluenzaA__AEO01412

SEQ ID NO: 199571 - RNA, 1701 nt, Artificial Sequence
  derived and/or modified CDS sequence (opt5) from hemagglutinin__InfluenzaA__AEO01413
augaaggccauccuggugguccuccuguacaccuucgcuacagccaacgcggacacgcuuugcauuggcuaucacgcuaauaacagcaccgauacaguugacaccgugcuggagaaaaaugugacagucacccauuccgugaaccuccuggaagauaagcacaaugggaaacuuuguaagcugagaggaguugcuccccuccaucugggcaaaugcaacaucgccggguggauucugggaaauccugagugugaaucucucagcacagccuccucuuggagcuacaucguggagaccuccucuagcgacaacggcacgugcuauccgggggauuuuauugacuacgaagaacugcgggagcagcuuuccagcgucucuuccuucgaacgcuuugagaucuuccccaagaccagcucuuggccuaaucacgauuccaacaagggagugacagccgcuuguccccaugccggcgcgaaaucuuuuuauaagaaucugaucuggcucguuaaaaagggcaacagcuacccuaaacuguccaagagcuauauuaaugacaaggggaaagaagugcuuguccuguggggaauccaccaccccuccaccucugccgaucaacagagccucuaccagaacgcugacgccuacguguucgugggcacauccagauauagcaagaaauuuaagccugagauugcuauccggccgaaaguccgcgaucaggaggggagaaugaauuacuauuggacccugguugaacccggagacaagauuacguucgaggccacaggcaaccugguggugccucgguacgcguuugccauggaacgcaacgcugggucuggaaucauuaucuccgauacccccguccaugacugcaauacaaccugucaaaccccuaaaggcgccaucaacacaagccuccccuuccagaauauucacccgaucacgauuggcaagugcccuaaguaugugaaaucuaccaagcugagacuugcuacagggcugcggaacguucccagcauccagucccgcggacucuuuggcgccauugccggguucaucgagggaggcuggaccgggaugguggacggaugguacggcuaucaucaccagaaugaacaaggcucuggguacgcugcggaucugaaaagcacacagaacgccaucgacaagauuaccaauaaagucaacuccgugaucgagaagaugaauacgcaguuuacagcuguuggaaaggaguucaaccaccuugagaaaagaauugagaaucugaacaagaaaguggaugacggcuuccucgauaucuggaccuacaaugccgaacugcugguccuccuggagaacgaacggacccuugacuaucaugauagcaaugugaagaaccuguacgagaaaguccgcucucagcucaaguccaacgccaaggagauugggaauggauguuuugaguucuaucacaaaugcgacaacacauguauggaaagcgugaagaauggcaccuacgauuauccuaaauacucugaagaggcuaagcugaacagagaagagaucgacgggguuaaacuugaguccacacggaucuaucaaauucuggccaucuacagcacgguggcguccucucucguccuggugguuagccugggcgcuauuuccuuuuggaugugcucuaauggaagccuccagugccgcaucuguauuuga

SEQ ID NO: 199572 - RNA, 1701 nt, Artificial Sequence
  derived and/or modified CDS sequence (opt5) from hemagglutinin__InfluenzaA__AEO01414
augaaggccauccuggugguccuccuguacaccuucgcuacagccaacgcggacacgcuuugcauuggcuaucacgcuaauaacagcaccgauacaguugacaccgugcuggagaagaaugugacagucacccauuccgugaaccuccuggaagauaagcacaaugggaaacuuuguaagcugagaggaguugcuccccuccaucugggcaaaugcaacaucgccggguggauucugggaaauccugagugugaaucucucagcacagccuccucuuggagcuacaucguggagaccuccucuagcgacaacggcacgugcuauccgggggauuuuauugacuacgaagaacugcgggagcagcuuuccagcgucucuuccuucgaacgcuuugagaucuuccccaagaccagcucuuggccuaaucacgauuccaacaagggagugacagccgcuuguccccaugccggcgcgaaaucuuuuuauaagaaucugaucuggcucguuaaaaagggcaacagcuacccuaaacuguccaagagcuauauuaaugacaaggggaaagaagugcuuguccuguggggaauccaccaccccuccaccucugccgaucaacagagccucuaccagaacgcugacgccuacguguucgugggcacauccagauauagcaagaaauuuaagccugagauugcuauccggccgaaaguccgcgaucaggaggggagaaugaauuacuauuggacccugguugaacccggagacaagauuacguucgaggccacaggcaaccugguggugccucgguacgcguuugccauggaacgcaacaccgggucuggaaucauuaucuccgauacacccguccaugacugcagcaccaccugucaaacaccuaaaggcgcuaucaauacgucucuccccuuccagaacgugcacccgauuaccaucggcaagugcccuaaguauguuaaaagcacaaagcugagacuugccaccgggcugcggaaugugcccuccauucagucucgcggacucuuuggcgcuaucgccggguucauugagggaggcuggacagggauggucgacggaugguacggcuaucaucaccagaacgaacaaggcagcggguacgccgcugaucugaaauccacccagaaugcgaucgacgagaucacgaacaaggugaauagcguuauugagaaaaugaacacacaguuuaccgccgugggaaaggaguucaaucaccuugagaagagaaucgaaaaccugaauaaaaaggucgaugacggcuuccucgauauuuggaccuacaacgcugagcugcuggugcuccuggaaaaugagcggacacuugacuaucaugauucuaacgucaaaaaucuguacgagaaggugcgcucccagcucaaaaacaacgccaaggaaaucgggaauggauguuuugaguucuaucacaagugcgacaacaccuguauggaaagcguuaaaaauggcacauacgauuauccuaaguacucugaggaagccaaacugaacagagaggagauugacggggugaaacuugaauccacgcggaucuaucaaauccuggcuauuuacagcaccgucgccuccucucucgugcugguugugagccugggcgcgaucuccuuuuggaugugcucuaauggaagccuccagugccgcauuuguaucuga

SEQ ID NO: 199573 - RNA, 1701 nt, Artificial Sequence; identical to SEQ ID NO: 198372
  derived and/or modified CDS sequence (opt5) from hemagglutinin__InfluenzaA__AEO01416

SEQ ID NO: 199574 - RNA, 1701 nt, Artificial Sequence; identical to SEQ ID NO: 195905
  derived and/or modified CDS sequence (opt5) from hemagglutinin__InfluenzaA__AEO01418

SEQ ID NO: 199575 - RNA, 1701 nt, Artificial Sequence; identical to SEQ ID NO: 195905
  derived and/or modified CDS sequence (opt5) from hemagglutinin__InfluenzaA__AEO01419

SEQ ID NO: 199576 - RNA, 1701 nt, Artificial Sequence
  derived and/or modified CDS sequence (opt5) from hemagglutinin__InfluenzaA__AEO01420
augaaggccauccuggugguccuccuguacaccuucgcuacagccaacgcggacacgcuuugcauuggcuaucacgcuaauaacagcaccgauacaguugacaccgugcuggagaagaaugugacagucacccauuccgugaaccuccuggaauacaagcacaaugggaaacuuuguaagcugagaggaguugcuccccuccaucugggcaaaugcaacaucgccggguggauucugggaaauccugagugugaaucucucagcacagccuccucuuggagcuauaucguggagaccuccaacucugauaauggcacgugcuacccgggggacuuuauugauuaugaagaacugcgggagcagcuuagcuccgucagcucuuucgaacgcuuugagaucuuccccaagaccuccagcuggccuaaccacgacucuaauaagggagugacagccgcuuguccccaugccggcgcgaaauccuuuuacaagaaccugaucuggcucguuaaaaagggcaauagcuauccuaaacugucuaaguccuacauuaacgauaaggggaaagaagugcuuguccuguggggaauccaccaccccagcaccuccgccgaccaacagucucucuaccagaaugcugaugccuauguguucgugggcacaagcagauacuccaagaaauuuaagccugagauugcuauccggccgaaaguccgcgaccaggaggggagaaugaacuauuacuggacccugguugaacccggagauaagauuacguucgaggccacaggcaaccugguggugccucgguaugcguuugccauggaacgcaaugcugggagcggaaucauuaucucugacacccccguccaugauugcaacacaaccugucaaaccccuaaaggcgccaucaauacaucccuccccuuccagaacauucacccgaucacgauuggcaagugcccuaaguacgugaaaagcaccaagcugagacuugcuacagggcugcggaauguucccucuauccagagccgcggacucuuuggcgccauugccggguucaucgagggaggcuggaccgggaugguggacggaugguauggcuaccaucaccagaacgaacaaggcuccggguacgcugcggaccugaaaucuacacagaaugccaucgaugagauuaccaacaaggucaauagcgugaucgagaaaaugaacacgcaguuuacagcuguuggaaaggaguucaaucaccuugagaagagaauugaaaaccugaauaaaaagguggacgauggcuuccucgacaucuggaccuauaacgccgagcugcugguccuccuggaaaaugagcggacccuugauuaccaugacuccaacgugaaaaaccuguaugagaagguccgcagccagcucaaaaauaacgccaaggaaauugggaauggauguuuugaguucuaccacaagugcgauaacacauguauggaaucugugaaaaauggcaccuaugacuacccuaaguauuccgaggaagcuaaacugaacagagaggagaucgaugggguuaaacuugaaagcacacggaucuaccaaauucuggccaucuacucuacgguggcguccagccucguccuggugguuucccugggcgcuauuucuuuuuggaugugcagcaauggaucccuccagugccgcaucuguauuuga

SEQ ID NO: 199577 - RNA, 1701 nt, Artificial Sequence
  derived and/or modified CDS sequence (opt5) from hemagglutinin__InfluenzaA__AEO01421
augaaggccauccuggugguccuccuguacaccuucgcuacagccaacgcggacacgcuuugcauuggcuaucacgcuaauaacagcaccgauacaguugacaccgugcuggagaaaaaugugacagucacccauuccgugaaccuccuggaagauaagcacaaugggaaacuuuguaagcugagaggaguugcgccccuccaucugggcaaaugcaacaucgccggguggauucugggaaauccugagugugaaucucucagcacagcuuccucuuggagcuacaucguggagaccuccucuagcgacaacggcacgugcuauccgggggauuuuauugacuacgaagaacugcgggagcagcuuuccagcgucucuuccuucgaaaaguuugagaucuuccccaagaccagcucuuggccuaaucacgauuccaacaaaggagugacagccgcuuguccccaugccggcgccaagagcuuuuauaaaaaucugaucuggcucguuaagaaaggcaacucuuacccuaagcuguccaagagcuauauuaaugacaaagggaaggaagugcuuguccuguggggaauccaccaccccuccaccucugccgaucaacagagccucuaccagaacgcugacgccuacguguucgugggcacaucccgcuauagcaaaaaguuuaaaccugagauugcuaucagaccgaagguccgggaucaggaggggcgcaugaauuacuauuggacccugguugaacccggagacaaaauuacguucgaggccacaggcaaccugguggugccuagauacgcguuugccauggaacggaacgcugggucuggaaucauuaucuccgauacccccguccaugacugcaauacaaccugucaaaccccuaagggcgccaucaacacaagccuccccuuccagaauauucacccgaucacgauuggcaagugcccuaaauaugugaagucuaccaaacugcgccuugcuacagggcugagaaacguucccagcauccagucccggggacucuuuggcgccauugccggguucaucgagggaggcuggaccgggaugguggacggaugguacggcuaucaucaccagaaugaacaaggcucuggguacgcugcggaucuuaagagcacacagaacgccaucgacaaaauuaccaauaaggucaacuccgugaucgagaagaugaauacgcaguuuacagcuguuggaaaagaguucaaccaccuugaaaagcgcauugagaaucugaacaaaaagguggaugacggcuuccucgauaucuggaccuacaaugccgaacugcugguccuccuggagaacgaaagaacccuugacuaucaugauagcaaugugaaaaaccuguacgagaagguccggucucagcucaagaacaaugccaaagagauugggaacggauguuuugaguucuaucacaagugcgacaauacauguauggaguccgugaaaaacggcaccuacgauuauccuaaguacagcgaagaggcuaaacugaaucgcgaagagaucgacgggguuaagcuggagucuacaagaaucuaucaaauucuggccaucuacuccacgguggcgagcucccucguccuggugguuucucugggcgcuauuagcuuuuggaugugcuccaacggaucucuccagugccggaucuguauuuga

SEQ ID NO: 199578 - RNA, 1701 nt, Artificial Sequence
  derived and/or modified CDS sequence (opt5) from hemagglutinin__InfluenzaA__AEO01422
augaaggccauccuggugguccuccuguacaccuucgcuauugccaacgcggacacacuuugcaucggcuaucacgcuaauaacagcacggauaccguugacacagugcuggagaaaaaugugaccgucacacauuccgugaaccuccuggaagauaagcacaaugggaaacuuuguaagcugagaggaguugcuccccuccaucugggcaaaugcaacauugccggguggauccugggaaauccugagugugaaucucucagcaccgccuccucuuggagcuacauuguggagacauccucuagcgacaacggaaccugcuauccgggggauuuuaucgacuacgaagaacugcgggagcagcuuuccagcgucucuuccuucgaacgcuuugagaucuuccccaagacgagcucuuggccuaaucacgauuccaacaagggagugaccgccgcuuguccccaugccggcgcgaaaucuuuuuauaagaaucugauuuggcucguuaaaaagggcaaccuguacccuaaacuuagcaaguccuauaucaaugacaaggggaaagaagugcugguccucuggggcauucaccaccccagcacauccgccgaucaacagucucuguaccagaacgcugacgccuacguguucgugggcaccagcagauauuccaagaaauuuaagccugagaucgcuauucggccgaaaguccgcgaucaggaggggagaaugaauuacuauuggacacugguugaacccggagacaagaucaccuucgaggccacgggcaaccucguggugccucgguacgcguuugccauggaacgcaacgcugggagcggaauuaucaucucugauacacccguccaugacugcaauaccacaugucaaaccccuaaaggcgccauuaacaccucccugcccuuccagaauauccacccgauuacaaucggcaagugcccuaaguaugugaaaagcacgaaacuuagacuggcuaccgggcuccggaacguucccucuauucagagccgcggacuguuuggcgccaucgccggguucaucgagggaggcuggacagggaugguggacggaugguacggcuaucaucaccagaaugaacaaggcuccggguacgcugcggaucuuaagucuacccagcacgccauugacgagaucacaaacaaggucaauagcgugauugagaaaaugaacacccaguuuacggcuguuggaaaggaguucaaucaucuggagaagagaaucgaaaaccucaauaaaaagguggaugacggcuuccuggauauuuggacauacaacgccgagcugcucguccugcuugaaaaugagcggacccuggacuaucacgauuccaacgugaaaaaucucuacgagaagguccgcagccagcugaaaaacaacgccaaggaaaucgggaauggauguuuugaguucuaucauaagugcgacaacaccuguauggaaucugugaaaaauggcacauacgauuauccuaaguacuccgaggaagcuaaacuuaacagagaggagaucaaugggguuaagcuggaaagcacccggauuuaucaaauccucgccauuuacucuacaguggcguccagccugguccuggugguuucccucggcgcuaucucuuuuuggaugugcagcaacggaucccugcagugccgcauuuguaucuga

SEQ ID NO: 199579 - RNA, 1701 nt, Artificial Sequence
  derived and/or modified CDS sequence (opt5) from hemagglutinin__InfluenzaA__AEO01423
augaaggccauccugauugugcuccuguacaccuucgcuacagccaacgcggacacgcuuugcaucggcuaucacgcuaauaacagcaccgauacagucgacaccguucuggagaagaaugugacagugacccauuccgucaaccuccuggaagauaagcacaaugggaaacuuuguaagcugagaggaguggcuccccuccaucugggcaaaugcaacauugccggguggauccugggaaauccugagugugaaucucucagcacagccuccucuuggagcuacauuguugagaccuccucuagcgacaacggcacgugcuauccgggggauuuuaucgacuacgaagaacugcgggagcagcuuuccagcgugucuuccuucgaacgcuuugagaucuuccccaagaccagcucuuggccuaaucacgauuccaacaagggagucacagccgcuuguccccaugccggcgcgaaaucuuuuuauaagaaucugauuuggcucgugaaaaagggcaacagcuacccuaaacuguccaagagcuauaucaaugacaaggggaaagaaguucuugugcuguggggcauucaccaccccuccaccucugccgaucaacagagccucuaccagaacgcugacgccuacgucuucgugggaacauccagauauagcaagaaauuuaagccugagaucaccauucggccgaaagugcgcgaucaggaggggagaaugaauuacuauuggacgcuggucgaacccggagacaagaucacauucgaggcuaccggcaaccugguugugccucgguacgccuuugcgauggaacgcaacgccgggucuggaauuaucaucuccgauacacccgugcaugacugcaauaccaccugucaaacaccuaaaggcgcuauuaacacgagccuccccuuccagaauauccacccgauuaccaucggcaagugcccuaaguaugucaaaucuacaaagcugagacuugccaccgggcugcggaacgugcccagcauucagucccgcggacucuuuggcgcuaucgccggguucaucgagggaggcuggacagggaugguugacggaugguacggcuaucaucaccagaaugaacaaggcucuggguacgccgcugaucugaaaagcacccagaacgcgauugacgagaucacgaauaaggugaacuccgucauugagaaaaugaauacacaguuuaccgccgugggaaaggaguucaaccaccuugagaagagaaucgaaaaucugaacaaaaagguugaugacggcuuccucgauauuuggaccuacaaugcugagcugcuggugcuccuggaaaacgagcggacacuugacuaucaugauagcaaugucaaaaaccuguacgagaaggugcgcucucagcucaaaaacaaugccaaggaaaucgggaacggauguuuugaguucuaucacaagugcgacaauaccuguauggaauccgucaaaaacggcacauacgauuauccuaaguacagcgaggaagccaaacugaauagagaggagaucgacggggugaaacuugaaucuacgcggauuuaucaaauccuggcuauuuacuccaccguugccagcucccucgugcuggucgugucucugggcgcgaucagcuuuuggaugugcuccaacggaucucuccagugccgcauuuguaucuga

SEQ ID NO: 199580 - RNA, 1701 nt, Artificial Sequence; identical to SEQ ID NO: 199577
  derived and/or modified CDS sequence (opt5) from hemagglutinin__InfluenzaA__AEO01424

SEQ ID NO: 199581 - RNA, 1701 nt, Artificial Sequence; identical to SEQ ID NO: 199577
  derived and/or modified CDS sequence (opt5) from hemagglutinin__InfluenzaA__AEO01425

SEQ ID NO: 199582 - RNA, 1701 nt, Artificial Sequence; identical to SEQ ID NO: 194741
  derived and/or modified CDS sequence (opt5) from hemagglutinin__InfluenzaA__AEO01426

SEQ ID NO: 199583 - RNA, 1701 nt, Artificial Sequence
  derived and/or modified CDS sequence (opt5) from hemagglutinin__InfluenzaA__AEO01427
augaaggccauccuggugguccuccuguacaccuucgcuacagccaacagcgacacgcuuugcauuggcuaucacgcgaauaacuccaccgauacaguugacaccgugcuggagaaaaaugugacagucacccauucugugaaccuccuggaagauaagcacaaugggaaacuuuguaagcugagaggaguugcuccccuccaucugggcaaaugcaacaucgccggguggauucugggaaauccugagugugaaagccucuccacagccucuagcugguccuacaucguggagaccucuagcuccgacaacggcacgugcuauccgggggauuuuauugacuacgaagaacugcgggagcagcuuagcucugucuccagcuucgaacgcuuugagaucuuccccaagaccucuuccuggccuaaucacgauagcaacaagggagugacagcugccuguccccaugcuggcgccaaaucuuuuuauaagaaucugaucuggcucguuaaaaagggcaacuccuacccuaaacugagcaaguccuauauuaaugacaaggggaaagaagugcuuguccuguggggaauccaccaccccucuaccagcgcggaucaacagucccucuaccagaacgccgacgcuuacguguucgugggcacaagcagauauucuaagaaauuuaagccugagauugccauccggccgaaaguccgcgaucaggaggggagaaugaauuacuauuggacccugguugaacccggagacaagauuacguucgaggcuacaggcaaccugguggugccucgguacgccuuugcgauggaacgcaacgccggguccggaaucauuaucagcgauacccccguccaugacugcaauacaaccugucaaaccccuaaaggcgcuaucaacacaucucuccccuuccagaauauucacccgaucacgauuggcaagugcccuaaguaugugaaaagcaccaagcugagacuugccacagggcugcggaacguucccuccauccagucucgcggacucuuuggcgcuauugccggguucaucgagggaggcuggaccgggaugguggacggaugguacggcuaucaucaccagaaugaacaaggcagcggguacgccgcugaucugaaauccacacagaacgcgaucgacaagauuaccaauaaagucaacagcgugaucgagaagaugaauacgcaguuuacagccguuggaaaggaguucaaccaccuugagaaaagaauugagaaucugaacaagaaaguggaugacggcuuccucgauaucuggaccuacaaugcugaacugcugguccuccuggagaacgaacggacccuugacuaucaugauucuaaugugaagaaccuguacgagaaaguccgcucccagcucaagaacaaugccaaggagauugggaacggauguuuugaguucuaucacaaaugcgacaauacauguauggaaagcgugaagaacggcaccuacgauuauccuaaauacucugaagaggccaagcugaauagagaagagaucgacgggguuaaacuugaguccacacggaucuaucaaauucuggcuaucuacagcacgguggccuccucucucguccuggugguuagccugggcgcgauuuccuuuuggaugugcucuaacggaagccuccagugccgcaucuguauuuga

SEQ ID NO: 199584 - RNA, 1701 nt, Artificial Sequence
  derived and/or modified CDS sequence (opt5) from hemagglutinin__InfluenzaA__AEO01428
augaaggccauccuggugguccuccuguacaccuucgcuacagccaacgcggacacgcuuugcauuggcuaucacgcuaauaacagcaccgauacaguugacaccgugcuggagaaaaaugugacagucacccauuccgugaaccuccuggaagauaagcacaaugggaaacuuuguaagcugagaggaguugcuccccuccaucugggcaaaugcaacaucgccggguggauucugggaaauccugagugugaaucucucagcacagccuccucuuggagcuacaucguggagaccuccucuagcgacaacggcacgugcuauccgggggauuuuauugacuacgaagaacugcgggagcagcuuuccagcgucucuuccuucgaacgcuuugagaucuuccccaagaccagcucuuggccugaucacgacuccaauaagggagugacagccgcuuguccccaugccggcgcgaaaucuuuuuauaagaaccugaucuggcucguuaaaaagggcaauagcuacccuaaacuguccaagagcuauauuaacgauaaggggaaagaagugcuuguccuguggggaauccaccaccccuccaccucugccgaccaacagagccucuaccagaaugcugaugccuacguguucgugggcacauccagauauagcaagaaauuuaagccugagauugcuauccggccgaaaguccgcgaccaggaggggagaaugaacuacuauuggacccugguugaacccggagauaagauuacguucgaggccacaggcaaucugguggugccucgguacgcguuugccauggaacgcaacgcugggucuggaaucauuaucuccgacacccccguccaugacugcaacacaaccugucaaaccccuaaaggcgccaucaauacaagccuccccuuccagaacauucacccgaucacgauuggcaagugcccuaaguaugugaaaucuaccaagcugagaauggcuacagggcuucggaauguucccagcauccagucccgcggacuguuuggcgccauugccggguucaucgagggaggcuggaccgggaugguggauggaugguacggcuaucaucaccagaacgaacaaggcucuggguacgcugcggaccucaaaagcacacagaaugccaucgaugagauuaccaacaaggucaauuccgugaucgagaaaaugaacacgcaguuuacagcuguuggaaaggaguucaaucaccuggagaagagaauugaaaaccuuaauaaaaagguggacgauggcuuccuggacaucuggaccuacaacgccgagcuccugguccugcucgaaaaugagcggacccuggauuaucaugacagcaacgugaaaaaucuuuacgagaagguccgcucucagcugaaaaacaacgccaaggaaauugggaauggauguuuugaguucuaucacaagugcgauaacacauguauggaauccgugaaaaauggcaccuacgacuauccuaaguacagcgaggaagcuaaacucaacagagaggagaucgaugggguuaagcuggaaucuacacggaucuaucaaauucuugccaucuacuccacgguggcgagcucccugguccucgugguuucucugggcgcuauuagcuuuuggaugugcuccaauggaucucugcagugccgcaucuguauuuga

SEQ ID NO: 199585 - RNA, 1701 nt, Artificial Sequence; identical to SEQ ID NO: 195905
  derived and/or modified CDS sequence (opt5) from hemagglutinin__InfluenzaA__AEO01429

SEQ ID NO: 199586 - RNA, 1701 nt, Artificial Sequence
  derived and/or modified CDS sequence (opt5) from hemagglutinin__InfluenzaA__AEO01430
augaaggccauccuggugguccuccuguacaccuucgcuacagccaacgcggacacgcuuugcauuggcuaucacgcuaauaacagcaccgauacaguugacaccgugcuggagaaaaaugugacagucacccauuccgugaaccuccuggaagauaagcacaaugggaaacuuuguaagcugagaggaguugcuccccuccaucugggcaaaugcaacaucgccggguggauucugggaaauccugagugugaaucucucagcacagccuccucuuggagcuacaucguggagaccuccucuagcgacaacggcacgugcuauccgggggauuuuauugacuacgaagaacugcgggagcagcuuuccagcgucucuuccuucgaacgcuuugagaucuuccccaagaccagcucuuggccuaaucacgauuccaacaagggagugacagccgcuuguccccaugacggcgccaagagcuuuuauaagaaucugaucuggcucguuaaaaagggcaacucuuacccuaaacuguccaagagcuauauuaaugauaaggggaaagaagugcuuguccuguggggaauccaccaccccuccaccucugcggaccaacagagccucuaccagaacgccgaugcuuacguguucgugggcacauccagauauagcaagaaauuuaagccugagauugccauccggccgaaaguccgcgaccaggaggggagaaugaauuacuauuggacccugguugaacccggagauaagauuacguucgaggcuacaggcaaccugguggugccucgguacgccuuugcgauggaacgcaacgccgggucuggaaucauuaucuccgacacccccguccaugacugcaauacaaccugucaaaccccuaaaggcgcuaucaacacaagccuccccuuccagaauauucacccgaucacgauuggcaagugcccuaaguaugugaaaucuaccaagcugagacuugccacagggcugcggaacguucccagcauccagucccgcggacucuuuggcgcuauugccggguucaucgagggaggcuggaccgggaugguggauggaugguacggcuaucaucaccagaaugaacaaggcucuggguacgccgcugaccugaaaagcacacagaacgcgaucgaugagauuaccaauaaggucaacuccgugaucgagaaaaugaauacgcaguuuacagccguuggaaaggaguucaaccaccuugagaagagaauugaaaaucugaacaaaaagguggacgauggcuuccucgacaucuggaccuacaaugcugagcugcugguccuccuggaaaacgagcggacccuugauuaucaugacagcaaugugaaaaaccuguacgagaagguccgcucucagcucaaaaacaaugccaaggaaauugggaacggauguuuugaguucuaucacaagugcgauaauacauguauggaauccgugaaaaacggcaccuacgacuauccuaaguacagcgaggaagccaaacugaauagagaggagaucgaugggguuaaacuugaaucuacacggaucuaucaaauucuggcuaucuacuccacgguggccagcucccucguccuggugguuucucugggcgcgauuagcuuuuggaugugcuccaacggaucucuccagugccgcaucuguauuuga

SEQ ID NO: 199587 - RNA, 1701 nt, Artificial Sequence; identical to SEQ ID NO: 199459
  derived and/or modified CDS sequence (opt5) from hemagglutinin__InfluenzaA__AEO01431

SEQ ID NO: 199588 - RNA, 1701 nt, Artificial Sequence; identical to SEQ ID NO: 194741
  derived and/or modified CDS sequence (opt5) from hemagglutinin__InfluenzaA__AEO01432

SEQ ID NO: 199589 - RNA, 1701 nt, Artificial Sequence
  derived and/or modified CDS sequence (opt5) from hemagglutinin__InfluenzaA__AEO01434
augaaggccauccuggugguccuccuguacaccuucgcuacagccaacgcggacacgcuuugcauuggcuaucacgcuaauaacagcaccgauacaguugacaccgugcuggagaaaaaugugacagucacccauuccgugaaccuccuggaagauaagcacaaugggaaacuuuguaagcugagaggaguugcgccccuccaucugggcgagugcaacaucgccggguggauucugggaaauccugaaugugagucucucagcacagcuuccucuuggagcuacaucguggaaaccuccucuagcgacaacggcacgugcuauccgggggauuuuauugacuacgaggagcugcgggaacagcuuuccagcgucucuuccuucgagcgcuuugaaaucuuccccaaaaccagcucuuggccuaaucacgauuccaacaagggagugacagccgcuuguccccaugccggcgccaagagcuuuuauaaaaaucugaucuggcucguuaagaaaggcaacucuuacccuaagcugaauaaauccuauauuaacgacaaggggaaggaggugcuuguccuguggggaauccaccaccccagcaccuccgccgaucaacagucucucuaccagaaugcugacgccuacguguucgugggcacaagcagauauuccaaaaaguuuaaaccugagauugcuauccggccgaagguccgcgaucaggaagggagaaugaacuacuauuggacccugguugagcccggagacaaaauuacguucgaagccacaggcaaccugguggugccucgguacgcguuugccauggagcgcaaugcugggagcggaaucauuaucucugauacccccguccaugacugcaacacaaccugucaaaccccuaagggcgccaucaauacaucccuccccuuccagaacauucacccgaucacgauuggcgaaugcccuaaauauguuaagagcaccaagcugagacuugcuacagggcugcggaaugugcccucuauccagagccgcggacucuuuggcgccauugccggguucaucgagggaggcuggaccgggaugguggacggaugguacggcuaucaucaccagaacgagcaaggcuccggguacgcugcggaucugaaaucuacacagaaugccaucgacaagauuaccaacaaagucaauagcgugaucgaaaagaugaacacgcaguuuacagcuguuggaaaagaguucaaucaccuugaaaagagaauugagaaccugaauaagaaaguggaugacggcuuccucgauaucuggaccuacaacgccgaacugcugguccuccuggagaaugagcggacccuugacuaucaugauuccaacgugaagaaccuguacgaaaaaguccgcagccagcucaagaauaacgccaaagagauugggaauggauguuuugaguucuaucacaagugcgacaacacauguauggaaucugugaagaauggcaccuacgauuauccuaaauacuccgaagaggcuaagcugaacagagaggaaaucgacgggguuaaacuugagagcacacggaucuaucaaauucuggccaucuacucuacgguggcguccagccucguccuggugguuucccugggcgcuauuucuuuuuggaugugcagcaauggaucccuccagugccgcaucuguauuuga

SEQ ID NO: 199590 - RNA, 1701 nt, Artificial Sequence
  derived and/or modified CDS sequence (opt5) from hemagglutinin__InfluenzaA__AEO01435
augaaggccauccuggugguccuccuguacaccuucgcuacagccaacgcggacacgcuuugcauuggcuaucacgcuaauaacagcaccgauacaguugacaccgugcuggagaaaaaugugacagucacccauuccgugaaccuccuggaagauaagcacaaugggaaacuuuguaagcugagaggaguugcuccccuccaucugggcaaaugcaacaucgccggguggauucugggaaauccugagugugaaucucucagcacagccuccucuuggagcuacaucguggagaccuccucuagcgacaacggcacgugcuauccgggggauuuuauugacuacgaagaacugcgggagcagcuuuccagcgucucuuccuucgaacgcuuugagaucuuccccaagaccagcucuuggccuaaucacgauuccaacaagggagugacagccgcuuguccccaugccggcgcgaaaucuuuuuauaagaaucugaucuggcucguuaaaaagggcaacagcuacccuaaacuguccaagagcuauauuaaugacaaggggaaagaagugcuuguccuguggggaauccaccaccccuccaccucugccgaucaacagagccucuaccagaacgcugacgccuacguguucgugggcacauccagauauagcaagaaauuuaagccugagauugcuauccggccgaaaguccgcgaucaggaggggagaaugaauuacuauuggacccugguugaacccggagacaagauuacguucgaggccacaggcaaccugguggugccucgguacgcguuugccauggaacgcaacgcugggucuggaaucauuaucuccgauacccccgucuaugacugcaauacaaccugucaaaccccuaaaggcgccaucaacacaagccuccccuuccagaauauucauccgaucacgauuggcaagugcccuaaguacgugaaaucuaccaagcugagacuugcuacagggcugcggaacguucccagcauccagucccgcggacucuuuggcgccauugccggguucaucgagggaggcuggaccgggaugguggacggaugguauggcuaccaccaucagaaugaacaaggcucuggguacgcugcggaucugaaaagcacacagaacgccaucgacaagauuaccaauaaagucaacuccgugaucgagaagaugaauacgcaguuuacagcuguuggaaaggaguucaaccaccuugagaaaagaauugagaaucugaacaagaaaguggaugacggcuuccucgauaucuggaccuauaaugccgaacugcugguccuccuggagaacgaacggacccuugacuaccacgauagcaaugugaagaaccuguaugagaaaguccgcaaccagcucaagaauaacgccaaggagauugggaauggauguuuugaguucuaccauaaaugcgacaacacauguauggaaucugugaagaauggcaccuaugauuacccuaaauauuccgaagaggcuaagcugaacagagaagagaucgacgggguuaaacuugagagcacacggaucuaccaaauucuggccaucuacucuacgguggcguccagccucguccuggugguuucccugggcgcuauuucuuuuuggaugugcagcaauggaucccuccagugccgcaucuguauuuga

SEQ ID NO: 199591 - RNA, 1701 nt, Artificial Sequence; identical to SEQ ID NO: 199577
  derived and/or modified CDS sequence (opt5) from hemagglutinin__InfluenzaA__AEO01436

SEQ ID NO: 199592 - RNA, 1701 nt, Artificial Sequence; identical to SEQ ID NO: 199459
  derived and/or modified CDS sequence (opt5) from hemagglutinin__InfluenzaA__AEO01437

SEQ ID NO: 199593 - RNA, 1701 nt, Artificial Sequence; identical to SEQ ID NO: 199510
  derived and/or modified CDS sequence (opt5) from hemagglutinin__InfluenzaA__AEO01438

SEQ ID NO: 199594 - RNA, 1701 nt, Artificial Sequence; identical to SEQ ID NO: 195094
  derived and/or modified CDS sequence (opt5) from hemagglutinin__InfluenzaA__AEO01440

SEQ ID NO: 199595 - RNA, 1701 nt, Artificial Sequence
  derived and/or modified CDS sequence (opt5) from hemagglutinin__InfluenzaA__AEO01441
augaaggccauccuggugguccuccuguacaccuucgcuacagccaacgcggacacgcuuugcauuggcuaucacgcuaauaacagcaccgauacaguugacaccgugcuggagaaaaaugugacagucacccauuccgugaaccuccuggaagauaagcacaaugggaaacuuuguaagcugagaggaguugcuccccuccaucugggcaaaugcaacaucgccggguggauucugggaaauccugagugugaaucucucagcacagccuccucuuggagcuacaucguggagaccuccucuagcgacaacggcacgugcuauccgggggauuuuauugacuacgaagaacugcgggagcagcuuuccagcgucucuuccuucgaacgcuuugagaucuuccccaagaccagcucuuggccuaaucacgauuccaacaagggagugacagccgcuuguccccaugccggcgcgaaaucuuuuuauaagaaucugaucuggcucguuaaaaagggcaacagcuacccuaaacuguccaagagcuauauuaaugacaaggggaaagaagugcuuguccuguggggaauccaccaccccuccaccucugccgaucaacagagccucuaccagaacgcugacgccuacguguucgugggcacauccagauauagcaagaaauuuaagccugagauugcuauccggccgaaaguccgcgaucaggaggggagaaugaauuacuauuggacccugguugaacccggagacaagauuacguucgaggccacaggcaaccugguggugccucgguacgcguuugccauggaacgcaacgaugggucuggaaucauuaucuccgacacccccguccaugacugcaauacaaccugucaaaccccuaaaggcgcuaucaacacaagccuccccuuccagaauauucacccgaucacgauuggcaagugcccuaaguaugugaaaucuaccaagcugagacuugccacagggcugcggaacguucccagcauccagucccgcggacucuuuggcgcuauugccggguucaucgagggaggcuggaccgggaugguggauggaugguacggcuaucaucaccagaaugaacaaggcucuggguacgccgcugaccugaaaagcacacagaacgcgaucgauaagauuaccaauaaagucaacuccgugaucgagaagaugaauacgcaguuuacagccguuggaaaggaguucaaccaccuugagaaaagaauugagaaucugaacaagaaaguggacgauggcuuccucgacaucuggaccuacaaugcugaacugcugguccuccuggagaacgaacggacccuugauuaucaugacagcaaugugaagaaccuguacgagaaaguccgcucucagcucaagaacaaugccaaggagauugggaacggauguuuugaguucuaucacaaaugcgauaauacauguauggaauccgugaagaacggcaccuacgacuauccuaaauacagcgaagaggccaagcugaauagagaagagaucgaugggguuaaacuugagucuacacggaucuaucaaauucuggcuaucuacuccacgguggccagcucccucguccuggugguuucucugggcgcgauuagcuuuuggaugugcuccaacggaucucuccagugccgcaucuguauuuga

SEQ ID NO: 199596 - RNA, 1701 nt, Artificial Sequence; identical to SEQ ID NO: 196161
  derived and/or modified CDS sequence (opt5) from hemagglutinin__InfluenzaA__AEO01442

SEQ ID NO: 199597 - RNA, 1701 nt, Artificial Sequence
  derived and/or modified CDS sequence (opt5) from hemagglutinin__InfluenzaA__AEO01443
augaaggccauccuggugguccuccuguacaccuucgcuacagccaacgcggacacgcuuugcauuggcuaucacgcuaauaacagcaccgauacaguugacaccgugcuggagaaaaaugugacagucacccauuccgugaaccuccuggaagauaagcacaaugggaaacuuuguaagcugagaggaguugcuccccuccaucugggcaaaugcaacaucgccggguggauucugggaaauccugagugugaaucucucagcacagccuccucuuggagcuacaucguggagaccuccucuagcgacaacggcacgugcuauccgggggauuuuauugacuacgaagaacugcgggagcagcuuuccagcgucucuuccuucgaacgcuuugagaucuuccccaagaccagcucuuggccuaaucacgauuccaacaagggagugacagccgcuuguccccaugccggcgcgaaaucuuuuuauaagaaucugaucuggcucguuaaaaaggaaaacagcuacccuaaacuguccaagagcuauauuaaugacaagggcaaagaggugcuuguccugugggggauccaccaccccuccaccucugccgaucaacagagccucuaccagaacgcugacgccuacguguucgugggaacauccagauauagcaagaaauuuaagccugagauugcuauccggccgaaaguccgcgaucaggaaggcagaaugaauuacuauuggacccugguugagcccggggacaagauuacguucgaagccacaggaaaccugguggugccucgguacgcguuugccauggagcgcaacgcuggcucugggaucauuaucuccgauacccccguccaugacugcaauacaaccugucaaaccccuaaaggagccaucaacacaagccuccccuuccagaauauucacccgaucacgauuggcaagugcccuaaguaugugaaaucuaccaagcugagacuugcuacaggccugcggaacguucccagcauccagucccgcgggcucuuuggagccauugccggcuucaucgaagggggauggaccggcaugguggacgggugguacggauaucaucaccagaaugagcaaggcucuggcuacgcugcggaucugaaaagcacacagaacgccaucgacaagauuaccaauaaagucaacuccgugaucgagaagaugaauacgcaguuuacagcuguugggaaggaguucaaccaccuugagaaaagaauugaaaaucugaacaagaaaguggaugacggauuccucgauaucuggaccuacaaugccgagcugcugguccuccuggaaaacgagcggacccuugacuaucaugauagcaaugugaagaaccuguacgagaaaguccgcucucagcucaagaacaaugccaaggaaauuggcaacggguguuuugaguucuaucacaaaugcgacaauacauguauggaauccgugaagaacggaaccuacgauuauccuaaauacagcgaggaagcuaagcugaauagagaggagaucgacggcguuaaacuugaaucuacacggaucuaucaaauucuggccaucuacuccacgguggcgagcucccucguccuggugguuucucugggggcuauuagcuuuuggaugugcuccaacggcucucuccagugccgcaucuguauuuga

SEQ ID NO: 199598 - RNA, 1701 nt, Artificial Sequence
  derived and/or modified CDS sequence (opt5) from hemagglutinin__InfluenzaA__AEO01444
augaaggccauccuggugguccuccuguacaccuucgcuacagccaacgcggacacgcuuugcauuggcuaucacgcuaauaacagcaccgauacaguugacaccgugcuggagaaaaaugugacagucacccauuccgugaaccuccuggaagauaagcacaaugggaaacuuuguaagcugagaggaguugcuccccuccaucugggcaaaugcaacaucgccggguggauucugggaaauccugagugugaaucucucagcacagccuccucuuggagcuacaucguggagaccuccaacucugacaauggcacgugcuauccgggggauuuuauugacuacgaagaacugcgggagcagcuuagcuccgucagcucuuucgaacgcuuugagaucuuccccaagaccuccagcuggccuaaccacgauucugacaagggagugacagccgcuuguccccaugccggcgcgaaauccuuuuauaagaaucugaucuggcucguuaaaaagggcaacagcuacccuaaacugucuaaguccuauauuaaugauaaggggaaagaagugcuuguccuguggggaauccaccaccccagcaccuccgccgaccaacagucucucuaccagaacgcugaugccuacguguucgugggcacaagcagauauuccaagaaauuuaagccugagauugcuauccggccgaaaguccgcgaccaggaggggagaaugaauuacuauuggacccugguugaacccggagauaagauuacguucgaggccacaggcaaccugguggugccucgguacgcguuugccauggaacgcaacgcugggagcggaaucauuaucucugacacccccguccaugacugcaauacaaccugucaaaccccuaaaggcgccaucaacacaucccuccccuuccagaauauucacccgaucacgauuggcaagugcccuaaguaugugaaaagcaccaagcugagacuugcuacagggcugcggaacguucccucuauccagagccgcggacucuuuggcgccauugccggguucaucgagggaggcuggaccgggaugguggauggaugguacggcuaucaucaccagaaugaacaaggcuccggguacgcugcggaccugaaaucuacacagaacgccaucgauaagauuaccaauaaagucaacagcgugaucgagaagaugaauacgcaguuuacagcuguuggaaaggaguucaaccaccuugagaaaagaauugagaaucugaacaagaaaguggacgauggcuuccucgacaucuggaccuacaaugccgaacugcugguccuccuggagaacgaacggacccuugauuaucaugacuccaaugugaagaaccuguacgagaaaguccgcagccagcucaagaacaaugccaaggagauugggaacggauguuuugaguucuaucacaaaugcgauaauacauguauggaaucugugaagaacggcaccuacgacuauccuaaauacuccgaagaggcuaagcugaauagagaagagaucgaugggguuaaacuugagagcacacggaucuaucaaauucuggccaucuacucuacgguggcguccagccucguccuggugguuucccugggcgcuauuucuuuuuggaugugcagcaacggaucccuccagugccgcaucuguauuuga

SEQ ID NO: 199599 - RNA, 1701 nt, Artificial Sequence; identical to SEQ ID NO: 196909
  derived and/or modified CDS sequence (opt5) from hemagglutinin__InfluenzaA__AEO01445

SEQ ID NO: 199600 - RNA, 1701 nt, Artificial Sequence; identical to SEQ ID NO: 199459
  derived and/or modified CDS sequence (opt5) from hemagglutinin__InfluenzaA__AEO01446

SEQ ID NO: 199601 - RNA, 1701 nt, Artificial Sequence
  derived and/or modified CDS sequence (opt5) from hemagglutinin__InfluenzaA__AEO01447
augaaggccauccuggugguccuccuguacaccuucgcuacagccaacgcggacacgcuuugcauuggcuaucacgcuaauaacagcaccgauacaguugacaccgugcuggagaagaaugugacagucacccauuccgugaaccuccuggaagauaagcacaaugggaaacuuuguaagcugagaggaguugcuccccuccaucugggcaaaugcaacaucgccggguggauucugggaaauccugagugugaaucucucagcacagccuccucuuggagcuacaucguggagaccuccucuagcgacaacggcacgugcuauccgggggauuuuauugacuacgaagaacugcgggagcagcuuuccagcgucucuuccuucgaacgcuuugagaucuuccccaagaccagcucuuggccuaaucacgauuccaacaagggagugacagccgcuuguccccaugccggcgcgaaaucuuuuuauaagaaucugaucuggcucguuaaaaagggcaacagcuacccuaaacuguccaagagcuauauuaaugacaaggggaaagaagugcuuguccuguggggaauccaccaccccuccaccucugccgaucaacagagccucuaccagaacgcugacgccuacguguucgugggcacauccagauauagcaagaaauuuaagccugagauugcuauccggccgaaaguccgcgaucaggaggggagaaugaauuacuauuggacccugguugaacccggagacaagauuacguucgaggccacaggcaaccugguggugccucgguacgcguuugccauggaacgcaacgcugggucuggaaucauuaucuccgauacccccguccaugacugcaauacaaccugucaaaccccuaaaggcgccaucaacacaagccuccccuuccagaauauucacccgaucacgauuggcaagugcccuaaguaugugaaaucuaccaagcugagacuugcuacagggcugcggaacguucccagcauccagucccgcggacucuuuggcgccauugccggguucaucgagggaggcuggaccgggaugguggacggaugguacggcuaucaucaccagaaugaacaaggcucuggguacgcugcggaucugaaaagcacacagaacgccaucgacgagauuaccaauaaggucaacuccgugaucgagaaaaugaauacgcaguuuacagcuguuggaaaggaguucaaccaccuugagaagagaauugaaaaucugaacaaaaagguggaugacggcuuccucgauaucuggaccuacaaugccgagcugcugguccuccuggaaaacgagcggacccuugacuaucaugauagcaaugugaaaaaccuguacgagaagguccgcucucagcucaaaaacaaugccaaggaaauugggaacggauguuuugaguucuaucacaagugcgacaauacauguauggaauccgugaaaaacggcaccuacgauuauccuaaguacagcgaggaagcuaaacugaauagagaggagaucgacgggguuaaacuugaaucuacacggaucuaucaaauucuggccaucuacuccacgauugcgagcucccucgugcuggucgugucucugggcgcuaucagcuuuuggaugugcuccaacggaucucuccagugccgcauuuguaucuga

SEQ ID NO: 199602 - RNA, 1701 nt, Artificial Sequence; identical to SEQ ID NO: 195094
  derived and/or modified CDS sequence (opt5) from hemagglutinin__InfluenzaA__AEO01448

SEQ ID NO: 199603 - RNA, 1701 nt, Artificial Sequence; identical to SEQ ID NO: 199577
  derived and/or modified CDS sequence (opt5) from hemagglutinin__InfluenzaA__AEO01449

SEQ ID NO: 199604 - RNA, 1701 nt, Artificial Sequence
  derived and/or modified CDS sequence (opt5) from hemagglutinin__InfluenzaA__AEO01450
augaaggccauccuggugguccuccuguacaccuucgcuacagccaacgcggacacgcuuugcauuggcuaucacgcuaauaacagcaccgauacaguugacaccgugcuggagaagaaugugacagucacccauuccgugaaccuccuggaagauaagcacaaugggaaacuuuguaagcugagaggaguugcuccccuccaucugggcaaaugcaacaucgccggguggauucugggaaauccugagugugaaucucucagcacagccuccucuuggagcuacaucguggagaccuccucuagcgacaacggcacgugcuauccgggggauuuuauugacuacgaagaacugcgggagcagcuuuccagcgucucuuccuucgaacgcuuugagaucuuccccaagaccagcucuuggccuaaucacgauuccaacaagggagugacagccgcuuguccccaugccggcgcgaaaucuuuuuauaagaaucugaucuggcucguuaaaaagggcaacagcuacccuaaacuguccaagagcuauauuaaugacaaggggaaagaagugcuuguccuguggggaauccaccaccccuccaccucuacagaucaacagagccucuaccagaacgccgacgcuuacguguucgugggcaccuccagauauagcaagaaauuuaagccugagauugccauccggccgaaaguccgcgaucaggaggggagaaugaauuacuauuggacgcugguugaacccggagacaagauuacauucgaggcuaccggcaaccugguggugccucgguacgccuuugcgauggaacgcaacgccgggucuggaaucauuaucuccgauacacccguccaugacugcaauaccaccugucaaacaccuaaaggcgcuaucaacacgagccuccccuuccagaauauucacccgaucaccauuggcaagugcccuaaguaugugaaaucuacaaagcugagacuugccaccgggcugcggaacguucccagcauccagucccgcggacucuuuggcgcuauugccggguucaucgagggaggcuggacagggaugguggacggaugguacggcuaucaucaccagaaugaacaaggcucuggguacgccgcugaucugaaaagcacccagcacgcgaucgacgagauuacgaacaaggucaauuccgugaucgagaaaaugaacacacaguuuaccgccguuggaaaggaguucaaucaucuugagaagagaauugaaaaccugaauaaaaagguggaugacggcuuccucgauaucuggaccuacaacgcugagcugcugguccuccuggaaaaugagcggacacuugacuaucacgauagcaacgugaaaaaucuguacgagaagguccgcucucagcucaaaaacaacgccaaggaaauugggaauggauguuuugaguucuaucauaagugcgacaacaccuguauggaauccgugaaaaauggcacauacgauuauccuaaguacagcgaggaagccaaacugaacagagaggagaucgacgggguuaaacuugaaucuacgcggaucuaucaaauucuggcuaucuacuccaccguggccagcucccucguccuggugguuucucugggcgcgauuagcuuuuggaugugcuccaauggaucucuccagugccgcaucuguauuuga

SEQ ID NO: 199605 - RNA, 1701 nt, Artificial Sequence; identical to SEQ ID NO: 194741
  derived and/or modified CDS sequence (opt5) from hemagglutinin__InfluenzaA__AEO01451

SEQ ID NO: 199606 - RNA, 1701 nt, Artificial Sequence
  derived and/or modified CDS sequence (opt5) from hemagglutinin__InfluenzaA__AEO01452
augaaggccauccuggugguccuccuguacaccuucgcuacagccaacgcggacacgcuuugcauuggcuaucacgcuaauaacagcaccgauacaguugacaccgugcuggagaaaaaugugacagucacccauuccgugaaccuccuggaagauaagcacaaugggaaacuuuguaagcugagaggaguugcuccccuccaucugggcaaaugcaacaucgccggguggauucugggaaauccugagugugaaucucucagcacagccuccucuuggagcuacaucguggagaccuccucuagcgacaacggcacgugcuauccgggggauuuuauugacuacgaagaacugcgggagcagcuuuccagcgucucuuccuucgaacgcuuugagaucuuccccaagaccagcucuuggccuaaucacgauuccaacaagggagugacagccgcuuguccccaugccgaagcgaaaucuuuuuauaagaaucugaucuggcucguuaaaaagggcaacagcuacccuaaacuguccaagagcuauauuaaugacaagggcaaagaggugcuuguccugugggggauccaccaccccuccaccucugccgaucaacagagccucuaccagaacgcugacgccuacguguucgugggaacauccagauauagcaagaaauuuaagccugagauugcuauccggccgaaaguccgcgaucaggaaggcagaaugaauuacuauuggacccugguugagcccggggacaagauuacguucgaagccacaggaaaccugguggugccucgguacgcguuugccauggagcgcaacgcuggcucugggaucauuaucuccgauacccccgcccaugacugcaauacaaccugucaaaccccuaaaggagcuaucaacacaagccuccccuuccagaauauucacccgaucacgauuggcaagugcccuaaguaugucaaaucuaccaagcugagacuugccacaggccugcggaacgugcccagcauccagucccgcgggcucuuuggagccauugcuggcuucaucgaagggggauggaccggcaugguugacgggugguacggauaucaucaccagaaugagcaaggcucuggcuacgcggccgaucugaaaagcacacagaacgcuaucgacgagauuaccaauaaggugaacuccgucaucgagaaaaugaauacgcaguuuacagccguggggaaggaguucaaccaccuugaaaagagaauugagaaucugaacaaaaagguugaugacggauuccucgauaucuggaccuacaaugccgaacugcuggugcuccuggagaacgagcggacccuugacuaucaugauagcaaugucaaaaagcuguacgaaaaagugcgcucucagcucaagaacaacgcuaaggagauuggcaauggguguuuugaguucuaucacaaaugcgacaacacauguauggaauccgucaagaauggaaccuacgauuauccuaaauacagcgaagaggccaagcugaacagagaggaaaucgacggcgugaaacuugagucuacacggaucuaucaaauucuggcgaucuacuccacgguugcuagcucccucgugcuggucgugucucugggggccauuagcuuuuggaugugcuccaauggcucucuccagugccgcaucuguauuuga

SEQ ID NO: 199607 - RNA, 1701 nt, Artificial Sequence
  derived and/or modified CDS sequence (opt5) from hemagglutinin__InfluenzaA__AEO01453
augaaggccauccuggugguccuccuguacaccuucgcuauugccaacgcggacacacuuugcaucggcuaucacgcuaauaacagcacggauaccguugacacagugcuggagaagaaugugaccgucacacauuccgugaaccuccuggaagauaagcacaaugggaaacuuuguaagcugagaggaguugcuccccuccaucugggcaaaugcaacauugccggguggauccugggaaauccugagugugaaucucucagcaccgccuccucuuggagcuacauuguggagacauccucuagcgacaacgggaccugcuauccgggcgauuuuaucgacuacgaagaacugcgggagcagcuuuccagcgucucuuccuucgaacgcuuugagaucuuccccaagacgagcucuuggccuaaucacgauuccaacaagggagugaccgccgcuuguccccaugccggcgcgaaauccuuuuauaagaaucugauuuggcucguuaaaaagggcaacucuuacccuaaacuguccaagagcuauaucaaugacaaggggaaagaagugcuuguccuguggggagugcaccaccccuccacaucugccgaucaacagagccucuaccagaacgcugacgccuacguguucgucggcaccuccagauauagcaagaaauuuaagcgggagauugcuauccgcccuaaaguuagagaucaggaggggcggaugaauuacuauuggacacugguggaaccgggagacaagauuaccuucgaggccacgggcaaccugguggucccccgcuacgcguuugccauggaaagaaacgcugggucuggaaucauuaucuccgauacaccugugcaugacugcaauaccacaugucaaacccccaaaggcgccaucaacaccagccucccuuuccagaauauucaccccaucacaauuggcaagugcccgaaguauguuaaaucuacgaagcugcggcuugcuaccgggcugcgcaacgugccuagcauccaguccagaggacucuuuggcgccauugccggguucaucgagggaggcuggacagggauggucgacggaugguacggcuaucaucaccagaaugaacaaggcucuggguacgcugcggaucugaaaagcacccagcacgccaucgacgagauuacaaacaaggugaauagcguuaucgagaaaaugaacacccaguuuacggcugugggaaaggaguucaaucaucuugagaagcggauugaaaaccugaauaaaaaggucgaugacggcuuccucgauaucuggacauacaacgccgagcugcuggugcuccuggaaaaugagcgcacccuugacuaucacgauagcaacgucaaaaaucuguacgagaaggugagaucucagcucaaaaacaacgccaaggaaauugggaauggauguuuugaguucuaucauaagugcgacaacaccuguauggaauccguuaaaaauggcacauacgauuaucccaaguacagcgaggaagcuaaacugaaccgggaggagaucaauggggugaaacuugaaucuacccgcaucuaucaaauucuggccaucuacuccacagucgcgagcucccucgugcugguugugucucugggcgcuauuagcuuuuggaugugcuccaacggaucucuccagugcagaaucuguauuuga

SEQ ID NO: 199608 - RNA, 1701 nt, Artificial Sequence
  derived and/or modified CDS sequence (opt5) from hemagglutinin__InfluenzaA__AEO01454
augaaggccauccuggugguccuccuguacaccuucgcuacagccaacgcggacacgcuuugcauuggcuaucacgcuaauaacagcaccgauacaguugacaccgugcuggagaaaaaugugacagucacccauuccgugaacauccucgaagauaagcacaaugggaaacuguguaaacuuagaggaguugcuccccugcaucucggcaagugcaacauugccggguggauccugggaaauccugagugugaaucucugagcacagccuccucuuggagcuacauuguggagaccuccucuagcgacaacggcacgugcuauccgggggauuuuaucgacuacgaagaacuccgggagcagcuguccagcgucucuuccuucgaacgcuuugagaucuuccccaagaccagcucuuggccuaaucacgauuccaacaagggagugacagccgcuuguccccaugccggcgcgaaaucuuuuuauaagaaucuuauuuggcugguuaaaaagggcaacagcuacccuaaacucuccaagagcuauaucaaugacaaggggaaagaagugcugguccuuuggggcauucaccaccccuccaccucugccgaucaacagagccuguaccagaacgcugacgccuacguguucgugggaacauccagauauagcaagaaauuuaagccugagaucgcuauucggccgaaaguccgcgaucaggaggggagaaugaauuacuauuggacccucguugaacccggagacaagaucacguucgaggccacaggcaaccugguggugccucgguacgcguuugccauggaacgcaacgcugggucuggaauuaucaucuccgauacccccguccaugacugcaauacaaccugucaaaccccuaaaggcgccauuaacacaagccugcccuuccagaauauccacccgacgaccauuggcaagugcccuaaguaugugaaaucuacaaagcucagacuggcuaccgggcuucggaacguucccagcauccagucccgcggacuguuuggcgccauugccggguucaucgagggaggcuggacagggaugguggacggaugguacggcuaucaucaccagaaugaacaaggcucuggguacgcugcggaucucaaaagcacccagaacgccaucgacgagauuacgaauaaggucaacuccgugaucgagaaaaugaauacacaguuuaccgcuguuggaaaggaguucaaccaccuggagaagagaauugaaaaucuuaacaaaaagguggaugacggcuuccuggauaucuggaccuacaaugccgagcuccugguccugcucgaaaacgagcggacacuggacuaucaugauagcaaugugaaaaaccuuuacgagaagguccgcucucagcugaaaaacaaugccaaggaaauugggaacggauguuuugaguucuaucacaagugcgacaauaccuguauggaauccgugaaaaacggcacauacgauuauccuaaguacagcgaggaagcuaaacucaauagagaggagaucgacgggguuaagcuggaaucuacgcggaucuaucaaauucuugccaucuacuccaccguggcgagcucccugguccucgugguuucucugggcgcuauuagcuuuuggaugugcuccaacggaucucugcagugccgcaucuguauuuga

SEQ ID NO: 199609 - RNA, 1701 nt, Artificial Sequence
  derived and/or modified CDS sequence (opt5) from hemagglutinin__InfluenzaA__AEO01455
augaaggccauccuggugguccuccuguacaccuucgcuacagccaacgcggacacgcuuugcauuggcuaucacgcuaauaacagcaccgauacaguugacaccgugcuggagaaaaaugugacagucacccauuccgugaaccuccuggaagauaagcacaaugggaaacuuuguaagcugagaggaguugcuccccuccaucugggcaaaugcaacaucgccggguggauucugggaaauccugagugugaaucucucagcacagccuccucuuggagcuacaucguggagaccuccucuagcgacaacggcacgugcuauccgggggauuuuauugacuacgaagaacugcgggagcagcuuuccagcgucucuuccuucgaacgcuuugagaucuuccccaagaccagcucuuggccuaaucacgauuccaacaagggagugacagccgcuuguccccaugccggcgcgaaaucuuuuuauaagaaucugaucuggcucguuaaaaagggcaacagcuacccuaaacuguccaagagcuauauuaaugacaaggggaaagaagugcuuguccuguggggaauccaccaccccuccaccucugccgaucaacagagccucuaccagaacgcugacgccuacguguucgugggcacauccagauauagcaagaaauuuaagccugagauugcuauccggccgaaaguccgcgagcaggaagggagaaugaauuacuauuggacccugguugagcccggagauaagauuacguucgaagccacaggcaaccugguggugccucgguacgcguuugccauggagcgcaacgcugggucuggaaucauuaucuccgacacccccguccaugauugcaauacaaccugucaaaccccuaaaggcgccaucaacacaagccuccccuuccagaauauucacccgaucacgauuggcaagugcccuaaguaugugaaaucuaccaagcugagacuugcuacagggcugcggaacauccccagcauucagucccgcggacucuuuggcgccaucgccggguucaucgaaggaggcuggaccgggaugguugacggaugguacggcuaucaucaccagaaugagcaaggcucuggguacgcugcggaccugaaaagcacacagaacgccauugaugagaucaccaauaaggugaacuccgucauugaaaagaugaauacgcaguuuacagcugugggaaaggaguucaaccaccuugaaaagagaaucgagaaucugaacaaaaagguugacgauggcuuccucgacauuuggaccuacaaugccgaacugcuggugcuccuggagaacgagcggacccuugauuaucaugacagcaaugucaaaaaccuguacgaaaaggugcgcucucagcucaaaaacaaugccaaggagaucgggaacggauguuuugaguucuaucacaagugcgauaauacauguauggaguccgucaaaaacggcaccuacgacuauccuaaguacagcgaagaggcuaaacugaauagagaggaaaucgauggggugaaacuugagucuacacggauuuaucaaauccuggccauuuacuccacgguugcgagcucccucgugcuggucgugucucugggcgcuaucagcuuuuggaugugcuccaacggaucucuccagugccgcauuuguaucuga

SEQ ID NO: 199610 - RNA, 1701 nt, Artificial Sequence
  derived and/or modified CDS sequence (opt5) from hemagglutinin__InfluenzaA__AEO01456
augaaggccauccugauugugcuccuguacaccuucgcuacagccaacgcggacacgcuuugcaucggcuaucacgcuaauaacagcaccgauacagucgacacccugcucgagaaaaauguuacagugacccauuccgugaaccugcuugaagauaagcacaaugggaaacuguguaagcucagaggagucgcuccccugcaucugggcaaaugcaacauugccggguggauccucggaaauccugagugugaaucucugagcacagccuccucuuggagcuacauuguggagaccuccucuagcgacaacggcacgugcuauccgggggauuuuaucgacuacgaagaacuucgggagcagcuguccagcguuucuuccuucgaacgcuuugagaucuuccccaagaccagcucuuggccuaaucacgauuccaacaagggagugacagccgcuuguccccaugccggcgcgaaaucuuuuuauaagaaucucauuuggcuggucaaaaagggcaacagcuacccuaaacuuuccaagagcuauaucaaugacaaggggaaagaagugcugguucucuggggcauucaccaccccuccaccucugccgaucaacagagccuguaccagaacgcugacgccuacguguucgucggaacauccagauauagcaagaaauuuaagccugagaucgcuauucggccgaaagugcgcgaucaggaggggagaaugaauuacuauuggacccugguggaacccggagacaagaucacguucgaggccacaggcaaccucgucguuccucgguacgcguuugccauggaucgcaacgcugggucuggaauuaucaucuccgacgcccccgugcaugacugcaauaccacaugucaaaccccuaaaggcgcuauuaacaccagccugcccuuccagaauauccacccgauuacaaucggcaagugcccuaaguaugugaaaucuacgaaacuuagacuggccaccgggcuccggaacguccccagcauucagucccgcggacuguuuggcgccaucgcuggguucaucgaaggaggcuggacagggaugguggauggaugguacggcuaucaucaccagaaugagcaaggcucuggguacgcggccgaccuuaagagcacccagaacgcuauugaugaaaucacaaauaagguuaacuccgugauugagaaaaugaauacccaguuuacggccgucggaaaggaguucaaccaccuggaaaagagaaucgagaaucucaacaaaaagguggacgauggcuuccuggacauuuggacauacaaugccgaacugcucguucugcuugagaacgaacggacccuggauuaucaugacagcaaugugaaaaaccucuacgagaagguccgcucucagcugaaaaacaaugcuaaggagaucgggaacggauguuuugaguucuaucacaagugcgauaauaccuguauggaguccgugaaaaacggcacauacgacuauccuaaguacagcgaagaggccaaacuuaauagagaagagaucgauggggucaagcuggagucuacccggauuuaucaaauccucgcgauuuacuccacaguggcuagcucccugguucugguggucucucucggcgccaucagcuuuuggaugugcuccaacggaucucugcagugccgcauuuguaucuga

SEQ ID NO: 199611 - RNA, 1701 nt, Artificial Sequence; identical to SEQ ID NO: 199510
  derived and/or modified CDS sequence (opt5) from hemagglutinin__InfluenzaA__AEO01457

SEQ ID NO: 199612 - RNA, 1701 nt, Artificial Sequence; identical to SEQ ID NO: 199506
  derived and/or modified CDS sequence (opt5) from hemagglutinin__InfluenzaA__AEO01458

SEQ ID NO: 199613 - RNA, 1701 nt, Artificial Sequence; identical to SEQ ID NO: 199506
  derived and/or modified CDS sequence (opt5) from hemagglutinin__InfluenzaA__AEO01459

SEQ ID NO: 199614 - RNA, 1701 nt, Artificial Sequence; identical to SEQ ID NO: 196161
  derived and/or modified CDS sequence (opt5) from hemagglutinin__InfluenzaA__AEO01461

SEQ ID NO: 199615 - RNA, 1701 nt, Artificial Sequence; identical to SEQ ID NO: 195842
  derived and/or modified CDS sequence (opt5) from hemagglutinin__InfluenzaA__AEO01462

SEQ ID NO: 199616 - RNA, 1701 nt, Artificial Sequence; identical to SEQ ID NO: 195094
  derived and/or modified CDS sequence (opt5) from hemagglutinin__InfluenzaA__AEO01463

SEQ ID NO: 199617 - RNA, 1701 nt, Artificial Sequence
  derived and/or modified CDS sequence (opt5) from hemagglutinin__InfluenzaA__AEO01464
augaaggccauccuggugguccuccuguacaccuucgcuacagccaacgcggacacgcuuugcauuggcuaucacgcuaauaacagcaccgauacaguugacacccugcucgagaaaaaugugacagugacccauuccgucaaccugcuugaagauaagcacaaugggaaacuguguaagcucagaggaguggcuccccugcaucugggcaaaugcaacaucgccggguggauucucggaaauccugagugugaaucucugagcacagccuccucuuggagcuacaucguugagaccuccucuagcgacaacggcacgugcuauccgggggauuuuauugacuacgaagaacuucgggagcagcuguccagcgugucuuccuucgaacgcuuugagaucuuccccaagaccagcucuuggccuaaucacgauuccaacaagggagucacagccgcuuguccccaugccggcgcgaaaucuuuuuauaagaaucucaucuggcuggugaaaaagggcaacagcuacccuaaacuuuccaagagcuauauuaaugacaaggggaaagaaguucuggugcucuggggaauccaccaccccuccaccucugccgaucaacagagccuguaccagaacgcugacgccuacgucuucgugggcacauccagauauagcaagaaauuuaagccugagauugcuauccggccgaaagugcgcgaucaggaggggagaaugaauuacuauuggacccuggucgaacccggagacaagauuacguucgaggccacaggcaaccucguugugccucgguacgcguuugccauggaucgcaacgcugggucuggaaucauuaucuccgacaccagcgugcaugacugcaauacaaccugucaaacccccaaaggcgccaucaacacaucucugccuuuccagaauauucaccccaucacgauuggcaagugcccgaaguaugucaaaagcaccaaacuuagacuggcuacagggcuccggaacgugccuuccauccagucucgcggacuguuuggcgccauugccggguucaucgaaggaggcuggaccgggaugguugauggaugguacggcuaucaucaccagaaugagcaaggcagcggguacgcugcggaccuuaaguccacacagaacgccaucgaugaaauuaccaauaaggugaacagcgucaucgagaaaaugaauacgcaguuuacagcugugggaaaggaguucaaccaccuggaaaagagaauugagaaucucaacaaaaagguugacgauggcuuccuggacaucuggaccuacaaugccgaacugcucgugcugcuugagaacgaacggacccuggauuaucaugacucuaaugucaaaaaccucuacgagaaggugcgcucccagcugaaaaacaaugccaaggagauugggaacggauguuuugaguucuaucacaagugcgauaauacauguauggagagcgucaaaaacggcaccuacgacuaucccaaguacucugaagaggcuaaacuuaauagagaagagaucgauggggugaagcuggaguccacacggaucuaucaaauucucgccaucuacagcacgguugcguccucucuggugcuggucgugagccucggcgcuauuuccuuuuggaugugcucuaacggaagccugcagugccgcaucuguauuuga

SEQ ID NO: 199618 - RNA, 1701 nt, Artificial Sequence; identical to SEQ ID NO: 199597
  derived and/or modified CDS sequence (opt5) from hemagglutinin__InfluenzaA__AEO01465

SEQ ID NO: 199619 - RNA, 1701 nt, Artificial Sequence; identical to SEQ ID NO: 196613
  derived and/or modified CDS sequence (opt5) from hemagglutinin__InfluenzaA__AEO01466

SEQ ID NO: 199620 - RNA, 1701 nt, Artificial Sequence; identical to SEQ ID NO: 195094
  derived and/or modified CDS sequence (opt5) from hemagglutinin__InfluenzaA__AEO01467

SEQ ID NO: 199621 - RNA, 1701 nt, Artificial Sequence; identical to SEQ ID NO: 195905
  derived and/or modified CDS sequence (opt5) from hemagglutinin__InfluenzaA__AEO01468

SEQ ID NO: 199622 - RNA, 1701 nt, Artificial Sequence; identical to SEQ ID NO: 194741
  derived and/or modified CDS sequence (opt5) from hemagglutinin__InfluenzaA__AEO01469

SEQ ID NO: 199623 - RNA, 1701 nt, Artificial Sequence
  derived and/or modified CDS sequence (opt5) from hemagglutinin__InfluenzaA__AEO01470
augaaggccauccuggugguccuccuguacaccuucgcuacagccaacgcggacacgcuuugcauuggcuaucacgcuaauaacagcaccgauacaguugacaccgugcuggagaagaaugugacagucacccauuccgugaaccuccuggaagauaagcacaaugggaaacuuuguaagcugagaggaguugcuccccuccaucugggcaaaugcaacaucgccggguggauucugggaaauccugagugugaaucucucagcacagccuccucuuggagcuacaucguggagaccuccucuagcgacaacggcacgugcuauccgggggauuuuauugacuacgaagaacugcgggagcagcuuuccagcgucucuuccuucgaacgcuuugagaucuuccccaagaccagcucuuggccuaaucacgauuccaacaagggagugacagccgcuuguccccaugccggcgcgaaaucuuuuuauaagaaucugaucuggcucguuaaaaagggcaacagcuacccuaaacuguccaagagcuauauuaaugacaaggggaaagaagugcuuguccuguggggaauccaccaccccuccaccucugccgaucaacagagccucuaccagaacgcugacgccuacguguucgugggcacauccagauauagcaagaaauuuaagccugagauugcuauccggccgaaaguccgcgaucaggaggggagaaugaauuacuauuggacccugguugaacccggagacaagauuacguucgaggccacaggcaaccuggugaucccucgguacgcguuugccauggaacgcaacgcugggucuggaauuaucaucuccgauacccccgugcaugacugcaauacaaccugucaaaccccuaaaggcgccauuaacacaagccuccccuuccagaauauccacccgauuacgaucggcaagugcccuaaguaugucaaaucuaccaagcugagacuugcuacagggcugcggaacgugcccagcauucagucccgcggacucuuuggcgccaucgccggguucaucgagggaggcuggaccgggaugguugacggaugguacggcuaucaucaccagaaugaacaaggcucuggguacgcugcggaucugaaaagcacacagaacgccauugacgagaucaccaauaaggugaacuccgucauugagaaaaugaauacgcaguuuacagcugugggaaaggaguucaaccaccuugagaagagaaucgaaaaucugaacaaaaagguugaugacggcuuccucgauauuuggaccuacaaugccgagcugcuggugcuccuggaaaacgagcggacccuugacuaucaugauagcaaugucaaaaaccuguacgagaaggugcgcucucagcucaaaaacaaugccaaggaaaucgggaacggauguuuugaguucuaucacaagugcgacaauacauguauggaauccgucaaaaacggcaccuacgauuauccuaaguacagcgaggaagcuaaacugaauagagaggagaucgacggggugaaacuugaaucuacacggauuuaucaaauccuggccauuuacuccacgguugcgagcucccucgugcuggucgugucucugggcgcuaucagcuuuuggaugugcuccaacggaucucuccagugccgcauuuguaucuga

SEQ ID NO: 199624 - RNA, 1701 nt, Artificial Sequence; identical to SEQ ID NO: 199450
  derived and/or modified CDS sequence (opt5) from hemagglutinin__InfluenzaA__AEO01471

SEQ ID NO: 199625 - RNA, 1701 nt, Artificial Sequence; identical to SEQ ID NO: 196368
  derived and/or modified CDS sequence (opt5) from hemagglutinin__InfluenzaA__AEO01472

SEQ ID NO: 199626 - RNA, 1701 nt, Artificial Sequence
  derived and/or modified CDS sequence (opt5) from hemagglutinin__InfluenzaA__AEO01473
augaaggccauccuggugguccuccuguacaccuucgcuacagccaacgcggacacgcuuugcauuggcuaucacgcuaauaacagcaccgauacaguugacaccgugcuggagaaaaaugugacagucacccauuccgugaaccuccuggaagauaagcacaaugggaaacuuuguaagcugagaggaguugcuccccuccaucugggcaaaugcaacaucgccggguggauucugggaaauccugagugugaaucucucagcacagccuccucuuggagcuacaucguggagaccuccucuagcgacaacggcacgugcuauccgggggauuuuauugacuacgaagaacugcgggagcagcuuuccagcgucucuuccuucgaacgcuuugagaucuuccccaagaccagcucuuggccuaaucacgauuccaacaagggagugacagccgcuuguccccaugccggcgcgaaaucuuuuuauaagaaucugaucuggcucguuaaaaagggcaacagcuacccuaaacugaauaaguccuauauuaacgacaaggggaaagaagugcuuguccuguggggaauccaccaccccagcaccuccgccgaucaacagucucucuaccagaaugcugacgccuacguguucgugggcacaagcagauauuccaagaaauuuaagccugagauugcuauccggccgaaaguccgcgaucaggaggggagaaugaacuacuauuggacccugguugaacccggagacaagauuacguucgaggccacaggcaaccugguggugccucgguacgcguuugccauggaacgcaaugcugggagcggaaucauuaucucugauacccccguccaugacugcaacacaaccugucaaaccccugagggcgccaucaauacaucccuccccuuccagaacauucacccgaucacgauuggcgaaugcccuaaauauguuaagagcaccaagcugagacuugcuacagggcugcggaaugugcccucuauccagagccgcggacucuuuggcgccauugccggguucaucgagggaggcuggaccgggaugguggacggaugguacggcuaucaucaccagaacgagcaaggcuccggguacgcugcggaucugaaaucuacacagaaugccaucgacaagauuaccaacaaagucaauagcgugaucgaaaagaugaacacgcaguuuacagcuguuggaaaagaguucaaucaccuugaaaagagaauugagaaccugaauaagaaaguggaugacggcuuccucgauaucuggaccuacaacgccgaacugcugguccuccuggagaaugagcggacccuugacuaucaugauuccaacgugaagaaccuguacgaaaaaguccgcagccagcucaagaauaacgccaaagagauugggaauggauguuuugaguucuaucacaagugcgacaacacauguauggagucugugaagaauggcaccuacgauuauccuaaauacuccgaagaggcuaagcugaacagagaggaaaucgacgggguuaaacuugagagcacacggaucuaucaaauucuggccaucuacucuacgguggcguccagccucguccuggugguuucccugggcgcuauuucuuuuuggaugugcagcaauggaucccuccagugccgcaucuguauuuga

SEQ ID NO: 199627 - RNA, 1701 nt, Artificial Sequence
  derived and/or modified CDS sequence (opt5) from hemagglutinin__InfluenzaA__AEO01474
augaaggccauccuggugguccuccuguacaccuucgcuacagccaacgcggacacgcuuugcauuggcuaucacgcuaauaacagcaccgauacaguugacaccgugcuggagaaaaaugugacagucacccauuccgugaaccuccuggaagauaagcacaaugggaaacuuuguaagcugagaggaguugcuccccuccaucugggcaaaugcaacaucgccggguggauucugggaaauccugagugugaaucucucagcacagccuccucuuggagcuacaucguggagaccuccucuagcgacaacggcacgugcuauccgggggauuuuauugacuacgaagaacugcgggagcagcuuuccagcgucucuuccuucgaacgcuuugagaucuuccccaagaccagcucuuggccuaaucacgauuccgacaagggagugacagccgcuuguccccaugccggcgcgaaaucuuuuuauaagaaccugaucuggcucguuaaaaagggcaauagcuacccuaaacuguccaagagcuauauuaacgauaaggggaaagaagugcuuguccuguggggaauccaccaccccuccaccucugccgaccaacagagccucuaccagaaugcugaugccuacguguucgugggcacauccagauauagcaagaaauuuaagccugagauugcuauccggccgaaaguccgcgaccaggaggggagaaugaacuacuauuggacccugguugaacccggagauaagauuacguucgaggccacaggcaaucugguggugccucgguacgcguuugccauggaacgcaacgcugggucuggaaucauuaucuccgacacccccguccaugacugcaacacaaccugucaaaccccuaaaggcgccaucaauacaagccuccccuuccagaacauucacccgaucacgauuggcaagugcccuaaguaugugaaaucuaccaagcugagacuugcuacagggcugcggaauguucccagcauccagucccgcggacucuuuggcgccauugccggguucaucgagggaggcuggaccgggaugguggauggaugguacggcuaucaucaccagaacgaacaaggcucuggguacgcugcggaccugaaaagcacacagaaugccaucgauaagauuaccaacaaagucaauuccgugaucgagaagaugaacacgcaguuuacagcuguuggaaaggaguucaaucaccuugagaaaagaauugagaaccugaauaagaaaguggacgauggcuuccucgacaucuggaccuacaacgccgaacugcugguccuccuggagaaugaacggacccuugauuaucaugacagcaacgugaagaaucuguacgagaaaguccgcucucagcucaagaacaacgccaaggagauugggaauggauguuuugaguucuaucacaaaugcgauaacacauguauggaauccgugaagaauggcaccuacgacuauccuaaauacagcgaagaggcuaagcugaacagagaagagaucgaugggguuaaacuugagucuacacggaucuaucaaauucuggccaucuacuccacgguggcgagcucccucguccuggugguuucucugggcgcuauuagcuuuuggaugugcuccaauggaucucuccagugccgcaucuguauuuga

SEQ ID NO: 199628 - RNA, 1701 nt, Artificial Sequence
  derived and/or modified CDS sequence (opt5) from hemagglutinin__InfluenzaA__AEO01475
augaaggccauccuggugguccuccuguacaccuucgcuacagccaacgcggacacgcuuugcauuggcuaucacgcuaauaacagcaccgauacaguugacaccgugcuggagaagaaugugacagucacccauuccgugaaccuccuggaagauaagcacaaugggaaacuuuguaagcugagaggaguugcuccccuccaucugggcaaaugcaacaucgccggguggauucugggaaauccugagugugaaucucucagcacagccuccucuuggagcuacaucguggagaccuccaacucugacaauggcacgugcuauccgggggauuuuauugacuacgaagaacugcgggagcagcuuagcuccgucagcucuuucgaacgcuuugagaucuuccccaagaccuccagcuggccuaaccacgauucuaauaagggagugacagccgcuuguccccaugccggcgcgaaauccuuuuauaagaaccugaucuggcucguuaaaaagggcaauagcuacccuaaacugucuaaguccuauauuaacgacaaggggaaagaagugcuuguccuguggggaauccaccaccccagcaccuccgccgaucaacagucucucuaccagaaugcugacgccuacguguucgugggcacaagcagauauuccaagaaauuuaagccugagauugcuauccggccgaaaguccgcgaucaggaggggagaaugaacuacuauuggacccugguugaacccggagacaagauuacguucgaggccacaggcaaccugguggugccucgguacgcguuugccauggaacgcaaugcugggagcggaaucauuaucucugauacccccguccaugacugcaacacaaccugucaaaccccuaaaggcgccaucaauacaucccuccccuuccagaacauucacccgaucacgauuggcaagugcccuaaguaugugaaaagcaccaagcugagacuugcuacagggcugcggaauguucccucuauccagagccgcggacucuuuggcgccauugccggguucaucgagggaggcuggaccgggaugguggacggaugguacggcuaucaucaccagaacgaacaaggcuccggguacgcugcggaucugaaaucuacacagcacgccaucgacgagauuaccaauaaggucaacagcgugaucgagaaaaugaauacgcaguuuacagcuguuggaaaggaguucaaccaucuugagaagagaauugaaaaucugaacaaaaagguggaugacggcuuccucgauaucuggaccuacaaugccgagcugcugguccuccuggaaaacgagcggacccuugacuaucacgauuccaaugugaaaaaccuguacgagaagguccgcagccagcucaaaaacaaugccaaggaaauugggaacggauguuuugaguucuaucauaagugcgacaauacauguauggaaucugugaaaaacggcaccuacgauuauccuaaguacuccgaggaagcuaaacugaauagagaggagaucgacgggguuaaacuugaaagcacacggaucuaucaaauucuggccaucuacucuacgguggcguccagccucguccuggugguuucccugggcgcuauuucuuuuuggaugugcagcaacggaucccuccagugccgcaucuguauuuga

SEQ ID NO: 199629 - RNA, 1701 nt, Artificial Sequence
  derived and/or modified CDS sequence (opt5) from hemagglutinin__InfluenzaA__AEO01476
augaaggccauccuggugguccuccuguacaccuucagcacagcuaacgccgacacgcuuugcauuggcuaucacgcgaauaacuccaccgauacaguugacaccgugcuggagaagaaugugacagucacccauucugugaaccuccuggaagauaagcacaaugggaaacuuuguaagcugagaggaguugcuccccuccaucugggcaaaugcaacaucgccggguggauucugggaaauccugagugugaaagccucuccacagccucuagcugguccuacaucguggagaccucuagcuccgacaacggcacgugcuauccgggggauuuuauugacuacgaagaacugcgggagcagcuuagcucugucuccagcuucgaacgcuuugagaucuuccccaagaccucuuccuggccuaaucacgauagcaacaagggagugacagcugccuguccccaugcuggcgccaaaucuuuuuauaagaaucugaucuggcucguuaaaaagggcaacuccuacccuaaacugagcaaguccuauauuaaugacaaggggaaagaagugcuuguccuguggggaauccaccaccccucuaccagcgcggaucaacagucccucuaccagaacgccgacgcuuacguguucgugggcacaagcagauauucuaagaaauuuaagccugagauugccauccggccgaaaguccgcgaucaggaggggagaaugaauuacuauuggacccugguugaacccggagacaagauuacguucgaggcuacaggcaaccugguggugccucgguacgccuuugcgauggaacgcaacgccggguccggaaucauuaucagcgauacccccguccaugacugcaauacaaccugucaaaccccuaaaggcgcuaucaacacaucucuccccuuccagaauauucacccgaucacgauuggcaagugcccuaaguaugugaaaagcaccaagcugagacuugccacagggcugcggaacguucccuccauccagucucgcggacucuuuggcgcuauugccggguucaucgagggaggcuggaccgggaugguggacggaugguacggcuaucaucaccagaaugaacaaggcagcggguacgccgcugaucugaaauccacacagaacgcgaucgacgagauuaccaauaaggucaacagcgugaucgagaaaaugaauacgcaguuuacagccguuggaaaggaguucaaccaccuugagaagagaauugaaaaucugaacaaaaagguggaugacggcuuccucgauaucuggaccuacaaugcugagcugcugguccuccuggaaaacgagcggacccuugacuaucaugauucuaaugugaaaaaccuguacgagaagguccgcucccagcucaaaaacaaugccaaggaaauugggaacggauguuuugaguucuaucacaagugcgacaauacauguauggaaagcgugaaaaacggcaccuacgauuauccuaaguacucugaggaagccaaacugaauagagaggagaucgacgggguuaaacuugaauccacacggaucuaucaaauucuggcuaucuacagcacgguggccuccucucucguccuggugguuagccugggcgcgauuuccuuuuggaugugcucuaacggaagccuccagugccgcaucuguauuuga

SEQ ID NO: 199630 - RNA, 1701 nt, Artificial Sequence
  derived and/or modified CDS sequence (opt5) from hemagglutinin__InfluenzaA__AEO01477
augaaggccauccuggugguccuccuguacaccuucgcuacagccaacgcggacacgcuuugcauuggcuaucacgcuaauaacagcaccgauacaguugacaccgugcuggagaaaaaugugacagucacccauuccgugaaccuccuggaagauaagcacaaugggaaacuuuguaagcugagaggaguugcuccccuccaucugggcaaaugcaacaucgccggguggauucugggaaauccugagugugaaucucucagcacagccuccucuuggagcuacaucguggagaccuccucuagcgacaacggcacgugcuauccgggggauuuuauugacuacgaagaacugcgggagcagcuuuccagcgucucuuccuucgaacgcuuugagaucuuccccaagaccagcucuuggccuaaucacgauuccaacaagggagugacagccgcuuguccccaugccggcgcgaaaucuuuuuauaagaaucugaucuggcucguuaaaaagggcaacagcuacccuaaacuguccaagagcuauauuaaugacaaggggaaagaagugcuuguccuguggggaauccaccaccccuccaccucugccgaucaacagagccucuaccagaacgcugacgccuacgcuuucgugggcacauccagauauagcaagaaauuuaagccugagauugccauccggccgaaagugcgcgagcaggaagggagaaugaauuacuauuggacccuggucgagcccggagauaagauuacguucgaagcgacaggcaaccugguugugccucgguacgccuuugcuauggagcgcaacgccgggucuggaaucauuaucuccgacacccccgugcaugauugcaauacaaccugucaaaccccuaaaggcgcuaucaacacaagccuccccuuccagaauauucacccgaucacgauuggcaagugcccuaaguaugucaaaucuaccaagcugagacuugccacagggcugcggaacgugcccagcauccagucccgcggacucuuuggcgccauugcuggguucaucgaaggaggcuggaccgggaugguugacggaugguacggcuaucaucaccagaaugagcaaggcucuggguacgcggccgaccugaaaagcacacagaacgcuaucgaugagauuaccaauaaggugaacuccgucaucgaaaagaugaauacgcaguuuacagccgugggaaaggaguucaaccaccuugaaaagagaauugagaaucugaacaaaaagguugacgauggcuuccucgacaucuggaccuacaaugccgaacugcuggugcuccuggagaacgagcggacccuugauuaucaugacagcaaugucaaaaaccuguacgaaaaggugcgcucucagcucaaaaacaaugcuaaggagauugggaacggauguuuugaguucuaucacaagugcgauaauacauguauggaguccgucaaaaacggcaccuacgacuauccuaaguacagcgaagaggccaaacugaauagagaggaaaucgauggggugaaacuugagucuacacggaucuaucaaauucuggcgaucuacuccacgguugcuagcucccucgugcuggucgugucucugggcgccauuagcuuuuggaugugcuccaacggaucucuccagugccgcaucuguauuuga

SEQ ID NO: 199631 - RNA, 1701 nt, Artificial Sequence; identical to SEQ ID NO: 196069
  derived and/or modified CDS sequence (opt5) from hemagglutinin__InfluenzaA__AEO01478

SEQ ID NO: 199632 - RNA, 1701 nt, Artificial Sequence; identical to SEQ ID NO: 199459
  derived and/or modified CDS sequence (opt5) from hemagglutinin__InfluenzaA__AEO01479

SEQ ID NO: 199633 - RNA, 1701 nt, Artificial Sequence; identical to SEQ ID NO: 199506
  derived and/or modified CDS sequence (opt5) from hemagglutinin__InfluenzaA__AEO01480

SEQ ID NO: 199634 - RNA, 1701 nt, Artificial Sequence
  derived and/or modified CDS sequence (opt5) from hemagglutinin__InfluenzaA__AEO01482
augaaggccauccuggugguccuccuguacaccuucgcuacagccaacgcggacacgcuuugcauuggcuaucacgcuaauaacagcaccgauacaguugacaccgugcuggagaaaaaugugacagucacccauuccgugaaccuccuggaagauaagcacaaugggaaacuuuguaagcugagaggaguugcuccccuccaucugggcaaaugcaacaucgccggguggauucugggaaauccugagugugaaucucucagcacagccuccucuuggagcuacaucguggagaccuccucuagcgacaacggcacgugcuauccgggggauuuuauugacuacgaagaacugcgggagcagcuuuccagcgucucuuccuucgaacgcuuugagaucuuccccaagaccagcucuuggccuaaucacgauuccaacaagggagugacagccgcuuguccccaugccggcgcgaaaucuuuuuauaagaaucugaucuggcucguuaaaaagggcaacagcuacccuaaacuguccaagagcuauauuaaugacaaggggaaagaagugcuuguccuguggggaauccaccaccccuccaccucugccgaucaacagagccucuaccagaacgcugacgccuacguguucgugggcacauccagauauagcaagaaauuuaagccugagauugcuauccggccgaaaguccgcgaucaggaggggagaaugaauuacuauuggacccugguugaacccggagacaagauuacguucgaggccacaggcaaccugguggugccucgguacgcguuugccauggaacgcaacgcugggucuggaaucauuaucuccgauacccccguccaugacugcaauacaaccugucaaaccccuaaaggcgccaucaacacaagccuccccuuccagaauauucacccgaucacgauuggcaagugcccuaaguaugugaaaucuaccaagcugagacuugcuacagggcugcggaacguucccagcauccagucccgcggacucuuuggcgccauugccggguucaucgagggaggcuggaccgggaugguggacggaugguacggcuaucaucaccagaaugaacaaggcucuggguacgcugcggaucugaaaagcacacagaacgccaucgacaagauuaccaauaaagucaacuccgugaucgagaagaugaauacgcaguuuacagcuguuggaaaggaguucaaccaccuugagaaaagaauugagaaucugaacaagaaaguggaugacggcuuccucgauaucuggaccuacaaugccgaacugcugguccuccuggagaacgaacggacccuugacuaucaugauagcaaugugaagaaccuguacgagaaaguccgcucucagcucaagaacaaugccaaggagauugggaacggauguuuugaguucuaucacaaaugcaauaacacauguauggaauccgugaagaauggcaccuacgacuauccuaaauacagcgaagaggcuaagcugaacagagaagagaucgaugggguuaaacuugagucuacacggaucuaucaaauucuggccaucuacuccacgguggcgagcucccucguccuggugguuucucugggcgcuauuagcuuuuggaugugcuccaauggaucucuccagugccgcaucuguauuuga

SEQ ID NO: 199635 - RNA, 1701 nt, Artificial Sequence
  derived and/or modified CDS sequence (opt5) from hemagglutinin__InfluenzaA__AEO01483
augaaggccauccuggugguccuccuguacaccuucgcuacagccaacgcggacacgcuuugcauuggcuaucacgcuaauaacagcaccgauacaguugacaccgugcuggagaaaaaugugacagucacccauuccgugaaccuccuggaagauaagcacaaugggaaacuuuguaagcugagaggaguugcuccccuccaucugggcaaaugcaacaucgccggguggauucugggaaauccugagugugaaucucucagcacagccuccucuuggagcuacaucguggagaccuccaacucugacaauggcacgugcuauccgggggauuuuauugacuacgaagaacugcgggagcagcuuagcuccgucagcucuuucgaacgcuuugagaucuuccccaagaccuccagcuggccuaaccacgauucuaauaagggagugacagccgcuuguccccaugccggcgcgaaauccuuuuauaagaaccugaucuggcucguuaaaaagggcaauagcuacccuaaacugucuaaguccuauauuaacgacaaggggaaagaagugcuuguccuguggggaauccaccaccccagcaccuccgccgaucaacagucucucuaccagaaugcugacgccuacguguucgugggcacaagcagauauuccaagaaauuuaagccugagauugcuauccggccgaaaguccgcgaucaggaggggagaaugaacuacuauuggacccugguugaacccggagacaagauuacguucgaggccacaggcaaccugguggugccucgguacgcguuugccauggaacgcaaugcugggagcggaaucauuaucucugauacccccguccaugacugcaacacaaccugucaaaccccuaaaggcgccaucaauacaucccuccccuuccagaacauucacccgaucacgauuggcaagugcccuaaguaugugaaaagcaccaagcugagacuugcuacagggcugcggaauguucccucuauccagagccgcggacucuuuggcgccauugccggguucaucgagggaggcuggaccgggaugguggacggaugguacggcuaucaucaccagaacgaacaaggcuccggguacgcugcggaucugaaaucuacacagaaugccaucgacaagauuaccaacaaagucaauagcgugaucgagaagaugaacacgcaguuuacagcuguuggaaaggaguucaaucaccuugagaaaagaauugagaaccugaauaagaaaguggaugacggcuuccucgauaucuggaccuacaacgccgaacugcugguccuccuggagaaugaacggacccuugacuaucaugauuccaacgugaagaaccuguacgagaaaguccgcagccagcucaagaauaacgccaaggagauugggaauggauguuuugaguucuaucacaaaugcgacaacacauguauggaaucugugaagaauggcaccuacgauuauccuaaauacuccgaagaggcuaagcugaacagagaagagaucgacgggguuaaacuugagagcacacggaucuaucaaauucuggccaucuacucuacggcggcuuccagccucgugcuggucgugucccugggcgccauuucuuuuuggaugugcagcaauggaucccuccagugccgcaucuguauuuga

SEQ ID NO: 199636 - RNA, 1701 nt, Artificial Sequence
  derived and/or modified CDS sequence (opt5) from hemagglutinin__InfluenzaA__AEO01484
augaaggccauccuggugguccuccuguacaccuucgcuacagccaacgcggacacgcuuugcauuggcuaucacgcuaauaacagcaccgauacaguugacaccgugcuggagaaaaaugugacagucacccauuccgugaaccuccuggaagauaagcacaaugggaaacuuuguaagcugaaaggaguugcgccccuccaucugggcaagugcgacaucgccggguggauucugggaaacccugagugugaaucucucagcacagcuuccucuuggagcuacaucguggagaccuccucuagcgauaauggcacgugcuauccgggggacuuuauugauuacgaagaacugagagagcagcuuuccagcgucucuuccuucgaacgguuugagaucuuccccaagaccagcucuuggccuaaccacgacuccaauaaaggagugacagccgcuuguccccaugccggcgccaagagcuuuuauaaaaaccugaucuggcucguuaagaaaggcaauucuuacccuaagcuguccaagagcuauauuaacgauaaagggaaggaagugcuuguccuguggggaauccaccaccccuccaccucugccgaccaacagagccucuaccagaaugcugaugccuacguguucgugggcacaucccgcuauagcaaaaaguuuaaaccugagauugcuaucagaccgaagguccgggaccaggaggggcgcaugaacuacuauuggacccugguugaacccggagauaaaauuacguucgaggccacaggcaaucugguggugccuagauacgcguuugccauggaacggaacgcugggucuggaaucauuaucuccgacacccccguccaugacugcaacacaaccugucaaaccccuaagggcgccaucaauacaagccuccccuuccagaacauucacccgaucacgauuggcaagugcccuaaauaugugaagucuaccaaacugcgccuugcuacagggcugagaaauguucccagcauccagucccggggacucuuuggcgccauugccggguucaucgagggaggcuggaccgggaugguggauggaugguacggcuaucaucaccagaacgaacaaggcucuggguacgcugcggaccuuaagagcacacagcacgccaucgaugagauuaccaauaaagucaacuccgugaucgagaagaugaauacgcaguuuacagcuguuggaaaggaguucaaccaucuggagaaacgcauugaaaaucugaacaagaaaguggacgauggcuuccucgacaucuggaccuacaaugccgagcugcugguccuccuggaaaacgagagaacccuugauuaucacgacagcaaugugaagaaccuguacgagaaaguccggucucagcucaagaauaacgccaaggaaauugggaacggauguuuugaguucuaucauaaaugcgauaauacauguauggaauccgugaagaacggcaccuacgacuauccuaaauacagcgaggaagcuaagcugaaucgcgaggagaucgaugggguuaaacuugaaucuacaagaaucuaucaaauucuggccaucuacuccacgguggcgagcucccucguccuggugguuucucugggcgcuauuagcuuuuggaugugcuccaacggaucucuccagugccggaucuguauuuga

SEQ ID NO: 199637 - RNA, 1701 nt, Artificial Sequence
  derived and/or modified CDS sequence (opt5) from hemagglutinin__InfluenzaA__AEO01485
augaaggccauccuggugguccuccuguacaccuucgcuacagccaacgcggacacgcuuugcauuggcuaucacgcuaauaacagcaccgauacaguugacaccgugcuggagaagaaugugacagucacccauuccgugaaccuccuggaagauaagcacaaugggaaacuuuguaagcugagaggaguugcuccccuccaucugggcaaaugcaacaucgccggguggauucugggaaauccugagugugaaucucucagcacagccuccucuuggagcuacaucguggagaccuccucuagcgacaacggcacgugcuauccgggggauuuuauugacuacgaagaacugcgggagcagcuuuccagcgucucuuccuucgaacgcuuugagaucuuccccaagaccagcucuuggccuaaucacgauuccaacaagggagugacagccgcuuguccccaugccggcgcgaaaucuuuuuauaagaaucugaucuggcucguuaaaaagggcaacagcuacccuaaacuguccaagagcuauauuaaugacaaggggaaagaagugcuuguccuguggggaauccaccaccccuccaccucugccgaucaacagagccucuaccagaacgcugacgccuacguguucgugggcacauccagauauagcaagaaauuuaagccugagauuaccauccggccgaaaguccgcgaucaggaggggagaaugaauuacuauuggacgcugguugaacccggagacaagauuacauucgaggcuaccggcaaccugguggugccucgguacgccuuugcgauggaacgcaacgccgggucuggaaucauuaucuccgauacacccguccaugacugcaauaccaccugucaaacaccuaaaggcgcuaucaacacgagccuccccuuccagaauauucacccgaucaccauuggcaagugcccuaaguaugugaaaucuacaaagcugagacuugccaccgggcugcggaacguucccagcauccagucccgcggacucuuuggcgcuauugccggguucaucgagggaggcuggacagggaugguggacggaugguacggcuaucaucaccagaaugaacaaggcucuggguacgccgcugaucugaaaagcacccagaacgcgaucgacgagauuacgaauaaggucaacuccgugaucgagaaaaugaauacacaguuuaccgccguuggaaaggaguucaaccaccuugagaagagaauugaaaaucugaacaaaaagguggaugacggcuuccucgauaucuggaccuacaaugcugagcugcugguccuccuggaaaacgagcggacacuugacuaucaugauagcaaugugaaaaaccuguacgagaagguccgcucucagcucaaaaacaaugccaaggaaauugggaacggauguuuugaguucuaucacaagugcgacaauaccuguauggaauccgugaaaaacggcacauacgauuauccuaaguacagcgaggaagccaaacugaauagagaggagaucgacgggguuaaacuugaaucuacgcggaucuaucaaauucuggcuaucuacuccaccguggccagcucccucguccuggugguuucucugggcgcgauuagcuuuuggaugugcuccaacggaucucuccagugccgcaucuguauuuga

SEQ ID NO: 199638 - RNA, 1701 nt, Artificial Sequence
  derived and/or modified CDS sequence (opt5) from hemagglutinin__InfluenzaA__AEO01487
augaaggccauccuggugguccuccuguacaccuucgcuacagccaacgcggacacgcuuugcauuggcuaucacgcuaauaacagcaccgauacaguugacaccgugcuggagaaaaaugugacagucacccauuccgugaaccuccuggaagauaagcacaaugggaaacuuuguaagcugagaggaguugcuccccuccaucugggcaaaugcaacaucgccggguggauucugggaaauccugagugugaaucucucagcacagccuccucuuggagcuacaucguggagaccuccucuagcgacaacggcacgugcuauccgggggauuuuauugacuacgaagaacugcgggagcagcuuuccagcgucucuuccuucgaacgcuuugagaucuuccccaagaccagcucuuggccuaaucacgauuccaacaagggagugacagccgcuuguccccaugccggcgcgaaaucuuuuuauaagaaucugaucuggcucguuaaaaagggcaacagcuacccuaaacuguccaagagcuauauuaaugacaaggggaaagaagugcuuguccuguggggaauccaccaccccuccaccucugccgaucaacagagccucuaccagaacgcugacgccuacguguucgugggcacauccagauauagcaagaaauuuaagccugagauugcuauccggccgaaaguccgcgaucaggaggggagaaugaauuacuauuggacccugguugaacccggagacaagauuacguucgaggccacaggcaaccugguggugccucgguacgcguuugccauggaacgcaacgcugggucuggaaucauuaucuccgauacccccguccaugacugcaauacaaccugucaaaccccuaaaggcgccaucaacacaagccuccccuuccagaauauucacccgaucacgauuggcaagugcccuaaguaugugaaaucuaccaagcugagacuugcuacagggcugcggaacguucccagcauccagucccgcggacucuuuggcgccauugccggguucaucgagggaggcuggaccgggaugguggacggaugguacggcuaucaucaccagaaugaacaaggcucuggguacgcugcggaucugaaaagcacacagaacgccaucgacgagauuaccaauaaggucaacuccgugaucgagaaaaugaauacgcaguuuacagcuguuggaaaggaguucaaccaccuugagaagagaauugaaaaucugaacaaaaagguggaugacggcuuccucgauaucuggaccuacaaugccgagcugcugguccuccuggaaaacgagcggacccuugacuaucaugauagcaaugugaaaaaccuguacgagaagguccgcucucagcucaaaaacaaugccaaggaaauugggaacggauguuuugaguucuaucacaagugcgacaauacauguauggaauccgugaaaaacggcaccuacgauuauccuaaguacagcgaggaagcuaaacugaauagagaggagaucgacgggguuacacuugaaucuacgcggaucuaucaaauucuggccaucuacuccaccguggcgagcucccucguccuggugguuucucugggcgcuauuagcuuuuggaugugcuccaacggaucucuccagugccgcaucuguauuuga

SEQ ID NO: 199639 - RNA, 1701 nt, Artificial Sequence
  derived and/or modified CDS sequence (opt5) from hemagglutinin__InfluenzaA__AEO01488
augaaggccauccuggugguccuccuguacaccuucgcuacagccaacgcggacacgcuuugcauuggcuaucacgcuaauaacagcaccgauacaguugacaccgugcuggagaagaaugugacagucacccauuccgugaaccuccuggaagauaagcacaaugggaaacuuuguaagcugagaggaguugcuccccuccaucugggcaaaugcaacaucgccggguggauucugggaaauccugagugugaaucucucagcacagccuccucuuggagcuacaucguggagaccuccucuagcgacaacggcacgugcuauccgggggauuuuauugacuacgaagaacugcgggagcagcuuuccagcgucucuuccuucgaacgcuuugagaucuuccccaagaccagcucuuggccuaaucacgauuccaacaagggagugacagccgcuuguccccaugccggcgcgaaaucuuuuuauaagaaucugaucuggcucguuaaaaagggcaacagcuacccuaaacuguccaagagcuauauuaaugacaaggggaaagaagugcuuguccuguggggaauccaccaccccuccaccucugccgaucaacagagccucuaccagaacgcugacgccuacguguucgugggcacauccagauauagcaagaaauuuaagccugagauugcuauccggccgaaaguccgcgaucaggaggggagaaugaauuacuauuggacccugguugaacccggagacaagauuacguucgaggccacaggcaaccugguggugccucgguacgcguuuaccauggaacgcaacgccgggucuggaaucauuaucuccgauacacccguccaugacugcaauaccaccugucaaacaccuaaaggcgcuaucaacacgagccuccccuuccagaauauucacccgaucaccauuggcaagugcccuaaguaugugaaaucuacaaagcugagacuugccaccgggcugcggaacguucccagcauccagucccgcggacucuuuggcgcuauugccggguucaucgagggaggcuggacagggaugguggacggaugguacggcuaucaucaccagaaugaacaaggcucuggguacgccgcugaucugaaaagcacccagaacgcgaucgacggaauuacgaauaaggucaacuccgugaucgagaaaaugaauacacaguuuaccgccguuggcaaggaguucaaccaccuugaaaagagaauugagaaucugaacaaaaagguggaugacggguuccucgauaucuggaccuacaaugcugaacugcugguccuccuggagaacgaacggacacuugacuaucaugauagcaaugugaaaaaccuguacgagaagguccgcucucagcucaaaaacaaugccaaggagauuggaaacggcuguuuugaguucuaucacaagugcgacaauaccuguauggaguccgugaaaaacgggacauacgauuauccuaaguacagcgaagaggccaaacugaauagagaagagaucgacggcguuaaacuugagucuacgcggaucuaucaaauucuggcuaucuacuccaccguggccagcucccucguccuggugguuucucugggagcgauuagcuuuuggaugugcuccaacggcucucuccagugccgcaucuguauuuga

SEQ ID NO: 199640 - RNA, 1701 nt, Artificial Sequence
  derived and/or modified CDS sequence (opt5) from hemagglutinin__InfluenzaA__AEO01489
augaaggccauccuggugguccuccuguacaccuucgcuacagccaacgcggacacgcuuugcauuggcuaucacgcuaauaacagcaccgauacaguugacaccgugcuggagaaaaaugugacagucacccauuccgugaaccuccuggaagauaagcacaaugggaaacuuuguaagcugagaggaguugcuccccuccaucugggcaaaugcaacaucgccggguggauucugggaaauccugagugugaaucucucagcacagccuccucuuggagcuacaucguggagaccuccucuagcgacaacggcacgugcuauccgggggauuuuauugacuacgaagaacugcgggagcagcuuuccagcgucucuuccuucgaacgcuuugagaucuuccccaagaccagcucuuggccuaaucacgauuccaacaagggagugacagccgcuuguccccaugccggcgcgaaaucuuuuuauaagaaucugaucuggcucguuaaaaagggcaacagcuacccuaaacuguccaagagcuauauuaaugacaaggggaaagaagugcuuguccuguggggaauccaccaccccuccaccucugccgaucaacagagccucuaccagaacgcugacgccuacguguucgugggcacauccagauauagcaagaaauuucggccugagauugcuauccgcccgaaggucagagaucaggaggggcggaugaauuacuauuggacccugguugaacccggagacaaaauuacguucgaggccacaggcaaccugguggugccucgcuacgcguuugccauggaaagaaacgcugggucuggaaucauuaucuccgauacccccguccaugacugcaauacaaccugucaaaccccuaagggcgccaucaacacaagccuccccuuccagaauauucacccgaucacgauuggcaaaugcccuaaguaugugaagucuaccaaacugcggcuugcuacagggcugcgcaacguucccagcauccaguccagaggacucuuuggcgccauugccggguucaucgagggaggcuggaccgggaugguggacggaugguacggcuaucaucaccagaaugaacaaggcucuggguacgcugcggaucuuaagagcacacagaacgccaucgacgagauuaccaauaaagucaacuccgugaucgagaagaugaauacgcaguuuacagcuguuggaaaagaguucaaccaccuggagaagcggauugaaaaucugaacaagaaaguggaugacggcuuccucgauaucuggaccuacaaugccgagcugcugguccuccuggaaaacgagcgcacccuugacuaucaugauagcaaugugaagaaccuguacgagaaagucagaucucagcucaagaacaaugccaaagaaauugggaacggauguuuugaguucuaucacaagugcgacaauacauguauggaauccgugaagaacggcaccuacgauuauccuaaauacagcgaggaagcuaagcugaaucgggaggagaucgacgggguuaaacuugaaucuacacgcaucuaucaaauucuggccaucuacuccacgguggcgagcucccucguccuggugguuucucugggcgcuauuagcuuuuggaugugcuccaacggaucucuccagugcagaaucuguauuuga

SEQ ID NO: 199641 - RNA, 1701 nt, Artificial Sequence
  derived and/or modified CDS sequence (opt5) from hemagglutinin__InfluenzaA__AEO01490
augaaggccauccuggugguccuccuguacaccuucgcuacagccaacgcggacacgcuuugcauuggcuaucacgcuaauaacagcaccgauacaguugacaccgugcuggagaaaaaugugacagucacccauuccgugaaccuccuggaagauaagcacaaugggaaacuuuguaagcugagaggaguugcuccccuccaucugggcaaaugcaacaucgccggguggauucugggaaauccugagugugaaucucucagcacagccuccucuuggagcuacaucguggagaccuccucuagcgacaacggcacgugcuauccgggggauuuuauugacuacgaagaacugcgggagcagcuuuccagcgucucuuccuucgaacgcuuugagaucuuccccaagaccagcucuuggccuaaucacgauuccaacaagggagugacagccgcuuguccccaugccggcgcgaaaucuuuuuauaagaaucugaucuggcucguuaaaaagggcaacagcuacccuaaacuguccaagagcuauauuaaugacaaggggaaagaagugcuuguccuguggggaauccaccaccccuccaccucugccgaucaacagagccucuaccagaacgcugacgccuacguguucgugggcacauccagauauagcaagaaauuuaagccugagauugcuauccggccgaaaguccgcgaucaggaggggagaaugaauuacuauuggacccugguugaacccggagacaagauuacguucgaggccacaggcaaccugguggugccucgguacgcguuugccauggaacgcaacgcugggucuggaaucauuaucuccgauacccccguccaugacugcaauacaaccugucaaaccccuaaaggcgccaucaacacaagccuccccuuccagaauauucacccgaucacgauuggcaagugcccuaaguaugugaaaucuaccaagcugagaauggcuacagggcuucggaacguucccagcauccagucccgcggacuguuuggcgccauugccggguucaucgagggaggcuggaccgggaugguggacggaugguacggcuaucaucaccagaaugaacaaggcucuggguacgcugcggaucucaaaagcacacagaacgccaucgacgagauuaccaauaaggucaacuccgugaucgagaaaaugaauacgcaguuuacagcuguuggaaaggaguucaaccaccuggagaagagaauugaaaaucuuaacaaaaagguggaugacggcuuccuggauaucuggaccuacaaugccgagcuccugguccugcucgaaaacgagcggacccuggacuaucaugauagcaaugugaaaaaccuuuacgagaagguccgcaaccagcugaaaaauaacgccaaggaaauugggaauggauguuuugaguucuaucacaagugcgacaacacauguauggaaucugugaaaaauggcaccuacgauuauccuaaguacuccgaggaagcuaaacucaacagagaggagaucgacgggguuaagcuggaaagcacacggaucuaucaaauucuugccaucuacucuacgguggcguccagccugguccucgugguuucccugggcgcuauuucuuuuuggaugugcagcaauggaucccugcagugccgcaucuguauuuga

SEQ ID NO: 199642 - RNA, 1701 nt, Artificial Sequence
  derived and/or modified CDS sequence (opt5) from hemagglutinin__InfluenzaA__AEO01491
augaaggccauccuggugguccuccuguacaccuucgcuacagccaacgcggacacgcuuugcauuggcuaucacgcuaauaacagcaccgauacaguugacaccgugcuggagaagaaugugacagucacccauuccgugaaccuccuggaagauaaguacaaugggaaacuuuguaagcugagaggaguugcuccccuccaccugggcaaaugcaacaucgccggguggauucugggaaauccugagugugaaucucucagcacagccuccucuuggagcuauaucguggagaccuccucuagcgacaacggcacgugcuacccgggggauuuuauugacuaugaagaacugcgggagcagcuuuccagcgucucuuccuucgaacgcuuugagaucuuccccaagaccagcucuuggccuaaucaugauuccaacaagggagugacagccgcuuguccccacgccggcgcgaaaucuuuuuacaagaaucugaucuggcucguuaaaaagggcaacagcuauccuaaacuguccaagagcuacauuaaugacaaggggaaagaagugcuuguccuguggggaauccaucaccccuccaccucugccgaucaacagagccucuaccagaacgcugacgccuauguguucgugggcacauccagauacagcaagaaauuuaagccugagauugcuauccggccgaaaguccgcgaucaggaggggagaaugaauuaucacuggacccugguugaacccggagacaagauuacguucgaggccacaggcaaccugguggugccucgguacgcguuugccauggaacgcaacgcugggucuggaaucauuaucuccgauacccccguccaugacugcaauacaaccugucaaaccccuaaaggcgccaucaacacaagccuccccuuccagaauauucacccgaucacgauuggcaagugcccuaaguaugugaaaucuaccaagcugagacuugcuacagggcugcggaacguucccagcauccagucccgcggacucuuuggcgccauugccggguucaucgagggaggcuggaccgggaugguggacggaugguacggcuaucaucaccagaaugaacaaggcucuggguacgcugcggaucugaaaagcacacagaacgccaucgacgagauuaccaauaaggucaacuccgugaucgagaaaaugaauacgcaguuuacagcuguuggaaaggaguucaaccaccuugagaagagaauugaaaaucugaacaaaaagguggaugacggcuuccucgauaucuggaccuacaaugccgagcugcugguccuccuggaaaacgagcggacccuugacuaucaugauagcaaugugaaaaaccuguacgagaagguccgcucucagcucaaaaacaaugccaaggaaauugggaacggauguuuugaguucuaucacaagugcgacaauacauguauggaauccgugaaaaacggcaccuacgauuauccuaaguacagcgaggaagcuaaacugaauagagaggagaucgacgggguuaaacuugaaucuacacggaucuaucaaauucuggccaucuacuccacgguggcgagcucccucguccuggugguuucucugggcgcuauuagcuuuuggaugugcuccaacggaucucuccagugccgcaucuguauuuga

SEQ ID NO: 199643 - RNA, 1701 nt, Artificial Sequence; identical to SEQ ID NO: 199510
  derived and/or modified CDS sequence (opt5) from hemagglutinin__InfluenzaA__AEO01492

SEQ ID NO: 199644 - RNA, 1701 nt, Artificial Sequence
  derived and/or modified CDS sequence (opt5) from hemagglutinin__InfluenzaA__AEO01493
augaaggccauccuggugguccuccuguacaccuucgcuacagccaacgcggacacgcuuugcauuggcuaucacgcuaauaacagcaccgauacaguugacaccgugcuggagaaaaaugugacagucacccauuccgugaacauccucgaagauaagcacaaugggaaacuguguaaacuuagaggaguugcuccccugcaucucggcaagugcaacauugccggguggauccugggaaauccugagugugaaucucugagcacagccuccucuuggagcuacauuguggagaccuccucuagcgacaacggcacgugcuauccgggggauuuuaucgacuacgaagaacuccgggagcagcuguccagcgucucuuccuucgaacgcuuugagaucuuccccaagaccagcucuuggccuaaucacgauuccaacaagggagugacagccgcuuguccccaugccggcgcgaaaucuuuuuauaagaaucuuauuuggcugguuaaaaagggcaacagcuacccuaaacucuccaagagcuauaucaaugacaaggggaaagaagugcugguccuuuggggcauucaccaccccuccaccucugccgaucaacagagccuguaccagaacgcugacgccuacguguucgugggaacauccagauauagcaagaaauuuaagccugagaucgcuauucggccgaaaguccgcgaucaggaggggagaaugaauuacuauuggacccucguugaacccggagacaagaucacguucgaggccacaggcaaccugguggugccucgguacgcguuugccauggaacgcucugcuggguccggaauuaucaucagcgauacccccguccaugacugcaacacaaccugucaaaccccuaaaggcgccauuaauacaucucugcccuuccagaacauccacccgauuacgaucggcaagugcccuaaguaugugaaaagcaccaagcucagacuggcuacagggcuucggaauguucccuccauucagucucgcggacuguuuggcgccaucgccggguucaucgagggaggcuggaccgggaugguggacggaugguacggcuaucaucaccagaacgaacaaggcagcggguacgcugcggaucucaaauccacacagaaugccauugacgagaucaccaacaaggucaauagcgugauugagaaaaugaacacgcaguuuacagcuguuggaaaggaguucaaucaccuggagaagagaaucgaaaaccuuaauaaaaagguggaugacggcuuccuggauauuuggaccuacaacgccgagcuccugguccugcucgaaaaugagcggacccuggacuaucaugauucuaacgugaaaaaucuuuacgagaagguccgcucccagcugaaaaacaacgccaaggaaaucgggaauggauguuuugaguucuaucacaagugcgacaacacauguauggaaagcgugaaaaauggcaccuacgauuauccuaaguacucugaggaagcuaaacucaacagagaggagaucgacgggguuaagcuggaauccacacggauuuaucaaauccuugccauuuacagcacgguggcguccucucugguccucgugguuagccugggcgcuaucuccuuuuggaugugcucuaauggaagccugcagugccgcauuuguaucuga

SEQ ID NO: 199645 - RNA, 1701 nt, Artificial Sequence
  derived and/or modified CDS sequence (opt5) from hemagglutinin__InfluenzaA__AEO01494
augaaggccauccuggugguccuccuguacaccuucgcuacagccaacgcggacacgcuuugcaccggcuaucacgcuaauaacagcacagauaccguugacacagugcuggagaagaaugugaccgucacacauuccgugaaccuccuggaagauaagcacaaugggaaacuuuguaagcugagaggaguugcuccccuccaucugggcaaaugcaacauugccggguggauccugggaaauccugagugugaaucucucagcaccgccuccucuuggagcuacauuguggagacguccucuagcgacaacggaaccugcuauccgggggauuuuaucgacuacgaagaacugcgggagcagcuuuccagcgucucuuccuucgaacgcuuugagauuuuccccaagacaagcucuuggccuaaucacgauuccaacaagggagugaccgccgcuuguccccaugccggcgcgaaaucuuuuuauaagaaucugaucuggcucguuaaaaagggcaacagcuacccuaaacuguccaagagcuauaucaaugacaaggggaaagaagugcuuguccuguggggcauucaccaccccuccacaucugccgaucaacagagccucuaccagaacgcugacgccuacguguucgugggcaccuccagauauagcaagaaauuuaagccugagaucgcuauucggccgaaaguccgcgaucaggaggggagaaugaauuacuauuggacgcugguugaacccggagacaagaucacauucgaggccaccggcaaccugguggugccucgguacgcguuugccauggaacgcaacgcugggucuggaauuaucauuuccgauacacccguccaugacugcaauaccaccugucaaacaccuaaaggcgccaucaacacgagccuccccuuccagaauauccacccgauuaccaucggcaagugcccuaaguaugugaaaucuacaaagcugagacuugcuaccgggcugcggaacguucccagcauucagucccgcggacucuuuggcgccaucgccggguucauugagggaggcuggacagggaugguggacggaugguacggcuaucaucaccagaaugaacaaggcucuggguacgcugcggaucugaaaagcacccagaacgccaucgacgagaucacgaauaaggucaacuccgugauugagaaaaugaauacacaguuuaccgcuguuggaaaggaguucaaccaccuugagaagagaaucgaaaaucugaacaaaaagguggaugacggcuuccucgauauuuggaccuacaaugccgagcugcugguccuccuggaaaacgagcggacacuugacuaucaugauagcaaugugaaaaaccuguacgagaagguccgcaaccagcucaaaaauaacgccaaggaaaucgggaauggauguuuugaguucuaucacaagugcgacaacaccuguauggaaucugugaaaaauggcacauacgauuauccuaaguacuccgaggaagcuaaacugaacagagaggagauugacgggguuaaacuugaaagcacgcggaucuaucaaauccuggccauuuacucuaccguggcguccagccucguccuggugguuucccugggcgcuaucucuuuuuggaugugcagcaauggaucccuccagugccgcauuuguaucuga

SEQ ID NO: 199646 - RNA, 1701 nt, Artificial Sequence; identical to SEQ ID NO: 196338
  derived and/or modified CDS sequence (opt5) from hemagglutinin__InfluenzaA__AEO01496

SEQ ID NO: 199647 - RNA, 1701 nt, Artificial Sequence; identical to SEQ ID NO: 195094
  derived and/or modified CDS sequence (opt5) from hemagglutinin__InfluenzaA__AEO01497

SEQ ID NO: 199648 - RNA, 1701 nt, Artificial Sequence; identical to SEQ ID NO: 196338
  derived and/or modified CDS sequence (opt5) from hemagglutinin__InfluenzaA__AEO01498

SEQ ID NO: 199649 - RNA, 1701 nt, Artificial Sequence
  derived and/or modified CDS sequence (opt5) from hemagglutinin__InfluenzaA__AEO01499
augaaggccauccuggugguccuccuguacaccuucgcuauugccaacgcggacacacuuugcaucggcuaucacgcuaauaacagcacggauaccguugacacagugcuggagaagaaugugaccgucacacauuccgugaaccuccuggaagauaagcacaaugggaaacuuuguaagcugagaggaguugcuccccuccaucugggcaaaugcaacauugccggguggauccugggaaauccugagugugaaucucucagcaccgccuccucuuggagcuacauuguggagacauccucuagcgacaacggaaccugcuauccgggggauuuuaucgacuacgaagaacugcgggagcagcuuuccagcgucucuuccuucgaacgcuuugagaucuuccccaagacgagcucuuggccuaaucacgauuccaacaagggagugaccgccgcuuguccccaugccggcgcgaaaucuuuuuauaagaaucugauuuggcucguuaaaaagggcaacagcuacccuaaacuguccaagagcuauaucaaugacaaggggaaagaagugcuuguccuguggggcauucaccaccccuacacauccgccgaucaacagucucucuaccagaacgcugacgccuauguguucgugggcaccagcagauacuccaagaaauuuaagccugagaucgcuauucggccgaaaguccgcgaucaggaggggagaaugaauuauuacuggacacugguugaacccggagacaagaucaccuucgaggccacgggcaaccugguggugccucgguaugcguuugccauggaacgcaacgcugggagcggaauuaucaucucugauacacccguccaugacugcaauaccacaugucaaaccccuaaaggcgccauuaacaccucccuccccuuccagaauauccacccgauuacaaucggcaagugcccuaaguacgugaaaagcacgaagcugagacuugcuaccgggcugcggaacguucccucuauucagagccgcggacucuuuggcgccaucgccggguucaucgagggaggcuggacagggaugguggacggaugguauggcuaccaucaccagaaugaacaaggcuccggguacgcugcggaucugaaaucuacccagcacgccauugacgagaucacaaacaaggucaauagcgugauugagaaaaugaacacccaguuuacggcuguuggaaaggaguucaaucaucuugagaagagaaucgaaaaccugaauaaaaagguggaugacggcuuccucgauauuuggacauauaacgccgagcugcugguccuccuggaaaaugagcggacccuugacuaccacgauuccaacgugaaaaaucuguaugagaagguccgcagccagcucaaaaacaacgccaaggaaaucgggaauggauguuuugaguucuaccauaagugcgacaacaccuguauggaaucugugaaaaauggcacauaugauuacccuaaguauuccgaggaagcuaaacugaacagagaggagaucaaugggguuaaacuugaaagcacccggauuuaccaaauccuggccauuuacucuacaguggcguccagccucguccuggugguuucccugggcgcuaucucuuuuuggaugugcagcaacggaucccuccagugccgcauuuguaucuga

SEQ ID NO: 199650 - RNA, 1701 nt, Artificial Sequence; identical to SEQ ID NO: 195842
  derived and/or modified CDS sequence (opt5) from hemagglutinin__InfluenzaA__AEO01500

SEQ ID NO: 199651 - RNA, 1701 nt, Artificial Sequence; identical to SEQ ID NO: 195905
  derived and/or modified CDS sequence (opt5) from hemagglutinin__InfluenzaA__AEO01501

SEQ ID NO: 199652 - RNA, 1701 nt, Artificial Sequence; identical to SEQ ID NO: 195905
  derived and/or modified CDS sequence (opt5) from hemagglutinin__InfluenzaA__AEO01502

SEQ ID NO: 199653 - RNA, 1701 nt, Artificial Sequence; identical to SEQ ID NO: 196161
  derived and/or modified CDS sequence (opt5) from hemagglutinin__InfluenzaA__AEO01503

SEQ ID NO: 199654 - RNA, 1701 nt, Artificial Sequence; identical to SEQ ID NO: 196338
  derived and/or modified CDS sequence (opt5) from hemagglutinin__InfluenzaA__AEO01505

SEQ ID NO: 199655 - RNA, 1701 nt, Artificial Sequence; identical to SEQ ID NO: 195842
  derived and/or modified CDS sequence (opt5) from hemagglutinin__InfluenzaA__AEO01506

SEQ ID NO: 199656 - RNA, 1701 nt, Artificial Sequence; identical to SEQ ID NO: 199450
  derived and/or modified CDS sequence (opt5) from hemagglutinin__InfluenzaA__AEO01507

SEQ ID NO: 199657 - RNA, 1701 nt, Artificial Sequence; identical to SEQ ID NO: 196338
  derived and/or modified CDS sequence (opt5) from hemagglutinin__InfluenzaA__AEO01508

SEQ ID NO: 199658 - RNA, 1701 nt, Artificial Sequence; identical to SEQ ID NO: 196069
  derived and/or modified CDS sequence (opt5) from hemagglutinin__InfluenzaA__AEO01510

SEQ ID NO: 199659 - RNA, 1701 nt, Artificial Sequence
  derived and/or modified CDS sequence (opt5) from hemagglutinin__InfluenzaA__AEO01511
augaaggccauccuggugguccuccuguacaccuucgcuacagccaacgcggacacgcuuugcauuggcuaucacgcuaauaacagcaccgauacaguugacaccgugcuggagaaaaaugugacagucacccauuccgugaaccuccuggaagauaagcacaaugggaaacuuuguaagcugagaggaguuacaccccuccaucugggcaaaugcaacaucgccggguggauucugggaaauccugagugugaaucucucagcaccacguccucuuggagcuacaucguggagaccuccucuagcgacaacggcacaugcuauccgggggauuuuauugacuacgaagaacugcgggagcagcuuuccagcgucucuuccuucgaacgcuuugagaucuuccccaagaccagcucuuggccuaaucacgauuccaacaagggagugacagccgcuuguccccaugccggcgcuaagagcuuuuauaaaaaucugaucuggcucguuaaaaagggcaacucuuacccuaaacuguccaagagcuauauuaaugacaaggggaaagaagugcuuguccuguggggaauccaccaccccuccaccucugccgaucaacagagccucuaccagaacgcggacgccuacguguucgugggcacguccagauauagcaagaaauuuaagccugagauugcuauccggccgaaaguccgcgagcaggaagggagaaugaauuacuauuggacacugguugagcccggagauaagauuaccuucgaagccacaggcaaccugguggugccucgguacgcuuuugccauggagcgcaacgcggggucuggaaucauuaucuccgacacccccguccaugauugcaauaccacaugucaaacgccuaaaggcgccaucaacaccagccuccccuuccagaauauucacccgaucacaauuggcaagugcccuaaguaugugaaaucuaccaagcugagacuugcuacagggcugcggaacguucccagcauccagucccgcggacucuuuggcgccauugcuggguucaucgaaggaggcuggaccgggaugguggacggaugguacggcuaucaucaccagaaugagcaaggcucuggguacgccgccgaccugaaaagcacgcagaacgcuaucgauaagauuacaaauaaagucaacuccgugaucgagaagaugaauacccaguuuaccgcgguuggaaaggaguucaaccaccuugagaaaagaauugaaaaucugaacaagaaaguggacgauggcuuccucgacaucuggacauacaaugccgagcugcugguccuccuggaaaacgagcggacccuugauuaucaugacagcaaugugaagaaccuguacgagaaaguccgcucucagcucaagaacaaugcuaaggaaauugggaacggauguuuugaguucuaucacaaaugcgauaauacauguauggaauccgugaagaacggcacguacgacuauccuaaauacagcgaggaagccaagcugaauagagaggagaucgaugggguuaaacuugaaucuacccggaucuaucaaauucuggccaucuacuccacaguggcuagcucccucguccuggugguuucucugggcgccauuagcuuuuggaugugcuccaacggaucucuccagugccgcaucuguauuuga

SEQ ID NO: 199660 - RNA, 1701 nt, Artificial Sequence
  derived and/or modified CDS sequence (opt5) from hemagglutinin__InfluenzaA__AEO01512
augaaggccauccuggugguccuccuguacaccuucgcuacagccaacgcggacacgcuuugcauuggcuaucacgcuaauaacagcaccgauacaguugacaccgugcuggagaaaaaugugacagucacccauuccgugaaccuccuggaagauaagcacaaugggaaacuuuguaagcugagaggaguugcuccccuccaucugggcaaaugcaacaucgccggguggauucugggaaauccugagugugaaucucucagcacagccuccucuuggagcuacaucguggagaccuccucuagcgacaacggcacgugcuauccgggggauuuuauugacuacgaagaacugcgggagcagcuuuccagcgucucuuccuucgaacgcuuugagaucuuccccaagaccagcucuuggccuaaucacgauuccaacaagggagugacagccgcuuguccccaugccggcgcgaaaucuuuuuauaagaaucugaucuggcucguuaaaaagggcaacagcuacccuaaacuguccaagagcuauauuaaugacaaggggaaagaagugcuuguccuguggggaauccaccaccccuccaccucugccgaucaacagagccucuaccagaacgcugacgccuacguguucgugggcacauccagauauagcaagaaauuuaagccugagauugcuauccggccgaaaguccgcgagcaggaagggagaaugaauuacuauuggacccugguugagcccggagauaagauuacguucgaagccacaggcaaccugguggugccucgguacgcguuugccauggagcgcaacgcugggucuggaaucauuaucuccgacacccccguccaugauugcaauacaaccugucaaaccccuaaaggcgccaucaacacaagccuccccuuccagaauauucacccgaucacgauuggcaagugcccuaaguaugugaaaucuaccaagcugagacuugcuacagggcugcggaacguucccagcauccagucccgcggacucuuuggcgccauugccggguucaucgaaggaggcuggaccgggaugguggacggaugguacggcuaucaucaccagaaugagcaaggcucuggguacgcugcggaccugaaaagcacacagaacgccaucgaugagauuaccaauaaggucaacuccgugaucgagaaaaugaauacgcaguuuacagcuguuggaaaggaguucaaccaccuugaaaagagaauugagaaucugaacaaaaagguggacgauggcuuccucgacaucuggaccuacaaugccgaacugcugguccuccuggagaacgagcggacccuugauuaucaugacagcaaugugaaaaaccuguacgaaaagguccgcucucagcucaaaaacaaugccaaggagauugggaacggauguuuugaguucuaucacaagugcgauaauaaauguauggaauccgugaagaacggcacauacgacuauccuaaauacagcgaagaggcuaagcugaauagagaggaaaucgaugggguuaaacuugagucuacccggaucuaucaaauucuggccaucuacuccacaguggcgagcucccucguccuggugguuucucugggcgcuauuagcuuuuggaugugcuccaacggaucucuccagugccgcaucuguauuuga

SEQ ID NO: 199661 - RNA, 1701 nt, Artificial Sequence
  derived and/or modified CDS sequence (opt5) from hemagglutinin__InfluenzaA__AEO01513
augaaggccauccuggcugugcuccuguacaccuucgccacagcgaacgcugacacgcuuugcauuggcuaucacgccaauaacagcaccgauacagucgacaccguucuggagaaaaaugugacagugacccauuccgucaacauccucgaagauaagcacaaugggaaacuguguaaacuuagaggaguggcuccccugcaucucggcaaaugcaacauugccggguggauccugggaaauccugagugugaaucucugagcacagccuccucuuggagcuacauuguugagaccuccucuagcgacaacggcacgugcuauccgggggauuuuaucgacuacgaagaacuccgggagcagcuguccagcgugucuuccuucgaacgcuuugagaucuuccccaagaccagcucuuggccuaaucacgauuccaacaagggagucacagcugccuguccccaugcgggcgccaagagcuuuuauaagaaucuuauuuggcuggugaaaaagggcaacucuuacccuaaacucuccaagagcuauaucaaugacaaggggaaagaaguucuggugcuuuggggcauucaccaccccuccaccucugcugaucaacagagccuguaccagaacgccgacgcuuacgucuucgugggauccagcagauauucuaagaaauuuaagccugagaucgccauucggccgaaagugcgcgaucaggaggggagaaugaauuacuauuggacacucgucgaacccggagacaagaucaccuucgaggcgacgggcaaccugguugugccucgguacgccuuugcuauggaacgcaacgccggguccggaauuaucaucagcgauacacccgugcaugacugcaauaccacaugucaaaccccuaaaggcgcuauuaacaccucucugcccuuccagaauauccacccggucacaauuggcaagugcccuaaguaugugaaaagcacgaagcucagacuggccaccgggcuucggaacguucccuccauccagucucgcggacuguuuggcgccauugcuggguucaucgagggaggcuggacagggaugguggacggaugguacggcuaucaucaccagaaugaacaaggcagcggguacgcggccgaucucaaauccacccagaacgcuaucgacgagauuacaaauaaggucaacagcgugaucgagaaaaugaauacccaguuuacggccguuggaaaggaguucaaccaccuggagaagagaauugaaaaucuuaacaaaaagguggaugacggcuuccuggauaucuggacauacaaugccgagcuccugguccugcucgaaaacgagcggacccuggacuaucaugauucuaaugugaaaaaccuuuacgagaagguccgcucccagcugaaaaacaaugcuaaggaaauugggaacggauguuuugaguucuaucacaagugcgacaauaccuguauggaaagcgugaaaaacggcacauacgauuauccuaaguacucugaggaagccaaacucaauagagaggagaucgacgggguuaagcuggaauccacccggaucuaucaaauucuugcgaucuacagcacaguggcuuccucucugguccucgugguuagccugggcgccauuuccuuuuggaugugcucuaacggaagccugcagugccgcaucuguauuuga

SEQ ID NO: 199662 - RNA, 1701 nt, Artificial Sequence
  derived and/or modified CDS sequence (opt5) from hemagglutinin__InfluenzaA__AEO01514
augaaggccauccuggugguccuccuguacaccuucgcuacagccaacgcggacacgcuuugcauuggcuaucacgcuaauaacagcaccgauacaguugacaccgugcuggagaagaaugugacagucacccauuccgugaaccuccuggaagauaugcacaaugggaagcuguguaaacugagaggaguugcgccccuccaucugggcaagugcaacaucgccggguggauucugggaaauccugagugugaaucucucagcacagcuuccucuuggagcuacaucguggagaccuccucuagcgacaacggcacgugcuauccgggggauuuuauugacuacgaagaacugcgggagcagcuuuccagcgucucuuccuucgaacgcuuugagaucuuccccaaaaccagcucuuggccuaaucacgauuccaacaagggagugacagccgcuuguccccaugccggcgccaagagcuuuuauaaaaaucugaucuggcucguuaagaaaggcaacucuuacccuaagcuguccaaaagcuauauuaaugacaaggggaaggaagugcuuguccuguggggaauccaccaccccuccaccucugccgaucaacagagccucuaccagaacgcugacgccuacguguucgugggcacauccagauauagcaaaaaguuuaaaccugagauugcuauccggccgaagguccgcgagcaggaagggagaaugaauuacuauuggacccugguugagcccggagauaaaauuacguucgaagccacaggcaaccugguggugccucgguacgcguuugccauggagcgcaacgcugggucuggaaucauuaucuccgacacccccguccaugauugcaauacaaccugucaaaccccuaagggcgccaucaacacaagccuccccuuccagaauauucacccgaucacgauuggcaaaugcccuaaguaugugaagucuaccaaacugagacuugcuacagggcugcggaacguucccagcauccagucccgcggacucuuuggcgccauugccggguucaucgaaggaggcuggaccgggaugguggacggaugguacggcuaucaucaccagaaugagcaaggcucuggguacgcugcggaccuuaagagcacacagaacgccaucgauaaaauuaccaauaaggucaacuccgugaucgagaaaaugaauacgcaguuuacagcuguuggaaaggaguucaaccaccuugagaagagaauugaaaaucugaacaaaaagguggacgauggcuuccucgacaucuggaccuacaaugccgagcugcugguccuccuggaaaacgagcggacccuugauuaucaugacagcaaugugaaaaaccuguacgagaagguccgcucucagcucaaaaacaaugccaaggaaauugggaacggauguuuugaguucuaucacaagugcgauaauacauguauggaauccgugaaaaacggcaccuacgacuauccuaaguacagcgaggaagcuaaacugaauagagaggagaucgaugggguuaaacuugaaucuacacggaucuaucaaauucuggccaucuacuccacgguggcgagcucccucguccuggugguuucucugggcgcuauuagcuuuuggaugugcuccaacggaucucuccagugccgcaucuguauuuga

SEQ ID NO: 199663 - RNA, 1701 nt, Artificial Sequence; identical to SEQ ID NO: 196928
  derived and/or modified CDS sequence (opt5) from hemagglutinin__InfluenzaA__AEO01515

SEQ ID NO: 199664 - RNA, 1701 nt, Artificial Sequence; identical to SEQ ID NO: 199510
  derived and/or modified CDS sequence (opt5) from hemagglutinin__InfluenzaA__AEO01516

SEQ ID NO: 199665 - RNA, 1701 nt, Artificial Sequence
  derived and/or modified CDS sequence (opt5) from hemagglutinin__InfluenzaA__AEO01517
augaaggccauccuggugguccuccuguacaccuucgcuacagccaacgcggacacgcuuugcauuggcuaucacgcuaauaacagcaccgauacaguugacaccgugcuggagaaaaaugugacagucacccauuccgugaaccuccuggaagauaagcacaaugggaaacuuuguaagcugagaggaguugcuccccuccaucugggcaaaugcaacaucgccggguggauucugggaaauccugagugugaaucucucagcacagccuccucuuggagcuacaucguggagaccuccucuagcgacaacggcacgugcuauccgggggauuuuauugacuacgaggagcugcgggagcagcuuuccagcgucucuuccuucgaacgcuuugagaucuuccccaagaccagcucuuggccuaaucacgauuccaacaagggagugacagccgcuuguccccaugccggcgcgaaaucuuuuuauaagaaucugaucuggcucguuaaaaaggaaaacagcuacccuaaacuguccaagagcuauauuaaugacaagggcaaagaggugcuuguccugugggggauccaccaccccuccaccucugccgaucaacagagccucuaccagaacgcugacgccuacguguucgugggaacauccagauauagcaagaaauuuaagccugagauugcuauccggccgaaaguccgcgaucaggaaggcagaaugaauuacuauuggacccugguugagcccggggacaagauuacguucgaagccacaggaaaccugguggugccucgguacgcguuugccauggagcgcaacgcuggcucugggaucauuaucuccgauacccccguccaugacugcaauacaaccugucaaaccccugaaggagccaucaacacaagccuccccuuccagaauauucacccgaucacgauuggcaaaugcccuaaguaugugaagucuaccaaacugagacuugcuacaggccugcggaacguucccagcauccagucccgcgggcucuuuggagccauugccggcuucaucgaagggggauggaccggcaugguggacgggugguacggauaucaucaccagaaugagcaaggcucuggcuacgcugcggaucuuaagagcacacagaacgccaucgacgaaauuaccaauaaagucaacuccgugaucgagaagaugaauacgcaguuuacagcuguugggaaagaguucaaccaccuggaaaagagaauugaaaaucugaacaagaaaguggaugacggauuccucgauaucuggaccuacaaugccgagcugcugguccuccuggagaacgaacggacccuugacuaucaugauagcaaugugaagaaccuguacgagaaaguccgcucucagcucaagaacaaugccaaagaaauuggcaacggguguuuugaguucuaucacaagugcgacaauacauguauggaauccgugaagaacggaaccuacgauuauccuaaauacagcgaggaggcuaagcugaauagagaagagaucgacggcguuaaacuugaaucuacacggaucuaucaaauucuggccaucuacuccacgguggcgagcucccucguccuggugguuucucugggggcuauuagcuuuuggaugugcuccaacggcucucuccagugccgcaucuguauuuga

SEQ ID NO: 199666 - RNA, 1701 nt, Artificial Sequence
  derived and/or modified CDS sequence (opt5) from hemagglutinin__InfluenzaA__AEO01518
augaaggccauccuggugguccuccuguacaccuucgcuacagccaacgcggacacgcuuugcauuggcuaucacgcuaauaacagcaccgauacaguugacaccgugcuggagaaaaaugugacagucacccauuccgugaaccuccuggaagauaagcacaaugggaaacuuuguaagcugagaggaguugcuccccuccaucugggcaaaugcaacaucgccggguggauucugggaaauccugagugugaaucucucagcacagccuccucuuggagcuacaucguggagaccuccucuagcgacaacggcacgugcuauccgggggauuuuauugacuacgaagaacugcgggagcagcuuuccagcgucucuuccuucgaacgcuuugagaucuuccccaagaccagcucuuggccuaaucacgauuccaacaagggagugacagccgcuuguccccaugccggcgcgaaaucuuuuuauaagaaucugaucuggauuguuaaaaagggcaacagcuacccuaaacucaauaaguccuauaucaacgacaaggggaaagaagugcugguccuuuggggcauucaccaccccagcaccuccgccgaucaacagucucuguaccagaaugcugacgccuacguguucgugggaacaagcagauauuccaagaaauuuaagccugagaucgcuauucggccgaaaguccgcgaucaggaggggagaaugaacuacuauuggacccucguugaacccggagacaagaucacguucgaggccacaggcaaccugguggugccucgguacgcguuugccauggaacgcaaugcugggagcggaauuaucaucucugauacccccguccaugacugcaacacaaccugucaaaccccuaaaggcgccauuaauacaucccugcccuuccagaacauccacccgauuacgaucggcgagugcccuaaguauguuaagagcaccaaacucagacuggcuacagggcuucggaaugugcccucuauucagagccgcggacuguuuggcgccaucgccggguucaucgaaggaggcuggaccgggaugguggacggaugguacggcuaucaucaccagaacgagcaaggcuccggguacgcugcggaucucaagucuacacagaaugccauugacaaaaucaccaacaaggucaauagcgugauugagaaaaugaacacgcaguuuacagcuguuggaaaggaguucaaucaccuggagaagagaaucgaaaaccuuaauaaaaagguggaugacggcuuccuggauauuuggaccuacaacgccgagcuccugguccugcucgaaaaugagcggacccuggacuaucaugauuccaacgugaaaaaccuuuacgagaagguccgcagccagcugaaaaauaacgccaaggaaaucgggaauggauguuuugaguucuaucacaagugcgacaacacauguauggaaucugugaaaaauggcaccuacgauuauccuaaguacuccgaggaagcuaaacucaacagagaggagaucgacgggguuaagcuggaaagcacacggauuuaucaaauccuugccauuuacucuacgguggcguccagccugguccucgugguuucccugggcgcuaucucuuuuuggaugugcagcaauggaucccugcagugccgcauuuguaucuga

SEQ ID NO: 199667 - RNA, 1701 nt, Artificial Sequence
  derived and/or modified CDS sequence (opt5) from hemagglutinin__InfluenzaA__AEO01519
augaaggccauccuggugguccuccuguacaccuucgcuacagccaacgcggacacgcuuugcauuggcuaucacgcuaauaacagcaccgauacaguugacaccgugcuggagaaaaaugugacagucacccauuccgugaaccuccuggaagauaagcacaaugggaaacuuuguaagcugagaggaguugcuccccuccaucugggcaaaugcaacaucgccggguggauucugggaaauccugagugugaaucucucagcacagccuccucuuggagcuacaucguggagaccuccucuagcgacaacggcacgugcuauccgggggauuuuauugacuacgaagaacugcgggagcagcuuuccagcgucucuuccuucgaacgcuuugagaucuuccccaagaccagcucuuggccuaaucacgauuccaacaagggagugacagccgcuuguccccaugccggcgcgaaaucuuuuuauaagaaucugaucuggcucguuaaaaagggcaacagcuacccuaaacuguccaagagcuauauuaaugacaaggggaaagaagugcuuguccuguggggaauccaccaccccuccaccucugccgaucaacagagccucuaccagaacgcugacgccuacguguucgugggcacauccagauauagcaagaaauuucggccugagauugcuauccgcccgaaggucagagagcaggaagggcggaugaauuacuauuggacccugguugagcccggagauaaaauuacguucgaagccacaggcaaccugguggugccucgcuacgcguuugccauggagagaaacgcugggucuggaaucauuaucuccgacacccccguccaugauugcaauacaaccugucaaaccccuaagggcgccaucaacacaagccuccccuuccagaauauucacccgaucacgauuggcaaaugcccuaaguaugugaagucuaccaaacugcggcuugcuacagggcugcgcaacauccccagcauucaguccagaggacucuuuggcgccaucgccggguucaucgaaggaggcuggaccgggaugguugacggaugguacggcuaucaucaccagaaugagcaaggcucuggguacgcugcggaccuuaagagcacacagaacgccauugaugagaucaccaauaaagugaacuccgucauugaaaagaugaauacgcaguuuacagcugugggaaaagaguucaaccaccuggaaaagcggaucgagaaucugaacaagaaaguugacgauggcuuccucgacauuuggaccuacaaugccgaacugcuggugcuccuggagaacgagcgcacccuugauuaucaugacagcaaugucaagaaccuguacgaaaaagugagaucucagcucaagaacaaugccaaagagaucgggaacggauguuuugaguucuaucacaagugcgauaauacauguauggaguccgucaagaacggcaccuacgacuauccuaaauacagcgaagaggcuaagcugaaucgggaggaaaucgauggggugaaacuugagucuacacgcauuuaucaaauccuggccauuuacuccacgguugcgagcucccucgugcuggucgugucucugggcgcuaucagcuuuuggaugugcuccaacggaucucuccagugcagaauuuguaucuga

SEQ ID NO: 199668 - RNA, 1701 nt, Artificial Sequence; identical to SEQ ID NO: 197646
  derived and/or modified CDS sequence (opt5) from hemagglutinin__InfluenzaA__AEO01520

SEQ ID NO: 199669 - RNA, 1701 nt, Artificial Sequence; identical to SEQ ID NO: 196368
  derived and/or modified CDS sequence (opt5) from hemagglutinin__InfluenzaA__AEO01521

SEQ ID NO: 199670 - RNA, 1701 nt, Artificial Sequence; identical to SEQ ID NO: 198160
  derived and/or modified CDS sequence (opt5) from hemagglutinin__InfluenzaA__AEO01522

SEQ ID NO: 199671 - RNA, 1701 nt, Artificial Sequence; identical to SEQ ID NO: 195905
  derived and/or modified CDS sequence (opt5) from hemagglutinin__InfluenzaA__AEO01523

SEQ ID NO: 199672 - RNA, 1701 nt, Artificial Sequence; identical to SEQ ID NO: 199499
  derived and/or modified CDS sequence (opt5) from hemagglutinin__InfluenzaA__AEO01524

SEQ ID NO: 199673 - RNA, 1701 nt, Artificial Sequence
  derived and/or modified CDS sequence (opt5) from hemagglutinin__InfluenzaA__AEO01525
augaaggccauccuggugguccuccuguacaccuucgcuacagccaacgcggacacgcuuugcauuggcuaucacgcuaauaacagcaccgauacaguugacaccgugcuggagaaaaaugugacagucacccauuccgugaaccuccuggaagauaagcacaaugggaaacuuuguaagcugagaggaguugcuccccuccaucugggcaaaugcaacaucgccggguggauucugggaaauccugagugugaaucucucagcacagccuccucuuggagcuacaucguggagaccuccucuagcggcaacgggacgugcuauccgggagacuuuauugauuacgaagaacugcgggagcagcuuuccagcgucucuuccuucgaacgcuuugagaucuuccccaagaccagcucuuggccuaaucacgacuccaacaagggcgugacagccgcuuguccccaugccggcgcgaaaucuuuuuauaagaaucugaucuggcucguuaaaaaggggaacagcuacccuagacuguccaaaagcuauauuaaugauaagggaaaggaagugcuuguccuguggggcauccaccaccccuccaccucugccgaccaacagagccucuaccagaacgcugaugccuacguguucguggggacaucccgguauagcaaaaaguuuaaaccugagauugcuauccgcccgaaggucagagaccaggagggacggaugaauuacuauuggacccugguugaacccggcgauaaaauuacguucgaggccacagggaaccugguggugccucgcuacgcguuugccauggaaagaaacgcuggaucuggcaucauuaucuccgacacccccguccaugauugcaauacaaccugucaaaccccuaagggcgccaucaacacaagccuccccuuccagaauauucacccgaucacgauugggaaaugcccuaaguaugugaagucuaccaaacugcggcuugcuacaggacugcgcaacguucccagcauccaguccagaggccucuuuggggccauugccggauucaucgagggcggguggaccggaaugguggacggcugguacggcuaucaucaccagaaugaacaagggucuggauacgcugcggaccuuaagagcacacagaacgccaucgaugagauuaccaauaaagucaacuccgugaucgagaagaugaauacgcaguuuacagcuguuggcaaagaguucaaccaccuggagaagcggauugaaaaucugaacaagaaaguggacgauggguuccucgacaucuggaccuacaaugccgagcugcugguccuccuggaaaacgagcgcacccuugauuaucaugacagcaaugugaagaaccuguacgagaaagucagaucucagcucaagaacaaugccaaagaaauuggaaacggcuguuuugaguucuaucacaagugcgauaauacauguauggaauccgugaagaacgggaccuacgacuauccuaaauacagcgaggaagcuaagcugaaucgggaggagaucgauggcguuaaacuugaaucuacacgcaucuaucaaauucuggccaucuacuccacgguggcgagcucccucguccuggugguuucucugggagcuauuagcuuuuggaugugcuccaacggcucucuccagugcagaaucuguauuuga

SEQ ID NO: 199674 - RNA, 1701 nt, Artificial Sequence; identical to SEQ ID NO: 195905
  derived and/or modified CDS sequence (opt5) from hemagglutinin__InfluenzaA__AEO01526

SEQ ID NO: 199675 - RNA, 1701 nt, Artificial Sequence; identical to SEQ ID NO: 198682
  derived and/or modified CDS sequence (opt5) from hemagglutinin__InfluenzaA__AEO01527

SEQ ID NO: 199676 - RNA, 1701 nt, Artificial Sequence
  derived and/or modified CDS sequence (opt5) from hemagglutinin__InfluenzaA__AEO01529
augaaggccauccuggugguccuccuguacaccuucgcuacagccaacgcggacacgcuuugcauuggcuaucacgcuaauaacagcaccgauacaguugacaccgugcuggagaaaaaugugacagucacccauuccgugaacauccucgaagauaagcacaaugggaaacuguguaaacuuagaggaguugcuccccugcaucucggcaagugcaacauugccggguggauccugggaaauccugagugugaaucucugagcacagccuccucuuggagcuacauuguggagaccuccucuagcgacaacggcacgugcuauccgggggauuuuaucgacuacgaagaacuccgggagcagcuguccagcgucucuuccuucgaacgcuuugagaucuuccccaagaccagcucuuggccuaaucacgauuccaacaagggagugacagccgcuuguccccaugccggcgcgaaaucuuuuuauaagaaucuuauuuggcugguuaaaaagggcaacagcuacccuaaacucuccaagagcuauaucaaugacaaggggaaagaagugcugguccuuuggggcauucaccaccccuccaccucugccgaucaacagagccuguaccagaacgcugacgccuacguguucgugggauccagcagauauucuaagaaauuuaagccugagaucgcuauucggccgaaaguccgcgaucaggaggggagaaugaauuacuauuggacacucguugaacccggagacaagaucaccuucgaggccacgggcaaccugguggugccucgguacgcguuugccauggaacgcaacgcuggguccggaauuaucaucagcgauacacccguccaugacugcaauaccacaugucaaaccccuaaaggcgccauuaacaccucucugcccuuccagaauauccacccgauuacaaucggcaagugcccuaaguaugugaaaagcacgaagcucagacuggcuaccgggcuucggaacguucccuccauucagucucgcggacuguuuggcgccaucgccggguucaucgagggaggcuggacagggaugguggacggaugguacggcuaucaucaccagaaugaacaaggcagcggguacgcugcggaucucaaauccacccagaacgccauugacgagaucacaaauaaggucaacagcgugauugagaaaaugaauacccaguuuacggcuguuggaaaggaguucaaccaccuggagaagagaaucgaaaaucuuaacaaaaagguggaugacggcuuccuggauauuuggacauacaaugccgagcuccugguccugcucgaaaacgagcggacccuggacuaucaugauucuaaugugaaaaaccuuuacgagaagguccgcucccagcugaaaaacaaugccaaggaaguggggaacggauguuuugaguucuaucacaagugcgacaauaccuguauggaaagcguuaaaaacggcacauacgauuauccuaaguacucugaggaagcuaaacucaauagagagaagaucgacggggugaaacuggaguccacccggaucuaucaaauucuugccaucuacagcacagcggcuuccucucugguccucgugguuagccugggcgccauuuccuuuuggaugugcucuaacggaagccugcagugccgcaucuguauuuga

SEQ ID NO: 199677 - RNA, 1701 nt, Artificial Sequence; identical to SEQ ID NO: 195905
  derived and/or modified CDS sequence (opt5) from hemagglutinin__InfluenzaA__AEO01530

SEQ ID NO: 199678 - RNA, 1701 nt, Artificial Sequence
  derived and/or modified CDS sequence (opt5) from hemagglutinin__InfluenzaA__AEO01531
augaaggccauccuggugguccuccuguacaccuucgcuacagccaacacggacacccuuugcauuggcuaucacgcgaauaacagcacagauaccguugacacagugcuggagaaaaaugugaccgucacacauuccgugaaccuccuggaagauaagcacaaugggaaacuuuguaagcugagaggaguugcuccccuccaucugggcaaaugcaacaucgccggguggauucugggaaauccugagugugaaucucucagcaccgccuccucuuggagcuacaucguggagacguccucuagcgacaacgggaccugcuauccgggcgauuuuauugacuacgaagaacugcgggagcagcuuuccagcgucucuuccuucgaacgcuuugagaucuuccccaagacaagcucuuggccuaaucacgauuccaacaagggagugaccgcugccuguccccaugcuggcgccaagagcuuuuauaaaaaucugaucuggcucguuaaaaagggcaacucuuacccuaaacuguccaagagcuauauuaaugacaaggggaaagaagugcuuguccuguggggaauccaccaccccuccacaucugcggaucaacagagccucuaccagaacgccgacgcuuacguguucgugggcaccuccagauauagcaagaaauuuaagccugagauugccauccggccgaaaguccgcgagcaggaagggagaaugaauuacuauuggacgcugguugagcccggagauaagauuacauucgaagcuaccggcaaccugguggugccucgguacgccuuugcgauggagcgcaacgccgggucuggaaucauuaucuccgacacacccguccaugauugcaauaccaccugucaaacaccuaaaggcgcuaucaacacgagccuccccuuccagaauauucacccgaucaccauuggcaagugcccuaaguaugugaaaucuacaaagcugagacuugccaccgggcugcggaacguucccagcauccagucccgcggacucuuuggcgcuauugccggguucaucgaaggaggcuggacagggaugguggacggaugguacggcuaucaucaccagaaugagcaaggcucuggguacgccgcugaccugaaaagcacccagaacgcgaucgauaagauuacgaauaaagucaacuccgugaucgagaagaugaauacacaguuuaccgccguuggaaaggaguucaaccaccuugagaaaagaauugaaaaucugaacaagaaaguggacgauggcuuccucgacaucuggaccuacaaugcugagcugcugguccuccuggaaaacgagcggacacuugauuaucaugacagcaaugugaagaaccuguacgagaaaguccgcucucagcucaagaacaaugccaaggaaauugggaacggauguuuugaguucuaucacaaaugcgauaauaccuguauggaauccgugaagaacggcacauacgacuauccuaaauacagcgaggaagccaagcugaauagagaggagaucgaugggguuaaacuugaaucuacgcggguguaucaaauccuggcuauuuacuccaccgucgccagcucccucgugcugguugugucucugggcgcgaucagcuuuuggaugugcuccaacggaucucuccagugccgcauuuguaucuga

SEQ ID NO: 199679 - RNA, 1701 nt, Artificial Sequence; identical to SEQ ID NO: 199510
  derived and/or modified CDS sequence (opt5) from hemagglutinin__InfluenzaA__AEO01532

SEQ ID NO: 199680 - RNA, 1701 nt, Artificial Sequence
  derived and/or modified CDS sequence (opt5) from hemagglutinin__InfluenzaA__AEO01533
augaaggccauccuggugguccuccuguacaccuucgcuacagccaacgcggacacgcuuugcauuggcuaucacgcuaauaacagcaccgauacaguugacaccgugcuggagaagaaugugacagucacccauuccguggaucuccuggaagacaagcacaacgggaaacuuuguaagcugagaggaguugcuccccuccaucugggcaaaugcaauaucgccggguggauucugggaaacccugagugugaaucucucagcacagccuccucuuggagcuacaucguggagaccuccucuagcgauaauggcacgugcuauccgggggacuuuauugauuacgaagaacugcgggagcagcuuuccagcgucucuuccuucgaacgcuuugagaucuuccccaagaccagcucuuggccuaaccacgacuccaauaagggagugacagccgcuuguccccaugccggcgcgaaaucuuuuuauaagaaccugaucuggcucguuaaaaagggcaauagcuacccuaaacuguccaagagcuauauuaacgauaaggggaaagaagugcuuguccuguggggaauccaccaccccuccaccucugccgaccaacagagccucuaccagaaugcugaugccuacguguucgugggcacauccagauauagcaagaaauuuaagccugagauugcuauccggccgaaaguccgcgaccaggaggggagaaugaacuacuauuggacccugguugaacccggagauaagauuacguucgaggccacaggcaaucugguggugccucgguacgcguuugccauggaacgcaacgcugggucuggaaucauuaucuccgacacccccguccaugacugcaacacaaccugucaaaccccuaaaggcgccaucaauacaagccuccccuuccagaacauucacccgaucacgauuggcaagugcccuaaguaugugaaaucuaccaagcugagacuugcuacagggcugcggaauguucccagcauccagucccgcggacucuuuggcgccauugccggguucaucgagggaggcuggaccgggaugguggauggaugguacggcuaucaucaccagaacgaacaaggcucuggguacgcugcggaccugaaaagcacacagaaugccaucgaugagauuaccaacaaggucaauuccgugaucgagaaaaugaacacgcaguuuacagcuguuggaaaggaguucaaucaccuugagaagagaauugaaaaccugaauaaaaagguggacgauggcuuccucgacaucuggaccuacaacgccgagcugcugguccuccuggaaaaugagcggacccuugauuaucaugacagcaacgugaaaaaucuguacgagaagguccgcucucagcucaaaaacaacgccaaggaaauugggaauggauguuuugaguucuaucacaagugcgauaacacauguauggaauccgugaaaaauggcaccuacgacuauccuaaguacagcgaggaagcuaaacugaacagagaggagaucgaugggguuaaacuugaaucuacacggaucuaucaaauucuggccaucuacuccacgguggcgagcucccucguccuggugguuucucugggcgcuauuagcuuuuggaugugcuccaauggaucucuccagugccgcaucuguauuuga

SEQ ID NO: 199681 - RNA, 1701 nt, Artificial Sequence
  derived and/or modified CDS sequence (opt5) from hemagglutinin__InfluenzaA__AEO01534
augaaggccauccuggugguccuccuguacaccuucgcuacagccaacgcggacacgcuuugcauuggcuaucacgcuaauaacagcaccgauacaguugacaccgugcuggagaagaaugugacagucacccauuccgugaaccuccuggaagauaagcacaaugggaaacuuuguaagcugagaggaguugcuccccuccaucugggcaaaugcaacaucgccggguggauucugggaaauccugagugugaaucucucagcacagcccgguccuggucuuacaucguggagaccagcuccucugacaacggcacgugcuauccgggggauuuuauugacuacgaagaacugcgcgagcagcuuagcuccgucagcucuuucgaaagauuugagaucuuccccaagaccuccagcuggccuaaucacgauucuaacaagggagugacagccgcuuguccccaugccggcgcgaaauccuuuuauaagaaucugaucuggcucguuaaaaagggcaacagcuacccuaaacugucuaaguccuauauuaaugacaaggggaaagaagugcuuguccuguggggaauccaccaccccagcaccuccgccgaucaacagucucucuaccagaacgcugacgccuacguguucgugggcacaagccgguauuccaagaaauuuaagccugagauugcuauccgcccgaaagucagagaucaggaggggcggaugaauuacuauuggacccugguugaacccggagacaagauuacguucgaggccacaggcaaccugguggugccucgcuacgcguuugccauggaaagaaacgcugggagcggaaucauuaucucugauacccccguccaugacugcaauacaaccugucaaaccccuaaaggcgccaucaacacaucccuccccuuccagaauauucacccgaucacgauuggcaagugcccuaaguaugugaaaagcaccaagcugcggcuugcuacagggcugcgcaacguucccucuauccagagcagaggacucuuuggcgccauugccggguucaucgagggaggcuggaccgggaugguggacggaugguacggcuaucaucaccagaaugaacaaggcuccggguacgcugcggaucugaaaucuacacagcacgccaucgacgagauuaccaacaaggucaauagcgugaucgagaaaaugaacacgcaguuuacagcuguuggaaaggaguucaaucaucuugagaagcggauugaaaaccugaauaaaaagguggaugacggcuuccucgauaucuggaccuacaacgccgagcugcugguccuccuggaaaaugagcgcacccuugacuaucacgauuccaacgugaaaaaucuguacgagaaggucagaagccagcucaaaaacaacgccaaggaaauugggaauggauguuuugaguucuaucauaagugcgacaacacauguauggaaucugugaaaaauggcaccuacgauuauccuaaguacuccgaggaagcuaaacugaaccgggaggagaucgacgggguuaaacuugaaagcacacgcaucuaucaaauucuggccaucuacucuacgguggcguccagccucguccuggugguuucccugggcgcuauuucuuuuuggaugugcagcaauggaucccuccagugcagaaucuguauuuga

SEQ ID NO: 199682 - RNA, 1701 nt, Artificial Sequence; identical to SEQ ID NO: 196390
  derived and/or modified CDS sequence (opt5) from hemagglutinin__InfluenzaA__AEO01535

SEQ ID NO: 199683 - RNA, 1701 nt, Artificial Sequence; identical to SEQ ID NO: 195905
  derived and/or modified CDS sequence (opt5) from hemagglutinin__InfluenzaA__AEO01536

SEQ ID NO: 199684 - RNA, 1701 nt, Artificial Sequence; identical to SEQ ID NO: 197646
  derived and/or modified CDS sequence (opt5) from hemagglutinin__InfluenzaA__AEO01537

SEQ ID NO: 199685 - RNA, 1701 nt, Artificial Sequence
  derived and/or modified CDS sequence (opt5) from hemagglutinin__InfluenzaA__AEO01538
augaaggccauccuggugguccuccuguacaccuucgcuacagccaacgcggacacgcuuugcauuggcuaucacgcuaauaacagcaccgauacaguugacaccgugcuggagaagaaugugacagucacccauuccgugaaccuccuggaagauaagcacaaugggaaacuuuguaagcugggaggcguugcuccccuccaucuggggaaaugcaacaucgccggauggauucugggcaauccugagugugaaucucucagcacagccuccucuuggagcuacaucguggagaccuccucuagcgacaacgggacgugcuauccgggagauuuuauugacuacgaagaacugagagagcagcuuuccagcgucucuuccuucgaacgguuugagaucuuccccaagaccagcucuuggccuaaucacgauuccaacaagggcgugacagccgcuuguccccaugccggcgcgaaaucuuuuuauaagaaucugaucuggcucguuaaaaaggggaacagcuacccuaaacuguccaagagcuauauuaaugacaagggaaaagaagugcuuguccuguggggcauccaccaccccuccaccucugccgaucaacagagccucuaccagaacgcugacgccuacguguucguggggacaucccgcuauagcaagaaauuuaagccugagauugcuaucagaccgaaaguccgggaucaggagggacgcaugaauuacuauuggacccugguugaacccggcgacaagauuacguucgaggccacagggaaccugguggugccuagauacgcguuugccauggaacggaacgcuggaucuggcaucauuaucuccgauacccccguccaugacugcaauacaaccugucaaaccccuaaaggcgccaucaacacaagccuccccuuccagaauauucacccgaucacgauugggaagugcccuaaguaugugaaaucuaccaagcugcgccuugcuacaggacugagaaacguucccagcauccagucccggggccucuuuggggccauugccggauucaucgagggcggguggaccggaaugguggacggcugguacggcuaucaucaccagaaugaacaagggucuggauacgcugcggaucugaaaagcacacagaacgccaucgacgagauuaccaauaaggucaacuccgugaucgagaaaaugaauacgcaguuuacagcuguuggcaaggaguucaaccaccuugagaagcgcauugaaaaucugaacaaaaagguggaugacggguuccucgauaucuggaccuacaaugccgagcugcugguccuccuggaaaacgagagaacccuugacuaucaugauagcaaugugaaaaaccuguacgagaagguccggucucagcucaaaaacaaugccaaggaaauuggaaacggcuguuuugaguucuaucacaagugcgacaauacauguauggaauccgugaaaaacgggaccuacgauuauccuaaguacagcgaggaagcuaaacugaaucgcgaggagaucgacggcguuaaacuugaaucuacaagaaucuaucaaauucuggccaucuacuccacgguggcgagcucccucguccuggugguuucucugggagcuauuagcuuuuggaugugcuccaacggcucucuccagugccggaucuguauuuga

SEQ ID NO: 199686 - RNA, 1701 nt, Artificial Sequence; identical to SEQ ID NO: 196368
  derived and/or modified CDS sequence (opt5) from hemagglutinin__InfluenzaA__AEO01539

SEQ ID NO: 199687 - RNA, 1701 nt, Artificial Sequence
  derived and/or modified CDS sequence (opt5) from hemagglutinin__InfluenzaA__AEO01540
augaaggccauccuggugguccuccuguacaccuucgcuauugccaacgcggacacacuuugcaucggcuaucacgcuaauaacagcacggauaccguugacacagugcuggagaaaaaugugaccgucacacauuccgugaaccuccuggaagauaagcacaaugagaaacuuuguaagcugagagggguugcuccccuccaucugggaaaaugcaacauugccggcuggauccuggggaauccugaaugugagucucucagcaccgccuccucuuggagcuacauuguggaaacauccucuagcgacaacggaaccugcuauccgggcgauuuuaucgacuacgaggagcugcgggaacagcuuuccagcgucucuuccuucgagcgcuuugaaaucuuccccaagacgagcucuuggccuaaucacgauuccaacaagggggugaccgccgcuuguccccaugccggagcgaaaucuuuuuauaagaaucugauuuggcucguuaaaaagggcaacagcuacccuaaacuguccaagagcuauaucaaugacaagggcaaagaggugcuuguccugugggggauucaccaccccuccacaucugccgaucaacagagccucuaccagaacgcugacgccuacguguucgugggaaccuccagauauagcaagaaauuuaagccugagaucgcuauucggccgaaaguccgcgaucaggaaggcagaaugaauuacuauuggacacugguugagcccggggacaagaucaccuucgaagccacgggaaaccugguggugccucgguacgcguuugccauggagcgcaacgcuggcucugggauuaucaucuccgauacacccguccaugacugcaauaccacaugucaaaccccuaaaggagccauuaacaccagccuccccuuccagaauauccacccgauuacaaucggcaagugcccuaaguaugugaaaucuacgaagcugagacuugcuaccggccugcggaacguucccagcauucagucccgcgggcucuuuggagccaucgccggcuucaucgaagggggauggacaggcaugguggacgggugguacggauaucaucaccagaaugagcaaggcucuggcuacgcugcggaucugaaaagcacccagcacgccauugacgagaucacaaacaaggucaauuccgugauugaaaagaugaacacccaguuuacggcuguugggaaggaguucaaucaucuugaaaagagaaucgagaaccugaauaaaaagguggaugacggauuccucgauauuuggacauacaacgccgaacugcugguccuccuggagaaugagcggacccuugacuaucacgauagcaacgugaaaaaucuguacgaaaagguccgcucucagcucaaaaacaacgccaaggagaucggcaauggguguuuugaguucuaucauaagugcgacaacaccuguauggaauccgugaaaaauggaacauacgauuauccuaaguacagcgaagaggcuaaacugaacagagaggaaaucaauggcguuaaacuugagucuacccggauuuaucaaauccuggccauuuacuccacaguggcgagcucccucguccuggugguuucucugggggcuaucagcuuuuggaugugcuccaacggcucucuccagugccgcauuuguaucuga

SEQ ID NO: 199688 - RNA, 1701 nt, Artificial Sequence; identical to SEQ ID NO: 196161
  derived and/or modified CDS sequence (opt5) from hemagglutinin__InfluenzaA__AEO01541

SEQ ID NO: 199689 - RNA, 1701 nt, Artificial Sequence; identical to SEQ ID NO: 195905
  derived and/or modified CDS sequence (opt5) from hemagglutinin__InfluenzaA__AEO01542

SEQ ID NO: 199690 - RNA, 1701 nt, Artificial Sequence; identical to SEQ ID NO: 195842
  derived and/or modified CDS sequence (opt5) from hemagglutinin__InfluenzaA__AEO01543

SEQ ID NO: 199691 - RNA, 1701 nt, Artificial Sequence; identical to SEQ ID NO: 195842
  derived and/or modified CDS sequence (opt5) from hemagglutinin__InfluenzaA__AEO01544

SEQ ID NO: 199692 - RNA, 1701 nt, Artificial Sequence
  derived and/or modified CDS sequence (opt5) from hemagglutinin__InfluenzaA__AEO01545
augaaggccauccuggugguccuccuguacaccuucgcuacagccaacgcggacacgcuuugcauuggcuaucacgcuaauaacagcaccgauacaguugacaccgugcuggagaaaaaugugacagucacccauuccgugaaccuccuggaagauaagcacucugggaaacuuuguaagcugagaggaguugcuccccuccaucugggcaaaugcaauaucgccggguggauucugggaaacccugagugugaaagccucuccacagccucuagcugguccuacaucguggagaccucuagcuccgacaauggcacgugcuauccgggggauuuugucgacuacgaagaacugcgggagcagcuuagcucuguguccagcuucgaacgcuuugagauuuuccccaagaccucuuccuggccuaaccacgauagcaauaagggaguuacagccgcuuguccccaugccggcgcgaaaucuuuuuauaagaaccugaucuggcucgugaaaaagggcaauuccuacccuaaacugagcaaguccuauaucaacgacaaggggaaagaaguccuugugcuguggggcauucaccaccccucuaccagcgccgaucaacagucccucuaccagaaugcugacgccuacguguucgucggaacaagcagauauucuaagaaauuuaagccugagaucgcuauucggccgaaaguucgcgaucaggaggggagaaugaacuacuauuggacccugguggaacccggagacaagaucacguucgaggccacaggcaaucugguggucccucgguacgcguuugccauggaacgcaacgcuggguccggaauuaucauuagcgauacccccgugcaugacugcaacacaaccugucaaaccccuaaaggcgccaucaauacaucucuccccuuccagaacauccacccgauuacgaucggcaagugcccuaaguauguuaaaagcaccaagcugagacuugcuacagggcugcggaaugugcccuccauucagucucgcggacucuuuggcgccaucgccggguucauugagggaggcuggaccgggauggucgacggaugguacggcuaucaucaccagaacgaacaaggcagcggguacgcugcggaucugaaauccacacagaaugccaucgacaagaucaccaacaaagugaauagcguuauugagaagaugaacacgcaguuuacagcugugggaaaggaguucaaucaccuugagaaaagaaucgagaaccugaauaagaaagucgaugacggcuuccucgauauuuggaccuacaacgccgaacugcuggugcuccuggagaaugaacggacccuugacuaucaugauucuaacgucaagaaucuguacgagaaagugcgcucccagcucaagaacaacgccaaggagaucgggaauggauguuuugaguucuaucacaaaugcgacaacacauguauggaaagcguuaagaauggcaccuacgauuauccuaaauacucugaagaggcuaagcugaacagagaagagauugacggggugaaacuugaguccacacggaucuaucaaauccuggccauuuacagcacggucgcguccucucucgugcugguugugagccugggcgcuaucuccuuuuggaugugcucuaauggaagccuccagugccgcauuuguaucuga

SEQ ID NO: 199693 - RNA, 1701 nt, Artificial Sequence; identical to SEQ ID NO: 194728
  derived and/or modified CDS sequence (opt5) from hemagglutinin__InfluenzaA__AEO01546

SEQ ID NO: 199694 - RNA, 1701 nt, Artificial Sequence; identical to SEQ ID NO: 194728
  derived and/or modified CDS sequence (opt5) from hemagglutinin__InfluenzaA__AEO01547

SEQ ID NO: 199695 - RNA, 1701 nt, Artificial Sequence; identical to SEQ ID NO: 194921
  derived and/or modified CDS sequence (opt5) from hemagglutinin__InfluenzaA__AEO01548

SEQ ID NO: 199696 - RNA, 1701 nt, Artificial Sequence; identical to SEQ ID NO: 194832
  derived and/or modified CDS sequence (opt5) from hemagglutinin__InfluenzaA__AEO01549

SEQ ID NO: 199697 - RNA, 1701 nt, Artificial Sequence; identical to SEQ ID NO: 194741
  derived and/or modified CDS sequence (opt5) from hemagglutinin__InfluenzaA__AEO01550

SEQ ID NO: 199698 - RNA, 1701 nt, Artificial Sequence; identical to SEQ ID NO: 194741
  derived and/or modified CDS sequence (opt5) from hemagglutinin__InfluenzaA__AEO01551

SEQ ID NO: 199699 - RNA, 1701 nt, Artificial Sequence; identical to SEQ ID NO: 194741
  derived and/or modified CDS sequence (opt5) from hemagglutinin__InfluenzaA__AEO01552

SEQ ID NO: 199700 - RNA, 1701 nt, Artificial Sequence; identical to SEQ ID NO: 194741
  derived and/or modified CDS sequence (opt5) from hemagglutinin__InfluenzaA__AEO01553

SEQ ID NO: 199701 - RNA, 1701 nt, Artificial Sequence; identical to SEQ ID NO: 194741
  derived and/or modified CDS sequence (opt5) from hemagglutinin__InfluenzaA__AEO01554

SEQ ID NO: 199702 - RNA, 1701 nt, Artificial Sequence; identical to SEQ ID NO: 194921
  derived and/or modified CDS sequence (opt5) from hemagglutinin__InfluenzaA__AEO01555

SEQ ID NO: 199703 - RNA, 1701 nt, Artificial Sequence; identical to SEQ ID NO: 194741
  derived and/or modified CDS sequence (opt5) from hemagglutinin__InfluenzaA__AEO01557

SEQ ID NO: 199704 - RNA, 1701 nt, Artificial Sequence; identical to SEQ ID NO: 194741
  derived and/or modified CDS sequence (opt5) from hemagglutinin__InfluenzaA__AEO01558

SEQ ID NO: 199705 - RNA, 1701 nt, Artificial Sequence
  derived and/or modified CDS sequence (opt5) from hemagglutinin__InfluenzaA__AEO01559
augaaggccauccuggugguccuccuguacaccuucgcuacagccaacgcggacacgcuuugcauuggcuaucacgcuaauaacagcaccgauacaguugacaccgugcuggagaagaaugugacagucacccauuccgugaaccuccuggaagauaagcacaaugggaaacuuuguaagcugagaggaguugcuccccuccaucugggcaaaugcaacaucgccggguggauucugggaaauccugagugugaaucucucagcacagccuccucuuggagcuacaucguggagaccuccucuagcgacaacggcacgugcuauccgggggauuuuauugacuacgaagaacugcgggagcagcuuuccagcgucucuuccuucgaacgcuuugagaucuuccccaagaccagcucuuggccuaaucacgauuccaacaagggagugacagccgcuuguccccaugccggcgcgaaaucuuuuuauaagaaucugaucuggcucguuaaaaagggcaacagcuacccuaaacuguccaagagcuauauuaaugacaaggggaaagaagugcuuguccuguggggaauccaccaccccuccaccucugccgaucaacagagccucuaccagaacgcugacgccuacguguucgugggcacauccagauauagcaagaaauuuaagccugagauugcuauccggccgaaaguccgcgaucaggaggggagaaugaauuacuauuggacccugguugaacccggagacaagauuacguucgaggccacaggcaaccugguggugccucgguacgcguuugccauggaacgcaacgcugggucuggaaucauuaucuccgauacccccguccaagacugcaauacaaccugucagaccccuaaaggcgccaucaacacaagccuccccuuccagaauauucauccgaucacgauuggcaagugcccuaaguaugugaaaucuaccaagcugagacuugcuacagggcugcggaacguucccagcauccagucccgcggacucuuuggcgccauugccggguucaucgagggaggcuggaccgggaugguggacggaugguacggcuaucaccaucaaaaugaacagggcucuggguacgcugcggaucugaaaagcacacagaacgccaucgacgagauuaccaauaaggucaacuccgugaucgagaaaaugaauacgcaguuuacagcuguuggaaaggaguucaaccaccuugagaagagaauugaaaaucugaacaaaaagguggaugacggcuuccucgauaucuggaccuacaaugccgagcugcugguccuccuggaaaacgagcggacccuugacuaucacgauagcaaugugaaaaaccuguacgagaagguccgcucucaacucaaaaacaaugccaaggaaauugggaacggauguuuugaguucuaucauaagugcgacaauacauguauggaauccgugaaaaacggcaccuacgauuauccuaaguacagcgaggaagcuaaacugaauagagaggagaucgacgggguuaaacuugaaucuacacggaucuaucagauucuggccaucuacuccacgguggcgagcucccucguccuggugguuucucugggcgcuauuagcuuuuggaugugcuccaacggaucucuccagugccgcaucuguauuuga

SEQ ID NO: 199706 - RNA, 1701 nt, Artificial Sequence; identical to SEQ ID NO: 194741
  derived and/or modified CDS sequence (opt5) from hemagglutinin__InfluenzaA__AEO01560

SEQ ID NO: 199707 - RNA, 1701 nt, Artificial Sequence; identical to SEQ ID NO: 194741
  derived and/or modified CDS sequence (opt5) from hemagglutinin__InfluenzaA__AEO01561

SEQ ID NO: 199708 - RNA, 1701 nt, Artificial Sequence; identical to SEQ ID NO: 194741
  derived and/or modified CDS sequence (opt5) from hemagglutinin__InfluenzaA__AEO01562

SEQ ID NO: 199709 - RNA, 1701 nt, Artificial Sequence; identical to SEQ ID NO: 194741
  derived and/or modified CDS sequence (opt5) from hemagglutinin__InfluenzaA__AEO01563

SEQ ID NO: 199710 - RNA, 1701 nt, Artificial Sequence; identical to SEQ ID NO: 194741
  derived and/or modified CDS sequence (opt5) from hemagglutinin__InfluenzaA__AEO01564

SEQ ID NO: 199711 - RNA, 1701 nt, Artificial Sequence; identical to SEQ ID NO: 194741
  derived and/or modified CDS sequence (opt5) from hemagglutinin__InfluenzaA__AEO01565

SEQ ID NO: 199712 - RNA, 1701 nt, Artificial Sequence; identical to SEQ ID NO: 194728
  derived and/or modified CDS sequence (opt5) from hemagglutinin__InfluenzaA__AEO01566

SEQ ID NO: 199713 - RNA, 1701 nt, Artificial Sequence; identical to SEQ ID NO: 194983
  derived and/or modified CDS sequence (opt5) from hemagglutinin__InfluenzaA__AEO01567

SEQ ID NO: 199714 - RNA, 1701 nt, Artificial Sequence; identical to SEQ ID NO: 194923
  derived and/or modified CDS sequence (opt5) from hemagglutinin__InfluenzaA__AEO01568

SEQ ID NO: 199715 - RNA, 1701 nt, Artificial Sequence; identical to SEQ ID NO: 194923
  derived and/or modified CDS sequence (opt5) from hemagglutinin__InfluenzaA__AEO01569

SEQ ID NO: 199716 - RNA, 1701 nt, Artificial Sequence; identical to SEQ ID NO: 194983
  derived and/or modified CDS sequence (opt5) from hemagglutinin__InfluenzaA__AEO01570

SEQ ID NO: 199717 - RNA, 1701 nt, Artificial Sequence; identical to SEQ ID NO: 194923
  derived and/or modified CDS sequence (opt5) from hemagglutinin__InfluenzaA__AEO01571

SEQ ID NO: 199718 - RNA, 1701 nt, Artificial Sequence; identical to SEQ ID NO: 194983
  derived and/or modified CDS sequence (opt5) from hemagglutinin__InfluenzaA__AEO01572

SEQ ID NO: 199719 - RNA, 1701 nt, Artificial Sequence; identical to SEQ ID NO: 194728
  derived and/or modified CDS sequence (opt5) from hemagglutinin__InfluenzaA__AEO01573

SEQ ID NO: 199720 - RNA, 1701 nt, Artificial Sequence; identical to SEQ ID NO: 194741
  derived and/or modified CDS sequence (opt5) from hemagglutinin__InfluenzaA__AEO01574

SEQ ID NO: 199721 - RNA, 1701 nt, Artificial Sequence; identical to SEQ ID NO: 194728
  derived and/or modified CDS sequence (opt5) from hemagglutinin__InfluenzaA__AEO01575

SEQ ID NO: 199722 - RNA, 1701 nt, Artificial Sequence; identical to SEQ ID NO: 194728
  derived and/or modified CDS sequence (opt5) from hemagglutinin__InfluenzaA__AEO01576

SEQ ID NO: 199723 - RNA, 1701 nt, Artificial Sequence; identical to SEQ ID NO: 194728
  derived and/or modified CDS sequence (opt5) from hemagglutinin__InfluenzaA__AEO01577

SEQ ID NO: 199724 - RNA, 1701 nt, Artificial Sequence; identical to SEQ ID NO: 194983
  derived and/or modified CDS sequence (opt5) from hemagglutinin__InfluenzaA__AEO01578

SEQ ID NO: 199725 - RNA, 1701 nt, Artificial Sequence; identical to SEQ ID NO: 194983
  derived and/or modified CDS sequence (opt5) from hemagglutinin__InfluenzaA__AEO01579

SEQ ID NO: 199726 - RNA, 1701 nt, Artificial Sequence; identical to SEQ ID NO: 194728
  derived and/or modified CDS sequence (opt5) from hemagglutinin__InfluenzaA__AEO01581

SEQ ID NO: 199727 - RNA, 1701 nt, Artificial Sequence; identical to SEQ ID NO: 194728
  derived and/or modified CDS sequence (opt5) from hemagglutinin__InfluenzaA__AEO01582

SEQ ID NO: 199728 - RNA, 1701 nt, Artificial Sequence; identical to SEQ ID NO: 194728
  derived and/or modified CDS sequence (opt5) from hemagglutinin__InfluenzaA__AEO01583

SEQ ID NO: 199729 - RNA, 1701 nt, Artificial Sequence; identical to SEQ ID NO: 194728
  derived and/or modified CDS sequence (opt5) from hemagglutinin__InfluenzaA__AEO01584

SEQ ID NO: 199730 - RNA, 1701 nt, Artificial Sequence; identical to SEQ ID NO: 194728
  derived and/or modified CDS sequence (opt5) from hemagglutinin__InfluenzaA__AEO01585

SEQ ID NO: 199731 - RNA, 1701 nt, Artificial Sequence; identical to SEQ ID NO: 194728
  derived and/or modified CDS sequence (opt5) from hemagglutinin__InfluenzaA__AEO01586

SEQ ID NO: 199732 - RNA, 1701 nt, Artificial Sequence; identical to SEQ ID NO: 194728
  derived and/or modified CDS sequence (opt5) from hemagglutinin__InfluenzaA__AEO01587

SEQ ID NO: 199733 - RNA, 1701 nt, Artificial Sequence; identical to SEQ ID NO: 194728
  derived and/or modified CDS sequence (opt5) from hemagglutinin__InfluenzaA__AEO01588

SEQ ID NO: 199734 - RNA, 1701 nt, Artificial Sequence; identical to SEQ ID NO: 194741
  derived and/or modified CDS sequence (opt5) from hemagglutinin__InfluenzaA__AEO01589

SEQ ID NO: 199735 - RNA, 1701 nt, Artificial Sequence; identical to SEQ ID NO: 194741
  derived and/or modified CDS sequence (opt5) from hemagglutinin__InfluenzaA__AEO01590

SEQ ID NO: 199736 - RNA, 1701 nt, Artificial Sequence; identical to SEQ ID NO: 194741
  derived and/or modified CDS sequence (opt5) from hemagglutinin__InfluenzaA__AEO01591

SEQ ID NO: 199737 - RNA, 1701 nt, Artificial Sequence; identical to SEQ ID NO: 194728
  derived and/or modified CDS sequence (opt5) from hemagglutinin__InfluenzaA__AEO01592

SEQ ID NO: 199738 - RNA, 1701 nt, Artificial Sequence; identical to SEQ ID NO: 194741
  derived and/or modified CDS sequence (opt5) from hemagglutinin__InfluenzaA__AEO01593

SEQ ID NO: 199739 - RNA, 1701 nt, Artificial Sequence; identical to SEQ ID NO: 194728
  derived and/or modified CDS sequence (opt5) from hemagglutinin__InfluenzaA__AEO01594

SEQ ID NO: 199740 - RNA, 1701 nt, Artificial Sequence; identical to SEQ ID NO: 194728
  derived and/or modified CDS sequence (opt5) from hemagglutinin__InfluenzaA__AEO01595

SEQ ID NO: 199741 - RNA, 1701 nt, Artificial Sequence; identical to SEQ ID NO: 194921
  derived and/or modified CDS sequence (opt5) from hemagglutinin__InfluenzaA__AEO01596

SEQ ID NO: 199742 - RNA, 1701 nt, Artificial Sequence; identical to SEQ ID NO: 194741
  derived and/or modified CDS sequence (opt5) from hemagglutinin__InfluenzaA__AEO01597

SEQ ID NO: 199743 - RNA, 1701 nt, Artificial Sequence
  derived and/or modified CDS sequence (opt5) from hemagglutinin__InfluenzaA__AEO01598
augaaggccauccuggugguccuccuguacaccuucgcuacagccaacgcggacacgcuuugcauuggcuaucacgcuaauaacagcaccgauacaguugacaccgugcuggagaaaaaugugacagucacccauuccgugaaccuccuggaagauaagcacaaugggaaacuuuguaagcugagaggaguugcgccccuccaucugggcaaaugcaacaucgccggguggauucugggaaauccugagugugaaucucucagcacagcuuccucuuggagcuacaucguggagaccuccucuagcgacaacggcacgugcuauccgggggauuuuauugacuacgaagaacugcgggagcagcuuuccagcgucucuuccuucgaacgcuuugagauguuccccaagaccagcucuuggccuaaucacgauuccaacaauggagugacagccgcuuguccccaugccggcgccaagagcuuuuauaaaaaccugaucuggcucguuaagaaaggcaauucuuacccuaagcuguccaaaagcuauaucaacgacaaggggaaggaagugcuuguccuguggggcauucaccaccccuccaccucugccgaucaacagagccucuaccagaaugcugacgccuacguguucgugggauccagcagauauucuaaaaaguuuaaaccugagaucgcuauucggccgaagguccgcgaucaggaggggagaaugaacuacuauuggacacugguugaacccggagacaaaaucaccuucgaggccacgggcaaccugguggugccucgguacgcguuugccauggaacgcaaugcuggguccggaauuaucauuagcgauacacccguccaugacugcaacaccacaugucaaaccccuaagggcgccaucaauaccucucuccccuuccagaacauccacccgauuacaaucggcaaaugcccuaaguauguuaagagcacgaaacugagacuugcuaccgggcugcggaaugugcccuccauucagucucgcggacucuuuggcgccaucgccggguucauugagggaggcuggacagggaugguggacggaugguacggcuaucaucaccagaacgaacaaggcagcggguacgcugcggaucugaaguccacccagaaugccaucgacgagaucacaaacaaagucaauagcgugauugagaagaugaacacccaguuuacggcuguuggaaaagaguucaaucaccuugagaagagaaucgaaaaccugaauaagaaaguggaugacggcuuccucgauauuuggacauacaacgccgagcugcugguccuccuggaaaaugagcggacccuugacuaucaugauucuaacgugaagaaccuguacgagaaaguccgcucccagcucaagaauaacgccaaagaaaucgggaauggauguuuugaguucuaucacaagugcgacaacaccuguauggaaagcgugaagaauggcacauacgauuauccuaaauacucugaggaagcuaagcugaacagagaggagauugacgggguuaaacuugaauccacccggaucuaucaaauccuggccauuuacagcacaguggcguccucucucguccuggugguuagccugggcgcuaucuccuuuuggaugugcucuaauggaagccuccagugccgcauuuguaucuga

SEQ ID NO: 199744 - RNA, 1701 nt, Artificial Sequence; identical to SEQ ID NO: 194741
  derived and/or modified CDS sequence (opt5) from hemagglutinin__InfluenzaA__AEO01599

SEQ ID NO: 199745 - RNA, 1701 nt, Artificial Sequence; identical to SEQ ID NO: 194741
  derived and/or modified CDS sequence (opt5) from hemagglutinin__InfluenzaA__AEO01600

SEQ ID NO: 199746 - RNA, 1701 nt, Artificial Sequence; identical to SEQ ID NO: 194741
  derived and/or modified CDS sequence (opt5) from hemagglutinin__InfluenzaA__AEO01601

SEQ ID NO: 199747 - RNA, 1701 nt, Artificial Sequence; identical to SEQ ID NO: 194741
  derived and/or modified CDS sequence (opt5) from hemagglutinin__InfluenzaA__AEO01602

SEQ ID NO: 199748 - RNA, 1701 nt, Artificial Sequence; identical to SEQ ID NO: 194741
  derived and/or modified CDS sequence (opt5) from hemagglutinin__InfluenzaA__AEO01603

SEQ ID NO: 199749 - RNA, 1701 nt, Artificial Sequence; identical to SEQ ID NO: 194741
  derived and/or modified CDS sequence (opt5) from hemagglutinin__InfluenzaA__AEO01604

SEQ ID NO: 199750 - RNA, 1701 nt, Artificial Sequence; identical to SEQ ID NO: 194741
  derived and/or modified CDS sequence (opt5) from hemagglutinin__InfluenzaA__AEO01605

SEQ ID NO: 199751 - RNA, 1701 nt, Artificial Sequence
  derived and/or modified CDS sequence (opt5) from hemagglutinin__InfluenzaA__AEO01606
augaaggccauccuggugguccuccuguacaccuucgcuacagccaacgcggacacgcuuugcauuggcuaucacgcuaauaacagcaccgauacaguugacaccgugcuggagaaaaaugugacagucacccauuccgugaaccuccuggaagauaagcacaaugggaaacuuuguaagcugagaggaguugcuccccuccaucugggcaaaugcaacaucgccggguggauucugggaaauccugagugugaaucucucagcacagccuccucuuggagcuacaucguggagaccuccucuagcgacaacggcacgugcuauccgggggauuuuauugacuacgaagaacugcgggagcagcuuuccagcgucucuuccuucgaacgcuuugagaucuuccccaagaccagcucuuggccuaaucacgauuccaacaagggagugacagccgcuuguccccaugccggcgcgaaaucuuuuuauaagaaucugaucuggcucguuaaaaagggcaacagcuacccuaaacuguccaagagcuauauuaaugacaaggggaaagaagugcuuguccuguggggaauccaccaccccuccaccucugccgaucaacagagccucuaccagaacgcugacgccuacguguucgugggcacauccagauauagcaagaaauuuaagccugagauugcuauccggccgaaaguccgcgaucaggaggggagaaugaauuacuauuggacccugguugaacccggagacaagauuacguucgaggccacaggcaaccugguggugccucgguacgcguuugccauggaacgcaacgcugggucuggaaucauuaucuccgauacccccguccaugacugcaauacaaccugucaaaccccuaaaggcgccaucaacacaagccuccccuuccagaauauucacccgaucacgauuggcaagugcccuaaguaugugaaaucuaccaagcugagacuugcuacagggcugcggaacguucccagcauccagucccgcggacucuuuggcgccauugccggguucaucgagggaggcuggaccgggaugguggacggaugguacggcuaucaucaccagaaugaacaaggcucuggguacgcugcggaucugaaaagcacacagaacgccaucgacgagauuaccaauaaggucaacuccgugaucgagaaaaugaauacgcaguuuacagcuguuggaaaggaguucaaccaccuugagaagagaauugaaaaucugaacaaaaagguggaugacggcuuccucgauaucuggaccuacaaugccgagcugcugguccuccuggaaaacgagcggacccuugacuaucaugauagcaaugugaaaaaccuguacgagaaggucaaaucucagcucaagaacaaugccaaggaaauugggaacggauguuuugaguucuaucacaaaugcgacaauacauguauggaauccgugaagaacggcaccuacgauuauccuaaauacagcgaggaagcuaagcugaaucgcgaggagaucgacgggguuaaacuugaaucuacaagaaucuaucaaauucuggccaucuacuccacgguggcgagcucccucguccuggugguuucucugggcgcuauuagcuuuuggaugugcuccaacggaucucuccagugccggaucuguauuuga

SEQ ID NO: 199752 - RNA, 1701 nt, Artificial Sequence; identical to SEQ ID NO: 194983
  derived and/or modified CDS sequence (opt5) from hemagglutinin__InfluenzaA__AEO01607

SEQ ID NO: 199753 - RNA, 1701 nt, Artificial Sequence; identical to SEQ ID NO: 197646
  derived and/or modified CDS sequence (opt5) from hemagglutinin__InfluenzaA__AEO01608

SEQ ID NO: 199754 - RNA, 1701 nt, Artificial Sequence; identical to SEQ ID NO: 199506
  derived and/or modified CDS sequence (opt5) from hemagglutinin__InfluenzaA__AEO01609

SEQ ID NO: 199755 - RNA, 1701 nt, Artificial Sequence
  derived and/or modified CDS sequence (opt5) from hemagglutinin__InfluenzaA__AEO01610
augaaggccauccuggugguccuccuguacaccuucgcuacaacgaacgccgacacccuuugcauuggcuaucacgcgaauaacagcacagauaccguugacacagugcuggagaaaaaugugaccgucacacauuccgugaaccuccuggaagauaagcacaaugggaaacuuuguaagcugagaggaguugcuccccuccaucugggcaaaugcaacaucgccggguggauucugggaaauccugagugugaaucucucagcaccgccuccucuuggagcuacaucguggagacguccucuagcgacaacgggaccugcuauccgggcgauuuuauugacuacgaagaacugcgggagcagcuuuccagcgucucuuccuucgaacgcuuugagaucuuccccaagacaagcucuuggccuaaucacgauuccaacaagggagugaccgcugccuguccccaugcuggcgccaagagcuuuuauaagaaucugaucuggcucguuaaaaagggcaacucuuacccuaaacuguccaagagcuauauuaaugacaaggggaaagaagugcuuguccuguggggaauccaccaccccuccacaucugcggaucaacagagccucuaccagaacgccgacgcuuacguguucgugggcaccuccagauauagcaagaaauuuaagccugagauugccauccggccgaaaguccgcgaucaggaggggagaaugaauuacuauuggacgcugguugaacccggagacaagauuacauucgaggcuaccggcaaccugguggugccucgguacgccuuugcgauggaacgcaacgccgggucuggaaucauuaucuccgauacacccguccaugacugcaauaccaccugucaaacaccuaaaggcgcuaucaacacgagccuccccuuccagaauauucacccgaucaccauuggcaagugcccuaaguaugugaaaucuacaaagcugagacuugccaccgggcugcggaacguucccagcauccagucccgcggacucuuuggcgcuauugccggguucaucgagggaggcuggacagggaugguggacggaugguacggcuaucaucaccagaaugaacaaggcucuggguacgccgcugaucugaaaagcacccagcacgcgaucgacgagauuacgaacaaggucaauuccgugaucgagaaaaugaacacacaguuuaccgccguuggaaaggaguucaaucaucuugagaagagaauugaaaaccugaauaaaaagguggaugacggcuuccucgauaucuggaccuacaacgcugagcugcugguccuccuggaaaaugagcggacacuugacuaucacgauagcaacgugaaaaaucuguacgagaagguccgcucucagcucaaaaacaacgccaaggaaauugggaauggauguuuugaguucuaucauaagugcgacaacaccuguauggaauccgugaaaaauggcacauacgauuauccuaaguacagcgaggaagccaaacugaacagagaggagaucgacgggguuaaacuugaaucuacgcggaucuaucaaauucuggcuaucuacuccaccguggccagcucccucguccuggugguuucucugggcgcgauuagcuuuuggaugugcuccaauggaucucuccagugccgcguguguaucuga

SEQ ID NO: 199756 - RNA, 1701 nt, Artificial Sequence
  derived and/or modified CDS sequence (opt5) from hemagglutinin__InfluenzaA__AEO01611
augaaggccauccuggugguccuccuguacaccuucgcuacagccaacgcggacacgcuuugcauuggcuaucacgcuaauaacagcaccgauacaguugacaccgugcuggagaaaaaugugacagucacccauuccgugaaccuccuggaagauaagcacaaugggaaacuuuguaagcugagaggaguugcuccccuccaucugggcaaaugcaacaucgccggguggauucugggaaauccugagugugaaucucucagcacagccuccucuuggagcuacaucguggagaccuccucuagcgacaacggcacgugcuauccgggggauuuuauugacuacgaagaacugcgggagcagcuuuccagcgucucuuccuucgaacgcuuugagaucuuccccaagaccagcucuuggccuaaucacgauuccaacaagggagugacagccgcuuguccccaugccggcgcgaaaucuuuuuauaagaaucugaucuggcucguuaaaaagggcaacagcuacccuaaacuguccaagagcuauauuaaugacaaggggagagaagugcuuguccuguggggaauccaccaccccuccaccucugccgaucaacagagccucuaccagaacgcugacgccuacguguucgugggcacaucccgguauagcaaaaaguuuaaaccugagauugcuauccgcccgaaggucagagaucaggaggggcggaugaauuacuauuggacccugguugaacccggagacaaaauuacguucgaggccacaggcaaccugguggugccucgcuacgcguuugccauggaaagaaacgcugggucuggaaucauuaucuccgauacccccguccaugacugcaauacaaccugucaaaccccuaagggcgccaucaacacaagccuccccuuccagaauauucacccgaucacgauuggcgagugcccuaaauaugugaagucuaccaagcugcggcuugcuacagggcugcgcaacguucccagcauccaguccagaggacucuuuggcgccauugccggguucaucgaaggaggcuggaccgggaugguggacggaugguacggcuaucaucaccagaaugagcaaggcucuggguacgcugcggaucugaaaagcacacagaacgccaucgacaagauuaccaauaaagucaacuccgugaucgagaagaugaauacgcaguuuacagcuguuggaaaagaguucaaccaccuugagaagcggauugaaaaucugaacaagaaaguggaugacggcuuccucgauaucuggaccuacaaugccgagcugcugguccuccuggaaaacgagcgcacccuugacuaucaugauagcaaugugaagaaccuguacgagaaagucagaucucagcucaagaacaaugccaaagaaauugggaacggauguuuugaguucuaucacaagugcgacaauacauguauggaauccgugaagaacggcaccuacgauuauccuaaauacagcgaggaagcuaagcugaaucgggaggagaucgacgggguuaaacuugaaucuacacgcaucuaucaaauucuggccaucuacuccacggcggcuagcucccucgugcuggucgugucucugggcgccauuagcuuuuggaugugcuccaacggaucucuccagugcagaaucuguauuuga

SEQ ID NO: 199757 - RNA, 1701 nt, Artificial Sequence
  derived and/or modified CDS sequence (opt5) from hemagglutinin__InfluenzaA__AEO01612
augaaggccauccuggugguccuccuguacaccuucgcuacagccaacgcggacacgcuuugcauuggcuaucacgcuaauaacagcaccgauacaguugacaccgugcuggagaaaaaugugacagucacccauuccgugaaccuccuggaagauaagcacaaugggaaacuuuguaagcugagaggaguugcuccccuccaucugggcaaaugcaacaucgccggguggauucugggaaauccugagugugaaucucucagcacagccuccucuuggagcuacaucguggagaccuccucuagcgacaacggcacgugcuauccgggggauuuuauugacuacgaagaacugcgggagcagcuuuccagcgucucuuccuucgaacgcuuugagaucuuccccaagaccagcucuuggccuaaucacgauuccaacaagggagccacagcugccuguccccaugcgggcgccaagagcuuuuauaagaaucugaucuggcucgugaaaaagggcaacucuuacccuaaacuguccaagagcuauauuaaugacaaggggaaagaaguucuugugcuguggggaauccaccaccccuccaccucugcugaucaacagagccucuaccagaacgccgacgcuuacgucuucgugggcacauccagauauagcaagaaauuuaagccugagauugccauccggccgaaagugcgcgaucaggaggggagaaugaauuacuauuggacccuggucgaacccggagacaagauuacguucgaggcgacaggcaaccugguugugccucgguacgccuuugcuauggaacgcaacgccgggucuggaaucauuaucuccgauacccccgugcaugacugcaauacaaccugucaaaccccuaaaggcgcuaucaacacaagccuccccuuccagaauauucacccgaucacgauuggcaagugcccuaaguaugucaaaucuaccaagcugagacuugccacagggcugcggaacgugcccagcauccagucccgcggacucuuuggcgccauugcuggguucaucgagggaggcuggaccgggaugguugacggaugguacggcuaucaucaccagaaugaacaaggcucuggguacgcggccgaucugaaaagcacacagaacgcuaucgacgagauuaccaauaaggugaacuccgucaucgagaaaaugaauacgcaguuuacagccgugggaaaggaguucaaccaccuugagaagagaauugaaaaucugaacaaaaagguugaugacggcuuccucgauaucuggaccuacaaugccgagcugcuggugcuccuggaaaacgagcggacccuugacuaucaugauagcaaugucaaaaaccuguacgagaaggugcgcucucagcucaaaaacaaugcuaaggaaauugggaacggauguuuugaguucuaucacaagugcgacaauacauguauggaauccgucaaaaacggcaccuacgauuauccuaaguacagcgaggaagccaaacugaauagagaggagaucgacggggugaaacuugaaucuacacggaucuaucaaauucuggcgaucuacuccacgguugcuagcucccucgugcuggucgugucucugggcgccauuagcuuuuggaugugcuccaacggaucucuccagugccgcaucuguauuuga

SEQ ID NO: 199758 - RNA, 1701 nt, Artificial Sequence; identical to SEQ ID NO: 197338
  derived and/or modified CDS sequence (opt5) from hemagglutinin__InfluenzaA__AEO01613

SEQ ID NO: 199759 - RNA, 1701 nt, Artificial Sequence
  derived and/or modified CDS sequence (opt5) from hemagglutinin__InfluenzaA__AEO01614
augaaggccauccuggugguccuccuguacaccuucgcuacagccaacgcggacacgcuuugcauuggcuaucacgcuaauaacagcaccgauacaguugacaccgugcuggagaaaaaugugacagucacccauuccgugaaccuccuggaagauaagcacaaugggaaacuuuguaagcugaaaggaguugcgccccuccaucugggcaagugcaacaucgccggguggauucugggaaauccugagugugaaucucucagcacagcuuccucuuggagcuacaucguggagaccuccucuagcgacaacggcacgugcuauccgggggauuuuauugacuacgaagaacugagagagcagcuuuccagcgucucuuccuucgaacgguuugagaucuuccccaagaccagcucuuggccuaaucacgauuccaacaaaggagugacagccgcuuguccccaugccggcgccaagagcuuuuauaaaaaucugaucuggcucguuaagaaaggcaacucuuacccuaagcuguccaagagcuauauuaaugacaaagggaaggaagugcuuguccuguggggaauccaccaccccuccaccucugccgaucaacagagccucuaccagaacgcugacgccuacguguucgugggcacaucccgcuauagcaaaaaguuuaaaccugagauugcuaucagaccgaagguccgggaucaggaggggcgcaugaauuacuauuggacccugguugaacccggagacaaaauuacguucgaggccacaggcaaccugguggugccuagauacgcguuugccauggaacggaacgcugggucuggaaucauuaucuccgauacccccguccaugacugcaauacaaccugucaaaccccuaagggcgccaucaacacaagccuccccuuccagaauauucacccgaucacgauuggcaagugcccuaaauaugugaagucuaccaaacugcgccuugcuacagggcugagaaacauccccagcauucagucccggggacucuuuggcgccaucgccggguucaucgagggaggcuggaccgggaugguugacggaugguacggcuaucaucaccagaaugaacaaggcucuggguacgcugcggaucuuaagagcacacagaacgccauugacgagaucaccaauaaagugaacuccgucauugagaagaugaauacgcaguuuacagcugugggaaaggaguucaaccaccuggagaaacgcaucgaaaaucugaacaagaaaguugaugacggcuuccucgauauuuggaccuacaaugccgagcugcuggugcuccuggaaaacgagagaacccuugacuaucaugauagcaaugucaagaaccuguacgagaaagugcggucucagcucaagaacaaugccaaggaaaucgggaacggauguuuugaguucuaucacaaaugcgacaauacauguauggaauccgucaagaacggcaccuacgauuauccuaaauacagcgaggaagcuaagcugaaucgcgaggagaucgacggggugaaacuugaaucuacaagaauuuaucaaauccuggccauuuacuccacgguugcgagcucccucgugcuggucgugucucugggcgcuaucagcuuuuggaugugcuccaacggaucucuccagugccggauuuguaucuga

SEQ ID NO: 199760 - RNA, 1701 nt, Artificial Sequence
  derived and/or modified CDS sequence (opt5) from hemagglutinin__InfluenzaA__AEO01615
augaaggccauccuggugguccuccuguacaccuucgcuacagccaacgcggacacgcuuugcauuggcuaucacgcuaauaacagcaccgauacaguugacaccgugcuggagaaaaaugugacagucacccauuccgugaaccuccuggaagauaagcacaaugggaaacuuuguaagcugagaggaguugcuccccuccaucugggcaaaugcaacaucgccggguggauucugggaaauccugagugugaaucucucagcacagccuccucuuggagcuacaucguggagaccuccucuagcgacaacggcacgugcuauccgggggauuuuauugacuacgaagaacugcgggagcagcuuuccagcgucucuuccuucgaacgcuuugagaucuuccccaagaccagcucuuggccuaaucacgauuccaacaagggagugacagccgcuuguccccaugccggcgcgaaaucuuuuuauaagaaucugaucuggcucguuaaaaagggcaacagcuacccuaaacuguccaaguauuacauuaaugacaaggggaaagaagugcuuguccuguggggaauccaccaccccagcaccuccgccgaucaacagucucucuaccagaacgcugacgccuauguguucgugggcacaagcagauacuccaagaaauuuaagccugagauugcuauccggccgaaaguccgcgagcaggaagggagaaugaauuauuacuggacccugguugagcccggagauaagauuacguucgaagccacaggcaaccugguggugccucgguaugcguuugccauggagcgcaacgcugggagcggaaucauuaucucugacacccccguccaugauugcaauacaaccugucaaaccccuaaaggcgccaucaacacaucccuccccuuccagaauauucacccgaucacgauuggcaagugcccuaaguacgugaaaagcaccaagcugagacuugcuacagggcugcggaacguucccucuauccagagccgcggacucuuuggcgccauugccggguucaucgaaggaggcuggaccgggaugguggacggaugguauggcuaccaucaccagaaugagcaaggcuccggguacgcugcggaccugaaaucuacacagaacgccaucgauaagauuaccaauaaagucaacagcgugaucgagaagaugaauacgcaguuuacagcuguuggaaaggaguucaaccaccuugagaaaagaauugaaaaucugaacaagaaaguggacgauggcuuccucgacaucuggaccuauaaugccgagcugcugguccuccuggaaaacgagcggacccuugauuaccaugacuccaaugugaagaaccuguaugagaaaguccgcagccagcucaagaacaaugccaaggaaauugggaacggauguuuugaguucuaccacaaaugcgauaauacauguauggaaucugugaagaacggcaccuaugacuacccuaaauauuccgaggaagcuaagcugaauagagaggagaucgaugggguuaaacuugaaagcacacggaucuaccaaauucuggccaucuacucuacgguggcguccagccucguccuggugguuucccugggcgcuauuucuuuuuggaugugcagcaacggaucccuccagugccgcaucuguauuuga

SEQ ID NO: 199761 - RNA, 1701 nt, Artificial Sequence; identical to SEQ ID NO: 195094
  derived and/or modified CDS sequence (opt5) from hemagglutinin__InfluenzaA__AEO01616

SEQ ID NO: 199762 - RNA, 1701 nt, Artificial Sequence; identical to SEQ ID NO: 195905
  derived and/or modified CDS sequence (opt5) from hemagglutinin__InfluenzaA__AEO01617

SEQ ID NO: 199763 - RNA, 1701 nt, Artificial Sequence; identical to SEQ ID NO: 196338
  derived and/or modified CDS sequence (opt5) from hemagglutinin__InfluenzaA__AEO01619

SEQ ID NO: 199764 - RNA, 1701 nt, Artificial Sequence; identical to SEQ ID NO: 199450
  derived and/or modified CDS sequence (opt5) from hemagglutinin__InfluenzaA__AEO01620

SEQ ID NO: 199765 - RNA, 1701 nt, Artificial Sequence; identical to SEQ ID NO: 199597
  derived and/or modified CDS sequence (opt5) from hemagglutinin__InfluenzaA__AEO01621

SEQ ID NO: 199766 - RNA, 1701 nt, Artificial Sequence
  derived and/or modified CDS sequence (opt5) from hemagglutinin__InfluenzaA__AEO01625
augaagaccaucauugcccugagcuacauccucugccugguguccgcucagaaacuucccggcaacgacaauucuacagccacgcugugucucgggcaccaugcggucccuaacggaaccauuguuaagacaaucaccaaugaucaaauugaggugacaaacgcuaccgaacuggugcagagcuccucuacaggcgagaucugcgacagcccgcaccagguccuugauggggaaaauuguacccugaucgacgcccuccugggagauccccagugcgacggcuuccaaaacaaaaagugggaucuguuuguggagagauccaaagccuauucuaauuguuacccuuaugacguucccgauuacgcuagccuccggucccugguggccagcucugggacgcuugaguucaacaaugaauccuuuaacuggaccggagucacacagaauggcaccagcucugcuugcauucgcagauccaacaauagcuucuuuucucggcugaacuggcucacacauuccaaguucaaguauccugcccugaaugugaccaugcccaacaacgaggaauuugacaaacuuuacaucuggggcguucaccauccugggacggauaaugaccagauuuuccuguaugcgcaggccagcggacgcaucacaguguccaccaagagaucucaacagacagucauuccgaacaucggcagccggccccgcgugagaaauauuccuucccggaucagcaucuacuggaccauugugaaacccggggauauccuccugauuaacucuaccggaaaucugaucgcuccucgcggcuacuuuaagauuagauccgggaaaagcucuaucaugcggagcgacgcccccaucggaaaguguaacuccgagugcauuacaccgaauggcucuaucccuaacgacaagcccuuccagaaugucaaccgcauuacguauggcgcuuguccuagauacguuaaacagaauacccucaagcuggccacagggaugcggaacgugcccgaaaaacaaacccgcggaaucuuuggcgcgauugccggguucaucgagaauggaugggagggcaugguggaugggugguauggauuuagacaccagaacagcgaaggcaucggccaggcugccgaccuuaaguccacacaagcugccauugaucagaucaaugggaaacugaaccggcucauuggaaagaccaacgagaaauuccaccagaucgaaaaggaguucagcgaagucgagggccgcauucaggaccuggagaaguacguggaagauacgaaaaucgaccuuuggucuuauaaugccgagcugcucguugcucuggaaaaccaacauacaauugaucugaccgacuccgagaugaauaagcucuuugagaaaaccaagaaacagcugagagaaaacgcggaggauauggggaauggaugcuucaagaucuaccacaagugugacaacgccugcaucggcagcauucggaaugggacauaugaucaugaaguguacagagacgaggcucuuaacaaucgcuuucagaucaaaggcgucgaacugaagucuggauacaaagacuggauucucuggaucuccuucgccauuagcugcuuucugcuuuguguggcccugcucggcuucaucaugugggcuugccagaaggggaacauccgguguaauauuugcaucuga

SEQ ID NO: 199767 - RNA, 1701 nt, Artificial Sequence
  derived and/or modified CDS sequence (opt5) from hemagglutinin__InfluenzaA__AEO01636
augaaaagcaucauugcccuguccuacauccucugccuggugucugcucagaaacuucccggcaacgacaauagcaccgccacacugugucucgggcaccaugcggucccuaacggaacgauuguuaagaccaucacaaaugaucaaauugaggugaccaacgcuacagaacuggugcaguccucuagcaccggcgagaucugcgacuccccgcaccagguccuugauggggaaaauuguacacugaucgacgcccuccugggagauccccagugcgacggcuuccaaaacaaaaagugggaucuguuuguggagagaucuaaagccuauagcaauuguuacccuuaugacguucccgauuacgcuucccuccggagccugguggccucuuccgggacccuugaauuuaacaaugagagcuucaacuggacgggagucacccagaauggcacaucuuccgcuugcauucgcagaagcaacaauucuuucuuuucccggcugaacuggcucacccauagcaaguucaaguauccugcccugaaugugacaaugcccaacaacgaggaauuugacaaacuuuacaucuggggcguucaccauccugggaccgauaaugaccagauuuuccuguaugcgcaggccuccggacgcaucacggugucuacaaagagaagccaacagaccgucauuccgaacaucggcucccggccccgcgugagaaauauuccuagccggaucucuaucuacuggacaauugugaaacccggggauauccuccugauuaacuccaccggaaaucugaucgcuccucgcggcuacuuuaagauuagaagcgggaaaucuagcaucaugcgguccgacgcccccaucggaaaguguaacucugagugcauuaccccgaauggcagcaucccuaacgacaagcccuuccagaaugucaaccgcauuacauauggcgcuuguccuagauacguuaaacagaauacgcucaagcuggccaccgggaugcggaacgugcccgaaaaacaaacacgcggaaucuuuggcgcgauugccggguucaucgagaauggaugggagggcaugguggaugggugguauggauuuagacaccagaacuccgaaggcaucggccaggcugccgaccuuaagagcacccaagcugccauugaucagaucaaugggaaacugaaccggcucauuggaaagacaaacgagaaauuccaccagaucgaaaaggaguucucugaagucgagggccgcauucaggaccuggagaaguacguggaagauaccaaaaucgaccuuugguccuauaaugccgagcugcucguugcucuggaaaaccaacauacgauugaucugacagacagcgagaugaauaagcucuuugaaaagaccaagaaacagcugagagagaacgcggaggauauggggaauggaugcuucaagaucuaccacaagugugacaacgccugcaucggcucuauucggaaugggaccuaugaucaugacguguacagagacgaagcucuuaacaaucgcuuucagaucaaaggcgucgagcugaaguccggauacaaagauuggauucucuggaucagcuucgccauuuccugcuuucugcuuuguguggcccugcucggcuucaucaugugggcuugccagaaggggaacauccgguguaauauuugcaucuga

SEQ ID NO: 199768 - RNA, 1701 nt, Artificial Sequence
  derived and/or modified CDS sequence (opt5) from hemagglutinin__InfluenzaA__AEO01642
augaagaccaucauugcccugagcuacauccucugccugguguccgcucagaaacuucccggcaacgacaauucuacagccacgcugugucucgggcaccaugcggucccuaacggaaccauuguuaagacaaucaccaaugaucaaauugaggugacaaacgcuaccgaacuggugcagagcuccucuacaggcgagaucugcaauagcccgcaccagauccuugacggggaaaacuguacccugauugaugcccuccugggagacccccagugcgauggcuuccaaaauaaaaagugggaccuguuugucgagagauccaaagccuauucuaacuguuacccuuaugaugugcccgacuacgcuagccuccggucccugguugccagcucugggacgcuugaguucaauaacgaauccuuuaauuggaccggagugacacagaacggcaccagcucugcuugcauccgcagauccaauaacagcuucuuuucucggcugaauuggcucacacaucugaaguucaaguauccugcccuuaacgucaccaugcccaacaaugaggaauuugauaaacuguacauuuggggcgugcaccauccugggacggacaacgaucagaucuuccucuaugcgcaggccuccggacgcauuacaguuagcaccaagagaucccaacagacagugaucccgaauauuggcucucggccccgcgucagaaacaucccuagccggaucuccauuuacuggaccaucgugaaacccggggacauucugcugaucaauagcaccggaaaccucauugcuccucgcggcuacuuuaagaucagaucugggaaauccagcaucaugcggucugaugcccccauuggaaaguguaauagcaagugcaucacaccgaacggcuccauuccuaaugacaaacccuuccagaacgugaaucgcgucacguauggcgcuuguccuagauacguuaagcagaacacccugaaacuugccacagggaugcggaaugugcccgagaagcaaacccgcggaaucuuuggcgcgauugccggguucaucgaaaacggaugggagggcaugguggacgggugguauggauuuagacaccaaaauucugagggcaucggccaggcugccgaucugaaaagcacacaggcugccauugaccagaucaacgggaagcucaaccggcugauuggaaaaaccaaugaaaaguuccaccagaucgagaaggaguucuccgaagucgaaggccgcauucaggaucuugagaaauacguggaggacacgaagaucgaucuguggagcuauaacgccgaacuccugguugcucuggagaaucaacauacaauugaccucaccgauucugaaaugaacaaacuguuugagaagaccaaaaagcagcuuagagaaaaugcggaggacauggggaacggaugcuucaagaucuaccacaaaugugauaaugccugcaucggcuccauucggaacgggacauaugaccaugauguguacagagacgaggcucugaauaaccgcuuucagaucaagggcgucgaacucaaaagcggauacaaggacuggauucuguggaucucuuucgccauuuccugcuuucuucuguguguggcccuccugggcuucaucaugugggcuugccagaaagggaauauccgguguaacauuugcaucuga

SEQ ID NO: 199769 - RNA, 1698 nt, Artificial Sequence
  derived and/or modified CDS sequence (opt5) from hemagglutinin__InfluenzaA__AEO01663
augaaggugaaacugcucguccugcuuugcaccuucgccgcuacauacgccgacacgaucuguauuggcuaucacgcgaacaauagcaccgauacaguugacaccgugcuggagaagaacgugacagucacccauuccgugaaucuccuggaaaacucucacaaugggaaacuuugccugcucaagggaaucgcuccccugcagcugggcaacuguagcguugccggguggauucucggaaauccugagugcgaacugcuuaucuccaaagagucuuggagcuacauuguggaaaagccgaaccccgagaauggcacauguuauccugggcauuuugccgauuacgaggaacugagagagcaacucuccucugucagcuccuucgaacgguuugagaucuuccccaaggagagcucuuggccuaaccacaccgugacgggaguuuccgcuagcugcucucauaauggcgaauccagcuuuuaucgcaaccugcuuuggcugaccggcaaaaaugggcucuaccccaaccugucuaaguccuaugccaauaacaaagagaaggaagugcugguccucuggggagugcaccacccuccgaacaucggcgaccagaaagcucuguaccauacagagaaugccuacgugagcgucguuuccucucacuauagcagaaaguucacccccgaaauugcgaagcggccuaaagugcgcgaucaggaggggagaaucaacuacuauuggacacuucuggagcccggagacaccauuaucuuugaagccaauggcaaccuccgggcuccucgcuacgccuucgcucuguccagaggguuuggaagcggcauuaucaauucuaacgcccccauggauaagugugacgcgaaaugccagacgccgcaaggcgccauuaauuccagccuuccuuuccagaacgugcaucccgucccuaucggggagugucccaaguaugugcggucugcuaaacugcgcaugguuacaggacucagaaauauccccagcauucagucccggggccuguuuggggccaucgcuggauucauugaaggcggguggaccggaaugguggauggcugguacggcuaucaccaccagaacgagcaagggucuggauacgccgccgaccaaaagagcacacagaaugcuaucaacggcauuaccaauaaagucaacuccgugaucgaaaagaugaauacccaguuuacagcgguugggaaggaguucaacaaacuggagcgcagaauggaaaaccucaauaagaaaguggaugacggauucaucgauauuuggacguacaacgccgagcugcuuguccugcucgaaaaugagcggacccuggacuuucaugacagcaacgugaagaaucuuuaugaaaaagucaagucucagcugaagaacaaugcuaaagagaucggcaacgggugcuucgaguuuuaccacaaguguaaugaugaaugcauggaguccgugaaaaacggcacauaugacuacccuaaguauagcgaagagucuaaacucaaucgcgagaagauugauggaguuagacuggaauccaugggcguguaccagauccuggccauuuauagcaccgucgccuccucucucgugcugcuuguuagccugggggcuaucuccuucuggaugugcucuaacggaagccuccagugucggaucugcauuuga

SEQ ID NO: 199770 - RNA, 1698 nt, Artificial Sequence
  derived and/or modified CDS sequence (opt5) from hemagglutinin__InfluenzaA__AEO01674
augaaggugaaacugcucguccugcuuugcaccuucacagccacguacgcugacaccaucuguauuggcuaucacgccaacaauagcacagauaccguugacacagugcuggagaagaacgugaccgucacacauuccgugaaucuccuggaaaacucucacaaugggaaacuuugccugcucaagggaaucgcgccccugcagcugggcaacuguagcguugcuggguggauucucggaaauccugagugcgaacugcuuaucuccaaagagucuuggagcuacauuguggaaaagccgaaccccgagaauggcaccuguuauccugggcauuuugccgauuacgaggaacugagagagcaacucuccucugucagcuccuucgaacgguuugagaucuuccccaaggagagcucuuggccuaaccacacggugaccggaguuuccgccagcugcucucauaauggcgaauccagcuuuuaucgcaaccugcuuuggcugacaggcaaaaaugggcucuaccccaaccugucuaaguccuaugcuaauaacaaagagaaggaagugcugguccucuggggagugcaccacccuccgaacaucggcgaccagaaagcccuguaccauaccgagaaugcuuacgugagcgucguuuccucucacuauagcagaaaguucacacccgaaauugccaagcggccuaaagugcgcgaucaggaggggagaaucaacuacuauuggacccuucuggagcccggagacacgauuaucuuugaagcgaaugagaaccucaaggccccucgguacgcuuucgcccugucccgcggcuuugggagcggaauuaucaauucuaaagcucccauggauaagugugacgccaaaugccagacaccgcaaggcgcgauuaacuccagccuuccuuuccagaaugugcaucccgucaccaucggcgaauguccuaaguaugugagaucugccaaacugcggaugguuacagggcuccgcaacauccccagcauucaguccagaggacuguuuggcgcuaucgccggguucauugagggaggcuggaccgggaugguggauggaugguacggcuaucaccaccagaaugaacaaggcucuggguacgcugccgaccagaaaagcacccagaacgccaucaauggaauuacaaacaaggucaauuccgugaucgagaaaaugaacacgcaguuuaccgcuguuggcaaggaguucaauaaacuggaacggcgcauggagaaccucaacaagaaaguggaugacggguucaucgauauuuggacauacaaugcggaacugcuuguccugcucgagaacgaaagaacccuggacuuucaugacagcaaugugaagaaccuuuaugagaaggucaaaucucaacugaagaauaacgccaaagagaucggaaauggcugcuucgaauuuuaccacaaguguaacgaugagugcauggaauccgugaaaaaugggacauaugacuaccccaaguauagcgaggagucuaagcucaaccgggaaaagauugauggcguucgccuggaguccaugggaguguaccagauccuggcuauuuauagcaccgucgccuccucucucgugcugcuuguuagccugggcgccaucuccuucuggaugugcucuaaugggagccuccaguguagaaucugcauuuga

SEQ ID NO: 199771 - RNA, 1701 nt, Artificial Sequence; identical to SEQ ID NO: 199766
  derived and/or modified CDS sequence (opt5) from hemagglutinin__InfluenzaA__AEO01691

SEQ ID NO: 199772 - RNA, 1698 nt, Artificial Sequence
  derived and/or modified CDS sequence (opt5) from hemagglutinin__InfluenzaA__AEO01699
augaaggugaaacugcucguccugcuuugcaccuucacagccacguacgcugacaccaucuguauuggcuaucacgccaacaauagcacagauaccguugacacagugcuggagaagaacgugaccgucacacauuccgugaaucuccuggaaaacucucacaaugggaaacuuugccugcucaagggaaucgcgccccugcagcugggcaacuguagcguugcuggguggauucucggaaauccugagugcgaacugcuuaucuccaaagagucuuggagcuacauuguggaaaagccgaaccccgagaauggcaccuguuauccugggcauuuugccgauuacgaggaacugagagagcaacucuccucugucagcuccuucgaacgguuugagaucuuccccaaggagagcucuuggccuaaccacacggugaccggaguuuccgccagcugcucucauaauggcgaauccagcuuuuaucgcaaccugcuuuggcugacaggcaaaaaugggcucuaccccaaccugucuaaguccuaugcuaauaacaaagagaaggaagugcugguccucuggggagugcaccacccuccgaacaucggcgaccagaaagcccuguaccauaccgagaaugcuuacgugagcgucguuuccucucacuauagcagaaaguucacacccgaaauugccaagcggccuaaagugcgcgaucaggaggggagaaucaacuacuauuggacccuucuggagccccgggacacgauuaucuuugaagcgaauggaaaccucauugccccucgcuacgcuuucgcccuguccagaggcuuugggagcggaaucauuaauucuaacgcucccauggauaagugugacgccaaaugccagacaccgcaaggcgcgaucaauuccagccuuccuuuccagaacgugcaucccgucaccaucggcgaguguccuaaguaugugcggucugccaaacugcgcaugguuacagggcucagaaauauucccagcauccccucccggggacuguuuggcgcuauugccggguucaucgaaggaggcuggaccgggaugguggauggaugguacggcuaucaccaccagaacgagcagggcucuggguacgcugccgaccaaaagagcacccagaaugccauuaacggaaucacaaauaaagucaacuccgugaucgaaaagaugaauacgcaguuuaccgcuguuggcaaggaguucaacaaacuggagcgcagaauggaaaaccucaauaagaaaguggaugacggguucauugauaucuggacauacaacgcggagcugcuuguccugcucgaaaaugagcggacccuggacuuucaugacagcaacgugaagaaucuuuaugaaaaagucaagucucagcugaagaacaaugccaaagagauuggaaacggcugcuucgaguuuuaccacaaguguaaugaugaaugcauggaguccgugaaaaacgggacauaugacuacccuaaguauagcgaagagucuaaacucaaucgcgagaagaucgauggcguuaagcuggaauccaugggagcuuaccaaauucuggccaucuauagcaccggcgccuccucucucgugcugcuugucagccugggggcuaucuccuucuggaugugcucuaacggaagccuccagagacggauuuguaucuga

SEQ ID NO: 199773 - RNA, 1698 nt, Artificial Sequence
  derived and/or modified CDS sequence (opt5) from hemagglutinin__InfluenzaA__AEO01709
augaaggugaaacugcucguccugcuuugcaccuucacagccacguacgcugacaccaucuguauuggcuaucacgccaacaauagcacagauaccguugacacagugcuggagaagaacgugaccgucacacauuccgugaaucuccuggaaaacucucacaaugggaaacuuugccugcucaagggaaucgcgccccugcagcugggcaacuguagcguugcuggguggauucucggaaauccugagugcgaacugcuuaucuccaaagagucuuggagcuacauuguggaaaagccgaaccccgagaauggcaccuguuauccugggcauuuugccgauuacgaggaacugagagagcaacucuccucugucagcuccuucgaacgguuugagaucuuccccaaggagagcucuuggccuaaccacacggugaccggaguuuccgccagcugcucucauaauggcgaauccagcuuuuaucgcaaccugcuuuggcugacaggcaaaaaugggcucuaccccaaccugucuaaguccuaugcuaauaacaaagagaaggaagugcugguccucuggggagugcaccacccuccgaacaucggcgaccagaaagcccuguaccauaccgagaaugcuuacgugagcgucguuuccucucacuauagcagaaaguucacacccgaaauugccaagcggccuaaacuucgcgaucaggacgggagaaucaacuacuauuggacccugcucgagcccggagauacgacaauuuuugaggcgaauggcaaccugaucgccccucgguacgcuuucgcccuuucccgcggguuuggaagcggcauuaucaauucuaacgcucccauggacaagugugaugccaaaugccagaccccgcaaggcgcgauuaauuccagccugccuuuccagaacgugcaucccgugacaaucggggaauguccuaaguaugucagaucugccaaacuccggauggugaccggacugcgcaauauccccagcauucaguccagaggccuguuuggggcuaucgccggauucauugagggcggguggaccggaaugguugacggcugguacggcuaucaccaccagaacgaacaagggucuggauacgcugccgaucaaaagagcacacagaaugccaucaacggcauuacgaauaaagugaacuccgucaucgagaagaugaauacccaguuuacagcuguggggaaggaguucaacaaacucgaacggcgcauggagaaccugaauaagaaaguugacgauggauucaucgacauuuggaccuacaacgcggaacuucuggugcuccuggagaaugaaagaacacuugacuuucaugauagcaacgucaagaaucuguaugagaaagugaagucucagcucaagaacaaugccaaagaaaucggcaacgggugcuucgagcuguaccugaaguguaauggcgagugcauggaauccgucaaaaacggaaccuaugacuaccccaaguauagcgaggaaucuaaacucaaucgggagaagauugauggcgugaagcuggaguccauggggguuuaccagauccuugcuauuuauagcacgguggccuccucucugguccuccuggugagccugggagccaucuccuuuuggaugugcucuaacggcagccuucagugucgcaucugcauuuga

SEQ ID NO: 199774 - RNA, 1701 nt, Artificial Sequence; identical to SEQ ID NO: 195905
  derived and/or modified CDS sequence (opt5) from hemagglutinin__InfluenzaA__AEO37530

SEQ ID NO: 199775 - RNA, 1701 nt, Artificial Sequence
  derived and/or modified CDS sequence (opt5) from hemagglutinin__InfluenzaA__AEO72176
augaaggccauccuggugguccuccuguacaccuucgcuacagccaacgcggacacgcuuugcauuggcuaucacgcuaauaacagcaccgauacaguugacaccgugcuggagaaaaaugugacagucacccauuccgugaaccuccuggaagauaagcacaaugggaaacuuuguaagcugagaggaguugcuccccuccaucugggcaaaugcaacaucgccggguggauucugggaaauccugagugugaaucucucagcacagccuccucuuggagcuacaucguggagaccuccucuagcgacaacggcacgugcuauccgggggauuuuauugacuacgaagaacugcgggagcagcuuuccagcgucucuuccuucgaacgcuuugagaucuuccccaagaccagcucuuggccuaaucacgauuccaacaagggagugacagccgcuuguccccaugccggcgcgaaaucuuuuuauaagaaucugaucuggcucguuaaaaagggcaacagcuacccuaaacuguccaagagcuauauuaaugacaaggggaaagaagugcuuguccuguggggaauccaccaccccuccaccacagccgaucaacagucucucuaccagaacgcugacaccuacguguucgugggcacgagcagauauuccaagaaauuuaagccugagauugccauccggccgaaaguccgcgaucaggaggggagaaugaauuacuauuggacacugguugaacccggagacaagauuaccuucgaggcuacaggcaaccugguggugccucgguacgccuuugcgauggaacgcaacgccgggagcggaaucauuaucucugauacccccguccaugacugcaauaccacaugucaaacgccuaaaggcgcuaucaacaccucccuccccuuccagaauauucacccgaucacaauuggcaagugcccuaaguaugugaaaagcaccaagcugagacuugccacagggcugcggaacguucccucuauccagagccgcggacucuuuggcgcuauugccggguucaucgagggaggcuggaccgggaugguggacggaugguacggcuaucaucaccagaaugaacaaggcuccggguacgccgcugaucugaaaucuacgcagaacgcgaucgacaagauuacaaauaaagucaacagcgugaucgagaagaugaauacccaguuuaccgccguuggaaaggaguucaaccaccuugagaaaagaauugagaaucugaacaagaaaguggaugacggcuuccucgauaucuggacauacaaugcugaacugcugguccuccuggagaacgaacggacccuugacuaucaugauuccaaugugaagaaccuguacgagaaaguccgcaaccagcucaagaauaacgccaaggagauugggaauggauguuuugaguucuaucacaaaugcgacaacacauguauggaaagcgugaagaauggcacguacgauuauccuaaauacucugaagaggccaagcugaacagagaagagaucgacgggguuaaacuugaguccacccggaucuaucaaauucuggcuaucuacagcacaguggccucuucccucguccuggcggugagccugggcgcuauuuccuuuuggaugugcucuaauggaagccuccagugccgcaucuguauuuga

SEQ ID NO: 199776 - RNA, 1704 nt, Artificial Sequence
  derived and/or modified CDS sequence (opt5) from hemagglutinin__InfluenzaA__AEO88980
auggagaagaucgugcugcuccuggccauugucagccuuguuaaauccgaccagaucugcauuggcuaccacgcuaacaauucuaccgaacaaguggauacaaucauggagaagaacgugacggucacccaugcccaggacauucuggaaaagacacacaaugggaagcucugugaucuggacggagugaaaccccuuauccugagagauugcagcguugcgggcuggcuccuggggaacccuaugugugacgaguucaucaaugugccggaaugguccuauauugucgagaaggcuaaccccgccaaugaucugugcuacccuggaaacuuuaaugacuaugaggaacucaagcaucugcuuucucggaucaaccacuucgagaaaauucagaucauucccaagagcuccuggucugaucaugaagccagcuccggcgugagcucugcuuguccuuaccaggggacccccuccuuuuuccgcaauguuguguggcugaucaaaaagaacaauacauauccuaccauuaaaagaagcuacaacaauacaaaccaagaggaccuccugauccuuuggggaauccaccacucuaacgaugccgcugagcagaccaagcuguaucagaauccgacgaccuacauuuccgucggcacaagcacccucaaccagcggcuggugcccaagaucgccacacgcucuaaagugaauggccaauccgggagaauggacuuuuucuggaccauucugaagccuaacgaugcgaucaauuuugaaagcaacggaaauuucauugcccccgaguacgcuuauaaaaucgucaagaaaggcgacuccgccaucaugaagucugaaguugaguacgggaacugcaauacgaaaugucagacaccuauuggagcuaucaacagcuccaugcccuuucauaauauucacccgcucaccaucggcgaaugcccuaaguaugugaaaagcaacaaacuggugcuugccacagggcugcgcaauucuccccuccgggagagacggcgcaagagaggacuguucggcgcgauugccggcuuuaucgaagggggauggcagggcauggucgacgggugguacggauaucaucacuccaacgaacagggcagcggguacgcugccgauaaagagucuacccaaaaggcuaucgacggagugaccaauaaaguuaacagcauuaucgauaagaugaacacacaguucgaagccgugggccgggaguuuaauaaccuugaacgcagaauugagaaucugaacaagaaaauggaggacggcuuccucgaugucuggacguauaaugccgaacugcuggugcucauggagaacgaacggacccuggacuuccacgauuccaauguuaagaaccuuuacgacaaagugcgccugcagcucagagauaaugcuaaggagcuggggaacggauguuuugaguucuaccauaaaugcgacaaugaguguauggagucuguccggaacggcacauaugauuacccucaauauagcgaagaggcgagacuuaagcgcgaagagaucuccggggugaagcuggagagcauuggaaccuaccagauccucucuauuuauuccacagucgccagcucucuggcucuggccaucaugguggccggccucucccuguggaugugcagcaaugggucccuucagugccggaucuguauuuga

SEQ ID NO: 199777 - RNA, 1704 nt, Artificial Sequence
  derived and/or modified CDS sequence (opt5) from hemagglutinin__InfluenzaA__AEO89021
auggagaagaucgugcugcuccuggccauugucagccuuguuaaauccgaccagaucugcauuggcuaccacgcuaacaauucuaccgaacaaguggauacaaucauggagaagaacgugacggucacccaugcccaggacauucuggagaaaacacacaaugggaagcucugugaucuggacggagugaaaccccuuauccugagagauugcagcguugcgggcuggcuccuggggaacccuaugugugacgaguucaucaaugugccggaaugguccuauauugucgagaaggcuaaccccgccaaugaucugugcuacccuggaaacuuuaaugacuaugaggaacucaagcaucugcuuucucggaucaaccacuucgagaaaauucccaucauuccuaagagcuccuggucugaucaugaagccagcuccggcgugagcucugcuugucccuaccaggggaccccuuccuuuuuccgcaauguuguguggcugaucaaaaagaacaauacauauccgaccauuaaaagaagcuacaacaauacaaaccaggaggaccuccugauccuuuggggaauccaccacucuaacaaugccgcugagcaaaccaagcuguaucagaaccccacgaccuacauuuccgucggcacaagcacccucaaucugcggcuggugccuaagaucgccacacgcucuaaagugaacggccaguccgggagaauggauuucuucuggaccauucucaagcccaaugacgcgaucaacuuugaaagcaauggaaacuucauugccccugaguacgcuuauaaaaucgucaagaaaggcgauuccgccaucaugaagucugaaguugaguacgggaauugcaacacgaaaugucagacacccauuggagcuaucaauagcuccaugccguuucauaacauucacccucugaccaucggcgaaugccccaaguaugucaagagcaauaaacuugugcuggccacagggcuccggaacucuccucugcgcgagagacggcgcaagagaggacuuuucggcgcgauugccggcuuuaucgaagggggauggcaaggcaugguggacgggugguacggauaucaucacuccaaugaacagggcagcggguacgcugccgacaaagagucuacccagaaggcuaucgauggagugaccaacaaaguuaacagcauuaucgacaagaugaauacacaguucgaagccgugggccgggaguuuaacaaucuggaacgcagaauugagaaccucaauaagaaaauggaggauggcuuccuggacgucuggacguauaacgccgaacugcucgugcugauggagaaugaacggacccuugauuuccacgacuccaacguuaagaaucuguacgauaaagugcgccuccaacugagagacaacgcuaaggagcuugggaauggauguuuugaauuuuaccauaaaugcgauaacgaguguauggagucuguccggaauggcacauaugacuacccccaguauagcgaagaggcgagacugaagcgcgaagagaucuccggggugaagcucgagagcauuggaaccuaccagauccugucuauuuauuccacagucgccagcucucuggcucucgccaucaugguggccggccugucccuuuggaugugcagcaacgggucccugcaaugccggaucuguauuuga

SEQ ID NO: 199778 - RNA, 1704 nt, Artificial Sequence
  derived and/or modified CDS sequence (opt5) from hemagglutinin__InfluenzaA__AEO89030
auggagaagaucgugcugcuccuggccauugucagccuuguuaaauccgaccagaucugcauuggcuaccacgcuaacaauucuaccgaacaaguggauacaaucauggagaagaacgugacggucacccaugcccaggacauucuggagaaaacacacaaugggaagcucugugaucuggacggagugaaaccccuuauccugagagauugcagcguugcgggcuggcuccuggggaacccuaugugugacgaguucaucaaugugccggaaugguccuauauugucgagaaggcuaaccccgccaaugaucugugcuacccuggaaacuuuaaugacuaugaggaacucaagcaucugcuuucucggaucaaccacuucgagaaaauucagaucauucccaagagcuccuggucugaucaugaagccagcuccggcgugagcucuguuuguccuuaccaggggacccccuccuuuuuccgcaauguggucuggcugaucaaaaagaacaauacauauccuaccauuaaaagaagcuacaacaauacaaaccaagaggaccuccugauccuuuggggaauccaccacucuaacgaugcugccgagcagaccaagcuguaucagaauccgacgaccuacauuuccgugggcacaagcacccucaaccagcggcuggugcccaagaucgcuacacgcucuaaagucaauggccaauccgggagaauggacuuuuucuggaccguucugaagccuaacgaugccauuaauuuugaaagcaacggaaauuucaucgcgcccgaguacgccuauaaaauugugaagaaaggcgacuccgcuaucaugaagucugaaguggaguacgggaacugcaauacgaaaugucagacaccuaucggagccauuaacagcuccaugcccuuucauaauauccacccgcucaccauuggcgaaugcccuaaguaugucaagagcaacaaacuggugcuugcuacagggcugcgcaauucuccccuccgggagagacggcgcaagagaggacuguucggcgccaucgcgggcuuuauugaagggggauggcagggcaugguugacgggugguacggauaucaucacuccaacgaacagggcagcggguacgccgcugauaaagagucuacccaaaaggccaucgacggagugaccaauaaagucaacagcaucauugauaagaugaacacacaguucgaagcugugggccgggaguuuaauaaccuugaacgcagaaucgagaaucugaacaagaaaauggaggacggcuuccucgauguuuggacguauaaugccgaacugcuggugcucauggagaacgaacggacccuggacuuccacgauuccaaugucaagaaccuuuacgacaaagugcgccugcagcucagagauaaugccaaggagcuggggaacggauguuuugaguucuaccauaaaugcgacaaugaauguauggagucuguccggaacggcacauaugauuacccucaauauagcgaagaggcuagacuuaagcgcgaagagauuuccggggugaagcuggagagcaucggaaccuaccagauucucucuaucuauuccacaguugcgagcucucuggcccuggcuauuaugguggccggccucucccuguggaugugcagcaaugggucccuucagugccggaucuguaucuga

SEQ ID NO: 199779 - RNA, 1704 nt, Artificial Sequence
  derived and/or modified CDS sequence (opt5) from hemagglutinin__InfluenzaA__AEO89048
auggagaagaucguguuccugcucgccauugucagccugguuaaauccgaccagaucugcauuggcuaccacgcuaacaauucuaccgaacaaguggauacaaucauggagaagaacgugacggucacccaugcccaggacauucuugaaaagacacacaaugggaagcugugugaucucgacggagugaaaccccugauccuuagagauugcagcguugcgggcuggcugcucgggaacccuaugugugacgaguuuaucaaugugccggaaugguccuauauugucgagaaggcuaaccccgccaaugaucugugcuacccuggaaacuucaaugacuaugaggaacugaagcaucuccugucucggaucaaccacuuugagaaaauucagaucauucccaagagcuccuggucugaucaugaagccagcuccggcgugagcucugcuuguccuuaccaggggacccccuccuucuuucgcaauguuaucuggcuuauuaaaaagaacaauacauauccuaccaucaaaagaagcuacaacaauacaaaccaagaggaccugcucauccugugggggauucaccacucuaacgaugccgcugagcagaccaaacuuuaucagaauccgacgaccuacaucuccgugggcacaagcacccugaaccagcggcucguccccaagauugccacacgcucuaaagugaauggccaauccgggagaauggacuucuuuuggaccauccugaagccuaacgaugcgauuaauuucgaaagcaacggaaauuuuaucgcccccgaguacgcuuauaaaaucgugaagaaaggcgacuccgccauucugaagucugaagucgaguacgggaacugcaauacgaaaugucagacaccuaucggagcuauuaacagcuccaugcccuuccauaauauccacccgcucaccauuggcgaaugcccuaaguauguuaagagcaacaaacuggugcuugccacagggcugcgcaauucuccccuccgggagagacggcgcaagagaggacuguuuggcgcgaucgccggcuucaucgagggaggauggcagggcaugguggacgggugguacggauaucaucacuccaacgaacagggcagcggguacgcugccgauaaagagucuacccaaaaggcuauugacggagucaccaauaaagugaacagcaucauugauaagaugaacacacaguuugaagccguuggccgggaguucaauaaccuugaacgcagaaucgagaaucugaacaagaaaauggaggacggcuuccucgauguguggacguauaaugccgaacugcugguccucauggagaacgaacggacccuggacuuucacgauuccaaugugaagaaccuuuacgacaaaguucgccugcagcucagagauaaugcuaaggagcuggggaacggauguuucgaauuuuaccauaaaugcgacaaugaguguauggagucugugcggaacggcacauaugauuacccucaauauagcgaagaggcgagacuuaagcgcgaagagauuuccggggucaagcuggagagcaucggaaccuaccagauucucucuaucuauuccacaguggccagcucucuggcucuggccaucauggucgccggccucucccuguggaugugcagcaaugggucccuucagugccggauuuguaucuga

SEQ ID NO: 199780 - RNA, 1704 nt, Artificial Sequence
  derived and/or modified CDS sequence (opt5) from hemagglutinin__InfluenzaA__AEO89065
auggagaagaucgugcugcuccuggccauugucagccuuguuaaauccgaccagaucugcauuggcuaccacgcuaacaauucuaccgaacaaguggauacaaucauggagaagaacgugacggucacccaugcccaggacauucuggaaaagacacacaaugggaagcucugugaucuggacggagugaaaccccuuauccugagagauugcagcguugcgggcuggcuccuggggaacccuaugugugacgaguucaucaaugugccggaaugguccuauauugucgagaaggcuaaccccgccaaugaucugugcuacccuggaaacuuuaaugacuaugaggaacucaagcaucugcuuucucggaucaaccacuucgagaaaauucagaucauucccaagagcuccuggucugaucaugaagccagcuccggcgugagcucuguuuguccuuaccaggggacccccuccuuuuuccgcaauguggucuggcugaucaaaaagaacaauacauauccuaccauuaaaagaagcuacaacaauacaaaccaagaggaccuccugauccuuuggggaauccaccacucuaacgaugcugccgagcagaccaagcuguaucagaauccgacgaccuacauuuccgugggcacaagcacccucaaccugcggcuggugcccaagaucgcuacacgcucuaaagucaauggccaguccgggagaauggacuuuuucuggaccauucucaagccuagcgaugccaucaacuuugaauccaauggaaacuucauugcgcccgaguacgccuauaaaaucguuaagaaaggcgacucugcuaucaugaaaagcgaaguggaguacgggaauugcaacacgaaaugucaaacaccuauuggagccaucaauuccagcaugcccuuucauaacauucacccgcugaccaucggcgaaugcccuaaguaugugaagucuaauaaacuuguccuggcuacagggcuccggaacagcccccugcgcgagagacggcgcaagagaggacuuuucggcgccauugcgggcuuuaucgaagggggauggcagggcaugguggacgggugguacggauaucaucacuccaaugaacagggcucuggguacgccgcugauaaagagagcacccagaaggccaucgacggaguuaccaacaaagucaauuccauuaucgauaagaugaacacacaauucgaagcugugggccgggaguuuaacaaucuggaacgcagaauugagaaccucaauaagaaaauggaggacggcuuccuggauguguggacguauaacgccgaacugcucguucugauggagaaugaacggacccuugacuuccacgauucuaacgugaagaaucuguacgacaaaguccgccuccagcugagagauaacgccaaggagcuugggaauggauguuuugaguucuaccauaaaugcgacaacgaguguauggagagcgugcggaauggcacauaugauuacccucaguauuccgaagaggcuagacugaagcgcgaagagaucagcggggucaagcucgagucuauuggaaccuaccaaauccuguccauuuauagcacaguggcgucuucccuggcccucgcuaucaugguugccggccugagccuuuggaugugcuccaacgggucucugcagugccggaucuguauuuga

SEQ ID NO: 199781 - RNA, 1704 nt, Artificial Sequence
  derived and/or modified CDS sequence (opt5) from hemagglutinin__InfluenzaA__AEO89082
auggagaagaucgugcugcuccuggccauugucagccuuguuaaauccgaccagaucugcauuggcuaccacgcuaacaauucuaccgaacaaguggauacaaucauggagaagaacgugacggucacccaugcccaggacauucuggagaaaacacacaaugggaagcucugugaucuggacggagugaaaccccuuauccugagagauugcagcguugcgggcuggcuccuggggaacccuaugugugacgaguucaucaaugugccggaaugguccuauauugucgagaaggcuaaccccgccaaugaucugugcuacccuggaaacuuuaaugacuaugaggaacucaagcaucugcuuucucggaucaaccacuucgagaaaauucagaucauucccaagagcuccuggucugaucaugacaccagcuccggcgugagcucugccuguccuuaccaggggacacccuccuuuuuccgcaauguuguguggcugaucaaaaagaacaauaccuauccuacaauuaaaagaagcuacaacaauaccaacaaggaagaucuccugauccuuuggggaauccaccacucuaacgacgcugccgagcaaacgaagcuguaucagaauccgaccacauacauuuccgucggcaccagcacacucaaccagcggcuggugcccaaaaucgcuacccgcucuaaggugaauggccaguccgggagaauggacuuuuucuggacgauucugaaaccuaacgaugccaucaauuuugagagcaacggaaauuucauugcgcccgaauacgccuauaagaucgucaaaaagggcgacuccgcuaucaugaaaucugagguugaauacgggaacugcaauacaaagugucaaaccccuauuggagccaucaacagcuccaugcccuuucauaauauucacccgcucacaaucggcgagugcccuaaguaugugaaaagcaacaagcuggugcuugcuaccgggcugcgcaauucuccccuccgggaaagacggcgcaaaagaggacuguucggcgccauugcgggcuuuaucgaagggggauggcagggcauggucgaugggugguacggauaucaucacuccaacgagcagggcagcggguacgccgcugacaaggaaucuacccagaaagccaucgauggagugacaaauaagguuaacagcauuaucgacaagaugaacacgcaauucgaggcugugggccgggaauuuaauaaccuugagcgcagaauugaaaaucugaacaaaaagauggaggauggcuuccucgacgucuggaccuauaaugccgagcugcuggugcucauggaaaacgagcggacacuggauuuccacgacuccaauguuaaaaaccuuuacgauaaggugcgccugcagcucagagacaaugccaaagaacuggggaacggauguuuugaguucuaccauaagugcgauaaugaauguauggagucuguccggaacggcaccuaugacuacccucaguauagcgaggaagcuagacuuaagcgcgaggaaaucuccggggugaaacuggagagcauuggaacauaccaaauccucucuauuuauuccaccgucgcgagcucucuggcccuggcuaucaugguggccggccucucccuguggaugugcagcaaugggucccuucagugccggaucuguauuuga

SEQ ID NO: 199782 - RNA, 1704 nt, Artificial Sequence
  derived and/or modified CDS sequence (opt5) from hemagglutinin__InfluenzaA__AEO89091
auggagaagaccguguuccugcucgccaucgucagccugguuaaauccgaccagauuugcaucggcuaccacgcuaacaauucuacagaacaaguggauacgauuauggagaagaacgugaccgucacacaugcccagaauauccuugagaaaacccacaacgggaagcugugugacauugauggagugaaaccccucauccugaaggacugcagcguugcgggcuggcuucuggggaauccuaugugugaugaauuuaucaacgugccggaaugguccuauauugucgagaaggcuaaucccgccaacgaccucugcuacccuggaaauuucaacgauuaugaggaacugaaacaucugcucucuagaaucaaucacuuugagaagauucagaucauucccaaaagcuccuggucugaccaugaagccagcuccggcgugagcucuacauguccuuaccaggggacccccuccuucuuucggaacguuguguggcugaucaagaaaaauaacacauauccuaccauuaagcgcagcuacaauaacacgaaccaagaggaucuucugauccucuggggaauccaccacucuaaugacgaggcugaacaggccaagcuguaucagaacccgaccacauacauuuccgucggcaccagcacacuuaaucagagacuggugcccaaaaucgcuacccggucuaaggugaacggccaauccgggcgcauggauuucuuuuggacgauucucaaaccuaaugacgccaucaacuucgagagcaauggaaacuuuauugcgcccgaauacgccuauaagaucgucaaaaagggcgauuccgcuaucaugaaaucugagguugaauacgggaauugcaacacaaagugucagaccccuauuggagccaucaauagcuccaugcccuuccauaacauucacccgcugacaaucggcgagugcccuaaguaugugaaaagcaauaagcuggugcucgcuaccgggcugagaaacucuccccuucgggagcgcagacggaaacgcggacuguuuggcgccauugcgggcuucaucgaagggggauggcagggcauggucgacgggugguacggauaucaucacuccaaugagcagggcagcggguacgccgcugacaaggaaucuacccaaaaagccaucgauggagugacaaacaagguuaacagcauuaucgacaagaugaauacgcaguuugaggcugugggcagagaguucaacaaucucgaacggcgcauugagaaccugaauaaaaagauggaagauggcuuccuugacgucuggaccuauaacgccgagcugcucgugcugauggaaaaugagagaacacuggauuuucacgacuccaacguuaaaaaucucuacgauaaggugcggcugcagcuucgcgacaacgccaaagaacuggggaauggauguuucgaguuuuaccauaagugcgaugacgaguguauggaaucugucagaaacggcaccuaugauuacccucaauauagcgaggaagcucggcucaagagagaggagaucuccggggugaaacuggaaagcauuggaacauaccagauccuuucuauuuauuccaccgucgcgagcucucuggcccucgcuaucaugauggccggccugucccuguggaugugcagcaaugggucccuccagugccgcaucuguauuuga

SEQ ID NO: 199783 - RNA, 1704 nt, Artificial Sequence
  derived and/or modified CDS sequence (opt5) from hemagglutinin__InfluenzaA__AEO89100
auggagaagaucgugcccuuccuggccauuaucagccucgucaaauccgaccagauuugcaucggcuaccacgcuaacaauucuaccgaacaaguugauacaauuauggagaagaacgugacggugacccaugcccaggacauccuggaaaagacacacaaugggaaacuuugugaucuggacggagucaaaccucucauccugagagauugcagcguggcgggcuggcuucuggggaacccgaugugugacgaguuuauuaauguucccgaaugguccuauaucguggagaaggcuaacccugccaaugaucucugcuaccccggaaacuucaaugacuaugaggaacugaagcaucugcucucucggauuaaccacuuugagaaaauccagauuaucccuaagaauagcugguccgaucaugaagccucuagcggcgucuccagcgcuugucccuaccaggggaccccuucuuucuuucgcaacgugguuuggcugauuaaaaagaauaacacauauccgaccaucaaaagauccuacaauaacacaaaccaagaggaccuucugauccucuggggcauucaccacagcaaugaugccgcugagcagaccaagcuguaucagaaccccacgaccuacaucucugugggaacauccacccuuaaucagcggcuggucccuaagauugccacacgcagcaaagugaacggccaaucugggagaauggacuucuuuuggaccauccucaagcccaaugaugcgauuaacuucgaauccaauggaaacuuuaucgccccugaguacgcuuauaaaaucgugaagaaaggcgacagcgccauuaugaaguccgaagucgaguacgggaauugcaacacgaaaugucagacacccaucggagcuauuaauucuagcaugccguuccauaacauccacccucugaccauuggcgaaugccccaaguauguuaaguccaauaaacuggugcucgccacagggcugcggaacagcccucuucgcgagagacggcgcaagagaggacuguuuggcgcgaucgccggcuucaucgaagggggauggcagggcaugguggacgggugguacggauuucaucacucuaaugaacagggcuccggguaugcugccgauaaagagagcacccaaaaggcuauugacggagucaccaacaaagugaacucuaucauugauaagaugaauacacaguucgaagccguuggccgggaguucaacaaucucgaacgcagaaucgagaaccugaauaagaaaauggaggacggcuuucuugauguguggacguacaacgccgaacugcucguccugauggagaaugaacggacccuggacuuccacgauagcaacgugaagaaucucuaugacaaaguucgccugcagcuuagagauaacgcuaaggagcuggggaauggauguuuugaguucuaccauaaaugcgacgaugaguguauggaguccgugaagaacggcacauacgacuauccccaauacucugaagaggcgcggcucaagagagaagagauuagcggggucaaacuggaguccaucggaaccuaucagauucuuagcaucuacucuacaguggccuccagccuggcucucgccaucauggucgccggccugucucuguggaugugcuccaaugggagccuccagugccgcauuuguaucuga

SEQ ID NO: 199784 - RNA, 1704 nt, Artificial Sequence
  derived and/or modified CDS sequence (opt5) from hemagglutinin__InfluenzaA__AEO89109
auggagaagaucgugcugcuccuggccauugucagccuuguuaaauccgaccagaucugcauuggcuaccacgcuaacaauucuaccgaacaaguggauacaaucauggagaagaacgugacggucacccaugcccaggacauucuggaaaagacacacaaugggaaacucugugaucuggacggagugaaaccccuuauccugagagauugcagcguugcgggcuggcuccuggggaacccuaugugugacgaguucaucaaugugccggaaugguccuauauugucgagaaggcuaaccccgccaaugaucugugcuacccuggaaacuuuaaugacuaugaggaacucaagcaucugcuuucucggaucaaccacuucgagaaaauucagaucauucccaagagcuccuggucugaucaugaagccagcuccggcgugagcucugcuuguccuuaccaggggacccccuccuuuuuccgcaauguuguguggcugaucaaaaagaacaauacauauccuaccauuaaaagaagcuacaacaauacaaaccaagagaaccuccugauccuuuggggaauccaccacucuaaugacgccgcugagcagauuaagcuguaucagaacccgaccacguacaucuccgucggcaccagcacacucaaucagcggcuggugaccaagauugccacacgccccaaagugaacggccaaucugggagaauggacuuuuucuggaccauccugaagccuaaugaugcgauuaacuuugaauccaauggaaacuucaucgcccccgaguacgcuuauaaaaucgucaaggaaggcgauagcgccauuaugaaauccgagguugaauacgggaauugcaacacgaagugucagacaccuaucggagcuauuaauucuagcaugcccuuucauaacauccacccgcucaccauuggcgagugcccuaaauaugugaaguccaauaagcuggugcuugccacagggcugcggaacagcccccuccgcgagagacggcgcaaaagaggacuguucggcgcgaucgccggcuuuaucgaagggggauggcagggcauggucgacgggugguacggauaucaucacucuaaugagcagggcuccggguacgcugccgacaaggaaagcacccaaaaagcuauugauggagugaccaacaagguuaacucuaucauugacaaaaugaauacacaguucgaggccgugggccgggaauuuaacaaucuugagcgcagaaucgagaaccugaauaagaagauggaagauggcuuccucgacgucuggacguauaacgccgagcugcuggugcucauggaaaaugagcggacccuggauuuccacgacagcaacguuaaaaaucuuuacgauaaggugcgccugcagcucagagacaacgcuaaagaacuggggaauggauguuuugaguucuaccauaagugcgauaacgaguguauggaauccguccggaauggcacauaugacuacccucaauauucugaggaagcgagacuuaaacgcgaggagauuagcggggugaagcuggaauccaucggaaccuaccagauucucagcaucuauucuacagucgccuccagccuggcucuggccaucaugguggccggccucucucuguggaugugcuccaacgggagccuucagugccggauuuguaucuga

SEQ ID NO: 199785 - RNA, 1704 nt, Artificial Sequence
  derived and/or modified CDS sequence (opt5) from hemagglutinin__InfluenzaA__AEO89127
auggagaagaucgugcugcuccuggccauuaucagccuugucaaauccgaccagauuugcaucggcuaccacgcuaacaauucuaccgaacaaguugauacaauuauggagaagaacgugacggugacccaugcccaggacauccuggaaaagacacacaaugggaaacucugugaucuggacggagucaaaccccuuauccugagagauugcagcguggcgggcuggcuccuggggaacccuaugugugacgaguucauuaauguuccggaaugguccuauaucguggagaaggcuaaccccgccaaugaucugugcuacccuggaaacuuuaaugacuaugaggaacucaagcaucugcuuucucggauuaaccacuucgagaaaauccagauuauccccaagagcuccuggucugaucaugaagccagcuccggcgucagcucugcuuguccuuaccaggggacccccuccuuuuuccgcaaugugguuuggcugauuaaaaagaacaauacauauccuaccaucaaaagaagcuacaacaauacaaaccaagagaaccuccugauccuuuggggcauucaccacucuaaugacgccgcugagcagaucaagcuguaucagaacccgaccacguacauuuccgugggaaccagcacacucaaucagcggcugguccccaagaucgccacccgcucuaaagugaacggccaauccgggagaauggacuuuuucuggacaauucugaagccuaaugaugcgaucaacuuugaaagcaauggaaacuucaucgcccccgaguacgcuuauaaaauugugaaggaaggcgauuccgccaucaugaaaucugaggucgaauacgggaauugcaacaccaagugucagacgccuauuggagcuaucaauagcuccaugcccuuucauaacauucacccgcucacaaucggcgagugcccuaaauauguuaagagcaauaagcuggugcuugccaccgggcugcggaacucuccccuccgcgagagacggcgcagacggggacuguucggcgcgaucgccggcuuuauugaagggggauggcagggcaugguggacgggugguacggauaucaucacuccaaugagcagggcagcggguacgcugccgacaaagaaucuacacaaaaggcuaucgauggagucaccaacaaagugaacagcauuaucgacaagaugaauacccaguucgaggccguuggccgcgaauuuaacaaucuugagagacggauugagaaccugaauaaaaagauggaagauggcuuccucgacguguggacauauaacgccgagcugcugguccucauggaaaaugagcgcacgcuggauuuccacgacuccaacgugaagaaucuuuacgauaaaguuagacugcagcuccgggacaacgcuaaggaacuggggaauggauguuuugaguucuaccauaaaugcgauaacgaguguauggaaucugugagaaauggcaccuaugacuacccucaauauagcgaggaagcgcgccuuaagcgggaggagaucuccgggauuaaacuggaaagcaugggaacauaccagauccucucuaucuauuccaccgucgccagcucucuggcucuggccauuaugguggccggccucucccuguggaugugcagcaacgggucccuucagugcagaaucuguauuuga

SEQ ID NO: 199786 - RNA, 1704 nt, Artificial Sequence
  derived and/or modified CDS sequence (opt5) from hemagglutinin__InfluenzaA__AEO89145
auggagaagaucgugcugcuccuggccauugucagccuuguuaaauccgaccagaucugcauuggcuaccacgcuaacaauucuaccgaacaaguggauacaaucauggagaagaacgugacggucacccaugcccaggacauucuggagaaaacacacaaugggaagcucugugaucuggacggagugaaaccccuuauccugggcgauugcagcguugcgggguggcuccugggaaacccuaugugugacaaguucaucaaugugccggaaugguccuauauugucgaaaaggcuaaccccgccaaugaucugugcuacccuggcaacuuuaaugacuaugaggagcucaaacaucugcuuucuagaaucaaccacuucgaaaagauucagaucauucccaaaagcuccuggucugaucaugaggccagcuccggggugagcucugcuuguccuuaccagggaacccccuccuuuuuccggaauguuguguggcugacaaagaaaaacaauaccuauccuacaaucaagcgcagcuacaacaauaccaaccaagaagaccuccugauucuuuggggcauccaccacucuaacaaugccgcugagcaggagaagcuguaucagaacccgacgaccuacaucuccgucggcacaagcacccucaaucagagacuggugcccaaaauugccacacggucuaaggugaacgggcaauccggacgcauggacuuuuucuggaccauccugaaaccuaaugaugcgauuaacuuugaaagcaauggcaacuucaucgcccccgaguacgcuuauaagauugucaaaaagggggauuccgccaucaugaaaucuggaguugaauacggcaauugcaacacgaagugucagacaccuaucggggcuauuaauagcuccaugcccuuucauaacauccacccgcucaccauuggagagugcccuaaguaugugaaaagcaauaagcuggugcuugccacaggccugagaaacucuccccuccgggaacgcagacggaaacgcggccuguucggggcgaucgccggauuuauugagggcggguggcagggaauggucgacggcugguacggguaucaucacuccaaugagcagggaagcggcuacgcugccgacaaggaaucuacccaaaaagcuaucgauggcgugaccaacaagguuaacagcaucauugacaagaugaauacacaguucgaggccguggggagagaauuuaacaaucuugagcggcgcaucgaaaaccugaauaaaaagauggaggauggauuccucgacgucuggacguauaacgccgagcugcuggugcucauggaaaaugagagaacccuggauuuccacgacuccaacguuaaaaaucuuuacgauaaggugcggcugcagcuccgcgacaacgcuaaagaacugggcaauggguguuuugaguucuaccauaagugcgauaacgaauguauggagucugucagaaauggaacauaugacuacccucaauauagcgaggaagcgcggcuuaagagagaggaaauuuccggcgugaaacuggagagcaucgggaccuaccagauucucucuaucuauuccacagccgcuagcucucuggcccuggccauuauggucgcuggccucucccuguggaugugcagcaacggaucccuucagugccgcaucuguaucuga

SEQ ID NO: 199787 - RNA, 1707 nt, Artificial Sequence
  derived and/or modified CDS sequence (opt5) from hemagglutinin__InfluenzaA__AEO89163
auggagaagaucgugcuccuguucgccauugucagccugguuaaauccgaccacaucugcauuggcuaccaugcuaacaauucuaccgaacagguggauacaaucauggagaagaacgugacggucacccacgcccaagacauucuugaaaagacacauaaugggaagcugugugaucucaacggagugaaaccccugauccuuaaggacugcagcguugcgggcuggcugcucgggaauccuaugugugaugaguuuaucgacgugccggaaugguccuauauugucgagaaggcuaaccccgccaaugaucugugcuacccuggaaacuucaaugacuaugaggaacugaaacaccuccugucuagaaucaaccauuuugagaagauucagaucauucccaaagauagcuggccugaccacgaagccucccuuggcgugucuagcgcuugucccuaccagggaaauuccagcuucuuucggaacguuguguggcugaucaagaaagggaaugccuauccuaccauuaagaagucuuacaacaauacaaacaaagaggaucuccugauccuuuggggcauccaccauccgaacgacgaggcugaacagacccgccuguaucaaaaucccacaaccuacauuuccaucggcacgagcacccucaaccagagacuggucccucggauugccacacgcucuaaggugaaugggcaguccggaagaaucgauuucuuuuggaccauucugaaacccaacgacgcgaucaauuucgagagcaacggcaauuuuaucgccccugaauacgcuuauaagauugugaaaaagggggacucuacaaucaugaaauccgaggucgaauacggaaacugcaauacccggugucagacgcccaugggcgccauuaacagcuccaugccguuccacaauauccauccucucacaauuggggagugccccaaguauguuaagucuaacaaacuggugcuugcuaccggacugcgcaauagcccucaaagagagcggcgcagacggaagcgcggccucuuuggcgccaucgcgggguucaucgaaggaggcuggcaggggaugguggauggaugguacggcuaucaccacuccaacgagcaggggagcggauacgccgcugacaaagaaucuacacagaaggccauugauggcgucaccaauaaagugaacuccaucauugacaagaugaacacccaauuugaggcuguuggcagagaguucaauaaccuggaacggcgcaucgagaaucuuaacaagaaaauggaagauggguuccuggacguguggacauauaaugccgagcuccugguccugauggaaaacgagagaacgcucgauuuucaugacagcaaugugaagaaccuguacgauaaaguucggcuucagcugagagacaaugccaaggaacucggaaacggcuguuucgaguuuuaccacaaaugcgauaaugaguguauggaaucugugcgcaacgggaccuaugacuacccccaguauagcgaggaagcucggcugaagagagaggagauuuccggagucaaacuugaaucuaucggcacauaccaaauucugagcaucuauuccaccguggcgagcucucucguccuggccaucaugguggcugggcugucccucuggaugugcagcaauggcucucugcagugccgcauuuguaucuga

SEQ ID NO: 199788 - RNA, 1704 nt, Artificial Sequence
  derived and/or modified CDS sequence (opt5) from hemagglutinin__InfluenzaA__AEO89172
auggagaagaucgugcugcuccuggccauugucagccuuguuagauccgaccagaucugcauuggcuaccacgcuaacaauucuaccgaacaaguggauacaaucauggagaaaaacgugacggucacccaugcccagaauauucuggaaaagacacacaacgggaaacucugugaccuggauggagugaagccccuuauccugcgggacugcagcguugcgggcuggcuccuggggaauccuaugugugaugaguucaucaacgugccggaaugguccuauauugucgagaaagcuaaucccgccaacgaccugugcuacccuggaaauuuuaacgauuaugaggaacucaagcaucugcuuucucgcaucaaucacuucgagaagauucagaucauucccaaaagcuccuggucugaccaugaagccagcuccggcgugagcucugcuuguccuuaccaggggacccccuccuuuuucagaaacguuguguggcugaucaagaaaaauaacacauauccuaccauuaagcggagcuacaauaacacaaaccaagaggaucuccugguccuuuggggaauccaccacucuaaugacgccaccgagcagaucaaacuguaucagaacccgacgaccuacguguccgugggcacaagcacccucaaucagcgccugguccccaagauugcuacaagaucuaagguuaacggccaauccgggcggauggacuuuuucuggaccauccugaaaagcaaugaugccauuaacuuugaauccaauggaaacuucaucgcgccugaguacgccuauaagauugugaaaaagggcgauucugcuaucaugaaaagcgaaguggaguacgggaauugcuccacgaagugucagacacccaucggagccauuaacagcucuaugccuuuucauaauauccacccccucaccauuggcgaaugcccgaaauaugucaaguccaacaagcuggugcuugcuacagggcugcgcaauagcccucucagagagcggcgcagaaaacggggacuguucggcgccaucgcgggcuuuauugaagggggauggcagggcaugguugacgggugguacggauaucaucacucuaacgaacagggcagcggguacgccgcugacaaggaguccacccaaaaagccaucgauggagugaccaauaaggucaacucuaucauugacaaaaugaacacacaguucgaagcugugggccgcgaguuuaauaaccuugaaagacggaucgagaaucugaacaagaagauggaggauggcuuccucgacguuuggacguauaaugccgaacugcuggugcucauggagaacgaacgcacccuggauuuccacgacagcaaugucaaaaaccuuuacgauaaggugagacugcagcuccgggacaaugccaaagagcuggggaacggauguuuugaguucuaccauaagugcgauaaugaguguauggaguccgucagaaacggcacauaugacuacccccaauauagcgaagaggcucgccuuaaacgggaagagauuucuggggugaagcuggaguccaucggaaccuaccagauucucagcaucuauucuacaguugcguccagccuggcccuggcuauuaugguggccggccucucccuguggaugugcucuaaugggagccuucagugcagaaucuguaucuga

SEQ ID NO: 199789 - RNA, 1704 nt, Artificial Sequence
  derived and/or modified CDS sequence (opt5) from hemagglutinin__InfluenzaA__AEO89181
auggagaagaucgugcuccuguucgccaccauuagccuggucaaauccgaccacaucugcauuggcuaccaugcuaacaauucuacagaacagguugauacgaucauggagaagaacgugaccgugacacacgcccaagacauucuugagaaaacccauaaugggaagcugugugaucucaacggagucaaaccccugauccuuaaggacugcagcguggcgggcuggcugcucgggaauccuaugugugaugaauuuaucaacguuccggaaugguccuauauuguggagaaggcuaaucccgccaacgaccugugcuacccuggaaauuucaacgauuaugaggaacugaaacaccuccugucuagaaucaaucauuuugagaagauucagaucauucccaaaaacagcugguccgaccacgaagccucucuuggcgucagcgcugccuguccuuaccaggggaaguccagcuucuuucggaaugugguuuggcugaucaaaaaggauaacgcuuaucccacaauuaagaaaggauacaauaacaccaaccaggaggaccuccuggugcuuuggggcauccaccauccuaaugaugaggccgaacaaacacgccuguaucagaacccgaccacguacaucucuauuggcaccuccacacucaaucagagacugguccccaagaucgcgacccggagcaaaauuaacgggcagucuggacgcaucgacuucuuuuggacaauucugaagccuaaugaugccauccacuucgaguccaacggcaauuuuaucgcucccgaauacgccuauaaaauugugaagaaaggggacagcaccaucaugaagucugagguggaauacggaaacugcaauacgagaugucaaacaccuauuggcgcuaucaacuccagcaugcccuuccauaauauucacccgcucaccaucggggagugcccuaaguaugucaaauccaacaagcugguucuugccacaggacugcgcaauucuccccagcgggagagacggcgcaaaagaggccucuuuggcgcgaucgccggguucauugaaggaggcuggcaggggaugguggacggaugguacggcuaucaccauagcaacgagcagggguccggauacgcugccgauaaggaaagcacccaaaaagcuaucgacggcgugaccaauaaggucaacucuauuaucgauaagaugaacacacaguuugaggccgugggccgggaguucaauaaccuggaacgcagaauugagaaucuuaacaaaaagauggaagacggguuccuggauguuuggacguauaaugccgagcuccuggugcugauggaaaacgagcggacccucgacuuucacgauuccaauguccgcaaccuguacgacaaagugagacuucagcugaaggauaaugcuaaagaacucggaaacggcuguuucgaguuuuaccauaagugcgacaaugaguguauggaaagcguucggaacgggacauaugauuacccucaauauucugaggaagcgagacugaagcgcgaggagaucagcggagugaaacuugaauccauuggcaucuaccagauccugucuauuuauagcaccgucgccuccagccucgugcuggcuaucaugauggccgggcugucucucuggaugugcuccaauggcagccugcagugccggauuuguaucuga

SEQ ID NO: 199790 - RNA, 1704 nt, Artificial Sequence
  derived and/or modified CDS sequence (opt5) from hemagglutinin__InfluenzaA__AEO89192
auggagaagaucgugcugcuccuggccauugucagccuuguuaaauccgaccagaucugcauuggcuaccacgcuaacaauucuaccgaacaaguggauacaaucauggagaagaacgugacggucacccaugcccaggacauucuggaaaagacacacaaugggaagcucugugaucuggacggagugaaaccccuuauccugagagauugcagcguugcgggcuggcuccuggggaacccuaugugugacgaguucaucaaugugccggaaugguccuauauugucgagaaggcuaaccccgccaaugaucugugcuacccuggaaacuuuaaugacuaugaggaacucaagcaucugcuuucucggaucaaccacuucgagaaaauucagaucauucccaagagcuccuggucugaucaugaagccagcuccggcgugagcucugcuuguccuuaccaggggacccccuccuuuuuccgcaauguuguguggcugaucaaaaagaacaauacauauccuaccauuaaaagaagcuacaacaauacaaaccaagagaaccuccugauccuuuggggaauccaccacucuaaugacgccgcugagcagauuaagcuguaucagaacccgaccacguacgucuccaucggcaccagcacacucaaucagcggcuggugcccaagauugccacccgcucuaaagugaacggccaauccgggagaauggacuuuuucuggacaauccugaagccuaaugaugcgauuaacuuugaaagcaauggaaacuucaucgcccccgaguacgcuuauaaaaucgucaaggaaggcgauuccgccauuaugaaaucugagguugaauacgggaauugcaacaccaagugucagacgccuaucggagcuauuaauagcuccaugcccuuucauaacauccacccgcucacaauuggcgagugcccuaaauaugugaaaagcaauaagcuggugcuugccaccgggcugcggaacucuccccuccgcgagagacggcgcaaaagaggacuguucggcgcgaucgccggcuuuaucgaagggggauggcagggcauggucgacgggugguacggauauccucauuccaaugagcagggcagcggguacgcugccgacaaggaaucuacacaaaaagcuauugauggagugaccaacaagguuaacagcaucauugacaaaaugaauacccaguucgaggccgugggccgggaauuuaacaaucuugagcgcagaaucgagaaccugaauaagaagauggaagauggcuuccucgacgucuggacauauaacgccgagcugcuggugcucauggaaaaugagcggacgcuggauuuccacgacuccaacguuaaaaaucuuuacgauaaggugcgccugcagcucagagacaacgcuaaagaacuggggaauggauguuuugaguucuaccacaagugcgauaacgaguguauggaaucuguccggaauggcaccuaugacuacccccaauauagcgaggaagcgagacuuaaacgcgaggagauuaacggggugaagcuggaauccaucggaacauaccagauucucagcaucuauucuaccgucgccuccagccuggcucuggccaucaugguggccggccucucucuguggaugugcuccaaugggagccuucagugccggauuuguaucuga

SEQ ID NO: 199791 - RNA, 1704 nt, Artificial Sequence
  derived and/or modified CDS sequence (opt5) from hemagglutinin__InfluenzaA__AEO89203
auggagaagaucgugcugcuccuggccauugucagccuuguuaaauccgaccagaucugcauuggcuaccacgcuaacaauucuaccgaacaaguggauacaaucauggagaagaacgugacggucacccaugcccaggacauucuggaaaagacacacaaugggaagcucugugaucuggacggagugaaaccccuuauccugagagauugcagcguugcgggcuggcuccuggggaacccuaugugugacgaguucaucaaugugccggaaugguccuauauugucgagaaggcuaaccccgccaaugaucugugcuacccuggaaacuuuaaugacuaugaggaacucaagcaucugcuuucucggaucaaccacuucgagaaaauucagaucauucccaagagcuccuggucugaucaugaagccagcuccggcgugagcucugcuuguccuuaccaggggacccccuccuuuuuccgcaauguuguguggcugaucaaaaagaacaauacauauccuaccauuaaaagaagcuacaacaauacaaaccaagagaaccuccugauccuuuggggaauccaccacucuaaugacgccgcugagcagauuaagcuguaucagaacccgaccacguacgucuccaucggcaccagcacacucaaucagcggcuggugcccaagauugccacccgcucuaaagugaacggccaauccgggagaauggacuuuuucuggacaauccugaagccuaaugaugcgauuaacuuugaaagcaauggaaacuucaucgcccccgaguacgcuuauaaaaucgucaaggaaggcgauuccgccauuaugaaaucugagguugaauacgggaauugcaacaccaagugucagacgccuaucggagcuauuaauagcuccaugcccuuucauaacauccacccgcucacaauuggcgagugcccuaaauaugugaaaagcaauaagcuggugcuugccaccgggcugcggaacucuccccuccgcgagagacggcgcaaaagaggacuguucggcgcgaucgccggcuuuaucgaagggggauggcagggcauggucgacgggugguacggauaucaucacuccaaugagcagggcagcggguacgcugccgacaaggaaucuacacaaaaagcuauugauggagugaccaacaagguuaacagcaucauugacaaaaugaauacccaguucgaggccgugggccgggaauuuaacaaucuugagcgcagaaucgagaaccugaauaagaagauggaagauggcuuccucgacgucuggacauauaacgccgagcugcuggugcucauggaaaaugagcggacgcuggauuuccacgacuccaacguuaaaaaucuuuacgauaaggugcgccugcagcucagagacaacgcuaaagaacuggggaauggauguuuugaguucuaccauaagugcgauaacgaguguauggaaucuguccggaauggcaccuaugacuacccucaauauagcgaggaagcgagacuuaaacgcgaggagauuaacggggugaagcuggaauccaucggaacauaccagauucucagcaucuauucuaccgucgccuccagccuggcucuggccaucaugguggccggccucucucuguggaugugcuccaaugggagccuucagugccggauuuguaucuga

SEQ ID NO: 199792 - RNA, 1704 nt, Artificial Sequence; identical to SEQ ID NO: 199791
  derived and/or modified CDS sequence (opt5) from hemagglutinin__InfluenzaA__AEO89213

SEQ ID NO: 199793 - RNA, 1704 nt, Artificial Sequence; identical to SEQ ID NO: 199791
  derived and/or modified CDS sequence (opt5) from hemagglutinin__InfluenzaA__AEO89224

SEQ ID NO: 199794 - RNA, 1704 nt, Artificial Sequence
  derived and/or modified CDS sequence (opt5) from hemagglutinin__InfluenzaA__AEO89235
auggagaagaucgugcugcuccuggccauggucagccuuguuagauccgaccagauuugcaucggcuaccacgcuaacaauucuaccgaacaaguggauacaauuauggagaaaaacgugacggucacccaugcccaggacauccuggaaaagacacacaaugggaaacucugugaucuggacggagugaagccccuuauucugcgggauugcagcguugcgggcuggcuccuggggaacccuaugugugacgaguucaucaaugugccggaaugguccuauaucgucgagaaagcuaaccccgccaaugaucugugcuacccuggaaaccucaaugacuaugaggaacugaagcaucuucugucucgcauuaaccacuuugagaagauccagauuauccccaaaagcuccuggucugaucaugaagccagccucggcguguccagcgcuuguccuuaccaggggacccccucuuucuuuagaaauguuauuuggcugaucaagaaaaacaauacauauccuaccauuaagcgguccuacaacaauacaaaccaagaggaccuucugauccucuggggaauccaccacagcaacgaugaggccgaacagauuaaacuguaucagaauccgaccacguacaucucugugggcaccuccacacugaaccagcgccucguccccaagauugcuaccagaagcaaggugaauggccaaucugggcggauggacuucuuuuggacaauccugaaaccugaugacgccauuaacuucgaguccaauggaaacuuuaucgcgcccgaauacgccuauaagaucgugaaaaagggcgacagcgcuauuaugaaauccgaggucgaauacgggaauugcaacaccaagugucagacgccuaucggagccauuaauucuagcaugcccuuccauaacauccacccgcuuacaauuggcgagugcccuaaauauguuaaguccaauaagcuggugcucgcuaccgggcugcgcaacagcccccuuagagagaaacggcgcaagagaggacuguuuggcgccaucgcgggcuucaucgaagggggauggcagggcaugguggaugggugguacggauaucaucacucuaaugagcagggcuccggguacgccgcugacaaagaaagcacacaaaaggccauugauggagucaccaacaaaguuaauucuaucauugacaagaugaacacccaguuugaggcugugggccgggaguucaacaaucucgaacgcagaaucgagaaccugaauaagaaaauggaagauggcuuucuggacguguggacauauaacgccgagcuccugguccuuauggaaaaugagcggacgcuggauuuccacgacagcaacgugaagaaucucuacgauaaaguucgccugcagcuuagagacaacgccaaggaacuggggaauggauguuucgaguuuuaccauaaaugcgauaacgaguguauggaauccgugcggaauggcaccuaugacuacccucaauauucugaggaagcuagacucaagcgcgaggagauuagcggggucaagcuggaauccaucggaacauaccagauucugagcaucuauucuaccguggcguccagccucgcccuggcuaucauggucgccggccuuucucuguggaugugcuccaacgggagccuccagugccggauuuguaucuga

SEQ ID NO: 199795 - RNA, 1704 nt, Artificial Sequence
  derived and/or modified CDS sequence (opt5) from hemagglutinin__InfluenzaA__AEO89246
auggagaagaucgugccccugcucgccauggucagccugguuaaauccgaccagauuugcaucggcuaccacgcuaacaauucuaccgaacaaguggauacaauuauggagaagaacgugacggucacccaugcccaggacauccuugaaaagacacacaaugggaaacugugugaucucgacggagugaaaccucugauucuuagagauugcagcguugcgggcuggcugcucgggaacccgaugugugacgaguucaucaaugugcccgaaugguccuauaucgucgagaaggcuaacccugccaaugaucugugcuaccccggaaaccugaaugacuaugaggaacucaagcaucugcuuucucggauuaaccacuuugagaaaauccagauuaucccuaagagcuccuggucugaucaugaagccagccugggcguguccagcgcuugucccuaccaggggaccccuucuuucuuucgcaauguuguguggcucauuaaaaagaacaauacauauccgaccaucaaaagauccuacaacaauacaaaccaagaggaccugcuuauucuguggggaauccaccacagcaacgaugaggccgaacagaucaagcucuaucagaaucccaccacguacauuucugucggcaccuccacacugaaccagcggcuggugccuaagaucgcuacccgcagcaaagugaauggccaaucugggagaauggacuucuuuuggacaauucucaagcccgaugacgccaucaacuucgaguccaauggaaacuuuauugcgccugaauacgccuauaaaaucgucaagaaaggcgacagcgcuaucaugaaguccgagguugaauacgggaauugcaacaccaaaugucagacgcccauuggagccaucaauucuagcaugccguuccauaacauucacccucugacaaucggcgagugccccaaguaugugaaguccaauaaacuugugcuggcuaccgggcuccggaacagcccucugcgcgagagacggcgcaagagaggacuuuuuggcgccauugcgggcuucaucgaagggggauggcagggcauggucgaugggugguacggauaucaucacucuaaugagcagggcuccggguacgccgcugacaaagaaagcacacaaaaggccaucgauggagugaccaacaaaguuaauucuauuaucgacaagaugaacacccaguuugaggcugugggccgggaguucagcaaccuggaacgcagaauugagaaucucaacaagaaaauggaagauggcuuucuggacgucuggacauauaaugccgagcugcucgugcugauggaaaacgagcggacgcuugauuuccacgacuccaauguuaagaaccuguacgauaaagugcgccuccagcugagagacaaugccaaggaacuugggaacggauguuucgaguuuuaccauaaaugcgauaaugaguguauggaaucuguccggaacggcaccuaugacuacccccaauauagcgaggaagcuagacugaagcgcgaggagaucuccggggugaagcucgaaagcauuggaacauaccagauccugucuauuuauuccaccgucgcgagcucucuggcccucgcuaucaugguggccggccugucccuuuggaugugcagcaaugggucccugcagugccggaucuguauuuga

SEQ ID NO: 199796 - RNA, 1704 nt, Artificial Sequence
  derived and/or modified CDS sequence (opt5) from hemagglutinin__InfluenzaA__AEO89257
auggagaagaucgugcugcuccuggccauugucagccuuguuagauccgaccagaucugcauuggcuaccacgcuaacaauucuaccgaacaaguggauacaaucauggagaaaaacgugacggucacccaugcccaggacauucuggaaaagacacacaaugggaaacucugugaucuggacggagugaagccccuuauccugcgggauugcagcguugcgggcuggcuccuggggaacccuaugugugacgaguucaucaaugugccggaaugguccuauauugucgagaaagcuaaccccgccaaugaucugugcuacccuggaaacuuuaaugacuaugaggaacucaagcaucugcuuucucgcaucaaccacuucgagaagauucagaucauucccaaaagcuccuggucugaucaugaagccagcuccggcgugagcucugcuuguccuuaccaggggacccccuccuuuuucagaaauguuguguggcugaucaagaaaaacaauacauauccuaccauuaagcggagcuacaacaauacaaaccaagaggaccuccugguccuuuggggaauccaccacucuaacgaugccgcugagcagaucaaacuguaucagaauccgaccacguacguguccgugggcaccagcacacucaaccagcgccugguccccaagauugccaccagaucuaagguuaauggccaauccgggcggauggacuuuuucuggacaauccugaaaagcaacgaugcgauuaauuuugaauccaacggaaauuucaucgccccugaguacgcuuauaagauugugaaaaagggcgacucugccaucaugaaaagcgaaguggaguacgggaacugcuccaccaagugucagacgcccaucggagcuauuaauagcucuaugccuuuucauaacauccacccccucacaauuggcgaaugcccgaaauaugucaaguccaauaagcuggugcuugccaccgggcugcgcaacagcccucucagagagcggcgcagaaaacggggacuguucggcgcgaucgccggcuuuauugaagggggauggcagggcaugguugacgggugguacggauaucaucacucuaaugaacagggcagcggguacgcugccgauaaggaguccacacaaaaagcuaucgacggagugaccaacaaggucaauucuaucauugauaaaaugaacacccaguucgaagccgugggccgcgaguuuaacaaucuugaaagacggaucgagaaccugaauaagaagauggaggacggcuuccucgauguuuggacauauaacgccgaacugcuggugcucauggagaaugaacgcacgcuggacuuccacgauagcaacgucaaaaaucuuuacgacaaggugagacugcagcuccgggauaacgcuaaagagcuggggaauggauguuuugaguucuaccauaagugcgacaacgaguguauggaguccgucagaaauggcaccuaugauuacccccaauauagcgaagaggcgcgccuuaaacgggaagagauuucuggggugaagcuggaguccaucggaacauaccagauucucagcaucuauucuaccguugccuccagccuggugcuggcuauuauggucgccggccucucccuguggaugugcucuaacgggagccuucagugcagaaucuguaucuga

SEQ ID NO: 199797 - RNA, 1704 nt, Artificial Sequence; identical to SEQ ID NO: 199796
  derived and/or modified CDS sequence (opt5) from hemagglutinin__InfluenzaA__AEO89268

SEQ ID NO: 199798 - RNA, 1704 nt, Artificial Sequence
  derived and/or modified CDS sequence (opt5) from hemagglutinin__InfluenzaA__AEO89279
auggagaagaucgugcugcuccuggccauugucagccuuguuaaauccgaccagaucugcauuggcuaccacgcuaacaauucuaccgaacaaguggauacaaucauggagaagaacgugacggucacccaugcccaggacauucuggaaaagacacacaaugggaagcucugugaucuggacggagugaaaccccuuauccugggcgauugcagcguugcgggguggcuccugggaaacccuaugugugacaaguucaucaaugugccggagugguccuauauugucgaaaaggcuaaccccgccaaugaucugugcuacccuggcaacuuuaaugacuaugaggagcucaaacaucugcuuucuagaaucaaccacuucgaaaagauucagaucauucccaaaagcuccuggucugaucaugaggccagcuccggggugagcucugcuuguccuuaccagggaacccccuccuuuuuccggaauguuguguggcugaucaagaaaaacaauacauauccuaccauuaagcgcagcuacaacaauacaaaccaagaagaccuccugauccuuuggggcauccaccacucuaacaaugccgcugagcaggagaagcuguaucagaacccgaccacguacauuuccgucggcaccagcacacucaaucagagacuggugcccaaaaucgccacccggucuaaggugaacgggcaauccggacgcauggauuucuucuggacaauucugaaaccuaaugacgcgaucaacuuugaaagcaauggcaacuucauugcccccgaguacgcuuauaagaucgucaaaaagggggauuccgccaucaugaaaucuggaguuaaguacggcaauugcaacaccaagugucagacgccuauuggggcuaucaauagcuccaugcccuuucauaacauucacccgcucacaaucggagaaugcccuaaauaugugaaaagcaauaaacuggugcuugccaccggccugagaaacucuccccuccgggagcgcagacggaagcgcggccuguucggggcgauugccggauuuaucgaaggcggguggcagggaauggucgacggcugguacggguaucaucacuccaaugagcagggaagcggcuacgcugccgacaaagagucuacacaaaaggcuaucgauggcgugaccaacaagguuaacagcauuaucgacaaaaugaauacccaguucgaagccguggggagagaguuuaacaaucuugaacggcgcauugagaaccugaauaagaaaauggaagauggauuccucgacgucuggacauauaacgccgagcugcuggugcucauggagaaugaaagaacgcuggauuuccacgacuccaacguuaagaaucuuuacgauaaagugcggcugcagcuccgcgacaacgcuaaggagcugggcaauggguguuuugaauuuuaccauaagugcgauaacgaguguauggaaucugucagaaauggaaccuaugacuacccucaauauagcgaggaggcgcggcuuaaaagagaagagaucuccggcgugaagcuggaaagcauugggacauaccagauccucucuauuuauuccaccgccgcuagcucucuggcccuggccaucauggucgcuggccucucccuguggaugugcagcaacggaucccuucagugccgcaucuguauuuga

SEQ ID NO: 199799 - RNA, 1704 nt, Artificial Sequence
  derived and/or modified CDS sequence (opt5) from hemagglutinin__InfluenzaA__AEO89289
auggagaagaucgugcugcuccuggccauugucagccuugcuaaauccgaccagaucugcauuggcuaccacgccaacaauucuaccgaacaaguugauacaaucauggagaagaacgugacggugacccaugcgcaggacauucuggaaaagacacacaaugggaagcucugugaucuggacggagucaaaccccuuauccugggcgauugcagcguggcuggguggcuccugggaaacccuaugugugacaaguucaucaauguuccggagugguccuauauuguggaaaaggucaaccccgccaaugaucugugcuacccuggcaacuuuaaugacuaugaggagcucaaacaucugcuuucuagaaucaaccacuucgaaaagauuaaaaucauucccaagagcuccuggucugaucaugaggccagcuccggggugagcucugcuuguccuuaccagggaacccccuccuuuuuccggaauguuguguggcugaucaaaaagaacaauacauauccuaccauuaagcgcagcuacaacaauacaaaccaggaagaccuccugauccuuuggggcauccaccacucuaacaaugucgccgagcaagagaaacuguaucagaacccgaccacguacauuuccgugggcaccagcacacucaaucagagacuggugcccaagaucgcuacccggucuaaagucaacgggcaguccggacgcauggacuuuuucuggacaauucugaagccuaaugauaccaucaacuuugaaagcaauggcaacuucauugcccccgaguacgcguauaaaaucguuaagaaaggggauuccgccaucaugaagucuggaguggaauacggcaauugcaacacgaagugucaaacaccuauuggggcuaucaauagcuccaugcccuuucauaacauucacccgcucaccaucggagagugcccuaaauaugugaaaagcaauaaacugguccuugccacaggccugagaaacucuccccuccgggaacgcagacggaagcgcggccuguucggggcuauugccggauuuaucgagggcggguggcagggaaugguggacggcugguacggguaucaucacuccaaugagcagggaagcggcuacgcggccgacaaagaaucuacccagaaggcuaucgauggcguuaccaacaaggugaacagcauuaucgacaaaaugaauacacaauucgaggccgucgggagagaauuuaacaaucuugagcggcgcauugaaaaccugaauaagaaaauggaggauggauuccucgacguguggacguauaacgcugagcugcugguucucauggaaaaugagagaacccuggauuuccacgacuccaacgugaagaaucuuuacgauaaaguccggcugcagcuccgcgacaacgccaaggaacugggcaauggguguuuugaguucuaccauaagugcgauaacgaauguauggagucugugagaaauggaacauaugacuacccucgguauagcgaggaagccagacuuaaacgcgaggaaaucuccggcgucaagcuggagagcauugggaccuaccagauccucucuauuuauuccacagcugcgagcucucuggcccuggcuaucaugguggccggccucucccuguggaugugcagcaacggaucccuucaaugccggaucuguauuuga

SEQ ID NO: 199800 - RNA, 1704 nt, Artificial Sequence
  derived and/or modified CDS sequence (opt5) from hemagglutinin__InfluenzaA__AEO89300
auggagaagaucgugcugcuccuggccauugucagccuuguuaaauccgaccagaucugcauuggcuaccacgcuaacaauucuaccgaacaaguggauacaaucauggagaagaacgugacggucacccaugcccaggacauucuggaaaagacacacaaugggaagcucugugaucuggacggagugaaaccccuuauccugagagauugcagcguugcgggcuggcuccuggggaacccuaugugugacgaguucaucaaugugccggaaugguccuauauugucgagaaggcuaaccccgccaaugaucugugcuacccuggaaacuuuaaugacuaugaggaacucaagcaucugcuuucucggaucaaccacuucgagaaaauucagaucauucccaagagcuccuggucugaucaugaagccagcuccggcgugagcucugcuuguccuuaccaggggacccccuccuuuuuccgcaauguuguguggcugaucaaaaagaacaauacauauccuaccauuaaaagaagcuacaacaauacaaaccaagagaaccuccugauccuuuggggaauccaccacucuaaugacgccgcugagcagauuaagcuguaucagcauccgaccacguacaucuccgucggcaccagcacacucaaccagcggcuggugcccaagauugccacccgcucuaaagugaauggccaauccgggagaauggacuuuuucuggacaauccugaagccuaacgaugcgauuaauuuugaaagcaacggaaauuucaucgcccccgaguacgcuuauaaaaucgucaaggaaggcgauuccgccauuaugaaaucugagguugaauacgggaacugcaauaccaagugucagacgccuaucggagcuauuaacagcuccaugcccuuucacaauauccauccgcucacaauuggcgagugcccuaaauaugugaaaagcaacaagcuggugcuugccaccgggcugcgcaauucuccccuccgggagagacggcgcaaaagaggacuguucggcgcgaucgccggcuuuaucgaagggggauggcagggcauggucgacgggugguacggauaucaccacuccaacgagcagggcagcggguacgcugccgacaaggaaucuacacaaaaagcuauugauggagugaccaauaagguuaacagcaucauugacaaaaugaacacccaguucgaggccgugggccgggaauuuaauaaccuugagcgcagaaucgagaaucugaacaagaagauggaagauggcuuccucgacgucuggacauauaaugccgagcugcuggugcucauggaaaacgagcggacgcuggauuuccaugacuccaauguuaaaaaccuuuacgauaaggugcgccugcagcucagagacaaugcuaaagaacuggggaacggauguuuugaguucuaccacaagugcgauaaugaguguauggaaucuguccggaacggcaccuaugacuacccucaauauagcgaggaagcgagacuuaaacgcgaggagauuaauggggugaagcuggaauccaugggaacauaccagauccucagcauuuauucuaccgucgccuccagccuggcucuggccaucaugguggccggccucucuuuuuggaugugcuccaacgggagccugcagugccggaucuguauuuga

SEQ ID NO: 199801 - RNA, 1704 nt, Artificial Sequence
  derived and/or modified CDS sequence (opt5) from hemagglutinin__InfluenzaA__AEO89311
auggagaagaucgugcuccuguucgccauugucagccugguuaaauccgaccacaucugcauuggcuaccaugcuaacaauucuaccgaacagguggauacaaucauggagaagaacgugacggucacccacgcccaagacauucuugagaaaacacauaaugggaagcugugugaucucaacggagugaaaccccugauccuuaaggacugcagcguugcgggcuggcugcucgggaauccuaugugugaugaauuuaucaacgugccggaaugguccuauauugucgagaaggcuaaucccgccaacgaccugugcuacccuggaaauuucaacgauuaugaggaacugaaacaccuccugucuagaaucaaucauuuugagaagauucagaucauucccaaagacagcugguccgaucacgaagccucucuuggcgugagcgcugccuguccuuaccaggggaacuccagcuucuuucggaauguuguguggcugaucaagaaagacaacgcuuaucccaccauuaagaagucuuacaauaacacaaaccaggaggaucuccugauccuuuggggaauccaccauccuaaugacgaggccgaacaaacccgccuguaucagaacccgacaaccuacauuuccaucggcacgagcacccucaaucagagacugguccccaaaauugcgacacggucuaaggugaacggccaguccgggcgcaucgauuucuuuuggaccauucugaaaccuaaugacgccauccacuucgagagcaacggaaauuuuaucgcucccgaauacgccuauaagauugugaaaaagggcgacucuacaaucaugaaauccgaggucgaauacgggaacugcaauaccagaugucaaacgccuaugggagcuauuaacagcuccaugcccuuccauaauauccacccgcucacaauuggcgagugcccuaaguauguuaagucuaccaaacuggugcuugccacagggcugcggaacagcccccagcgcgagagacggcgcaagagaggacucuuuggcgcgaucgccggcuucaucgaagggggauggcagggcaugguggaugggugguacggauaucaccauuccaaugagcagggcagcggguacgcugccgacaaagaaucuacccaaaaggcuauugauggagucaccaacaaaguuaauuccaucauugacaagaugaacacacaguuugaggccgugggccgggaguucaacaagcuggaacgcagaaucgagaaucuuaacaaaaagauggaagauggcuuccuggacguguggacguauaaugccgagcuccugguccugauggaaaacgagcggacccucgauuuucacgacagcaaugugaaaaaccuguacgauaagguucgccuucagcugagagacaaugcuaaagaacucgggaacggauguuucgaguuuuaccauaagugcaauaacgaguguauggaaucugugcggaauggcacauaugauuacccucaauauagcgaggaagcgagacugaagcgcgaggagauuuccggggucaaacuugaaucuaucggaauuuaccagauccugagcaucuauuccaccguggccagcucucucguccuggcuauuaugauggccggccugucccucuggaugugcagcaacgggucucugcagugccggaucuguauuuga

SEQ ID NO: 199802 - RNA, 1701 nt, Artificial Sequence; identical to SEQ ID NO: 194000
  derived and/or modified CDS sequence (opt5) from hemagglutinin__InfluenzaA__AEO99215

SEQ ID NO: 199803 - RNA, 1698 nt, Artificial Sequence
  derived and/or modified CDS sequence (opt5) from hemagglutinin__InfluenzaA__AEQ38187
augaaggugaaacugcucguccugcuuugcaccuucacagccacguacgcugacaccaucuguauuggcuaucacgccaacaauagcacagauaccguugacacagugcuggagaagaacgugaccgucacacauuccgugaaucuccuggaaaacucucacaaugggaaacuuugccugcucaagggaaucgcgccccugcagcugggcaacuguagcguugcuggguggauucucggaaauccugagugcgaacugcuuaucuccaaagagucuuggagcuacauuguggaaaagccgaaccccgagaauggcaccuguuauccugggcauuuugccgauuacgaggaacugagagagcaacucuccucugucagcuccuucgaacgguuugagaucuuccccaaggagagcucuuggccuaaccacacggugaccggagccuccgcuagcugcucucauaauggcgaaaacuccuuuuaucgcaaucugcuuuggcugacaggcaaaaacgggcucuaccccaaucugagcaagucuuaugccaacaacaaagagaaggaaguucuggugcucuggggaguccaccacccuccgaauaucgcugaccagaaaacccuguaccauacagagaacgccuacguguccguggucagcucccacuauucuagaaaguucacccccgaaauugcgaagcggccuaaaguucgcgaucaggagggcagaaucaauuacuauuggacgcuucuggagcccggggacacaauuaucuuugaagccaacggaaaucucauugcuccucgguacgccuucgcucugagccgcggcuuuggguccggaaucauuaacagcaaugcccccauggauaagugugacgcgaaaugccagaccccgcaaggcgccaucaacucuucccuuccuuuccagaaugugcaucccgugacaaucggcgaguguccuaaguaugucagaagcgcuaaacugcggauggugaccgggcuccgcaacauucccucuauccagagcagaggacuguuuggcgccauugcuggguucaucgaaggaggcuggaccgggaugguugauggaugguacggcuaucaccaccagaaugagcaaggcuccggguacgccgccgaccagaagucuacacagaacgcuauuaauggaaucacgaacaaagugaauagcgucaucgaaaagaugaacacccaguuuacagcggugggcaaggaguucaacaaacuggagcggcgcauggaaaaucucaacaagaaaguugaugacggguucauugauaucuggaccuacaaugccgagcugcuugugcugcucgaaaacgagagaacacuggacuuucaugacuccaaugucaagaaccuuuaugaaaaagucaagagccaacugaagaauaacgcuaaagagauuggaaauggcugcuucgaguuuuaccacaaguguaacgaugaaugcauggagucugugaaaaaugggaccuaugacuaccccaaguauuccgaagagagcaaacucaaccgggagaagaucgauggcgugaagcuggaaucuaugggaguuuaccagauucuggccaucuauuccacgguggccagcucccucguccugcuugugucucugggcgcuaucagcuucuggaugugcuccaaugggucucuccagugucgcauuugcaucuga

SEQ ID NO: 199804 - RNA, 1698 nt, Artificial Sequence; identical to SEQ ID NO: 199803
  derived and/or modified CDS sequence (opt5) from hemagglutinin__InfluenzaA__AEQ38188

SEQ ID NO: 199805 - RNA, 1698 nt, Artificial Sequence
  derived and/or modified CDS sequence (opt5) from hemagglutinin__InfluenzaA__AEQ38189
augaaggugaaacugcucguccugcuuugcaccuucacagccacguacgcugacaccaucuguauuggcuaucacgccaacaauagcacagauaccguugacacagugcuggagaagaacgugaccgucacacauuccgugaaucuccuggaaaacucucacaaugggaaacuuugccugcucaagggaaucgcgccccugcagcugggcaacuguagcguugcuggguggauucucggaaauccugagugcgaacugcuuaucuccaaagagucuuggagcuacauuguggaaaagccgaaccccgagaauggcaccuguuauccugggcauuuugccgauuacgaggaacugagagagcaacucuccucugucagcuccuucgaacgguuugagaucuuccccaaggagagcucuuggccuaaccacacggugaccggaguuuccgccagcugcucucauaauggcgaaaacuccuuuuaucgcaaucugcuuuggcugacaggcaaaaacgggcucuaccccaaucugagcaagucuuaugcuaacaacaaagagaaggaagugcugguccucuggggagugcaccacccuccgaauaucgccaaccagaaaacccuguaccauacagagaaugcuuacguguccgucguuagcucccacuauucuagaaaguucacccccgaaauugccaagcggccuaaagugcgcgaccaggagggcagaaucaacuacuauuggacgcuucuggagcccggggauacaauuaucuuugaagcgaauggaaaccucauugccccucgguacgcuuucgcccugagccgcggcuuuggguccggaaucauuaauagcaacgcucccauggacaagugugaugccaaaugccagaccccgcaaggcgcgaucaauucuucccuuccuuuccagaacgugcaucccgucacaaucggcgaguguccuaaguaugugagaagcgccaaacugcggaugguuaccgggcuccgcaauauucccucuauccagagcagaggacuguuuggcgcuauugccggguucaucgaaggaggcuggaccgggaugguggacggaugguacggcuaucaccaccagaacgagcaaggcuccggguacgcugccgaucagaagucuacacagaaugccauuaacggaaucacgaauaaagucaacagcgugaucgaaaagaugaacacccaguuuacagcuguuggcaaggaguucaauaaacuggagcggcgcauggaaaaccucaauaagaaaguggacgauggguucauugacaucuggaccuacaacgcggagcugcuuguccugcucgaaaaugagagaacacuggauuuucaugacuccaacgugaagaaucuuuaugaaaaagucaagagccaacugaagaacaaugccaaagagauuggaaacggcugcuucgaguuuuaccacaaguguaaugacgaaugcauggagucugugaaaaacgggaccuaugauuaccccaaguauuccgaagagagcaaacucaaucgggagaagaucgacggcguuaagcuggaaucuaugggaguguaccagauucuggcuaucuauuccacggucgccagcucccucgugcugcuuguuucucugggcgccaucagcuucuggaugugcuccaacgggucucuccagugucgcauuugcaucuga

SEQ ID NO: 199806 - RNA, 1698 nt, Artificial Sequence
  derived and/or modified CDS sequence (opt5) from hemagglutinin__InfluenzaA__AEQ38190
augaaggugaaacugcucguccugcuuugcaccuucacagccacguacgcugacaccaucuguauuggcuaucacgccaacaauagcacagauaccguugacacagugcuggagaagaacgugaccgucacacauuccgugaaucuccuggaaaacucucacaaugggaaacuuugccugcucaagggaaucgcgccccugcagcugggcaacuguagcguugcuggguggauucucggaaauccugagugcgaacugcuuaucuccaaagagucuuggagcuacauuguggaaaagccgaaccccgagaauggcaccuguuauccugggcauuuugccgauuacgaggaacugagagagcaacucuccucugucagcuccuucgaacgguuugagaucuuccccaaggagagcucuuggccuaaccacacggugaccggaguuuccgccagcugcucucauaauggcgaaaacuccuuuuaucgcaaucugcuuuggcugacaggcaaaaacgggcucuaccccaaucugagcaagccuuaugcuaacaacaaagagaaggaagugcugguccucuggggagugcaccacccgcccaauaucgccgugcagaaaacccuguaccauacagagaacgcuuacgucucuguuguguccagccacuauuccagaaaguucaccccugaaauugccaagcggcccaaagugcgcgaccaggagggcagaaucaauuacuauuggacgcuucuggagccuggggauacaauuaucuuugaagcgaacggaaaucucauugcuccccgguacgccuucgcccugucucgcggcuuugggagcggaaucauuaacuccaaugcuccgauggacaagugugaugccaaaugccagaccccucaaggcgcgaucaacagcucucuucccuuccagaauguccauccugugacaaucggcgagugucccaaguauguuagauccgccaaacugcggauggugaccgggcuccgcaacauucccagcauccagucuagaggacuguuuggcgcuauugccggguucaucgaaggaggcuggaccgggauggucgacggaugguacggcuaucaccaccagaaugagcaaggcagcggguacgcugccgaucagaaguccacacagaacgccauuaauggaaucacgaacaaaguuaauucugugaucgaaaagaugaacacccaguuuacagcugugggcaaggaguucaacaaacuggagcggcgcauggaaaaucucaacaagaaagucgacgauggguucauugacaucuggaccuacaaugcggagcugcuugugcugcucgaaaacgagagaacacuggauuuucaugacagcaaugucaagaaccuuuaugaaaaagugaagucccaacugaagaauaacgccaaagagauuggaaauggcugcuucgaguuuuaccacaaguguaacgacgaaugcauggagagcguuaaaaaugggaccuaugauuacccuaaguauucugaagaguccaaacucaaccgggagaagaucgacggcgugaagcuggaaagcaugggagucuaccagauucuggcuaucuauucuacgguggccuccagccucguucugcuugugucccugggcgccaucucuuucuggaugugcagcaaugggucccuccagugucgcauuugcaucuga

SEQ ID NO: 199807 - RNA, 1698 nt, Artificial Sequence; identical to SEQ ID NO: 195698
  derived and/or modified CDS sequence (opt5) from hemagglutinin__InfluenzaA__AEQ38191

SEQ ID NO: 199808 - RNA, 1698 nt, Artificial Sequence
  derived and/or modified CDS sequence (opt5) from hemagglutinin__InfluenzaA__AEQ38192
augaaggugaaacugcucguccugcuuugcaccuucacagccacguacgcugacaccaucuguauuggcuaucacgccaacaauagcacagauaccguugacacagugcuggagaagaacgugaccgucacacauuccgugaaucuccuggaaaacucucacaaugggaaacuuugccugcucaagggaaucgcgccccugcagcugggcaacuguagcguugcuggguggauucucggaaauccugagugcgaacugcuuaucuccaaagagucuuggagcuacauuguggaaaagccgaaccccgagaauggcaccuguuauccugggcauuuugccgauuacgaggaacugagagagcaacucuccucugucagcuccuucgaacgguuugagaucuuccccaaggagagcucuuggccuaaccacacggugaccggaguuuccgccagcugcucucauaauggcgaauccagcuuuuaucgcaaccugcuuuggcugacaggcaaaaaugggcucuaccccaaccugucuaaguccuaugcuaauaacaaagagaaggaagugcugguccucuggggagugcaccacccuccgagcaucuccgaccagaaaacccuguaccauacagagaacgccuacgugucugucguuagcucccacuauagcagaaaguucacccccgaaauuacgaagcggccuaaagugcgcgaucaggagggcagaaucaauuacuauuggacacuucuggagcccggggacaccauuaucuuugaagcuaacggaaaucucauugccccucgguacgcguucgcccugucucgcggcuuuggguccggaaucauuaacagcaauacacccauggauaagugugacaccaaaugccagaccccgcaaggcgcuaucaacucuagccuuccuuuccagaaugugcaucccgucacaaucggcgaguguccuaaguaugugagauccgccaaacugcggaugguuacggggcuccgcaacauucccucuauccagagcagaggacuguuuggcgcuauugccggguucaucgaaggaggcuggaccgggaugguggauggaugguacggcuaucaccaccagaaugagcaaggcuccggguacgcggccgaccaaaagagcacacagaacgcuauuaauggaaucaccaacaaagucaauucugugaucgaaaagaugaacacacaguuuaccgccguuggcaaggaguucaauaaacuggagcggcgcauggaaaaccucaacaagaaaguggaugacggguucauugauaucuggacguacaaugcugagcugcuuguccugcucgaaaacgagagaacacuggacuuucaugacuccaaugugaagaaccuuuaugaaaaagucaagagccagcugaagaauaacgccaaagagauuggaaauggcugcuucgaguuuuaccacaaguguaacgaugaaugcauggagucugugaaaaaugggaccuaugacuaccccaaguauuccgaagagagcaaacucaaccgggagaagaucgauggcguuaagcuggaauccaugggaguguaccagauucuggccaucuauucuaccgucgcuagcucccucgugcugcuuguuucucugggcgcgaucagcuucuggaugugcuccaaugggagccuccagugucgcauuugcaucuga

SEQ ID NO: 199809 - RNA, 1698 nt, Artificial Sequence
  derived and/or modified CDS sequence (opt5) from hemagglutinin__InfluenzaA__AEQ38193
augaaggugaaacugcucauccugcuuugcaccuucacagccacguacgcugacaccauuuguaucggcuaucacgccaacaauagcacagauaccgucgacacaguucuggagaagaacgugaccgugacacauuccgucaaucuccuggaaaacucucacaaugggaaacuuugccugcucaagggaauugcgccccugcagcugggcaacuguagcguggcuggguggauccucggaaauccugagugcgaacugcuuauuuccaaagagucuuggagcuacaucguugaaaagccgaaccccgagaauggcaccuguuauccugggcauuuugccgauuacgaggaacugagagagcaacucuccucugugagcuccuucgaacgguuugagaucuuccccaaggagagcucuuggccuaaccacacggucaccggaguguccgccagcugcucucauaauggcgaauccagcuuuuaucgcaaccugcuuuggcugacaggcaaaaaugggcucuaccccaaccugucuaaguccuaugcuaauaacaaagagaaggaaguucuggugcucuggggaguccaccacccuccgaacauuguggaccagaaaacccuguacagaacagagaaugccuacgugagcgucguuuccucucauuauagccggaaguucacccccgaaaucgcuaagcgcccuaaagugagagaucaggagggccggauuaacuacuauuggacgcuucuggagcccggggacacaaucauuuuugaagccaauggaaaccucaucgcgccucgcuacgccuucgcucuguccagaggcuuugggagcggaauuaucaauucuaacgcccccauggauaagugugacgcuaaaugccagaccccgcaaggcgccaucaauuccagccuuccuuuccagaacgugcaccccgucacaauuggcgaguguccuaaguaugugcggucugcgaaacugcgcaugguuaccgggcucagaaauauccccagcauucagucccggggacuguuuggcgccaucgcuggguucauugaaggaggcuggaccgggaugguggauggaugguacggcuaucaucaccagaacgagcaaggcucuggguacgccgcugaccaaaagagcacacagaaugccaucaacggaaucacgaauaaagucaacuccgugauugaaaagaugaauacccaguuuacagccguuggcaaggaguucaacaaacuggagcgcagaauggaaaaccucaauaagaaaguggaugacggguucaucgauauuuggaccuacaacgcugagcugcuuguccugcucgaaaaugagcggacacuggacuuucacgacagcaacgugaagaaucuuuaugaaaaagucaagucucagcugaagaacaaugcgaaagagaucggaaacggcugcuucgaguuuuaccauaaguguaaugaugaaugcauggaguccgugaaaaacgggaccuaugacuaccccaaguauagcgaagagucuaaacucaaucgcgagaagauugauggcguuaagcuggaauccaugggaguguaccagauccuggccaucuauagcacggucgcuuccucucucgugcugcuuguuagccugggcgccauuuccuucuggaugugcucuaacgggagccuccaguguagaaucugcauuuga

SEQ ID NO: 199810 - RNA, 1698 nt, Artificial Sequence
  derived and/or modified CDS sequence (opt5) from hemagglutinin__InfluenzaA__AEQ38194
augaaggugaaacugcucguccugcuuugcaccuucacagccacguacgcugacaccaucuguauuggcuaucacgccaacaauagcacagauaccguugacacagugcuggagaagaacgugaccgucacacauuccgugaaucuccuggaaaacucucacaaugggaaacuuugccugcucaagggaaucgcgccccugcagcugggcaacuguagcguugcuggguggauucucggaaauccugagugcgaacugcuuaucuccaaagagucuuggagcuacauuguggaaaagccgaaccccgagaauggcaccuguuauccugggcauuuugccgauuacgaggaacugagagagcaacucuccucugucagcuccuucgaacgguuugagaucuuccccaaggagagcucuuggccuaaccacacggugaccggaguuuccgccagcugcucucauaauggcgaauccagcuuuuaucgcaaccugcuuuggcugacaggcaaaaaugggcucuaccccaaccugucuaaguccuaugcuaauaacaaagagaaggaagugcugguccucuggggagugcaccacccuccgagcaucuccgaccagaaaacccuguaccauacagagaacgccuacgugucugucguuagcucccacuauagcagaaaguucacccccgaaauugcuaagcggccuaaagugcgcgaucaggagggcagaaucaauuacuauuggacgcuucuggagcccggggacacaauuaucuuugaagccucuggaaaccucauugcgccucgguacgccuucgcucugucccgcggcuuugggagcggaaucauuaauucuaacgcccccauggauaagugugacgcuaaaugccagaccccgcaaggcgccaucaauagcucccuuccuuuccagaacgugcaucccgucacaaucggcgaguguccuaaguaugugagaucugcgaaacugcggaugguuaccgggcuccgcaauauucccagcauccaguccagaggacuguuuggcgccauugcuggguucaucgaaggaggcuggaccgggaugguggauggaugguacggcuaucaccaccggaacgagcagggcagcggguacgccgcugaccaaaagucuacacagaaugccauuaacggaaucacgaauaaagucaacuccgugaucgaaaagaugaauacccaguuuacagccguuggcaaggaguucaacaaacuggagcgcagaauggaaaaucucaacaagcggguggaugacggguucauugauaucuggaccuacaacgcugagcugcuuguccugcucgaaaaugagcgcacacuggacuuucaugacagcaacgugaaaaaucuuuaugaaaaggucaaaucucagcugaagaacaaugcgaaggagauuggaaacggcugcuucgaguuuuaccacaaauguaaugaugaaugcauggaguccgugaagaacgggaccuaugacuaccccaaauauagcgaagaguccaagcucaauagagagaaaaucgauggcguuaagcuggaaucuaugggaguguaccaaauucuggccaucuauagcacggucgcuuccucucucgugcugcuuguuagccugggcgccaucuccuucuggaugugcagcaacgggucucuccagugucggauuugcaucuga

SEQ ID NO: 199811 - RNA, 1698 nt, Artificial Sequence
  derived and/or modified CDS sequence (opt5) from hemagglutinin__InfluenzaA__AEQ38195
augaaggugaaacugcucguccugcuuugcaccuucacagccacguacgcugacaccaucuguauuggcuaucacgccaacaauagcacagauaccguugacacagugcuggagaagaacgugaccgucacacauuccgugaaucuccuggaaaacucucacaaugggaaacuuugccugcucaagggaaucgcgccccugcagcugggcaacuguagcguugcuggguggauucucggaaauccugagugcgaacugcuuaucuccaaagagucuuggagcuacauuguggaaaagccgaaccccgagaauggcaccuguuauccugggcauuuugccgauuacgaggaacugagagagcaacucuccucugucagcuccuucgaacgguuugagaucuuccccaaggagagcucuuggccuaaccacacggugaccggagccuccgcuagcugcucucauaauggcgaaaacuccuuuuaucgcaaucugcuuuggcugacaggcaaaaacgggcucuaccccaaucugagcaagucuuaugccaacaacaaagagaaggaaguucuggugcucuggggaguccaccacccuccgaauaucgcuaaccagaaaacccuguaccauacagagaaugccuacguguccguggucagcucccacuauucuagaaaguucacccccgaaauugcgaagcggccuaaaguucgcgaccaggagggcagaaucaacuacuauuggacgcuucuggagcccggggauacaauuaucuuugaagccaauggaaaccucauugcuccucgguacgccuucgcucugagccgcggcuuuggguccggaaucauuaauagcaacgcccccauggacaagugugaugcgaaaugccagaccccgcaaggcgccaucaauucuucccuuccuuuccagaacgugcaucccgugacaaucggcgaguguccuaaguaugucagaagcgcuaaacugcggauggugaccgggcuccgcaauauucccucuauccagagcagaggacuguuuggcgccauugcuggguucaucgaaggaggcuggaccgggaugguugacggaugguacggcuaucaccaccagaacgagcaaggcuccggguacgccgccgaucagaagucuacacagaaugcuauuaacggaaucacgaauaaagugaacagcgucaucgaaaagaugaacacccaguuuacagcgaugggcaaggaguucaauaaacuggagcggcgcauggaaaaccucaauaagaaaguggacgauggguucauugacaucuggaccuacaacgccgagcugcuuguucugcucgaaaaugagagaacacuggauuuucaugacuccaacgugaagaaucuuuaugaaaaagucaagagccaacugaagaacaaugcuaaagagauuggaaacggcugcuucgaguuuuaccacaaguguaaugacgaaugcauggagucugugaaaaacgggaccuaugauuaccccaaguauuccgaagagagcaaacucaaucgggagaagaucgacggcgucaagcuggaaucuaugggaguguaccagauucuggccaucuauuccacgguugccagcucccucgugcugcuugucucucugggcgcuaucagcuucuggaugugcuccaacgggucucuccagugucgcauuugcaucuga

SEQ ID NO: 199812 - RNA, 1698 nt, Artificial Sequence
  derived and/or modified CDS sequence (opt5) from hemagglutinin__InfluenzaA__AEQ38196
augaaggugaaacugcucguccugcuuugcaccuucacagccacguacgcugacaccaucuguauuggcuaucacgccaacaauagcacagauaccguugacacagugcuggagaagaacgugaccgucacacauuccgugaaucuccuggaaaacucucacaaugggaaacuuugccugcucaagggaaucgcgccccugcagcugggcaacuguagcguugcuggguggauucucggaaauccugagugcgaacugcuuaucuccaaagagucuuggagcuacauuguggaaaagccgaaccccgagaauggcaccuguuauccugggcauuuugccgauuacgaggaacugagagagcaacucuccucugucagcuccuucgaacgguuugagaucuuccccaaggagagcucuuggccuaaccacacggugaccggagccuccgcuagcugcucucauaauggcgaaaacuccuuuuaucgcaaucugcuuuggcugacaggcaaaaacgggcucuaccccaaucugagcaagucuuaugccaacaacaaagagaaggaaguucuggugcucuggggaguccaccacccuccgaauaucgcugaccagaaaacccuguaccauacagagaacgccuacguguccguggucagcucccacuauucuagaaaguucacccccgaaauugcgaagcggccuaaaguucgcgaucaggagggcagaaucaauuacuauuggacgcuucuggagcccggggacacaauuaucuuugaagccaacggaaaucucauugcuccucgguacgccuucgcucugagccgcggcuuuggguccggaaucauuaacagcaaugcccccauggauaagugugacgcgaaaugccagaccccgcaaggcgccaucaacucuucccuuccuuuccagaaugugcaucccgugacaaucggcgaguguccuaaguaugucagaagcgcuaaacugcggauggugaccgggcuccgcaacauucccucuauccagagcagaggacuguuuggcgccauugcuggguucaucgaaggaggcuggaccgggaugguugauggaugguacggcuaucaccaccagaaugagcaaggcuccggguacgccgccgaccagaagucuacacagaacgcuauuaauggaaucacgaacaaagugaauagcgucaucgaaaagaugaacacccaguuuacagcggugggcaaggaguucaacaaacuggagcggcgcauggaaaaucucaacaagaaaguugaugacggguucauugauaucuggaccuacaaugccgagcugcuugugcugcucgaaaacgagagaacacuggacuuucaugacuccaaugucaagaaccuuuaugaaaaagucaagagccaacugaagaauaacgcuaaagagauuggaaauggcugcuucgaguuuuaccacaaguguaacgaugaaugcauggagucugugaaaaaugggaccuaugaauaccccaaguauuccgaggagagcaaacucaaccgggaaaagaucgacggcgugaagcuggagucuaugggaguuuaccagauucuggccaucuauuccacgguggccagcucccucguccugcuugugucucugggcgcuaucagcuucuggaugugcuccaaugggucucuccagugucgcauuugcaucuga

SEQ ID NO: 199813 - RNA, 1698 nt, Artificial Sequence; identical to SEQ ID NO: 199803
  derived and/or modified CDS sequence (opt5) from hemagglutinin__InfluenzaA__AEQ38197

SEQ ID NO: 199814 - RNA, 1698 nt, Artificial Sequence; identical to SEQ ID NO: 199803
  derived and/or modified CDS sequence (opt5) from hemagglutinin__InfluenzaA__AEQ38198

SEQ ID NO: 199815 - RNA, 1701 nt, Artificial Sequence; identical to SEQ ID NO: 199122
  derived and/or modified CDS sequence (opt5) from hemagglutinin__InfluenzaA__AEQ62909

SEQ ID NO: 199816 - RNA, 1701 nt, Artificial Sequence
  derived and/or modified CDS sequence (opt5) from hemagglutinin__InfluenzaA__AEQ62910
augaaggccauccugguggucaugcucuacaccuucgcuacagccaacgcggacacgcugugcauuggcuaucacgcuaauaacagcaccgauacaguugacaccgugcuugagaaaaaugugacagucacccauuccgugaaccugcucgaagauaagcacaaugggaaacuguguaaacuuagaggaguugcuccccugcaucucggcaagugcaacaucgccggguggauucugggaaauccugagugugaaucucugagcacagccuccucuuggagcuacaucguggagaccgccuccccggacaacggcacgugcuaucccggggauuuuauugacuacgaagaacuccgggagcagcugucuagcgucuccagcuucgaacgcuuugagaucuucccuaagaccucuuccuggcccaaucacgauagcaacaagggagugacagcugccuguccucaugcgggcgccaaaucuuuuuauaagaaucuuauguggcugguuaaaaagggcaacuccuaccccaaacucagcaagucuuauaucaaugacaaggggaaagaagugcugguccuuuggggcauucaccacccuccgaccuccgcugaucaacagagccuguaccagaacgccgacgcuuacguguucgugggaacauccagauauucuaagaaauuuaagcccgagaucgccauucggccuaaaguccgcgggcaggagggaagaaugaauuacuauuggacccucguugaacccggcgauaagaucacguucgaggcgacagggaaccugguggugccucgguacgccuuugcuauggaacgcaacgccggaagcggcauuaucauuuccgacacccccguccaugauugcaauacaaccugucaaagcccgaaaggcgcuaucaacaccucucugccuuuccagaauauccaccccauuacaaucggggagugcccuaaguaugugaaguccacgaaacucagacuggccaccggacuucggaacguucccagcgugcagucucgcggccuguuuggggccauugcuggauucaucgaaggcggguggacaggaauggucgacggcugguacggcuaucaucaccagaaugagcaagggagcggauacgcggccgaccucaaguccacccagaacgcuauugaugagaucacaaauaaagugaacucuguuaucgaaaagaugaauacccaguuuacggccgugggcaaagaguucaaccagcuggaaaagagaauugagaaucuuaacaagaaagucgacgauggguuccuggacaucuggacauacaaugccgaacuccuggugcugcucgagaacgagcggacccuggauuaucacgacagcaaugucaagaaccuuuacgaaaaagugcgcucccaacugaagaacaaugcuaaagagauuggaaacggcuguuuugaguucuaucauaagugcgauaauaccuguauggagagcguuaagaacgggacauacgacuaucccaaauacucugaagaggccaagcucaauagagaggaaaucgauggcgugaaacuggaguccacccggauuuaucagauccuugcgaucuacagcacagucgcuucuucccuggugcucguugugagccugggagccauuuccuuuuggaugugcucuaacggcagccugcagugccgcaucuguauuuga

SEQ ID NO: 199817 - RNA, 1701 nt, Artificial Sequence; identical to SEQ ID NO: 198939
  derived and/or modified CDS sequence (opt5) from hemagglutinin__InfluenzaA__AEQ62911

SEQ ID NO: 199818 - RNA, 1701 nt, Artificial Sequence; identical to SEQ ID NO: 199122
  derived and/or modified CDS sequence (opt5) from hemagglutinin__InfluenzaA__AEQ62912

SEQ ID NO: 199819 - RNA, 1701 nt, Artificial Sequence
  derived and/or modified CDS sequence (opt5) from hemagglutinin__InfluenzaA__AEQ62915
augaaggccauccuggugguccuccuguacaccuucgcuacagccaacgcggacacgcuuugcauuggcuaucacgcuaauaacagcaccgauacaguugacaccgugcuggagaaaaaugugacagucacccauuccgugaaccuccuggaagauaagcacaaugggaaacuuuguaagcugagaggaguugcuccccuccaucugggcaaaugcaacaucgccggguggauucugggaaauccugagugugaaucucucagcacagccuccucuuggagcuacaucguggagaccuccucuagcgacaacggcacgugcuauccgggggauuuuauuaauuacgaagaacugcgggagcagcuuuccagcgucucuuccuucgaacgcuuugagaucuuccccaagaccagcucuuggccuaaccacgacuccaauaagggagugacagccgcuuguccccaugccggcgcgaaaucuuuuuauaagaaccugaucuggcucguuaaaaagggcaauagcuacccuaaacuguccaagagcuauauuaacgauaaggggaaagaagugcuuguccuguggggaauccaccaccccuccaccacagccgaccaacagucucucuaccagaaugcugaugccuacguguucgugggcaccagcagauauuccaagaaauuuaagccugagauugcuauccggccgaaaguccgcgaccaggaggggagaaugaacuacuauuggacgcugguugaacccggagauaagauuacauucgaggccaccggcaaccugguggugccucgguacgcguuugccauggaacgcaaugcugggagcggaaucauuaucucugacacacccguccaugauugcaacaccaccugucaaacaccuaaaggcgccaucaauacgucccuccccuuccagaacauucacccgaucaccauuggcaagugcccuaaguaugugaaaagcacaaagcugagacuugcuaccgggcugcggaauguucccucuauccagagccgcggacucuuuggcgccauugccggguucaucgagggaggcuggacagggaugguggacggaugguacggcuaucaucaccagaacgaacaaggcuccggguacgcugcggaccugaaaucuacccagaaugccaucgauaagauuacgaacaaagucaauagcgugaucgagaagaugaacacacaguuuaccgcuguuggaaaggaguucaaucaccuugagaaaagaauugagaaccugaauaagaaaguggacgauggcuuccucgacaucuggaccuacaacgccgaacugcugguccuccuggagaaugaacggacacuugauuaucaugacuccaacgugaagaaccuguacgagaaaguccgcaaucagcucaagaccaacgccaaggagauugggaauggauguuuugaguucuaucacaaaugcgauaacacauguauggaaagcgugaagaauggcacguacgacuauccuaaauacucugaagaggcuaagcugaacagagaagagaucgaugggguuaaacuugaguccacccggaucuaucaaauucuggccaucuacagcacaguggcgucuucccucguccuggugguuagccugggcgcuauuuccuuuuggaugugcucuaauggaagccuccagugccgcaucuguauuuga

SEQ ID NO: 199820 - RNA, 1701 nt, Artificial Sequence; identical to SEQ ID NO: 195483
  derived and/or modified CDS sequence (opt5) from hemagglutinin__InfluenzaA__AER08646

SEQ ID NO: 199821 - RNA, 1701 nt, Artificial Sequence; identical to SEQ ID NO: 197491
  derived and/or modified CDS sequence (opt5) from hemagglutinin__InfluenzaA__AER08648

SEQ ID NO: 199822 - RNA, 1701 nt, Artificial Sequence
  derived and/or modified CDS sequence (opt5) from hemagglutinin__InfluenzaA__AER08652
augaagaccaucauugcccugagcuacauccucugccugguguucgcucagaaacuucccggcaacgacaauuccacagccacgcugugucucgggcaccaugcggucccuaacggaaccauuguuaagacaaucaccaaugaucaaauugaggugacaaacgcuaccgaacuggugcagucuagcuccacaggcgagaucugcgacucuccgcaccagauccuugaugggaaaaauuguacccugauugacgcccuccugggagauccccagugcgacggcuuucaaaacaagaaaugggaucuguucgucgaaagaagcaaggccuauuccaauuguuacccuuaugacgugcccgauuacgcuucucuccggagccugguugccuccagcgggacgcuugaguuuaacaaugaaucuuucaacuggaccggagugacacagaauggcaccuccagcgcuugcauccgcagaucuaagaacuccuuuuucagccggcugaauuggcucacacaucugaacuuuaaauauccugcccuuaaugucaccaugcccaacaacgagcaguucgacaagcuguacauuuggggcgugcaccauccugggacggauaaagaccagaucuuucucuaugcgcaagccucuggacgcauuacaguuuccaccaagagaagccagcagacagcuaucccgaauauuggcucccggccccgcgugagaaacaucccuucucggaucagcauuuacuggaccaucgucaaacccggggauauucugcugaucaauuccaccggaaaccucauugccccucgcggcuacuucaagaucagaagcgggaagucuuccaucaugcggagcgacgcucccauuggaaaauguaauucugagugcaucacaccgaacggcagcauuccuuccgacaagcccuuucagaaugugaaccgcaucacguauggcgccuguccuagauacgugaaacaaaauacccugaaacuugcgacagggaugcggaacguccccgaaaaacagacccgcggaauuuucggcgccaucgcuggguuuaucgagaauggaugggaaggcaugguugaugggugguauggauucagacaccagaacucugagggccggggccaagccgcugaccucaagagcacacaggccgccauugaucagaucaaugggaaacugaacagacugauuggaaagaccaaugagaaguuccaccagaucgaaaaagaguuuuccgaaguggagggccgcauucaagaccuugaaaaguacguggaggauacgaaaaucgaccuguggagcuauaacgcugagcuccuggucgcgcuggaaaaccagcauacaauugaucucaccgacucugagaugaauaagcuguucgaaaagaccaagaagcagcuucgggagaacgccgaagauauggggaauggaugcuuuaaaaucuaccacaagugugacaacgcuugcaucggcuccauuagaaaugggacauaugaucaugacguguaccgcgacgaggcccugaacaaucgguuccagaucaaaggcguugagcucaagagcggauacaaagauuggauucuguggaucucuuuugccauuuccugcuuccuucuguguguggcucuccugggcuuuaucaugugggccugccaaaaggggaacaucagauguaauauuugcaucuga

SEQ ID NO: 199823 - RNA, 1701 nt, Artificial Sequence; identical to SEQ ID NO: 199822
  derived and/or modified CDS sequence (opt5) from hemagglutinin__InfluenzaA__AER08654

SEQ ID NO: 199824 - RNA, 1701 nt, Artificial Sequence
  derived and/or modified CDS sequence (opt5) from hemagglutinin__InfluenzaA__AER08656
augaagaccaucauugcccugagcuacauccucugccugguguucgcucagaaacuucccggcaacgacaauuccacagccacgcugugucucgggcaccaugcggucccuaacggaaccauuguuaagacaaucaccaaugaucaaauugaggugacaaacgcuaccgaacuggugcagucuagcuccacaggcgagaucugcgacucuccgcaccagauccuugaugggaaaaauuguacccugauugacgcccuccugggagauccccagugcgacggcuuucaaaacaagaaaugggaucuguucgucgaaagaagcaaggccuauuccaauuguuacccuuaugacgugcccgauuacgcuucucuccggagccugguugccuccagcgggacgcuugaguuuaacaaugaaucuuucaacuggaccggagugacacagaauggcaccuccagcgcuugcauccgcagaucuaagaacuccuuuuucagccggcugaauuggcucacacaucugaacuuuaaauauccugcccuuaaugucaccaugcccaacaacgagcaguucgacaagcuguacauuuggggcgugcaccauccugggacggauaaagaccagaucuuucucuaugcgcaagccucuggacgcauuacaguuuccaccaagagaagccagcagacagugaucccgaauauuggcucccggccccgcgucagaaacaucccuucucggaucagcauuuacuggaccaucgugaaacccggggauauucugcugaucaauuccaccggaaaccucauugcuccucgcggcuacuucaagaugcagagcgggaagucuuccaucaugagaagcgacgcccccaucggaaaauguaauucugagugcauuacaccgaacggcagcaucccuaaugacaagcccuuucaaaacgugaaucggauuacguauggcgcuuguccucgcuacgucaaacagaacacccugaaacuugccacagggaugagaaauguucccgaaaaacagacccggggaaucuucggcgcgauugccggguuuaucgagaacggaugggaaggcaugguggaugggugguauggauuccgccaccaaaauuccgagggcagaggccaggcugccgaccugaagucuacacaggcugccaucgaucagauuaacgggaaacucaaucggcugaucggaaagaccaacgagaaguuccaccaaauugaaaaagaguuuagcgaaguggagggcagaauccaggaccuugaaaaguacgucgaggauacgaaaauugaccugugguccuauaacgccgagcuccugguggcucuggaaaaucagcauacaaucgaucucaccgacagcgagaugaacaagcuguucgaaaagaccaagaagcagcuucgcgagaaugcggaagauauggggaacggaugcuuuaaaauuuaccacaagugugacaaugccugcaucggcucuauccggaacgggacauaugaucaugacguuuacagagacgaggcucugaauaaccgcuuccaaauuaaaggcguggagcucaaguccggauacaaagauuggauccuguggauuagcuuugccaucucuugcuuccuucugugugucgcccuccugggcuuuauuaugugggcuugccagaaggggaauauccgguguaacaucugcauuuga

SEQ ID NO: 199825 - RNA, 1701 nt, Artificial Sequence
  derived and/or modified CDS sequence (opt5) from hemagglutinin__InfluenzaA__AER08660
augaagaccaucauugcccugagcuacauccucugccugguguucgcucagaaacuucccggcaacgacaauuccacagccacgcugugucucgggcaccaugcggucccuaacggaaccauuguuaagacaaucaccaaugaucaaauugaggugacaaacgcuaccgaacuggugcagucuagcuccacaggcgagaucugcaauucuccgcaccagauccuugacggggaaaacuguacccugauugaugcccuccugggagacccccagugcgauggcuuucaaaauaaaaagugggaccuguucgucgagagaagcaaagccuauuccaacuguuacccuuaugaugugcccgacuacgcuucucuccggagccugguugccuccagcgggacgcuugaauuuaauaacgagucuuucaauuggaccggagugacacagaacggcaccuccagcgcuugcauccgcagaucuaauaacuccuuuuucagccggcugaauuggcucacacaucugaacuuuaaguauccugcccuuaacgucaccaugcccaauaacgagcaguucgauaagcuguacauuuggggcgugcaccauccugggacggacaaagaucagaucuuucucuaugcgcaagccucuggacgcauuacaguuuccaccaagagaagccagcaggcugugaucccgaauauuggcucccggccccgcgucagaaacaucccuucucggaucagcauuuacuggacaaucgugaaacccggggacauucugcugaucaauuccaccggaaaccucauugccccucgcggcuacuucaagaucagaagcgggaaaucuuccaucaugcggagcgaugcucccauuggaaaguguaauucugccugcaucaccccgaacggcagcauuccuaaugacaagcccuuucagaacgugaaucgcaucacauauggcgcguguccuagauacgucaaacaaaacacgcugaaacuugccaccgggaugcggaauguucccgaaaaacagacacgcggaauuuucggcgcuaucgccggguuuaucgagaacggaugggaaggcaugguggacgggugguauggauucagacaccaaaauuccgagggccggggccaggcugccgaucugaagucuacccaggccgcuauugaccagaucaacgggaaacucaacagacugauuggaaagacaaaugagaaauuccaccagaucgaaaaggaguuuagcgaaguggagggccgcauucaagaucuugaaaaguacgucgaggacaccaaaaucgaucugugguccuauaacgcggagcuccugguggcccuggaaaaucagcauacgauugaccucacagauagcgagaugaacaagcuguucgaaaagaccaagaaacagcuucgggagaaugcugaagacauggggaacggaugcuuuaagaucuaccacaagugugauaaugccugcaucggcucuauuagaaacgggaccuaugaccaugauguuuaccgcgacgaggcccugaauaaccgguuccagaucaaaggcguggagcucaaguccggauacaaagacuggauucuguggaucagcuuugcuauuucuugcuuccuucugugugucgcccuccugggcuuuaucaugugggcgugccaaaaggggaauaucagauguaacauuugcaucuga

SEQ ID NO: 199826 - RNA, 1701 nt, Artificial Sequence
  derived and/or modified CDS sequence (opt5) from hemagglutinin__InfluenzaA__AER08664
augaagaccaucauugcccugagcuacauccucugccugguguucgcucagaaacuucccggcaacgacaauuccacagccacgcugugucucgggcaccaugcggucccuaacggaaccauuguuaagacaaucaccaaugaucaaauugaggugacaaacgcuaccgaacuggugcagucuagcuccacaggcgagaucugcgacucuccgcaccagauccuugauggggaaaauuguacccugauugacgcccuccugggagauccccagugcgacggcuuucaaaacaaaaagugggaucuguucgucgagagaagcaaagccuauuccaauuguuacccuuaugacgugcccgauuacgcuucucuccggagccugguugccuccagcgggacgcuugaauuuaacucugaguccuucaauuggaccggagugacacagaacggcaccagcucugcuugcauccgcagauccaauaacagcuuuuucucucggcugaauuggcucacacaucugaacuuuaaguauccugcccuuaaugucaccaugcccaacaacgagcaguucgacaagcuguacauuuggggcgugcaccauccugggacggauaaagaccagaucuuucucuaugcgcaagccuccggacgcauuacaguuagcaccaagagaucccagcaggcugugaucccgaauauuggcucucggccccgcgucagaaacaucccuagccggaucuccauuuacuggacaaucgugaaacccggggauauucugcugaucaauagcaccggaaaccucauugccccucgcggcuacuucaagaucagaucugggaaauccagcaucaugcggucugacgcucccauuggaaaguguaauagcgaaugcaucaccccgaacggcuccauuccuaaugacaagcccuuucagaacgugaaucgcaucacauauggcgccuguccuagauacgucaaacaaucuacgcugaaacuugcgaccgggaugcggaacguucccgagaagcagacacgcggaauuuucggcgccaucgcuggguuuaucgaaaauggaugggagggcaugguggaugggugguauggauucagacaccagaacagcgagggccggggccaagccgcugaccugaaguccacccaggccgccauugaucagaucaaugggaaacucaacagacugauuggaaagacaaaugaaaaauuccaccagaucgagaaggaauuuagcgagguggaaggccgcauucaagaccuugagaaguacgucgaggauaccaaaaucgaccuguggucuuauaacgcugaacuccugguggcgcuggagaaccagcauacgauugaucucacagacuccgaaaugaauaagcuguucgagaaaaccaagaaacagcuucgggaaaacgccgaggauauggggaauggaugcuuuaagaucuaccacaagugugacaacgcuugcaucggcagcauuagaaaugggaccuaugaucaugacguuuaccgcgacgaggcccugaacaaucgguuccagaucaaaggcguggaacucaagucuggauacaaagauuggauucuguggaucuccuuugccauuagcugcuuccuucugugugucgcucuccugggcuuuaucaugugggccugccaaaaggggaacaucagauguaauauuugcaucuga

SEQ ID NO: 199827 - RNA, 1701 nt, Artificial Sequence; identical to SEQ ID NO: 199054
  derived and/or modified CDS sequence (opt5) from hemagglutinin__InfluenzaA__AER08668

SEQ ID NO: 199828 - RNA, 1701 nt, Artificial Sequence
  derived and/or modified CDS sequence (opt5) from hemagglutinin__InfluenzaA__AER08670
augaagaccaucauugcccugagcuacauccucugccugguguucgcucagaaacuucccggcaacgacaauuccacagccacgcugugucucgggcaccaugcggucccuaacggaaccauuguuaagacaaucaccaaugaucaaauugaggugacaaacgcuaccgaacuggugcagucuagcuccacaggcgagaucugcaauucuccgcaccagauccuugacggggaaaacuguacccugauugaugcccuccugggagacccccagugcgauggcuuucaaaauaaaaagugggaccuguucgucgagagaagcaaagcccauuccaacuguuauccuuacgaugugcccgacuaugcuucucuccggagccugguugccuccagcgggacgcuugaauuuaauaacgagucuuucaauuggaccggagugacacagaacggcaccuccagcgcuugcauccgcagaucuaauaacuccuuuuucagccggcugaauuggcucacacaccugaacuuuaaguacccugcccuuaacgucaccaugcccaauaacgagcaguucgauaagcuguauauuuggggcgugcaucacccugggacggacaaagaucagaucuuucucuacgcgcaagccucuggacgcauuacaguuuccaccaagagaagccagcaggcugugaucccgaauauuggcucccggccccgcgucagaaacaucccuucucgggugagcaucuauuggacaauugugaaacccggggacauccugcugauuaauuccaccggaaaccucaucgccccucgcggcuacuucaagauuagaagcgggaaaucuuccaucaugaaguccgaugcucccaucggaaaguguaauucugccugcauuaccccgaacggcagcaucccuaaugacaaacccuuucagaacgucaaucggauuacauacggcgcguguccucgcuauguuaagcaaaacacgcugaaacuugccaccgggaugagaaaugugcccgaaaagcagacacggggaaucuucggcgcuauugccggguuuaucgagaacggaugggaaggcaugguggacgggugguacggauuccgccaccagaauagcgagggcagaggccaagcugccgaucugaaaucuacccaggccgcuaucgaccagauuaacgggaagcucaaccggcugaucggaaaaacaaaugagaaguuccaucagauugaaaaggaguuuagcgaagucgagggcagaauccaagaucuugaaaaauauguggaggacaccaagauugaucugugguccuacaacgcggagcuccugguugcccuggaaaaucagcacacgaucgaccucacagauagcgagaugaacaaacuguucgaaaagaccaaaaagcagcuucgcgagaaugcugaagacauggggaacggaugcuuuaagauuuaucauaaaugugauaaugccugcaucggcucuauccggaacgggaccuacgaccacgauguguauagagacgaggcccugaauaaccgcuuccagauuaagggcgucgagcucaaauccggauacaaggacuggauccuguggauuagcuuugcuaucucuugcuuccuucuguguguggcccuccugggcuuuauuaugugggcgugccaaaaagggaauauccgguguaacaucugcauuuga

SEQ ID NO: 199829 - RNA, 1701 nt, Artificial Sequence
  derived and/or modified CDS sequence (opt5) from hemagglutinin__InfluenzaA__AER08672
augaagaccaucauugcccugagcuacauccucugccugguguucgcucagaaacuucccggcaacgacaauuccacagccacgcugugucucgggcaccaugcggucccuaacggaaccauuguuaagacaaucaccaaugaucaaauugaggugacaaacgcuaccgaacuggugcagucuagcuccacaggcgggaucugcgacucuccgcaccagauccuugauggaggcaauuguacccugauugacgcccuccugggggauccccagugcgacggauuucaaaacaaaaagugggaucuguucgucgagagaagcaaagccuauuccaauuguuacccuuaugacgugcccgauuacgcuucucuccggagccugguugccuccagcggcacgcuugaauuuaacucugaguccuucaauuggaccggcgugacacagaacgggaccagcucugcuugcauccgcagauccaauaacagcuuuuucucucggcugaauuggcucacacaucugaacuuuaaguauccugcccuuaaugucaccaugcccaacaacgaacaguucgacaagcuguacauuuggggagugcaccauccuggcacggauaaagaccagaucuuucucuaugcgcaagccuccgggcgcauuacaguuagcaccaagagaucccagcaggcugugaucccgaauauuggaucucggccccgcgucagaaacaucccuagccggaucuccauuuacuggacaaucgugaaacccggcgauauucugcugaucaauagcaccgggaaccucauugccccucgcggauacuucaagaucagaucuggcaaauccagcaucaugcggucugacgcucccauuggcaaguguaauagcgagugcaucaccccgaacggguccauuccuaaugacaagcccuuucagaacgugaaucgcaucacauauggagccuguccuagauacgucaaacaaucuacgcugaaacuugcgaccggcaugcggaacguucccgagaagcagacacgcgggauuuucggagccaucgcuggcuuuaucgaaaaugggugggagggaaugguggauggcugguauggcuucagacaccagaacagcgaagggcggggacaagccgcugaccugaaguccacccaggccgccauugaucagaucaauggcaaacucaacagacugauugggaagacaaaugagaaauuccaccagaucgagaaggaauuuagcgagguggaaggacgcauucaagaccuugagaaguacgucgaagauaccaaaaucgaccuguggucuuauaacgcugagcuccugguggcgcuggagaaccagcauacgauugaucucacagacuccgaaaugaauaagcuguucgagaaaaccaagaaacagcuucgggaaaacgccgaggauaugggcaaugggugcuuuaagaucuaccacaagugugacaacgcuugcaucggcagcauuagaaauggaaccuaugaucaugacguuuaccgcgacgaagcccugaacaaucgguuccagaucaaaggcguggagcucaagucuggguacaaagauuggauucuguggaucuccuuugccauuagcugcuuccuucugugugucgcucuccugggauuuaucaugugggccugccaaaagggcaacaucagauguaauauuugcaucuga

SEQ ID NO: 199830 - RNA, 1701 nt, Artificial Sequence
  derived and/or modified CDS sequence (opt5) from hemagglutinin__InfluenzaA__AER08674
augaagaccaucauugcccugagcuacauccucugccugguguucgcucagaaacuucccggcaacgacaauuccacagccacgcugugucucgggcaccaugcggucccuaacggaaccaugguuaagacaauuaccaaugaucaaaucgaggugacaaacgcuaccgaacuggugcagucuagcuccacaggcgagauuugcaauucuccgcaccagauccuugacggggaaaacuguacccugaucgaugcccuccugggagacccccagugcgauggcuuucaaaauaaaaagugggaccuguucgucgagagaagcaaagcccauuccaacuguuauccuuacgaugugcccgacuaugcuucucuccggagccugguugccuccagcgggacgcuugaauuuaauaacgagucuuucaauuggaccggagugacacagaacggcaccuccagcgcuugcauucgcagaucuaauaacuccuuuuucagccggcugaauuggcucacacaccugaacuuuaaguacccugcccuuaacgucaccaugcccaauaacgagcaguucgauaagcuguauaucuggggcgugcaucacccugggacggacaaagaucagauuuuucucuacgcgcaagccucuggacgcaucacaguuuccaccaagagaagccagcaggcugugauuccgaauaucggcucccggccccgcgucagaaacauuccuucucgggugagcaucuauuggacaaucgugaaacccggggacauucugcugaucaauuccaccggaaaccucauugccccucgcggcuacuucaagaucagaagcgggaaaucuuccauuaugcggagcgaugcucccaucggaaaguguaauucugccugcaucaccccgaacggcagcauuccuaaugacaagcccuuucagaacgucaaucgcaucacauacggcgcguguccuagauauguuaaacaaaacacgcugaaacuugccaccgggaugcggaaugugcccgaaaaacagacacgcggaauuuucggcgcuaucgccggguuuauugagaacggaugggaaggcaugguggacgggugguacggauucagacaccaaaauuccgagggccggggccaggcugccgaucugaagucuacccaggccgcuaucgaccagaucaacgggaaacucaacagacugauuggaaagacaaaugagaaauuccaucagaucgaaaaggaguuuagcgaagucgagggccgcauucaagaucuugaaaaguauguggaggacaccaaaaucgaucugugguccuacaacgcggagcuccugguugcccuggaaaaucagcacacgauugaccucacagauagcgagaugaacaagcuguucgaaaagaccaagaaacagcuucgggagaaugcugaagacauggggaacggaugcuuuaagaucuaucauaagugugauaaugccugcauuggcucuaucagaaacgggaccuacgaccacgauguguaucgcgacgaggcccugaauaaccgguuccagaucaaaggcgucgagcucaaguccggauacaaagacuggauucuguggaucagcuuugcuauuucuugcuuccuucuguguguggcccuccugggcuuuaucaugugggcgugccaaaaggggaauauuagauguaacaucugcaucuga

SEQ ID NO: 199831 - RNA, 1701 nt, Artificial Sequence; identical to SEQ ID NO: 199054
  derived and/or modified CDS sequence (opt5) from hemagglutinin__InfluenzaA__AER08676

SEQ ID NO: 199832 - RNA, 1701 nt, Artificial Sequence; identical to SEQ ID NO: 199054
  derived and/or modified CDS sequence (opt5) from hemagglutinin__InfluenzaA__AER08678

SEQ ID NO: 199833 - RNA, 1701 nt, Artificial Sequence
  derived and/or modified CDS sequence (opt5) from hemagglutinin__InfluenzaA__AER08680
augaagaccaucauugcccugagcuacauccucugccugguguucgcucagaaacuucccggcaacgacaauuccacagccacgcugugucucgggcaccaugcggucccuaacggaaccauuguuaagacaaucaccaaugaucaaauugaggugacaaacgcuaccgaacuggugcagucuagcuccgccggcgagaucugcgacucuccgcaccagauccuugauggggaaaauuguacacugauugacgcccuccugggagauccccagugcgacggcuuucaaaacaaaaagugggaucuguucgucgagagaagccgggcucauuccaauuguuauccuuacgacgugcccgauuaugccucucuccgcagccugguugcuuccagcgggacccuugaauuuaacaaugagucuuucaacuggacgggagugacccagaauggcacauccagcgccugcaucagacggucuaacaauuccuuuuucagccgccugaacuggcucacccaccugaauuuuaaauacccugcgcuuaacgucacaaugcccaacaaugagcaguucgacaagcuguauauuuggggcgugcaucacccugggaccgauaaggaccagaucuuucucuacgcccaggcuucuggaagaauuacgguuuccacaaaacggagccagcaggccgugaucccgaacauuggcucccgccccagaguccggaauaucccuucucgcaucagcauuuauuggaccaucgugaagcccggggauauucugcugaucaacuccacaggaaaucucauugcuccuagaggcuacuucaaaauccggagcgggaagucuuccaucaugcgcagcgacgcccccauuggaaaauguaacucugaaugcaucaccccgaauggcagcauuccuaacgacaagcccuuucagaaugugaacagaaucaccuacggcgcguguccucgguaugucaagcaauccacacugaaacuugccacggggaugcgcaauguucccgagaagcagaccagaggaauuuucggcgcuaucgccggguuuaucgaaaacggaugggagggcaugauggaugggugguacggauuccggcaccaaaauucugagggcagaggccaagcugccgaccugaaaagcacacaggccgcuauugaucagaucaacgggaagcucaaucgccugauuggaaaaaccaacgaaaaguuccaucagaucgagaaagaauuuuccgagguggaaggccggauucaagaccuugagaaguauguggaggauacaaagaucgaccuguggagcuacaacgcggaacuccuggucgcccuggagaaucagcacaccauugaucucacggacucugaaaugaacaaacuguucgagaagaccaaaaagcagcuuagagaaaaugcugaggauauggggaacggaugcuuuaaaaucuaucauaagugugacaaugccugcaucggcuccauucgcaacgggacauacgaucacgacguguaucgggacgaggcccugaauaacagauuccagaucaagggcguugaacucaaaagcggauacaaggauuggauucuguggaucucuuuugcuauuuccugcuuccuucuguguguggcccuccugggcuuuaucaugugggcgugccaaaaagggaauauccgcuguaacauuugcaucuga

SEQ ID NO: 199834 - RNA, 1701 nt, Artificial Sequence
  derived and/or modified CDS sequence (opt5) from hemagglutinin__InfluenzaA__AER08682
augaagaccgugaucgcccugagcuacauucucugccuggucuucgcucagaaacuucccggcaacgacaauuccacagccacgcugugucucgggcaccaugcgguuccuaacggaaccaucgugaagacaauuaccaaugaucaaaucgaggugacaaacgcuaccgaacugguccagucuagcuccacaggcgagauuugcaauucuccgcaccagauccuugacggggaaaacuguacccugaucgaugcccuccugggagacccccagugcgauggcuuucaaaauaaaaagugggaccuguucguggagagaagcaaagcccauuccaacuguuauccuuacgauguucccgacuaugcuucucuccggagccugguggccuccagcgggacgcuugaauuuaauaacgagucuuucaauuggaccggagucacacagaacggcaccuccagcgcuugcauucgcagaucuaauaacuccuuuuucagccggcugaauuggcucacacaccugaacuuuaaguacccugcccuuaacgugaccaugcccaauaacgagcaguucgauaagcuguauaucuggggcguucaucacccugggacggacaaagaucagauuuuucucuacgcgcaagccucuggacgcaucacaguguccaccaagagaagccagcaggcugucauuccgaauaucggcucccggccccgcgugagaaacauuccuucucgggugagcaucuauuggacaaucgucaaacccggggacauucugcugaucaauuccaccggaaaccucauugccccucgcggcuacuucaagaucagaagcgggaaaucuuccauuaugcggagcgaugcucccaucggaaaguguaauucugccugcaucaccccgaacggcagcauuccuaaugacaagcccuuucagaacguuaaucgcaucacauacggcgcguguccuagauaugugaaacaaaacacgcugaaacuugccaccgggaugcggaaugugcccgaaaaacagacacgcggaauuuucggcgcuaucgccggguuuauugagaacggaugggaaggcauggucgacgggugguacggauucagacaccaaaauuccgagggccggggccaggcugccgaucugaagucuacccaggccgcuaucgaccagaucaacgggaaacucaacagacugauuggaaagacaaaugagaaauuccaucagaucgaaaaggaguuuagcgaaguggagggccgcauucaagaucuugaaaaguauguugaggacaccaaaaucgaucugugguccuacaacgcggagcuccugguggcccuggaaaaucagcacacgauugaccucacagauagcgagaugaacaagcuguucgaaaagaccaagaaacagcuucgggagaaugcugaagacauggggaacggaugcuuuaagaucuaucauaagugugauaaugccugcauuggcucuaucagaaacgggaccuacgaccacgaugucuaucgcgacgaggcccugaauaaccgguuccagaucaaaggcguggagcucaaguccggauacaaagacuggauucuguggaucagcuuugcuauuucuugcuuccuucuguguguugcccuccugggcuuuaucaugugggcgugccaaaaggggaauauuagauguaacaucugcaucuga

SEQ ID NO: 199835 - RNA, 1701 nt, Artificial Sequence
  derived and/or modified CDS sequence (opt5) from hemagglutinin__InfluenzaA__AER08684
augaagaccaucauugcccugagcuacauccucugccugguguucgcucagaaacuucccggcaacgacaauuccacagccacgcugugucucgggcaccaugcggucccuaacggaaccauuguuaagacaaucaccaaugaucaaauugaggugacaaacgcuaccgaacuggugcagucuagcuccacaggcgagaucugcaauucuccgcaccagauccuugacggggaaaacuguacccugauugaugcccuccugggagacccccagugcgauggcuuucaaaauaaaaagugggaccuguucgucgagagaagcaaagcccauuccaacuguuauccuuacgaugugcccgacuaugcuucucuccggagccugguugccuccagcgggacgcuugaauuuaauaacgagucuuucaauuggaccggagugacacagaacggcaccuccagcgcuugcauccgcagaucuaauaacuccuuuuucagccggcugaauuggcucacacaccugaacuuuaaguacccugcccuuaacgucaccaugcccaauaacgagcaguucgauaagcuguauauuuggggcgugcaucacccugggacggacaaagaucagaucuuucucuacgcgcaagccucuggacgcauuacaguuuccaccaagagaagccagcaggcugugaucccgaauauuggcucccggccccgcgucagaaacaucccuucucgggugagcaucuauuggacaauugugaaacccggggacauccugcugauuaauuccaccggaaaccucaucgccccucgcggcuacuucaagauuagaagcgggaaaucuuccaucaugcggagcgaugcucccaucggaaaguguaauucuaccugcauuacaccgaacggcagcaucccuaaugacaagcccuuucagaacgucaaucgcauuacguacggcgccuguccuagauauguuaaacaaaacacccugaaacuugcgacagggaugcggaaugugcccgaaaaacagacccgcggaaucuucggcgccauugcuggguuuaucgagaacggaugggaaggcaugguggacgggugguacggauucagacaccaaaauuccgagggccggggccaggccgcugaucugaagucuacacaggccgccaucgaccagauuaacgggaaacucaacagacugaucggaaagaccaaugagaaauuccaucagauugaaaaggaguuuagcgaagucgagggccgcauccaagaucuugaaaaguauguggaggacacgaaaauugaucugugguccuacaacgcugagcuccugguugcgcuggaaaaucagcacacaaucgaccucaccgauagcgagaugaacaagcuguucgaaaagaccaagaaacagcuucgggagaaugccgaagacauggggaacggaugcuuuaagauuuaucauaagugugauaaugcuugcaucggcucuaucagaaacgggacauacgaccacgauguguaucgcgacgaggcccugaauaaccgguuccagauuaaaggcgucgagcucaaguccggauacaaagacuggauccuguggauuagcuuugccaucucuugcuuccuucuguguguggcucuccugggcuuuauuaugugggccugccaaaaggggaauaucagauguaacaucugcauuuga

SEQ ID NO: 199836 - RNA, 1701 nt, Artificial Sequence
  derived and/or modified CDS sequence (opt5) from hemagglutinin__InfluenzaA__AER08686
augaagaccaucauugcccugagcuacauccucugccugguguucgcucagaaacuucccggcaacgacaauuccacagccacgcugugucucgggcaccaugcggucccuaacggaaccauuguuaagacaaucaccaaugaucaaauugaggugacaaacgcuaccgaacuggugcagucuagcuccacaggcgagaucugcaauucuccgcaccagauccuugacggggaaaacuguacccugauugaugcccuccugggagacccccagugcgauggcuuucaaaauaaaaagugggaccuguucgucgagagaagcaaagcccauuccaacuguuauccuuacgaugugcccgacuaugcuucucuccggagccugguugccuccagcgggacgcuugaauuuaauaacgagucuuucaauuggaccggagugacacagaacggcaccuccagcgcuugcauccgcagaucuaauaacuccuuuuucagccggcugaauuggcucacacaccugaacuuuaaguacccugcccuuaacgucaccaugcccaauaacgagcaguucgauaagcuguauauuuggggcgugcaucacccugggacggacaaagaucagaucuuucucuacgcgcaagccucuggacgcauuacaguuuccaccaagagaagccagcaggcugugaucccgaauauuggcucccggccccgcgucagaaacaucccuucucgggugagcaucuauuggacaauugugaaacccggggacauccugcugauuaauuccaccggaaaccucaucgccccucgcggcuacuucaagauuagaagcgggaaaucuuccaucaugcggagcgaugcucccaucggaaaguguaauucuaccugcauuacaccgaacggcagcaucccuaaugacaagcccuuucagaacgucaaucgcauuacguacggcgccuguccuagauauguuaaacaaaacacccugaaacuugcgacagggaugcggaaugugcccgaaaaacagacccgcggaaucuucggcgccauugcuggguuuaucgagaacggaugggaaggcaugguggacgggugguacggauucagacaccaaaauuccgagggccggggccaggccgcugaucugaagucuacacaggccgccaucgaccagauuaacgggaaacucaacagacugaucggaaagaccaaugagaaauuccaucagauugaaaaggaguuuagcgaagucgagggccgcauccaagaucuugaaaaguauauugaggacacgaaaaucgaucugugguccuacaacgcugagcuccugguggcgcuggaaaaucagcacacaauugaccucaccgauagcgagaugaacaagcuguucgaaaagaccaagaaacagcuucgggagaaugccgaagacauggggaacggaugcuuuaagaucuaucauaagugugauaaugcuugcaucggcucuauuagaaacgggacauacgaccacgauguuuaucgcgacgaggcccugaauaaccgguuccagaucaaaggcguggagcucaaguccggauacaaagacuggauucuguggaucagcuuugccauuucuugcuuccuucugugugucgcucuccugggcuuuaucaugugggccugccaaaaggggaauaucagauguaacauuugcaucuga

SEQ ID NO: 199837 - RNA, 1701 nt, Artificial Sequence; identical to SEQ ID NO: 199054
  derived and/or modified CDS sequence (opt5) from hemagglutinin__InfluenzaA__AER08688

SEQ ID NO: 199838 - RNA, 1701 nt, Artificial Sequence
  derived and/or modified CDS sequence (opt5) from hemagglutinin__InfluenzaA__AER08690
augaagaccaucauugcccugagcuacauccucugccugguguucgcucagaaacuucccgagaacgacaauuccacagccacgcugugucucggccaccaugcggucccuaacgggaccauuguuaagacaaucaccaaugaucaaauugaagugacaaacgcuaccgagcuggugcagucuagcuccacaggagaaaucugcaauucuccgcaccagauccuugacggcgagaacuguacccugauugaugcccuccugggggacccccagugcgauggauuucaaaauaaaaagugggaccuguucgucgaaagaagcaaagcccauuccaacuguuauccuuacgaugugcccgacuaugcuucucuccggagccugguugccuccagcggcacgcuugaguuuaauaacgagucuuucaauuggaccggggugacacagaacggaaccuccagcgcuugcauccgcagaucuaauaacuccuuuuucagccggcugaauuggcucacacaccugaacuuuaaguacccugcccuuaacgucaccaugcccaauaacgaacaguucgauaagcuguauauuuggggcgugcaucacccuggcacggacaaagaucagaucuuucucuacgcgcaagccucugggcgcauuacaguuuccaccaagagaagccagcaggcugugaucccgaauauuggaucccggccccgcgucagaaacaucccuucucgggugagcaucuauuggacaauugugaaacccggcgacauccugcugauuaauuccaccgggaaccucaucgccccucgcggauacuucaagauuagaagcggcaaaucuuccaucaugcggagcgaugcucccaucgggaaguguaauucuaccugcauuacaccgaacggaagcaucccuaaugacaagcccuuucagaacgucaaucgcauuacguacggcgccuguccuagauauguuaaacaaaacacccugaaacuugcgacaggcaugcggaaugugcccgagaagcagacccgcgggaucuucggagccauugcuggcuuuaucgaaaacgggugggagggaaugguggacggcugguacggguucagacaccaaaauuccgagggacggggccaggccgcugaucugaagucuacacaggccgccaucgaccagauuaacggcaaacucaacagacugaucgggaagaccaaugaaaaauuccaucagauugagaaggaauuuagcgaggucgaaggacgcauccaagaucuugagaaguauguggaggacacgaaaauugaucugugguccuacaacgcugaacuccugguugcgcuggagaaucagcacacaaucgaccucaccgauagcgaaaugaacaagcuguucgagaaaaccaagaaacagcuucgggaaaaugccgaggacaugggcaacgggugcuuuaagauuuaucauaagugugauaaugcuugcaucggaucuaucagaaacggcacauacgaccacgauguguaucgcgacgaggcccugaauaaccgguuccagauuaaaggggucgaacucaaguccggcuacaaagacuggauccuguggauuagcuuugccaucucuugcuuccuucugugugugguucuccugggauuuauuaugugggcuugccaaaagggcaauaucagauguaacaucugcauuuga

SEQ ID NO: 199839 - RNA, 1701 nt, Artificial Sequence; identical to SEQ ID NO: 199054
  derived and/or modified CDS sequence (opt5) from hemagglutinin__InfluenzaA__AER08692

SEQ ID NO: 199840 - RNA, 1701 nt, Artificial Sequence
  derived and/or modified CDS sequence (opt5) from hemagglutinin__InfluenzaA__AER08698
augaagaccacaaucgcccugagccacauucucugccugguguucgcucagaaacuucccggcaacgacaauuccacggccacccugugucucgggcaucacgcggucccuaacggaacaaucguuaagaccauuacaaaugaucaaaucgaggugaccaacgcuacagaacuggugcagucuagcuccgccggcgagauuugcgacucuccgcaucagauccuugauggggaaaauuguacccugaucgacgcccuccugggagauccccagugcgacggcuuucaaaacaaaaagugggaucuguucgucgagagaagccgggcuuacuccaauuguuauccuuacgacgugcccgauuaugccucucuccgcagccugguugcuuccagcgggacgcuugaauuuaacaaugagucuuucaacuggaccggagugacacagaauggcaccuccagcgccugcauuagacggucuaacaauuccuuuuucagccgccugaacuggcucacacaccugaauuuuaaauacccugcgcuuaacgucaccaugcccaacaaugagcaguucgacaagcuguauaucuggggcgugcaucacccugggacggauaaggaccagauuuuucucuacgcccaggcuucuggaagaaucacaguuuccaccaaacggagccagcaggccgugauuccgaacaucggcucccgccccagaguccggaauauuccuucucgcaucagcaucuauuggacaauugugaagcccggggauauccugcugauuaacuccaccggaaaucucaucgcuccuagaggcuacuucaaaauucggagcgggaagucuuccaucaugcgcagcgacgcccccaucggaaaauguaacucugaaugcauuaccccgaauggcagcaucccuaacgacaagcccuuucagaaugugaacagaauuacauacggcgcguguccucgguaugucaagcaauccacgcugaaacuugccaccgggaugcgcaauguucccgagaagcagacaagaggaaucuucggcgcuauugccggguuuaucgaaaacggaugggagggcaugguggaugggugguacggauuccggcaccaaaauucugagggcagaggccaagcugccgaccugaaaagcacccaggccgcuaucgaucagauuaacgggaagcucaaucgccugaucggaaaaacaaacgaaaaguuccaucagauugagaaagaauuuuccgagguggaaggccggauccaagaccuugagaaguaugucgaggauaccaagauugaccuguggagcuacaacgcggaacuccugguggcccuggagaaucagcacacgaucgaucucacagacucugaaaugaacaaacuguucgagaagaccaaaaagcagcuuagagaaaaugcugaggauauggggaacggaugcuuuaaaauuuaucauaagugugacaaugccugcaucggcuccauccgcaacgggaccuacgaucacgacguuuaucgggacgaggcccugaauaacagauuccagauuaagggcguggaacucaaaagcggauacaaggauuggauccuguggauuucuuuugcuaucuccugcuuccuucugugugucgcccuccugggcuuuauuaugugggcgugccaaaaagggaauauccgcuguaacaucugcauuuga

SEQ ID NO: 199841 - RNA, 1701 nt, Artificial Sequence; identical to SEQ ID NO: 199054
  derived and/or modified CDS sequence (opt5) from hemagglutinin__InfluenzaA__AER08700

SEQ ID NO: 199842 - RNA, 1701 nt, Artificial Sequence
  derived and/or modified CDS sequence (opt5) from hemagglutinin__InfluenzaA__AER92712
augaaggccauccuggugguccuccuguacaccuucgcuacagccaacgcggacacgcuuugcauuggcuaucacgcuaauaacagcaccgauacaguugacaccgugcuggagaagaaugugacagucacccauuccguggaucuccuggaagacaagcacaacgggaaacuuuguaagcugagaggaguugcuccccuccaucugggcaaaugcaauaucgccggguggauucugggaaacccugagugugaaucucucagcacagccuccucuuggagcuacaucguggagaccuccaauucugauaacggcacgugcuauccgggggacuuuauugauuacgaagaacugcgggagcagcuuagcuccgucagcucuuucgaacgcuuugagaucuuccccaagaccuccagcuggccuaaucacgacucuaacaagggagugacagccgcuuguccccaugccggcgcgaaauccuuuuauaagaaucugaucuggcucguuaaaaagggcaacagcuacccuaaacugaauaagucuuauauuaacgauaaggggaaagaagugcuuguccuguggggaauccaccaccccuccaccagcacagaccaacagucccucuaccagaaugccgaugcuuacguguucgugggcaccucuagauauagcaagaaauuuaagccugagauugccauccggccgaaaguccgcaaccaggaggggagaaugaacuacuauuggacgcugguugaacccggagacaagauuacauucgaggcuaccggcaaucugguggugccucgguacgccuuuacaaucgaacgcaacgcgggguccggaauuaucaucagcgauacccccauucaugacugcaauaccacaugucaaacgccuaaaggcgccaucaacaccucucuccccuuccagaauauucacccgaucacaauuggcaagugcccuaaguaugucaaauccaccaagcugagacuugcuacagggcugcggaacgugcccagcauccagucucgcggacucuuuggcgccaucgcuggguucauugagggaggcuggaccgggaugguugacggaugguacggcuaucaucaccagaaugaacaaggcagcggguacgccgccgaucugaaauccacgcagaacgcuaucgacgagauuacaaauaaggugaacucugucaucgagaaaaugaauacccaguuuaccgcggugggaaaggaguucaaccaccuugagaagagaauugaaaaucugaacaaaaagguugaugacggcuuccucgauaucuggacauacaaugccgagcugcuggugcuccuggaaaacgagcggacccuugacuaucaugauagcaacgucaaaaaucuguacgagaaggugcgcucccagcucaaaaacaaugcuaaggaaaucgggaacggauguuuugaguucuaucacaagugcgacaauacauguauggaaagcgucaaaaacggcacguacgauuauccuaaguacucugaggaagccaaacugaauagagaggagauugacggggugaaacuugaauccacccggaucuaucaaauucuggccaucuacagcacaguugcuucuucccucgugcuggucgugagccugggcgccauuuccuuuuggaugugcucuaacggaagccuccagugccgcaucuguauuuga

SEQ ID NO: 199843 - RNA, 1701 nt, Artificial Sequence; identical to SEQ ID NO: 197605
  derived and/or modified CDS sequence (opt5) from hemagglutinin__InfluenzaA__AET10090

SEQ ID NO: 199844 - RNA, 1701 nt, Artificial Sequence; identical to SEQ ID NO: 197605
  derived and/or modified CDS sequence (opt5) from hemagglutinin__InfluenzaA__AET10091

SEQ ID NO: 199845 - RNA, 1701 nt, Artificial Sequence; identical to SEQ ID NO: 197605
  derived and/or modified CDS sequence (opt5) from hemagglutinin__InfluenzaA__AET10092

SEQ ID NO: 199846 - RNA, 1701 nt, Artificial Sequence
  derived and/or modified CDS sequence (opt5) from hemagglutinin__InfluenzaA__AET10094
augaagaccaucauugcccugagcugcauccucugucugguguucgcucagaaacuucccggcaacgacaauuccacagccacgcugugccucgggcaccaugcggucccuaacggaaccauuguuaagacaaucaccaaugaucaaauugaggugacaaacgcuaccgaacuggugcagucuagcuccacaggcgagaucugugacucuccgcaccagauccuugauggggaaaauugcacccugauugacgcccuccugggagauccccagugugacggcuuucaaaacaaaaagugggaucuguucgucgagagaagcaaagccuacuccucuugcuauccuuacgacgugcccgauuaugcuagccuccggucccugguugccagcucugggacgcuugaauuuaauaacgaguccuucaauuggaccggagugacacagaacggcaccagcucugcuuguauccgcagauccaauaacagcuuuuucucucggcugaauuggcucacacaucugaacuuuaaguacccugcccuuaaugucaccaugcccaacaacgagcaguucgacaagcuguauauuuggggcgugcaccauccugggacggauaaagaccagaucuuucucuacgcgcaagccuccggacgcauuacaguuagcaccaagagaucccagcaggcugugaucccgaauauuggcucucggccccgcgucagaaacaucccuagccggaucuccauuuauuggacaaucgugaaacccggggauauucugcugaucaauagcaccggaaaccucauugccccucgcggcuacuucaagaucagaucugggaaauccagcaucaugcggucugacgcucccauuggaaagugcaauagcgaauguaucaccccgaacggcuccauuccuaaugacaagcccuuucagaacgugaaucgcaucacauacggcgccugcccuagauaugucaaacaaucuacgcugaaacuugcgaccgggaugcggaacguucccgagaagcagacacgcggaauuuucggcgccaucgcuggguuuaucgaaaauggaugggagggcaugguggaugggugguacggauucagacaccagaacagcgagggccggggccaagccgcugaccugaaguccacccaggccgccauugaucagaucaaugggaaacucaacagacugauuggaaagacaaaugaaaaauuccaccagaucgagaaggaauuuagcgagguggaaggccgcauucaagaccuugagaaguaugucgaggauaccaaaaucgaccuguggucuuacaacgcugaacuccugguggcgcuggagaaccagcauacgauugaucucacagacuccgaaaugaauaagcuguucgagaaaaccaagaaacagcuucgggaaaacgccgaggauauggggaauggauguuuuaccaucuaucacaagugcgacaacgcuugcaucggcagcauuagaaaugggacauacgaucauaacguuuaucgcgacgaggcccugaauaaccgguuccagaucaagggcguggaacucaaaucuggauacaaggacuggauucuguggaucuccuuugccauuagcuguuuccuucugugcgucgcucuccugggcuuuaucaugugggccugucaaaaagggaauaucagaugcaacauuuguaucuga

SEQ ID NO: 199847 - RNA, 1701 nt, Artificial Sequence
  derived and/or modified CDS sequence (opt5) from hemagglutinin__InfluenzaA__AET10095
augaagaccaucauugcccugagcuacauccucugccugguguucgcucagaaacuucccggcaacgacaauuccacagccacgcugugucucgggcaccaugcggucccuaacggaaccauuguuaagacaaucaccaaugaucaaauugaggugacaaacgcuaccgaacuggugcagucuagcuccacaggcgagaucugcgacucuccgcaccagauccuugauggggaaaauuguacccugauugacgcccuccugggagauccccagugcgacggcuuucaaaacaaaaagugggaucuguucgucgagagaagcaaagccuauuccaauuguuacccuuaugacgugcccgauuacgcuucucuccggagccugguugccuccagcgggacgcuugaauuuaacaaugagucuuucaacuggaccggagugacacagaauggcaccuccagcgcuugcauccgcagaucuaacaauuccuuuuucagccggcugaacuggcucacacaucugaauuuuaaguauccugcccuuaacgucaccaugcccaacaaugagcaguucgacaagcuguacauuuggggcgugcaccauccugggacggauaaagaccagaucuuucucuaugcgcaagccucuggacgcauuacaguuuccaccaagagaagccagcaggcugugaucccgaacauuggcucccggccccgcgucagaaauaucccuucucggaucagcauuuacuggacaaucgugaaacccggggauauucugcugaucaacuccaccggaaaucucauugccccucgcggcuacuucaagaucagaagcgggaaaucuuccaucaugcggagcgacacccccauuggaaaguguaacucugaaugcaucacaccgaauggcagcauuccuaacgacaagcccuuucagaaugugaaccgcaucacguauggcgcuuguccuagauacgucaaacaaaauacccugaaacuugccacagggaugcggaacguucccgagaagcagacccgcggaauuuucggcgcgaucgccggguuuaucgaaaauggaugggagggcaugguggaugggugguauggauucagacaccagaacuccgagggccggggccaagcugccgaccugaagucuacacaggcugccauugaucagaucaaugggaaacucaacagacugauuggaaagaccaacgaaaaauuccaccagaucgagaaggaauuuagcgagguggaaggccgcauucaagaccuugagaaguacgucgaggauacgaaaaucgaccugugguccuauaaugccgaacuccugguggcucuggagaaccagcauacaauugaucucaccgacagcgaaaugaauaagcuguucgagaaaaccaagaaacagcuucgggaaaacgcggaggauauggggaauggaugcuuuaagaucuaccacaagugugacaacgccugcaucgagucuauuagaaauggcacauaugaucaugacguuuaccgcgacgaagcucugaacaaucgguuccagaucaaagggguggagcucaaguccggcuacaaagauuggauucuguggaucagcuuugccauuucuugcuuccuucugugugucgcccuccugggauuuaucaugugggcuugccaaaagggcaacaucagauguaauauuugcaucuga

SEQ ID NO: 199848 - RNA, 1701 nt, Artificial Sequence
  derived and/or modified CDS sequence (opt5) from hemagglutinin__InfluenzaA__AET10096
augaagaccaucauugcccugagcuacauccucugccugguguucgcucagaaauuucccggcaacgacaauuccacagccacgcuuugucuggggcaccaugcggucccuaacggaaccauuguuaagacaaucaccaaugaucaaauugaggugacaaacgcuaccgaacucgugcaaaauucuagcacaggcgagaucugcgacuccccgcaccagaucauugauggggaaaacuguacccugaucgacgcccuucugggagauccccagugcgacggcuuccagaauaaaaaguggaaccucuuugucgagagaucuaaagccuauagcaauuguuacccuuaugaugugcccgacuacgcuucccugcggucucugguugccagcuccgggacgcucgaauuuaacaaugagagcuucaacuggaccggagugacacagaauggcaccucuuccgcuugcauucgcagaagcaacaauucuuucuuuucccggcugaacuggcuuacacaucugaacuucaaguauccugcccucaaugucaccaugcccaacaaugagcaguuugauaagcuguacaucuggggcgugcaccauccugggacggacaaagaucagauuuuccuuuaugcgcaagccagcggacgcaucacaguuucuaccaagagaucccagcaggcugugauuccgaacaucggcagccggccccgcgucagaaauaucccuucccggauuucuaucuacuggacaauugugaaacccggggacauccugcucauuaacagcaccggaaaucugaucgccccucgcggcuacuuuaagaucagauccgggaaaagcucuauuaugcgguccgaugcucccaucggaaaguguaacagcgaaugcauuaccccgaauggcucuaucccuaacgacaagcccuuccagaaugugaaccgcauuacauauggcgccuguccuagauacgucaaacaaaauacgcugaagcucgcgaccgggaugcggaacguucccgagaaacagacacgcggaaucuuuggcgccaucgcuggguucauugaaaauggaugggagggcaugguggacgggugguauggauucagacaccagaacagcgagggccggggccaagccgcugaucugaaguccacccaggccgccaucgaccagauuaacgggaaacuuaauagacugaucggaaagacaaacgaaaaauuucaccagauugagaaggaguucucugaaguggaaggccgcauccaagaucucgagaaguacgucgaggacaccaaaauugaucuguggagcuauaaugcugaacuucugguggcgcucgagaaccagcauacgaucgaccugacagauuccgaaaugaauaagcuguuugagaaaaccaagaaacagcuccgggaaaacgccgaggacauggggaauggaugcuucaagaucuaccacaagugugauaacgcuugcauuggcagcaucagaaaugggaccuaugaccaugauguuuaccgcgacgaggcccugaacaaucgguuucagauuaaaggcguggaacuuaagucuggauacaaagacuggauccuguggauuuccuucgccaucagcugcuuucuccugugugucgcccuucugggcuucaucaugugggcuugccaaaaggggaacauuagauguaauaucugcauuuga

SEQ ID NO: 199849 - RNA, 1701 nt, Artificial Sequence
  derived and/or modified CDS sequence (opt5) from hemagglutinin__InfluenzaA__AET10098
augaagaccaucauugcccugagcuacauccucugccugguguucgcucagaaauuucccggcaacgacaauuccacagccacgcuuugucuggggcaccaugcggucccuaacggaaccauuguuaagacaaucaccaaugaucaaauugaggugacaaacgcuaccgaacucgugcaaaauucuagcacaggcgagaucugcgacuccccgcaccagaucauugauggggaaaacuguacccugaucgacgcccuucugggagauccccagugcgacggcuuccagaauaaaaagugggaucucuuugucgagagaucuaaagccuauagcaacuguuacccuuaugacgugcccgauuacgcuucccugcggucucugguugccagcuccgggacgcucgaauuuaauaacgagagcuucaauuggaccggagugacacagaacggcaccucuuccgcuugcauucgcagaagcaauaacucuuucuuuucccggcugaauuggcuuacacaucugaacuucaaguauccugcccucaacgucaccaugcccaauaacgagcaguuugacaagcuguacaucuggggcgugcaccauccugggacggauaaagaccagauuuuccuuuaugcgcaagccagcggacgcaucacaguuucuaccaagagaucccagcaggcugugauuccgaauaucggcagccggccccgcgucagaaacaucccuucccggauuucuaucuacuggacaauugugaaacccggggauauccugcucauuaauagcaccggaaaccugaucgccccucgcggcuacuuuaagaucagauccgggaaaagcucuauuaugcgguccgacgcucccaucggaaaguguaauagcgaaugcauuaccccgaacggcucuaucccuaaugacaagcccuuccagaacgugaaucgcauuacauauggcgccuguccuagauacgucaaacaaaacacgcugaagcucgcgaccgggaugcggaauguucccgagaaacagacacgcggaaucuuuggcgccaucgcuggguucauugaaaacggaugggagggcaugguggaugggugguauggauucagacaccagaauagcgagggccggggccaagccgcugaccugaaguccacccaggccgccaucgaucagauuaacgggaaacuuaacagacugaucggaaagacaaaugaaaaauuucaccagauugagaaggaguucucugaaguggaaggccgcauccaagaccucgagaaguacgucgaggauaccaaaauugaccuguggagcuauaacgcugaacuucugguggcgcucgagaaucagcauacgaucgaucugacagacuccgaaaugaacaagcuguuugagaaaaccaagaaacagcuccgggaaaaugccgaggauauggggaacggaugcuucaagaucuaccacaagugugacaaugcuugcauuggcagcaucagaaacgggaccuaugaucaugacguuuaccgcgacgaggcccugaauaaccgguuucagauuaaaggcguggaacuuaagucuggauacaaagauuggauccuguggauuuccuucgccaucagcugcuuucuccugugugucgcccuucugggcuucaucaugugggcuugccaaaaggggaauauuagauguaacaucugcauuuga

SEQ ID NO: 199850 - RNA, 1701 nt, Artificial Sequence; identical to SEQ ID NO: 198927
  derived and/or modified CDS sequence (opt5) from hemagglutinin__InfluenzaA__AET10099

SEQ ID NO: 199851 - RNA, 1701 nt, Artificial Sequence; identical to SEQ ID NO: 199054
  derived and/or modified CDS sequence (opt5) from hemagglutinin__InfluenzaA__AET10100

SEQ ID NO: 199852 - RNA, 1701 nt, Artificial Sequence
  derived and/or modified CDS sequence (opt5) from hemagglutinin__InfluenzaA__AET10101
augaagaccaucauugcccugagcugcauccucugucugguguucgcucagaaacuucccggcaacgacaauuccacagccacgcugugccucgggcaccaugcggucccuaacggaaccauuguuaagacaaucaccaaugaucaaauugaggugacaaacgcuaccgaacuggugcagucuagcuccacaggcgagaucugugacucuccgcaccagauccuugauggggaaaauugcacccugauugacgcccuccugggagauccccagugugacggcuuucaaaacaaaaagugggaucuguucgucgagagaagcaaagccuacuccaauugcuauccuuacgacgugcccgauuaugcuucucuccggagccugguugccuccagcgggacgcuugaauuuaacaaugagucuuucaacuggaccggagugacacagaauggcaccuccagcgcuuguauccgcagaucuaacaauuccuuuuucagccggcugaacuggcucacacaucugaauuuuaaguacccugcccuuaacgucaccaugcccaacaaugagcaguucgacaagcuguauauuuggggcgugcaccauccuggggcggauaaagaccagaucuuucucuacgcccaggcuucuggacgcauuacgguuuccacaaagagaagccagcaggccgugaucccgaacauuggcucccggccccgcgucagaaauaucccuucucggaucagcauuuauuggaccaucgugaaacccggggauauucugcugaucaacuccacaggaaaucucauugcuccucgcggcuacuucaagaucagaagcgggaaaucuuccaucaugcggagcgacgcccccauuggaaagugcaacucugaauguaucaccccgaauggcagcauuccuaacgacaagcccuuucagaaugugaaccgcaucaccuacggcgcgugcccuagauaugucaaacaauccacacugaagcuggccacggggaugcggaauguucccgagaaacagacccgcggaauuuucggcgcuaucgccggguuuaucgaaaacggaugggagggcaugguggaugggugguacggauucagacaccaaaauucugagggccggggccaagcugccgaccuuaagagcacacaggccgcuauugaucagaucaacgggaaacucaauagacugauuggaaagaccaacgaaaaauuccaccagaucgagaaggaauuuuccgagguggaaggccgcauucaagaccuugagaaguaugucgaggauacaaaaaucgaccuguggagcuacaacgcggaacuccugguggcccuggagaaucagcauaccauugaucucacggacucugaaaugaacaagcuguucgagaaaacaaagaaacagcuucgggaaaaugcugaggauauggggaacggauguuuuaccaucuaucacaagugcgacaaugccugcaucggcuccauuagaaacgggaccuacgaucauaauguuuaucgcgacgaggcccugaacaaucgguuccagaucaagggcguggaacucaaaagcggauacaaggacuggauucuguggaucucuuuugcuauuuccuguuuccuucugugcgucgcccuccugggcuuuaucaugugggcgugucaaaaagggaacaucagaugcaauauuuguaucuga

SEQ ID NO: 199853 - RNA, 1701 nt, Artificial Sequence
  derived and/or modified CDS sequence (opt5) from hemagglutinin__InfluenzaA__AET10102
augaagaccaucauugcccugagcuacauccucugccugguguucacacagaaacuucccggcaacgacaauuccacggcuacccugugucucgggcaccaugccgucccuaacggaacaauuguuaagaccaucacaaaugaucaaauugaggugaccaacgcgacagaacuggugcagucuagcuccaccggcgagaucugcgacucuccgcaccagauccuugaugggaaaaauuguacgcugauugacgcucuccugggagauccccagugcgacggcuuucaaaacaagaaaugggaucuguucgucgaaagaagcaaggccuauuccaauuguuacccuuuugacgugcccgauuaugccucucuccggagccugguugcuuccagcgggacccuugaguucaacaaugaaucuuuuaacuggacaggagugacccagaauggcacauccagcgccugcaugcgcagaucuaaguccagcuucuuuucucggcugaacuggcucacccaucugaauuucaaauacccugcucuuaacgucacgaugcccaaugacgagcaguuugauaagcuguauaucuggggcgugcaccauccugggacagacaaagaucagauuuuccucuacgcccaagcguccggacgcaucaccguuagcacaaagagaucccagcagaccgugauuccgaacaucggcucucggccccgcauuagaaacaucccuagccggaucuccauuuauuggaccaucgucaaacccggggacauucugcugaucaauagcacaggaaaccucauugccccucgcggcuacuuuaagaucagaucugggaaguccagcaucaugcggucugacgcucccauuggaaaauguaauagcgagugcaucacgccgaacggcuccauuccuaaugauaagcccuuccagaacgugaaucgcaucaccuacggcgccuguccuagauaugugaaacaaaacacacugaagcuggcuaccgggaugcggaauguccccgaaaaacagacacgcggaauuuuuggcgccaucgcgggguucaucgagaacggaugggaaggcaugguugacgggugguacggauucagacaccaaaauucugagggccggggccaggccgcugaucuuaagagcacccaggccgcuauugaccagaucaacgggaaacucaauagacugauuggacgcacgaacgagaaguuucaccagaucgaaaaggaguucuccgaaguggagggccggauucaagaucuugaaaaauauguggaggacacaaagaucgaucuguggagcuacaaugccgagcuccuggucgcccuggaaaaccagcauaccauugaccucaccgauucugagaugaacaaacuguuugaaaagacaagaaaacagcuucgcgagaaugcugaagacauggggaacggaugcuucaagaucuaucacaagugugauaaugcgugcaucggcuccauucggaacgggaccuacgaccaugacguguauagagaugaggcccugaauaaccgcuuucagaucaaaggcguugagcucaagagcggauacaaagacuggauucuguggaucucuuucgcuauuuccugcuuucuucuguguguggccagccucggcuucaucaugugggccugccaaaaggggaauauccgguguaacauuugcaucuga

SEQ ID NO: 199854 - RNA, 1701 nt, Artificial Sequence
  derived and/or modified CDS sequence (opt5) from hemagglutinin__InfluenzaA__AET10103
augaagaccaucauugcccugagcuacauccucugccugguguucgcucagaaacuucccggcaacgacaauuccacagccacgcugugucucgggcaccaugcggucccuaacggaaccauuguuaagacaaucaccaaugaucaaauugaggugacaaacgcuaccgaacuggugcaaaauucuagcacaggcgagaucugcgacuccccgcaccagauccuugauggggaaaacuguacccugauugacgcccuccugggagauccccagugcgacggcuuucagaauaaaaagugggaucuguucgucgagagaucuaaagccuauagcaacuguuacccuuaugacgugcccgauuacgcuucccuccggucucugguugccagcuccgggacgcuugaauuuaauaacgagagcuucaauuggaccggagugacacagaacggcaccucuuccgcuugcauccgcagaagcaauaacuccuuuuucucucggcugaauuggcucacacaucugaacuuuaaguauccugcccuuaacgucaccaugcccaauaacgagcaguucgacaagcuguacauuuggggcgugcaccauccugggacggauaaagaccagaucuuucucuaugcgcaagccagcggacgcauuacaguuucuaccaagagaucccagcaggcugugaucccgaauauuggcagccggccccgcgucagaaacaucccuucccggaucucuauuuacuggacaaucgugaaacccggggauauucugcugaucaauagcaccggaaaccucauugccccucgcggcuacuucaagaucagauccgggaaaagcucuaucaugcgguccgacgcucccauuggaaaguguaauagcgaaugcaucaccccgaacggcucuauuccuaaugacaagcccuuucagaacgugaaucgcaucacauauggcgccuguccuagauacgucaaacaaaacacgcugaaacuugcgaccgggaugcggaauguucccgagaagcagacacgcggaauuuucggcgccaucgcuggguuuaucgaaaacggaugggagggcaugguggaugggugguauggauucagacaccagaauagcgagggccggggccaagccgcugaccugaaguccacccaggccgccauugaucagaucaacgggaaacucaacagacugauuggaaagacaaaugaaaaauuccaccagaucgagaaggaauuuucugagguggaaggccgcauucaagaccuugagaaguacgucgaggauaccaaaaucgaccuguggagcuauaacgcugaacuccugguggcgcuggagaaucagcauacgauugaucucacagacuccgaaaugaacaagcuguucgagaaaaccaagaaacagcuucgggaaaaugccgaggauauggggaacggaugcuuuaagaucuaccacaagugugacaaugcuugcaucggcagcauuagaaacgggaccuaugaucaugacguuuaccgcgacgaggcccugaauaaccgguuccagaucaaaggcguggaacucaagucuggauacaaagauuggauucuguggaucuccuuugccauuagcugcuuccuucugugugucgcucuccugggcuuuaucaugugggccugccaaaaggggaauaucagauguaacauuugcaucuga

SEQ ID NO: 199855 - RNA, 1701 nt, Artificial Sequence
  derived and/or modified CDS sequence (opt5) from hemagglutinin__InfluenzaA__AET10104
augaagaccaucauugcccugagcuacauccucugccugguguucgcucagaaauuucccggcaacgacaauuccacagccacgcuuugucuggggcaccaugcggucccuaacggaaccauuguuaagacaaucaccaaugaucaaauugaggugacaaacgcuaccgaacucgugcaaaauucuagcacaggcgagaucugcgacuccccgcaccagaucauugauggggaaaacuguacccugaucgacgcccuucugggagauccccagugcgacggcuuccagaauaaaaagugggaucucuuugucgagagaucuaaagccuauagcaacuguuacccuuaugacgugcccgauuacgcuucccugcggucucugguugccagcuccgggacgcucgaauuuaauaacgagagcuucaauuggaccggagugacacagaacggcaccucuuccgcuugcauucgcagaagcaauaacucuuucuuuucccggcugaauuggcuuacacaucugaacuucaaguauccugcccucaacgucaccaugcccaauaacgagcaguuugacaagcuguacaucuggggcgugcaccauccugggacggauaaagaccagauuuuccuuuaugcgcaagccagcggacgcaucacaguuucuaccaagagaucccagcaggcugugauuccgaauaucggcagccggccccgcgucagaaacaucccuucccggauuucuaucuacuggacaauugugaaacccggggauauccugcucauuaauagcaccggaaaccugaucgccccucgcggcuacuuuaagaucagauccgggaaaagcucuauuaugcgguccgacgcucccaucggaaaguguaauagcgaaugcauuaccccgaacggcucuaucccuaaugacaagcccuuccagaacgugaaucgcauuacauauggcgccuguccuagauacgucaaacaaaacacgcugaagcucgcgaccgggaugcggaauguucccgagaaacagacacgcggaaucuuuggcgccaucgcuggguucauugaaaacggaugggagggcaugguggaugggugguauggauucagacaccagaauagcgagggccggggccaagccgcugaccugaaguccacccaggccgccaucgaucagauuaacgggaaacuuaacagacugaucggaaagacaaaugaaaaauuucaccagauugagaaggaguucucugaaguggaaggccgcauccaagaccucgggaaguacgucgaggauaccaaaauugaccuguggagcuauaacgcugagcuucugguggcgcucgaaaaucagcauacgaucgaucugacagacuccgagaugaacaagcuguuugagaaaaccaagaaacagcuccgggaaaaugccgaagauaugggaaacggcugcuucaagaucuaccacaagugugacaaugcuugcauugggagcaucagaaacggcaccuaugaucaugacguuuaccgcgacgaggcccugaauaaccgguuucagauuaaaggaguggagcuuaagucuggcuacaaagauuggauccuguggauuuccuucgccaucagcugcuuucuccugugugucgcccuucugggguucaucaugugggcuugccaaaagggaaauauuagauguaacaucugcauuuga

SEQ ID NO: 199856 - RNA, 1701 nt, Artificial Sequence
  derived and/or modified CDS sequence (opt5) from hemagglutinin__InfluenzaA__AET10105
augaagaccaucauugcccugagcuacauccucugccugguguucgcucaggagcuucccggcaacgacaauuccacagccacgcugugucucgggcaccaugcggucccuaacggaaccauuguuaaaacaaucaccaaugaucaaauugaagugacaaacgcuaccgagcuggugcagucuagcuccacaggcgaaaucugcaauucuccgcaccagauccuugacggggagaacuguacccugauugaugcccuccugggagacccccagugcgauggcuuucaaaauaagaaaugggaccuguucgucgaaagaagcaaggcccauuccaacuguuauccuuacgaugugcccgacuaugcuucucuccggagccugguugccuccagcgggacgcuugaguuuaauaacgagucuuucaauuggaccggagugacacagaacggcaccuccagcgcuugcauccgcagaucuaauaacuccuuuuucagccggcugaauuggcucacacaccugaacuuuaaauacccugcccuuaacgucaccaugcccaauaacgaacaguucgauaagcuguauauuuggggcgugcaucacccugggacggacaaggaucagaucuuucucuacgcgcaagccgcuggacgcauuacaguuucuaccaaaagaucccagcaggccgugaucccgaauauuggcagccggccccgcgucagaaacaucccuucccgggugucuaucuauuggacaauugugaagcccggggacauccugcugauuaauagcaccggaaaccucaucgcuccucgcggcuacuucaaaauuagauccggaaagagcucuaucaugcgguccgaugcccccaucgggaaauguaauagcgcgugcauuaccccgaacggcucuaucccuaaugacaagcccuuucagaacgucaaucgcauuacauacggcgccuguccuagauauguuaagcaaaacacgcugaaacuugcuaccgggaugcggaaugugcccgagaagcagacacgcggaaucuucggcgccauugcuggguuuaucgaaaacggaugggagggcaugguggacgggugguacggauucagacaccagaauagcgagggccggggccaagccgccgaucugaaauccacccaggcugcgaucgaccagauuaacgggaagcucaacagacugaucggaaaaacaaaugaaaaguuccaucagauugagaaagaauuuucugaggucgaaggccgcauccaagaucuugagaaguauguggaggacaccaagauugaucuguggagcuacaacgccgaacuccugguugcucuggagaaucagcacacgaucgaccucacagauuccgaaaugaacaaacuguucgagaagaccaaaaagcagcuucgggaaaaugccgaggacauggggaacggaugcuuuaaaauuuaucauaagugugauaaugccugcaucggcagcaucagaaacgggaccuacgaccacgauguguaucgcgacgaggcucugaauaaccgguuccagauuaagggcgucgaacucaaaucuggauacaaggacuggauccuguggauuuccuuugccaucagcugcuuccuucuguguguggcgcuccugggcuuuauuaugugggcuugccaaaaagggaauaucagauguaacaucugcauuuga

SEQ ID NO: 199857 - RNA, 1701 nt, Artificial Sequence
  derived and/or modified CDS sequence (opt5) from hemagglutinin__InfluenzaA__AET10106
augaagaccaucauugcccugagcuacauccucugccugguguucgcucagaaacuucccggcaacuauaauuccacagccacgcugugucucgggcaccaugcggucccuaacggaaccauuguuaagacaaucaccaaugaccaaauugaggugacaaacgcuaccgaacuggugcagucuagcuccacaggcgagaucugcaauucuccgcaccagauccuugauggggaaaacuguacccugauugacgcccuccugggagauccccagugcgacggcuuucaaaauaaaaagugggaucuguucgucgagagaagcaaagcccauuccaacuguuacccuuaugacgugcccgauuacgcuucucuccggagccugguugccuccagcgggacgcuugaauuuaauaacgagucuuucaauuggaccggagugacacagaacggcaccuccagcgcuugcauccgcagaucuaauaacuccuuuuucagccggcugaauuggcucacacaccugaacuuuaaguauccugcccuuaacgucaccaugcccaauaacgagcaguucgacaagcuguacauuuggggcgugcaucacccugggacggauaaagaccagaucuuucucuaugcgcaagccucuggacgcauuacaguuuccaccaagagaagccagcaggcugugaucccgaauauuggcucccggccccgcgucagaaacaucccuucucgggugagcaucuacuggacaauugugaaacccggggauauccugcugauuaauuccaccggaaaccucaucgccccucgcggcuacuucaagauuagaagcgggaaaucuuccaucaugcggagcgacgcucccaucggaaaguguaauucugccugcauuaccccgaacggcagcaucccuaaugauaagcccuuucagaacgucaaucgcauuacauauggcgcguguccuagauacguuaaacaaaacacgcugaaacuugccaccgggaugcggaaugugcccgaaaaacagacacgcggaaucuucggcgcuauugccggguuuaucgagaacggaugggaaggcaugguggacgggugguauggauucagacaccaaaauuccgagggccggggccaggcugccgaccugaagucuacccaggccgcuaucgaucagauuaacgggaaacucaacagacugaucggaaagacaaaugagaaauuccaucagauugaaaaggaguuuagcgaagucgagggccgcauccaagaccuugaaaaguacguggaggauaccaaaauugaccugugguccuauaacgcggagcuccugguugcccuggaaaaucagcacacgaucgaucucacagacagcgagaugaacaagcuguucgaaaagaccaagaaacagcuucgggagaaugcugaagauauggggaacggaugcuuuaagauuuaccauaagugugacaaugccugcaucggcucuaucagaaacgggaccuaugaucacgacguguaccgcgaugaggcccugaauaaccgguuccagauuaaaggcgucgagcucaaguccggauacaaagacuggauccuguggauuagcuuugcuaucucuugcuuccuucuguguguggcccuccugggcuuuauuaugugggcgugccaaaaggggaauaucagauguaacaucugcauuuga

SEQ ID NO: 199858 - RNA, 1701 nt, Artificial Sequence
  derived and/or modified CDS sequence (opt5) from hemagglutinin__InfluenzaA__AET10107
augaagaccaucauugcccugagcuacauccucugccugguguucgcucaggagauucccggcaacgacaauuccacagccacgcuuugucuggggcaccaugcggucccuaacggaaccaucguuaaaacaauuaccaaugaucaaaucgaagugacaaacgcuaccgagcucgugcagucuagcuccacaggcgaaaucugcaauucuccgcaccagauucuggacggggagaacuguacccuuaucgaugcccugcucggagacccccagugcgauggcuuucaaaauaagaaaugggaccuguucgucgaaagaagcaaggcccauuccaacuguuauccuuacgaugugcccgacuaugcuucucugcggagccucguugccuccagcgggacgcuggaguuuaauaacgagucuuucaauuggaccggagugacacagaacggcaccuccagcgcuugcauucgcagaucuaauaacuccuuuuucagccggcuuaauuggcugacacaccucaacuuuaaauacccugcccugaacgucaccaugcccaauaacgaacaguucgauaaacuuuauaucuggggcgugcaucacccugggacggacaaggaucagauuuuucuguacgcgcaagccucuggacgcaucacaguuuccaccaagagaagccagcaggcugugauuccgaauaucggcucccggccccgcgucagaaacaucccuucucgggugagcauuuauuggacaaucgugaagcccggggacauucuccugaucaauuccaccggaaaccugauugccccucgcggcuacuucaaaaucagaagcgggaagucuuccaucaugcggagcgaugcucccauuggaaaauguaauucugccugcaucaccccgaacggcagcauuccuaaugacaagcccuuucagaacgucaaucgcaucacauacggcgcguguccuagauauguuaagcaaaacacgcucaaacuggccaccgggaugcggaaugugcccgagaagcagacacgcggaauuuucggcgcuaucgccggguuuaucgaaaacggaugggagggcaugguggacgggugguacggauucagacaccaaaauuccgagggccggggccaggcugccgaucuuaaaucuacccaggccgcuauugaccagaucaacgggaagcugaacagacucauuggaaaaacaaaugaaaaguuccaucagaucgagaaagaauuuagcgaggucgaaggccgcauucaagaucuggagaaguauguggaggacaccaagaucgaucuuugguccuacaacgcggaacugcucguugcccuggagaaucagcacacgauugaccugacagauagcgaaaugaacaaacucuucgagaagaccaaaaagcagcugcgggaaaaugcugaggacauggggaacggaugcuuuaaaaucuaucauaagugugauaaugccugcaucggcucuauuagaaacgggaccuacgaccacgauguguaucgcgacgaggcccuuaauaaccgguuccagaucaagggcgucgaacugaaauccggauacaaggacuggauucucuggaucagcuuugcuauuucuugcuuccugcuuuguguggcccugcucggcuuuaucaugugggcgugccaaaaagggaauaucaaguguaacauuugcaucuga

SEQ ID NO: 199859 - RNA, 1701 nt, Artificial Sequence; identical to SEQ ID NO: 195483
  derived and/or modified CDS sequence (opt5) from hemagglutinin__InfluenzaA__AET10108

SEQ ID NO: 199860 - RNA, 1701 nt, Artificial Sequence; identical to SEQ ID NO: 199054
  derived and/or modified CDS sequence (opt5) from hemagglutinin__InfluenzaA__AET10109

SEQ ID NO: 199861 - RNA, 1701 nt, Artificial Sequence
  derived and/or modified CDS sequence (opt5) from hemagglutinin__InfluenzaA__AET10110
augaagaccaucauugcccugagcuacauccucugccugguguucgcucagaaacuucccggcaacgacaauuccacagccacgcugugucucgggcaccaugcggucccuaacggaaccauuguuaagacaaucaccaaugaucaaauugaggugacaaacgcuaccgaacuggugcagucuagcuccacaggcgagaucugcaauucuccgcaccagauccuugacggggaaaacuguacccugauugaugcccuccugggagacccccagugcgauggcuuucaaaauaaaaagugggaccuguucgucgagagaagcaaagccuauuccaacuguuacccuuaugaugugcccgacuacgcuucucuccggagccugguugccuccagcgggacgcuugaauuuaauaacgagucuuucaauuggaccggagugacacagaacggcaccuccagcgcuugcauccgcagaucuaauaacuccuuuuucagccggcugaauuggcucacacaucugaacuuuaaguauccugcccuuaacgucaccaugcccaauaacgagcaguucgauaagcuguacauuuggggcgugcaccauccugggacggacaaagaucagaucuuucucuaugcgcaagccucuggacgcauuacaguuuccaccaagagaagccagcaggcugugaucccgaauauuggcucccggccccgcgucagaaacaucccuucucgggugagcaucuacuggacaauugugaaacccggggacauccugcugauuaauuccaccggaaaccucaucgccccucgcggcuacuucaagauuagaagcgggaaaucuuccaucaugcggagcgaugcucccaucggaaaguguaauucugccugcauuaccccgaacggcagcaucccuaaugacaagcccuuucagaacgucaaucgcauuacauauggcgcguguccuagauacguuaaacaaaacacgcugaaacuugccaccgggaugcggaaugugcccgaaaaacagacacgcggaaucuucggcgcuauugccggguuuaucgagaacggaugggaaggcaugguggacgggugguauggauucagacaccaaaauuccgagggccggggccaggcugccgaucugaagucuacccaggccgcuaucgaccagauuaacgggaaacucaacagacugaucggaaagacaaaugagaaauuccaccagauugaaaaggaguuuagcgaagucgagggccgcauccaagaucuugaaaaguacguggaggacaccaaaauugaucugugguccuauaacgcggagcuccugguugcccuggaaaaucagcauacgaucgaccucacagauagcgagaugaacaagcuguucgaaaagaccaagaaacagcuucgggagaaugcugaagacauggggaacggaugcuuuaagauuuaccacaagugugauaaugccugcaucggcucuaucagaaacgggaccuaugaccaugauguguaccgcgacgaggcccugaauaaccgguuccagauuaaaggcgucgagcucaaguccggauacaaagacuggauccuguggauuagcuuugcuaucucuugcuuccuucuguguguggcccuccugggcuuuauuaugugggcgugccaaaaggggaauaucaaauguaacaucugcauuuga

SEQ ID NO: 199862 - RNA, 1701 nt, Artificial Sequence
  derived and/or modified CDS sequence (opt5) from hemagglutinin__InfluenzaA__AET10111
augaagaccaucauugcccugagcuacauccucugccugguguucgcucaggagauucccggcaacgacaauuccacagccacgcuuugucuggggcaccaugcggucccuaacggaaccaucguuaaaacaauuaccaaugaucaaaucgaagugacaaacgcuaccgagcucgugcagucuagcuccacaggcgaaaucugcaauucuccgcaccagauucuggacggggagaacuguacccuuaucgaugcccugcucggagacccccagugcgauggcuuucaaaauaagaaaugggaccuguucgucgaaagaagcaaggcccauuccaacuguuauccuuacgaugugcccgacuaugcuucucugcggagccucguugccuccagcgggacgcuggaguuuaauaacgagucuuucaauuggaccggagugacacagaacggcaccuccagcgcuugcauucgcagaucuaauaacuccuuuuucagccggcuuaauuggcugacacaccucaacuuuaaauacccugcccugaacgucaccaugcccaauaacgaacaguucgauaaacuuuauaucuggggcgugcaucacccugggacggacaaggaucagauuuuucuguacgcgcaagccucuggacgcaucacaguuuccaccaagagaagccagcaggcugugauuccgaauaucggcucccggccccgcgucagaaacaucccuucucgggugagcauuuauuggacaaucgugaagcccggggacauucuccuguccaauagcaccggaaaccugaucggcccucgcggguacuucaaaauuagaucuggaaaguccagcaucaugcggucugaugcccccaucggcaaauguaauagcgcuugcauuaccccgaacggcuccaucccuaaugacaagcccuuucagaacgucaaucgcauuacauacggggccuguccuagauauguuaagcaaaacacgcucaaacuggcgaccggaaugcggaaugugcccgagaagcagacacgcggcaucuucggggccauugcuggauuuaucgaaaacggcugggaggggaugguggacggaugguacggcuucagacaccaaaauucugagggccgggggcaggccgcugaucuuaaaagcacccaggccgccaucgaccagauuaacggaaagcugaacagacucaucggcaaaacaaaugaaaaguuccaucagauugagaaagaauuuuccgaggucgaagggcgcauccaagaucuggagaaguauguggaggacaccaagauugaucuuuggagcuacaacgcugaacugcucguugcgcuggagaaucagcacacgaucgaccugacagauucugaaaugaacaaacucuucgagaagaccaaaaagcagcugcgggaaaaugccgaggacaugggaaacggcugcuuuaaaauuuaucauaagugugauaaugcuugcaucggguccaucagaaacggcaccuacgaccacgauguguaucgcgacgaggcccuuaauaaccgguuccagauuaagggagucgaacugaaaagcggcuacaaggacuggauccucuggauuucuuuugccaucuccugcuuccugcuuuguguggcucugcucggguuuauuaugugggccugccaaaaaggaaauaucagauguaacaucugcauuuga

SEQ ID NO: 199863 - RNA, 1701 nt, Artificial Sequence
  derived and/or modified CDS sequence (opt5) from hemagglutinin__InfluenzaA__AET10113
augaagaccaucauugcccugagcuacauccucugccugguguucgcucaggagcuucccggcaacgacaauuccacagccacgcugugucucgggcaccaugcgguccaaaacggaaccauuguuaaaacaaucaccaaugaucagauugaagugacaaacgcuaccgagcuggugcagucuagcuccacaggcgaaaucugcaauucuccucaccagauccuugacggggagaacuguacccugauugaugcccuccugggagacccgcaaugcgauggcuuucagaauaagaaaugggaccuguucgucgaaagaagcaaggcccauuccaacuguuaucccuacgaugugccugacuaugcuucucuccggagccugguugccuccagcgggacgcuugaguuuaauaacgagucuuucaauuggaccggagugacacagaacggcaccuccagcgcuugcauccgcagaucuaauaacuccuuuuucagccggcugaauuggcucacacaccugaacuuuaaauaccccgcccuuaacgucaccaugccuaauaacgaacaguucgauaagcuguauauuuggggcgugcaucaccccgggacggacaaggaucaaaucuuucucuacgcgcaggccucuggacgcauuacaguuuccaccaaaagaagccagcaggcugugaucccuaauauuggcucccggccgcgcgucagaaacauccccucucgggugagcaucuauuggacaauugugaagccuggggacauccugcugauuaauuccaccggaaaccucaucgcuccccgcggcuacuucaaaauuagaagcgggaagucuuccaucaugcggagcgaugccccuaucggaaaauguaauucugccugcauuacccccaacggcagcaucccgaaugacaagccuuuucaaaacgucaaucgcauuacauacggcgcgugucccagauauguuaagcagaacacgcugaaacuugccaccgggaugcggaaugugccugagaagcagacacgcggaaucuucggcgcuauugccggguuuaucgaaaacggaugggagggcaugguggacgggugguacggauucagacaccaaaauuccgagggccggggccaggcugccgaucugaaaucuacccaggccgcuaucgaccagauuaacgggaagcucaacagacugaucggaaaaacaaaugaaaaguuccaucaaauugagaaagaauuuagcgaggucgaaggccgcauccaggaucuugagaaguauguggaggacaccaagauugaucugugguccuacaacgcggaacuccugguugcccuggagaaucagcacacgaucgaccucacagauagcgaaaugaacaaacuguucgagaagaccaaaaagcagcuucgggaaaaugcugaggacauggggaacggaugcuuuaaaauuuaucauaagugugauaaugccugcaucggcucuaucagaaacgggaccuacgaccacgauguguaucgcgacgaggcccugaauaaccgguuccaaauuaagggcgucgaacucaaauccggauacaaggacuggauccuguggauuagcuuugcuaucucuugcuuccuucuguguguggcccuccugggcuuuauuaugugggcgugccagaaagggaauaucagauguaacaucugcauuuga

SEQ ID NO: 199864 - RNA, 1701 nt, Artificial Sequence
  derived and/or modified CDS sequence (opt5) from hemagglutinin__InfluenzaA__AET10114
augaagaccaucauugcccugagcuacauccucugccugguguucgcucaggagcuucccggcaacgacgauuccacagccacgcugugucucgggcaccaugcggucccuaauggaaccauuguuaaaacaaucaccaacgaccaaauugaagugacaaaugcuaccgagcuggugcagucuagcuccacaggcgaaaucugcaacucuccgcaccagauccuugauggggagaauuguacccugauugacgcccuccugggagauccccagugcgacggcuuucaaaacaagaaaugggaucuguucgucgaaagaagcaaggcccauuccaauuguuauccuuacgacgugcccgauuaugcuucucuccggagccugguugccuccagcgggacgcuugaguuuaacaaugagucuuucaacuggaccggagugacacagaauggcaccuccagcgcuugcauccgcagaucuaacaauuccuuuuucagccggcugaacuggcucacacaccugaauuuuaaauacccugcccuuaacgucaccaugcccaacaaugaacaguucgacaagcuguauauuuggggcgugcaucacccugggacggauaaggaccagaucuuucucuacgcgcaagccucuggacgcauuacaguuuccaccaaaagaagccagcaggcugugaucccgaacauuggcucccggccccgcgucagaaauaucccuucucgggugagcaucuauuggacaauugugaagcccggggauauccugcugauuaacuccaccggaaaucucaucgccccucgcggcuacuucaaaauuagaagcgggaagucuuccaucaugcggagcgacgcucccaucggaaaauguaacucugccugcauuaccccgaauggcagcaucuccaacgacaagccuuuucagaaugucaaccgcauuacauacggcgcgugucccagauauguuaagcaaaauacgcugaaacuugccaccgggaugcggaacgugccugagaagcagacacgcggaaucuucggcgcuauugccggguuuaucgaaaauggaugggagggcaugguggaugggugguacggauucagacaccagaacucugagggccggggccaagcugccgaccugaaaagcacccaggccgcuaucgaucagauuaaugggaagcucaacagacugaucggaaaaacaaacgaaaaguuccaucagauugagaaagaauuuuccgaggucgaaggccgcauccaagaccuugagaaguauguggaggauaccaagauugaccuguggagcuacaaugcggaacuccugguugcccuggagaaccagcacacgaucgaucucacagacucugaaaugaauaaacuguucgagaagaccaaaaagcagcuucgggaaaacgcugaggauauggggaauggaugcuuuaaaauuuaucauaagugugacaacgccugcaucggcuccaucagaaaugggaccuacgaucacgacguguaucgcgacgaggcccugaacaaucgguuccagauuaagggcgucgaacucaaaagcggauacaaggauuggauccuguggauuucuuuugcuaucuccugcuuccuucuguguguggcccuccugggcuuuauuaugugggcgugccaaaaagggaacaucauguguaauaucugcauuuga

SEQ ID NO: 199865 - RNA, 1698 nt, Artificial Sequence
  derived and/or modified CDS sequence (opt5) from hemagglutinin__InfluenzaA__AET50439
augaaggugaaacugcucguccugcuuugcaccuucacagccacguacgcugacaccaucuguauuggcuaucacgccaacaauagcacagauaccguugacacagugcuggagaagaacgugaccgucacacauuccgugaaucuccuggaaaacucucacaaugggaaacuuugccugcucaagggaaucgcgccccugcagcugggcaacuguagcguugcuggguggauucucggaaauccugagugcgaacugcuuaucuccaaagagucuuggagcuacauuguggaaaagccgaaccccgagaauggcaccuguuauccugggcauuuugccgauuacgaggaacugagagagcaacucuccucugucagcuccuucgaacgguuugagaucuuccccaaggagagcucuuggccuaaccacacggugaccggaguuuccgccagcugcucucauaauggcgaauccagcuuuuaucgcaaccugcuuuggcugacaggcaaaaaugggcucuaccccaaccugucuaaguccuaugcuaauaacaaagagaaggaagugcugguccucuggggagugcaccacccuccgaacaucggcaaucagaaagcccuguaccauaccgagaacgcuuacgugagcgucguuuccucucacuauagcagaaaguucacacccgaaauugccaagcggccuaaagugcgcgaccaggaggggagaaucaauuacuauuggacccuucuggagcccggagauacgauuaucuuugaagcgaacggcaaucucauugccccucgguacgcuuucgcccugucccgcggguuuggaagcggcaucauuaacucuaaugcucccauggacaagugugaugccaaaugccagacaccgcaaggcgcgaucaacuccagccuuccuuuccagaaugugcaucccgucaccaucggggaguguccuaaguaugugagaucugccaaacugcggaugguuacaggacuccgcaacauucccagcauccaguccagaggccuguuuggggcuauugccggauucaucgaaggcggguggaccggaaugguggacggcugguacggcuaucaccaccagaaugagcaagggucuggauacgcugccgaucaaaagagcacccagaacgccauuaauggcaucacaaacaaagucaauuccgugaucgaaaagaugaacacgcaguuuaccgcuguugggaaggaguucaacaaacuggagcggcgcauggaaaaucucaacaagaaaguggacgauggauucauugacaucuggacauacaaugcggagcugcuuguccugcucgaaaacgagagaacccuggauuuucaugacagcaaugugaagaaccuuuaugaaaaagucaagucucagcugaagaauaacgccaaagagauuggcaaugggugcuucgaguuuuaccacaaguguaacgacgaaugcauggaguccgugaaaaauggcacauaugauuaccccaaguauagcgaagagucuaaacucaaccgggagaagaucgacggaguuaagcuggaauccaugggcguguaccagauucuggcuaucuauagcaccgucgccuccucucucgugcugcuuguuagccugggggccaucuccuucuggaugugcucuaauggaagccuccagugucgcauuugcaucuga

SEQ ID NO: 199866 - RNA, 1698 nt, Artificial Sequence
  derived and/or modified CDS sequence (opt5) from hemagglutinin__InfluenzaA__AET50440
augaaggugaaacugcucguccugcuuugcaccuucacagccacguacgcugacaccaucuguauuggcuaucacgccaacaauagcacagauaccguugacacagugcuggagaagaacgugaccgucacacauuccgugaaucuccuggaaaacucucacaaugggaaacuuugccugcucaagggaaucgcgccccugcagcugggcaacuguagcguugcuggguggauucucggaaauccugagugcgaacugcuuaucuccaaagagucuuggagcuacauuguggaaaagccgaaccccgagaauggcaccuguuauccugggcauuuugccgauuacgaggaacugagagagcaacucuccucugucagcuccuucgaacgguuugagaucuuccccaaggagagcucuuggccuacgcacaccgugacaggaguuuccgccagcugcucucauaacggcgaauccagcuuuuaucgcaaucugcuuuggcugaccggcaaaaacgggcucuaccccaaucugucuaaguccuaugcuaacaauaaagagaaggaagugcugguccucuggggagugcaccacccuccgaacaucggcaaccagaaagcccuguaccauacagagaaugcuuacgugagcgucguuuccucucacuauagcagaaaguucacccccgaaauugccaagcggccuaaagugcgcgaccaggaggggagaaucaacuacuauuggacgcuucuggagcccggagauacaauuaucuuugaagcgaauggcaaccucauugccccucgguacgcuuucgcccugucccgcggguuuggaagcggcaucauuaauucuaacgcucccauggacaagugugaugccaaaugccagaccccgcaaggcgcgaucaauuccagccuuccuuuccagaacgugcaucccgucacaaucggggaguguccuaaguaugugagaucugccaaacugcggaugguuaccggacuccgcaauauucccagcauccaguccagaggccuguuuggggcuauugccggauucaucgaaggcggguggaccggaaugguggacggcugguacggcuaucaccaccagaacgagcaagggucuggauacgcugccgaucaaaagagcacacagaaugccauuaacggcaucacgaauaaagucaacuccgugaucgaaaagaugaauacccaguuuacagcuguugggaaggaguucaacaaacuggagcggcgcauggaaaaccucaauaagaaaguggacgauggauucauugacaucuggaccuacaacgcggagcugcuuguccugcucgaaaaugagagaacacuggauuuucaugacagcaacgugaagaaucuuuaugaaaaagucaagucucagcugaagaacaaugccaaagagauuggcaacgggugcuucgaguuuuaccacaaguguaaugacgaaugcauggaguccgugaaaaacggcaccuaugauuaccccaaguauagcgaagagucuaaacucaaucgggagaagaucgacggaguuaagcuggaauccaugggcguguaccagauucuggcuaucuauagcacggucgccuccucucucgugcugcuuguuagccugggggccaucuccuucuggaugugcucuaacggaagccuccagugucgcauuugcaucuga

SEQ ID NO: 199867 - RNA, 1698 nt, Artificial Sequence
  derived and/or modified CDS sequence (opt5) from hemagglutinin__InfluenzaA__AET50441
augaaggugaaacugcucguccugcuuugcaccuucacagccacguacgcugacaccaucuguauuggcuaucacgccaacaauagcacagauaccguugacacagugcuggagaagaacgugaccgucacacauuccgugaaucuccuggaaaacucucacaaugggaaacuuugccugcucaagggaaucgcgccccugcagcugggcaacuguagcguugcuggguggauucucggaaauccugagugcgaacugcuuaucuccaaagagucuuggagcuacauuguggaaaagccgaaccccgagaauggcaccuguuauccugggcauuuugccgauuacgaggaacugagagagcaacucuccucugucagcuccuucgaacgguuugagaucuuccccaaggagagcucuuggccuacgcacaccgugacaggaguuuccgccagcugcucucauaacggcgaauccagcuuuuaucgcaaucugcuuuggcugaccggcaaaaacgggcucuaccccaaucugucuaaguccuaugcuaacaauaaagagaaggaagugcugguccucuggggagugcaccacccuccgaacaucggcaaccagaaagcccuguaccauacagagaaugcuuacgugagcgucguuuccucucacuauagcagaaaguucacccccgaaauugccaagcggccuaaagugcgcgggcaggagggaagaaucaacuacuauuggacgcuucuggagcccggcgacacaauuaucuuugaagcgaaugggaaccucauugccccucgguacgcuuucgcccugucccgcggauuuggcagcggcaucauuaauucuaacgcucccauggauaagugugacgccaaaugccagaccccgcaaggggcgaucaauuccagccuuccuuuccagaacgugcaucccgucacaaucggagaguguccuaaguaugugagaucugccaaacugcggaugguuaccggccuccgcaauauucccagcauccaguccagagggcuguuuggagcuauugccggcuucaucgaagggggauggaccggcaugguggauggcugguacggguaucaccaccagaacgagcaaggaucuggcuacgcugccgaccaaaagagcacacagaaugccauuaacgggaucacgaauaaagucaacuccgugaucgaaaagaugaauacccaguuuacagcuguuggaaaggaguucaacaaacuggagcggcgcauggaaaaccucaauaagaaaguggaugacggcuucauugauaucuggaccuacaacgcggagcugcuuguccugcucgaaaaugagagaacacuggacuuucaugauagcaacgugaagaaucuuuaugaaaaagucaagucucagcugaagaacaaugccaaagagauugggaacggcugcuucgaguuuuaccacaaguguaaugacgaaugcauggaguccgugaaaaacggaaccuaugacuaccccaaguauagcgaagagucuaaacucaaucgggagaagaucgauggcguuaagcuggaauccauggggguguaccagauucuggcuaucuauagcacggucgccuccucucucgugcugcuuguuagccugggagccaucuccuucuggaugugcucuaacggcagccuccagugucgcauuugcaucuga

SEQ ID NO: 199868 - RNA, 1698 nt, Artificial Sequence
  derived and/or modified CDS sequence (opt5) from hemagglutinin__InfluenzaA__AET50442
augaaggugaaacugcucguccugcuuugcaccuucacagccacguacgcugacaccaucuguauuggcuaucacgccaacaauagcacagauaccguugacacagugcuggagaagaacgugaccgucacacauuccgugaaucuccuggaaaacucucacaaugggaaacuuugccugcucaagggaaucgcgccccugcagcugggcaacuguagcguugcuggguggauucucggaaauccugagugcgaacugcuuaucuccaaagagucuuggagcuacauuguggaaaagccgaaccccgagaauggcaucuguuauccugggcauuuugccgauuacgaggaacugagagagcaacucuccucugucagcuccuucgaacgguuugagaucuuccccaaggagagcucuuggccuacccacacggugaccggaguuuccgccagcugcucucauaacggcgaauccagcuuuuaucgcaaucugcuuuggcugacaggcaaaaacgggcucuaccccaaucugucuaaguccuaugcuaacaauaaagagaaggaagugcugguccucuggggagugcaccacccuccgaacauuggcaaccagaaagcccuguaccauaccgagaaugcuuacgugagcgucguuuccucucacuauagcagaaaguucacacccgaaaucgccaagcggccuaaagugcgcgggcaggagggaagaauuaacuacuauuggacccuucuggagcccggcgacacgaucauuuuugaagcgaaugggaaccucaucgccccucgguacgcuuucgcccugucccgcggauuuggcagcggcauuaucaauucuaacgcucccauggauaagugugacgccaaaugccagacaccgcaaggggcgaucaauuccagccuuccuuuccagaacgugcaucccgucaccauuggagaguguccuaaguaugugagaucugccaaacugcggaugguuacaggccuccgcaauauccccagcauucaguccagagggcuguuuggagcuaucgccggcuucauugaagggggauggaccggcaugguggauggcugguacggguaucaccaccagaacgagcaaggaucuggcuacgcugccgaccaaaagagcacccagaaugccaucaacgggaucacaaauaaagucaacuccgugauugaaaagaugaauacgcaguuuaccgcuguuggaaaggaguucaacaaacuggagcggcgcauggaaaaccucaauaagaaaguggaugacggcuucaucgauauuuggacauacaacgcggagcugcuuguccugcucgaaaaugagagaacccuggacuuucaugauagcaacgugaagaaucuuuaugaaaaagucaagucucagcugaagaacaaugccaaagagaucgggaacggcugcuucgaguuuuaccacaaguguaaugacgaaugcauggaguccgugaaaaacggaacauaugacuaccccaaguauagcgaagagucuaaacucaaucgggagaagauugauggcguuaagcuggaauccauggggguguaccagauccuggcuaucuauagcaccgucgccuccucucucgugcugcuuguuagccugggagccauuuccuucuggaugugcucuaacggcagccuccagugucgcaucugcauuuga

SEQ ID NO: 199869 - RNA, 1698 nt, Artificial Sequence
  derived and/or modified CDS sequence (opt5) from hemagglutinin__InfluenzaA__AET84163
augaaggugaaacugcucguccugcuuugcaccuucacagccacguacgcugacaccaucuguauuggcuaucacgccaacaauagcacagauaccguugacacagugcuggagaagaacgugaccgucacacauuccgugaaucuccuggaaaacucucacaaugggaaacuuugccugcucaagggaaucgcgccccugcagcugggcaacuguagcguugcuggguggauucucggaaauccugagugcgaaucccugaucucuaaagagagcugguccuacauuguggaaaagccgaaccccgagaauggcaccuguuauccugggcauuuugccgauuacgaggaacuuagagagcaacugucuagcgucuccagcuucgaacgguuugagaucuuccccaaggagucuuccuggccuaaccacacggugaccggaguuagcgccucuugcucccauaauggcgaaagcucuuuuuaucgcaaccuccuguggcuuacaggcaaaaaugggcuguaccccaaccucuccaagagcuaugcuaauaacaaagagaaggaagugcugguccuguggggagugcaccacccuccguccaucucuaaccagaaaacccucuaccauacagagaaugccuacgugagcgucguuuccagccacuauucuagaaaguucacccccgaaguggcuaagcggccuaaagugcgcgaccaggagggcagaauuaacuacuauuggacgcugcuugagcccggggauacaaucauuuuugaagccaauggaaaccugaucgcgccucgguacgccuucgcucucucccgcggcuuugggagcggaauuaucaauucuaacgcccccauggacaagugugaugcuaaaugccagaccccgcaaggcgccauuaauagcucccugccuuuccagaacguccaucccgugacaaucggcgaguguccuaaguauguuagaucugcgaaacuucggauggugaccgggcugcgcaauauccccagcauucaguccagaggacucuuuggcgccaucgcuggguucauugaaggaggcuggaccgggauggucgacggaugguacggcuaucaccaccagaacgagcaaggcagcggguacgccgcugaucagaagucuacacagaaugccaucaacggaauuacgaauaaagugaacuccguuaucgaaaagaugaauacccaguuuacagccgugggcaaggaguucaacaaacuggagcggcgcauggaaaaccugaauaagaaagucgacgauggguucaucgacauuuggaccuacaacgcugagcuccuggugcuucuggaaaaugagagaacacucgauuuucaugacagcaacgucaagaaucuguaugaaaaagugaagucucaacuuaagaacaaugcgaaagagaucggaaacggcugcuucgaguuuuaccacaaguguaaugacgaaugcauggaguccguuaaaaacgggaccuaugauuaccccaaguauagcgaagaguccaaacugaaucgggagaagauugacggcgugaagcucgaaucuaugggagucuaccagauccuggccauuuauagcacgguggcuuccucucugguucuccuggugagccuuggcgccaucuccuucuggaugugcagcaacgggucucugcagugucgcaucugcauuuga

SEQ ID NO: 199870 - RNA, 1698 nt, Artificial Sequence
  derived and/or modified CDS sequence (opt5) from hemagglutinin__InfluenzaA__AET84174
augaaggugaaacugcucguccugcuuugcaccuucacagccacguacgcugacaccaucuguauuggcuaucacgccaacaauagcacagauaccguugacacagugcuggagaagaacgugaccgucacacauuccgugaaucuccuggaaaacucucacaaugggaaacuuugccugcucaagggaaucgcgccccugcagcugggcaacuguagcguugcuggguggauucucggaaauccugagugcgaacugcuuaucuccaaagagucuuggagcuacauuguggaaaagccgaaccccgagaauggcaccuguuauccugggcauuuugccgauuacgaggaacugagagagcaacucuccucugucagcuccuucgaacgguuugagaucuuccccaaggagagcucuuggccuaaccacacggugaccggaguuuccgccagcugcucucauaauggcgaauccagcuuuuaucgcaaccugcuuuggcugacaggcaaaaaugggcucuaccccaaccugucuaaguccuaugcuaauaacaaagagaaggaagugcugguccucuggggagugcaccacccuccgaacaucguggaccagaaaacccuguacagaacagagaaugccuacgucagcguuguguccucucauuauagccggaaguucacccccgaaauugcuaagcgcccuaaagugagagaucaggagggccggaucaacuacuauuggacgcuucuggagcccggggacacaauuaucuuugaagccaauggaaaccucauugcgccucgcuacgccuucgcucugaucagaggcuuuggguccggaauuaucaauagcaacgcccccaugggcaagugugaugcuaaaugccagaccccgcaaggcgccaucaauucuucccuuccuuuccagaacguccaccccgugacaauuggggaguguccuaaguauguucggagcgcgaaacugcgcauggugaccggacucagaaauauccccucuauucagagccggggccuguuuggggccaucgcuggauucauugaaggcggguggaccggaauggucgacggcugguacggcuaucaucaccagaacgagcaaggguccggauacgccgcugaucagaagucuacacagaaugccaucaacggcaucacgaauaaagugaacagcguuauugaaaagaugaauacccaguuuacagccguggggaaggaguucaacaaacuggagcgcagaauggaaaaccucaauaagaaagucgacgauggauucaucgacauuuggaccuacaacgcugagcugcuugugcugcucgaaaaugagcggacacuggauuuucacgacuccaacgucaagaaucuuuaugaaaaaguuaagagccaacugaagaacaaugcgaaagagaucggcaacgggugcuucgaguuuuaccauaaguguaaugacgaaugcauggagucugugaaaaacggcaccuaugauuaccccaaguauuccgaagagagcaaacucaaucgcgagaagauugacggagugaagcuggaaucuaugggcgucuaccagauccuggccaucuauuccacgguggcuagcucccucguucugcuugugucucugggggccauuagcuucuggaugugcuccaacggaucucuccaguguagaaucugcauuuga

SEQ ID NO: 199871 - RNA, 1698 nt, Artificial Sequence
  derived and/or modified CDS sequence (opt5) from hemagglutinin__InfluenzaA__AET84196
augaaggugaaacugcucguccugcuuugcaccuucacagccacguacgcugacaccaucuguauuggcuaucacgccaacaauagcacagauaccguugacacagugcuggagaagaacgugaccgucacacauuccgugaaucuccuggaaaacucucacaaugggaaacuuugccugcucaagggaaucgcgccccugcagcugggcaacuguagcguugcuggguggauucucggaaauccugagugcgaaucccugaucucuaaagagagcugguccuacauuguggaaaagccgaaccccgagaauggcaccuguuauccugggcauuuugccgauuacgaggaacuuagagagcaacugucuagcgucuccagcuucgaacgguuugagaucuuccccaaggagucuuccuggccuaaccacacggugaccggaguuagcgccucuugcucccauaauggcgaaagcucuuuuuaucgcaaccuccuguggcuuacacggaaaaauggccuguaccccacccucuccaagagcuaugcuaacaauaaagagaaggaagugcugguccuguggggagugcaccacccuccguccaucaacgaccagaaaacacucuaccauaccgagaacgccuacgugucugucguuagcucccacuauagcagaaaguucacgcccgaaauugcuaagcgcccuaaagugagagaucaggaggggcggaucaauuacuauuggacacugcuugagcccggcgacaccauuaucuuugaagccaacgggaaucugauugcgccucgcuacgccuucgcucucucuagaggauuuggcuccgggaucauuaacagcucugcccccauggauaagugugacgcuaaaugccagacaccgcaaggagccaucaauagcucccugccuuuccagaacgugcaucccgucaccaucggcgaguguccuaaguaugugcggucugcgaaacuucgcaugguuaccggccugagaaauauucccagcauccagucccgggggcucuuuggagccauugcuggcuucaucgaagggggauggacaggcaugguggaugggugguacggauaucaccaccagaacgagcaaggcagcggcuacgccgcugaccagaagucuacgcagaaugccauuaacgggaucaccaauaaagucaacuccgugaucgaaaagaugaauacacaguuuaccgccguuggaaaggaguucaacaaacuggagcgcagaauggaaaaucugaacaagaaaguggaugacggcuucauugauaucuggacauacaacgcugagcuccugguccuucuggaaaaugagcggacccucgacuuucauaacagcaaugugaagaaccuguaugaaaaagucaagucucaacuuaagaauaacgcgaaagagauugggaauggaugcuucgaguuuuaccacaaguguaacgacgaaugcauggaguccgugaaaaauggcacguaugauuaccccaaguauagcgaagaguccaaacugaaccgcgagaagaucgacgggguuaagcucgaaucuaugggcguguaccagauucuggccaucuauagcacagucgcuuccucucuggugcuccugguuagccuuggagccaucuccuucuggaugugcagcaauggcucucugcaguguagaauuugcaucuga

SEQ ID NO: 199872 - RNA, 1698 nt, Artificial Sequence
  derived and/or modified CDS sequence (opt5) from hemagglutinin__InfluenzaA__AET84207
augaaggugaaacugcucguccugcuuugcaccuucacagccacguacgcugacaccaucuguauuggcuaucacgccaacaauagcacagauaccguugacacagugcuggagaagaacgugaccgucacacauuccgugaaucuccuggaaaacucucacaaugggaaacuuugccugcucaagggaaucgcgccccugcagcugggcaacuguagcguugcuggguggauucucggaaauccugagugcgaacugcuuaucuccaaagagucuuggagcuacauuguggaaaagccgaaccccgagaauggcaccuguuauccugggcauuuugccgauuacgaggaacugagagagcaacucuccucuguccccagcuucgaacgguuugagaucuucccuaaggaguccagcuggcccaaccacacggugaccggaguuucugccuccugcagccauaauggcgaaucuuccuuuuaucgcaaccugcuuuggcugacaggcaaaaaugggcucuacccuaaccugagcaagucuuaugcuaauaacaaagagaaggaagugcugguccucuggggagugcaccacccgcccuccaucaacgaccagaaaacccuguaccauacagagaaugccuacgugagcgucguuuccucucacuauagcagaaaguucaccccugaaauugcuaagcggcccaaagugcgcgaucaggagggcagaaucaacuacuauuggacgcuucuggagccucgggacacaauuaucuuugaagccaaugggaaccucauugcgccccgcuacgccuucgcucuguccagaggauuuggcagcgggaucauuaauucuaacgccccgauggauaagugugacgcuaaaugccagaccccucaaggagccaucaauuccagccuucccuuccagaacgugcauccugucacaaucggcgagugucccaaguaugugcggucugcgaaacugcgcaugguuaccggccucagaaauauucccagcauccagucccgggggcuguuuggagccauugcuggcuucaucgaagggggauggaccggcaugguggaugggugguacggauaucaccaccagaacgagcaaggcucuggcuacgccgcugaccaaaagagcacacagaaugccauuaacgggaucacgaauaaagucaacuccgugaucgaaaagaugaauacccaguuuacagccguuggaaaggaguucaacaaacuggagcgcagaauggaaaaccucaauaagaaaguggaugacggcuucauugauaucuggaccuacaacgcugagcugcuuguccugcucgaaaaugagcggacacuggacuuucaugacagcaacgugaagaaucuuuaugaaaaagucaagucucagcugaagaacaaugcgaaagagauugggaacggaugcuucgaguuuuaccacaaguguaaugaugaaugcauggaguccgugaaaaacggcaccuaugacuacccuaaguauagcgaagagucuaaacucaaucgcgagaagaucgaugggguuaagcuggaauccaugggcguguaccagauucuggccaucuauagcacggucgcuuccucucucgugcugcuuguuagccugggagccaucuccuucuggaugugcucuaacggcagccuccaguguagaauuugcaucuga

SEQ ID NO: 199873 - RNA, 1698 nt, Artificial Sequence
  derived and/or modified CDS sequence (opt5) from hemagglutinin__InfluenzaA__AET84218
augaaggugaaacugcucguccugcuuugcaccuucacagccacguacgcugacaccaucuguauuggcuaucacgccaacaauagcacagauaccguugacacagugcuggagaagaacgugaccgucacacauuccgugaaucuccuggaaaacucucacaaugggaaacuuugccugcucaagggaaucgcgccccugcagcugggcaacuguagcguugcuggguggauucucggaaauccugagugcgaacugcuuaucuccaaagagucuuggagcuacauuguggaaaagccgaaccccgagaauggcaccuguuauccugggcauuuugccgauuacgaggaacugagagagcaacucuccucugucagcuccuucgaacgguuugagaucuuccccaaggagagcucuuggccuaaccacacggugaccggaguuuccgccagcugcucucauaauggcgaauccagcuuuuaucgcaaccugcuuuggcugacaggcaaaaaugggcucuaccccaaccugucuaaguccuaugcuaauaacaaagagaaggaagugcugguccucuggggagugcaccacccuccgaacaucagcaaucagaaaacccuguaccauacagagaacgccuacguguccgucguuucuagccacuauuccagaaaguucacccccgaaauugcuaagcggccuaaagugcgcgaccaggagggcagaaucaauuacuauuggacgcuucuggagcccggggauacaauuaucuuugaagccagcggaaaccucauugcgccucgguacgccuucgcucugucucgcggcuuuggguccggaaucauuaauagcaacgcccccauggacaagugugaugcuaaaugccagaccccgcaaggcgccaucaauucuagccuuccuuuccagaacgugcaucccgucacaaucggcgaguguccuaaguaugugagauccgcgaaacugcggaugguuaccgggcuccgcaauauucccucuauccagagcagaggacuguuuggcgccauugcuggguucaucgaaggaggcuggaccgggaugguggacggaugguacggcuaucaccaccagaacgagcaaggcuccggguacgccgcugaucaaaagagcacacagaaugccauuaacggaaucacgaauaaagucaacucugugaucgaaaagaugaauacccaguuuacagccguuggcaaggaguucaacaaacuggagcggcgcauggaaaaccucaauaagaaaguggacgauggguucauugacaucuggaccuacaacgcugagcugcuuguccugcucgaaaaugagagaacacuggauuuucaugacuccaacgugaagaaucuuuaugaaaaagucaagagccagcugaagaacaaugcgaaagagauuggaaacggcugcuucgaguuuuaccacaaguguaaugacgaaugcauggagucugugaaaaacgggaccuaugauuaccccaaguauuccgaagagagcaaacucaaucgggagaagaucgacggcguuaagcuggaauccaugggaguguaccagauucuggccaucuauucuacggucgcuagcucccucgugcugcuuguuucucugggcgccaucagcuucuggaugugcuccaacgggagccuccagugucgcauuugcaucuga

SEQ ID NO: 199874 - RNA, 1698 nt, Artificial Sequence
  derived and/or modified CDS sequence (opt5) from hemagglutinin__InfluenzaA__AET84229
augaaggugaaacugcucguccugcuuugcaccuucacagccacguacgcugacaccaucuguauuggcuaucacgccaacaauagcacagauaccguugacacagugcuggagaagaacgugaccgucacacauuccgugaaucuccuggaaaacucucacaaugggaaacuuugccugcucaagggaaucgcgccccugcagcugggcaacuguagcguugcuggguggauucucggaaauccugagugcgaacugcuuaucuccaaagagucuuggagcuacauuguggaaaagccgaaccccgagaauggcaccuguuauccugggcauuuugccgauuacgaggaacugagagagcaacucuccucugucagcuccuucgaacgguuugagaucuuccccaaggagagcucuuggccuaaccacacggugaccggaguuuccgccagcugcucucauaauggcgaauccagcuuuuaucgcaaccugcuuuggcugacaggcaaaaaugggcucuaccccacccugucuaaguccuaugcuaacaauaaagagaaggaagugcugguccucuggggagugcaccacccuccgaacaucguggaccagaaaacacuguacagaaccgagaacgccuacgucagcguuguguccucucauuauagccggaaguucacgcccgaaauugcuaagcgcccuaaagugagagaucaggagggccggaucaauuacuauuggacacuucuggagcccggggacaccauuaucuuugaagccaacggaaaucucauugcgccucgcuacgccuucgcucuguccagaggcuuugggagcggaaucauuaacucuaaugcccccaugggcaagugugaugcuaaaugccagacaccgcaaggcgccaucaacuccagccuuccuuuccagaauguccaccccgugaccaucggggaguguccuaaguauguucggucugcgaaacugcgcauggugaccggacucagaaacauuccucccauccagagccggggccuguuuggggccauugcuggauucaucgaaggcggguggacaggaauggucgacggcugguacggcuaucaucaccagaaugagcaaggguccggauacgccgcugaucagaagucuacgcagaacgccauuaauggcaucaccaacaaagugaauagcguuaucgaaaagaugaacacacaguuuaccgccguggggaaggaguucaauaaacuggagcgcagaauggaaaaccucaacaagaaagucgacgauggauucauugacaucuggacauacaaugcugagcugcuugugcugcucgaaaacgagcggacccuggauuuucacgacuccaaugucaagaaccuuuaugaaaaaguuaagagccaacugaagaauaacgcgaaagagauuggcaaugggugcuucgaguuuuaccauaaguguaacgacgaaugcauggagucugugaaaaauggcacguaugauuaccccaaguauuccgaagagagcaaacucaaccgcgagaagaucgacggagugaagcuggaaucuaugggcgucuaccagauucuggccaucuauuccacaguggcuagcucccucguucugcuugugucucugggggccaucagcuucuggaugugcuccaauggaucucuccaguguagaauuugcaucuga

SEQ ID NO: 199875 - RNA, 1698 nt, Artificial Sequence
  derived and/or modified CDS sequence (opt5) from hemagglutinin__InfluenzaA__AET84240
augaaggugaaacugcucguccugcuuugcaccuucacagccacguacgcugacaccaucuguauuggcuaucacgccaacaauagcacagauaccguugacacagugcuggagaagaacgugaccgucacacauuccgugaaucuccuggaaaacucucacaaugggaaacuuugccugcucaagggaaucgcgccccugcagcugggcaacuguagcguugcuggguggauucucggaaauccugagugcgaacugcuuaucuccaaagagucuuggagcuacauuguggaaaagccgaaccccgagaauggcaccuguuauccuggguacuuugccgauuaugaggaacugagagagcaacucuccucugucagcuccuucgaacgguuugagaucuuccccaaggagagcucuuggccuaaccauacggugaccggaguuuccgccagcugcucucacaauggcgaauccagcuuuuaccgcaaccugcuuuggcugacaggcaaaaaugggcucuaucccaaccugucuaaguccuacgcuaauaacaaagagaaggaagugcugguccucuggggagugcaucacccuccgaacaucguggaccagaaaacccuguacagaacagagaaugccuaugucagcguuguguccucucacuacagccggaaguucacccccgaaauugcuaagcgcccuaaagugagagaucaggagggccggaucaacuauuacuggacgcuucuggagcccggggacacaauuaucuuugaagccaauggaaaccucauugcgccucgcuaugccuucgcucuguccagaggcuuugggagcggaaucauuaauucuaacgcccccaugggcaagugugaugcuaaaugccagaccccgcaaggcgccaucaauuccagccuuccuuuccagaacguccaucccgugacaaucggggaguguccuaaguacguucggucugcgaaacugcgcauggugaccggacucagaaauauucccagcauccagucccggggccuguuuggggccauugcuggauucaucgaaggcggguggaccggaauggucgacggcugguauggcuaccaccaucagaacgagcaagggucuggauacgccgcugaucaaaagagcacacagaaugccauuaacggcaucacgaauaaagugaacuccguuaucgaaaagaugaauacccaguuuacagccguggggaaggaguucaacaaacuggagcgcagaauggaaaaccucaauaagaaagucgacgauggauucauugacaucuggaccuauaacgcugagcugcuugugcugcucgaaaaugagcggacacuggauuuucacgacagcaacgucaagaaucuuuacgaaaaagugaagucucagcugaagaacaaugcgaaagagauuggcaacgggugcuucgaguuuuaucacaaguguaauaacgaaugcauggaguccguuaaaaauggcaccuacgacuaucccaaguacagcgaagagucuaaacucaaccgcgagaagaucgauggagugaagcuggaauccaugggcgucuaucagauucuggccaucuacagcacgguggcuuccucucucguucugcuugugagccugggggccaucuccuucuggaugugcucuaauggaagccuccaguguagaauuugcaucuga

SEQ ID NO: 199876 - RNA, 1698 nt, Artificial Sequence
  derived and/or modified CDS sequence (opt5) from hemagglutinin__InfluenzaA__AET84251
augaaggugaaacugcucguccugcuuugcaccuucacagccacguacgcugacaccaucuguauuggcuaucacgccaacaauagcacagauaccguugacacagugcuggagaagaacgugaccgucacacauuccgugaaucuccuggaaaacucucacaaugggaaacuuugccugcucaagggaaucgcgccccugcagcugggcaacuguagcguugcuggguggauucucggaaauccugagugcgaacugcuuaucuccaaagagucuuggagcuacauuguggaaaagccgaaccccgagaauggcaccuguuauccugggcauuuugccgauuacgaggaacugagagagcaacucuccucugucagcuccuucgaacgguuugagaucuuccccaaggagagcucuuggccuaaccacacggugaccggaguuuccgccagcugcucucauaauggcgaauccagcuuuuaucgcaaccugcuuuggcugacaggcaaaaaugggcucuaccccaaccugucuaaguccuaugcuaauaacaaagagaaggaagugcugguccucuggggagugcaccacccuccgaacaucgugaaucagaaaacccuguacagaacagagaacgccuacgucagcguuguguccucucauuauagccggaaguucacccccgaaauugcuaagcgcccuaaagugagagaccaggagggccggaucaauuacuauuggacgcuucuggagcccggggauacaauuaucuuugaagccaacggaaaucucauugcgccucgcuacgccuucgcucuguccagaggcuuugggagcggaaucauuaacucuaaugcccccaugggcaagugugacgcuaaaugccagaccccgcacggcgccaucaacuccugucuuccuuuccaaaauguccaucccgugacaaucggggagugcccuaaguauguucggagcgcgaaacugcgcauggugaccggacucagaaacauucccucuauccagagccggggccuguuuggggccauugcuggauucaucgaaggcggguggaccggaauggucgauggcugguacggcuaucaccaccagaaugagcagggguccggauacgccgcugaccaaaagucuacacagaacgccauuaauggcaucacgaacaaagugaauagcguuaucgaaaagaugaacacccaguuuacagccguggggaaggaguucaacaaacuggagcgcagaauggaaaaucucaacaagaaagucgaugacggauucauugauaucuggaccuacaaugcugagcugcuugugcugcucgaaaacgagcggacacuggacuuucaugauuccaaugucaagaaccuuuaugaaaaaguuaagagccagcugaagaauaacgcgaaagagauuggcaauggguguuucgaguuuuaccacaagugcaacgacgaaugcauggagucugugaaaaauggcaccuaugacuaccccaaguauuccgaagagagcaaacucaacaaggagaagaucgauggagugaaacuggaaucuaugggcgucuaccaaauucuggccaucuauuccacgguggcuagcucccucguucugcuugugucucugggggccaucagcuucuggauguguuccaauggaucucuccagugccgcauuuguaucuga

SEQ ID NO: 199877 - RNA, 1698 nt, Artificial Sequence
  derived and/or modified CDS sequence (opt5) from hemagglutinin__InfluenzaA__AET84262
augaaggugaaacugcucguccugcuuugcaccuucacagccacguacgcugacaccaucuguauuggcuaucacgccaacaauagcacagauaccguugacacagugcuggagaagaacgugaccgucacacauuccgugaaucuccuggaaaacucucacaaugggaaacuuugccugcucaagggaaucgcgccccugcagcugggcaacuguagcguugcuggguggauucucggaaauccugagugcgaacugcuuaucuccaaagagucuuggagcuacauuguggaaaagccgaaccccgagaauggcaccuguuauccugggcauuuugccgauuacgaggaacugagagagcaacucuccucugucagcuccuucgaacgguuugagaucuuccccaaggagagcucuuggccuaaccacacggugaccggaguuuccgccagcugcucucauaauggcgaauccagcuuuuaucgcaaccugcuuuggcugacaggcaaaaaugggcucuaccccaaccugucuaaguccuaugcuaauaacaaagagaaggaagugcugguccucuggggagugcaccacccuccgaacaucguggaccagaaaacccuguacagaacagagaaugccuacgucagcguuguguccucucauuauagccggaaguucacccccgaaauugcuaagcgcccuaaagugagagaucaggagggccggaucaacuacuauuggacgcuucuggagcccggggacacaauuaucuuugaagccaauggaaaccucauugcgccucgcuacgccuucgcucuguccagaggcuuugggagcggaaucauuaauucuaacgcccccauggauaagugugacgcuaaaugccagaccccgcacggcgccaucaauuccugucuuccuuuccaaaacguccaucccgugacaaucggcgagugcccuaaguauguucggagcgcgaaacugcgcauggugaccgggcucagaaauauucccucuauccagagccggggacuguuuggcgccauugcuggguucaucgaaggaggcuggaccgggauggucgauggaugguacggcuaucaccaccagaacgagcagggcuccggguacgccgcugaccaaaagucuacacagaaugccauuaacggaaucacgaauaaagugaacagcguuaucgaaaagaugaauacccaguuuacagccgugggcaaggaguucaacaaacuggagcgcagaauggaaaaccucaauaagaaagucgaugacggguucauugauaucuggaccuacaacgcugagcugcuugugcugcucgaaaaugagcggacacuggacuuucaugacuccaacgucaagaaucuuuaugaaaaaguuaagagccagcugaagaacaaugcgaaagagauuggaaacggcuguuucgaguuuuaccacaagugcaaugaugaaugcauggagucugugaaaaacgggaccuaugacuaccccaaguauuccgaagagagcaaacucaaucgcgagaagaucgauggcgugaagcuggaaucuaugggagucuaccaaauucuggccaucuauuccacgguggcuagcucccucguucugcuugugucucugggcgccaucagcuucuggauguguuccaacgggucucuccagugcagaauuuguaucuga

SEQ ID NO: 199878 - RNA, 1698 nt, Artificial Sequence; identical to SEQ ID NO: 199805
  derived and/or modified CDS sequence (opt5) from hemagglutinin__InfluenzaA__AET84284

SEQ ID NO: 199879 - RNA, 1698 nt, Artificial Sequence
  derived and/or modified CDS sequence (opt5) from hemagglutinin__InfluenzaA__AET84306
augaaggugaaacugcucguccugcuuugcaccuucacagccacguacgcugacaccaucuguauuggcuaucacgccaacaauagcacagauaccguugacacagugcuggagaagaacgugaccgucacacauuccgugaaucuccuggaaaacucucacaaugggaaacuuugccugcucaagggaaucgcgccccugcagcugggcaacuguagcguugcuggguggauucucggaaauccugagugcgaacugcuuaucuccaaagagucuuggagcuacauuguggaaaagccgaaccccgagaauggcaccuguuauccugggcauuuugccgauuacgaggaacugagagagcaacucuccucugucagcuccuucgaacgguuugagaucuuccccaaggagagcucuuggccuaaccacacggugaccggaguuuccgccagcugcucucauaauggcgaauccagcuuuuaucgcaaccugcuuuggcugacaggcaaaaaugggcucuaccccaaccugucuaaguccuaugcuaauaacaaagagaaggaagugcugguccucuggggagugcaccacccuccgaacaucggcaaucagaaagcccuguaccauaccgagaacgcuuacgugagcgucguuuccucucacuauagcauuaaguucacacccgaaaucgccaagagaccuaaagugcgggaccaggaggggcgcauuaauuacuauuggacccuucuggagcccggagauacgaucauuuuugaagcgaacggcaaucucaucgccccuagauacgcuuucgcccugucccggggguuuggaagcggcauuaucaacucuaaugcucccauggacaagugugaugccaaaugccagacaccgcaaggcgcgaucaacuccagccuuccuuuccagaaugugcaucccgucaccauuggggaguguccuaaguaugugcgcucugccaaacugagaaugguuacaggacuccggaacauccccagcauucagucccgcggccuguuuggggcuaucgccggauucauugaaggcggguggaccggaaugguggacggcugguacggcuaucaccaccagaaugagcaagggucuggauacgcugccgaucaaaagagcacccagaacgccaucaauggcaucacaaacaaagucaauuccgugauugaaaagaugaacacgcaguuuaccgcuguugggaaggaguucaacaaacuggagagacggauggaaaaucucaacaagaaaguggacgauggauucaucgacauuuggacauacaaugcggagcugcuuguccugcucgaaaacgagcgcacccuggauuuucaugacagcaaugugaagaaccuuuaugaaaaagucaagucucagcugaagaauaacgccaaagagaucggcaaugggugcuucgaguuuuaccacaaguguaacgacgaaugcauggaguccgugaaaaauggcacauaugauuaccccaaguauagcgaagagucuaaacucaacagagagaagauugacggaguuaagcuggaauccaugggcguguaccagauccuggcuaucuauagcaccgucgccuccucucucgugcugcuuguuagccugggggccauuuccuucuggaugugcucuaauggaagccuccagugucggaucugcauuuga

SEQ ID NO: 199880 - RNA, 1698 nt, Artificial Sequence
  derived and/or modified CDS sequence (opt5) from hemagglutinin__InfluenzaA__AET84339
augaaggugaaacugcucguccugcuuugcaccuucacagccacguacgcugacaccaucuguauuggcuaucacgccaacaauagcacagauaccguugacacagugcuggagaagaacgugaccgucacacauuccgugaaucuccuggaaaacucucacaaugggaaacuuugccugcucaagggaaucgcgccccugcagcugggcaacuguagcguugcuggguggauucucggaaauccugagugcgaacugcuuaucuccaaagagucuuggagcuacauuguggaaaagccgaaccccgagaauggcaccuguuauccugggcauuuugccgauuacgaggaacugagagagcaacucuccucugucagcuccuucgaacgguuugagaucuuccccaaggagagcucuuggccuaaccacacggugaccggaguuuccgccagcugcucucauaauggcgaacgcuccuuuuauagaaaccugcuuuggcugacaggcaaaaaugggcucuaccccaaccugagcaagucuuaugcuaauaacaaagagaaggaagugcugguccucuggggagugcaccacccuccgaacaucggcaaucagaaaacccuguaccauacagagaacgccuacguguccgucguuagcucccacuauucucggaaguucacccccgaaauugcuaagcgcccuaaagugagagaccaggaggggcggaucaauuacuauuggacgcuucuggagcccggagauacaauuaucuuugaagccaacggcaaucucauugcgccucgcuacgccuucgcucugagcagaggguuuggauccggcaucauuaacagcaaugcccccauggacaagugugaugcuaaaugccagaccccgcaaggcgccaucaacucuucccuuccuuuccagaaugugcaucccgucacaaucggggaguguccuaaguaugugcggagcgcgaaacugcgcaugguuaccggacucagaaacauucccucuauccagagccggggccuguuuggggccauugcuggauucaucgaaggcggguggaccggaaugguggacggcugguacggcuaucaccaccagaaugagcaaggguccggauacgccgcugaucagaagucuacacagaacgccauuaauggcaucacgaacaaagucaauagcgugaucgaaaagaugaacacccaguuuacagccguugggaaggaguucaacaaacuggagcgcagaauggaaaaucucaacaagaaaguggacgauggauucauugacaucuggaccuacaaugcugagcugcuuguccugcucgaaaacgagcggacacuggauuuucaugacuccaaugugaagaaccuuuaugaaaaagucaagagccaacugaagaauaacgcgaaagagauuggcaaugggugcuucgaguuuuaccacaaguguaacgacgaaugcauggagucugugaaaaauggcaccuaugauuaccccaaguauuccgaagagagcaaacucaaccgcgagaagaucgacggaguuaagcuggaaucuaugggcguguaccagauucuggccaucuauuccacggucgcuagcucccucgugcugcuuguuucucugggggccaucagcuucuggaugugcuccaauggaucucuccaguguagaauuugcaucuga

SEQ ID NO: 199881 - RNA, 1698 nt, Artificial Sequence; identical to SEQ ID NO: 199880
  derived and/or modified CDS sequence (opt5) from hemagglutinin__InfluenzaA__AET84361

SEQ ID NO: 199882 - RNA, 1698 nt, Artificial Sequence
  derived and/or modified CDS sequence (opt5) from hemagglutinin__InfluenzaA__AET84372
augaaggugaaacugcucguccugcuuugcaccuucacagccacguacgcugacaccaucuguauuggcuaucacgccaacaauagcacagauaccguugacacagugcuggagaagaacgugaccgucacacauuccgugaaucuccuggaaaacucucacaaugggaaacuuugccugcucaagggaaucgcgccccugcagcugggcaacuguagcguugcuggguggauucucggaaauccugagugcgaacugcuuaucuccaaagagucuuggagcuacauuguggaaaagccgaaccccgagaauggcaccuguuauccugggcauuuugccgauuacgaggaacugagagagcaacucuccucugucagcuccuucgaacgguuugagaucuuccccaaggagagcucuuggccuaaccacacggugaccggaguuuccgccagcugcucucauaauggcgaacgcuccuuuuauagaaaccugcuuuggcugacaggcaaaaaugggcucuaccccaaccugagcaagucuuaugcuaauaacaaagagaaggaagugcugguccucuggggagugcaccacccuccgaacaucggcgaccagaaaacccuguaccauacagagaaugccuacguguccgucguuagcucccacuauucucggaaguucacccccgaaauugcuaagcgcccuaaagugagagaucaggaggggcggaucaacuacuauuggacgcuucuggagcccggagacacaauuaucuuugaagccaauggcaaccucauugcgccucgcuacgccuucgcucugagcagaggguuuggauccggcaucauuaauagcaacgcccccauggauaagugugacgcuaaaugccagaccccgcaaggcgccaucaauucuucccuuccuuuccagaacgugcaucccgucacaaucggggaguguccuaaguaugugcggagcgcgaaacugcgcaugguuaccggacucagaaauauucccucuauccagagccggggccuguuuggggccauugcuggauucaucgaaggcggguggaccggaaugguggauggcugguacggcuaucaccaccagaacgagcaaggguccggauacgccgcugaccagaagucuacacagaaugccauuaacggcaucacgaauaaagucaacagcgugaucgaaaagaugaauacccaguuuacagccguugggaaggaguucaacaaacuggagcgcagaauggaaaaccucaauaagaaaguggaugacggauucauugauaucuggaccuacaacgcugagcugcuuguccugcucgaaaaugagcggacacuggacuuucaugacuccaacgugaagaaucuuuaugaaaaagucaagagccaacugaagaacaaugcgaaagagauuggcaacgggugcuucgaguuuuaccacaaguguaaugaugaaugcauggagucugugaaaaacggcaccuaugacuaccccaaguauuccgaagagagcaaacucaaucgcgagaagaucgauggaguuaagcuggaaucuaugggcguguaccagauucuggccaucuauuccacggucgcuagcucccucgugcugcuuguuucucugggggccaucagcuucuggaugugcuccaacggaucucuccaguguagaauuugcaucuga

SEQ ID NO: 199883 - RNA, 1698 nt, Artificial Sequence
  derived and/or modified CDS sequence (opt5) from hemagglutinin__InfluenzaA__AET84394
augaaggugaaacugcucguccugcuuugcaccuucacagccacguacgcugacaccaucuguauuggcuaucacgccaacaauagcacagauaccguugacacagugcuggagaagaacgugaccgucacacauuccgugaaucuccuggaaaacucucacaaugggaaacuuugccugcucaagggaaucgcgccccugcagcugggcaacuguagcguugcuggguggauucucggaaauccugagugcgaacugcuuaucuccaaagagucuuggagcuacauuguggaaaagccgaaccccgagaauggcaccuguuauccugggcauuuugccgauuacgaggaacugagagagcaacucuccucugucagcuccuucgaacgguuugagaucuuccccaaggagagcucuuggccuaaccacacggugaccggaguuuccgccagcugcucucauaauggcgaacgcuccuuuuauagaaaccugcuuuggcugacaggcaaaaaugggcucuaccccaaccugagcaagucuuaugcuaauaacaaagagaaggaagugcugguccucuggggagugcaccacccuccggacaucggcaaccagaaaacccuguaccauacagagaaugccuacguguccgucguuagcucccacuauucucggaaguucacccccgaaauugcuaagcgcccuaaagugagagaucaggaggggcggaucaacuacuauuggacgcuucuggagcccggagacacaauuaucuuugaagccaauggcaaccucauugcgccucgcuacgccuucgcucugagcagaggguuuggauccggcaucauuaauagcaacgcccccauggauaagugugacgcuaaaugccagaccccgcaaggcgccaucaauucuucccuuccuuuccagaacgugcaucccgucacaaucggggaguguccuaaguaugugcggagcgaaaaacugcgcaugguuaccggacucagaaauauucccucuauccagagccggggccuguuuggggcgauugccggauucaucgagggcggguggaccggaaugguggauggcugguacggcuaucaccaccagaacgaacaaggguccggauacgcugccgaccagaagucuacacagaaugcuauuaacggcaucacgaauaaagucaacagcgugaucgagaagaugaauacccaguuuacagccguugggaaggaguucaacaaacuggaacgcagaauggagaaccucaauaagaaaguggaugacggauucauugauaucuggaccuacaacgccgaacugcuuguccugcucgagaaugaacggacacuggacuuucaugacuccaacgugaagaaucuuuaugagaaagucaagagccaacugaagaacaaugcuaaagagauuggcaacgggugcuucgaauuuuaccacaaguguaaugaugagugcauggaaucugugaaaaacggcaccuaugacuaccccaaguauuccgaggagagcaaacucaaucgcgaaaagaucgauggaguuaagcuggagucuaugggcguguaccagauucuggcgaucuauuccacggucgccagcucccucgugcugcuuguuucucugggggcuaucagcuucuggaugugcuccaacggaucucuccaguguagaauuugcaucuga

SEQ ID NO: 199884 - RNA, 1698 nt, Artificial Sequence; identical to SEQ ID NO: 197588
  derived and/or modified CDS sequence (opt5) from hemagglutinin__InfluenzaA__AET84405

SEQ ID NO: 199885 - RNA, 1698 nt, Artificial Sequence
  derived and/or modified CDS sequence (opt5) from hemagglutinin__InfluenzaA__AET84416
augaaggugaaacugcucguccugcuuugcaccuucacagccacguacgcugacaccaucuguauuggcuaucacgccaacaauagcacagauaccguugacacagugcuggagaagaacgugaccgucacacauuccgugaaucuccuggaaaacucucacaaugggaaacuuugccugcucaagggaaucgcgccccugcagcugggcaacuguagcguugcuggguggauucucggaaauccugagugcgaacugcuuaucuccaaagagucuuggagcuacauuguggaaaagccgaaccccgagaauggcaccuguuauccugggcauuuugccgauuacgaggaacugagagagcaacucuccucugucagcuccuucgaacgguuugagaucuuccccaaggagagcucuuggccuaaccacacggugaccggaguuuccgccagcugcucucauaauggcgaacgcuccuuuuauagaaaccugcuuuggcugacaggcaaaaaugggcucuaccccacccugagcaagucuuaugcuaacaauaaagagaaggaagugcugguccucuggggagugcaccacccuccggacaucggcgaucagaaaacacuguaccauaccgagaacgccuacguguccgucguuagcucccacuauucucggaaguucacgcccgaaauugcuaagcgcccuaaagugagagaccaggaggggcggaucaacuacuauuggacacuucuggagcccggagauaccauuaucuuugaagccaauggcaaccucauugcgccucgcuacgccuucgcucugagcagaggguuuggauccggcaucauuaauagcaacgcccccauggacaagugugaugcuaaaugccagacaccgcaaggcgccaucaauucuucccuuccuuuccagaacgugcaucccgucaccaucggggaguguccuaaguaugugcggagcgcgaaacugcgcaugguuaccggacucagaaauauucccucuauccagagccggggccuguuuggggccauugcuggauucaucgaaggcggguggacaggaaugguggacggcugguacggcuaucaccaccagaacgagcaaggguccggauacgccgcugaucagaagucuacgcagaaugccauuaacggcaucaccaauaaagucaacagcgugaucgaaaagaugaauacacaguuuaccgccguugggaaggaguucaacaaacuggagcgcagaauggaaaaucucaacaagaaaguggacgauggauucauugacaucuggacauacaacgcugagcugcuuguccugcucgaaaaugagcggacccuggacuuucaugauuccaacgugaagaaucuuuaugaaaaagucaagagccaacugaagaacaaugcgaaagagauuggcaacgggugcuucgaguuuuaccacaaguguaaugacgaaugcauggagucugugaaaaacggcacguaugauuaccccaaguauuccgaagagagcaaacucaaucgcgagaagaucgacggaguuaagcuggaaucuaugggcguguaccagauucuggccaucuauuccacagucgcuagcucccucgugcugcuuguuucucugggggccaucagcuucuggaugugcuccaacggaucucuccaguguagaauuugcaucuga

SEQ ID NO: 199886 - RNA, 1698 nt, Artificial Sequence
  derived and/or modified CDS sequence (opt5) from hemagglutinin__InfluenzaA__AET84427
augaaggugaaacugcucguccugcuuugcaccuucacagccacguacgcugacaccaucuguauuggcuaucacgccaacaauagcacagauaccguugacacagugcuggagaagaacgugaccgucacacauuccgugaaucuccuggaaaacucucacaaugggaaacuuugccugcucaagggaaucgcgccccugcagcugggcaacuguagcguugcuggguggauucucggaaauccugagugcgaacugcuuaucuccaaagagucuuggagcuacauuguggaaaagccgaaccccgagaauggcaccuguuauccugggcauuuugccgauuacgaggaacugagagagcaacucuccucugucagcuccuucgaacgguuugagaucuuccccaaggagagcucuuggccuaaccacacggugaccggaguuuccgccagcugcucucauaauggcgaauccagcuuuuaucgcaaccugcuuuggcugacaggcaaaaaugggcucuaccccaaccugucuaaguccuaugcuaauaacaaagagaaggaagugcugguccucuggggagugcaccacccuccgaacaucggcaaucagaaaacccuguaccauacagagaacgccuacgugagcgucguuuccucucacuauagcagaaaguucacccccgaaauugcuaagcggccuaaagugcgcgaccaggaggggagaaucaauuacuauuggacgcuucuggagcccggagauacaauuaucuuugaagccaacggcaaucucauugcgccucgguacgccuucgcucugucccgcggguuuggaagcggcaucauuaacucuaaugcccccauggacaagugugaugcuaaaugccagaccccgcaaggcgccaucaacuccagccuuccuuuccagaaugugcaucccgucacaaucggggaguguccuaaguaugugagaucugcgaaacugcggaugguuaccggacuccgcaacauucccagcauccaguccagaggccuguuuggggccauugcuggauucaucgaaggcggguggaccggaaugguggacggcugguacggcuaucaccaccagaaugagcaagggucuggauacgccgcugaucaaaagagcacacagaacgccauuaauggcaucacgaacaaagucaauuccgugaucgaaaagaugaacacccaguuuacagccguugggaaggaguucaacaaacuggagcggcgcauggaaaaucucaacaagaaaguggacgauggauucauugacaucuggaccuacaaugcugagcugcuuguccugcucgaaaacgagagaacacuggauuuucaugacagcaaugugaagaaccuuuaugaaaaagucaagucucagcugaagaauaacgcgaaagagauuggcaaugggugcuucgaguuuuaccacaaguguaacgacgaaugcauggaguccgugaaaaauggcaccuaugauuaccccaaguauagcgaagagucuaaacucaaccgggagaagaucgacggaguuaagcuggaauccaugggcguguaccagauucuggccaucuauagcacggucgcuuccucucucgugcugcuuguuagccugggggccaucuccuucuggaugugcucuaauggaagccuccagugucgcauuugcaucuga

SEQ ID NO: 199887 - RNA, 1698 nt, Artificial Sequence
  derived and/or modified CDS sequence (opt5) from hemagglutinin__InfluenzaA__AET84438
augaaggugaaacugcucguccugcuuugcaccuucacagccacguacgcugacaccaucuguauuggcuaucacgccaacaauagcacagauaccguugacacagugcuggagaagaacgugaccgucacacauuccgugaaucuccuggaaaacucucacaaugggaaacuuugccugcucaagggaaucgcgccccugcagcugggcaacuguagcguugcuggguggauucucggaaauccugagugcgaacugcuuaucuccaaagagucuuggagcuacauuguggaaaagccgaaccccgagaauggcaccuguuauccugggcauuuugccgauuacgaggaacugagagagcaacucuccucugucagcuccuucgaacgguuugagaucuuccccaaggagagcucuuggccuaaccacacggugaccggaguuuccgccagcugcucucauaauggcgaauccagcuuuuaucgcaaccugcuuuggcugacaggcaaaaaugggcucuaccccaaccugucuaaguccuaugcuaauaacaaagagaaggaagugcugguccucuggggagugcaccacccuccgaacaucggcgugcagaaaacccuguacaauacagagaacgccuacgucagcguuguguccucucauuauagcagaaaguucacccccgaaauugcuaagcggccuaaagugcgcgaccaggaggggagaaucaauuacuauuggacgcuucuggagcccggagauacaauuauguuugaagccaacggcaaucucaucgcgccucgguacgccuucgcucugucccgcggguuuggaagcggcauuaucaacucuaaugcccccauggacaagugugaugcuaaaugccagaccccgcaaggcgccauuaacuccagccuuccuuuccagaauguccaccccgugacaaucggggaguguccuaaguauguuagaucugcgaaacugcggauggugaccggacuccgcaacauccccagcauucaguccagaggccuguuuggggccaucgcuggauucauugaaggcggguggaccggaauggucgacggcugguacggcuaucaucaccagaaugagcaagggucuggauacgccgcugaucagaaguccacacagaacgccaucaauggcauuacgaacaaagugaauagcguuaucgaaaagaugaacacccaguuuacagccguggggaaggaguucaacaaacuggagcggcgcauggaaaaucucaacaagaaagucgacgauggauucaucgacauuuggaccuacaaugcugagcugcuugugcugcucgaaaacgagagaacacuggauuuucacgacagcaaugucaagaaccuuuaugaaaaagugaagucucaacugaagaauaacgcgaaagagaucggcaaugggugcuucgaguuuuaccauaaguguaacgacgaaugcauggaguccguuaaaaauggcaccuaugauuaccccaaguauagcgaagagucuaaacucaaccgggagaagauugacggagugaagcuggaauccaugggcgucuaccagauccuggccauuuauagcacgguggcuuccucucucguucugcuugugagccugggggccaucuccuucuggaugugcucuaauggaagccuccagugucgcaucugcauuuga

SEQ ID NO: 199888 - RNA, 1698 nt, Artificial Sequence
  derived and/or modified CDS sequence (opt5) from hemagglutinin__InfluenzaA__AET84449
augaaggugaaacugcucguccugcuuugcaccuucacagccacguacgcugacaccaucuguauuggcuaucacgccaacaauagcacagauaccguugacacagugcuggagaagaacgugaccgucacacauuccgugaaucuccuggaagauucucacaacgggaaacuuugccugcucaagggaaucgcgccccugcagcugggcaauuguagcguugcuggguggauucucggaaacccugagugcgaacugcuuaucuccagagagucuuggagcuacauuguggaaaaaccgaaucccgagaacggcaccuguuauccugggcauuuugccgacuacgaggaacugcgggagcaacucuccucugucagcuccuucgaacgcuuugagaucuuccccaaggagagcucuuggccuaaucacacgaccacaggaguguccgccagcugcucucauaacggcgaauccagcuuuuauaagaaucugcuuuggcugaccggcaaaaacgggcucuaccccaaucugucuaaguccuaugcuaacaauaaagagaaggaaguucuggugcucuggggaguccaccacccuccgaacaucggcgaucagagagcccuguaccauacagagaacgcuuacgugagcguggucuccucucacuauagccggaaauucacccccgaaauugccaagcgcccuaagguuagagaccaggaggggcggaucaauuacuauuggacgcuucuggagcccggagauacaauuaucuuugaagcgaacggcaaucucauugccccucgcuacgcuuucgcccuguccagaggguuuggaagcggcaucauuaacucuaaugcucccauggacggcugugaugccaaaugccagaccccgcaaggggcgaucaacuccagccuuccuuuccagaaugugcaucccgugacaaucggagaguguccuaaguauguccggucugccaaacugcgcauggugaccggccucagaaacauucccagcauccagucccgggggcuguuuggagcuauugccggcuucaucgaagggggauggaccggcaugguugacggcugguacggguaucaccaccagaaugagcaaggaucuggcuacgcugccgaucagaaguccacacagaacgccauuaaugggaucacgaacaaagugaauagcgucaucgaaaagaugaacacccaguuuacagcugugggaaaagaguucaauaagcuggagcgcagaauggaaaaccucaacaagaaaguugacgauggcuucauugacaucuggaccuacaaugcggagcugcuugugcugcucgaaaacgagcggacacuggacuuucaugauagcaaugucaagaaccuuuaugaaaaagugaagucucaacugaaaaauaacgccaaggagauugggaauggcugcuucgaguuuuaccacaaguguaacgacgaaugcauggaguccgucaaaaauggaaccuaugauuaccccaaguauagcgaagagucuaaacucaaccgcgagaagaucgacggcgugaaacuggaauccauggggguuuaccagauucuggcuaucuauagcacgguggccuccucucucguccugcuugugagccugggagccaucuccuucuggaugugcucuaauggcagccuccaguguagaauuugcaucuga

SEQ ID NO: 199889 - RNA, 1701 nt, Artificial Sequence
  derived and/or modified CDS sequence (opt5) from hemagglutinin__InfluenzaA__AET98600
augaagaccaucauugcccugagcuacauccucugccugguguucgcucagaaacuucccggcaacgacaauuccacagccacgcugugucucgggcaccaugcggucccuaacggaaccauuguuaagacaaucaccaaugaucaaauugaggugacaaacgcuaccgaacuggugcagucuagcuccacaggcgagaucugcgacucuccgcaccagauccuugauggggaaaauuguacccugauugacgcccuccugggagauccccagugcgacggcuuucaaaacaaaaagugggaucuguucgucgagagaagcaaagccuauuccaauuguuacccuuaugacgugcccgauuacgcuucucuccggagccugguugccuccagcgggacgcuugaauuuaacaaugagucuuucaacuggaccggagugacacagaauggcaccuccagcgcuugcauccgcagaucuaacaauuccuuuuucagccggcugaacuggcucacacaucugaauuuuaaguauccugcccuuaacgucaccgugcccaacaaugagcaguucgacaagcuguacauuuggggcguucaccauccugggacggauaaagaccagaucuuucucuaugcgcaagccucuggacgcauuacaguguccaccaagagaagccagcaggcugucaucccgaacauuggcucccggccccgcgugagaaauaucccuucucggaucagcauuuacuggacaaucgugaaacccggggauauucugcugaucaacuccaccggaaaucucauugccccucgcggcuacuucaagaucagaagcgggaaaucuuccaucaugcggagcgacgcucccauuggaaaguguaacucugaaugcaucaccccgaauggcagcauuccuaacgacaagcccuuucagaaugucaaccgcaucacauauggcgccuguccuagauacguuaaacaauccacgcugaagcuggcgaccgggaugcggaaugugcccgagaaacagacacgcggaauuuucggcgccaucgcuggguuuaucgaaaacggaugggagggcaugguggaugggugguauggauucagacaccaaaauucugagggccggggccaggccgcugaccuuaagagcacccaggccgccauugaucagaucaacgggaaacucaauagacugauuggaaagacaaacgaaaaauuccaccagaucgagaaggaauuuuccgaggucgaaggccgcauucaagaccuugagaaguacguggaggauaccaaaaucgaccuguggagcuauaacgcugaacuccugguugcgcuggagaaucagcauacgauugaucucacagacucugaaaugaacaagcuguucgagaaaaccaagaaacagcuucgggaaaaugccgaggauauggggaacggaugcuuuaccaucuaccacaagugugacaaugcuugcaucggcuccauuagaaacgggacauaugaucauaauguguaccgcgacgaggcccugaacaaucgguuccagaucaagggcgucgaacucaaaagcggauacaaggacuggauucuguggaucucuuuugccauuuccugcuuccuucuguguguggcucuccugggcuuuaucaugugggccugccaaaaagggaacaucagauguaauauuugcaucuga

SEQ ID NO: 199890 - RNA, 1701 nt, Artificial Sequence
  derived and/or modified CDS sequence (opt5) from hemagglutinin__InfluenzaA__AEV76874
augaaggccauccuggugguccuccuguacaccuucgcuacagccaacgcggacacgcuuugcauuggcuaucacgcuaauaacagcaccgauacaguugacaccgugcuggagaaaaaugugacagucacccauuccgugaaccuccuggaagauaagcacaaugggaaacuuuguaagcugagaggaguugcuccccuccaucugggcaaaugcaacaucgccggguggauucugggaaauccugagugugaaucuuuuagcacagccuccucuuggagcuacaucguggagaccuccucuagcgacaacggcacgugcuauccgggggauuucauugacuacgaagaacuccgggagcagcuguccagcgucucuuccuuugaacgcuucgagaucuuucccaagaccagcucuuggccuaaucacgauuccaacaagggagugacagccgcuuguccccaugccggcgcgaaaggcuucuauaagaaucuuaucuggcugguuaaaaaggggaacagcuacccuaaacucucuaaguccuauauuaaugacaagggaaaagaagugcugguccuuuggggcauccaccaccccagcaccacagccgaucaacagucccuguaccagaacgcugacaccuacguguuuguggggacgucuagauauagcaagaaauucaauccugagauugagauccggccgaagguccgcgaucaggaaggaagaaugaacuacuauuggacacucguugagcccggcgacaaaauuaccuuugaagccacagggaaccugguggugccucgguacgcuuucgccauggagcgcaaugcgggauccggcaucauuaucagcgauacccccguccaugacugcaacaccacaugucaaacgccuaagggcgccaucaauaccucucugcccuuucagaacauucacccgaucacaauugggaaaugcccuaaguaugugaaguccaccaaacucagacuggcuacaggacuucggaauguucccagcauccagucucgcggccuguucggggccauugcuggauuuaucgaaggcggguggaccggaaugguggacggcugguacggcuaucaucaccagaacgagcaagggagcggauacgccgccgaucucaaguccacgcagaaugcuaucgacaaaauuacaaacaaggucaauucugugaucgagaaaaugaacacccaguucaccgcgguuggcaaggaguucaaucaccuggagaagagaauugaaaaccuuaauaaaaagguggaugacggguuucuggauaucuggacauacaacgccgagcuccugguccugcucgaaaaugagcggacccuggacuaucaugauagcaacgugaaaaaccuuuacgagaagguccgcaaucagcugaaaaacaaugcuaaggaaauuggaaacggcuguuucgaguuuuaucacaagugcgacaauacauguauggaauccgugaaaaacgggacguacgauuauccuaaguacagcgaggaagccaaacucaauagagaggagaucgacggcguuaagcuggaaucuacccggaucuaucaaauucuugccaucuacuccacaguggcuagcucucugguccucgugguuucccugggagccauuagcuucuggaugugcuccaacggcucucugcagugccgcaucuguauuuga

SEQ ID NO: 199891 - RNA, 1701 nt, Artificial Sequence; identical to SEQ ID NO: 194741
  derived and/or modified CDS sequence (opt5) from hemagglutinin__InfluenzaA__AEW10574

SEQ ID NO: 199892 - RNA, 1701 nt, Artificial Sequence; identical to SEQ ID NO: 194741
  derived and/or modified CDS sequence (opt5) from hemagglutinin__InfluenzaA__AEW10584

SEQ ID NO: 199893 - RNA, 1701 nt, Artificial Sequence; identical to SEQ ID NO: 195094
  derived and/or modified CDS sequence (opt5) from hemagglutinin__InfluenzaA__AEW10594

SEQ ID NO: 199894 - RNA, 1701 nt, Artificial Sequence; identical to SEQ ID NO: 195094
  derived and/or modified CDS sequence (opt5) from hemagglutinin__InfluenzaA__AEW10604

SEQ ID NO: 199895 - RNA, 1701 nt, Artificial Sequence; identical to SEQ ID NO: 195094
  derived and/or modified CDS sequence (opt5) from hemagglutinin__InfluenzaA__AEW10614

SEQ ID NO: 199896 - RNA, 1701 nt, Artificial Sequence; identical to SEQ ID NO: 195094
  derived and/or modified CDS sequence (opt5) from hemagglutinin__InfluenzaA__AEW10624

SEQ ID NO: 199897 - RNA, 1701 nt, Artificial Sequence; identical to SEQ ID NO: 194741
  derived and/or modified CDS sequence (opt5) from hemagglutinin__InfluenzaA__AEW10634

SEQ ID NO: 199898 - RNA, 1701 nt, Artificial Sequence; identical to SEQ ID NO: 194728
  derived and/or modified CDS sequence (opt5) from hemagglutinin__InfluenzaA__AEW10644

SEQ ID NO: 199899 - RNA, 1701 nt, Artificial Sequence
  derived and/or modified CDS sequence (opt5) from hemagglutinin__InfluenzaA__AEW10654
augaaggccauccuggugguccuccuguacaccuucgcuacagccaacgcggacacgcuuugcauuggcuaucacgcuaauaacagcaccgauacaguugacaccgugcuggagaagaaugugacagucacccauuccgugaaccuccuggaagauaagcacaaugggaaacuuuguaagcugagaggaguugcuccccuccaucugggcaaaugcaacaucgccggguggauucugggaaauccugagugugaaucucucagcacagccuccucuuggagcuacaucguggagaccuccucuagcgacaacggcacgugcuauccgggggauuuuauugacuacgaagaacugcgggagcagcuuuccagcgucucuuccuucgaacgcuuugagaucuuccccaagaccagcucuuggccuaaucacgauuccaacaagggagugacagccgcuuguccccaugccggcgcgaaaucuuuuuauaagaaucugaucuggcucguuaaaaagggcaacagcuacccuaaacugaauaaguccuauauuaacgacaaggggaaagaagugcuuguccuguggggaauccaccaccccagcaccuccgccgaucaacagucucucuaccagaaugcugacgccuacguguucgugggcagcuccagauauagcaagaaauuuaagccugagauugcuauccggccgaaaguccgcgaucaggaggggagaaugaacuacuauuggacacugguugaacccggagacaagauuaccuucgaggccacgggcaaccugguggugccucgguacgcguuugccauggaacgcaaugcugggucuggaaucauuaucuccgauacacccguccaugacugcaacaccacaugucaaaccccuaaaggcgccaucaauaccagccuccccuuccagaacauucacccgaucacaauuggcaagugcccuaaguaugugaaaucuacgaagcugagacuugcuaccgggcugcggaauguucccagcauccagucccgcggacucuuuggcgccauugccggguucaucgagggaggcuggacagggaugguggacggaugguacggcuaucaucaccagaacgaacaaggcucuggguacgcugcggaucugaaaagcacccagaaugccaucgacgagauuacaaacaaggucaauuccgugaucgagaaaaugaacacccaguuuacggcuguuggaaaggaguucaaucaccuugagaagagaauugaaaaccugaauaaaaagguggaugacggcuuccucgauaucuggacauacaacgccgagcugcugguccuccuggaaaaugagcggacccuugacuaucaugauagcaacgugaaaaaccuguacgagaagguccgcucucagcucaaaaauaacgccaaggaaauugggaauggauguuuugaguucuaucacaagugcgacaacaccuguauggaauccgugaaaaauggcacauacgauuauccuaaguacagcgaggaagcuaaacugaacagagaggagaucgacgggguuaaacuugaaucuacccggaucuaucaaauucuggccaucuacuccacaguggcgagcucccucguccuggugguuucucugggcgcuauuagcuuuuggaugugcuccaauggaucucuccagugccgcaucuguauuuga

SEQ ID NO: 199900 - RNA, 1701 nt, Artificial Sequence; identical to SEQ ID NO: 194728
  derived and/or modified CDS sequence (opt5) from hemagglutinin__InfluenzaA__AEW10664

SEQ ID NO: 199901 - RNA, 1701 nt, Artificial Sequence
  derived and/or modified CDS sequence (opt5) from hemagglutinin__InfluenzaA__AEW10674
augaaggccauccuggugguccuccuguacaccuucgcuacagccaacgcggacacgcuuugcauuggcuaucacgcuaauaacagcaccgauacaguugacaccgugcuggagaaaaaugugacagucacccauuccgugaaccuccuggaagauaagcacaaugggaaacuuuguaagcugagaggaguugcuccccuccaucugggcaaaugcaacaucgccggguggauucugggaaauccugagugugaaucucucagcacagccuccucuuggagcuacaucguggagaccuccucuagcgacaacggcacgugcuauccgggggauuuuauugacuacgaagaacugcgggagcagcuuuccagcgucucuuccuucgaacgcuuugagaucuuccccaagaccagcucuuggccuaaucacgauuccaacaagggagugacagccgcuuguccccaugccgaagcgaaaucuuuuuauaagaaucugaucuggcucguuaaaaagggcaacagcuacccuaaacuguccaagagcuauauuaaugacaagggcaaagaggugcuuguccugugggggauccaccaccccuccaccucugccgaucaacagagccucuaccagaacgcugacgccuacguguucgugggaacauccagauauagcaagaaauuuaagccugagauugcuauccggccgaaaguccgcgaucaggaaggcagaaugaauuacuauuggacccugguugagcccggggacaagauuacguucgaagccacaggaaaccugguggugccucgguacgcguuugccauggagcgcaacgcuggcucugggaucauuaucuccgauacccccguccaugacugcaauacaaccugucaaaccccuaaaggagccaucaacacaagccuccccuuccagaauauucacccgaucacgauuggcaagugcccuaaguaugugaaaucuaccaagcugagacuugcuacaggccugcggaacguucccagcauccagucccgcgggcucuuuggagccauugccggcuucaucgaagggggauggaccggcaugguggacgggugguacggauaucaucaccagaaugagcaaggcucuggcuacgcugcggaucugaaaagcacacagaacgccaucgacgagauuaccaauaaggucaacuccgugaucgaaaagaugaauacgcaguuuacagcuguugggaaggaguucaaccaccuugaaaagagaauugagaaucugaacaaaaagguggaugacggauuccucgauaucuggaccuacaaugccgaacugcugguccuccuggagaacgagcggacccuugacuaucaugauagcaaugugaaaaaccuguacgaaaagguccgcucucagcucaaaaacaaugccaaggagauuggcaacggguguuuugaguucuaucacaagugcgacaauacauguauggaguccgugaaaaacggaaccuacgauuauccuaaguacagcgaagaggcuaaacugaauagagaggaaaucgacggcguuaaacuugagucuacacggaucuaucaaauucuggccaucuacuccacgguggcgagcucccucguccuggugguuucucugggggcuauuagcuuuuggaugugcuccaacggcucucuccagugccgcaucuguauuuga

SEQ ID NO: 199902 - RNA, 1701 nt, Artificial Sequence; identical to SEQ ID NO: 194741
  derived and/or modified CDS sequence (opt5) from hemagglutinin__InfluenzaA__AEW10684

SEQ ID NO: 199903 - RNA, 1701 nt, Artificial Sequence; identical to SEQ ID NO: 194728
  derived and/or modified CDS sequence (opt5) from hemagglutinin__InfluenzaA__AEW10694

SEQ ID NO: 199904 - RNA, 1701 nt, Artificial Sequence; identical to SEQ ID NO: 194728
  derived and/or modified CDS sequence (opt5) from hemagglutinin__InfluenzaA__AEW10704

SEQ ID NO: 199905 - RNA, 1701 nt, Artificial Sequence; identical to SEQ ID NO: 199899
  derived and/or modified CDS sequence (opt5) from hemagglutinin__InfluenzaA__AEW10724

SEQ ID NO: 199906 - RNA, 1701 nt, Artificial Sequence; identical to SEQ ID NO: 194741
  derived and/or modified CDS sequence (opt5) from hemagglutinin__InfluenzaA__AEW10734

SEQ ID NO: 199907 - RNA, 1701 nt, Artificial Sequence
  derived and/or modified CDS sequence (opt5) from hemagglutinin__InfluenzaA__AEW10744
augaaggccauccuggugguccuccuguacaccuucgcuacagccaacgcggacacgcuuugcauuggcuaucacgcuaauaacagcaccgauacaguugacaccgugcuggagaagaaugugacagucacccauuccgugaacauccucgaagauaagcacaaugggaaacuguguaaacuuagaggaguugcuccccugcaucucggcaagugcaacauugccggguggauccugggaaauccugagugugaaucucugagcacagccuccucuuggagcuacauuguggagaccuccucuagcgacaacggcacgugcuauccgggggauuuuaucgacuacgaagaacuccgggagcagcuguccagcgucucuuccuucgaacgcuuugagaucuuccccaagaccagcucuuggccuaaucacgauuccaacaagggagugacagccgcuuguccccaugccggcgcgaaaucuuuuuauaagaaucuuauuuggcugguuaaaaagggcaacagcuacccuaaacucuccaagagcuauaucaaugacaaggggaaagaagugcugguccuuuggggcauucaccaccccuccaccucugccgaucaacagagccuguaccagaacgcugacgccuacguguucgugggauccagcagauauucuaagaaauuuaagccugagaucgcuauucggccgaaaguccgcgaucaggaggggagaaugaauuacuauuggacacucguugaacccggagacaagaucaccuucgaggccacgggcaaccugguggugccucgguacgcguuugccauggaacgcaacgcuggguccggaauuaucaucagcgauacacccguccaugacugcaauaccacaugucaaaccccuaaaggcgccauuaacaccucucugcccuuccagaauauccacccgauuacaaucggcaagugcccuaaguaugugaaaagcacgaagcucagacuggcuaccgggcuucggaacguucccuccauucugucucgcggacucuuuggcgccaucgccggguucaucgagggaggcuggacagggaugguggacggaugguacggcuaucaucaccagaaugaacagggcagcggguacgcugcggaucugaaauccacccaaaacgccauugacgagaucacaaauaaggucaacagcgugauugagaaaaugaauacccaguuuacggcuguuggaaaggaguucaaccaccuugagaagagaaucgaaaaucugaacaaaaagguggaugacggcuuccucgauauuuggacauacaaugccgagcugcugguccuccuggaaaacgagcggacccuugacuaucaugauucuaaugugaaaaaccuguacgagaagguccgcucccagcucaaaaacaaugccaaggaaaucgggaacggauguuuugaguucuaucacaagugcgacaauaccuguauggaaagcgugaaaaacggcacauacgauuauccuaaguacucugaggaagcuaaacugaauagagaggagaucgacgggguuaaacuugaauccacccggauuuaucagauccuggccauuuacagcacaguggcguccucucucguccuggugguuagccugggcgcuaucuccuuuuggaugugcucuaacggaagccuccaaugccgcauuuguaucuga

SEQ ID NO: 199908 - RNA, 1701 nt, Artificial Sequence; identical to SEQ ID NO: 199907
  derived and/or modified CDS sequence (opt5) from hemagglutinin__InfluenzaA__AEW10754

SEQ ID NO: 199909 - RNA, 1701 nt, Artificial Sequence
  derived and/or modified CDS sequence (opt5) from hemagglutinin__InfluenzaA__AEW10764
augaaggccauccuggugguccuccuguacaccuucgcuacagccaacgcggacacgcuuugcauuggcuaucacgcuaauaacagcaccgauacaguugacaccgugcuggagaaaaaugugacagucacccauuccgugaacauccucgaagauaagcacaaugggaaacuguguaaacuuagaggaguugcuccccugcaucucggcaagugcaacauugccggguggauccugggaaauccugagugugaaucucugagcacagccuccucuuggagcuacauuguggagaccuccucuagcgacaacggcacgugcuauccgggggauuuuaucgacuacgaagaacuccgggagcagcuguccagcgucucuuccuucgaacgcuuugagaucuuccccaagaccagcucuuggccuaaucacgauuccaacaagggagugacagccgcuuguccccaugccggcgcgaaaucuuuuuauaagaaucuuauuuggcugguuaaaaagggcaacagcuacccuaaacucuccaagagcuauaucaaugacaaggggaaagaagugcugguccuuuggggcauucaccaccccuccaccucugccgaucaacagagccuguaccagaacgcuaaugccuacguguucgugggauccagcagauauucuaagaaauuuaagccugagaucgcuauucggccgaaaguccgcgaccaggaggggagaaugaacuacuauuggacacucguugaacccggagauaagaucaccuucgaggccacgggcaaccugguggugccucgguacgcguuugccauggaacgcaaugcuggguccggaauuaucaucagcgacacacccguccaugauugcaacaccacaugucaaaccccuaaaggcgccauuaauaccucucugcccuuccagaacauccacccgauuacaaucggcaagugcccuaaguaugugaaaagcacgaagcucagacuggcuaccgggcuucggaauguucccuccauucagucucgcggacuguuuggcgccaucgccggguucaucgagggaggcuggacagggaugguggacggaugguacggcuaucaucaccagaacgaacaaggcagcggguacgcugcggaccucaaauccacccagaaugccauugaugagaucacaaacaaggucaauagcgugauugagaaaaugaacacccaguuuacggcuguuggaaaggaguucaaucaccuggagaagagaaucgaaaaccuuaauaaaaagguggacgauggcuuccuggacauuuggacauacaacgccgagcuccugguccugcucgaaaaugagcggacccuggauuaucaugacucuaacgugaaaaaccuuuacgagaagguccgcucccagcugaaaaauaacgccaaggaaaucgggaauggauguuuugaguucuaucacaagugcgauaacaccuguauggaaagcgugaaaaauggcacauacgacuauccuaaguacucugaggaagcuaaacucaacagagaggagaucgaugggguuaagcuggaauccacccggauuuaucaaauccuugccauuuacagcacaguggcguccucucugguccucgugguuagccugggcgcuaucuccuuuuggaugugcucuaauggaagccugcagugccgcauuuguaucuga

SEQ ID NO: 199910 - RNA, 1701 nt, Artificial Sequence; identical to SEQ ID NO: 194985
  derived and/or modified CDS sequence (opt5) from hemagglutinin__InfluenzaA__AEW10774

SEQ ID NO: 199911 - RNA, 1701 nt, Artificial Sequence; identical to SEQ ID NO: 194728
  derived and/or modified CDS sequence (opt5) from hemagglutinin__InfluenzaA__AEW10784

SEQ ID NO: 199912 - RNA, 1701 nt, Artificial Sequence; identical to SEQ ID NO: 194728
  derived and/or modified CDS sequence (opt5) from hemagglutinin__InfluenzaA__AEW10794

SEQ ID NO: 199913 - RNA, 1701 nt, Artificial Sequence; identical to SEQ ID NO: 194921
  derived and/or modified CDS sequence (opt5) from hemagglutinin__InfluenzaA__AEW10804

SEQ ID NO: 199914 - RNA, 1701 nt, Artificial Sequence; identical to SEQ ID NO: 194739
  derived and/or modified CDS sequence (opt5) from hemagglutinin__InfluenzaA__AEW10814

SEQ ID NO: 199915 - RNA, 1701 nt, Artificial Sequence; identical to SEQ ID NO: 194832
  derived and/or modified CDS sequence (opt5) from hemagglutinin__InfluenzaA__AEW10824

SEQ ID NO: 199916 - RNA, 1701 nt, Artificial Sequence; identical to SEQ ID NO: 194728
  derived and/or modified CDS sequence (opt5) from hemagglutinin__InfluenzaA__AEW10834

SEQ ID NO: 199917 - RNA, 1701 nt, Artificial Sequence; identical to SEQ ID NO: 194921
  derived and/or modified CDS sequence (opt5) from hemagglutinin__InfluenzaA__AEW10844

SEQ ID NO: 199918 - RNA, 1701 nt, Artificial Sequence
  derived and/or modified CDS sequence (opt5) from hemagglutinin__InfluenzaA__AEW10854
augaaggccauccuggugguccuccuguacaccuucgcuacagccaacgcggacacgcuuugcauuggcuaucacgcuaauaacagcaccgauacaguugacaccgugcuggagaaaaaugugacagucacccauuccgugaacauccucgaagauaagcacaaugggaaacuguguaaacuuagaggaguugcuccccugcaucucggcaagugcaacauugccggguggauccugggaaauccugagugugaaucucugagcacagccuccucuuggagcuacauuguggagaccuccucuagcgacaacggcacgugcuauccgggggauuuuaucgacuacgaagaacuccgggagcagcuguccagcgucucuuccuucgaacgcuuugagaucuuccccaagaccagcucuuggccuaaucacgauuccaacaagggagugacagccgcuuguccccaugccggcgcgaaaucuuuuuauaagaaucuuauuuggcugguuaaaaagggcaacagcuacccuaaacucuccaagagcuauaucaaugacaaggggaaagaagugcugguccuuuggggcauucaccaccccuccaccucugccgaucaacagagccuguaccagaacgcugacgccuacguguucgugggauccagcagauauucuaagaaauuuaagccugagaucacaauucggccgaaaguccgcgaucaggaggggagaaugaauuacuauuggacccucguugaacccggagacaagaucacguucgaggcuacaggcaaccugguggugccucgguacgccuuugcgauggaacgcaacgccggguccggaauuaucaucagcgauacccccguccaugacugcaauacaaccugucaaaccccuaaaggcgcuauuaacacaucucugcccuuccagaauauccacccgauuacgaucggcaagugcccuaaguaugugaaaagcaccaagcucagacuggccacagggcuucggaacguucccuccauucagucucgcggacuguuuggcgcuaucgccggguucaucgagggaggcuggaccgggaugguggacggaugguacggcuaucaucaccagaaugaacaaggcagcggguacgccgcugaucucaaauccacacagaacgcgauugacgagaucaccaauaaggucaacagcgugauugagaaaaugaauacgcaguuuacagccguuggaaaggaguucaaccaccuggagaagagaaucgaaaaucuuaacaaaaagguggaugacggcuuccuggauauuuggaccuacaaugcugagcuccugguccugcucgaaaacgagcggacccuggacuaucaugauucuaaugugaaaaaccuuuacgagaagguccgcucccagcugaaaaacaaugccaaggaaaucgggaacggauguuuugaguucuaucacaagugcgacaauacauguauggaaagcgugaaaaacggcaccuacgauuauccuaaguacucugaggaagccaaacucaauagagaggagaucgacgggguuaagcuggaauccacacggauuuaucaaauccuugcuauuuacagcacgguggccuccucucugguccucgugguuagccugggcgcgaucuccuuuuggaugugcucuaacggaagccugcagugccgcauuuguaucuga

SEQ ID NO: 199919 - RNA, 1701 nt, Artificial Sequence; identical to SEQ ID NO: 194921
  derived and/or modified CDS sequence (opt5) from hemagglutinin__InfluenzaA__AEW10864

SEQ ID NO: 199920 - RNA, 1701 nt, Artificial Sequence; identical to SEQ ID NO: 194921
  derived and/or modified CDS sequence (opt5) from hemagglutinin__InfluenzaA__AEW10874

SEQ ID NO: 199921 - RNA, 1701 nt, Artificial Sequence; identical to SEQ ID NO: 194921
  derived and/or modified CDS sequence (opt5) from hemagglutinin__InfluenzaA__AEW10884

SEQ ID NO: 199922 - RNA, 1701 nt, Artificial Sequence; identical to SEQ ID NO: 194728
  derived and/or modified CDS sequence (opt5) from hemagglutinin__InfluenzaA__AEW10894

SEQ ID NO: 199923 - RNA, 1701 nt, Artificial Sequence; identical to SEQ ID NO: 194921
  derived and/or modified CDS sequence (opt5) from hemagglutinin__InfluenzaA__AEW10904

SEQ ID NO: 199924 - RNA, 1701 nt, Artificial Sequence; identical to SEQ ID NO: 194921
  derived and/or modified CDS sequence (opt5) from hemagglutinin__InfluenzaA__AEW10914

SEQ ID NO: 199925 - RNA, 1701 nt, Artificial Sequence; identical to SEQ ID NO: 194728
  derived and/or modified CDS sequence (opt5) from hemagglutinin__InfluenzaA__AEW10924

SEQ ID NO: 199926 - RNA, 1701 nt, Artificial Sequence; identical to SEQ ID NO: 194728
  derived and/or modified CDS sequence (opt5) from hemagglutinin__InfluenzaA__AEW10934

SEQ ID NO: 199927 - RNA, 1701 nt, Artificial Sequence; identical to SEQ ID NO: 194921
  derived and/or modified CDS sequence (opt5) from hemagglutinin__InfluenzaA__AEW10944

SEQ ID NO: 199928 - RNA, 1701 nt, Artificial Sequence; identical to SEQ ID NO: 194741
  derived and/or modified CDS sequence (opt5) from hemagglutinin__InfluenzaA__AEW10954

SEQ ID NO: 199929 - RNA, 1701 nt, Artificial Sequence; identical to SEQ ID NO: 194741
  derived and/or modified CDS sequence (opt5) from hemagglutinin__InfluenzaA__AEW10964

SEQ ID NO: 199930 - RNA, 1701 nt, Artificial Sequence; identical to SEQ ID NO: 194921
  derived and/or modified CDS sequence (opt5) from hemagglutinin__InfluenzaA__AEW10974

SEQ ID NO: 199931 - RNA, 1701 nt, Artificial Sequence; identical to SEQ ID NO: 194741
  derived and/or modified CDS sequence (opt5) from hemagglutinin__InfluenzaA__AEW10984

SEQ ID NO: 199932 - RNA, 1701 nt, Artificial Sequence; identical to SEQ ID NO: 194741
  derived and/or modified CDS sequence (opt5) from hemagglutinin__InfluenzaA__AEW10994

SEQ ID NO: 199933 - RNA, 1701 nt, Artificial Sequence; identical to SEQ ID NO: 194741
  derived and/or modified CDS sequence (opt5) from hemagglutinin__InfluenzaA__AEW11004

SEQ ID NO: 199934 - RNA, 1701 nt, Artificial Sequence; identical to SEQ ID NO: 194741
  derived and/or modified CDS sequence (opt5) from hemagglutinin__InfluenzaA__AEW11014

SEQ ID NO: 199935 - RNA, 1701 nt, Artificial Sequence; identical to SEQ ID NO: 194741
  derived and/or modified CDS sequence (opt5) from hemagglutinin__InfluenzaA__AEW11024

SEQ ID NO: 199936 - RNA, 1701 nt, Artificial Sequence; identical to SEQ ID NO: 194741
  derived and/or modified CDS sequence (opt5) from hemagglutinin__InfluenzaA__AEW11034

SEQ ID NO: 199937 - RNA, 1701 nt, Artificial Sequence; identical to SEQ ID NO: 194921
  derived and/or modified CDS sequence (opt5) from hemagglutinin__InfluenzaA__AEW11044

SEQ ID NO: 199938 - RNA, 1701 nt, Artificial Sequence; identical to SEQ ID NO: 194741
  derived and/or modified CDS sequence (opt5) from hemagglutinin__InfluenzaA__AEW11054

SEQ ID NO: 199939 - RNA, 1701 nt, Artificial Sequence; identical to SEQ ID NO: 194728
  derived and/or modified CDS sequence (opt5) from hemagglutinin__InfluenzaA__AEW11064

SEQ ID NO: 199940 - RNA, 1701 nt, Artificial Sequence; identical to SEQ ID NO: 194728
  derived and/or modified CDS sequence (opt5) from hemagglutinin__InfluenzaA__AEW11074

SEQ ID NO: 199941 - RNA, 1701 nt, Artificial Sequence
  derived and/or modified CDS sequence (opt5) from hemagglutinin__InfluenzaA__AEW11084
augaaggccauccuggugguccuccuguacaccuucgcuacagccaacgcggacacgcuuugcauuggcuaucacgcuaauaacagcaccgauacaguugacaccgugcuggagaaaaaugugacagucacccauuccgugaaccuccuggaagauaagcacaaugggaaacuuuguaagcugagaggaguugcuccccuccaucugggcaaaugcaacaucgccggguggauucugggaaauccugagugugaaucucucagcacagccuccucuuggagcuacaucguggagaccuccucuagcgacaacggcacgugcuauccgggggauuuuauugacuacgaagaacugcgggagcagcuuuccagcgucucuuccuucgaacgcuuugagaucuuccccaagaccagcucuuggccuaaucacgauuccaacaagggagugacagccgcuugucugcaugccggcgcgaaaucuuuuuauaagaaucucaucuggcugguuaaaaagggcaacagcuaccccaaacuuuccaagagcuauauuaaugacaaggggaaagaagugcugguccucuggggaauccaccacccuuccaccucugccgaucaacagagccuguaccagaacgcugacgccuacguguucgugggcuccagcagauauucuaagaaauuuaagcccgagauugcuauccggccuaaaguccgcgaucaggaggggagaaugaauuacuauuggacacugguugaaccgggagacaagauuaccuucgaggccacgggcaaccucguggugccccgguacgcguuugccauggaacgcaacgcuggguccggaaucauuaucagcgauacaccuguccaugacugcaauaccacaugucaaacccccaaaggcgccaucaacaccucucugccuuuccagaauauucaccccaucacaauuggcaagugcccgaaguaugugaaaagcacgaaacuuagacuggcuaccgggcuccggaacguuccuuccauccagucucgcggacuguuuggcgccauugccggguucaucgagggaggcuggacagggaugguggacggaugguacggcuaucaucaccagaaugaacaaggcagcggguacgcugcggaucuuaaguccacccagaacgccaucgacgagauuacaaauaaggucaacagcgugaucgagaaaaugaauacccaguuuacggcuguuggaaaggaguucaaccaccuggagaagagaauugaaaaucucaacaaaaagguggaugacggcuuccuggauaucuggacauacaaugccgagcugcucguccugcuugaaaacgagcggacccuggacuaucaugauucuaaugugaaaaaccucuacgagaagguccgcucccagcugaaaaacaaugccaaggaaauugggaacggauguuuugaguucuaucacaagugcgacaauaccuguauggaaagcgugaaaaacggcacauacgauuaucccaaguacucugaggaagcuaaacuuaauagagaggagaucgacgggguuaagcuggaauccacccggaucuaucaaauucucgccaucuacagcacaguggcguccucucugguccuggugguuagccucggcgcuauuuccuuuuggaugugcucuaacggaagccugcagugccgcaucuguauuuga

SEQ ID NO: 199942 - RNA, 1701 nt, Artificial Sequence; identical to SEQ ID NO: 194728
  derived and/or modified CDS sequence (opt5) from hemagglutinin__InfluenzaA__AEW11094

SEQ ID NO: 199943 - RNA, 1701 nt, Artificial Sequence; identical to SEQ ID NO: 194728
  derived and/or modified CDS sequence (opt5) from hemagglutinin__InfluenzaA__AEW11104

SEQ ID NO: 199944 - RNA, 1701 nt, Artificial Sequence; identical to SEQ ID NO: 194741
  derived and/or modified CDS sequence (opt5) from hemagglutinin__InfluenzaA__AEW11114

SEQ ID NO: 199945 - RNA, 1701 nt, Artificial Sequence
  derived and/or modified CDS sequence (opt5) from hemagglutinin__InfluenzaA__AEW11124
augaaggccauccuggugguccuccuguacaccuucgcuacagccaacgcggacacgcuuugcauuggcuaucacgcuaauaacagcaccgauacaguugacaccgugcuggagaagaaugugacagucacccauuccgugaaccuccuggaagauaagcacaaugggaaacuuuguaagcugagaggaguugcuccccuccaucugggcaaaugcaacaucgccggguggauucugggaaauccugagugugaaucucucagcacagccuccucuuggagcuacaucguggagaccuccucuagcgacaacggcacgugcuauccgggggauuuuauugacuacgaagaacugcgggagcagcuuuccagcgucucuuccuucgaacgcuuugagaucuuccccaagaccagcucuuggccuaaucacgauuccaacaagggagugacagccgcuuguccccaugccggcgcgaaaucuuuuuauaagaaucugaucuggcucguuaaaaagggcaacagcuacccuaaacuguccaagagcuauauuaaugacaaggggaaagaagugcuuguccuguggggaauccaccaccccuccaccucugccgaucaacagagccucuaccagaacgcugacgccuacguguucgugggcuccagcagauauucuaagaaauuuaagccugagauugcuauccggccgaaaguccgcgaucaggaggggagaaugaauuacuauuggacacugguugaacccggagacaagauuaccuucgaggccacgggcaaccugguggugccucgguacgcguuugccauggaacgcaacgcuggguccggaaucauuaucagcgauacacccguccaugacugcaauaccacaugucaaaccccuaaaggcgccaucaacaccucucuccccuuccagaauauucacccgaucacaauuggcaagugcccuaaguuugugaaaagcacgaagcugagacuugcuaccgggcugcggaacguucccuccauccagucucgcggacucuucggcgccauugccggguuuaucgagggaggcuggacagggaugguggacggaugguauggcuaccaucaccagaaugaacaaggcagcggguaugcugcggaucugaaauccacccagaacgccaucgacgagauuacaaauaaggucaacagcgugaucgagaaaaugaauacccaguucacggcuguuggaaaggaguucaaccaccuugagaagagaauugaaaaucugaacaaaaagguggaugacggcuuucucgauaucuggacauacaaugccgagcugcugguccuccuggaaaacgagcggacccuugacuaccaugauucuaaugugaaaaaccuguaugagaagguccgcucccagcucaaaaacaaugccaaggaaauugggaacggauguuucgaguuuuaccacaagugcgacaauaccuguauggaaagcgugaaaaacggcacauaugauuacccuaaguauucugaggaagcuaaacugaauagagaggagaucgacgggguuaaacuugaauccacccggaucuaccaaauucuggccaucuauagcacaguggcguccucucucguccuggugguuagccugggcgcuauuuccuucuggaugugcucuaacggaagccuccagugccgcaucuguauuuga

SEQ ID NO: 199946 - RNA, 1701 nt, Artificial Sequence
  derived and/or modified CDS sequence (opt5) from hemagglutinin__InfluenzaA__AEW11134
augaaggccauccuggugguccuccuguacaccuucgcuacagccaacgcggacacgcuuugcauuggcuaucacgcuaauaacagcaccgauacaguugacaccgugcuggagaaaaaugugacagucacccauuccgugaacauccucgaagauaagcacaaugggaaacuguguaaacuuagaggaguugcuccccugcaucucggcaagugcaacauugccggguggauccugggaaauccugagugugaaucucugagcacagccuccucuuggagcuacauuguggagaccuccucuagcgacaacggcacgugcuauccgggggauuuuaucgacuacgaagaacuccgggagcagcuguccagcgucucuuccuucgaacgcuuugagaucuuccccaagaccagcucuuggccuaaucacgauuccaacaagggagugacagccgcuuguccccaugccggcgcgaaaucuuuuuauaagaaucuuauuuggcugguuaaaaagggcaacagcuacccuaaacucuccaagagcuauaucaaugacaaggggaaagaagugcugguccuuuggggcauucaccaccccuccaccucugccgaucaacagagccuguaccagaacgcugacgccuacguguucgugggauccagcagauauucuaagaaauuuaagccugagaucgcuauucggccgaaaguccgcgaucaggaggggagaaugaauuacuauuggacacucguugaacccggagacaagaucaccuucgaggccacgggcaaccugguggugccucgguacgcguuugccauggaacgcaacgcuggguccggaauuaucaucagcgauacacccguccaugacugcaauaccacaugucaaaccccuaaaggcgccauuaacaccucucugcccuuccagaauauccacccgauuacaaucggcaagugcccuaaguaugugaaaagcacgaagcucagacuggcuaccgggcuucggaacguucccuccauucagucucgcggacuguuuggcgccaucgccggguucaucgagggaggcuggacagggaugguggacggaugguacggcuaucaucaccagaaugaacaaggcagcggguacgcugcggaucucaaauccacccagaacgccauugacgagaucacaaauaaggucaacagcgugauugagaaaaugaauacccaguuuacggcuguuggaaaggaguucaaccaccuggagaagagaaucgaaaaucuuaacaaaaagguggaugacggcuuccuggauauuuggacauacaaugccgagcuccugguccugcucgaaaacgagcggacccuggacuaucaugauucuaaugugaaaaaccuuuacgagaagguccgcucccagcugaaaaacaaugccaaggaaaucgggaacggauguuuugaguucuaucacaagugcgacaauaccuguauggaaagcgugaaaaacggcacauacgauuauccuaaguacucugaggaagcuaaacucaauaaggaggagaucgacgggguuaaacuggaauccaccagaauuuaucaaauccuugccauuuacagcacaguggcguccucucugguccucgugguuagccugggcgcuaucuccuuuuggaugugcucuaacggaagccugcagugccggauuuguaucuga

SEQ ID NO: 199947 - RNA, 1701 nt, Artificial Sequence; identical to SEQ ID NO: 194741
  derived and/or modified CDS sequence (opt5) from hemagglutinin__InfluenzaA__AEW11144

SEQ ID NO: 199948 - RNA, 1701 nt, Artificial Sequence; identical to SEQ ID NO: 194741
  derived and/or modified CDS sequence (opt5) from hemagglutinin__InfluenzaA__AEW11154

SEQ ID NO: 199949 - RNA, 1701 nt, Artificial Sequence; identical to SEQ ID NO: 199941
  derived and/or modified CDS sequence (opt5) from hemagglutinin__InfluenzaA__AEW11164

SEQ ID NO: 199950 - RNA, 1701 nt, Artificial Sequence; identical to SEQ ID NO: 199941
  derived and/or modified CDS sequence (opt5) from hemagglutinin__InfluenzaA__AEW11174

SEQ ID NO: 199951 - RNA, 1701 nt, Artificial Sequence; identical to SEQ ID NO: 194741
  derived and/or modified CDS sequence (opt5) from hemagglutinin__InfluenzaA__AEW11184

SEQ ID NO: 199952 - RNA, 1701 nt, Artificial Sequence; identical to SEQ ID NO: 194728
  derived and/or modified CDS sequence (opt5) from hemagglutinin__InfluenzaA__AEW11194

SEQ ID NO: 199953 - RNA, 1701 nt, Artificial Sequence; identical to SEQ ID NO: 194741
  derived and/or modified CDS sequence (opt5) from hemagglutinin__InfluenzaA__AEW11204

SEQ ID NO: 199954 - RNA, 1701 nt, Artificial Sequence; identical to SEQ ID NO: 194741
  derived and/or modified CDS sequence (opt5) from hemagglutinin__InfluenzaA__AEW11214

SEQ ID NO: 199955 - RNA, 1701 nt, Artificial Sequence; identical to SEQ ID NO: 194921
  derived and/or modified CDS sequence (opt5) from hemagglutinin__InfluenzaA__AEW11224

SEQ ID NO: 199956 - RNA, 1701 nt, Artificial Sequence; identical to SEQ ID NO: 194741
  derived and/or modified CDS sequence (opt5) from hemagglutinin__InfluenzaA__AEW11234

SEQ ID NO: 199957 - RNA, 1701 nt, Artificial Sequence; identical to SEQ ID NO: 194741
  derived and/or modified CDS sequence (opt5) from hemagglutinin__InfluenzaA__AEW11244

SEQ ID NO: 199958 - RNA, 1701 nt, Artificial Sequence
  derived and/or modified CDS sequence (opt5) from hemagglutinin__InfluenzaA__AEW11254
augaaggccauccuggugguccuccuguacaccuucgcuacagccaacgcggacacgcuuugcauuggcuaucacgcuaauaacagcaccgauacaguugacaccgugcuggagaaaaaugugacagucacccauuccgugaaccuccuggaagauaagcacaaugggaaacuuuguaagcugagaggaguugcuccccuccaucugggcaaaugcaacaucgccggguggauucugggaaauccugagugugaaucucucagcacagccuccucuuggagcuacaucguggagaccuccucuagcgacaacggcacgugcuauccgggggauuuuauugacuacgaggaacugcgggagcagcuuuccagcgucucuuccuucgaacgcuuugagaucuuccccaagaccagcucuuggccuaaucacgauuccaacaagggagugacagccgcuugucugcaugccggcgcgaaaucuuuuuauaagaaucucaucuggcugguuaaaaagggcaacagcuaccccaaacuuuccaagagcuauauuaaugacaaggggaaagaagugcugguccucuggggaauccaccacccuuccgccucugcugaucaacagagccuguaccagaacgccgacgcuuacguguucgugggcuccagcagauauucuaagaaagucaagcccgagauugccauccggccuaaaguucgcgaucaggaggggagaaugaauuacuauuggacccugguggaaccgggagacaagauuacauuugaggcgaccggcaaccucguggucccccgguacgccuucgcuauggaacgcaacgccggguccggaaucauuaucagcgauacgccugugcaugacugcaauacaaccugucaaacacccaaaggcgcuaucaacaccucucugccuuuucagaauauucaccccaucaccauuggcaagugcccgaaguauguuaaaagcacaaaacuuagacuggccacggggcuccggaacgugccuuccauccagucucgcggacuguucggcgccauugcuggguuuaucgagggaggcuggaccgggauggucgacggaugguacggcuaucaucaccagaaugaacaaggcagcggguacgcggccgaucuuaaguccacacagaacgcuaucgacgagauuaccaauaaggugaacagcguuaucgagaaaaugaauacacaguucaccgccgugggaaaggaauuuaaccaccuggagaagagaauugaaaaucucaacaaaaaggucgaugacggcuuccuggauaucuggacguacaaugccgagcugcucgugcugcuugaaaacgagcggacacuggacuaucaugauucuaaugucaaaaaccucuacgagaaggugcgcucccagcugaaaaacaaugcuaaggaaauugggaacggauguuucgaguuuuaucacaagugcgacaauaccuguauggaaagcguuaaaaacggcaccuacgauuaucccaaguacucugaggaagccaaacuuaauagagaggagaucgacggggugaagcuggaauccacacggaucuaucaaauucucgcgaucuacagcaccgucgcuuccucucuggugcugguugugagccucggcgccauuuccuucuggaugugcucuaacggaagccugcagugccgcaucuguauuuga

SEQ ID NO: 199959 - RNA, 1701 nt, Artificial Sequence; identical to SEQ ID NO: 194728
  derived and/or modified CDS sequence (opt5) from hemagglutinin__InfluenzaA__AEW11263

SEQ ID NO: 199960 - RNA, 1701 nt, Artificial Sequence; identical to SEQ ID NO: 194728
  derived and/or modified CDS sequence (opt5) from hemagglutinin__InfluenzaA__AEW11273

SEQ ID NO: 199961 - RNA, 1701 nt, Artificial Sequence; identical to SEQ ID NO: 194728
  derived and/or modified CDS sequence (opt5) from hemagglutinin__InfluenzaA__AEW11283

SEQ ID NO: 199962 - RNA, 1701 nt, Artificial Sequence; identical to SEQ ID NO: 194728
  derived and/or modified CDS sequence (opt5) from hemagglutinin__InfluenzaA__AEW11293

SEQ ID NO: 199963 - RNA, 1701 nt, Artificial Sequence
  derived and/or modified CDS sequence (opt5) from hemagglutinin__InfluenzaA__AEW11303
augaaggccauccuggugguccuccuguacaccuucgcuacagccaacgcggacacgcuuugcauuggcuaucacgcuaauaacagcaccgauacaguugacaccgugcuggagaaaaaugugacagucacccauuccgugaaccuccuggaagauaagcacaaugggaaacuuuguaagcugagaggaguugcuccccuccaucugggcaaaugcaacaucgccggguggauucugggaaauccugagugugaaucucucagcacagccuccucuuggagcuacaucguggagaccuccucuagcgacaacggcacgugcuauccgggggauuuuauugacuacgaagaacugcgggagcagcuuuccagcgucucuuccuucgaacgcuuugagaucuuccccaagaccagcucuuggccuaaucacgauuccaacaagggagugacaaccgccuguccccaugcuggcgccaagagcuuuuauaagaaucugaucuggcucguuaaaaagggcaacucuuacccuaaacuguccaagagcuauauuaaugacaaggggaaagaagugcuuguccuguggggaauccaccaccccuccacaucugcggaucaacagagccucuaccagaacgccgacgcuuacguguucgugggcaccuccagauauagcaagaaauuuaagccugagauugccauccggccgaaaguccgcgaucaggaggggagaaugaauuacuauuggacgcugguugaacccggagacaagauuacauucgaggcuaccggcaaccugguggugccucgguacgccuuugcgauggaacgcaacgccgggucuggaaucauuaucuccgauacacccguccaugacugcaauaccaccugucaaacaccuaaaggcgcuaucaacacgagccuccccuuccagaauauucacccgaucaccauuggcaagugcccuaaguaugugaaaucuacaaagcugagacuugccaccgggcugcggaacguucccagcauccagucccgcggacucuuuggcgcuauugccggguucaucgagggaggcuggacagggaugguggacggaugguacggcuaucaucaccagaaugaacaaggcucuggguacgccgcugaucugaaaagcacccagaacgcgaucgacgagauuacgaauaaggucaacuccgugaucgagaaaaugaauacacaguuuaccgccguuggaaaggaguucaaccaccuugagaagagaauugaaaaucugaacaaaaagguggaugacggcuuccucgauaucuggaccuacaaugcugagcugcugguccuccuggaaaacgagcggacacuugacuaucaugauagcaaugugaaaaaccuguacgagaagguccgcucucagcucaaaaacaaugccaaggaaauugggaacggauguuuugaguucuaucacaagugcgacaauaccuguauggaauccgugaaaaacggcacauacgauuauccuaaguacagcgaggaagccaaacugaauagagaggagaucgacgggguuaaacuugaaucuacgcggaucuaucaaauucuggcuaucuacuccaccguggccagcucccucguccuggugguuucucugggcgcgauuagcuuuuggaugugcuccaacggaucucuccagugccgcguguguaucuga

SEQ ID NO: 199964 - RNA, 1701 nt, Artificial Sequence; identical to SEQ ID NO: 194728
  derived and/or modified CDS sequence (opt5) from hemagglutinin__InfluenzaA__AEW11313

SEQ ID NO: 199965 - RNA, 1701 nt, Artificial Sequence
  derived and/or modified CDS sequence (opt5) from hemagglutinin__InfluenzaA__AEW11323
augaaggccauccuggugguccuccuguacaccuucgcuacagccaacgcggacacgcuuugcauuggcuaucacgcuaauaacagcaccgauacaguugacaccgugcuggagaagaaugugacagucacccauuccgugaaccuccuggaagauaagcacaaugggaaacuuuguaagcugagaggaguugcuccccuccaucugggcaaaugcaacaucgccggguggauucugggaaauccugagugugaaucucucagcacagccuccucuuggagcuacaucguggagaccuccucuagcgacaacggcacgugcuauccgggggauuuuauugacuacgaagaacugcgggagcagcuuuccagcgucucuuccuucgaacgcuuugagaucuuccccaagaccagcucuuggccuaaucacgauuccaacaagggagugacagccgcuuguccccaugccggcgcgaaaucuuuuuauaagaaucugaucuggcucguuaaaaagggcaacagcuacccuaaacuguccaagagcuauauuaaugacaaggggaaagaagugcuuguccuguggggaauccaccaccccuccaccucugccgaucaacagagccucuaccagaacgcugacgccuacguguucgugggcacauccagauauagcaagaaauuuaagccugagauugcuauccggccgaaaguccgcgggcaggagggaagaaugaauuacuauuggacccugguugaacccggcgauaagauuacguucgaggccacagggaaccugguggugccucgguacgcguuugccauggaacgcaacgcuggaucuggcaucauuaucuccgacacccccguccaugauugcaauacaaccugucaaaccccuaaaggcgccgugaacacaagccuccccuuccagaauauccacccgauuacgaucgggaagugcccuaaguauguuaaaucuaccaagcugagacuugcuacaggacugcggaacgugcccagcauucagucccgcggccucuuuggggccaucgccggauucauugagggcggguggaccggaauggucgacggcugguacggcuaucaucaccagaaugaacaagggucuggauacgcugcggaccugaaaagcacacagaacgccaucgaugagaucaccaauaaggugaacuccguuauugagaaaaugaauacgcaguuuacagcugugggcaaggaguucaaccaccuugagaagagaaucgaaaaucugaacaaaaaggucgacgauggguuccucgacauuuggaccuacaaugccgagcugcuggugcuccuggaaaacgagcggacccuugauuaucaugacagcaaugucaaaaaccuguacgagaaggugcgcucucagcucaaaaacaaugccaaggaaaucggaaacggcuguuuugaguucuaucacaagugcgauaauacauguauggaauccguuaaaaacgggaccuacgacuauccuaaguacagcgaggaagcuaaacugaauagagaggagauugauggcgugaaacuugaaucuacacggaucuaucaaauccuggccauuuacuccacggucgcgagcucccucgugcugguugugucucugggagcuaucagcuuuuggaugugcuccaacggcucucuccagugccgcauuuguaucuga

SEQ ID NO: 199966 - RNA, 1701 nt, Artificial Sequence
  derived and/or modified CDS sequence (opt5) from hemagglutinin__InfluenzaA__AEW22712
augaaggccauccuggugguccuccuguacaccuucgcuacagccaacgcggacacgcuuugcauuggcuaucacgcuaauaacagcaccgauacaaucgacaccguucuggagaagaaugugacagugacccauuccgucaaccuccuggaagauaagcacaaugggaaacuuuguaagcugagaggaguggcuccccuccaucugggcaaaugcaacauugccggguggauccugggaaauccugagugugaaucucucagcacagccuccucuuggagcuacauuguugagaccuccucuagcgacaacggcacgugcuauccgggggauuuuaucgacuacgaggaacugcgggagcagcuuuccagcgugucuuccuucgaacgcuuugagaucuuccccaagaccagcucuuggccuaaucacgauuccaacaagggagucacagccgcuuguccccaugccggcgcgaaaggcuuuuauaagaaucugauuuggcucgugaaaaaggggaacagcuacccuaaacugucuaaguccuauaucaaugacaagggaaaagaaguucuugugcuguggggcauucaccaccccagcaccacagccgaucaacagucccucuaccagaacgcugacaccuacgucuucguggggacgucuagauauagcaagaaauuuaagccugagaucgccauucggccgaaagugcgcgaucaggagggaagaaugaauuacuauuggacacuggucaagcccggcgacaaaaucaccuucgaagcuacagggaaccugguugugccucgguacgccuuugcgauggagcgcaacgccggauccggcauuaucaucagcgauacccccgugcaugacugcaauaccacaugucaaacgccuaagggcgcuauuaacaccucucuccccuuccagaauauccacccgauuacaaucgggaagugcccuaaauaugucaaguccaccaaacugagacuugccacaggacugcggaacgugcccagcauucagucucgcggccucuuuggggcuaucgccggauucaucgaaggcggguggaccggaaugguugacggcugguacggcuaucaucaccagaaugagcaagggagcggauacgccgcugaucugaaguccacgcagaacgcgauugacaaaaucacaaauaaggugaacucugucauugaaaagaugaauacccaguuuaccgccgugggcaaagaguucaaccaccuugagaagagaaucgaaaaucugaacaaaaagguugaugacggguuccucgauauuuggacauacaaugcugagcugcuggugcuccuggaaaacgagcggacccuugacuaucaugauagcaaugucaaaaaccuguacgaaaaggugcgcaaccagcucaagaauaacgccaaagagaucggaaauggcuguuuugaguucuaucacaagugcgacaacacauguauggaauccgucaaaaaugggacguacgauuauccuaaguacagcgaggaagccaaacugaacagagaggaaaucgacggcgugaaacuugagucuacccggauuuaucaaauccuggcuauuuacuccacaguugccagcucucucgugcuggucgugucccugggagcgaucagcuuuuggaugugcuccaauggcucucuccagugccgcauuuguaucuga

SEQ ID NO: 199967 - RNA, 1701 nt, Artificial Sequence
  derived and/or modified CDS sequence (opt5) from hemagglutinin__InfluenzaA__AEW22718
augaaggccauccuggugguccuccuguacaccuucgcuacagccaacgcggacacgcuuugcauuggcuaucacgcuaauaacagcaccgauacaguugacaccgugcuggagaagaaugugacagucacccauuccgugaaccuccuggaagauaagcacaaugggaaacuuuguaagcugagaggaguugcuccccuccaucugggcaaaugcaacaucgccggguggauucugggaaauccugagugugaaucucucagcacagccuccucuuggagcuacaucguggagaccuccucuagcgacaacggcacgugcuauccgggggauuuuauugacuacgaggaacugcgggagcagcuuuccagcgucucuuccuucgaacgcuuugagaucuuccccaagaccagcucuuggccuaaucacgauuccaacaagggagugacagccgcuuguccccaugccggcgcgaaaggcuuuuauaagaaucugaucuggcucguuaaaaaggggaacagcuacccuaaacugucuaaguccuauauuaaugacaagggaaaagaagugcuuguccuguggggcauccaccaccccagcaccacagccgaucaacagucccucuaccagaacgcugacaccuacguguucguggggacgucuagauauagcaagaaauuuaagccugagauugccauccggccgaaaguccgcgaucaggagggaagaaugaauuacuauuggacacugguuaagcccggcgacaaaauuaccuucgaagcuacagggaaccugguggugccucgguacgccuuugcgauggagcgcaacgccggauccggcaucauuaucagcgauacccccguccaugacugcaauaccacaugucaaacgccuaagggcgcuaucaacaccucucuccccuuccagaauauucacccgaucacaauugggaagugcccuaaauaugugaaguccaccaaacugagacuugccacaggacugcggaacguucccagcauccagucucgcggccucuuuggggcuauugccggauucaucgaaggcggguggaccggaaugguggacggcugguacggcuaucaucaccagaaugagcaagggagcggauacgccgcugaucugaaguccacgcagaacgcgaucgacaaaauuacaaauaaggucaacucugugaucgaaaagaugaauacccaguuuaccgccguuggcaaagaguucaaccaccuugagaagagaauugaaaaucugaacaaaaagguggaugacggguuccucgauaucuggacauacaaugcugagcugcugguccuccuggaaaacgagcggacccuugacuaucaugauagcaaugugaaaaaccuguacgaaaagguccgcaaccagcucaagaauaacgccaaagagauuggaaauggcuguuuugaguucuaucacaagugcgacaacacauguauggaauccgugaaaaaugggacguacgauuauccuaaguacagcgaggaagccaaacugaacagagaggaaaucgacggcguuaaacuugagucuacccggaucuaucaaauucuggcuaucuacuccacaguggccagcucucucguccuggugguuucccugggagcgauuagcuuuuggaugugcuccaauggcucucuccagugccgcaucuguauuuga

SEQ ID NO: 199968 - RNA, 1701 nt, Artificial Sequence; identical to SEQ ID NO: 198526
  derived and/or modified CDS sequence (opt5) from hemagglutinin__InfluenzaA__AEW22720

SEQ ID NO: 199969 - RNA, 1701 nt, Artificial Sequence; identical to SEQ ID NO: 198526
  derived and/or modified CDS sequence (opt5) from hemagglutinin__InfluenzaA__AEW22722

SEQ ID NO: 199970 - RNA, 1701 nt, Artificial Sequence
  derived and/or modified CDS sequence (opt5) from hemagglutinin__InfluenzaA__AEW22724
augaaggccauccuggugguccuccuguacaccuucgcuacagccaacgcggacacgcuuugcauuggcuaucacgcuaauaacagcaccgauacaguugacaccgugcuggagaaaaaugugacagucacccauuccgugaaccuccuggaagauaagcacaaugggaaacuuuguaagcugagaggaguugcuccccuccaucugggcaaaugcaacaucgccggguggauucugggaaauccugagugugaaucucucagcacagccuccucuuggagcuacaucguggagaccuccucuagcgacaacggcacgugcuauccgggggauuuuauugacuacgaagaacugcgggagcagcuuuccagcgucucuuccuucgaacgcuuugagaucuuccccaagaccagcucuuggccuaaucacgauuccaacaagggagugacagccgcuuguccccaugccggcgcgaaaggcuuuuauaagaaucugaucuggcucguuaaaaaggggaacagcuacccuaaacugucuaaguccuauauuaaugacaagggaaaagaagugcuuguccuguggggcauccaccaccccagcaccacagccgaucaacagucccucuaccagaacgcugacaccuacguguucguggggacgucuagauauagcaagaaauuuaagccugagauugccauccggccgaaaguccgcgaucaggagggaagaaugaauuacuauuggacacugguugaacccggcgacaagauuaccuucgaggcuacagggaaccugguggugccucgguacgccuuugcgauggaacgcaacgccggauccggcaucauuaucagcgauacccccguccaugacugcaauaccacaugucaaacgccuaaaggcgcuaucaacaccucucuccccuuccagaauauucacccgaucacaauugggaagugcccuaaguaugugaaauccaccaagcugagacuugccacaggacugcggaacguucccagcauccagucucgcggccucuuuggggcuauugccggauucaucgagggcggguggaccggaaugguggacggcugguacggcuaucaucaccagaaugaacaagggagcggauacgccgcugaucugaaauccacgcagaacgcgaucgacaagauuacaaauaaagucaacucugugaucgagaagaugaauacccaguuuaccgccguuggcaaggaguucaaccaccuugaaaagagaauugagaaucugaacaagaaaguggaugacggguuccucgauaucuggacauacaaugcugaacugcugguccuccuggagaacgaacggacccuugacuaucaugauagcaaugugaagaaccuguacgagaaaguccgcaaccagcucaagaauaacgccagagagauuggaaauggcuguuuugaguucuaucacaagugcgacaacacauguauggaguccgugaaaaaugggacguacgauuauccuaaguacagcgaagaggccaaacugaaccgggaagagaucgacggcguuaaacuugagucuacccgcaucuaucaaauucuggcuaucuacuccacaguggccagcucucucguccuggugguuucccugggagcgauuagcuuuuggaugugcuccaauggcucucuccagugcagaaucuguauuuga

SEQ ID NO: 199971 - RNA, 1701 nt, Artificial Sequence
  derived and/or modified CDS sequence (opt5) from hemagglutinin__InfluenzaA__AEW25297
augaaggccauccuggugguccuccuguacaccuucgcuacagccaacgcggacacgcuuugcauuggcuaucacgcuaauaacagcaccgauacaguugacaccgugcuggagaaaaaugugacagucacccauuccgugaaccuccuggaagauaagcacaaugggaaacuuuguaagcugagaggaguugcuccccuccaucugggcaaaugcaacaucgccggguggauuccuggaaauccggagugugaaucucugagcacagccuccucuuggagcuacaucguggagaccuccucuagcgacaacggcacgugcuaucccggggauuuuauugacuacgaagaacuccgggagcagcuguccagcgucucuuccuucgaacgcuuugagaucuucccuaagaccagcucuuggcccaaucacgauccuaacaagggagugacagccgcuuguccccaugccggcgcgaaauccuuuuauaagaaucuuaucuggcugguuaaaaagggcaacagcuacccuaaacucucuaaguccuauauuaaugacaaggggaaagaagugcugguccuuuggggaauccaccacccgagcaccuccgccgaucaacagucucuguaccagaacgcugacgccuacguguucgugggcacaagcagauauuccaagaaauuuaagcccgagauugcuauccggccuaaaguccgcgaucaggaggggagaaugaauuacuauuggacccucguugaacccggagacaagauuacguucgaggccacaggcaaccugguggugccucgguacgcguuugccauggaacgcaacgcugggagcggaaucauuaucucugauacccccguccaugacugcaauacaaccugucaaaccccgagaggcgccaucaacacaucccugccuuuccagaauauucaccccaucacgauuggcaaaugcccuaaguauguuaagagcaccaaacuccggcuggcuacagggcuucgcaacgugcccucuauccagagcagaggacuguuuggcgccauugccggguucaucgagggaggcuggaccgggaugguggacggaugguacggcuaucaucaccagaaugaacaaggcuccggguacgcugcggaucucaagucuacacagaacgccaucgacgagauuaccaauaaagucaacagcgugaucgagaagaugaauacgcaguuuacagcuguuggaaaagaguucaaccaccuggagaagcggauugaaaaucuuaacaagaaaguggaugacggcuuccuggauaucuggaccuacaaugccgagcuccugguccugcucgaaaacgagcgcacccuggacuaucaugauuccaaugugaagaaccuuuacgagaaagucagaagccagcugaagaacaaugccaaagaaauugggaacggauguuuugaguucuaucacaagugcgacaauacauguauggaaucugugaagaacggcaccuacgauuaucccaaauacuccgaggaagcuaagcucaaucgggaggagaucgacgggguuaaacuggaaagcacacgcaucuaucaaauucuugccaucuacucuacgguggcguccagccugguccucgugguuucccugggcgcuauuucuuuuuggaugugcagcaacggaucccugcagugcagaaucuguauuuga

SEQ ID NO: 199972 - RNA, 1701 nt, Artificial Sequence; identical to SEQ ID NO: 195539
  derived and/or modified CDS sequence (opt5) from hemagglutinin__InfluenzaA__AEW25306

SEQ ID NO: 199973 - RNA, 1701 nt, Artificial Sequence
  derived and/or modified CDS sequence (opt5) from hemagglutinin__InfluenzaA__AEW25315
augaaggccauccuggugguccuccuguacaccuucgcuacagccaacgcggacacgcuuugcauuggcuaucacgcuaauaacagcaccgauacaguugacaccgugcuggagaagaaugugacagucacccauuccgugaaccuccuggaagauaagcacaaugggaaacuuuguaagcugagaggaguugcuccccuccaucugggcaaaugcaacaucgccggguggauucugggaaauccugagugugaaucucucagcacagccuccucuuggagcuacaucguggagaccuccucuagcgacaacggcacgugcuauccgggggauuuuauugacuacgaagaacugcgggagcagcuuuccagcgucucuuccuucgaacgcuuugagaucuuccccaagaccagcucuuggccuaaucacgaucccaacaagggagugacagccgcuuguccucaugccggcgcgaaauccuuuuauaagaaucugaucuggcucguuaaaaagggcaacagcuaccccaaacugucuaaguccuauauuaaugacaaggggaaagaagugcuuguccuguggggaauccaccacccuagcaccuccgccgaucaacagucucucuaccagaacgcugacgccuacguguucgugggcacaagcagauauuccaagaaauuuaagccggagauugcuauccggcccaaaguccgcgaucaggaggggagaaugaauuacuauuggacccugguugaaccuggagacaagauuacguucgaggccacaggcaaccugguggugccccgguacgcguuugccauggaacgcaacgcugggagcggaaucauuaucucugauaccccuguccaugacugcaauacaaccugucaaacccccaaaggcgccaucaacacaucccucccguuccagaauauucacccuaucacgauuggcaagugccccaaguaugugaaaagcaccaagcugagacuugcuacagggcugcggaacguuccuucuauccagagccgcggacucuuuggcgccauugccggguucaucgagggaggcuggaccgggaugguggacggaugguacggcuaucaucaccagaaugaacaaggcuccggguacgcugcggaucugaaaucuacacagaacgccaucgacgagauuaccaauaaggucaacagcgugaucgagaaaaugaauacgcaguuuacagcuguuggaaaggaguucaaccaccuugagaagagaauugaaaaucugaacaaaaagguggaugacggcuuccucgauaucuggaccuacaaugccgagcugcugguccuccuggaaaacgagcggacccuugacuaucaugauuccaaugugaaaaaccuguacgagaagguccgcagccagcucaaaaacaaugccaaggaaauugggaacggauguuuugaguucuaucacaagugcgacaauacauguauggaaucugugaaaaacggcaccuacgauuaucccaaguacuccgaggaagcuaaacugaauagagaggagaucgacgggguuaaacuugaaagcacacggaucuaucaaauucuggccaucuacucuacgguggcguccagccucguccuggugguuucccugggcgcuauuucuuuuugggugugcagcaacggaucccuccagugccgcaucuguauuuga

SEQ ID NO: 199974 - RNA, 1701 nt, Artificial Sequence
  derived and/or modified CDS sequence (opt5) from hemagglutinin__InfluenzaA__AEW25331
augaaggccauccuggugguccuccuguacaccuucgcuacagccaacgcggacacgcuuugcauuggcuaucacgcuaauaacagcaccgauacaguugacaccgugcuggagaaaaaugugacagucacccauuccgugaaccuccuggaagauaagcacaaugggaaacuuuguaagcugagaggaguugcuccccuccaucugggcaaaugcaacaucgccggguggauucugggaaauccugagugugaaucuuuuagcacauccucuagcugguccuacaucguggagaccucuagcuccgacaacggcacgugcuauccgggggauuucauugacuacgaagaacuccgggagcagcugagcucugucuccagcuuugaacgcuucgagaucuuucccaagaccucuuccuggccuaaucacgauagcaacaagggagugacagccgccuguccccaugcuggcgccaaaucuuucuauaagaaucuuaucuggcugguuaaaaagggcaacuccuacccuaaacucagcaaguccuauauuaaugacaaggggaaagaagugcugguccuuuggggaauccaccaccccucuaccagcgcggaucaacagucccuguaccagaacgccgacgcuuacguguuugugggcacaagcagauauucuaagaaauucaagccugagauugccauccggccgaaaguccgcgaucaggaggggagaaugaauuacuauuggacccucguugaacccggagacaagauuacguuugaggcuacaggcaaccugguggugccucgguacgccuucgcgauggaacgcaacgccggguccggaaucauuaucagcgauacccccguccaugacugcaauacaaccugucaaaccccuaaaggcgcuaucaacacaucucugcccuuucagaauauuccgccuaucacgauuggcaagugccccaaguaugugaaaagcaccaagcucagacuggccacagggcuucggaacguuccuuccauccagucucgcggacuguucggcgcuauugccggguuuaucgagggaggcuggaccgggaugguggacggaugguacggcuaucaccaucagaaugaacaaggcagcggguacgccgcugaucucaaauccacacagaacgcgaucgacgagauuaccaauaaggucaacagcgugaucgagaaaaugaauacgcaguucacagccguuggaaaggaguucaaccaccuggagaagagaauugaaaaucuuaacaaaaagguggaugacggcuuucuggauaucuggaccuacaaugcugagcuccugguccugcucgaaaacgagcggacccuggacuaucacgauucuaaugugaaaaaccuuuacgagaagguccgcucccagcugaaaaacaaugccaaggaaauugggaacggauguuucgaguuuuaucauaagugcgacaauacauguauggaaagcgugaaaaacggcaccuacgauuaucccaaguacucugaggaagccaaacucaauagagaggagaucgacgggguuaagcuggaauccacacggaucuaucaaauucuugcuaucuacagcacgguggccuccucucugguccucgugguuagccugggcgcgauuuccuucuggaugugcucuaacggaagccugcagugccgcaucuguauuuga

SEQ ID NO: 199975 - RNA, 1701 nt, Artificial Sequence
  derived and/or modified CDS sequence (opt5) from hemagglutinin__InfluenzaA__AEW25349
augaaggccauccuggugguccuccuguacaccuucgcuacagccaacgcggacacgcuuugcauuggcuaucacgcuaauaacagcaccgauacaguugacaccgugcuggagaaaaaugugacagucacccauuccgugaaccuccuggaagauaagcacaaugggaaacuuuguaagcugagaggaguugcuccccuccaucugggcaaaugcaacaucgccggguggauucugggaaauccugagugugaaucuuuuagcacauccucuagcugguccuacaucguggagaccucuagcuccgacaacggcacgugcuauccgggggauuucauugacuacgaagaacuccgggagcagcugagcucugucuccagcuuugaacgcuucgagaucuuucccaagaccucuuccuggccuaaucacgauagcaacaagggagugacagccgccuguccccaugcuggcgccaaaucuuucuauaagaaucuuaucuggcugguuaaaaagggcaacuccuacccuaaacucagcaaguccuauauuaaugacaaggggaaagaagugcugguccuuuggggaauccaccaccccucuaccagcgcggaucaacagucccuguaccagaacgccgacgcuuacguguuugugggcacaagcagauauucuaagaaauucaagccugagauugccauccggccgaaaguccgcgaucaggaggggagaaugaauuacuauuggacccucguugaacccggagacaagauuacguuugaggcuacaggcaaccugguggugccucgguacgccuucgcgauggaacgcaacgccggguccggaaucauuaucagcgauacccccguccaugacugcaauacaaccugucaaaccccuaaaggcgcuaucaacacaucucugcccuuucagaauauucacccgaucacgauuggcaagugcccuaaguaugugaaaagcaccaagcucagacuggccacagggcuucggaacguucccuccauccagucucgcggacuguucggcgcuauugccggguuuaucgagggaggcuggaccgggaugguggacggaugguacggcuaucaucaccagaaugaacaaggcagcggguacgccgcugaucucaaauccacacagaacgcgaucgacgagauuaccaauaaggucaacagcgugaucgagaaaaugaauacgcaguucacagccguuggaaaggaguucaaccaccuggagaagagaauugaaaaucuuaacaaaaagguggaugacggcuuucuggauaucuggaccuacaaugcugagcuccugguccugcucgaaaacgagcggacccuggacuaucaugauucuaaugugaaaaaccuuuacgagaagguccgcucccagcugaaaaacaaugccaaggaaauugggaacggauguuucgaguuuuaucacaagugcgacaauacauguauggaaagcgugaaaaacggcaccuacgauuauccuaaguacucugaggaagccaaacucaauagagaggagaucgacgggguuaagcuggaauccacacggaucuaucaaauucuugcuaucuacagcacgguggccuccucucugguccucgugguuagccugggcgcgauuuccuucuggaugugcucuaacggaagccugcagugccgcaucuguauuuga

SEQ ID NO: 199976 - RNA, 1701 nt, Artificial Sequence
  derived and/or modified CDS sequence (opt5) from hemagglutinin__InfluenzaA__AEW25367
augaaggccauccuggugguccuccuguacaccuucgcuacagccaacgcggacacgcuuugcauuggcuaucacgcuaauaacagcaccgauacaguugacaccgugcuggagaaaaaugugacagucacccauuccgugaaccuccuggaagauaagcacaaugggaaacuuuguaagcugagaggaguugcuccccuccaucugggcaaaugcaacaucgccggguggauucugggaaauccugagugugaaucuuuuagcacauccucuagcugguccuacaucguggagaccucuagcuccgacaacggcacgugcuauccgggggauuucauugacuacgaagaacuccgggagcagcugagcucugucuccagcuuugaacgcuucgagaucuuucccaagaccucuuccuggccuaaucacgauagcaacaagggagugacagccgccuguccccaugcuggcgccaaaucuuucuauaagaaucuuaucuggcugguuaaaaagggcaacuccuacccuaaacucagcaaguccuauauuaaugacaaggggaaagaagugcugguccuuuggggaauccaccaccccucuaccagcgcggaucaacagagacuguaccagaacgccgacgcuuacguguuugugggcacaucccgguauagcaagaaauucaagccugagauugccauccgcccgaaagucagagaucaggaggggcggaugaauuacuauuggacccucguugaacccggagacaagauuacguuugaggcuacaggcaaccugguggugccucgcuacgccuucgcgauggaaagaaacgccgggucuggaaucauuaucuccgauacccccguccaugacugcaauacaaccugucaaaccccuaaaggcgcuaucaacacaagccugcccuuucagaauauucacccgaucacgauuggcaagugcccuaaguaugugaaaucuaccaagcuccggcuggccacagggcuucgcaacguucccagcauccaguccagaggacuguucggcgcuauugccggguuuaucgagggaggcuggaccgggaugguggacggaugguacggcuaucaucaccagaaugaacaaggcucuggguacacagccgaucucaaaagcacccagaacgcuaucgacgagauuacgaauaaggucaacuccgugaucgagaaaaugaauacacaguucaccgcgguuggaaaggaguucaaccaccuggagaagcggauugaaaaucuuaacaaaaagguggaugacggcuuucuggauaucuggaccuacaaugccgagcuccugguccugcucgaaaacgagcgcacacuggacuaucaugauagcaaugugaaaaaccuuuacgagaaggucagaucucagcugaaaaacaaugcuaaggaaauugggaacggauguuucgaguuuuaucacaagugcgacaauaccuguauggaauccgugaaaaacggcacauacgauuauccuaaguacagcgaggaagccaaacucaaucgggaggagaucgacgggguuaagcuggaaucuacgcgcaucuaucaaauucuugccaucuacuccaccguggcuagcucccugguccucgugguuucucugggcgccauuagcuucuggaugugcuccaacggaucucugcagugcagaaucuguauuuga

SEQ ID NO: 199977 - RNA, 1701 nt, Artificial Sequence
  derived and/or modified CDS sequence (opt5) from hemagglutinin__InfluenzaA__AEW25377
augaaggccauccuggugguccuccuguacaccuucgcuacagccaacgcggacacgcuuugcauuggcuaucacgcuaauaacagcaccgauacaguugacaccgugcuggagaaaaaugugacagucacccauuccgugaaccuccuggaagauaagcacaaugggaaacuuuguaagcugagaggaguugcuccccuccaucugggcaaaugcaacaucgccggguggauucugggaaauccugagugugaaucucucagcacagccuccucuuggagcuacaucguggagaccuccucuagcgacaacggcacgugcuauccgggggauuuuauugacuacgaagaacugcgggagcagcuuuccagcgucucuuccuucgaacgcuuugagaucuuccccaagaccagcucuuggccuaaucacgauuccaacaagggagugacaaccgccuguccccaugcuggcgccaagagcuuuuauaaaaaucugaucuggcucguuaaaaagggcaacucuuacccuaaacuguccaagagcuauauuaaugacaaggggaaagaagugcuuguccuguggggaauccaccaccccuccacaucugcggaucaacagagccucuaccagaacgccgacgcuuacguguucgugggcaccuccagauauagcaagaaauuuaagccugagauugccauccggccgaaaguccgcgaucaggaggggagaaugaauuacuauuggacgcugguugaacccggagacaagauuacauucgaggcuaccggcaaccugguggugccucgguacgccuuugcgauggaacgcaacgccgggucuggaaucauuaucuccgauacacccguccaugacugcaauaccaccugucaaacaccuaaaggcgcuaucaacacgagccuccccuuccagaauauucacccgaucaccauuggcaagugcccuaaguaugugaaaucuacaaagcugagacuugccaccgggcugcggaacguucccagcauccagucccgcggacucuuuggcgcuauugccggguucaucgagggaggcuggacagggaugguggacggaugguacggcuaucaucaccagaaugaacaaggcucuggguacgccgcugaucugaaaagcacccagaacgcgaucgacgagauuacgaauaaggucaacuccgugaucgagaaaaugaauacacaguuuaccgccguuggaaaggaguucaaccaccuugagaagagaauugaaaaucugaacaaaaagguggaugacggcuuccucgauaucuggaccuacaaugcugagcugcugguccuccuggaaaacgagcggacacuugacuaucaugauagcaaugugaaaaaccuguacgagaaggucaaaucucagcucaagaacaaugccaaggaaauugggaacggauguuuugaguucuaucacaaaugcgacaaugccuguauggaauccgugaagaacggcaccuacgauuauccuaaauacagcgaggaagcuaagcugaaucgcgaggagaucgacgggguuaaacuugaaucuacaagaaucuaucaaauucuggccaucuacuccacgguggcgagcucccucguccuggugguuucucugggcgcuauuagcuuuuggaugugcuccaacggaucucuccagugccggaucuguauuuga

SEQ ID NO: 199978 - RNA, 1701 nt, Artificial Sequence
  derived and/or modified CDS sequence (opt5) from hemagglutinin__InfluenzaA__AEW25385
augaaggccauccuggugguccuccuguacaccuucgcuacagccaacgcggacacgcuuugcauuggcuaucacgcuaauaacagcaccgauacaguugacaccgugcuggagaaaaaugugacagucacccauuccgugaaccuccuggaagauaagcacaaugggaaacuuuguaagcugagaggaguugcuccccuccaucugggcaaaugcaacaucgccggguggauucugggaaauccugagugugaaucucucagcacagccuccucuuggagcuacaucguggagaccuccucuagcgacaacggcacgugcuauccgggggauuuuauugacuacgaagaacugcgggagcagcuuuccagcguccccucuuucgaacgcuuugagaucuucccuaagaccuccagcuggcccaaucacgauucuaacaagggagugacagccgcuuguccucaugccggcgcgaaauccuuuuauaagaaucugaucuggcucguuaaaaagggcaacagcuaccccaaacugucuaaguccuauauuaaugacaaggggaaagaagugcuuguccuguggggaauccaccacccuagcaccuccgccgaucaacagucucucuaccagaacgcugacgccuacguguucgugggcacaagcagauauuccaagaaauuuaagccggagauugcuauccggcccaaaguccgcgaucaggaggggagaaugaauuacuauuggacccugguugaaccuggagacaagauuacguucgaggccacaggcaaccugguggugccccgguacgcguuugccauggaacgcaacgcugggagcggaaucauuaucucugauaccccuguccaugacugcaauacaaccugucaaacccccaaaggcgccaucaacacaucccucccguuccagaauauucacccuaucacgauuggcaagugccccaaguaugugaaaagcaccaagcugagacuugcuacagggcugcggaacguuccuucuauccagagccgcggacucuuuggcgccauugccggguucaucgagggaggcuggaccgggaugguggacggaugguacggcuaucaucaccagaaugaacaaggcuccggguacgcugcggaucugaaaucuacacagaacgccaucgacaagauuaccaauaaagucaacagcgugaucgagaagaugaauacgcaguuuacagcuguuggaaaggaguucaaccaccuugagaaaagaauugagaaucugaacaagaaaguggaugacggcuuccucgauaucuggaccuacaaugccgaacugcugguccuccuggagaacgaacggacccuugacuaucaugauuccaaugugaagaaccuguacgagaaaguccgcagccagcucaagaacaaugccaaggagauugggaacggauguuuugaguucuaucacaaaugcgacaauacauguauggaaucugugaagaacggcaccuacgauuaucccaaauacuccgaagaggcuaagcugaauagagaagagaucgacgggguuaaacuugagagcacacggaucuaucaaauucuggccaucuacucuacgguggcguccagccucguccuggugguuucccugggcgcuauuucuuuuuggaugugcagcaacggaucccuccagugccgcaucuguauuuga

SEQ ID NO: 199979 - RNA, 1701 nt, Artificial Sequence; identical to SEQ ID NO: 199975
  derived and/or modified CDS sequence (opt5) from hemagglutinin__InfluenzaA__AEW25416

SEQ ID NO: 199980 - RNA, 1701 nt, Artificial Sequence
  derived and/or modified CDS sequence (opt5) from hemagglutinin__InfluenzaA__AEW25446
augaaggccauccuggugguccuccuguacaccuucgcuacagccaacgcggacacgcuuugcauuggcuaucacgcuaauaacagcaccgauacaguugacaccgugcuggagaaaaaugugacagucacccauuccgugaaccuccuggaagauaagcacaaugggaaacuuuguaagcugagaggaguugcuccccuccaucugggcaaaugcaacaucgccggguggauucugggaaauccugagugugaaucucucagcacagccuccucuuggagcuacaucguggagaccuccucuagcgacaacggcacgugcuauccgggggauuuuauugacuacgaagaacugcgggagcagcuuuccagcgucucuuccuucgaacgcuuugagaucuuccccaagaccagcucuuggccuaaucacgaucccaacaagggagugacagccgcuuguccucaugccggcgcgaaauccuuuuauaagaaucugaucuggcucguuaaaaagggcaacagcuaccccaaacugucuaaguccuauauuaaugacaaggggaaagaagugcuuguccuguggggaauccaccacccuagcaccuccgccgaucaacagucucucuaccagaacgcugacgccuacguguucgugggcacaagcagauauuccaagaaauuuaagccggagauugcuauccggcccaaaguccgcgaucaggaggggagaaugaauuacuauuggacccugguugaaccuggagacaagauuacguucgaggccacaggcaaccugguggugccccgguacgcguuugccauggaacgcaacgcugggagcggaaucauuaucucugauaccccuguccaugacugcaauacaaccugucaaacccccaaaggcgccaucaacacaucccucccguuccagaauauucacccuaucacgauuggcaagugccccaaguaugugaaaagcaccaagcugagacuugcuacagggcugcggaacguuccuucuauccagagccgcggacucuuuggcgccauugccggguucaucgagggaggcuggaccgggaugguggacggaugguacggcuaucaucaccagaaugaacaaggcuccggguacgcugcggaucugaaaucuacacagaacgccaucgacgagauuaccaauaaggucaacagcgugaucgagaaaaugaauaagcaguuuacggcuguuggaaaggaguucaaccaccuugagaaaagaauugaaaaucugaacaagaaaguggaugacggcuuccucgauaucuggacauacaaugccgagcugcugguccuccuggaaaacgagcggacccuugacuaucaugauuccaaugugaagaaccuguacgagaaaguccgcagccagcucaagaacaaugccaaggaaauugggaacggauguuuugaguucuaucacaaaugcgacaauaccuguauggaaucugugaagaacggcacauacgauuaucccaaauacuccgaggaagcuaagcugaauagagaggagaucgacgggguuaaacuugaaagcacccggaucuaucaaauucuggccaucuacucuacaguggcguccagccucguccuggugguuucccugggcgcuauuucuuuuuggaugugcagcaacggaucccuccagugccgcaucuguauuuga

SEQ ID NO: 199981 - RNA, 1701 nt, Artificial Sequence; identical to SEQ ID NO: 199975
  derived and/or modified CDS sequence (opt5) from hemagglutinin__InfluenzaA__AEW25454

SEQ ID NO: 199982 - RNA, 1701 nt, Artificial Sequence
  derived and/or modified CDS sequence (opt5) from hemagglutinin__InfluenzaA__AEW25462
augaaggccauccuggugguccuccuguacaccuucgcuacagccaacgcggacacgcuuugcauuggcuaucacgcuaauaacagcaccgauacaguugacaccgugcuggagaagaaugugacagucacccauuccgugaaccuccuggaagauaagcacaaugggaaacuuuguaagcugagaggaguugcuccccuccaucugggcaaaugcaacaucgccggguggauucugggaaauccugagugugaaucucucagcacagccuccucuuggagcuacaucguggagaccuccucuagcgacaacggcacgugcuauccgggggauuuuauugacuacgaagaacugcgggagcagcuuuccagcgucucuuccuucgaacgcuuugagaucuuccccaagaccagcucuuggccuaaucacgaucccaacaagggagugacagccgcuuguccucaugccggcgcgaaauccuuuuauaagaaucugaucuggcucguuaaaaagggcaacagcuaccccaaacugucuaagccuuauaccaaugacaaggggaaagaagugcuuguccuguggggcauucaccacccguccacaagcgccgaucaacagucccucuaccagaacgcugacgccuacguguucgugggaaccucuagauauagcaagaaauuuaagcccgagaucgcuauucggccuaaaguccgcgaucaggaggggagaaugaauuacuauuggacgcugguugaacccggagacaagaucacauucgaggccaccggcaaccugguggugccucgguacgcguuugccauggaacgcaacgcuggguccggaauuaucauuagcgauacacccguccaugacugcaauaccaccugucaaacaccgaaaggcgccaucaacacgucucucccuuuccagaauauccaccccauuaccaucggcaagugcccuaaguaugugaaauccacaaagcugagacuugcuaccgggcugcggaacguucccagcauucagucucgcggacucuuuggcgccaucgccggguucauugagggaggcuggacagggaugguggacggaugguacggcuaucaucaccagaaugaacaaggcagcggguacgcugcggaucugaaauccacccagaacgccaucgacgagaucacgaauaaggucaacucugugauugagaaaaugaauacacaguuuaccgcuguuggaaaggaguucaaccaccuugagaagagaaucgaaaaucugaacaaaaagguggaugacggcuuccucgauauuuggaccuacaaugccgagcugcugguccuccuggaaaacgagcggacacuugacuaucaugauagcaaugugaaaaaccuguacgagaagguccgcucccagcucaaaaacaaugccaaggaaaucgggaacggauguuuugaguucuaucacaagugcgacaauaccuguauggaaagcgugaaaaacggcacauacgauuaucccaaguacucugaggaagcuaaacugaauagagaggagauugacgggguuaaacuugaauccacgcggaucuaucaaauccuggccauuuacagcaccguggcgucuucccucguccuggugguuagccugggcgcuaucuccuuuuggaugugcucuaacggaagccuccagugccgcauuuguaucuga

SEQ ID NO: 199983 - RNA, 1701 nt, Artificial Sequence; identical to SEQ ID NO: 195539
  derived and/or modified CDS sequence (opt5) from hemagglutinin__InfluenzaA__AEW25472

SEQ ID NO: 199984 - RNA, 1701 nt, Artificial Sequence
  derived and/or modified CDS sequence (opt5) from hemagglutinin__InfluenzaA__AEW25482
augaaggccauccuggugguccuccuguacaccuucgcuacagccaacgcggacacgcuuugcauuggcuaucacgcuaauaacagcaccgauacaguugacaccgugcuggagaaaaaggugacagucacccauuccgugaaucuccuggaagauaaacacaacgggaaacuuuguaaacugagaggaguugcuccccuccaucugggcaagugcaauaucgccggguggauucugggaaacccugagugugaaucucucagcacagccuccucuuggagcuacaucguggagaccuccaauucugacaacggcacgugcuauccgggggauuuuauugacuacgaggaacugcgggagcagcuuagcuccgucagcucuuucgaacgcuuugagaucuuccccaagaccuccagcuggccuaaucacgaucccaacaaaggagugacagccgcuuguccucaugccggcgcgaagucuuuuuauaaaaaucugaucuggcucguuaagaaaggcaacuccuaccccaagcugagcaagucuuauauuaaugacaaagggaaggaagugcuuguccuguggggaauccaccacccuuccaccagcgccgaucaacagucccucuaccagaacgcugacgccuacguguucgugggcacaucuagauauagcaaaaaguuuaaaccggagauugcuauccggcccaagguccgcgaucaagggggaagaaugaauuacuauuggacccugguugagccuggcgacaaaauuacguucgaagccacagggaaccugguggugccccgguacgcguuugccauggagcgcaacgcuggauccggcaucauuaucagcgauaccccuguccaugacugcaauacaaccugucagacccccaagggcgccaucaacacaucucucccguuccagaauauucacccuaucacgauugggaagugccccaaauaugugaaguccaccaaacugagacuugcuacaggacugcggaacguuccuagcauccagucucgcggccucuuuggggccauugccggauucaucgaaggcggguggaccggaaugguggacggcugguacggcuaucaucaccagaaugagcaagggagcggauacgcugcggaucugaaguccacacagaacgccaucgacgaaauuaccaauaaagucaacucugugaucgagaagaugaauacgcaguuuacagcuguuggcaaggaguucaaccaccuugaaaagagaauugagaaucugaacaagaaaguggaugacggguuccucgauaucuggaccuacaaugccgaacugcugguccuccuggagaacgaacggacccuugacuaucaugauagcaaugugaagaaccuguacgagaaaguccgcucccagcucaagaacaaugccaaggagauuggaaacggcuguuuugaacuguaucacaaaugcgacaauacauguauggagagcgugaagaacgggaccuacgauuaucccaaauacucugaagaggcuaaacuuaauagagaagagaucgacggcguuaagcuggaguccacacggaucuaucaaauucucgccaucuacagcacgguggcgucuucccugguccuggugguuagccucggagcuauuuccuucuggaugugcucuaacggcagccugcagugccgcaucuguauuuga

SEQ ID NO: 199985 - RNA, 1701 nt, Artificial Sequence
  derived and/or modified CDS sequence (opt5) from hemagglutinin__InfluenzaA__AEW25492
augaaggccauccuggugguccuccuguacaccuucgcuacagccaacgcggacacgcuuugcauuggcuaucacgcuaauaacagcaccgauacaguugacaccgugcuggagaagaaugugacagucacccauuccgugaaccuccuggaagauaagcacaaugggaaacuuuguaagcugagaggaguugcuccccuccaucugggcaaaugcaacaucgccggguggauucugggaaauccugagugugaaucucucagcacagccuccucuuggagcuacaucguggagaccuccucuagcgacaacggcacgugcuauccgggggauuuuauugacuacgaagaacugcgggagcagcuuuccagcgucucuuccuucgaacgcuuugagaucuuccccaagaccagcucuuggccuaaucacgaucccaacaagggagugacagccgcuuguccucaugccggcgcgaaauccuuuuauaagaaucugaucuggcucguuaaaaagggcaacagcuaccccaaacugucuaaguccuauauuaaugacaaggggaaagaagugcuuguccuguggggaauccaccacccuagcaccuccgccgaucaacagucucucuaccagaacgcugacgccuacauuuucgugggcacaagcagauauuccaagaaauuuaagccggagaucgcuauucggcccaaagugcgcgaucaggaggggagaaugaauuacuauuggacccuggucgaaccuggagacaagaucacguucgaggccacaggcaaccugguugugccccgguacgcguuugccauggaacgcaacgcugggagcggaauuaucaucucugauaccccugugcaugacugcaauacaaccugucaaacccccaaaggcgccauuaacacaucccucccguuccagaauauccacccuauuacgaucggcaagugccccaaguaugucaaaagcaccaagcugagacuugcuacagggcugcggaacgugccuucuauucagagccgcggacucuuuggcgccaucgccggguucaucgagggaggcuggaccgggaugguugacggaugguacggcuaucaucaccagaaugaacaaggcuccggguacgcugcggaucugaaaucuacacagaacgccauugacgagaucaccaauaaggugaacagcgucauugagaaaaugaauacgcaguuuacagcugugggaaaggaguucaaccaccuugagaagagaaucgaaaaucugaacaaaaagguugaugacggcuuccucgauauuuggaccuacaaugccgagcugcuggugcuccuggaaaacgagcggacccuugacuaucaugauuccaaugucaaaaaccuguacgagaaggugcgcagccagcucaaaaacaaugccaaggaaaucgggaacggauguuuugaguucuaucacaagugcgacaauacauguauggaaucugucaaaaacggcaccuacgauuaucccaaguacuccgaggaagcuaaacugaauagagaggagaucgacggggugaaacuugaaagcacacggauuuaucaaauccuggccauuuacucuacgguugcguccagccucgugcuggucgugucccugggcgcuaucucuuuuuggaugugcagcaacggaucccuccagugccgcauuuguaucuga

SEQ ID NO: 199986 - RNA, 1701 nt, Artificial Sequence
  derived and/or modified CDS sequence (opt5) from hemagglutinin__InfluenzaA__AEW25501
augaaggccauccuggugguccuccuguacaccuucgcuacagccaacgcggacacgcuuugcauuggcuaucacgcuaauaacagcaccgauacaguugacaccgugcuggagaaaaaugugacagucacccauuccgugaaccuccuggaagauaagcacaaugggaaacuuuguaagcugagaggaguugcgccccuccaucugggcaaaugcaacaucgccggguggauucugggaaauccugagugugaaucucucagcacagcuuccucuuggagcuacaucguggagaccuccucuagcgacaacggcacgugcuauccgggggauuuuauugacuacgaagaacugcgggagcagcuuuccagcgucucuuccuucgaaaaguuugagaucuuccccaagaccagcucuuggccuaaucacgauuccaacaaaggagugacagccgcuuguccccaugccggcgccaagagcuuuuauaaaaaucugaucugccucguuaagaaaggcaacucuuacccuaagcuguccaagagcuauauuaaugacaaagggaaggaagugcuuguccuguggggaauccaccaccccuccaccucugccgaucaacagagccucuaccagaacgcugacgccuacguguucgugggcacaucccgcuauagcaaaaaguuuaaaccugagauugcuaucagaccgaagguccgggaucaggaggggcgcaugaauuacuauuggacccugguugaacccggagacaaaauuacguucgaggccacaggcaaccugguggugccuagauacgcguuugccauggaacggaacgcugggucuggaaucauuaucuccgauacccccguccaugacuguaauacaaccugccaaaccccuaagggcgccaucaacacaagccuccccuuccagaauauucacccgaucacgauuggcaaguguccuaaauaugugaagucuaccaaacugcgccuugcuacagggcugagaaacguucccagcauccagucccggggacucuuuggcgccauugccggguucaucgagggaggcuggaccgggaugguggacggaugguacggcuaucaucaccagaaugaacaaggcucuggguacgcugcggaucuuaagagcacacagaacgccaucgacaaaauuaccaauaaggucaacuccgugaucgagaagaugaauacgcaguuuacagcuguuggaaaagaguucaaccaccuugaaaagcgcauugagaaucugaacaaaaagguggaugacggcuuccucgauaucuggaccuacaaugccgaacugcugguccuccuggagaacgaaagaacccuugacuaucaugauagcaaugugaaaaaccuguacgagaagguccggucucagcucaagaacaaugccaaagagauugggaacggaugcuuugaguucuaucacaagugugacaauacaugcauggaguccgugaaaaacggcaccuacgauuauccuaaguacagcgaagaggcuaaacugaaucgcgaagagaucgacgggguuaagcuggagucuacaagaaucuaucaaauucuggccaucuacuccacgguggcgagcucccucguccuggugguuucucugggcgcuauuagcuuuuggaugugcuccaacggaucucuccagugucggaucugcauuuga

SEQ ID NO: 199987 - RNA, 1701 nt, Artificial Sequence; identical to SEQ ID NO: 199975
  derived and/or modified CDS sequence (opt5) from hemagglutinin__InfluenzaA__AEW25509

SEQ ID NO: 199988 - RNA, 1701 nt, Artificial Sequence
  derived and/or modified CDS sequence (opt5) from hemagglutinin__InfluenzaA__AEW25519
augaaggccauccuggugguccuccuguacaccuucgcuacagccaacgcggacacgcuuugcauuggcuaucacgcuaauaacagcaccgauacaguugacaccgugcuggagaaaaaugugacagucacccauuccgugaaccuccuggaagauaagcacaaugggaaacuuuguaagcugagaggaguugcuccccuccaucugggcaaaugcaacaucgccggguggauucugggaaauccugagugugaaucucucagcacagccuccucuuggagcuacaucguggagaccuccucuagcgacaacggcacgugcuauccgggggauuuuauugacuacgaagaacugcgggagcagcuuuccagcgucucuuccuucgaacgcuuugagaucuuccccaagaccagcucuuggccuaaucacgaucccaacaagggagugacagccgcuuguccucauaccggcgccaaauccuuuuauaagaaucugaucuggcucguuaaaaagggcaacagcuaccccaaacugucuaaguccuauauuaaugacaaggggaaagaagugcuuguccuguggggaauccaccacccuagcacauccgcggaucaacagucucucuaccagaacgccgacgcuuacguguucgugggcaccagcagauauuccaagaaauuuaagccggagauugccauccggcccaaaguccgcgaucaggaggggagaaugaauuacuauuggacgcugguugaaccuggagacaagauuacauucgaggcuaccggcaaccugguggugccccgguacgccuuugcgauggaacgcaacgccgggagcggaaucauuaucucugauacaccuguccaugacugcaauaccaccugucaaacacccaaaggcgcuaucaacacgucccucccguuccagaauauucacccuaucaccauuggcaagugccccaaguaugugaaaagcacaaagcugagacuugccaccgggcugcggaacguuccuucuauccagagccgcggacucuuuggcgcuauugccggguucaucgagggaggcuggacagggaugguggacggaugguacggcuaucaucaccagaaugaacaaggcuccggguacgccgcugaucugaaaucuacccagaacgcgaucgacgagauuacgaauaaggucaacagcgugaucgagaaaaugaauacacaguuuaccgccguuggaaaggaguucaaccaccuugagaagagaauugaaaaucugaacaaaaagguggaugacggcuuccucgauaucuggaccuacaaugcugagcugcugguccuccuggaaaacgagcggacacuugacuaucaugauuccaaugugaaaaaccuguacgagaagguccgcagccagcucaaaaacaaugccaaggaaauugggaacggauguuuugaguucuaucacaagugcgacaauaccuguauggaaucugugaaaaacggcacauacgauuaucccaaguacuccgaggaagccaaacugaauagagagaagaucgacgggguuaaacuugagagcacgcggaucuaucaaauucuggcuaucuacucuaccguggccuccagccucguccuggugguuucccugggcgcgauuucuuuuuggaugugcagcaacggaucccuccagugccgcaucuguauuuga

SEQ ID NO: 199989 - RNA, 1701 nt, Artificial Sequence
  derived and/or modified CDS sequence (opt5) from hemagglutinin__InfluenzaA__AEW25528
augaaggccauccuggugguccuccuguacaccuucgcuacagccaacgcggacacgcuuugcauuggcuaucacgcuaauaacagcaccgauacaguugacaccgugcuggagaaaaaugugacagucacccauuccgugaaccuccuggaagauaagcacaaugggaaacuuuguaagcugagaggaguugcuccccuccaucugggcaaaugcaacaucgccggguggauucugggaaauccugagugugaaucuuuuagcacauccucuagcugguccuacaucguggagaccucuagcuccgacaacggcacgugcuauccgggggauuucauugacuacgaggagcuccgggagcagcugagcucugucuccagcuuugaacgcuucgagaucuuucccaagaccucuuccuggccuaaucacgauagcaacaagggagugacagccgccuguccccaugcuggcgccaaaucuuucuauaagaaucuuaucuggcugguuaaaaagggcaacuccuacccuaaacucagcaaguccuauauuaaugacaaggggaaagaagugcugguccuuuggggaauccaccaccccucuaccagcgcggaucaacagucccuguaccagaacgccgacgcuuacguguuugugggcacaagcagauauucuaagaaauucaagccugagauugccauccggccgaaaguccgcgaucaggagagacggaugaauuacuauuggacccucguugaacccggggacaagauuacguuugaggcuacaggaaaccugguggugccucgcuacgccuucgcgauggaaagaaacgccggcuccgggaucauuaucagcgauacccccguccaugacugcaauacaaccugucaaaccccuaaaggagcuaucaacacaucucugcccuuucagaauauucacccgaucacgauuggcaagugcccuaaguaugugaaaagcaccaagcuccggcuggccacaggccuucgcaacguucccuccauccagucuagagggcuguucggagcuauugccggcuuuaucgaagggggauggaccggcaugguggacgggugguacggauaucaucaccagaaugaacaaggcagcggcuacgccgcugaucucaaauccacacagaacgcgaucgacgagauuaccaauaaggucaacagcgugaucgagaaaaugaauacgcaguucacagccguugggaaggaguucaaccaccuggaaaagcggauugaaaaucuuaacaaaaagguggaugacggauuucuggauaucuggaccuacaaugcugagcuccugguccugcucgaaaacgagcgcacccuggacuaucaugauucuaaugugaaaaaccuuuacgagaaggucagaucccagcugaaaaacaaugccaaggaaauuggcaacggguguuucgaguuuuaucacaagugcgacaauacauguauggaaagcgugaaaaacggaaccuacgauuauccuaaguacucugaggaagccaaacucaaucgggaggagaucgacggcguuaagcuggaauccacacgcaucuaucaaauucuugcuaucuacagcacgguggccuccucucugguccucgugguuagccugggggcgauuuccuucuggaugugcucuaacggcagccugcagugcagaaucuguauuuga

SEQ ID NO: 199990 - RNA, 1701 nt, Artificial Sequence
  derived and/or modified CDS sequence (opt5) from hemagglutinin__InfluenzaA__AEW25545
augaaggccauccuggugguccuccuguacaccuucgcuacagccaacgcggacacgcuuugcauuggcuaucacgcuaauaacagcaccgauacaguugacaccgugcuggagaaaaaugugacagucacccauuccgugaaccuccuggaagauaagcacaaugggaaacuuuguaagcugagaggaguugcuccccuccaucugggcaaaugcaacaucgccggguggauucugggaaauccugagugugaaucucucagcacagccuccucuuggagcuacaucguggagaccuccucuagcgacaacggcacgugcuauccgggggauuuuauugacuacgaagaacugcgggagcagcuuuccagcgucucuuccuucgaacgcuuugagaucuuccccaagaccagcucuuggccuaaucacgaucccaacaagggagugacagccgcuuguccucaugccggcgcgaaauccuuuuauaagaaucugaucuggcucguuaaaaagggcaacagcuaccccaaacugucuaaguccuauauuaaugacaaggggaaagaagugcuuguccuguggggaauccaccacccuagcaccuccgccgaucaacagucucucuaccagaacgcugacgccuacguguucgugggcacaagcagauauuccaagaaauuuaagccggagauugcuauccggcccaaaguccgcgaucaggaggggagaaugaauuacuauuggacccugguugaaccuggagacaagauuacguucgaggccacaggcaaccugguggugccccgguacgcguuugccauggaacgcaacgcugggagcggaaucauuaucucugauaccccuguccaugacugcaauacaaccugucaaacccccaaaggcgccaucaacacaucccucccguuccagaauauucacccuaucacgauuggcaagugccccaaguaugugaaaagcaccaagcugagacuugcuacagggcugcggaacguuccuucuauccagagccgcggacucuuuggcgccauugccggguucaucgagggaggcuggaccgggaugguggacggaugguacggcuaucaucaccagaaugaacaaggcuccggguacgcugcggaucugaaaucuacacagaacgccaucgacaagauuaccaauaaagucaacagcgugaucgagaagaugaauacgcaguuuacagcuguuggaaaggaguucaaccaccuugagaaaagaauugagaaucugaacaagaaaguggaugacggcuuccucgauaucuggaccuacaaugccgaacugcugguccuccuggagaacgaacggacccuugacuaucaugauuccaaugugaagaaccuguacgagaaaguccgcagccagcucaagaacaaugccaaggagauugggaacggauguuuugaguucuaucacaaaugcgacaauacauguauggaaucugugaagaacggcuccuacgauuaucccaaauacagcgaagaggcuaagcugaauagagaagagaucgacgggguuaaacuugagucuacccggaucuaucaaauucuggccaucuacuccacaguggcgagcucccucgucauggugguuucucugggcgcuauuagcuuuuggaugugcuccaacggaucucugcagugccgcaucuguauuuga

SEQ ID NO: 199991 - RNA, 1701 nt, Artificial Sequence
  derived and/or modified CDS sequence (opt5) from hemagglutinin__InfluenzaA__AEW25555
augaaggccauccuggugguccuccuguacaccuucgcuacagccaacgcggacacgcuuugcauuggcuaucacgcuaauaacagcaccgauacaguugacaccgugcuggagaagaaugugacagucacccauuccgugaaccuccuggaagauaagcacaaugggaaacuuuguaagcugagaggaguugcuccccuccaucugggcaaaugcaacaucgccggguggauucugggaaauccugagugugaaucucucagcacagccuccucuuggagcuacaucguggagaccuccucuagcgacaacggcacgugcuauccgggggauuuuauugacuacgaagaacugcgggagcagcuuuccagcgucucuuccuucgaacgcuuugagaucuuccccaagaccagcucuuggccuaaucacgaucccaacaagggagugacagccgcuuguccucaugccggcgcgaaauccuuuuauaagaaucugaucuggcucguuaaaaagggcaacagcuaccccaaacugucuaaguccuauauuaaugacaaggggaaagaagugcuuguccuguggggaauccaccacccuagcaccuccgccgaucaacagucucucuaccagaacgcugacgccuacguguucgugggcacaagcagauauuccaagaaauuuaagccggagauugcuauccggcccaaaguccgcgaucaggaggggagaaugaauuacuauuggacccugguugaaccuggagacaagauuacguucgaggccacaggcaaccugguggugccccgguacgcguuugccauggaacgcaacgcugggagcggaaucauuaucucugauaccccuguccauuauugcaauacaaccugucaaacccccaaaggcgccaucaacacaucccucccguuccagaauauucacccuaucacgauuggcaagugccccaaguacgugaaaagcaccaagcugagacuugcuacagggcugcggaacguuccuucuauccagagccgcggacucuuuggcgccauugccggguucaucgagggaggcuggaccgggaugguggacggaugguauggcuaccaucaccagaaugaacaaggcuccggguacgcugcggaccugaaaucuacacagaacgccaucgaugagauuaccaauaaggucaacagcgugaucgagaaaaugaauacgcaguuuacagcuguuggaaaggaguucaaccaccuugagaagagaauugaaaaucugaacaaaaagguggacgauggcuuccucgacaucuggaccuauaaugccgagcugcugguccuccuggaaaacgagcggacccuugauuaccaugacuccaaugugaaaaaccuguaugagaagguccgcagccagcucaaaaacaaugccaaggaaauugggaacggauguuuugaguucuaccacaagugcgauaauacauguauggaaucugugaaaaacggcaccuaugacuaccccaaguauuccgaggaagcuaaacugaauagagaggagaucgaugggguuaaacuugaaagcacacggaucuaccaaauucuggccaucuacucuacgguggcguccagccucguccuggugguuucccugggcgcuauuucuuuuuggaugugcagcaacggaucccuccagugccgcaucuguauuuga

SEQ ID NO: 199992 - RNA, 1701 nt, Artificial Sequence
  derived and/or modified CDS sequence (opt5) from hemagglutinin__InfluenzaA__AEW25564
augaaggccauccuggugguccuccuguacaccuucgcuacagccaacgcggacacgcuuugcauuggcuaucacgcuaauaacagcaccgauacaguugacaccgugcuggagaaaaaugugacagucacccauuccgugaaccuccuggaagauaagcacaaugggaaacuuuguaagcugagaggaguugcuccccuccaucugggcaaaugcaacaucgccggguggauucugggaaauccugagugugaaucucucagcacagccuccucuuggagcuacaucguggagaccuccucuagcgacaacggcacgugcuauccgggggauuuuauugacuacgaagaacugcgggagcagcuuuccagcgucucuuccuucgaacgcuuugagaucuuccccaagaccagcucuuggccuaaucacgauuccaacaagggagugacagccgcuuguccccaugccggcgcgaaaucuuuuuauaagaaucugaucuggcucguuaaaaagggcaacagcuacccuaaacuguccaagagcuauauuaaugacaaggggaaagaagugcuuguccuguggggaauccaccaccccuccaccucugccgaucaacagagccucuaccagaacgcugacgccuacguguucgugggcacauccagauauagcaagaaauuuaagccugagauugcuauccggccgaaaguccgcgaucaggaggggagaaugaauuacuauuggacccugguugaacccggagacaagauuacguucgaggccacaggcaaccugguggugccucgguacgcguuugccauggaacgcaacgcugggucuggaaucauuaucuccgauacccccguccaugacugcaauacaaccugucaaaccccuaaaggcgcccucaacacaagccugcccuuccagaauauccacccgauuacgaucggcaagugcccuaaguaugugaaaucuaccaaacuuagacuggcuacagggcuccggaacguucccagcauucagucccgcggacuguuuggcgccaucgccggguucauugagggaggcuggaccgggaugguggacggaugguacggcuaucaucaccagaaugaacaaggcucuggguacgcugcggaucuuaagagcacacagaacgccaucgacgagaucaccaauaaggucaacuccgugauugagaaaaugaauacgcaguuuacagcuguuggaaaggaguucaaccaccuggagaagagaaucgaaaaucucaaccggaaaguggaugacggcuuccuggauauuuggaccuacaaugccgagcugcucguccugcuugaaaacgagcgcacccuggacuaucaugauagcaaugugaagaaccucuacgagaaagucagaucucagcugaagaacaaugccaaagaaaucgggaacggauguuuugaguucuaucacaagugcgacaauacauguauggaauccgugaagaacggcaccuacgauuauccuaaauacagcgaggaagcuaaacuuaaucgggaggagauugacgggguuaagcuggaaucuacaggcaucuaucaaauccucgccauuuacuccacgguggcgagcucccugguccuggugguuucucucggagcuaucagcuuuuggaugugcuccaacggcucucugcagugccgcauuuguaucuga

SEQ ID NO: 199993 - RNA, 1701 nt, Artificial Sequence; identical to SEQ ID NO: 195539
  derived and/or modified CDS sequence (opt5) from hemagglutinin__InfluenzaA__AEW25573

SEQ ID NO: 199994 - RNA, 1701 nt, Artificial Sequence
  derived and/or modified CDS sequence (opt5) from hemagglutinin__InfluenzaA__AEW25582
augaaggccauccuggugguccuccuguacaccuucgcuacagccaacgcggacacgcuuugcauuggcuaucacgcuaauaacagcaccgauacaguugacaccgugcuggagaaaaaugugacagucacccauuccgugaaccuccuggaagauaagcacaaugggaaacuuuguaagcugagaggaguugcuccccuccaucugggcaaaugcaacaucgccggguggauucugggaaauccugagugugaaucucucagcacagccuccucuuggagcuacaucguggagaccuccucuagcgacaacggcacgugcuauccgggggauuuuauugacuacgaggaacugcgggagcagcuuuccagcgucucuuccuucgaacgcuuugagaucuuccccaagaccagcucuuggccuaaucacgauuccaacaagggagugacagccgcuuguccccaugccggcgcgaaaucuuuuuauaagaaucugaucuggcucguuaaaaagggcaacagcuacccuaaacuguccaagagcuauauuaaugacaaggggaaagaagugcuuguccuguggggaauccaccaccccuccaccucugccgaucaacagagccucuaccagaacgcugacgccuacguguucgugggcacauccagauauagcaagaaauuuaagccugagauugcuauccggccgaaaguccgcgaucaggaggggagaaugaauuacuauuggacccugguugaacccggagacaagauuacguucgaggccacaggcaaccugguggugccucgguacgcguuugccauggaacgcaacgcugggucuggaaucauucucuccgauacccccguccaugacugcaauacaaccugucaaaccccuaaaggcgccaucaacacaagccugcccuuccagaauauccacccgauuacgaucggcaagugcccuaaguaugugaaaucuaccaaacuuagacuggcuacagggcuccggaacguucccagcauucagucccgcggacuguuuggcgccaucgccggguucauugagggaggcuggaccgggaugguggacggaugguacggcuaucaucaccagaauggccaagggucuggauacgcugcggaucuuaagagcacacagaacgccaucgacaagaucaccaauaaagucaacuccgugauugaaaagaugaauacgcaguuuacagcuguuggcaaggaguucaaccaccuggagaaaagaaucgaaaaucucaacaagaaaguggaugacggguuccuggauauuuggaccuacaaugccgagcugcucguccugcuugaaaacgagcggacccuggacuaucaugauagcaaugugaagaaccucuacgaaaaaguccgcucucagcugaagaacaaugccaaggagaucggaaacggcuguuuugaguucuaucacaaaugcgacaauacauguauggaauccgugaagaacgggaccuacgauuauccuaaauacagcgaggaagcuaaacuuaauagagaggaaauugacggcguuaagcuggagucuacacggaucuaucaaauccucgccauuuacuccacgguggcgagcucccugguccuggugguuucucucggagcuaucagcuuuuggaugugcuccaacggcucucugcagugccgcauuuguaucuga

SEQ ID NO: 199995 - RNA, 1701 nt, Artificial Sequence
  derived and/or modified CDS sequence (opt5) from hemagglutinin__InfluenzaA__AEW25590
augaaggccauccuggugguccuccuguacaccuucgcuacagccaacgcggacacgcuuugcauuggcuaucacgcuaauaacagcaccgauacaguugacaccgugcuggagaagaaugugacagucacccaguccgugaaccuccuggaagauaagcauaaugggaaacuuuguaagcugagaggaguugcuccccuccaccugggcaaaugcaacaucgccggguggauucugggaaauccugagugugaaucucucagcacagccuccucuuggagcuacaucguggagaccuccucuagcgacaacggcacgugcuauccgggggauuuuauugacuacgaggagcugcgggagcaacuuuccagcgucucuuccuucgaacgcuuugagaucuuccccaagaccagcucuuggccuaaucaugauuccaacaagggagugacagccgcuuguccccacgccggcgcgaaaucuuuuuauaagaaucugaucuggcucguuaaaaagggcaacagcuacccuaaacuguccaagagcuauauuaaugacaaggggaaagaagugcuuguccuguggggaauccaucaccccuccaccucugccgaucagcagagccucuaccagaacgcugacgccuacguguucgugggcacauccagauauagcaagaaauuuaagccugagauugcuauccggccgaaaguccgcgaucaagaggccagaaugaauuacuauuggacccugguugaacccggggacaagauuacguucgaggcgacaggaaaccugguggugccucgguacgccuuugcuauggaacgcgaugccggcucugggaucauuaucuccgacacccccguccacgacugcaacacaaccugucagaccccuaaaggagcuaucaauacaagccuccccuuccagaacauucauccgaucacgauuggcaagugcccuaaguaugugaaaucuaccaagcugagacuugccacaggccugcggaauguucccagcauccagucccgcgggcucuuuggagccauugcuggcuucaucgaagggggauggaccggcaugguggaugggugguacggauaucaccaucaaaacgaacagggcucuggcuacgcggccgaccugaaaagcacacagaaugcuaucgaugagauuaccaacaaggucaauuccgugaucgagaaaaugaacacgcaguuuacagccguugggaaggaguucaaucaccuugaaaagagaauugaaaaccugaauaaaaagguggacgauggauuccucgacaucuggaccuacaacgccgagcugcugguccuccuggaaaaugagcggacccuugauuaucacgacagcaacgugaaaaaucugcaugagaagguccgcucucaacucaaaaacaacgcuaaggaaauuggcaauggguguuuugaguucuaccacaagugcgauaacacauguauggaauccgugaaaaauggaaccuaugacuacccuaaguauagcgaggaagccaaacugaacagagaggagaucgauggcguuaaacuugaaucuacacggaucuaccagauucuggcgaucuauuccacgguggcuagcucccucguccuggugguuucucugggggccauuagcuuuuggaugugcuccaauggcucucuccagugccgcaucuguauuuga

SEQ ID NO: 199996 - RNA, 1701 nt, Artificial Sequence; identical to SEQ ID NO: 195539
  derived and/or modified CDS sequence (opt5) from hemagglutinin__InfluenzaA__AEW25600

SEQ ID NO: 199997 - RNA, 1701 nt, Artificial Sequence; identical to SEQ ID NO: 195539
  derived and/or modified CDS sequence (opt5) from hemagglutinin__InfluenzaA__AEW25620

SEQ ID NO: 199998 - RNA, 1701 nt, Artificial Sequence
  derived and/or modified CDS sequence (opt5) from hemagglutinin__InfluenzaA__AEW25629
augaaggccauccuggugguccuccuguacaccuucgcuacagccaacgcggacacgcuuugcauuggcuaucacgcuaauaacagcaccgauacaguugacaccgugcuggagaaaaaugugacagucacccauuccgugaaccuccuggaagauaagcacaaugggaaacuuuguaagcugagaggaguugcuccccuccaucugggcaaaugcaacaucgccggguggauucugggaaauccugagugugaaucucucagcacagccuccucuuggagcuacaucguggagaccuccucuagcgacaacggcacgugcuauccgggggauuuuauugacuacgaagaacugcgggagcagcuuuccagcgucucuuccuucgaacgcuuugagaucuuccccaagaccagcucuuggccuaaucacgaucccaacaagggagugacagccgcuuguccucaugccgaagcgaaauccuuuuauaagaaucugaucuggcucguuaaaaagggcaacagcuaccccaaacugucuaaguccuauauuaaugacaagggcaaagaggugcuuguccugugggggauccaccacccuagcaccuccgccgaucaacagucucucuaccagaacgcugacgccuacguguucgugggaacaagcagauauuccaagaaauuuaagccggagauugcuauccggcccaaaguccgcgaucaggaaggcagaaugaauuacuauuggacccugguugagccuggggacaagauuacguucgaagccacaggaaaccugguggugccccgguacgcguuugccauggagcgcaacgcuggcagcgggaucauuaucucugauaccccuguccaugacugcaauacaaccugucaaacccccaaaggagccaucaacacaucccucccguuccagaauauucacccuaucacgauuggcaagugccccaaguaugugaaaagcaccaagcugagacuugcuacaggccugcggaacguuccuucuauccagagccgcgggcucuuuggagccauugccggcuucaucgaagggggauggaccggcaugguggacgggugguacggauaucaucaccagaaugagcaaggcuccggcuacgcugcggaucugaaaucuacacagaacgccaucgacgagauuaccaauaaggucaacagcgugaucgaaaagaugaauacgcaguuuacagcuguugggaaggaguucaaccaccuugaaaagagaauugagaaucugaacaaaaagguggaugacggauuccucgauaucuggaccuacaaugccgaacugcugguccuccuggagaacgagcggacccuugacuaucaugauuccaaugugaaaaaccuguacgaaaagguccgcagccagcucaaaaacaaugccaaggagauuggcaacggguguuuugaguucuaucacaagugcgacaauauguguauggagucugugaaaaacggaacauacgauuaucccaaguacuccgaagaggcuaaacugaauagagaggaaaucgacggcguuaaacuugagagcacccggaucuaucaaauucuggccaucuacucuacaguggcguccagccucguccuggugguuucccugggggcuauuucuuuuuggaugugcagcaacggcucccuccagugccgcaucuguauuuga

SEQ ID NO: 199999 - RNA, 1701 nt, Artificial Sequence; identical to SEQ ID NO: 194741
  derived and/or modified CDS sequence (opt5) from hemagglutinin__InfluenzaA__AEW25637

SEQ ID NO: 200000 - RNA, 1701 nt, Artificial Sequence
  derived and/or modified CDS sequence (opt5) from hemagglutinin__InfluenzaA__AEW25646
augaaggccauccuggugguccuccuguacaccuucgcuacagccaacgcggacacgcuuugcauuggcuaucacgcuaauaacagcaccgauacaguugacaccgugcuggagaaaaaugugacagucacccauuccgugaaccuccuggaagauaagcacaaugggaaacuuuguaagcugagaggaguugcuccccuccaucugggcaaaugcaacaucgccggguggauucugggaaauccugagugugaaucucucagcacagccuccucuuggagcuacaucguggagaccuccucuagcgacaacggcacgugcuauccgggggauuuuauugacuacgaagaacugcgggagcagcuuuccagcgucucuuccuucgaacgcuuugagaucuuccccaagaccagcucuuggccuaaucacgaucccaacaagggagugacagccgcuuguccucaugccggcgcgaaauccuuuuauaagaaucugaucuggcucguuaaaaagggcaacagcuaccccaaacugucuaaguccuauauuaaugacaaggggaaagaagugcuuguccuguggggaauccaccacccuagcaccuccgccgaucaacagucucucuaccagaacgcugacgccuacguguucgugggcacaagcagauauuccaagaaauuuaagccggagauugcuauccggcccaaaguccgcgaucaggaggggagaaugaauuacuauuggacccugguugaaccuggagacaagauuacguucgaggccacaggcaaccugguggugccccgguacgcguuugccauggaacgcaacgcugggagcggaaucauuaucucugauaccccuguccaugacugcaauacaaccugucaaacccccaaaggcgccaucaacacaucccucccguuccagaauauucacccuaucacgauuggcaagugccccaaguaugugaaaagcaccaagcugagacuugcuacagggcugcggaacguuccuucuauccagagccgcggacucuuuggcgccauugccggguucaucgagggaggcuggaccgggaugguggacggaugguacggcuaucaucaccagaaugaacaaggcuccggguacgcugcggaucugaaaucuacacagaacgccaucgacaagauuaccaauaaagucaacagcgugaucgagaagaugaauacgcaguuuacagcuguuggaaaggaguucaaccaccuugagaaaagaauugagaaucugaacaagaaaguggaugacggcuuccucgauaucuggaccuacaaugccgaacugcugguccuccuggagaacgaacggacccuugacuaucaugauuccaaugugaagaaccuguacgagaaaguccgcagccagcucaagaacaaugccaaggagauugggaacggauguuuugaguucuaucacaaaugcgacaauacauguauggaaucugugaagaacggcaccuacgauuaucccaaauacuccgaagaggcuaagcugaauagagaagagaucgacgggguuaaacuugagagcacacggaucuaucaaauucuggccaucuacucuacgguggcguccagccucguccuggugguuucccugggcgcuauuucuuuuuggaugugcagcaacggaucccuccagugccgcaucuguauuuga

SEQ ID NO: 200001 - RNA, 1701 nt, Artificial Sequence
  derived and/or modified CDS sequence (opt5) from hemagglutinin__InfluenzaA__AEW25654
augaaggccauccuggugguccuccuguacaccuucgcuacagccaacgcggacacgcuuugcauuggcuaucacgcuaauaacagcaccgauacaguugacaccgugcuggagaaaaaugugacagucacccauuccgugaaccuccuggaagauaagcacaaugggaaacuuuguaagcugagaggaguugcuccccuccaucugggcaaaugcaacaucgccggguggauucugggaaauccugagugugaaucucucagcacagccuccucuuggagcuacaucguggagaccuccucuagcgacaacggcacgugcuauccgggggauuuuauugacuacgaagaacugcgggagcagcuuuccagcgucucuuccuucgaacgcuuugagaucuuccccaagaccagcucuuggccuaaucacgauuccaacaagggagugacagccgcuuguccccaugccggcgcgaaaucuuuuuauaagaaucugaucuggcucguuaaaaagggcaacagcuacccuaaacuguccaagagcuauauuaaugacaaggggaaagaagugcuuguccuguggggaauccaccaccccuccaccucugccgaucaacagagccucuaccagaacgcugacgccuacguguucgugggcacauccagauauagcaagaaauuuaagccugagauugcuauccggccgaaaguccgcgaucaggaggggagaaugaauuacuauuggacccugguugaacccggagacaagauuacguucgaggccacaggcaaccugguggugccucgguacgcguuugccauggaacgcaacgcugggucuggaaucauuaucuccgauacccccguccaugacugcaauacaaccugucaaaccccuaaaggcgccaucaacacaucucccccguuccagaauauucacccuaucacgauuggcaagugccccaaguaugugaaaagcaccaagcucagacuggcuacagggcuucggaacaucccuagcauucagucccgcggacuguuuggcgccaucgccggguucaucgagggaggcuggaccgggaugguugacggaugguacggcuaucaucaccagaaugaacaaggcucuggguacgcugcggaucucaaaagcacacagaacgccauugacgagaucaccaauaaggugaacuccgucauugagaaaaugaauacgcaguuuacagcugugggaaaggaguucaaccaccuggagaagagaaucgaaaaucuuaacaaaaagguugaugacggcuuccuggauauuuggaccuacaaugccgagcuccuggugcugcucgaaaacgagcggacccuggacuaucaugauagcaaugucaaaaaccuuuacgagaaggugcgcucucagcugaaaaacaaugccaaggaaaucgggaacggauguuuugaguucuaucacaagugcgacaauacauguauggaauccgucaaaaacggcaccuacgauuaucccaaguacagcgaggaagcuaaacucaauagagaggagaucgacggggugaagcuggaaucuacacggauuuaucaaauccuugccauuuacuccacgguugcgagcucccuggugcucgucgugucucugggcgcuaucagcuuuuggaugugcuccaacggaucucugcagugccgcauuuguaucuga

SEQ ID NO: 200002 - RNA, 1701 nt, Artificial Sequence
  derived and/or modified CDS sequence (opt5) from hemagglutinin__InfluenzaA__AEW25662
augaaggccauccuggugguccuccuguacaccuucgcuacagccaacgcggacacgcuuugcauuggcuaucacgcuaauaacagcaccgauacaguugacaccgugcuggagaagaaugugacagucacccauuccgugaaccuccuggaagauaagcacaaugggaaacuuuguaagcugagaggaguugcuccccuccaucugggcaaaugcaacaucgccggguggauucugggaaauccugagugugaaucucucagcacagccuccucuuggagcuacaucguggagaccuccucuagcgacaacggcacgugcuauccgggggauuuuauugacuacgaagaacugcgggagcagcuuuccagcgucucuuccuucgaacgcuuugagaucuuccccaagaccagcucuuggccuaaucacgaucccaacaagggaaucacagccgcuuguccucaugccggcgcgaaauccuuuuauaagaaucugauuuggcucgugaaaaagggcaacagcuaccccaaacugucuaaguccuauaucaaugacaaggggaaagaaguucuugugcuguggggcauucaccacccuagcaccuccgccgaucaacagucucucuaccagaacgcugacgccuacgucuucgugggaacaagcagauauuccaagaaauuuaagccggagaucgcuauucggcccaaagugcgcgaucaggaggggagaaugaauuacuauuggacccuggucgaaccuggagacaagaucacguucgaggccacaggcaaccugguugugccccgguacgcguuugccauggaacgcaacgcugggagcggaauuaucaucucugauaccccugugcaugacugcaauacaaccugucaaacccccaaaggcgccauuaacacaucccucccguuccagaauauccacccuauuacgaucggcaagugccccaaguaugucaaaagcaccaagcugagacuugcuacagggcugcggaacgugccuucuauucagagccgcggacucuuuggcgccaucgccggguucaucgagggaggcuggaccgggaugguugacggaugguacggcuaucaucaccagaaugaacaaggcuccggguacgcugcggaucugaaaucuacacagaacgccauugacgagaucaccaauaaggugaacagcgucauugagaaaaugaauacgcaguuuacagcugugggaaaggaguucaaccaccuugagaagagaaucgaaaaucugaacaaaaagguugaugacggcuuccucgauauuuggaccuacaaugccgagcugcuggugcuccuggaaaacgagcggacccuugacuaucaugauuccaaugucaaaaaccuguacgagaaggugcgcagccagcucaaaaacaaugccaaggaaaucgggaacggauguuuugaguucuaucacaagugcgacaauacauguauggaaucugucaaaaacggcaccuacgauuaucccaaguacuccgaggaagcuaaacugaauagagaggagaucgacggggugaaacuugaaagcacacggauuuaucaaauccuggccauuuacucuacgguugcguccagccucgugcuggucgugucccugggcgcuaucucuuuuuggaugugcagcaacggaucccuccagugccgcauuuguaucuga

SEQ ID NO: 200003 - RNA, 1701 nt, Artificial Sequence
  derived and/or modified CDS sequence (opt5) from hemagglutinin__InfluenzaA__AEW25669
augaaggccauccuggugguccuccuguacaccuucgcuacagccaacgcggacacgcuuugcauuggcuaucacgcuaauaacagcaccgauacaguugacaccgugcuggagaaaaaugugacagucacccauuccgugaaccuccuggaagauaagcacaaugggaaacuuuguaagcugagaggaguugcuccccuccaucugggcaaaugcaacaucgccggguggauucugggaaauccugagugugaaucucucagcacagccuccucuuggagcuacaucguggagaccuccucuagcgacaacggcacgugcuauccgggggauuuuauugacuacgaagaacugcgggagcagcuuuccagcgucucuuccuucgaacgcuuugagaucuuccccaagaccagcucuuggccuaaucacgaucccaacaagggagugacagccgcuuguccucaugccggcgcgaaauccuuuuauaagaaucugaucuggcucguuaaaaagggcaacagcuaccccaaacugucuaaguccuauauuaaugacaaggggaaagaagugcuuguccuguggggaauccaccacccuagcaccuccgccgaucaacagucucucuaccagaacgcugacgccuacguguucgugggcacaagcagauauuccaagaaauuuaagccggagauugcuauccggcccaaaguccgcgaucaggaggggagaaugaauuacuauuggacccugguugaaccuggagacaagauuacguucgaggccacaggcaaccugguggugccccgguacgcguuugccauggaacgcaacgcugggagcggaaucauuaucucugauaccccuguccaugacugcaauacaaccugucaaacccccaaaggcgccaucaacacaucccucccguuccagaauauucacccuaucacgauuggcaagugccccaaguaugugaaaagcaccaagcugagacuugcuacagggcugcggaacguuccuucuauccagagccgcggacucuuuggcgccauugccggguucaucgagggaggcuggaccgggaugguggaaggaugguacggcuaucaucaccagaaugagcaaggcuccggguacgcugcggaccugaaaucuacacagaacgccaucgaugagauuaccaauaaggucaacagcgugaucgaaaagaugaauacgcaguuuacagcuguuggaaaggaguucaaccaccuugaaaagagaauugagaaucugaacaaaaagguggacgauggcuuccucgacaucuggaccuacaaugccgaacugcugguccuccuggagaacgagcggacccuugauuaucaugacuccaaugugaaaaaccuguacgaaaagguccgcagccagcucaaaaacaaugccaaggagauugggaacggauguuuugaguucuaucacaagugcgauaauacauguauggagucugugaaaaacggcaccuacgacuaucccaaguacuccgaagaggcuaaacugaauagagaggaaaucgaugggguuaaacuugagagcacacggaucuaucaaauucuggccaucuacucuacgguggcguccagccucguccuggugguuucccugggcgcuauuucuuuuuggaugugcagcaacggaucccuccagugccgcaucuguauuuga

SEQ ID NO: 200004 - RNA, 1701 nt, Artificial Sequence
  derived and/or modified CDS sequence (opt5) from hemagglutinin__InfluenzaA__AEW25678
augaaggccauccuggugguccuccuguacaccuucgcuacagccaacgcggacacgcuuugcauuggcuaucacgcuaauaacagcaccgauacaguugacaccgugcuggagaaaaaugugacagucacccauuccgugaaccuccuggaagauaagcacaaugggaaacuuuguaagcugagaggaguugcgccccuccaucugggcaaaugcaacaucgccggguggauucugggaaauccugagugugaaucucucagcacagcuuccucuuggagcuacaucguggagaccuccucuagcgacaacggcacgugcuauccgggggauuuuauugacuacgaagaacugcgggagcagcuuuccagcgucucuuccuucgaaaaguuugagaucuuccccaagaccagcucuuggccuaaucacgauuccaacaaaggagugacagccgcuuguccccaugccggcgccaagagcuuuuauaaaaaucugaucuggcucguuaagaaaggcaacucuuacccuaagcuguccaagagcuauauuaaugacaaagggaaggaagugcuuguccuguggggaauccaccaccccuccaccucugccgaucaacagagccucuaccagaacgcugacgccuacguguucgugggcacaucccgcuauagcaaaaaguuuaaaccugagauugcuaucagaccgaagguccgggaucaggaggggcgcaugaauuacuauuggacccugguugaacccggagacaaaauuacguucgaggccacaggcaaccugguggugccuagauacgcguuugccauggaacggaacgcugggucuggaaucauuaucuccgauacccccguccaugacugcaauacaaccugucaaaccccuaagggcgccaucaacacaagccuccccuuccagaauauucacccgaucacgauuggcaagugcccuaaauaugugaagucuaccaaacugcgccuugcuacagggcugagaaacguucccagcauccagucccggggacucuuuggcgccauugccggguucaucgagggaggcuggaccgggaugguggacggaugguacggcuaucaucaccagaaugaacaaggcucuggguacgcugcggaucuuaagagcacacagaacgccaucgacgagauuaccaauaaagucaacuccgugaucgagaagaugaauacgcaguuuacagcuguuggaaaggaguucaaccaccuggagaaacgcauugaaaaucugaacaagaaaguggaugacggcuuccucgauaucuggaccuacaaugccgagcugcugguccuccuggaaaacgagagaacccuugacuaucaugauagcaaugugaagaaccuguacgagaaaguccggucucagcucaagaacaaugccaaggaaauugggaacggauguuuugaguucuaucacaaaugcgacaauacauguauggaauccgugaagaacggcaccuacgauuauccuaaauacagcgaggaagcuaagcugaaucgcgaggagaucgacgggguuaaacuugaaucuacaagaaucuaucaaauucuggccaucuacuccacgguggcgagcucccucguccuggugguuucucugcgggcuauuagcuuuuggaugugcuccaacggcucucuccagugccgcaucuguauuuga

SEQ ID NO: 200005 - RNA, 1701 nt, Artificial Sequence
  derived and/or modified CDS sequence (opt5) from hemagglutinin__InfluenzaA__AEW25687
augaaggccauccuggugguccuccuguacaccuucgcuacagccaacgcggacacgcuuugcauuggcuaucacgcuaauaacagcaccgauacaguugacaccgugcuggagaaaaaugugacagucacccauuccgugaaccuccuggaagauaagcacaaugggaaacuuuguaagcugagaggaguugcuccccuccaucugggcaaaugcaacaucgccggguggauucugggaaauccugagugugaaucucucagcacagccuccucuuggagcuacaucguggagaccuccucuagcgacaacggcacgugcuauccgggggauuuuauugacuacgaagaacugcgggagcagcuuuccagcgucucuuccuucgaacgcuuugagaucuuccccaagaccagcucuuggccuaaucacgaucccaacaagggagugacagccgcuuguccuuaugccggcgcgaaauccuuuuacaagaaucugaucuggcucguuaaaaagggcaacagcuaucccaaacugucuaaguccuacauuaaugacaaggggaaagaagugcuuguccuguggggaauccaucacccuagcaccuccgccgaucaacagucucucuaccagaacgcugacgccuauguguucgugggcacaagcagauacuccaagaaauuuaagccggagauugcuauccggcccaaaguccgcgaucaggaggggagaaugaauuauuacuggacccugguugaaccuggagacaagauuacguucgaggccacaggcaaccugguggugccccgguaugcguuugccauggaacgcaacgcugggagcggaaucauuaucucugauaccccuguccacgacugcaauacaaccugucaaacccccaaaggcgccaucaacacaucccucccguuccagaauauucauccuaucacgauuggcaagugccccaaguacgugaaaagcaccaagcugagacuugcuacagggcugcggaacguuccuucuauccagagccgcggacucuuuggcgccauugccggguucaucgagggaggcuggaccgggaugguggacggaugguauggcuaccaccaucagaaugaacaaggcuccggguacgcugcggaucugaaaucuacacagaacgccaucgacaagauuaccaauaaagucaacagcgugaucgagaagaugaauacgcaguuuacagcuguuggaaaggaguucaaccaccuugagaaaagaauugagaaucugaacaagaaaguggaugacggcuuccucgauaucuggaccuauaaugccgaacugcugguccuccuggagaacgaacggacccuugacuaccacgauuccaaugugaagaaccuguaugagaaaguccgcagccagcucaagaacaaugccaaggagauugggaacggauguuuugaguucuaccauaaaugcgacaauacauguauggaaucugugaagaacggcaccuaugauuaccccaaauauuccgaagaggcuaagcugaauagagaagagaucgacgggguuaaacuugagagcacacggaucuaccaaauucuggccaucuacucuacgguggcguccagccucguccuggugguuucccugggcgcuauuucuuuuuggaugugcagcaacggaucccuccagugccgcaucuguauuuga

SEQ ID NO: 200006 - RNA, 1701 nt, Artificial Sequence; identical to SEQ ID NO: 199975
  derived and/or modified CDS sequence (opt5) from hemagglutinin__InfluenzaA__AEW25696

SEQ ID NO: 200007 - RNA, 1701 nt, Artificial Sequence; identical to SEQ ID NO: 195539
  derived and/or modified CDS sequence (opt5) from hemagglutinin__InfluenzaA__AEW25706

SEQ ID NO: 200008 - RNA, 1695 nt, Artificial Sequence
  derived and/or modified CDS sequence (opt5) from hemagglutinin__InfluenzaA__AEW91908
auggagaagaucgugcuccuguucgccaccauuagccuggucaaauccgaccacaucugcauuggcuaccaugcuaacaauucuacagaacagguugauacgaucauggagaagaacgugaccgugacacacgcccaagacauucuugaaaagacccauaaugggaagcugugugaucucaacggagucaaaccccugauccuuaaggacugcagcguggcgggcuggcugcucgggaauccuaugugugaugaguuuaucaacguuccggaaugguccuauauuguggagaaggcuaaucccgccaacgaccugugcuacccuggaaauuucaacgauuaugaggaacugaaacaccuccugucuagaaucaaucauuuugagaagauucagaucauucccaaaaacagcugguccgaccacgaagccucucuuggcgucagcgcugccuguccuuaccaggggaaguccagcuucuuucggaaugugguuuggcugaucaaaaaggauaacgcuuaucccacaauuaagaaaggauacaauaacaccaaccaggaggaccuccuggugcuuuggggcauccaccauccuaaugaugaggccgaacaaacacgccuguaucagaacccgaccacguacaucucuauuggcaccuccacacucaaucagagacugguccccaagaucgcgacccggagcaaaauuaacgggcagucuggacgcaucgacuucuuuuggacaauucugaagccuaaugaugccauccacuucgaguccaacggcaauuuuaucgcucccgaauacgccuauaaaauugugaagaaaggggacagcaccaucaugaagucugagguggaauacggaaacugcaauacgagaugucaaacaccuauuggcgcuaucaacuccagcaugcccuuccauaauauucacccgcucaccaucggggagugcccuaaguaugucaaauccaacaagcugguucuugccacaggacugcgcaauucuccccagggcgagacccggggccucuuuggggcgaucgccggauucauugaaggcggguggcagggaaugguggacggcugguacggguaucaccauagcaacgagcagggauccggcuacgcugccgauaaagaaagcacccaaaaggcuaucgacggcgugacaaauaaagucaacucuauuaucgauaagaugaacacgcaguuugaggccguggggagagaguucaauaaccuggaacggcgcauugagaaucuuaacaagaaaauggaagacggauuccuggauguuuggaccuauaaugccgagcuccuggugcugauggaaaacgagagaacacucgacuuucacgauuccaauguccggaaccuguacgacaaggugcgccuucagcugaaagauaaugcuaaggaacucggcaacggguguuucgaguuuuaccauaaaugcgacaaugaguguauggaaagcguuagaaacggaaccuaugauuacccucaauauucugaggaagcgcggcugaagcgcgaggagaucagcggcgugaaacuugaauccauugggaucuaccagauccugucuauuuauagcacagucgccuccagccucgugcuggcuaucaugauggccggccugucucucuggaugugcuccaauggaagccugcagugcagaauuuguaucuga

SEQ ID NO: 200009 - RNA, 1701 nt, Artificial Sequence
  derived and/or modified CDS sequence (opt5) from hemagglutinin__InfluenzaA__AEX09175
augaaggccauccuggugguccuccuguacaccuucgcuacagccaacgcggacacgcuuugcauuggcuaucacgcuaauaacagcaccgauacaguugacaccgugcuggagaaaaauguggccgucacacauuccgugaaccuccuggaagauaagcacaaugggaaacuuuguaagcugagaggaguugcuccccuccaucugggcaaaugcaacaucgccggguggauucugggaaauccugagugugaaucucucagcaccgccuccucuuggagcuacaucguggagacauccucuagcgacaacgggaccugcuauccgggcgauuuuauugacuacgaagaacugcgggagcagcuuuccagcgucucuuccuucgaacgcuuugagaucuuccccaagacgagcucuuggccuaaucacgauuccaacaagggagugaccgcugccuguccccaugcgggcgccaagagcuuuuauaagaaucugaucuggcucguuaaaaagggcaacucuuacccuaaacuguccaagagcuauauuaaugacaaggggaaagaagugcuuguccuguggggaauccaccaccccuccacaucugcugaucaacagagccucuaccagaacgccgacgcuuacguguucgugggcaccuccagauauagcaagaaauuuaagccugagauugccauccggccgaaaguccgcgauagagaggggcggaugaauuacuauuggacacugguugaacccggagacaagauuaccuucgaggcgacgggcaaccugguggugccucgcuacgccuuugcuauggaaagaaacgccgggucuggaaucauuaucuccgauacacccguccaugacugcaauaccacaugucagaccccuaaaggcgcuaucaacaccagccuccccuuccaaaauauucacccgaucacaauuggcaagugcccuaaguaugugaaaucuacgaagcugcggcuugccaccgggcugcgcaacguucccagcauccaguccagaggacucuuuggcgccauugcuggguucaucgagggaggcuggacagggaugguggacggaugguacggcuaucaucaccagaaugaacagggcucuggguacgcggccgaucugaaaagcacccaaaacgcuaucgacgagauuacaaauaaggucaacuccgugaucgagaaaaugaauacccaguuuacggccguuggaaaggaguucaaccaccuugagaagcggauugaaaaucugaacaaaaagguggaugacggcuuccucgauaucuggacauacaaugccgagcugcugguccuccuggaaaacgagcgcacccuugacuaucaugauagcaaugugaaaaaccuguacgagaaggucagaucucagcucaaaaacaaugcuaaggaaauugggaacggauguuuugaguucuaucacaagugcgacaauaccuguauggaauccgugaaaaacggcacauacgauuauccuaaguacagcgaggaagccaaacugaaucgggaggagaucgacgggguuaaacuugaaucuacccgcaucuaucagauucuggcgaucuacuccacaguggcuagcucccucguccuggugguuucucugggcgccauuagcuuuuggaugugcuccaacggaucucuccaaugcagaaucuguauuuga

SEQ ID NO: 200010 - RNA, 1701 nt, Artificial Sequence; identical to SEQ ID NO: 194741
  derived and/or modified CDS sequence (opt5) from hemagglutinin__InfluenzaA__AEX25795

SEQ ID NO: 200011 - RNA, 1701 nt, Artificial Sequence
  derived and/or modified CDS sequence (opt5) from hemagglutinin__InfluenzaA__AEX25797
auggaggccauccuggugguccuccuguacaccuucgcuacagccaacgcggacacgcuuugcauuggcuaucacgcuaauaacagcaccgauacaguugacaccgugcuggaaaagaaugugacagucacccauuccgugaaccuccuggaggauaaacacaaugggaagcuguguaaacugagaggaguugcuccccuccaucugggcaagugcaacaucgccggguggauucugggaaauccugaaugugagucucucagcacagccuccucuuggagcuacaucguggaaaccuccaacucugacaauggcacgugcuauccgggggauuuuauugacuacgaggagcugcgggaacagcuuagcuccgucagcucuuucgagcgcuuugaaaucuuccccaaaaccuccagcuggccuaaccacgauucuaauaagggagugacagccgcuuguccccaugccggcgcgaaguccuuuuauaaaaaccugaucuggcucguuaagaaaggcaauagcuacccuaagcugucuaaauccuauauuaacgacaaggggaaggaggugcuuguccuguggggaauccaccaccccagcaccuccgccgaucaacagucucucuaccagaaugcugacgccuacguguucgugggcagcuccagauauagcaaaaaguuuaaaccugagauugcuauccggccgaagguccgcgaucaggaagggagaaugaacuacuauuggacacugguugagcccggagacaaaauuaccuucgaagccacgggcaaccugguggugccucgguacgcguuugccauggagcgcaaugcugggucuggaaucauuaucuccgauacacccguccaugacugcaacaccacaugucaaaccccuaagggcgccaucaauaccagccuccccuuccacaacauucauccgaucacaauuggcaaaugcccuaaguaugugaagucuacgaaacugagacuugcuaccgggcugcggaauguucccagcauccagucccgcggacucuuuggcgccauugccggguucaucgaaggaggcuggacagggaugguggacggaugguacggcuaucaccaccagaacgagcagggcucuggguacgcugcggaucuuaagagcacccaaaaugccaucgacgagauuacaaacaaagucaauuccgugaucgaaaagaugaacacccaguuuacggcuguuggaaaagaguucaaucaucuugaaaagagaauugagaaccugaauaagaaaguggaugacggcuuccucgauaucuggacauacaacgccgaacugcugguccuccuggagaaugagcggacccuugacuaucacgauagcaacgugaagaaccuguacgaaaaaguccgcucucagcucaagaauaacgccaaagagauugggaauggauguuuugaguucuaucauaagugcgacaacaccuguauggaauccgugaagaauggcacauacgauuauccuaaauacagcgaagaggcuaagcugaacagagaggaaaucgacgggguuaaacuugagucuacccggaucuaucagauucuggccaucuacuccacaguggcgagcucccucguccuggugguuucucugggcgcuauuagcuuuuggaugugcuccaauggaucucuccaaugccgcaucuguauuuga

SEQ ID NO: 200012 - RNA, 1701 nt, Artificial Sequence
  derived and/or modified CDS sequence (opt5) from hemagglutinin__InfluenzaA__AEX25798
augaaggccauccuggugguccuccuguacaccuucgcuacagccaacgcggacacgcuuugcauuggcuaucacgcuaauaacagcaccgauacaguugacaccgugcuggagaagaaugugacagucacccauuccgugaaccuccuggaagauaagcacaaugggaaacuuuguaagcugagaggaguugcuccccuccaucugggcaaaugcaacaucgccggguggauucugggaaauccugagugugaaucucucagcacagccuccucuuggagcuacaucguggagaccuccucuagcgacaacggcacgugcuauccgggggauuuuauuaauuacgaagaacugcgggagcagcuuuccagcgucucuuccuucgaacgcuuugagaucuuccccaagaccagcucuuggccuaaccacgacuccaauaagggagugacagccgcuuguccccaugccggcgcgaaaucuuuuuauaagaaccugaucuggcucguuaaaaagggcaauagcuacccuaaacuguccaagagcuauauuaacgauaaggggaaagaagugcuuguccuguggggaauccaccaccccuccaccucugccgaccaacagagccucuaccagaaugcugaugccuacguguucgugggcacauccagauauagcaagaaauuuaagccugagauugcuauccggccgaaaguccgcgaccaggaggggagaaugaacuacuauuggacccugguugaacccggagauaagauuacguucgaggccacaggcaaccugguggugccucgguacgcguuugccauggaacgcaaugcugggucuggaaucauuaucuccgacacccccguccaugauugcaacacaaccugucaaaccccuaaaggcgccaucaauacaagccuccccuuccacaacauucauccgaucacgauuggcaagugcccuaaguaugugaaaucuaccaagcugagacuugcuacagggcugcggaauguucccagcauccagucccgcggacucuuuggcgccauugccggguucaucgagggaggcuggaccgggaugguggacggaugguacggcuaucaccaccagaacgaacagggcucuggguacgcugcggaccugaaaagcacacaaaaugccaucgaugagauuaccaacaaggucaauuccgugaucgagaaaaugaacacgcaguuuacagcuguuggaaaggaguucaaucaucuugagaagagaauugaaaaccugaauaaaaagguggacgauggcuuccucgacaucuggaccuacaacgccgagcugcugguccuccuggaaaaugagcggacccuugauuaucacgacagcaacgugaaaaaccuguacgagaagguccgcucucagcucaaaaauaacgccaaggaaauugggaauggauguuuugaguucuaucauaagugcgauaacacauguauggaauccgugaaaaauggcaccuacgacuauccuaaguacagcgaggaagcuaaacugaacagagaggagaucgaugggguuaaacuugaaucuacacggaucuaucagauucuggccaucuacuccacgguggcgagcucccucguccuggugguuucucugggcgcuauuagcuuuuggaugugcuccaauggaucucuccaaugccgcaucuguauuuga

SEQ ID NO: 200013 - RNA, 1701 nt, Artificial Sequence; identical to SEQ ID NO: 194741
  derived and/or modified CDS sequence (opt5) from hemagglutinin__InfluenzaA__AEX25800

SEQ ID NO: 200014 - RNA, 1701 nt, Artificial Sequence; identical to SEQ ID NO: 194741
  derived and/or modified CDS sequence (opt5) from hemagglutinin__InfluenzaA__AEX25803

SEQ ID NO: 200015 - RNA, 1701 nt, Artificial Sequence; identical to SEQ ID NO: 194983
  derived and/or modified CDS sequence (opt5) from hemagglutinin__InfluenzaA__AEX25808

SEQ ID NO: 200016 - RNA, 1701 nt, Artificial Sequence; identical to SEQ ID NO: 197711
  derived and/or modified CDS sequence (opt5) from hemagglutinin__InfluenzaA__AEX25810

SEQ ID NO: 200017 - RNA, 1701 nt, Artificial Sequence
  derived and/or modified CDS sequence (opt5) from hemagglutinin__InfluenzaA__AEX25811
auggaggccauccuggugguccuccuguacaccuucgcuacagccaacgcggacacgcuuugcauuggcuaucacgcuaauaacagcaccgauacaguugacaccgugcuggaaaagaaugugacagucacccauuccgugaaccuccuggaggauaagcacaaugggaaacuuuguaaacugagaggaguugcuccccuccaucugggcaagugcaacaucgccggguggauucugggaaauccugaaugugagucucucuuuacagccagcuccuggucuuacaucguggaaaccagcuccucugacaacggcacgugcuauccgggggauuucauugacuacgaggagcugcgggaacagcuuagcuccgucagcucuuuugagcgcuucgaaaucuuucccaaaaccuccagcuggccuaaucacgauucuaacaagggagugacagccgcuuguccccaugccggcgcgaaguccuucuauaaaaaucugaucuggcucguuaagaaaggcaacagcuacccuaagcugucuaaauccuauauuaaugacaaggggaaggaggugcuuguccuguggggaauccaccaccccagcaccuccgccgaucaacagucucucuaccagaacgcugacgccuacguguuugugggcagcuccagauauagcaaaaaguucaaaccugagauugcuauccggccgaagguccgcgaucaggaagggagaaugaauuacuauuggacacugguugagcccggagacaaaauuaccuuugaagccacgggcaaccugguggugccucgguacgcguucgccauggagcgcaaggcugggucuggaaucauuaucuccgauacacccguccaugacugcaacaccacaugucaaaccccuaaaggcgccaucaauaccagccuccccuuucacaacauucauccgaucacaauuggcaagugcccuaaguaugugaaaucuacgaagcugagacuugcuaccgggcugcggaauguucccagcauccagucccgcggacucuucggcgccauugccggguuuaucgaaggaggcuggacagggaugguggacggaugguacggcuaucaccaccagaacgagcagggcucuggguacgcugcggaucugaaaagcacccaaaaugccaucgacgagauuacaaacaaggucaauuccgugaucgaaaagaugaacacccaguucacggcuguuggaaaggaguucaaucaucuugaaaagagaauugagaaccugaauaaaaagguggaugacggcuuucucgauaucuggacauacaacgccgaacugcugguccuccuggagaaugagcggacccuugacuaucacgauagcaacgugaaaaaucuguacgaaaagguccgcucucagcucaaaaacaacgccaaggagauugggaauggauguuucgaauuuuaucauaagugcgacaacaccuguauggaguccgugaaaaauggcacauacgauuauccuaaguacagcgaagaggcuaaacugaacagagaggaaaucgacgggguuaaacuugagucuacccggaucuaucagauucuggccaucuacuccacaguggcgagcucccucguccuggugguuucucugggcgcuauuagcuucuggaugugcuccaauggaucucuccaaugccgcaucuguauuuga

SEQ ID NO: 200018 - RNA, 1701 nt, Artificial Sequence; identical to SEQ ID NO: 197711
  derived and/or modified CDS sequence (opt5) from hemagglutinin__InfluenzaA__AEX25814

SEQ ID NO: 200019 - RNA, 1701 nt, Artificial Sequence
  derived and/or modified CDS sequence (opt5) from hemagglutinin__InfluenzaA__AEX25816
augaaggccauccuggugguccuccuguacaccuucgcuacagccaacgcggacacgcuuugcauuggcuaucacgcuaauaacagcaccgauacaguugacaccgugcuggagaagaaugugacagucacccauuccgugaaccuccuggaagauaagcacaaugggaaacuuuguaagcugagaggaguugcuccccuccaucugggcaaaugcaacaucgccggguggauucugggaaauccugagugugaaucucucagcacagccaacuccuggucuuacaucguggagaccagcuccucugacaauggcacgugcuauccgggggauuuuauuaacuacgaagaacugcgggagcagcuuagcuccgucagcucuuucgaacgcuuugagaucuuccccaagaccuccagcuggccuaaucacgacucuaacaagggagugacagccgcuuguccccaugccggcgcgaaauccuuuuauaagaaucugaucuggcucguuaaaaagggcaacagcuacccuaaacugucuaaguccuauauuaaugauaaggggaaagaagugcuuguccuguggggaauccaccaccccagcaccuccgccgaccaacagucucucuaccagaacgcugaugccuacguguucgugggcacaagcagauauuccaagaaauuuaagccugagauugcuauccggccgaaaguccgcgaccaggaggggagaaugaacuacuauuggacccugguugaacccggagauaagauuacguucgaggccacaggcaaucugguggugccucgguacgcguuugccauggaacgcaacgcugggagcggaaucauuaucucugacacccccguccaugauugcaauacaaccugucaaaccccuaaaggcgccaucaacacaucccuccccuuccagaauauucacccgaucacgauuggcaagugcccuaaguaugugaaaagcaccaagcugagacuugcuacagggcugcggaacguucccucuauccagagccgcggacucuuuggcgccauugccggguucaucgagggaggcuggaccgggaugguggacggaugguacggcuaucaucaccagaaugaacaaggcuccggguacgcugcggaccugaaaucuacacagaacgccaucgaugagauuaccaauaaggucaacagcgugaucgagaaaaugaauacgcaguuuacagcuguuggaaaggaguucaaccaccuugagaagagaauugaaaaucugaacaaaaagguggacgauggcuuccucgacaucuggaccuacaaugccgagcugcugguccuccuggaaaacgagcggacccuugauuaucaugacuccaacgugaaaaaucuguacgagaagguccgcagccagcucaaaaacaaugccaaggaaauugggaacggauguuuugaguucuaucacaagugcgauaauacauguauggaaucugugaaaaacggcaccuacgacuauccuaaguacuccgaggaagcuaaacugaauagagaggagaucgaugggguuaaacuugaaagcacacggaucuaucaaauucuggccaucuacucuacgguggcguccagccucguccuggugguuucccugggcgcuauuucuuuuuggaugugcagcaacggaucccuccagugccgcaucuguauuuga

SEQ ID NO: 200020 - RNA, 1701 nt, Artificial Sequence
  derived and/or modified CDS sequence (opt5) from hemagglutinin__InfluenzaA__AEX25818
auggaggccauccuggugguccuccuguacaccuucgcuacagccaacgcggacacgcuuugcauuggcuaucacgcuaauaacagcaccgauacaguugacaccgugcuggaaaagaaugugacagucacccauuccgugaaccuccuggaggauaaacacaaugggaagcuguguaaacugagaggaguugcuccccuccaucugggcaagugcaacaucgccggguggauucugggaaauccugaaugugagucucucagcacagccuccucuuggagcuacaucguggaaaccuccaacucugacaauggcacgugcuauccgggggauuuuauugacuacgaggagcugcgggaacagcuuagcuccgucagcucuuucgagcgcuuugaaaucuuccccaaaaccuccagcuggccuaaccacgauucuaauaagggagugacagccgcuuguccccaugccggcgcgaaguccuuuuauaaaaaccugaucuggcucguuaagaaaggcaauagcuacccuaagcugucuaaauccuauauuaacgacaaggggaaggaggugcuuguccuguggggaauccaccaccaaagcaccuccgccgaucagcagucucucuaccagaaugcugacgccuacguguucgugggcagcuccagauauagcaaaaaguuuaaacccgagauugcuauccggccuaagguccgcgaucaagaagggagaaugaacuacuauuggacacugguugagccgggagacaaaauuaccuucgaagccacgggcaaccugguggugccccgguacgcguuugccauggagcgcaaugcugggucuggaaucauuaucuccgauacaccuguccaugacugcaacaccacaugucagacccccaagggcgccaucaauaccagccucccuuuccacaacauucaucccaucacaauuggcaaaugcccgaaguaugugaagucuacgaaacugagacuugcuaccgggcugcggaauguuccuagcauccagucccgcggacucuuuggcgccauugccggguucaucgaaggaggcuggacagggaugguggacggaugguacggcuaucaccaccagaacgagcaaggcucuggguacgcugcggaucuuaagagcacccagaaugccaucgacgagauuacaaacaaagucaauuccgugaucgaaaagaugaacacccaguuuacggcuguuggaaaagaguucaaucaucuugaaaagagaauugagaaccugaauaagaaaguggaugacggcuuccucgauaucuggacauacaacgccgaacugcugguccuccuggagaaugagcggacccuugacuaucacgauagcaacgugaagaaccuguacgaaaaaguccgcucucagcucaagaauaacgccaaagagauugggaauggauguuuugaguucuaucauaagugcgacaacaccuguauggaauccgugaagaauggcacauacgauuaucccaaauacagcgaagaggcuaagcugaacagagaggaaaucgacgggguuaaacuugagucuacccggaucuaucaaauucuggccaucuacuccacaguggcgagcucccucguccuggugguuucucugggcgcuauuagcuuuuggaugugcuccaauggaucucuccagugccgcaucuguauuuga

SEQ ID NO: 200021 - RNA, 1701 nt, Artificial Sequence
  derived and/or modified CDS sequence (opt5) from hemagglutinin__InfluenzaA__AEX25824
augaaggccauccuggugguccuccuguacaccuucgcuacagccaacgcggacacgcuuugcauuggcuaucacgcuaauaacagcaccgauacaguugacaccgugcuggagaaaaaugugacagucacccauuccgugaaccuccuggaagauaagcacaaugggaaacuuuguaagcugagaggaguugcuccccuccaucugggcaaaugcaacaucgccggguggauucugggaaauccugagugugaaucucucagcacagccuccucuuggagcuacaucguggagaccuccucuagcgacaacggcacgugcuauccgggggauuuuauugacuacgaagaacugcgggagcagcuuuccagcgucucuuccuucgaacgcuuugagaucuuccccaagaccagcucuuggccuaaucacgauuccaacaagggagugacagccgcuuguccccaugccggcgcgaaaucuuuuuauaagaaucugaucuggcucguuaaaaagggcaacagcuacccuaaacuguccaagagcuauauuaaugacaaggggaaagaagugcuuguccuguggggaauccaccaccccuccaccucugccgaucaacagagccucuaccagaacgcugacgccuacguguucgugggcacauccagauauagcaagaaauuuaagccugagauugcuauccggccgaaaguccgcgaucaggaggggagaaugaauuacuauuggacccugguugaacccggagacaagauuacguucgaggccacaggcaaccugguggugccucgguacgcguuugccauggaacgcaacgcugggucuggaaucauuaucuccgauacccccguccaugacugcaauacaaccugucaaaccccuaaaggcgccaucaacacaagccuccccuuccagaauauucacccgaucacgauuggcaagugcccuaaguauguggagucuaccaaacugagacuugcuacagggcugcggaacguucccagcauccagucccgcggacucuuuggcgccauugccggguucaucgaaggaggcuggaccgggaugguggacggaugguacggcuaucaucaccagaaugagcaaggcucuggguacgcugcggaucuuaagagcacacagaacgccaucgacgagauuaccaauaaagucaacuccgugaucgaaaagaugaauacgcaguuuacagcuguuggaaaagaguucaaccaccuggaaaagagaauugagaaucugaacaagaaaguggaugacggcuuccucgauaucuggaccuacaaugccgaacugcugguccuccuggagaacgagcggacccuugacuaucaugauagcaaugugaagaaccuguacgaaaaaguccgcucucagcucaagaacaaugccaaagagauugggaacggauguuuugaguucuaucacaagugcgacaauacauguauggaguccgugaagaacggcaccuacgauuauccuaaauacagcgaagaggcuaagcugaauagagaggaaaucgacgggguuaaacuugagucuacacggaucuaucaaauucuggccaucuacuccacgguggcgagcucccucguccuggugguuucucugggcgcuauuagcuuuuggaugugcuccaacggaucucuccagugccgcaucuguauuuga

SEQ ID NO: 200022 - RNA, 1698 nt, Artificial Sequence
  derived and/or modified CDS sequence (opt5) from hemagglutinin__InfluenzaA__AEX33420
augaaggugaaacugcucguccugcuuugcaucuucaccgccacauacgcugacacgauuuguaucggcuaucacgccaacaauagcaccgauacaguugacaccgugcuggagaagaacgugacagucacccauuccgugaaucuccuggaagauucucacaacgggaaacuuugccugcucaagggaauugcgccccugcagcugggcaauuguagcguugcuggguggauccucggaaacccugagugcgaacugcuuauuuccaaagagucuuggagcuacaucguggaaacaccgaaucccgagaacggcaccuguuauccuggguacuuugccgacuaugaggaacugagagagcaacucuccucugucagcuccuucgaacgguuugagaucuuccccaaggagagcucuuggccuaaucauacggugaccggaguuuccgccagcugcucucacaacggcaaguccagcuuuuaccgcaaucugcuuuggcugacaggcaaaucugggcucuaucccaaccuguccaagagcuacgcuaauaacaaagaaaaggaggugcugguccucuggggagugcaucacccuccgaauauuggcgaucagagagcccuguaccacaccgaaaacgcuuauguguccgucguuucuagccauuacucccggcgcuucacacccgagaucgccaaaagaccuaaggugcgggaccaggaagggcgcauuaacuauuacuggacccuucuggagcccggagauacgaucauuuuugaggcgaauggcaaccucaucgccccuagauaugcuuucgcccugagccggggguuuggaucuggcauuaucacauccaaugcucccauggacgaaugugaugccaagugccagaccccgcaaggcgcgaucaacagcucucuuccuuuccagaaugugcaccccgucacaauuggggaguguccuaaauacguuaagagcgccaaacugcgcauggugaccggacucagaaacauccccuccauucagucucggggccuguuuggggcuaucgccggauucauugaaggcggguggaccggaaugguggacggcugguauggcuaccaucaccagaaugagcaagggagcggauacgcugccgaucagaaguccacacagaacgccaucaauggcaucacgaacaaagucaauagcgugauugaaaagaugaacacccaguuuacagcuguugggaaagaguucaauaagcuggagcgcagaauggaaaaccucaauaagaaaguggacgauggauuccuggacaucuggaccuauaacgcggagcuucugguccuccuggaaaacgagcggacacuugacuuucacgauucuaaugugaagaaccuguacgaaaaagucaagucccaacucaaaaauaacgccaaggagauuggcaaugggugcuucgaguuuuaucauaaguguaacgacgaaugcauggagagcgugaaaaauggcaccuacgauuaucccaaguacucugaagaguccaaacugaaccgcgagaagaucgacggaguuaaacuggaaagcaugggcguguaucagauucucgcuaucuacuccacggucgccucuagccuggugcuucugguuucccucggggccaucucuuucuggaugugcagcaauggaucccugcaguguagaauuugcaucuga

SEQ ID NO: 200023 - RNA, 1701 nt, Artificial Sequence
  derived and/or modified CDS sequence (opt5) from hemagglutinin__InfluenzaA__AEX33453
augaagaccaucauugcccugagcuacauccucugccugguguucgcucagaaacuucccggcaacgacaauuccacagccacgcugugucucgggcaccaugcggucccuaacggaaccauuguuaagacaaucaccaaugaucaaauugaggugacaaacgcuaccgaacuggugcagucuagcuccacaggcgggaucugcgacucuccgcaccagauccuugauggagagaauuguacccugauugacgcccuccugggcgauccccagugcgacggguuucaaaacaaaaagugggaucuguucgucgaaagaagcaaagccuauuccaauuguuacccuuaugacgugcccgauuacgcuucucuccggagccugguugccuccagcggaacgcuugaguuuaacaaugaaucuuucaacuggaccggcgugacacagaauggcaccuccagcgcuugcaagcgcagaucugacaaguccuuuuucagccggcugaacuggcucacacaucugaaauauaaguacccugcccuuaaugucaccaugcccaacaaugagaaauuugauaagcuguauaucuggggagugcaccauccugggacggacucugaucagauuucccucuacgcgcaggccagcggccgcaucacaguuuccaccaaaagaucucaacagacagugauuccgaacaucgggagccggccccgcgucagagacguguccagccggauuucuaucuacuggaccaucgugaagccuggagacauucugcugaucaacuccaccggcaaucucauugcuccccgcggguauuucaagaucagaagcggaaaaucuagcauuaugcgguccgaugccccuaucggcaaguguaacucugagugcaucacacccaauggcagcauuccgaacgacaaaccuuuucagaaugucaaccgcaucacguacggggcuugucccagauauguuaagcagaauacccugaaacuugccacaggaaugcggaacgugccugaaaagcaaacccgcggcauuuucggggcgaucgccggauuuauugagaauggcugggaagggaugguggauggaugguacggcuucagacaccagaacuccgagggcacagggcaggcugccgaccugaaaagcacccaagcugccaucaaucagaucaacggaaagcucaaucggcugauuggcaagacgaacgagaaauuucaccagaucgaaaaggaguucucugaagucgaggggcgcauucaggaucuugaaaaauauguggaggacacaaagaucgaucugugguccuacaaugccgagcuccugguugcucuggaaaaccaacauaccauugaccucaccgauagcgagaugaacaaacuguucgaaagaacaaagaagcagcuucgggagaaugcggaagacaugggaaacggcugcuuuaaaaucuaucacaagugugauaaugccugcauugggucuaucagaaacggcaccuacgaccaugacguguaccgcgaugaggcucugaauaaccgguuccagaucaaaggagucgagcucaaguccggcuauaaagacuggauucuguggaucagcuuugccauuuccugcuuccuucuguguguggcccuccugggguuuaucaugugggcuugccagaagggaaauauuagauguaacaucugcaucuga

SEQ ID NO: 200024 - RNA, 1701 nt, Artificial Sequence; identical to SEQ ID NO: 193867
  derived and/or modified CDS sequence (opt5) from hemagglutinin__InfluenzaA__AEX33464

SEQ ID NO: 200025 - RNA, 1701 nt, Artificial Sequence; identical to SEQ ID NO: 193867
  derived and/or modified CDS sequence (opt5) from hemagglutinin__InfluenzaA__AEX33475

SEQ ID NO: 200026 - RNA, 1701 nt, Artificial Sequence; identical to SEQ ID NO: 193867
  derived and/or modified CDS sequence (opt5) from hemagglutinin__InfluenzaA__AEX33486

SEQ ID NO: 200027 - RNA, 1701 nt, Artificial Sequence; identical to SEQ ID NO: 193867
  derived and/or modified CDS sequence (opt5) from hemagglutinin__InfluenzaA__AEX33497

SEQ ID NO: 200028 - RNA, 1701 nt, Artificial Sequence; identical to SEQ ID NO: 193867
  derived and/or modified CDS sequence (opt5) from hemagglutinin__InfluenzaA__AEX33508

SEQ ID NO: 200029 - RNA, 1701 nt, Artificial Sequence; identical to SEQ ID NO: 193867
  derived and/or modified CDS sequence (opt5) from hemagglutinin__InfluenzaA__AEX33519

SEQ ID NO: 200030 - RNA, 1701 nt, Artificial Sequence
  derived and/or modified CDS sequence (opt5) from hemagglutinin__InfluenzaA__AEX33541
augaagaccaucauugcccugagcuacauccucugccugguguucgcucagaaacuucccggcaacgacaauuccacagccacgcugugucucgggcaccaugcggucccuaacggaaccauuguuaagacaaucaccaaugaucaaauugaggugacaaacgcuaccgaacuggugcagaucucuagcacaggcgggaucugcgacuccccgcaccagauucuugauggagagaauuguacccugaucgacgcccuccugggcgauccccagugcgacggguuucaaaacaaaaagugggaucuguucgucgaaagaucuaaagccuauagcaauuguuacccuuaugacgugcccgauuacgcuucccuccggucucugguugccagcuccggaacgcuugaguuuaacaaugagagcuucgacuggaccggcgugacacagaacggcaccucuuccagcugcaagcgcagaucuaauaaguccuuuuucagccggcugaacuggcucacacaucugaaauauaaguacccugcucuuaaugucaccaugcccaacaaugaaaaauuugauaagcuguauauuuggggagugcaccauccugggacggacucugaucagaucucccucuacgcccaggcgagcggccgcauuacaguuuccaccaaaagaucucaacagacagugaucccgaacauugggagccggccccgcgucagagacguguccagccggaucucuaucuacuggaccauugugaagccuggagacauccugcugauuaacuccaccggcaaucucaucgcuccccgcggguauuucaagauuagaagcggaaaaucuagcaucaugcgguccgaugccccuaucggcaaguguaacucugagugcauuacacccaauggcagcaucccgaacgacaaaccuuuucagaaugucaaccgcauuacguacggggccugucccagauauguuaagcagaauacccugaaacuugcuacaggaaugcggaacgugccugaaaagcaaacccgcggcaucuucggggccauugcgggauuuaucgagaauggcugggaagggaugguggauggaugguacggcuucagacaccagaacuccgagggcacagggcaggccgcugaccugaaaagcacccaagccgcuaucaaucagauuaacggaaagcucaaucggcugaucggcaagacgaacgagaaauuucaccagauugaaaaggaguucucugaagucgaggggagaauccaggaucuugaaaaauauguggaggacacaaagauugaucugugguccuacaaugccgagcuccugguugcccuggaaaaccaacauaccaucgaccucaccgauagcgagaugaacaaacuguucgaacgcacaaagaagcagcuucgggagaaugcugaagacaugggaaacggcugcuuuaaaauuuaucacaagugugauaaugcgugcaucgggucuaucagaaacggcaccuacgaccaugacguguaccgcgaugaggcccugaauaaccgguuccagauuaaaggagucgagcucaaguccggcuauaaagacuggauccuguggauuagcuuugcuaucuccugcuuccuucuguguguggcccuccugggguuuauuaugugggccugccagaagggaaauaucagauguaacaucugcauuuga

SEQ ID NO: 200031 - RNA, 1701 nt, Artificial Sequence
  derived and/or modified CDS sequence (opt5) from hemagglutinin__InfluenzaA__AEX33574
augaagaccaucauugcccugagcuacauccucugccugguguucgcucagaaacuucccggcaacgacaauuccacagccacgcugugucucgggcaccaugcggucccuaacggaaccauuguuaagacaaucaccaaugaucaaauugaggugacaaacgcuaccgaacuggugcagucuagcuccacaggcgggaucugcgacucuccgcaccagauccuugauggagagaauuguacccugauugacgcccuccugggcgauccccagugcgacggguuucaaaacaaaaagugggaucuguucgucgaaagaagcaaagccuauuccaauuguuacccuuaugacgugcccgauuacgcuucucuccggagccugguugccuccagcggaacgcuugaguuuaacaaugaaucuuucaacuggaccggcgugacacagaauggcaccuccagcgcuugcaagcgcagaucuaacaaguccuuuuucagccggcugaauuggcucacacaucugaaauuuaaguauccugcccuuaacgucaccaugcccaauaacgagaaauucgacaagcuguacaucuggggagugcaccauccugggacggauaacgaccagauuucucucuaugcgcaggccuccggccgcaucacaguuagcaccaaaagaucccaacagacagugauuccgaauaucgggucucggccccgcgucagagaugugccuagccggauuuccaucuacuggaccaucgugaagcccggagacauucugcugaucaacagcaccggcaaucucauugcuccucgcggguacuuuaagaucagaucuggaaaauccagcauuaugcggucugacgcccccaucggcaaguguaacagcgagugcaucacaccgaauggcuccauuccuaacgauaaacccuuccagaaugucaaccgcaucacguauggggcuuguccuagauacguuaagcagaauacccugaaacuugccacaggaaugcggaacgugcccgaaaagcaaacccgcggcauuuuuggggcgaucgccggauucauugagaauggcugggaagggaugguggacggaugguauggcuuuagacaccagaacucugagggcacagggcaggcugccgaucugaaaagcacccaagcugccaucaaucagaucaacggaaagcucaaucggcugauuggcaagacgaacgagaaauuccaccagaucgaaaaggaguucuccgaagucgaggggcgcauucaggaccuugaaaaauacguggaggauacaaagaucgaccuguggagcuauaacgccgagcuccugguugcucuggaaaaucaacauaccauugaucucaccgacucugagaugaacaaacuguuugaaagaacaaagaagcagcuucgggagaaugcggaagauaugggaaacggcugcuucaaaaucuaccacaagugugacaaugauugcauuggguccaucagaaacggcaccuaugaccaugacguguaccgcgaugaggcccugaauaaccgguuucagaucaaaggagucgagcucaagagcggcuacaaagacuggauucuguggaucucuuucgcuauuuccugcuuucuucuguguguggcccuccugggguucaucaugugggccugccagaagggaaauauuagauguaacaucugcaucuga

SEQ ID NO: 200032 - RNA, 1701 nt, Artificial Sequence; identical to SEQ ID NO: 193867
  derived and/or modified CDS sequence (opt5) from hemagglutinin__InfluenzaA__AEX33585

SEQ ID NO: 200033 - RNA, 1701 nt, Artificial Sequence
  derived and/or modified CDS sequence (opt5) from hemagglutinin__InfluenzaA__AEX33596
augaagaccaucauugcccugagcuacauccucugccugguguucgcucagaaacuucccggcaacgacaauuccacagccacgcugugucucgggcaccaugcggucccuaacggaaccauuguuaagacaaucaccaaugaucaaauugaggugacaaacgcuaccgaacuggugcagucuagcuccacaggcgggaucugcgacucuccgcaccagauccuugauggagagaauuguacccugauugacgcccuccugggcgauccccagugcgacggguuucaaaacaaaaagugggaucuguucgucgaaagaagcaaagccuauuccaauuguuacccuuaugacgugcccgauuacgcuucucuccggagccugguugccuccagcggaacgcuugaguuuaacaaugaaucuuucaacuggaccggcgugacacagaauggcaccuccagcgcuugcaagcgcagaucuaacaaguccuuuuucagccggcugaauuggcucacacaucugaaauuuaaguauccugcccuuaacgucaccaugcccaauaacgagaaauucgacaagcuguacaucuggggagugcaccauccugggacggauaacgaccagauuucucucuaugcgcaggccuccggccgcaucacaguuagcaccaaaagaucccaacagacagugauuccgaauaucgggucucggccccgcgucagagauauuccuagccggaucuccaucuacuggaccauugugaagcccggagacauccugcugauuaacagcaccggcaaucucaucgcuccucgcggguacuuuaagauuagaucuggaaaauccagcaucaugcggucugacgcccccaucggcaaguguaacagcgagugcauuacaccgaauggcuccaucccuaacgauaaacccuuccagaaugugaaccgcauuacguauggggcuuguccuagauacgucaagcagaauacccugaaacuugccacaggaaugcggaacguucccgaaaagcaaacccgcggcaucuuuggggcgauugccggauucaucgagaauggcugggaagggaugguggacggaugguauggcuuuagacaccagaacucugagggcacagggcaggcugccgaucugaaaagcacccaagcugccaucaaucagauuaacggaaagcucaaucggcugaucggcaagacgaacgagaaauuccaccagauugaaaaggaguucuccgaaguggaggggagaauccaggaccuugaaaaauacgucgaggauacaaagauugaccuguggagcuauaacgccgagcuccugguggcucuggaaaaucaacauaccaucgaucucaccgacucugagaugaacaaacuguuugaacgcacaaagaagcagcuucgggagaaugcggaagauaugggaaacggcugcuucaaaauuuaccacaagugugacaaugccugcaucggguccaucagaaacggcaccuaugaucaugacguuuaccgcgacgaggcucugaauaaccgguuucagauuaaaggaguggagcucaagagcggcuacaaagauuggauccuguggauuucuuucgccaucuccugcuuucuucugugugucgcccuccugggguucauuaugugggcuugccagaagggaaauaucagauguaacaucugcauuuga

SEQ ID NO: 200034 - RNA, 1701 nt, Artificial Sequence; identical to SEQ ID NO: 193867
  derived and/or modified CDS sequence (opt5) from hemagglutinin__InfluenzaA__AEX33618

SEQ ID NO: 200035 - RNA, 1701 nt, Artificial Sequence; identical to SEQ ID NO: 193867
  derived and/or modified CDS sequence (opt5) from hemagglutinin__InfluenzaA__AEX33629

SEQ ID NO: 200036 - RNA, 1701 nt, Artificial Sequence; identical to SEQ ID NO: 200033
  derived and/or modified CDS sequence (opt5) from hemagglutinin__InfluenzaA__AEX33640

SEQ ID NO: 200037 - RNA, 1701 nt, Artificial Sequence
  derived and/or modified CDS sequence (opt5) from hemagglutinin__InfluenzaA__AEX33836
augaagaccaucauugcccugagcuacauccucugccugguguucgcucagaaacuucccggcaacgacaauuccacagccacgcugugucucgggcaccaugcggucccuaacggaaccauuguuaagacaaucaccaaugaucaaauugaggugacaaacgcuaccgaacuggugcagucuagcuccacaggcgggaucugcgacucuccgcaccagauccuugauggagagaauuguacccugauugacgcccuccugggcgauccccagugcgacggguuucaaaacaaaaagugggaucuguucgucgaaagaagcaaagccuauuccaauuguuacccuuaugacgugcccgauuacgcuucucuccggagccugguugccuccagcggaacgcuugaguuuaacaaugaaucuuucaacuggaccggcgugacacagaauggcaccuccagcgcuugcaagcgcagaucuaacaauuccuuuuucagccggcugaacuggcucacacaucugaaguuuaaauauccugcccuuaaugucaccaugcccaacaacgagaaguucgacaaacuguacaucuggggagugcaccauccugggacggauaaugaccagauuuuucucuaugcgcaggccucuggccgcaucacaguuuccaccaagagaagccaacagacagugauuccgaacaucgggucccggccccgcgucagaaauauuccuucucggaucagcaucuacuggaccauugugaaacccggagauaucuuccugauuaacuccaccggcaaucugaucgcuccucgcggguacuuuaagauuagaagcggaaagucuuccaucaugcggagcgacgcccccaucggcaaauguaacucugagugcauuacaccgaauggcagcaucccuaacgacaagcccuuccagaaugugaaccgcauuacguauggggcuuguccuagauacgucaaacagaauacccucaagcuggccacaggaaugcggaacguucccgaaaaacaaacccgcggcaucuuuggggcgauugccggauucaucgagaauggcugggaagggaugguggauggaugguauggcuucagacaccagaacuccgagggcaucgggcaggcugccgaccuuaagucuacacaagcugccauuaaucagaucaacggaaaacugaaccggcucauuggcaagaccaaugagaaguuucaccagaucgaaaaagaguucagcgaaguggaggggcgcauucaggaucuggaaaaguacgucgaggacacgaaaaucgaucuuugguccuauaacgccgagcugcucguggcucuggaaaaucaacauacaauugaccugaccgauagcgagaugaacaagcucuuugaaagaaccaaaaagcagcugcgggagaaugcggaagacaugggaaacggcugcuucaagaucuaccacaaaugugauaaugccugcaucgggucuauuagaaacggcacauaugaccaugauguuuaccgcgacgaggcucuuaauaaccgguuucagaucaagggaguggagcugaaauccggcuacaaggacuggauucucuggaucagcuucgccauuucuugcuuucugcuuugugucgcccugcucggguucaucaugugggcuugccagaaaggaaauaucagauguaacauuugcaucuga

SEQ ID NO: 200038 - RNA, 1701 nt, Artificial Sequence; identical to SEQ ID NO: 192702
  derived and/or modified CDS sequence (opt5) from hemagglutinin__InfluenzaA__AEX33880

SEQ ID NO: 200039 - RNA, 1698 nt, Artificial Sequence
  derived and/or modified CDS sequence (opt5) from hemagglutinin__InfluenzaA__AEX33913
augaaggugaaacugcucguccugcuuugcaccuucacagccacguacgcugacaccaucuguauuggcuaucacgccaacaauagcacagauaccguugacacagugcuggagaagaacgugaccgucacacauuccgugaaucuccuggaagauucucacaacgggaaacuuugccugcucaagggaaucgcgccccugcagcugggcaauuguagcguugcuggguggauucucggaaacccugagugcgaacugcuuaucuccagagagucuuggagcuacauuguggaaaaaccgaaucccgagaacggcaccuguuauccugggcauuuugccgacuacgaggaacugcgggagcaacucuccucugucagcuccuucgaacgcuuugagaucuuccccaaggagaauagcuggccuaaccacacgaccacaggagugucugccuccugcagccauaauggcgaaucuuccuuuuauaagaaccugcuuuggcugaccggcaaaaaugggcucuaccccaaccugagcaagucuuaugcuaauaacaaaaagaaagagguucuggugcucuggggaguccaccacccuccgaacaucggcaaucagagagcccuguaccauacagaaaacgcuuacguguccguggucagcucccacuauucucggaaguucacccccgagauugccaagcgcccuaaaguuagagaucaggaagggcggaucaauuacuauuggacgcuucuggagcccggagacacaauuaucuuugaggcgaacggcaaucucauugccccucgcuacgcuuucgcccugagcagaggguuuggauccggcaucauuaacagcaaugcucccauggaugaaugugacgccaagugccagaccccgcaaggcgcgaucaacucuucccuuccuuuccagaaugugcaucccgugacaaucggggaguguccuaaauauguccggagcgccaagcugcgcauggugaccggacucagaaacauucccucuauccagagccggggccuguuuggggcuauugccggauucaucgaaggcggguggaccggaaugguugauggcugguacggcuaucaccaccagaaugagcaaggguccggauacgcugccgaccagaaaucuacacagaacgccauuaauggcaucacgaacaaggugaauagcgucaucgaaaagaugaacacccaguuuacagcuguggggaaagaguucaacaagcuggagcgcagaauggaaaaucucaacaaaaagguugaugacggauucauugauaucuggaccuacaaugcggagcugcuugugcugcucgaaaacgagcggacacuggacuuucaugacuccaaugucaaaaaccuuuaugaaaaggugaaaagccaacugaagaauaacgccaaggagauuggcaaugggugcuucgaguuuuaccacaaauguaacgaugaaugcauggagucugucaagaauggcaccuaugacuaccccaaauauuccgaagagagcaagcucaaccgcgagaaaaucgauggagugaaguucgaaucuaugggcguuuaccagauucuggcuaucuauuccacgguggccagcucccugguccuccuggugucucuuggggccaucagcuuuuggaugugcuccaauggaucucugcaguguagaauuugcaucuga

SEQ ID NO: 200040 - RNA, 1698 nt, Artificial Sequence
  derived and/or modified CDS sequence (opt5) from hemagglutinin__InfluenzaA__AEX33924
augaaggugaaacugcucguccugcuuugcaccuucacagccacguacgcugacaccaucuguauuggcuaucacgccaacaauagcacagauaccguugacacagugcuggagaagaacgugaccgucacacauuccgugaaucuccuggaagauucucacaacgggaaacuuugccugcucaagggaaucgcgccccugcagcugggcaauuguagcguugcuggguggauucucggaaacccugagugcgaaucccugaucucuagagagagcugguccuacauuguggaaaaaccgucucccgagaauggcaccuguuauccugggcauuuugccgacuacgaggaacuucgggagcaacugagcuccgucagcucuuucgaacgcuuugagaucuuccccaaggaguccagcuggccuaaccacacggccaccggagugucugcuuccugcagccauaauggcaagucuuccuuuuauaaaaaccuccuguggcuuacaggcaagaaugggcuguaccccaaccucagcaaauccuaugccaauaacaaggaaaaagagguucuggugcuguggggaguccaccacccuccgaauaucggcgaucagagagcucucuaccauaccgaaaacgccuacgugucuguggucagcucccacuauagccggaaguucacacccgagauugcgaagcgcccuaaaguuagagaccagaaggggcggaucaacuacuauuggacccugcuugaacccggagauacgauuaucuuugaggccaauggcaaccugauugcuccucgcuacgccuucgcucucucuagaggguuuggauccggcaucauuaauagcaacgcccccauggacgagugugaugcgaaaugccagacaccgcaaggcgccaucaauucuagccugccuuuccagaacgugcaucccgugaccaucggggaauguccuaaguauguccgguccgcuaaacuucgcauggugacaggacugagaaauauucccucuauccagagccggggccucuuuggggccauugcuggauucaucgagggcggguggaccggaaugguugacggcugguacggcuaucaccaccagaacgaacaaggguccggauacgccgccgaucaaaagagcacccagaaugcuauuaacggcaucacaaauaaagugaacucugucaucgagaagaugaauacgcaguuuaccgcgguggggaaggaguucaacaaacuggaacgcagaauggagaaucugaacaagaaaguugacgauggauucauugacaucuggacauacaacgccgaacuccuggugcuucuggagaaugaacggacccucgacuuucaugauuccaacgucaagaaucuguaugagaaagucaagagccagcuuaagaacaaugcuaaagaaauuggcaacgggugcuucgaguuuuaccacaaguguaaugacgagugcauggaaucugugaaaaacggcacauaugauuaccccaaguauuccgaggaaagcaaacugaaucgcgagaagaucgacggagugaagcucgaguccaugggcguuuaccagauucuggccaucuauucuaccguggccagcucccugguccuccuggugucucuuggggcuaucagcuucuggaugugcuccaacggaagccugcaguguagaauuugcaucuga

SEQ ID NO: 200041 - RNA, 1701 nt, Artificial Sequence
  derived and/or modified CDS sequence (opt5) from hemagglutinin__InfluenzaA__AEX33957
augaagaccaucauugcccugagcuacauccucugccugguguucgcucagaaacuucccggcauugacaacuccacagccacgcugugucucgggcaccaugcggucccuaauggaaccaucguuaagacaauuaccaacgaucaaguggaggugacaaaugcuaccgaacugguccagaacucuagcacaggcgggaucugcgacuccccgcaccagauccuugauggagagaauuguacccugauugacgcccuccugggcgauccccagugcgacggguuucaaaacaaaaagugggaucuguucguggaaagaucuaaagccuauagcaauuguuacccuuaugacguucccgauuacgcuucccuccggucucugguggccagcuccggaacgcuugaguuuaacaaugaaucuuucaacuggaccggcgucacacagaauggcaccucuuccgcuugcaagcgcgggagcaacaauagcuuuuucuccagacugaacuggcucacacauagcaaguuuaaauauccugcccugaaugugaccaugcccaacaacgaggaguucgacaaacuuuacaucuggggaguucaccauccuggcacggauaaugaccagauuuuucuguaugcgcaggccucugggcggaucacaguguccaccaagcgcagccaacagacagucauuccgaacaucggauccagaccccgggugcgcaauauuccuucuagaaucagcaucuacuggaccauugugaagcccggcgauauccuccugauuaacuccaccgggaaucugaucgcuccucggggauacuucaaaauucgcagcggcaagucuuccaucaugagaagcgacgcccccaucggcaaguguaacucugaaugcauuacaccgaaugggagcaucccuaacgacaaacccuuucagaaugucaaccggauuacguauggagcuuguccucgcuacguuaagcagaauacccucaaacuggccacaggcaugagaaacgugcccgagaagcaaacccgggggaucuucggagcgauugccggcuuuaucgaaaaugggugggagggaaugguggauggcugguauggcuuccgccaccagaacuccgaggggaucggacaggcugccgaccuuaaaucuacacaagcugccauugaucagaucaauggcaagcugaacagacucauugggaaaaccaacgaaaaguuccaccagaucgagaaggaauuuagcgaggucgaaggacggauucaggaccuggagaaauacguggaggauacgaagaucgaccuuugguccuauaaugccgaacugcucguugcucuggagaaccaacauacaauugaucugaccgacagcgaaaugaauaaacucuucgagaagaccaaaaagcagcugagagaaaacgcggaggauaugggcaaugggugcuuuaagaucuaccacaaaugugacaacgccugcaucggcucuauucgcaauggaacauaugaucaugacguguaccgggacgaggcucuuaacaauagauuccagaucaagggcgucgaacugaaauccggguacaaggauuggauucucuggaucagcuuugccauuucuugcuuccugcuuuguguggcccugcucggauuuaucaugugggcuugccagaaaggcaacauccgcuguaauauuugcaucuga

SEQ ID NO: 200042 - RNA, 1701 nt, Artificial Sequence
  derived and/or modified CDS sequence (opt5) from hemagglutinin__InfluenzaA__AEX33968
augaagaccaucauugcccugagcuacauccucugccugguguucgcucagaaacuucccggcauugacaacuccacagccacgcugugucucgggcaccaugcggucccuaauggaaccaucguuaagacaauuaccaacgaucaaaucgaggugacaaaugcuaccgaacuggugcagaacucuagcacaggcgggaucugcgacuccccgcaccagauucuugauggagagaauuguacccugaucgacgcccuccugggcgauccccagugcgacggguuucaaaacaaaaagugggaucuguucgucgaaagaucuaaagccuauagcaauuguuacccuuaugacgugcccgauuacgcuucccuccggucucugguugccagcuccggaacgcuugaguuuaacaaugaaucuuucaacuggaccggcgugacacagaauggcaccucuuccgcuugcaagcgcgggagcaacaauagcuuuuucuccagacugaacuggcucacacauagcaaguuuaaauauccugcccugaaugucaccaugcccaacaacgaggaguucgacaaacuuuacauuuggggagugcaccauccuggcacggauaaugaccagaucuuucugcacgcgcaggccucugggcggauuacaguuuccaccaagcgcagccaacagacagugaucccgaacauuggauccagaccccggguccgcaauaucccuucuagaaucagcauuuauuggaccaucgugaagcccggcgauauucuccugaucaacuccaccgggaaucugauugcuccucggggauacuucaaaauccgcagcggcaagucuuccaucaugagaagcgacgcccccauuggcaaguguaacucugaaugcaucacaccgaaugggagcauuccuaacgacaaacccuuucagaaugugaaccggaucacguacggagcuuguccucgcuaugucaagcagaauacccucaaacuggccacaggcaugagaaacguucccgagaagcaaacccgggggauuuucggagcgaucgccggcuuuaucgaaaaugggugggagggaaugguggauggcugguacggcuuccgccaccagaacuccgaggggauuggacaggcugccgaccuuaaaucuacacaagcugccaucgaucagauuaauggcaagcugaacagacucaucgggaaaaccaacgaaaaguuccaucagauugagaaggaauuuagcgagguggaaggacggauccaggaccuggagaaauaugucgaggauacgaagauugaccuuugguccuacaaugccgaacugcucguggcucuggagaaccaacacacaaucgaucugaccgacagcgaaaugaauaaacucuucgagaagaccaaaaagcagcugagagaaaacgcggaggauaugggcaaugggugcuuuaagaucuaucauaaaugugacaacgccugcauuggcucuauccgcaauggaacauacgaucacgacguuuaucgggacgaggcucuuaacaauagauuccagauuaagggcguggaacugaaauccggguacaaggauuggauccucuggauuagcuuugccaucucuugcuuccugcuuugugucgcccugcucggauuuaucaugugggcuugccagaaaggcaacauucgcuguaauaucugcauuuga

SEQ ID NO: 200043 - RNA, 1701 nt, Artificial Sequence
  derived and/or modified CDS sequence (opt5) from hemagglutinin__InfluenzaA__AEX33979
augaagaccaucauugcccugagcuacauccucugccugguguucgcucagaaacuucccggcaacgacaauuccacagccacgcugugucucgggcaccaugcggucccuaacggaaccauuguuaagacaaucaccaaugaucaaauugaggugacaaacgcuaccgaacuggugcagucuagcuccacaggcgagaucugcgacucuccgcaccagauccuugauggggaaaauuguacccugauugacgcccuccugggagauccccagugcgacggcuuucaaaacaaaaagugggaucuguucgucgagagaagcaaagccuauuccaauuguuacccuuaugacgugcccgauuacgcuucucuccggagccugguugccuccagcgggacgcuugaauuuaacaaugagucuuucaacuggaccggagugacacagaauggcaccuccagcgcuugcauccgcagaucuaacaauuccuuuuucagccggcugaacuggcucacacaucugaaguuuaaguauccugcccuuaaugucaccaugcccaacaacgagaaauucgacaagcuguacauuuggggcgugcaccauccugggacggauaaugaccagaucuuucucuaugcgcaggccucuggacgcauuacaguuuccaccaaaagaagccaacagacagugaucccgaacauuggcucccggccccgcgucagaaauaucccuucucggaucagcauuuacuggaccaucgugaagcccggggauauucugcugaucaacuccaccggaaaucucauugcuccucgcggcuacuucaaaaucagaagcgggaagucuuccaucaugcggagcgacgcccccauuggaaaguguaacucugaaugcaucacaccgaauggcagcauuccuaacgacaaacccuuucagaaugugaaccgcaucacguauggcgcuuguccuagauacgucaagcagaauacccugaaacuugccacagggaugcggaacguucccgagaagcaaacccgcggaauuuucggcgcgaucgccggguuuaucgaaaauggaugggagggcaugguggaugggugguauggauucagacaccagaacuccgagggcauuggccaggcugccgaccugaaaucuacacaagcugccaucgaucagauuaaugggaagcucaaccggcugaucggaaaaaccaacgaaaaguuccaccagauugagaaggaauuuagcgagguggaaggcagaauccaggaccuugagaaauacgucgaggauacgaagauugaccugugguccuauaaugccgaacuccugguggcucuggagaaccaacauacaaucgaucucaccgacagcgaaaugaauaaacuguucgagaagaccaaaaagcagcuucgcgaaaacgcggaggauauggggaauggaugcuuuaagaucuaccacaaaugugacaacgccugcauuggcucuauccggaaugggacauaugaucaugacguuuacagagacgaggcucugaacaaucgcuuccagauuaacggcguggaacucaaguccggauacaaagauuggauccuguggauuagcuuugccaucucuugcuuccuucugugugucgcccuccugggcuuuaucaugugggcuugccagaaggggaauauucgguguaacaucugcauuuga

SEQ ID NO: 200044 - RNA, 1701 nt, Artificial Sequence
  derived and/or modified CDS sequence (opt5) from hemagglutinin__InfluenzaA__AEX33990
augaagaccaucauugcccugagcuacauccucuaucugguguucgcucagaaacuucccggcaacgacaauuccacagccacgcugugccucgggcaccaugcggucccuaacggaaccauuguuaagacaaucaccaaugaucaaauugaggugacaaacgcuaccgaacuggugcagucuagcuccacaggcgagaucugugacucuccgcaccagauccuugauggggaaaauugcacccugauugacgcccuccugggagauccccagugugacggcuuucaaaacaaaaagugggaucuguucgucgagagaagcaaagccuacuccaauugcuauccuuacgacgugcccgauuaugcuucucuccggagccugguugccuccagcgggacgcuugaauuuaacaaugagucuuucaacuggaccggagugacacagaauggcaccuccagcgcuuguauccgcagaucuaacaauuccuuuuucagccggcugaacuggcucacacaucugaaguuuaaguacccugcccuuaaugucaccaugcccaacaacgagaaauucgacaagcuguauauuuggggcgugcaccauccugggacggauaaugaccagaucuuucucuacgcgcaggccucuggacgcauuacaguuuccaccaaaagaagccaacagacagugaucccgaacauuggcucccggccccgcgucagaaauaucccuucucggaucagcauuuacuggaccaucgugaagcccggggauauucugcugaucaacuccaccggaaaucucauugcuccucgcggcuauuucaaaauccagagcgggaagucuuccaucaugagaagcgacgcccccauuggaaagugcaacucugaauguaucacaccgaauggcagcauuccuaacgacaaacccuuucagaaugugaaccggaucacguacggcgcuugcccucgcuaugucaagcaagauacccugaaacuugccacagggaugagaaauguucccgagaagcagacccggggaauuuucggcgcgaucgccggguuuaucgaaaacggaugggagggcaugguggacgggugguacggauuccgccaccaaaauuccgagggcauuggccaggcugccgaucugaaaucuacacaggcugccaucgaccagauuaacgggaagcucaauagacugaucggaaaaaccaacgaaaaguuccaccagauugagaaggaauuuagcgagguggaaggccggauccaagaucuugagaaauaugucgaggacacgaagauugaucugugguccuacaacgccgaacuccugguggcucuggagaaucagcauacaaucgaccucaccgauagcgaaaugaacaaacuguucgagaagaccaaaaagcagcuuagagaaaaugcggaggacauggggaacggauguuuuaagaucuaucacaaaugcgauaaugccuguauuggcucuauccgcaacgggacauacgaccaugacguuuaccgggaugaggcucugaauaacagauuccagauuaaguccguggaacucaaaagcggcuauaaggacuggauccuguggauuucuuuugccaucuccugcuuccuucugugcgucgcccuccugggauuuaucaugugggcuugucaaaaaggcaauauucgcugcaacaucuguauuuga

SEQ ID NO: 200045 - RNA, 1701 nt, Artificial Sequence
  derived and/or modified CDS sequence (opt5) from hemagglutinin__InfluenzaA__AEX34001
augaagaccaucauugcccugagcuacauccucugccugguguucgcucagaaacuucccggcaacgacaauuccacagccacgcugugucucgggcaccaugcggucccuaacggaaccauuguuaagacaaucaccaaugaucaaauugaggugacaaacgcuaccgaacuggugcagucuagcuccacaggcgggaucugcgacucuccgcaccagauccuugauggagagaauuguacccugauugacgcccuccugggcgauccccagugcgacggguuucaaaacaaaaagugggaucuguucgucgaaagaagcaaagccuauuccaauuguuacccuuaugacgugcccgauuacgcuucucuccggagccugguugccuccagcggaacgcuugaguuuaacucugaauccuucaauuggaccggcgugacacagaacggcaccagcucugcuugcaagcgcagauccaauaacagcuuuuucucucggcugaauuggcucacacaucugaaguuuaaauauccugcccuuaacgucaccaugcccaauaacgagaaguucgacaaacuguacaucuggggagugcaccauccugggacggauaacgaccagauuuuucucuaugcgcaggccuccggccgcaucacaguuagcaccaagagaucccaacagacagugauuccgaauaucgggucucggccccgcgucagaaacauuccuagccggaucuccaucuacuggaccauugugaaacccggagauauccugcugauuaauagcaccggcaaccucaucgcuccucgcggguacuucaagauuagaucuggaaaguccagcaucaugcggucugacgcccccaucggcaaauguaauagcgagugcauuacaccgaacggcuccaucccuaaugacaagcccuuucagaacgugaaucgcauuacguauggggcuuguccuagauacgucaaacagaacacccugaaacuugccacaggaaugcggaauguucccgaaaagcaaacccgcggcaucuucggggcgauugccggauuuaucgagaacggcugggaagggaugguggauggaugguauggcuucagacaccagaaugcugagggcaucgggcaggccgcugaccugaagucuacacaagccgccauuaaccagaucaauggaaaacucaaccggcugauuggcaagaccaacgagaaguuccaccagaucgaaaaagaguuuagcgaaguggaggggcgcauucaggaucuugaaaaguacgucgaggacacgaaaaucgaucugugguccuauaaugcugagcuccugguggcgcuggaaaaccaacauacaauugaccucaccgauagcgagaugaauaagcuguucgaaagaaccaaaaagcagcuucgggagaacgccgaagacaugggaaauggcugcuuuaagaucuaccacaaaugugauaacgcuugcaucgggucuauuagaaauggcacauaugaccaugauguuuaccgcgacgaggcccugaacaaucgguuccagaucaagggaguggagcucaaauccggcuacaaggacuggauucuguggaucagcuuugccauuucuugcuuccuucugugugucgcucuccugggguuuaucaugugggccugccagaaaggaaacaucagauguaauauuugcaucuga

SEQ ID NO: 200046 - RNA, 1701 nt, Artificial Sequence
  derived and/or modified CDS sequence (opt5) from hemagglutinin__InfluenzaA__AEX34012
augaagaccaucauugcccugagcuacauccucuaucugguguucgcucagaaacuucccggcaacgacaauuccacagccacgcugugccucgggcaccaugcggucccuaacggaaccauuguuaagacaaucaccaaugaucaaauugaggugacaaacgcuaccgaacuggugcagucuagcuccacaggcgagaucugugacucuccgcaccagauccuugauggggaaaauugcacccugauugacgcccuccugggagauccccagugugacggcuuucaaaacaaaaagugggaucuguucgucgagagaagcaaagccuacuccaauugcuauccuuacgacgugcccgauuaugcuucucuccggagccugguugccuccagcgggacgcuugaauuuaacaaugagucuuucaacuggaccggagugacacagaauggcaccuccagcgcuuguauccgcagaucuaacaauuccuuuuucagccggcugaacuggcucacacaucugaaguuuaaguacccugcccuuaaugucaccaugcccaacaacgagaaauucgacaagcuguauauuuggggcgugcaccauccugggacggauaaugaccagaucuuucucuacgcgcaggccucuggacgcauuacaguuuccaccaaaagaagccaacagacagugaucccgaacauuggcucccggccccgcgucagaaauaucccuucucggaucagcauuuacuggaccaucgugaagcccggggauauucugcugaucaacuccaccggaaaucucauugcuccucgcggcuauuucaaaauccagagcgggaagucuuccaucaugagaagcgacgcccccauuggaaagugcaacucugaauguaucacaccgaauggcagcauuccuaacgacaaacccuuucagaaugugaaccggaucacguacggcgcuugcccucgcuaugucaagcaaaauacccugaaacuugccacagggaugagaaacguucccgagaagcagacccggggaauuuucggcgcgaucgccggguuuaucgaaaauggaugggagggcaugguggaugggugguacggauuccgccaccagaacuccgagggcauuggccaagcugccgaccugaaaucuacacaggcugccaucgaucagauuaaugggaagcucaacagacugaucggaaaaaccaacgaaaaguuccaccagauugagaaggaauuuagcgagguggaaggccggauccaagaccuugagaaauaugucgaggauacgaagauugaccugugguccuacaaugccgaacuccugguggcucuggagaaccagcauacaaucgaucucaccgacagcgaaaugaauaaacuguucgagaagaccaaaaagcagcuuagagaaaacgcggaggauauggggaauggauguuuuaagaucuaucacaaaugcgacaacgccuguauuggcucuauccgcaaugggacauacgaucaugacguuuaccgggacgaggcucugaacaauagauuccagauuaagggcguggaacucaaauccggauauaaggauuggauccuguggauuagcuuugccaucucuugcuuccuucugugcgucgcccuccugggcuuuaucaugugggcuugucaaaaagggaacauucgcugcaauaucuguauuuga

SEQ ID NO: 200047 - RNA, 1701 nt, Artificial Sequence; identical to SEQ ID NO: 194506
  derived and/or modified CDS sequence (opt5) from hemagglutinin__InfluenzaA__AEX34023

SEQ ID NO: 200048 - RNA, 1701 nt, Artificial Sequence
  derived and/or modified CDS sequence (opt5) from hemagglutinin__InfluenzaA__AEX34044
augaagaccaucauugccuucagcuacauccugugccucguguuugcucagaaacugcccggcauugacaacuccacagccacgcuuugucuggggcaccaugcggucccuaauggaaccaucguuaagacaauuaccaacgaucaaaucgaggugacaaaugcuaccgaacucgugcagucuagcuccacaggcgggaucugcgacucuccgcaccagauucuggauggagagaacuguacccuuaucgacgcccugcucggcgauccccagugcgacggguuccaaaauaaaaagugggaucuguuugucgaaagaagcaaagccuauuccaacuguuacccuuaugacgugcccgauuacgcuucucugcggagccucguugccuccagcggaacgcuggaguucaauaacgaaucuuuuaauuggaccggcgugacacagaacggcaccuccagcgcuugcaagcgcgggucuaauaacuccuucuuuagcagacuuaauuggcugacacauucuaaguucaaauauccugcccucaacgucaccaugcccaauaacgaggaguuugacaagcuguacauuuggggagugcaccauccuggcacggauaacgaccagaucuuccuuuaugcgcaggccuccgggcggauuacaguuagcaccaaacgcucccaacagacagugaucccgaauauuggaucuagaccccggguccgcaacaucccuagcagaaucuccauuuacuggaccaucgugaagcccggcgauauucugcucaucaauagcaccgggaaccugauugcuccucggggauacuuuaaaauccgcucuggcaaguccagcaucaugagaucugacgcccccauuggcaaguguaauagcgaaugcaucacaccgaacggguccauuccuaaugacaaacccuuccagaacgugaaucggaucacguauggagcuuguccucgcuacgucaagcagaacacccugaaacucgccacaggcaugagaaauguucccgagaagcaaacccgggggauuuuuggagcgaucgccggcuucaucgaaaacgggugggagggaaugguggauggcugguauggcuuccgccaccaaaauucugaggggauuggacaggcugccgaccugaaaagcacacaggcugccaucgaucagauuaacggcaaacuuaauagacugaucgggaagaccaacgaaaaguuucaccagauugagaaggaguucuccgaaguggaaggacggauccaggaccucgagaaauacgucgaggauacgaagauugaccuguggagcuauaacgccgaacuucugguggcucucgagaaucaacauacaaucgaucugaccgacucugaaaugaacaaacuguuugagaagaccaaaaagcagcucagagaaaaugcggaggauaugggcaacgggugcuucaagaucuaccacaaaugugacaaugccugcauuggcuccauccgcaacggaacauaugaucaugacguuuaccgggacgaggcucugaauaacagauuucagauuaagggcguggaacuuaaaagcggguacaaggauuggauccuguggauuucuuucgccaucuccugcuuucuccugugugucgcccuucugggauucaucaugugggcuugccagaaaggcaauauucgcuguaacaucugcauuuga

SEQ ID NO: 200049 - RNA, 1701 nt, Artificial Sequence
  derived and/or modified CDS sequence (opt5) from hemagglutinin__InfluenzaA__AEX34089
augaagaccaucauugcccugagcuacauccucugccugguguucgcucagaaacuucccggcauugacaacuccacagccacgcugugucucgggcaccaugcggucccuaauggaaccaucguuaagacaauuaccaacgaucaaaucgaggugacaaaugcuaccgaacuggugcagaacucuagcacaggcgggaucugcgacuccccgcaccagauucuugauggagagaauuguacccugaucgacgcccuccugggcgauccccagugcgacggguuucaaaacaaaaagugggaucuguucgucgaaagaucuaaagccuauagcaauuguuacccuuaugacgugcccgauuacgcuucccuccggucucugguugccagcuccggaacgcuugaguuuaacaaugaaucuuucaacuggaccggcgugacacagaauggcaccucuuccgcuugcaagcgcgggagcucuaacuccuuuuucagcagacugaauuggcucacacauucuaaguuuaaauauccugcccugaacgucaccaugcccaauaacgaggaguucgacaaacuuuacauuuggggagugcaccauccuggcacggauaacgaccagaucuuucuguaugcgcaggccuccgggcggauuacaguuagcaccaagcgcucccaacagacagugaucccgaauauuggaucuagaccccggguccgcaacaucccuagcagaaucuccauuuacuggaccaucgugaagcccggcgauauucuccugaucaauagcaccgggaaccugauugcuccucggggauacuucaaaauccgcucuggcaaguccagcaucaugagaucugacgcccccauuggcaaguguaauagcgaaugcaucacaccgaacggguccauuccuaaugacaaacccuuucagaacgugaaucggaucacguauggagcuuguccucgcuacgucaagcagaacacccucaaacuggccacaggcaugagaaauguucccgagaagcaaacccgggggauuuucggagcgaucgccggcuuuaucgaaaacgggugggagggaaugguggauggcugguauggcuuccgccaccagaauagcgaggggauuggacaggcugccgaccuuaaaagcacacaagcugccaucgaucagauuaacggcaagcugaauagacucaucgggaaaaccaacgaaaaguuccaccagauugagaaggaauuuuccgagguggaaggacggauccaggaccuggagaaauacgucgaggauacgaagauugaccuuuggagcuauaacgccgaacugcucguggcucuggagaaucaacauacaaucgaucugaccgacucugaaaugaacaaacucuucgagaagaccaaaaagcagcugagagaaaaugcggaggauaugggcaacgggugcuuuaagaucuaccacaaaugugacaaugccugcauuggcuccauccgcaacggaacauaugaucaugacguuuaccgggacgaggcucuuaauaacagauuccagauuaagggcguggaacugaaaagcggguacaaggauuggauccucuggauuucuuuugccaucuccugcuuccugcuuugugucgcccugcucggauuuaucaugugggcuugccagaaaggcaauauucgcuguaacaucugcauuuga

SEQ ID NO: 200050 - RNA, 1701 nt, Artificial Sequence
  derived and/or modified CDS sequence (opt5) from hemagglutinin__InfluenzaA__AEX34123
augaagaccaucauugcccugagcuacauccucugccugguguucgcucagaaacuucccggcauugacaacuccacagccacgcugugucucgggcaccaugcggucccuaauggaaccaucguuaagacaauuaccaacgaucaaaucgaggugacaaaugcuaccgaacuggugcagaacucuagcacaggcgggaucugcgacuccccgcaccagauucuugauggagagaauuguacccugaucgacgcccuccugggcgauccccagugcgacggguuucaaaacaaaaagugggaucuguucgucgaaagaucuaaagccuauagcaauuguuacccuuaugacgugcccgauuacgcuucccuccggucucugguugccagcuccggaacgcuugaguuuaacaaugaaucuuucaacuggaccggcgugacacagaauggcaccucuuccgcuugcaagcgcgggagcaacaauagcuuuuucuccagacugaacuggcucacacauagcaaguuuaaauauccugcccugaaugucaccaugcccaacaacgaggaguucgacaaacuuuacauuuggggagugcaccauccuggcacggauaaugaccagaucuuucuguaugcgcaggccucugggcggauuacaguuuccaccaagcgcagccaacagacagugaucccgaacauuggauccagaccccggguccgcaauaucccuucuagaaucagcauuuacuggaccaucgugaagcccggcgauauucuccugaucaacuccaccgggaaucugauugcuccucggggauacuucaaaauccgcagcggcaagucuuccaucaugagaagcgacgcccccauuggcaaguguaacucugaaugcaucacaccgaaugggagcauuccuaacgacaaacccuuucagaaugugaaccggaucacguauggagcuuguccucgcuacgucaagcagaauacccucaaacuggccacaggcaugagaaacguucccgagaagcaaacccgggggauuuucggagcgaucgccggcuuuaucgaaaaugggugggagggaaugguggauggcugguauggcuuccgccaccagaacuccgaggggauuggacaggcugccgaccuuaaaucuacacaagcugccaucgaucagauuaauggcaagcugaacagacucaucgggaaaaccaacgaaaaguuccaccagauugagaaggaauuuagcgagguggaaggacggauccaggaccuggagaaauacgucgaggauacgaagauugaccuuugguccuauaaugccgaacugcucguggcucuggagaaccaacauacaaucgaucugaccgacagcgaaaugaauaaacucuucgagaagaccaaaaagcagcugagagaaaacgcggaggauaugggcaaugggugcuuuaagaucuaccacaaaugugacaacgccugcauuggcucuauccgcaauggaacauaugaucaugacguuuaccgggacgaggcucuuaacaauagauuccagauuaagggcguggaacugaaauccggguacaaggauuggauccucuggauuagcuuugccaucucuugcuuccugcuuugugucgcccugcucggauuuaucaugugggcuugccagaaaggcaacauucgcuguaauaucugcauuuga

SEQ ID NO: 200051 - RNA, 1701 nt, Artificial Sequence
  derived and/or modified CDS sequence (opt5) from hemagglutinin__InfluenzaA__AEX34134
augaagaccaucauugcccugagcuacauccucugccugguguucgcucagaaacuucccggcaacgacaauuccauggccacacugugucucgggcaccaugcggucccuaacggaacgauuguuaagaccaucacaaaugaucaaauugaggugaccaacgcuacagaacuggugcagucuagcuccaccggcgagaucugcgacucuccgcaccagauccuugauggggaaaauuguacacugauugacgcccuccugggagauccccagugcgacggcuuucaaaacaaaaagugggaucuguucgucgagagaagcaaagccuauuccaauuguuacccuuaugacgugcccgauuacgcuucucuccggagccugguugccuccagcgggacccuugaauuuaacaaugagucuuucaacuggacgggagugacccagaauggcacauccagcgcuugcauccgcagaucuaacaauuccuuuuucagccggcugaacuggcucacccaucugaaguuuaaguauccugcccuuaaugucacaaugcccaacaacgagaaauucgacaagcuguacauuuggggcgugcaccauccugggaccgauaaugaccagaucuuucucuaugcgcaggccucuggacgcauuacgguuuccacaaaaagaagccaacagaccgugaucccgaacauuggcucccggccccgcgucagaaauaucccuucucggaucagcauuuacuggacaaucgugaagcccggggauauucugcugaucaacuccaccggaaaucucauugcuccucgcggcuacuucaaaaucagaagcgggaagucuuccaucaugcggagcgacgcccccauuggaaaguguaacucugaaugcaucaccccgaauggcagcauuccuaacgacaaacccuuucagaaugugaaccgcaucacauauggcgcuuguccuagauacgucaagcagaauacgcugaaacuugccaccgggaugcggaacguucccgagaagcaaacacgcggaauuuucggcgcgaucgccggguuuaucgaaaauggaugggagggcaugguggaugggugguauggauucagacaccagaacuccgagggcauuggccaggcugccgaccugaaaucuacccaagcugccaucgaucagauuaaugggaagcucaaccggcugaucggaaaaacaaacgaaaaguuccaccagauugagaaggaauuuagcgagguggaaggcagaauccaggaccuugagaaauacgucgaggauaccaagauugaccugugguccuauaaugccgaacuccugguggcucuggagaaccaacauacgaucgaucucacagacagcgaaaugaauaaacuguucgagaagaccaaaaagcagcuucgcgaaaacgcggaggauauggggaauggaugcuuuaagaucuaccacaaaugugacaacgccugcauuggcucuauccggaaugggaccuaugaucaugacguuuacagagacgaggcucugaacaaucgcuuccagauuaagggcguggaacucaaauccggauacaaggauuggauccuguggauuagcuuugccaucucuugcuuccuucugugugucgcccuccugggcuuuaucaugugggcuugccagaaagggaacauucgguguaauaucugcauuuga

SEQ ID NO: 200052 - RNA, 1701 nt, Artificial Sequence; identical to SEQ ID NO: 200050
  derived and/or modified CDS sequence (opt5) from hemagglutinin__InfluenzaA__AEX34145

SEQ ID NO: 200053 - RNA, 1701 nt, Artificial Sequence
  derived and/or modified CDS sequence (opt5) from hemagglutinin__InfluenzaA__AEX34156
augaagaccaucauugcccugagcuacauccucugccugguguucgcucagaaacuucccggcaacgacaauuccacagccacgcugugucucgggcaccaugcggucccuaacggaaccauuguuaagacaaucaccaaugaucaaauugaggugacaaacgcuaccgaacuggugcagucuagcuccacaggcgagaucugcgggucuccgcaccagauccuugacggagaaaauuguacccugauugaugcccuccugggcgacccccagugcgauggguuucaaaacaaaaagugggaccuguucgucgagagaagcaaagccuauuccaauuguuacccuuaugaugugcccgacuacgcuucucuccggagccugguugccuccagcggaacgcuugaauuuaacaaugagucuuucaacuggaccggcgugacacagaauggcaccuccagcgcuugcauccgcagaucuaacaauuccuuuuucagccggcugaacuggcucacacaucugaaguuuaaguauccugcccuuaaugucaccaugcccaacaacgagaaauucgauaagcuguacauuuggggagugcaccauccugggacggacaaugaucagaucuuucucuaugcgcaggccucuggccgcauuacaguuuccaccaaaagaagccaacagacagugaucccgaacauugggucccggccccgcgucagaaauaucccuucucggaucagcauuuacuggaccaucgugaagcccggagacauucugcugaucaacuccaccggcaaucucauugcuccucgcggguacuucaaaaucagaagcggaaagucuuccaucaugcggagcgaugcccccauuggcaaguguaacucugaaugcaucacaccgaauggcagcauuccuaacgacaaacccuuucagaaugugaaccgcaucacguauggggcuuguccuagauacgucaagcagaauacccugaaacuugccacaggaaugcggaacguucccgagaagcaaacccgcggcauuuucggggcgaucgccggauuuaucgaaaauggcugggaggggaugguggacggaugguauggcuucagacaccagaacuccgagggcacagggcaggcugccgaucugaaaucuacccaagcugccauugaccagaucaauggaaagcucaaccggcugauuggcaaaacgaacgaaaaguuccaccagaucgagaaggaauuuagcgagguggaagggcgcauucaggaucuugagaaauacgucgaggacacaaagaucgaucugugguccuauaaugccgaacuccugguggcucuggagaaccaacauaccauugaccucaccgauagcgaaaugaauaaacuguucgagaagaccaaaaagcagcuuagagaaaacgcggaggacaugggaaauggcugcuuuaagaucuaccacaaaugugauaacgccugcaucgggucuauucggaauggcacauaugaccaugauguuuacagagacgaggcucugaacaaucgcuuccagaucaagggaguggaacucaaauccggcuacaaggacuggauucuguggaucagcuuugccauuucuugcuuccuucugugugucgugcuccugggguuuaucaugugggccugccagaaaggaaacauccgguguaauauuugcaucuga

SEQ ID NO: 200054 - RNA, 1701 nt, Artificial Sequence; identical to SEQ ID NO: 194000
  derived and/or modified CDS sequence (opt5) from hemagglutinin__InfluenzaA__AEX34178

SEQ ID NO: 200055 - RNA, 1701 nt, Artificial Sequence
  derived and/or modified CDS sequence (opt5) from hemagglutinin__InfluenzaA__AEX34188
augaagaccaucauugcccugagcuacauccucugccugguguucgcucagaaauuucccggcaacgacaauuccacagccacgcuuugucuggggcaccaugcggucccuaacggaaccauuguuaagacaaucaccaaugaucaaauugaggugacaaacgcuaccgaacucgugcagucuagcuccacaggcgagaucugcgacucuccgcaccagauccuggauggggaaaauuguacccuuauugacgcccugcucggagauccccagugcgacggcuuccaaaacaaaaauugggaucuguuugucgagagaagcaaggccuauuccaacuguuacccuuaugacgugcccgauuacgcuucucugcggagccucguugccuccagcgggacgcuggaguucaauaacgaaucuuuuaauuggaccggagugacacagaacggcaccuccagcgcuugcauccgcagaucuaauaacuccuucuuuagccggcuuaauuggcugacacaucucaaauucaaguauccugcccugaacgucaccaugcccaacaaugagaacuuugacaaacuuuacauuuggggcgugcaccauccugggacggauaaugaccagaucuuccuguaugcgcaggccucuggacgcauuacaguuuccaccaagagaagccaacagacagugaucccgaacauuggcucccggccccgcgucagaaauaucccuucucggaucagcauuuacuggaccaucgugaagcccggggauauucuccugaucaacuccaccggaaaucugauugcuccucgcggcuacuuuaaaaucagaagcgggaagucuuccaucaugcggagcgacgcccccauuggaaaauguaacucugaaugcaucacaccgaauggcagcauuccuaacgacaagcccuuccagaaugugaaccgcaucacguauggcgcuuguccuagauacgucaagcagaauacccucaaacuggccacagggaugcggaacguucccgagaagcaaacccgcggaauuuuuggcgcgaucgccggguucaucgaaaauggaugggagggcaugguggaugggugguauggauucagacaccagaacuccgagggcauuggccaggcugccgaccuuaaaucuacacaagcugccaucgaucagauuaacgggaagcugaaucggcucaucggaaaaaccaacgaaaaguuucaccagauugagaaagaguucagcgaaguggaaggcagaauccaggaccuggagaaguacgucgaggauacgaagauugaccuuugguccuauaaugccgaacugcucguggcucuggagaaccaacauacaaucgaucugaccgacagcgaaaugaauaaacucuuugagaagaccaaaaagcagcugcgcgaaaacgcggaggauauggggaauggaugcuucaaaaucuaccacaagugugacaacgccugcauuggcucuauccggaaugggacauaugaucaugacguuuacagagacgaggcucuuaacaaucgcuuucagauuaagggcguggaacugaaauccggauacaaggauuggauccucuggauuagcuucgccaucucuugcuuucugcuuuguaucgcccugcucggcuucauuaugugggcuugccagaaagggaacauccgguguaauauuugcaucuga

SEQ ID NO: 200056 - RNA, 1701 nt, Artificial Sequence; identical to SEQ ID NO: 194506
  derived and/or modified CDS sequence (opt5) from hemagglutinin__InfluenzaA__AEX34199

SEQ ID NO: 200057 - RNA, 1701 nt, Artificial Sequence
  derived and/or modified CDS sequence (opt5) from hemagglutinin__InfluenzaA__AEX34221
augaagaccaucauugcccugagcuacauccucugccugguguucgcucagaaacuucccggcauugacaacuccacagccacgcugugucucgggcaccaugcggucccuaauggaaccaucguuaagacaauuaccaacgaucaaaucgaggugacaaaugcuaccgaacuggugcagucuagcuccacaggcgggaucugcgacucuccgcaccagauucuugauggagagaacuguacccugaucgacgcccuccugggcgauccccagugcgacggguuucaaaauaaaaagugggaucuguucgucgaaagaagcaaagccuauuccaacuguuacccuuaugacgugcccgauuacgcuucucuccggagccugguugccuccagcggaacgcuugaguuuaauaacgaaucuuucaauuggaccggcgugacacagaacggcaccuccagcgcuugcaagcgcgggucuaauaacuccuuuuucagcagacugaauuggcucacacauucuaaguuuaaauauccugcccugaacgucaccaugcccaauaacgaggaguucgacaaacuuuacauuuggggagugcaccauccuggcacggauaacgaccagaucuuucuguaugcgcaggccuccgggcggauuacaguuagcaccaagcgcucccaacagacagugaucccgaauauuggaucuagaccccggguccgcaacaucccuagcagaaucuccauuuacuggaccaucgugaagcccggcgauauucuccugaucaauagcaccgggaaccugauugcuccucggggauacuucaaaauccgcucuggcaaguccagcaucaugagaucugacgcccccauuggcaagugugacagcgaaugcaucacaccgaauggguccauuccuaacgauaaacccuuucagaaugugaaccggaucacguauggagcuuguccucgcuacgucaagcagaauacccucaaacuggccacaggcaugagaaacguucccgagaagcaaacccgggggauuuucggagcgaucgccggcuuuaucgaaaaugggugggagggaaugguggacggcugguauggcuuccgccaccagaacucugaggggauuggacaggcugccgaucuuaaaagcacacaagcugccaucgaccagauuaauggcaagcugaacagacucaucgggaaaaccaaugaaaaguuccaccagauugagaaggaauuuuccgagguggaaggacggauccaggaucuggagaaauacgucgaggacacgaagauugaucuuuggagcuauaacgccgaacugcucguggcucuggagaaccaacauacaaucgaccugaccgauucugaaaugaauaaacucuucgagaagaccaaaaagcagcugagagaaaacgcggaggacaugggcaaugggugcuuuaagaucuaccacaaaugugauaacgccugcauuggcuccauccgcaauggaacauaugaccaugacguuuaccgggaugaggcucuuaacaauagauuccagauuaagggcguggaacugaaaagcggguacaaggacuggauccucuggauuucuuuugccaucuccugcuuccugcuuugugucgcccugcucggauuuaucaugugggcuugccagaaaggcaacauucgcuguaauaucugcauuuga

SEQ ID NO: 200058 - RNA, 1701 nt, Artificial Sequence; identical to SEQ ID NO: 194000
  derived and/or modified CDS sequence (opt5) from hemagglutinin__InfluenzaA__AEX34243

SEQ ID NO: 200059 - RNA, 1701 nt, Artificial Sequence; identical to SEQ ID NO: 200055
  derived and/or modified CDS sequence (opt5) from hemagglutinin__InfluenzaA__AEX34254

SEQ ID NO: 200060 - RNA, 1701 nt, Artificial Sequence; identical to SEQ ID NO: 194000
  derived and/or modified CDS sequence (opt5) from hemagglutinin__InfluenzaA__AEX34265

SEQ ID NO: 200061 - RNA, 1701 nt, Artificial Sequence
  derived and/or modified CDS sequence (opt5) from hemagglutinin__InfluenzaA__AEX34275
augaagaccaucauugcccugagcuacauccucugccugguguucgcucagaaacuucccggcauugacaacuccacagccacgcugugucucgggcaccaugcggucccuaauggaaccaucguuaagacaauuaccaacgaucaaaucgaggugacaaaugcuaccgaacuggugcagaacucuagcacaggcgggaucugcgacuccccgcaccagauucuugauggagagaauuguacccugaucgacgcccuccugggcgauccccagugcgacggguuucaaaacaaaaagugggaucuguucgucgaaagaucuaaagccuauagcaauuguuacccuuaugacgugcccgauuacgcuucccuccggucucugguugccagcuccggaacgcuugaguuuaacaaugaaucuuucaacuggaccggcgugacacagaauggcaccucuuccgcuugcaagcgcgggagcaacaauagcuuuuucuccagacugaacuggcucacacauagcaaguuuaaauauccugcccugaaugucaccaugcccaacaacgaggaguucgacaaacuuuacauuuggggagugcugcacccuggcacggauaaugaccagaucuuucucuaugcgcaggccucugggcggauuacaguuuccaccaagcgcagccaacagacagugaucccgaacauuggauccagaccccggguccgcaauaucccuucuagaaucagcauuuacuggaccaucgugaagcccggcgauauucugcugaucaacuccaccgggaaucucauugcuccucggggauacuucaaaauccgcagcggcaagucuuccaucaugagaagcgacgcccccauuggcaaguguaacucugaaugcaucacaccgaaugggagcauuccuaacgacaaacccuuucagaaugugaaccggaucacguauggagcuuguccucgcuacgucaagcagaauacccugaaacuugccacaggcaugagaaacguucccgagaagcaaacccgggggauuuucggagcgaucgccggcuuuaucgaaaaugggugggagggaaugguggauggcugguauggcuuccgccaucagaacuccgaggggauuggacaggcugccgaccugaaaucuacacaagcugccaucgaucagauuaauggcaagcucaacagacugaucgggaaaaccaacgaaaaguuccaccagauugagaaggaauuuagcgagguggaaggacggauccaggaccuugagaaauacgucgaggauacgaagauugaccugugguccuauaaugccgaacuccugguggcucuggagaaccaacacacaaucgaucucaccgacagcgaaaugaauaaacuguucgagaagaccaaaaagcagcuuagagaaaacgcggaggauaugggcaaugggugcuuuaagaucuaccauaaaugugacaacgccugcauuggcucuauccgcaauggaacauaugaucacuacguuuaccgggacgaggcucugaacaauagauuccagauuaagggcguggaacucaaauccggguauaaggacuggauccuguggauuagcuuugccaucucuugcuuccuucugugugucgcccuccugggauuuaucaugugggcuugccagaaaggcaacauucgcuguaauaucugcauuuga

SEQ ID NO: 200062 - RNA, 1698 nt, Artificial Sequence; identical to SEQ ID NO: 194560
  derived and/or modified CDS sequence (opt5) from hemagglutinin__InfluenzaA__AEX34318

SEQ ID NO: 200063 - RNA, 1698 nt, Artificial Sequence
  derived and/or modified CDS sequence (opt5) from hemagglutinin__InfluenzaA__AEX34329
augaaggugaaacugcucguccugcuuugcaccuucacagccacguacgcugacaccaucuguauuggcuaucacgccaacaauagcacagauaccguugacacagugcuggagaagaacgugaccgucacacauuccgugaaucuccuggaaaacucucacaaugggaaacuuugccugcucaagggaaucgcgccccugcagcugggcaacuguagcguugcuggguggauucucggaaauccugagugcgaacugcuuguguccaaagagucuuggagcuacaucgucgaaaagccgaaccccgagaauggcaccuguuauccugggcauuuugccgauuacgaggaacugagagagcaacucuccucugugagcuccuucgaacgguuugagauuuuccccaaggagagcucuuggccuaaccacacgguuaccggaguguccgccagcugcucucauaauggcgaauccagcuuuuaucgcaaccugcuuuggcugacaggcaaaaaugggcucuaccccaaccugucuaaguccuaugcuaauaacaaagagaaggaaguccuggugcucuggggagugcaccacccuccgaacaucggcgaccagaaagcccuguaccauaccgagaaugcuuacgucagcguuguguccucucacuauagcagaaaguucacacccgaaaucgccaagcggccuaaagugcgcgaucaggaggggagaauuaacuacuauuggacccuucuggagcccggagacacgaucauuuuugaagcgaauggcaaccucaucgccccucgguacgcuuucgcccugucccgcggguuuggaagcggcauuaucaauucuaacgcucccauggauaagugugacgccaaaugccagacaccgcaaggcgcgauuaauuccagccuuccuuuccagaacguccaucccgugaccaucggggaguguccuaaguauguuagaucugccaaacugcggauggugacaggacuccgcaauauccccagcauucaguccagaggccuguuuggggcuaucgccggauucauugaaggcggguggaccggaauggucgauggcugguacggcuaucaccaccagaacgagcaagggucuggauacgcugccgaccaaaagagcacccagaaugccaucaacggcauuacaaauaaagugaacuccguuaucgaaaagaugaauacgcaguuuaccgcuguggggaaggaguucaacaaacuggagcggcgcauggaaaaccucaauaagaaagucgaugacggauucaucgauauuuggacauacaacgcggagcugcuugugcugcucgaaaaugagagaacccuggacuuucaugacagcaacgucaagaaucuuuaugaaaaagugaagucucagcugaagaacaaugccaaagagaucggcaacgggugcuucgaguuuuaccacaaguguaaugaugaaugcauggaguccguuaaaaacggcacauaugacuaccccaaguauagcgaagagucuaaacucaaucgggagaagauugaaggagugaagcuggaguccaugggcgucuaccagauccuggcuauuuauagcaccguggccuccucucucguucugcuugugagccugggggccaucuccuucuggaugugcucuaacggaagccuccagugucgcaucugcauuuga

SEQ ID NO: 200064 - RNA, 1701 nt, Artificial Sequence
  derived and/or modified CDS sequence (opt5) from hemagglutinin__InfluenzaA__AEX34352
augaagaccaucauugcccugagcuacauccucugccugguguucgcucagaaacuucccggcaacgacaauuccacagccacgcugugucucgggcaccaugcggucccuaacggaaccauuguuaagacaaucaccaaugaucaaauugaggugacaaacgcuaccgaacuggugcagucuagcuccacaggcgagaucugcgacucuccgcaccagauccuugauggggaaaauuguacccugauugacgcccuccugggagauccccagugcgacggcuuucaaaacaaaaagugggaucuguucgucgagagaagcaaagccuauuccaauuguuacccuuaugacgugcccgauuacgcuucucuccggagccugguugccuccagcgggacgcuugaauuuaacaaugagucuuucaacuggaccggagugacacagaauggcaccuccagcgcuugcauccgcagaucuaacaauuccuuuuucagccggcugaacuggcucacacaucugaaguuuaaguauccugcccuuaaugucaccaugcccaacaacgagaaauucgacaagcuguacauuuggggcgugcaccauccugggacggauaaugaccagaucuuucucuaugcgcaggccucuggacgcauuacaguuuccaccaaaagaagccaacagacagugaucccgaacauuggcucccggccccgcgucagaaauaucccuucucggaucagcauuuacuggaccaucgugaagcccggggauauucugcugaucaacuccaccggaaaucucauugcuccucgcggcuacuucaaaaucagaagcgggaagucuuccaucaugcggagcgacgcccccauuggaaaguguaacucugaaugcaucacaccgaauggcagcauucugaacgacaaaccuuuucagaaugugaaccgcaucacguauggcgcuugucccagauacgucaagcagaauacccuuaaacuggccacagggaugcggaacguuccugagaagcaaacccgcggaauuuucggcgcgaucgccggguuuaucgaaaauggaugggagggcaugguggaugggugguauggauucagacaccagaacuccgagggcauuggccaggcugccgaccucaaaucuacacaagcugccaucgaucagauuaaugggaagcugaaccggcuuaucggaaaaaccaacgaaaaguuccaccagauugagaaggaauuuagcgagguggaaggcagaauccaggaccuggagaaauacgucgaggauacgaagauugaccucugguccuauaaugccgaacugcugguggcucucgagaaccaacauacaaucgaucugaccgacagcgaaaugaauaaacuuuucgagaagaccaaaaagcagcugcgcgaaaacgcggaggauauggggaauggaugcuuuaagaucuaccacaaaugugacaacgccugcauuggcucuauccggaaugggacauaugaucaugacguuuacagagacgaggcucucaacaaucgcuuccagauuaagggcguggaacugaaauccggauacaaggauuggauccuuuggauuagcuuugccaucucuugcuuccugcucugugucgcccugcugggcuuuaucaugugggcuugccagaaagggaacauucgguguaauaucugcauuuga

SEQ ID NO: 200065 - RNA, 1701 nt, Artificial Sequence; identical to SEQ ID NO: 194506
  derived and/or modified CDS sequence (opt5) from hemagglutinin__InfluenzaA__AEX34364

SEQ ID NO: 200066 - RNA, 1701 nt, Artificial Sequence; identical to SEQ ID NO: 194506
  derived and/or modified CDS sequence (opt5) from hemagglutinin__InfluenzaA__AEX34375

SEQ ID NO: 200067 - RNA, 1701 nt, Artificial Sequence
  derived and/or modified CDS sequence (opt5) from hemagglutinin__InfluenzaA__AEX34386
augaagaccaucauugcccugagcuacauccucugccugguguucgcucagaaacuucccggcaacgacaauuccacagccacgcugugucucgggcaccaugcggucccuaacggaaccauuguuaagacaaucaccaaugaucaaauugaggugacaaacgcuaccgaacuggugcagucuagcuccacaggcgagaucugcgacucuccgcaccagauccuugauggggaaaauuguacccugauugacgcccuccugggagauccccagugcgacggcuuucaaaacaaaaagugggaucuguucaucgagagaagcaaagccuauuccaauuguuacccuuaugacguccccgauuacgcuucucuccggagccugguggccuccagcgggacgcuugaauuuaacaaugagucuuucaacuggaccggaguuacacagaauggcaccuccagcgcuugcauucgcagaucuaacaauuccuuuuucagccggcugaacuggcucacacaucugaaguuuaaguauccugcccuuaaugugaccaugcccaacaacgagcaguucgacaaacuguacaucuggggcguccaccauccugggacggauaaugaccagauuuuucucuaugcgcaagccucuggacgcaucacaguguccaccaagagaagccagcagacaguuauuccgaacaucggcucccggccccgcgugagaaauaucccuucucggauuagcaucuacuggaccauugucaaacccggggauauccugcugauuaacuccaccggaaaucucaucgcuccucgcggcuacuucaagaucagaagcgggaaaucuuccauuaugcggagcgacgcccccaucggaaaguguaacucugaaugcauuacaccgaauggcagcaucccuaacgacaagcccuuucagaaugugaaccgcauuacguauggcgcuuguccuagauacgugaaacaaaauacccugaaacuugccacagggaugcggaacguccccgagaagcagacccgcggaaucuucggcgcgaucgccggguuuauugaaaauggaugggagggcaugguugaugggugguauggauucagacaccagaacuccgagggccggggccaagcugccgaccugaagucuacacaggcugccaucgaucagauuaaugggaaacucaacagacugaucggaaagaccaacgaaaaauuccaccagauugagaaggaauuuagcgagguggaaggccgcauccaagaccuugagaaguacguggaggauacgaaaauugaccugugguccuauaaugccgaacuccuggucgcucuggagaaccagcauacaaucgaucucaccgacagcgaaaugaauaagcuguucgagaaaaccaagaaacagcuucgggaaaacgcggaggauauggggaauggaugcuuuaagaucuaccacaagugugacaacgccugcauuggcucuaucagaaaugggacauaugaucaugacguguaccgcgacgaggcucugaacaaucgguuccagauuaaaggcguugaacucaaguccggauacaaagauuggauccuguggauuagcuuugccaucucuugcuuccuucuguguguggcccuccugggcuuuaucaugugggcuugccaaaaggggaacauuagauguaauaucugcauuuga

SEQ ID NO: 200068 - RNA, 1701 nt, Artificial Sequence
  derived and/or modified CDS sequence (opt5) from hemagglutinin__InfluenzaA__AEX34407
augaagaccaucauugcccugagcuacauccucugccugguguucgcucagaaacuucccggcaacgacaauuccauggccacacugugucucgggcaccaugcggucccuaacggaacgauuguuaagaccaucacaaaugaucaaauugaggugaccaacgcuacagaacuggugcagucuagcuccaccggcgagaucugcgacucuccgcaccagauccuugauggggaaaauuguacacugauugacgcccuccugggagauccccagugcgacggcuuucaaaacaaaaagugggaucuguucgucgagagaagcaaagccuauuccaauuguuacccuuaugacgugcccgauuacgcuucucuccggagccugguugccuccagcgggacccuugaauuuaacaaugagucuuucaacuggacgggagugacccagaauggcacauccagcgcuugcauccgcagaucuaacaauuccuuuuucagccggcugaacuggcucacccaucugaaguuuaaguauccugcccuuaaugucacaaugcccaacaacgagcaguucgacaaacuguacauuuggggcgugcaccauccugggaccgauaaugaccagaucuuucucuaugcgcaagccucuggacgcauuacgguuuccacaaagagaagccagcagaccgugaucccgaacauuggcucccggccccgcgucagaaauaucccuucucggaucagcauuuacuggacaaucgugaaacccggggauauucugcugaucaacuccaccggaaaucucauugcuccucgcggcuacuucaagauccugagcgggaaaucuuccaucaugagaagcgacgcccccauuggaaaguguaacucugaaugcaucaccccgaauggcagcauuccuaacgacaagcccuuucagaaugugaaccggaucacauauggcgcuuguccucgcuacgucaaacaaaauacgcuuaagcuggccaccgggaugagaaacguucccgagaaacagacacggggaauuuucggcgcgaucgccggguuuaucgaaaauggaugggagggcaugguggaugggugguauggauuccgccaccagaacuccgagggcagaggccaagcugccgaccucaagucuacccaggcugccauugaucagaucaaugggaaacugaaccggcuuauuggaaagacaaacgaaaaauuccaccagaucgagaaggaauuuagcgagguggaaggccgcauucaagaccuggagaaguacgucgaggauaccaaaguggaccucugguccuauaaugccgaacugcugguugcucucgagaaccagcauacgaucgaucugacagacagcgaaaugaauaaacuuuucgagaagaccaagaaacagcugagagaaaacgcggaggauauggggaauggaugcuuuaagauuuaccacaagugugacaacgccugcaucggcucuauccggaaugggaccuaugaucaugacguguacagagacgaggcucucaacaaucgcuuccagauuaaaggcgucgaacugaaguccggauacaaagauuggauccuuuggauuagcuuugccaucucuugcuuccugcucuguguggcccugcugggcuuuauuaugugggcuugccaaaaggggaacauccgguguaauaucugcauuuga

SEQ ID NO: 200069 - RNA, 1698 nt, Artificial Sequence
  derived and/or modified CDS sequence (opt5) from hemagglutinin__InfluenzaA__AEX34440
augaaggugaaacugcucguccugcuuugcaccuucacagccacguacgcugacaccaucuguauuggcuaucacgccaacaauagcacagauaccguugacacagugcuggagaagaacgugaccgucacacauuccgugaaucuccuggaagauucucacaacgggaaacuuugccugcucaagggaaucgcgccccugcagcugggcaauuguagcguugcuggguggauucucggaaacccugagugcgaacugcuuaccuccagagagucuuggagcuacaucguggaaaaaccgaaucccgagaacggcacguguuauccugggcauuuugccgacuacgaggaacugcgggagcaacucuccucugucagcuccuucgaacgcuuugagauuuuccccaaggagagcucuuggccuaaucacaccacaaccggaguguccgccagcugcucucauaacggcgaauccagcuuuuauaagaaucugcuuuggcugacaggcaaaaacgggcucuaccccaaucugucuaaguccuaugcuaacaauaaagagaaggaaguucuggugcucuggggaguccaccacccuccgaacaucggcaaccagagagcccuguaccauaccgagaaugcuuacgugagcguggucuccucucacuauagccggaaauucacgcccgaaaucgccaagcgcccuaagguuagagaucaggaggggcggauuaacuacuauuggacacuucuggagcccggagacaccaucauuuuugaagcgaauggcaaccucaucgccccucgcuacgcuuucgcccuguccagaggguuuggaagcggcauuaucaauucuaacgcucccauggaugagugugacgccaaaugccagacaccgcaaggcgcgauuaauuccagccuuccuuuccagaacgugcaucccgugaccaucggggaauguccuaaguauguccggucugccaaacugcgcauggugaccggacucagaaauauccccagcauucagucccggggccuguuuggggcuaucgccggauucauugagggcggguggacaggaaugguugauggcugguacggcuaucaccaccagaacgaacaagggucuggauacgcugccgaccaaaagagcacgcagaaugccaucaacggcauuaccaauaaagugaacuccgucaucgagaagaugaauacacaguuuaccgcuguggggaaagaguucaacaagcuggaacgcagaauggagaaccucaauaagaaaguugaugacggauucaucgauauuuggacauacaacgcggaacugcuugugcugcucgagaaugaacggacccuggacuuucaugacagcaacgucaagaaucuuuaugagaaagugaagucucagcugaaaaacaaugccaaggagaucggcaacgggugcuucgaauuuuaccacaaguguaaugaugagugcauggaauccgucaaaaacggcacguaugacuaccccaaguauagcgaggagucuaaacucaaucgcgaaaagauugauggagugaaacuggaguccaugggcguuuaccagauccuggcuauuuauagcacaguggccuccucucucguccugcuugugagccugggggccaucuccuucuggaugugcucuaacggaagccuccaguguagaaucugcauuuga

SEQ ID NO: 200070 - RNA, 1698 nt, Artificial Sequence; identical to SEQ ID NO: 192371
  derived and/or modified CDS sequence (opt5) from hemagglutinin__InfluenzaA__AEX34462

SEQ ID NO: 200071 - RNA, 1698 nt, Artificial Sequence
  derived and/or modified CDS sequence (opt5) from hemagglutinin__InfluenzaA__AEX34473
augaaggugaaacugcucguccugcuuugcaccuucacagccacguacgcugacaccaucuguauuggcuaucacgccaacaauagcacagauaccguugacacagugcuggagaagaacgugaccgucacacauuccgugaaucuccuggaagauucucacaacgggaaacuuugccugcucaagggaaucgcgccccugcagcugggcaauuguagcguugcuggguggauucucggaaacccugagugcgaacugcuuaucuccaaagagucuuggagcuacauuguggaaaccccgaaucccgagaacggcacguguuauccuggguacuuugccgacuaugaggaacugagagagcaacucuccucugucagcuccuucgaacgguuugagaucuuccccaaggagagcucuuggccuaaucauaccgugacaggaguuuccgccagcugcucucacaacggcaaguccagcuuuuaccgcaaucugcuuuggcugaccggcaaaucugggcucuaucccaaccuguccaagagcuacgcuaauaacaaagaaaaggaggugcugguccucuggggagugcaucacccuccgaauaucggcgaucagagagcccuguaccacacagaaaacgcuuauguguccgucguuucuagccauuacucccggcgcuucacccccgagauugccaaaagaccuaaggugcgggaccaggaagggcgcaucaacuauuacuggacgcuucuggagcccggagauacaauuaucuuugaggcgaauggcaaccucauugccccuagauaugcuuucgcccugagccggggguuuggaucuggcaucauuaccuccaaugcucccauggacgaaugugaugccaagugccagacaccgcaaggcgcgaucaacagcucucuuccuuuccagaaugugcaccccgucaccaucggggaguguccuaaauacguuaagagcgccaaacugcgcauggugaccggacucagaaacauucccuccauccagucucggggccuguuuggggcuauugccggauucaucgaaggcggguggacaggaaugguggacggcugguauggcuaccaucaccagaaugagcaagggagcggauacgcugccgaucagaaguccacgcagagcgccauuaacggcaucaccaauaaagucaacucugugaucgaaaagaugaauacacaguuuaccgcuguugggaaagaguucaacaagcuggagcgcagaauggaaaaucucaacaagaaaguggacgauggauuccuggacauuuggacauauaaugcggagcuucugguccuccuggaaaacgagcggacccuugacuuucacgauuccaacgugaagaaucuguacgaaaaagucaagagccaacucaaaaacaaugccaaggagaucggcaacgggugcuucgaguuuuaucauaaguguaaugacgaaugcauggagucugugaaaaacggcacguacgauuaucccaaguacuccgaagagagcaaacugaaucgcgagaagauugacggaguuaaacuggaauccaugggcguguaucagauccucgcuauuuacucuacagucgccagcucccuggugcuucugguuucucucggggccaucagcuucuggaugugcuccaacggaagccugcaguguagaaucugcauuuga

SEQ ID NO: 200072 - RNA, 1698 nt, Artificial Sequence
  derived and/or modified CDS sequence (opt5) from hemagglutinin__InfluenzaA__AEX34495
augaaggugaaacugcucguccugcuuugcaucuucaccgccacauacgcugacacgauuuguaucggcuaucacgccaacaauagcaccgauacaguugacaccgugcuggagaagaacgugacagucacccauuccgugaaucuccuggaagauucucacaacgggaaacuuugccugcucaagggaauugcgccccugcagcugggcaauuguagcguugcuggguggauccucggaaacccugagugcgaacugcuuauuuccaaagagucuuggagcuacaucguggaaacaccgaaucccgagaacggcaccuguuauccuggguacuuugccgacuaugaggaacugagagagcaacucuccucugucagcuccuucgaacgguuugagaucuuccccaaggagagcucuuggccuaaucauacggugaccggaguuuccgccagcugcucucacaacggcaaguccagcuuuuaccgcaaucugcuuuggcugacaggcaaaucugggcucuaucccaaccuguccaagagcuacgcuaauaacaaagaaaaggaggugcugguccucuggggagugcaucacccuccgaauauuggcgugcagagagcccuguaccacaccgaaaacgcuuaugucuccguugugucuagccauuacucccggcgcuucacacccgagaucgccaaaagaccuaaggugcgggaucaggaagggcgcauuaacuauuacuggacccuucuggagcccggagacacgaucauuuuugaggcgaauggcaaccucaucgccccuagauaugcuuucgcccugagccggggguuuggaucuggcauuaucacauccaaugcucccauggaugaaugugacgccaagugccagaccccgcaaggcgcgaucaacagcucucuuccuuuccagaauguccaccccgugacaauuggggaguguccuaaauacguuaagagcgccaaacugcgcauggugaccggacucagaaacauccccuccauucagucucggggccuguuuggggcuaucgccggauucauugaaggcggguggaccggaauggucgauggcugguauggcuaccaucaccagaaugagcaagggagcggauacgcugccgaccagaaguccacacagaacgccaucaauggcaucacgaacaaagugaauagcguuauugaaaagaugaacacccaguuuacagcuguggggaaagaguucaauaagcuggagcgcagaauggaaaaccucaauaagaaagucgaugacggauuccuggauaucuggaccuauaacgcggagcuucuggugcuccuggaaaacgagcggacacuugacuuucacgacucuaaugucaagaaccuguacgaaaaagugaagucccaacucaaaaauaacgccaaggagauuggcaaugggugcuucgaguuuuaucauaaguguaacgaugaaugcauggagagcguuaaaaauggcaccuacgacuaucccaaguacucugaagaguccaaacugaaccgcgagaagaucgauggagugaaacuggaaagcaugggcgucuaucagauucucgcuaucuacuccacgguggccucuagccugguucuucuggugucccucggggccaucucuuucuggaugugcagcaauggaucccugcaguguagaauuugcaucuga

SEQ ID NO: 200073 - RNA, 1698 nt, Artificial Sequence; identical to SEQ ID NO: 200072
  derived and/or modified CDS sequence (opt5) from hemagglutinin__InfluenzaA__AEX34506

SEQ ID NO: 200074 - RNA, 1698 nt, Artificial Sequence; identical to SEQ ID NO: 200072
  derived and/or modified CDS sequence (opt5) from hemagglutinin__InfluenzaA__AEX34517

SEQ ID NO: 200075 - RNA, 1698 nt, Artificial Sequence; identical to SEQ ID NO: 200072
  derived and/or modified CDS sequence (opt5) from hemagglutinin__InfluenzaA__AEX34528

SEQ ID NO: 200076 - RNA, 1698 nt, Artificial Sequence; identical to SEQ ID NO: 200072
  derived and/or modified CDS sequence (opt5) from hemagglutinin__InfluenzaA__AEX34539

SEQ ID NO: 200077 - RNA, 1698 nt, Artificial Sequence; identical to SEQ ID NO: 200072
  derived and/or modified CDS sequence (opt5) from hemagglutinin__InfluenzaA__AEX34550

SEQ ID NO: 200078 - RNA, 1698 nt, Artificial Sequence; identical to SEQ ID NO: 200072
  derived and/or modified CDS sequence (opt5) from hemagglutinin__InfluenzaA__AEX34561

SEQ ID NO: 200079 - RNA, 1698 nt, Artificial Sequence; identical to SEQ ID NO: 200072
  derived and/or modified CDS sequence (opt5) from hemagglutinin__InfluenzaA__AEX34572

SEQ ID NO: 200080 - RNA, 1698 nt, Artificial Sequence; identical to SEQ ID NO: 200072
  derived and/or modified CDS sequence (opt5) from hemagglutinin__InfluenzaA__AEX34583

SEQ ID NO: 200081 - RNA, 1698 nt, Artificial Sequence; identical to SEQ ID NO: 200072
  derived and/or modified CDS sequence (opt5) from hemagglutinin__InfluenzaA__AEX34594

SEQ ID NO: 200082 - RNA, 1698 nt, Artificial Sequence; identical to SEQ ID NO: 200072
  derived and/or modified CDS sequence (opt5) from hemagglutinin__InfluenzaA__AEX34605

SEQ ID NO: 200083 - RNA, 1698 nt, Artificial Sequence; identical to SEQ ID NO: 200072
  derived and/or modified CDS sequence (opt5) from hemagglutinin__InfluenzaA__AEX34616

SEQ ID NO: 200084 - RNA, 1698 nt, Artificial Sequence; identical to SEQ ID NO: 200072
  derived and/or modified CDS sequence (opt5) from hemagglutinin__InfluenzaA__AEX34627

SEQ ID NO: 200085 - RNA, 1698 nt, Artificial Sequence; identical to SEQ ID NO: 200072
  derived and/or modified CDS sequence (opt5) from hemagglutinin__InfluenzaA__AEX34638

SEQ ID NO: 200086 - RNA, 1698 nt, Artificial Sequence
  derived and/or modified CDS sequence (opt5) from hemagglutinin__InfluenzaA__AEX34650
augaaggugaaacugcucguccugcuuugcaccuucacagccacguacgcugacaccaucuguauuggcuaucacgccaacaauagcacagauaccguugacacagugcuggagaagaacgugaccgucacacauuccgugaaucuccuggaagauucucacaacgggaaacuuugccugcucaagggaaucgcgccccugcagcugggcaauuguagcguugcuggguggauucucggaaacccugagugcgaacugcuuaucuccaaagagucuuggagcuacauuguggaaaccccgaaucccgagaacggcacguguuauccuggguacuuugccgacuaugaggaacugagagagcaacucuccucugucagcuccuucgaacgguuugagaucuuccccaaggagagcucuuggccuaaucauaccgugacaggaguuuccgccagcugcucucacaacggcaaguccagcuuuuaccgcaaucugcuuuggcugaccggcaaaaacgggcucuaucccaaucugucuaaguccuacgcuaacaauaaagaaaaggaggugcugguccucuggggagugcaucacccuccgaacaucggcaaccagagaagccuguaccacacagaaaaugccuauguguccgucguuucuagccauuacucccggcgcuucacccccgagauugcuaaaagaccuaaggugcgggaucaggaagggcgcaucaacuauuacuggacgcuucuggagcccggagacacaauuaucuuugaggccaauggcaaccucauugcgccuagauucgccuuugcucugagccggggguucggaucuggcaucauuaccuccaaugcccccauggaugaaugugacgcuaagugccagacaccgcaaggcgccaucaacagcucucuuccuuuucagaaugugcaccccgucaccaucggggaguguccuaaauaugugcgcagcgcgaagcugagaaugguuaccggacuccggaacauucccuccauccagucucgcggccuguucggggccauugcuggauuuaucgaaggcggguggacaggaaugguggauggcugguacggcuaucaucaccagaaugagcaagggagcggauacgccgcugaccagaaauccacgcagaacgccauuaauggcaucaccaacaaggucaauagcgugaucgaaaagaugaacacacaguucaccgccguugggaaagaguucaauaaacuggagagacggauggaaaaccucaacaagaagguggaugacggauuucuggauauuuggacauacaaugcugagcuucugguccuccuggaaaacgagcgcacccuugacuuccacgacucuaaugugaaaaaccuguaugaaaaggucaaaucccaacucaagaauaacgcgaaagagaucggcaaugggugcuuugaguucuaccauaaguguaacgaugaaugcauggagagcgugaagaauggcacguaugacuaccccaaauauucugaagaguccaagcugaacagagagaaaauugauggaguuaagcuggaaagcaugggcguguaccagauccucgccauuuauuccacagucgcuucuagccuggugcuucugguuucccucggggccaucucuuuuuggaugugcagcaauggaucccugcagugucggaucugcauuuga

SEQ ID NO: 200087 - RNA, 1698 nt, Artificial Sequence
  derived and/or modified CDS sequence (opt5) from hemagglutinin__InfluenzaA__AEX34661
augaaggugaaacugcucguccugcuuugcaccuucacagccacguacgcugacaccaucuguauuggcuaucacgccaacaauagcacagauaccguugacacagugcuggagaagaacgugaccgucacacauuccgugaaucuccuggaagauucucacaacgggaaacuuugccugcucaagggaaucgcgccccugcagcugggcaauuguagcguugcuggguggauucucggaaacccugagugcgaacugcuuaucuccaaagagucuuggagcuacauuguggaaaccccgaaucccgagaacggcacguguuauccuggguacuuugccgacuaugaggaacugagagagcaacucuccucugucagcuccuucgaacgguuugagaucuuccccaaggagagcucuuggccuaaucauaccgugacaggaguuuccgccagcugcucucacaacggcaaguccagcuuuuaccgcaaucugcuuuggcugaccggcaaaaaggggcucuaucccaaccugucuaaauccuacgcuaauaacaaggaaaaagaggugcugguccucuggggagugcaucacccuccgaauaucggcgaucagagagcccuguaccacacagaaaacgcuuaugugagcgucguuuccucucauuacagccggcgcuucacccccgagauugccaagagaccuaaggugcgggaccaggaagggcgcaucaacuauuacuggacgcuucuggagcccggagauacaauuaucuuugaggcgaauggcaaccucauugccccuagauucgcuuuugcccugucccggggguucggaagcggcaucauuaccucuaaugcucccauggacgaaugugaugccaaaugccagacaccgcaaggcgcgaucaacuccagccuuccuuuucagaaugugcaccccgucaccaucggggaguguccuaaguaugugcgcucugccaaacugagaauggcuaccggacuccggaacauucccagcauccagucccgcggccuguucggggccauugcuggauuuaucgaaggcggguggacaggaaugguugacggcugguacggcuaucaucaccagaaugagcaagggucuggauacgccgccgaucagaaaagcacgcagaacgcuauuaauggcaucaccaaaaaggugaacuccgucaucgaaaagaugaauacacaguucaccgcgguggggaaggaguucagcaagcuggagagacggauggaaaaccucaauaaaaagguugacgauggauuucuggacauuuggacauacaacgccgagcuucuggugcuccuggaaaaugagcgcacccuugacuuccacgauucuaacgucaaaaaccuguaugaaaaggugaaaucccaacucaagaauaacgcuaaggagaucggcaaugggugcuuugaguucuaccauaaauguaacgacgaaugcauggagagcgucaagaauggcacguaugauuaccccaaauauucugaagaguccaagcugaacagagagaaaauugacggagugaagcuggaaagcaugggcguuuaccagauccucgccauuuauuccacaguggccucuagccugguccuucuggugucccucggggcuaucucuuuuuggaugugcagcaauggaucccugcagugucggaucugcauuuga

SEQ ID NO: 200088 - RNA, 1698 nt, Artificial Sequence
  derived and/or modified CDS sequence (opt5) from hemagglutinin__InfluenzaA__AEX34672
augaaggugaaacugcucguccugcuuugcaccuucacagccacguacgcugacaccaucuguauuggcuaucacgccaacaauagcacagauaccguugacacagugcuggauaagaacgugaccgucacacauuccgugaaucuccuggaggacucucacaacgggaaacuuugccugcucaagggaaucgcgccccugcagcugggcaauuguagcguugcuggguggauucucggaaacccugaaugcgagcugcuuaucuccagagaaucuuggagcuacauuguggagaaaccgaaucccgaaaacggcaccuguuauccugggcauuuugccgauuacgaggagcugcgggaacaacucuccucugucagcuccuucgagcgcuuugaaaucuuccccaaggagagcucuuggccuaaucacacgaccacaggaguguccgccagcugcucucaugacggcgaguccagcuuuuauaagaaccugcuuuggcugaccggcaaaaaugggcucuaccccaaccugucuaaguccuaugcuaauaacaaagaaaaggagguucuggugcucuggggaguccaccacccuccgaauaucggcgugcagagagcccuguaccauacagaaaacgcuuacgugagcgucguuuccucucacuauagccggaaauucacccccgagauugccaagcgcccuaaggugagagaucaggaagggcggaucaacuacuauuggacgcuucuggagcccggagacacaauuaucuuugaggcgaauggcaaccucauugccccucgcuacgcuuucgcccuguccagaggguuuggaagcggcaucauuaauucuaacgcucccauggaugaaugugacgccaaaugccagaccccgcaaggcgcgaucaauuccagccuuccuuuccagaacgugcaucccgucacaaucggggaguguccuaaguaugugcggucugccaaacugcgcaugguuaccggacucagaaauauucccagcauccagucccggggccuguuuggggcuauugccggauucaucgaaggcggguggaccggaaugguggauggcugguacggcuaucaccaccagaacgagcaagggucuggauacgcugccgaccaaaagagcacacagaaugccauuaacggcaucacgaauaaagucaacuccgugaucgaaaagaugaauacccaguuuacagcuguugggaaagaguucaacaagcuggagcgcagaauggaaaaucucaacaagaaaguggaugacggauucauugacaucuggaccuacaacgcggagcugcuuguccugcucgaaaaugagcggacacuggauuuucaugacagcaacgugaagaaucuuuaugaaaaagucaagucucagcugaaaaacaaugccaaggagauuggcaacgggugcuucgaguuuuaccacaaguguaaugaugaaugcauggaguccgugaaaaacggcaccuaugacuaccccaaguauagcgaagagucuaaacucaaucgcgagaagaucgauggaguuaaacuggaauccaugggcguguaccagauucuggcuaucuauagcacggucgccuccucucucgugcugcuuguuagccugggggccaucuccuucuggaugugcucuaacggaagccuccaguguagaauuugcaucuga

SEQ ID NO: 200089 - RNA, 1698 nt, Artificial Sequence
  derived and/or modified CDS sequence (opt5) from hemagglutinin__InfluenzaA__AEX34683
augaaggugaaacugcucguccugcuuugcaccuucacagccacguacgcugacaccaucuguauuggcuaucacgccaacaauagcacagauaccguugacacagugcuggagaagaacgugaccgucacacauuccgugaaucuccuggaagauucucacaacgggaaacuuugccugcucaagggaaucgcgccccugcagcugggcaauuguagcguugcuggguggauucucggaaacccugagugcgaacugcuuaucuccagagagucuuggagcuacauuguggaaaaaccgaaucccgagaacggcaccuguuauccugggcauuuugccgacuacgaggaacugcgggagcaacucuccucugucagcuccuucgaacgcuuugagaucuuccccaaggagagcucuuggccuuaucacacgaccacaggaguguccgccagcugcucucauaauggcgaauccagcuuuuacaagaaccugcuuuggcugaccggcaaaaaugggcucuaucccaaccugucuaaguccuacgcuaauaacaaagagaaggaaguucuggugcucuggggaguccaccacccuccgaauaucggcgaucagagagcccuguaccauacagagaacgcuuaugugagcguggucuccucucacuacagccggaaauucacccccgaaauugccaagcgcccuaagguuagagaccaggaggggcggaucaacuauuacuggacgcuucuggagcccggagauacaauuaucuuugaagcgaauggcaaccucauugccccucgcuaugcuuucgcccuguccagaggguuuggaagcggcaucauuaauucuaacgcucccauggacgagugugaugccaaaugccagaccccgcaaggcgcgaucaauuccagccuuccuuuccagaacgugcaucccgugacaaucggggaauguccuaaguacguccggucugccaaacugcgcauggugaccggacucagaaauauucccagcauccagucccggggccuguuuggggcuauugccggauucaucgagggcggguggaccggaaugguugacggcugguauggcuaccaccaccagaacgaacaaggguuuggauacgcugccgaucagaagucuacacagaaugccauuaacggcaucacgaauaaagugaacagcgucaucgagaagaugaauacccaguucacagcuguggggaaagaguucaacaagcuggaacgcagaauggagaaucucaacaagaaaguugacgauggauuuauugacaucuggaccuauaacgcggaacugcuugugcugcucgagaaugaacggacacuggacuuccaugauuccaacgucaagaaucuuuacgagaaagucaagagccaacugaaaaacaaugccaaggagauuggcaacgggugcuuugaguucuaucacaaguguaaugacgaaugcauggaaucugugaaaaacggcaccuacgauuaucccaaguacuccgaggagagcaaacucaaucgcgaaaagaucgacggagugaaacuggagucuaugggcguuuaucagauucuggcuaucuacuccacgguggccagcucccucguccugcuugugucucugggggccaucagcuuuuggaugugcuccaacggaucucuccaguguagaauuugcaucuga

SEQ ID NO: 200090 - RNA, 1698 nt, Artificial Sequence
  derived and/or modified CDS sequence (opt5) from hemagglutinin__InfluenzaA__AEX34757
augaaggugaaacugcucguccugcuuugcaccuucacagccacguacgcugacaccaucuguauuggcuaucacgccaacaauagcacagauaccguugacacagugcuggagaagaacgugaccgucacacauuccgugaaucuccuggaagauucucacaacgggaaacuuugccugcucaagggaaucgcgccccugcagcugggcaauuguagcguugcuggguggauucucggaaacccugagugcgaacugcuuaucuccagagagucuuggagcuacauuguggaaaaaccgaaucccgagaacggcaccuguuauccugggcauuuugccgacuacgaggaacugcgggagcaacucuccucugucagcuccuucgaacgcuuugagaucuuccccaaggagagcucuuggccuaaucacacgaccacaggaguguccgccagcugcucucauaacggcggcuccagcuuuuauaagaaucugcuuuggcugaccagaaagaacgggcucuaccccaaucugucuaaguccuaugcuaacaauaaagaaaaggagguucuggugcucuggggaguccaccacccuccgaacaucggcgaucagcgggcccuguaccauacagaaaacgcuuacgugagcguggucuccucucacuauagccgcaaauucacccccgagauugccaagagaccuaagguucgggaccaggaagggcgcaucaauuacuauuggacgcuucuggagcccggagauacaauuaucuuugaggcgaacggcaaucucauugccccuagauacgcuuucgcccugucccggggguuuggaagcggcaucauuaacucuaaugcucccauggacgaaugugaugccaaaugccagaccccgcaaggcgcgaucaacuccagccuuccuuuccagaaugugcaucccgugacaaucggggaguguccuaaguauguccgcucugccaaacugagaauggugaccggacuccggaacauucccagcauccagucccgcggccuguuuggggcuauugccggauucaucgaaggcggguggaccggaaugguugacggcugguacggcuaucaccaccagaaugagcaagggucuggauacgcugccgaucagaaaagcacacagaacgccauuaauggcaucacgaacaaagucaauuccgugaucgaaaagaugaacacccaguuuacagcuguggggaaagaguucaauaagcuggagagacggauggaaaaccucaacaagaaaguugacgauggauucauugacaucuggaccuacaaugcggagcugcuugugcugcucgaaaacgagcgcacacuggacuuucaugauagcaaugucaagaaccuuuaugaaaaagugaagucucaacugaaaaauaacgccaaggagauuggcaaugggugcuucgaguuuuaccacaaguguaacgacgaaugcauggaguccgucaaaaauggcaccuaugauuaccccaaguauagcgaagagucuaaacucaacagagagaagaucgacggagugaaacuggaauccaugggcguuuaccagauucuggcuaucuauagcacgguggccuccucucucguccugcuugugagccugggggccaucuccuucuggaugugcucuaauggaagccuccagugucggauuugcaucuga

SEQ ID NO: 200091 - RNA, 1698 nt, Artificial Sequence
  derived and/or modified CDS sequence (opt5) from hemagglutinin__InfluenzaA__AEX34768
augaaggugaaacugcucguccugcuuugcaccuucacagccacguacgcugacaccaucuguauuggcuaucacgccaacaauagcacagauaccguugacacagugcuggagaagaacgugaccgucacacauuccgugaaucuccuggaagauucucacaacgggaaacuuugccugcucaagggaaucgcgccccugcagcugggcaauuguagcguugcuggguggauucucggaaacccugagugcgaacugcuuaucuccagagagucuuggagcuacauuguggaaaaaccgaaucccgagaacggcaccuguuauccugggcauuuugccgacuacgaggaacugcgggagcaacucuccucugucagcuccuucgaacgcuuugagaucuuccccaaggauagcucuuggccuaaucacacgaccacaggaguguccgccagcugcucucauaacggcgaguccagcuuuuauaagaaucugcuuuggcugaccggcaaaaacgggcucuaccccaaucugucuaaguccuaugcuaacaauaaagaaaaggagguucuggugcucuggggaguccaccacccuccgaacaucggcgaccagagagcccuguaccauacagaaaacgcuuacgugagcguggucuccucucacuauagccggaaauucacccccgagauugccaagcgcccuaagguuagagaucaagggggacggaucaauuacuauuggacgcuucuggaacccggcgacacaauuaucuuugaggcgaacgggaaucucauugccccucgcuacgcuuucgcccuguccagaggauuuggcagcggcaucauuaacucuaaugcucccauggaugagugugacgccaaaugccagaccccgcagggggcgaucaacuccagccuuccuuuccagaaugugcaucccgugacaaucggagaauguccuaaguauguccggucugccaaacugcgcauggugaccggccucagaaacauucccagcauccagucccgggggcuguuuggagcuauugccggcuucaucgaagggggauggaccggcaugguugauggcugguacggguaucaccaccagaaugaacaaggaucuggcuacgcugccgaccagaaguccacacagaacgccauuaaugggaucacgaacaaagugaauagcgucaucgagaagaugaacacccaguuuacagcugugggaaaagaguucaauaagcuggagcgcagaauggagaaccucaacaagaaaguugaugacggcuucauugacaucuggaccuacaaugcggaacugcuugugcugcucgagaacgaacggacacuggauuuucaugacagcaaugucaagaaccuuuaugagaaagugaagucucaacugaaaaauaacgccaaggaaauugggaauggcugcuucgaguuuuaccacaaguguaacgaugagugcauggaauccgucaaaaauggaaccuaugacuaccccaaguauagcgaggaaucuaaacucaaccgcgagaagaucgauggcgugaaacuggaguccauggggguuuaccagauucuggcuaucuauagcacgguggccuccucucucguccugcuugugagccugggagccaucuccuucuggaugugcucuaauggcagccuccaguguagaauuugcaucuga

SEQ ID NO: 200092 - RNA, 1698 nt, Artificial Sequence
  derived and/or modified CDS sequence (opt5) from hemagglutinin__InfluenzaA__AEX34779
augaaggugaaacugcucguccugcuuugcaccuucacagccacguacgcugacaccaucuguauuggcuaucacgccaacaauagcacagauaccguugacacagugcuggagaagaacgugaccgucacacauuccgugaaucuccuggaaaacucucacaaugggaaacuuugccugcucaagggaaucgcgccccugcagcugggcaacuguagcguugcuggguggauucucggaaauccugagugcgaacugcuuaucuccaaagagucuuggagcuacauuguggaaaagccgaaccccgagaauggcaccuguuauccugggcauuuugccgauuacgaggaacugagagagcaacucuccucugucagcuccuucgaacgguuugagaucuuccccaaggagagcucuuggccuaaccacacggugaccggaguuuccgccagcugcucucauaauggcgaacgcuccuuuuauagaaaccugcuuuggcugacaggcaaaaaugggcucuaccccaaccugagcaagucuuaugcuaauaacaaagagaaggaagugcugguccucuggggagugcaccacccuccgaacaucggcaaucagaaagcccuguaccauaccgagaacgcuuacguguccgucguuagcucccacuauucucggaaguucacacccgaaauugccaagcgcccuaaagugagagaccaggaggggcggaucaauuacuauuggacccuucuggagcccggagauacgauuaucuuugaagcgaacggcaaucucauugccccucgcuacgcuuucgcccugagcagaggguuuggauccggcaucauuaacagcaaugcucccauggacaagugugaugccaaaugccagacaccgcaaggcgcgaucaacucuucccuuccuuuccagaaugugcaucccgucaccaucggggaguguccuaaguaugugcggagcgccaaacugcgcaugguuacaggacucagaaacauucccucuauccagagccggggccuguuuggggcuauugccggauucaucgaaggcggguggaccggaaugguggacggcugguacggcuaucaccaccagaaugagcaaggguccggauacgcugccgaucagaagucuacccagaacgccauuaauggcaucacaaacaaagucaauagcgugaucgaaaagaugaacacgcaguuuaccgcuguugggaaggaguucaacaaacuggagcgcagaauggaaaaucucaacaagaaaguggacgauggauucauugacaucuggacauacaaugcggagcugcuuguccugcucgaaaacgagcggacccuggauuuucaugacuccaaugugaagaaccuuuaugaaaaagucaagagccaacugaagaauaacgccaaagagauuggcaaugggugcuucgaguuuuaccacaaguguaacgacgaaugcauggagucugugaaaaauggcacauaugauuaccccaaguauuccgaagagagcaaacucaaccgcgagaagaucgacggaguuaagcuggaaucuaugggcguguaccagauucuggcuaucuauuccaccgucgccagcucccucgugcugcuuguuucucugggggccaucagcuucuggaugugcuccaauggaucucuccaguguagaauuugcaucuga

SEQ ID NO: 200093 - RNA, 1698 nt, Artificial Sequence; identical to SEQ ID NO: 196169
  derived and/or modified CDS sequence (opt5) from hemagglutinin__InfluenzaA__AEX34790

SEQ ID NO: 200094 - RNA, 1698 nt, Artificial Sequence
  derived and/or modified CDS sequence (opt5) from hemagglutinin__InfluenzaA__AEX34801
augaaggugaaacugcucguccugcuuugcaccuucacagccacguacgcugacaccaucuguauuggcuaucacgccaacaauagcacagauaccguugacacagugcuggagaagaacgugaccgucacacauuccgugaaucuccuggaagauaaccacaaugggaaacuuugccugcucaagggaaucgcgccccugcagcugggcaacuguucuguugcuggguggauucucggaaauccugagugcgaacugcuuaucagcaaagaguccuggucuuacauuguggaaaagccgaaccccgagaauggcgccuguuauccugggcauuuugccgacuacgaggaacugagagagcaacucagcuccgucucuagcuucaagcgguuugaaaucuuccccaaagaguccagcuggccuaaccacaccgugacgggaguuucugcuuccugcagccauaauggcgagucuuccuuuuauaagaaccugcuuuggcugaccggcaaaaaugggcucuaccccaaccugagcaagucuuaugccaauaacaaagaaaaggaggugcugguccucuggggagugcaccacccuccgaacaucggcgaucagaugacacuguaccauaaggaaaaugcuuacguguccgucguuagcucccacuauucucgcaaauucacccccgagauugccaagagaccuaaagugcgggaccaggaagggcgcaucaacuacuauuggacacuucuggagcccggagauaccauuaucuuugaggcgagcggcaaucucauugccccuagauacgcuuucgcccugucccggggguuuggaagcggcaucauuaacucugacgcucccauggaugaaugugacgccaagugccagacgccgcaaggcgcgaucaauuccagccuuccuuuccagaacgugcaucccgucacaaucggggaguguccuaaauaugugcgcucugccaagcugagaaugguuaccggacuccggaauauucccagcauccagucccgcggccuguuuggggcuauugccggauucaucgaaggcggguggacaggaaugguggauggcugguacggcuaucaccaccagaacgagcaagggucuggauacgcugccgaccagaaaagcacccagaaugccauuaacggcaucaccaauaaggucaacuccgugaucgaaaagaugaauacacaguuuacggcuguugggaaagaguucaacaagcuggagagacggauggaaaaucucaacaaaaagguggaugacggauucauugacgucuggaccuacaacgcggagcugcuugugcugcucgaaaaugagcgcacacuggauuuucaugacagcaacgucaaaaaucuuuaugaaaaggugaagaaccaacugaaaaauaacgccaaggagaucggcaaugggugcuucgaguuuuaccacaaauguaacgaugaaugcauggagucuguuaagaauggcaccuaugacuaccccaaauauuccgaagagagcaagcucucuagagagaagauugauggagugaaacuggaauccaugggcgucuaccagauccuggcuauuuauagcacaguggccuccucucucguucugcuugugagccugggggccaucuccuucuggaugugcucuaacggaagccuccagugucggaucugcauuuga

SEQ ID NO: 200095 - RNA, 1698 nt, Artificial Sequence
  derived and/or modified CDS sequence (opt5) from hemagglutinin__InfluenzaA__AEX34812
augaaggugaaacugcucguccugcuuugcaccuucacagccacguacgcugacaccaucuguauuggcuaucacgccaacaauagcacagauaccguugacacagugcuggagaagaacgugaccgucacacauuccgugaaucuccuggaaaacucucacaaugggaaacuuugccugcucaagggaaucgcgccccugcagcugggcaacuguagcguugcuggguggauucucggaaauccugagugcgaacugcuuaucuccaaagagucuuggagcuacauuguggaaaagccgaaccccgagaauggcaccuguuauccugggcauuuugccgauuacgaggaacugagagagcaacucuccucugucagcuccuucgaacgguuugagaucuuccccaaggagagcucuuggccuaaccacacggugaccggaguuuccgccagcugcucucauaauggcgaauccagcuuuuaucgcaaccugcuuuggcugacaggcaaaaaugggcucuaccccaaccugucuaaguccuaugcuaauaacaaagagaaggaagugcugguccucuggggagugcaccacccuccgaacaucggcgaccagaaagcccuguaccauaccgagaaugcuuacgugagcgucguuuccucucacuauagcagaaaguucacacccgaaauugccaagcggccuaaagugcgcgaucaggaggggagaaucaacuacuauuggacccuucuggagcccggagacacgauuaucuuugaagcgaauggcaaccucauugccccucgguacgcuuucgcccugucccgcggguuuggaagcggcaucauuaauucuaacgcucccauggauaagugugacgccaaaugccagacaccgcaaggcgcgaucaauuccagccuuccuuuccagaacgugcaucccgucaccaucggggaguguccuaaguaugugagaucugccaaacugcggaugguuacaggacuccgcaauauucccagcauccaguccagaggccuguuuggggcuauugccggauucaucgaaggcggguggaccggaaugguggauggcugguacggcuaucaccaccagaacgagcaagggucuggauacgcugccgaccaaaagagcacccagaaugccauugauggcaucacaaacaaagucaauuccgugaucgaaaagaugaacacgcaguuuaccgcuguugggaaggaguucaauaaacuggagcggcgcauggaaaaccucaacaagaaaguggacgauggauucauugacaucuggacauacaaugcggagcugcuuguccugcucgaaaacgagagaacccuggacuuucaugauagcaaugugaagaaccuuuaugaaaaagucaagucucagcugaagaauaacgccaaagagauuggcaaugggugcuucgaguuuuaccacaaguguaacgacgaaugcauggaguccgugaaaaauggcacauaugauuaccccaaguauagcgaagagucuaaacucaaccgggagaagaucgacggaguuaagcuggaauccaugggcguguaccagauucuggcuaucuauagcaccgucgccuccucucucgugcugcuuguuagccugggggccaucuccuucuggaugugcucuaauggaagccuccagugucgcauuugcaucuga

SEQ ID NO: 200096 - RNA, 1698 nt, Artificial Sequence
  derived and/or modified CDS sequence (opt5) from hemagglutinin__InfluenzaA__AEX34834
augaaggugaaacugcucguccugcuuugcaccuucacagccacguacgcugacaccaucuguauuggcuaucacgccaacaauagcacagauaccguugacacagugcuggagaagaacgugaccgucacacauuccgugaaucuccuggaagauaaccacaaugggaaacuuugccugcucaagggaaucgcgccccugcagcugggcaacuguucuguugcuggguggauucucggaaauccugagugcgaacugcuuaacagcaaagaguccuggucuuacaucguggaaaagccgaaucccgagaacggcaccuguuauccugggcauuuugccgacuacgaggaacugagagagcaacucagcuccgucucuagcuucaagcgguuugaaauuuuccccaaagaguccagcuggccuaaucacacggugaccggaguuucugccuccugcagccauaacggcgagucuuccuuuuauaagaaucugcuuuggcugacaggcaaaaacgggcucuaccccaaucugagcaagucuuaugcuaacaacaaagaaaaggaggugcugguccucuggggagugcaccacccuccgaauaucggcgaucagaugacccuguaccauaaggaaaacgccuacguguccgucguuagcucccacuauucucgcaaauucacacccgagaucaccaagagaccuaaagugcgggaccaggaagggcgcauuaauuacuauuggacgcuucuggagcccggagauacaaucauuuuugaggcuagcggcaaccucaucgccccuagauacgcguucgcccugucccggggguuuggaagcggcauuaucaauucuaacgcucccauggacgaaugugaugccaagugccagaccccgcaaggcgcuauuaauuccagccuuccuuuccagaacgugcaucccgucacaaucggggaguguccuaaauaugugcgcucugccaagcugagaaugguuaccggacuccggaauauccccagcauucagucccgcggccuguuuggggcgaucgccggauucauugaaggcggguggaccggaaugguggacggcugguacggcuaucaccaccagaacgagcaagggucuggauacgcugccgaucagaaaagcacacagaaugcuaucaacggcauuacgaauaaggucaacuccgugaucgaaaagaugaauacccaguuuacagccguugggaaagaguucaacaagcuggagagacggauggaaaaccucaauaaaaagguggacgauggauucaucgacgucuggaccuacaacgccgagcugcuugugcugcucgaaaaugagcgcacacuggacuuucaugauagcaacgucaaaaaucuuuaugaaaaggugaagaaccaacugaaaaauaacgcuaaggagauuggcaaugggugcuucgaguuuuaccacaaauguaacgacgaaugcauggagucuguuaagaauggcaccuaugauuaccccaaauauuccgaagagagcaagcucucuagagagaagaucgacggagugaaacuggaauccaugggcgucuaccagauucuggcgaucuauagcacgguggccuccucucucguucugcuugugagccugggggcuauuuccuucuggaugugcucuaacggaagccuccagugucggaucugcaucuga

SEQ ID NO: 200097 - RNA, 1698 nt, Artificial Sequence
  derived and/or modified CDS sequence (opt5) from hemagglutinin__InfluenzaA__AEX34845
augaaggugaaacugcucguccugcuuugcaccuucacagccacguacgcugacaccaucuguauuggcuaucacgccaacaauagcacagauaccguugacacagugcuggagaagaacgugaccgucacacauuccgugaaucuccuggaaaacucucacaaugggaaacuuugccugcucaagggaaucgcgccccugcagcugggcaacuguagcguugcuggguggauucucggaaauccugagugcgaacugcuugugccgaaagaguccuggucuuacaucgucgaaaagcccaacccugagaauggcaccuguuaucccgggcauuuugccgauuacgaggaacugagagagcaacucagcuccgugucuagcuucgaacgguuugagauuuucccuaaggaguccagcuggcccaaccacacgguuaccggagugucugccuccugcagccauaauggcgaaucuuccuuuuaucgcaaccugcuuuggcugacaggcaaaaaugggcucuacccuaaccugagcaagucuuaugcuaauaacaaagagaaggaaguccuggugcucuggggagugcaccacccgcccaacaucggcgaccagaaagcccuguaccauaccgagaaugcuuacgucuccguugugagcucccacuauucuagaaaguucacaccugaaaucgccaagcggcccaaagugcgcgaucaggaggggagaauuaacuacuauuggacccuucuggagccuggagacacgaucauuuuugaagcgaauggcaaccucaucgcuccccgguacgccuucgcccugagccgcggguuuggauccggcauuaucaauagcaacgcuccgauggauaagugugacgccaaaugccagacaccucaaggcgcgauuaauucuucccuucccuuccagaacguccauccugugaccaucggggagugucccaaguauguuagaagcgccaaacugcggauggugacaggacuccgcaauauccccucuauucagagcagaggccuguuuggggcuaucgccggauucauugaaggcggguggaccggaauggucgauggcugguacggcuaucaccaccagaacgagcaaggguccggauacgcugccgaccagaagucuacccagaaugccaucaacggcauuacaaauaaagugaacagcguuaucgaaaagaugaauacgcaguuuaccgcuguggggaaggaguucaacaaacuggagcggcgcauggaaaaccucaauaagaaagucgaugacggauucaucgauauuuggacauacaacgcggagcugcuugugcugcucgaaaaugagagaacccuggacuuucaugacuccaacgucaagaaucuuuaugaaaaaguuaagagccaacugaagaacaaugccaaagagaucggcaacgggugcuucgaguuuuaccacaaguguaaugaugaaugcauggagucugugaaaaacggcacauaugacuacccuaaguauuccgaagagagcaaacucaaucgggagaagauugaaggagugaagcuggagucuaugggcgucuaccagauccuggcuauuuauuccaccguggccagcucccucguucugcuugugucucugggggccaucagcuucuggaugugcuccaacggaucucuccagugucgcaucugcauuuga

SEQ ID NO: 200098 - RNA, 1698 nt, Artificial Sequence; identical to SEQ ID NO: 196169
  derived and/or modified CDS sequence (opt5) from hemagglutinin__InfluenzaA__AEX34856

SEQ ID NO: 200099 - RNA, 1698 nt, Artificial Sequence
  derived and/or modified CDS sequence (opt5) from hemagglutinin__InfluenzaA__AEX34867
augaaggugaaacugcucguccugcuuugcaccuucacagccacguacgcugacaccaucuguauuggcuaucacgccaacaauagcacagauaccguugacacagugcuggagaagaacgugaccgucacacauuccgugaaucuccuggaaaacucucacaaugggaaacuuugccugcucaagggaaucgcgccccugcagcugggcaacuguagcguugcuggguggauucucggaaauccugagugcgaacugcuuguguccaaagagucuuggagcuacaucgucgaaaagccgaaccccgagaauggcaccuguuauccugggcauuuugccgauuacgaggaacugagagagcaacucauuuccgugucuagcuucgaacgguuugagaucuuccccaaggaguccagcuggccuaaccacacgguuaccggagugucugccuccugcagccauaauggcgaaucuuccuuuuaucgcaaccugcuuuggcugacaggcaaaaaugggcucuaccccaaccugagcaagucuuaugcuaauaacaaagagaaggaaguccuggugcucuggggagugcaccacccuccgaacaucggcgaccagaaagcccuguaccauaccgagaaugcuuacgucuccguugugagcucccacuauucuagaaaguucacacccgaaauugccaagcggccuaaagugcgcgaucaggaggggagaaucaacuacuauuggacccuucuggagcccggagacacgauuaucuuugaagcgaauggcaaccucauugccccucgguacgcuuucgcccugagccgcggguuuggauccggcaucauuaauagcaacgcucccauggauaagugugacgccaaaugccagacaccgagaggcgcgaucaauucuucccuuccuuuccaaaacguccaucccgugaccaucggggaguguccuaaguauguucggagcgccaaacugcgcauggugacaggacucagaaauauucccucuauccagagccggggccuguuuggggcuauugccggauucaucgaaggcggguggaccggaauggucgauggcugguacggcuaucaccaccagaacgagcagggguccggauacgcugccgaccaaaagucuacccagaaugccauuaacggcaucacaaauaaagugaacagcguuaucgaaaagaugaauacgcaguuuaccgcuguggggaaggaguucaacaaacuggagcgcagaauggaaaaccucaauaagaaagucgaugacggauucauugauaucuggacauacaacgcggagcugcuugugcugcucgaaaaugagcggacccuggacuuucaugacuccaacgucaagaaucuuuaugaaaaaguuaagagccagcugaagaacaaugccaaagagauuggcaacgggugcuucgaguuuuaccacaaguguaaugaugaaugcauggagucugugaaaaacggcacauaugacuaccccaaguauuccgaagagagcaaacucaaucgcgagaagaucgaaggagugaagcuggagucuaugggcgucuaccaaauucuggcuaucuauuccaccguggccagcucccucguucugcuugugucucugggggccaucagcuucuggaugugcuccaacggaucucuccaguguagaauuugcaucuga

SEQ ID NO: 200100 - RNA, 1698 nt, Artificial Sequence; identical to SEQ ID NO: 196169
  derived and/or modified CDS sequence (opt5) from hemagglutinin__InfluenzaA__AEX34878

SEQ ID NO: 200101 - RNA, 1698 nt, Artificial Sequence
  derived and/or modified CDS sequence (opt5) from hemagglutinin__InfluenzaA__AEX34889
augaaggugaaccugcucguccugcuuugcaccuucacagccacguacgcugacaccaucuguauuggcuaucacgccaauaacagcacagauaccguugacacagugcuggagaaaaaugugaccgucacacauuccgugaaccuccuggaaaauucucacaacgggaaacuuugccugcucaaaggaaucgcgccccugcagcugggcaauuguagcguugcuggguggauucucggaaacccugagugcgaacugcuuaucuccaaggagucuuggagcuacauuguggaaaaaccgaaucccgagaacggcaccuguuauccugggcauuuugccgauuacgaggaacugagagagcaacucuccucugucagcuccuucgaacgguuugagaucuuccccaaggagagcucuuggccuaaucacacggugaccggaguuuccgccagcugcucucauaacggcgaauccagcuuuuaucgcaaucugcuuuggcugacaggcaagaacgggcucuaccccaaucugucuaaauccuaugcuaacaacaaggagaaagaagugcugguccucuggggagugcaccacccuccgaauaucggcgaccagaaggcccuguaccauaccgagaacgcuuacgugagcgucguuuccucucacuauagcagaaaauucacacccgaaauugccaagcggccuaaggugcgcgaucaggaggggagaaucaauuacuauuggacccuucuggagcccggagacacgauuaucuuugaagcgaacggcaaucucauugccccucgguacgcuuucgcccugucccgcggguuuggaagcggcaucauuaacucuaaugcucccauggauaaaugugacgccaagugccagacaccgcaaggcgcgaucaacuccagccuuccuuuccagaaugugcaucccgucaccaucggggaguguccuaaauaugugagaucugccaagcugcggaugguuacaggacuccgcaacauucccagcauccaguccagaggccuguuuggggcuauugccggauucaucgaaggcggguggaccggaaugguggauggcugguacggcuaucaccaccagaaugagcaagggucuggauacgcugccgaccagaaaagcacccagaacgccauuaauggcaucacaaacaaggucaauuccgugaucgaaaagaugaacacgcaguuuaccgcuguugggaaggaguucaacaagcuggagcggcgcauggaaaaucucaacaaaaagguggaugacggauucauugauaucuggacauacaaugcggagcugcuuguccugcucgaaaacgagagaacccuggacuuucaugacagcaaugugaaaaaccuuuaugaaaaggucaaaucucaacugaagaauaacgccaaggagauuggcaaugggugcuucgaguuuuaccacaaauguaacgaugaaugcauggaguccgugaagaauggcacauaugacuaccccaaauauagcgaagagucuaagcucaaccgggagaaaaucgauggaguuaagcuggaauccaugggcguguaccagauucuggcuaucuauagcaccgucgccuccucucucgugcugcuuguuagccugggggccaucuccuucuggaugugcucuaauggaagccuccagugucgcauuugcaucuga

SEQ ID NO: 200102 - RNA, 1698 nt, Artificial Sequence
  derived and/or modified CDS sequence (opt5) from hemagglutinin__InfluenzaA__AEX34900
augaaggugaaacugcucguccugcuuugcaccuucacagccacguacgcugacaccaucuguauuggcuaucacgccaacaauagcacagauaccguugacacagugcuggagaagaacgugaccgucacacauuccgugaaucuccuggaagauaaccacaaugggaaacuuugccugcucaagggaaucgcgccccugcagcugggcaacuguucuguugcuggguggauucucggaaauccugagugcgaacugcuuaucagcaaagaguccuggucuuacauuguggaaaagccgaaccccgagaauggcaccuguuauccugggcauuuugccgacuacgaggaacugagagagcaacucagcuccgucucuagcuucgaacgguuugagaucuuccccaaggaguccagcuggccuaaccacacggugaccggaguuucugccuccugcagccauaauggcgaaucuuccuuuuauaaaaaccugcuuuggcugacaggcaagaaugggcucuaccccaaccugagcaaaucuuaugcuaauaacaaggagaaagaagugcugguccucuggggagugcaccacccuccgaacaucggcgaucagaugacccuguaccauaaggagaaugccuacguguccgucguuagcucccacuauucucgcaaguucacacccgaaauugcuaaaagaccuaaggugcgggaccaggaggggcgcaucaacuacuauuggacccuucuggagcccggagauacgauuaucuuugaagccagcggcaaucucauugcgccuagauacgccuucgcucugucccggggguuuggaagcggcaucauuaacucuaaugcccccauggacgagugugaugcuaaaugccagacaccgcaaggcgccaucaacuccagccuuccuuuccagaaugugcaucccgucaccaucggggaauguccuaaguaugugcgcucugcgaaacugagaaugguuacaggacuccggaacauucccagcauccagucccgcggccuguuuggggccauugcuggauucaucgagggcggguggaccggaaugguggacggcugguacggcuaucaccaccagaaugaacaagggucuggauacgccgcugaucagaaguccacccagaacgccauuaauggcgucacaaacaaagugaauagcguuaucgagaagaugaacacgcaguuuaccgccguggggaaggaguucaauaaacuggaaagacggauggagaaccucaacaagaaagucgacgauggauucaucgacguguggacauacaaugcugaacugcuuguccugcucgagaacgaacgcacccuggacuuucaugauagcaaugugaagaaccuuuaugagaaaguuaagaaucaacugaagaacaaugcgaaagagauuggcaacgggugcuucgaauuuuaccacaaguguaaugacgagugcauggaaucugugaaaaacggcacauaugauuaccccaaguauuccgaggagagcaaacucucuagagaaaagaucgacggagucgagcuggaauccaugggcguguaccagauucuggccaucuauagcaccguugcuuccucucucgugcugcuugucagccugggggccauuuccuucuggaugugcucuaauggaagccuccagugucggaucugcaucuga

SEQ ID NO: 200103 - RNA, 1698 nt, Artificial Sequence
  derived and/or modified CDS sequence (opt5) from hemagglutinin__InfluenzaA__AEX34911
augaaggugaaacugcucguccugcuuugcaccuucacagccacguacgcugacaccaucuguauuggcuaucacgccaacaauagcacagauaccguugacacagugcuggagaagaacgugaccgucacacauuccgugaaucuccuggaaaacucucacaaugggaaacuuugccugcucaagggaaucgcgccccugcagcugggcaacuguagcguugcuggguggauucucggaaauccugagugcgaacugcuuaucucccaagagucuuggagcuacauuguggaaaaaccgaaccccgagaauggcaccuguuauccugggcauuuugccgauuacgaggaacugagagagcagcucuccucugucagcuccuucgaacgguuugagaucuuccccaaggagagcucuuggccuaaccacacggugaccggaguuuccgccagcugcucucauaauggcgaauccagcuuuuaucgcaaccugcuuuggcugacaggcaagaaugggcucuaccccaaccugucuaaauccuaugcuaauaacaaggagaaagaagugcugguccucuggggagugcaccacccuccgaacaucggcgaccagaaggcccuguaccauaccgagaaugcuuacgugagcgucguuuccucucacuauagcagaaaauucacacccgaaauugccaagcggccuaaggugcgcgaucaggaggggagaaucaacuacuauuggacccuucuggagcccggagacacgauuaucuuugaagcgaauggcaaccucauugccccucgguacgcuuucgcccugucccgcggguuuggaagcggcaucauuaauucuaacgcucccauggauaaaugugacgccaagugccaaacaccgcagggcgcgaucaauuccagccuuccuuuccagaacgugcaucccgucaccaucggggaguguccuaaauaugugagaucugccaagcugcggaugguuacaggacuccgcaauauucccagcauccaguccagaggccuguuuggggcuauugccggauucaucgaaggcggguggaccggaaugguggauggcugguacggcuaucaccaccaaaacgagcaggggucuggauacgcugccgaccagaaaagcacccagaaugccauuaacggcaucacaaauaaggucaacuccgugaucgaaaagaugaauacgcaauuuaccgcuguugggaaagaguucaacaagcuggagcggcgcauggaaaaccucaauaaaaagguggaugacggauucauugauaucuggacauacaacgcggagcugcuuguccugcucgaaaaugagagaacccuggacuuucaugacagcaacgugaaaaaucuuuaugaaaaggucaaaucucagcugaagaacaaugccaaggagauuggcaacgggugcuucgaguuuuaccacaaauguaaugaugaaugcauggaguccgugaagaacggcacauaugacuaccccaaauauagcgaagagucuaagcucaaucgggagaaaaucgauggaguuaagcugggcuccauggggguguaccagauucuggcuaucuauagcaccgucgccuccucucucgugcugcuuguuagccugggagccaucuccuucuggaugugcucuaacggcagccuccaaugucgcauuugcaucuga

SEQ ID NO: 200104 - RNA, 1698 nt, Artificial Sequence
  derived and/or modified CDS sequence (opt5) from hemagglutinin__InfluenzaA__AEX34922
augaaggugaaacugcucguccugcuuugcaccuucacagccacguacgcugacaccaucuguauuggcuaucacgccaacaauagcacagauaccguugacacagugcuggagaagaacgugaccgucacacauuccgugaaucuccuggaaaacucucacaaugggaaacuuugccugcucaagggaaucgcgccccugcagcugggcaacuguagcguugcuggguggauucucggaaauccugagugcgaacugcuuaucuccaaagagucuuggagcuacauuguggaaaagccgaaccccgagaauggcaccuguuauccugggcauuuugccgauuacgaggaacugagagagcaacucuccucugucagcuccuucgaacgguuugagaucuuccccaaggagagcucuuggccuaaccacacggugaccggaguuuccgccagcugcucucauaauggcgaauccagcuuuuaucgcaaccugcuuuggcugacaggcaaaaaugggcucuaccccaaccugucuaaguccuaugcuaauaacaaagagaaggaagugcugguccucuggggagugcaccacccuccgaacaucggcgaccagaaagcccuguaccauaccgagaaugcuuacgugagcgucguuuccucucacuauagcagacgguucacacccgaaauugccaagcgcccuaaggugagagaucaggaggggcggaucaacuacuauuggacccuucuggagcccggagacacgauuaucuuugaagcgaauggcaaccucauugccccucgcuacgcuuucgcccuguccagaggguuuggaagcggcaucauuaauucuaacgcucccauggauaaaugugacgccaagugccagacaccgcaaggcgcgaucaauuccagccuuccuuuccagaacgugcaucccgucaccaucggggaguguccuaaauaugugcggucugccaagcugcgcaugguuacaggacucagaaauauucccagcauccagucccggggccuguuuggggcuauugccggauucaucgaaggcggguggaccggaaugguggauggcugguacggcuaucaccaccagaacgagcaagggucuggauacgcugccgaccagaaaagcacccagaaugccauuaacggcaucacaaauaaggucaacuccgugaucgaaaagaugaauacgcaguuuaccgcuguugggaaagaguucaacaagcuggagcgcagaauggaaaaccucgauaaaaagguggacgauggauucauugacaucuggacauacaaugcggagcugcuuguccugcucgaaaacgagcggacccuggacuuucaugauagcaaugugaaaaaccuuuaugaaaaggucaaaucucaacugaagaauaacgccaaggagauuggcaaugggugcuucgaguuuuaccacaaauguaacgacgaaugcauggaguccgugaagaauggcacauaugauuaccccaaauauagcgaagagucuaagcucaaccgcgagaaaaucgacggaguuaagcuggaauccaugggcguguaccagauucuggcuaucuauagcaccgucgccuccucucucgugcugcuuguuagccugggggccaucuccuucuggaugugcucuaauggaagccuccaguguagaauuugcaucuga

SEQ ID NO: 200105 - RNA, 1698 nt, Artificial Sequence; identical to SEQ ID NO: 194560
  derived and/or modified CDS sequence (opt5) from hemagglutinin__InfluenzaA__AEX34933

SEQ ID NO: 200106 - RNA, 1698 nt, Artificial Sequence; identical to SEQ ID NO: 194560
  derived and/or modified CDS sequence (opt5) from hemagglutinin__InfluenzaA__AEX34944

SEQ ID NO: 200107 - RNA, 1698 nt, Artificial Sequence
  derived and/or modified CDS sequence (opt5) from hemagglutinin__InfluenzaA__AEX34955
augaaggccaaacugcucgugcugcuuugcaccuucacagcuacguacgccgacaccaucuguauuggcuaucacgcgaacaauagcacagauaccgucgacacaguucuggagaagaacgugaccgugacacauuccgucaaucuccuggaaaacucucacaaugggaaacuuugccugcucaagggaaucgcuccccugcagcugggcaacuguagcguggccggguggauucucggaaauccugagugcgaacugcuuaucuccaaagagucuuggagcuacauuguugaaaagccgaaccccgagaauggcaccuguuauccugggcauuuugccgauuacgaggaacugagagagcaacucuccucugugagcuccuucgaacgguuugagaucuuccccaaggagagcucuuggccuaaccacacggucaccggaguguccgcuagcugcucucauaauggcgaauccagcuuuuaucgcaaccugcuuuggcugacaggcaaaaaugggcucuaccccaaccugucuaaguccuaugccaauaacaaagagaaggaaguucuggugcucuggggaguccaccacccuccgaacaucggcgaccagaaagcucuguaccauaccgagaaugccuacgugagcguggucuccucucacuauagcagaaaguucacacccgaaauugcgaagcggccuaaaguucgcgaucaggaggggagaaucaacuacuauuggacccuucuggagcccggagacacgauuaucuuugaagccaauggcaaccucauugcuccucgguacgccuucgcucugucccgcggguuuggaagcggcaucauuaauucuaacgcccccauggauaagugugacgcgaaaugccagacaccgcaaggcgccaucaauuccagccuuccuuuccagaacgugcaucccgugaccaucggggaguguccuaaguaugucagaucugcuaaacugcggauggugacaggacuccgcaauauucccagcauccaguccagaggccuguuuggggccauugcuggauucaucgaaggcggguggaccggaaugguugauggcugguacggcuaucaccaccagaacgagcaagggucuggauacgccgccgaccaaaagagcacccagaaugcuauuaacggcaucacaaauaaagugaacuccgucaucgaaaagaugaauacgcaguuuaccgcgguggggaaggaguucaacaaacuggagcggcgcauggaaaaccucaauaagaaaguugaugacggauucauugauaucuggacauacaacgccgagcugcuugugcugcucgaaaaugagagaacccuggacuuucaugacagcaacgucaagaaucuuuaugaaaaagugaagucucagcugaagaacaaugcuaaagagauuggcaacgggugcuucgaguuuuaccacaaguguaaugaugaaugcauggaguccgucaaaaacggcacauaugacuaccccaaguauagcgaagagucuaaacucaaucgggagaagaucgauggagugaagcuggaauccaugggcguuuaccagauucuggccaucuauagcaccguggccuccucucucguccugcuugugagccugggggcuaucuccuucuggaugugcucuaacggaagccuccagugucgcauuugcaucuga

SEQ ID NO: 200108 - RNA, 1698 nt, Artificial Sequence
  derived and/or modified CDS sequence (opt5) from hemagglutinin__InfluenzaA__AEX34966
augaaggugaaacugcucguccugcuuugcaccuucacagccacguacgcugacaccaucuguauuggcuaucacgccaacaauagcacagauaccguugacacagugcuggagaagaacgugaccgucacacauuccgugaaucuccuggaaaacucucacaaugggaaacuuugccugcucaagggaaucgcgccccugcagcugggcaacuguagcguugcuggguggauucucggaaauccugagugcgaacugcuuaucuccaaagagucuuggagcuacauuguggaaaagccgaaccccgagaauggcaccuguuauccugggcauuuugccgauuacgaggaacugagagagcaacucuccucugucagcuccuucgaacgguuugagaucuuccccaaggagagcucuuggccuaaccacacggugaccggaguuuccgccagcugcucucauaauggcgaauccagcuuuuaucgcaaccugcuuuggcugacaggcaaaaaugggcucuaccccaaccugucuaaguccuaugcuaauaacaaagagaaggaagugcugguccucuggggagugcaccacccuccgaacaucggcgaccagaaagcccuguaccauaccgagaaugcuuacgugagcgucguuuccucucacuauagcagaaaguucacacccgaaauugccaagcggccuaaagugcgcgaucaggaggggagaaucaacuacuauuggacccuucuggagcccggagacacgauuauguuugaagcgaauggcaaccucaucgccccucgguacgcuuucgcccugucccgcggguuuggaagcggcauuaucaauucuaacgcucccauggauaagugugacgccaaaugccagacaccgcaaggcgcgauuaauuccagccuuccuuuccagaacgugcaucccgucaccaucggggaguguccuaaguaugugagaucugccaaacugcggaugguuacaggacuccgcaauauccccagcauucaguccagaggccuguuuggggcuaucgccggauucauugaaggcggguggaccggaaugguggauggcugguacggcuaucaccaccagaacgagcaagggucuggauacgcugccgaccaaaagagcacccagaaugccaucaacggcauuacaaauaaagucaacuccgugaucgaaaagaugaauacgcaguuuaccgcuguugggaaggaguucaacaaacuggagcggcgcauggaaaaccucaauaagaaaguggaugacggauucaucgauauuuggacauacaacgcggagcugcuuguccugcucgaaaaugagagaacccuggacuuucaugacagcaacgugaagaaucuuuaugaaaaagucaagucucagcugaagaacaaugccaaagagaucggcaacgggugcuucgaguuuuaccacaaguguaaugaugaaugcauggaguccgugaaaaacggcacauaugacuaccccaaguauagcgaagagucuaaacucaaucgggagaagauugauggaguuaagcuggaauccaugggcguguaccagauccuggcuauuuauagcaccgucgccuccucucucgugcugcuuguuagccugggggccaucuccuucuggaugugcucuaacggaagccuccagugucgcaucugcauuuga

SEQ ID NO: 200109 - RNA, 1698 nt, Artificial Sequence; identical to SEQ ID NO: 200108
  derived and/or modified CDS sequence (opt5) from hemagglutinin__InfluenzaA__AEX34977

SEQ ID NO: 200110 - RNA, 1698 nt, Artificial Sequence; identical to SEQ ID NO: 200108
  derived and/or modified CDS sequence (opt5) from hemagglutinin__InfluenzaA__AEX34988

SEQ ID NO: 200111 - RNA, 1698 nt, Artificial Sequence; identical to SEQ ID NO: 196169
  derived and/or modified CDS sequence (opt5) from hemagglutinin__InfluenzaA__AEX34999

SEQ ID NO: 200112 - RNA, 1698 nt, Artificial Sequence; identical to SEQ ID NO: 200108
  derived and/or modified CDS sequence (opt5) from hemagglutinin__InfluenzaA__AEX35010

SEQ ID NO: 200113 - RNA, 1698 nt, Artificial Sequence; identical to SEQ ID NO: 200108
  derived and/or modified CDS sequence (opt5) from hemagglutinin__InfluenzaA__AEX35032

SEQ ID NO: 200114 - RNA, 1698 nt, Artificial Sequence; identical to SEQ ID NO: 200108
  derived and/or modified CDS sequence (opt5) from hemagglutinin__InfluenzaA__AEX35043

SEQ ID NO: 200115 - RNA, 1698 nt, Artificial Sequence
  derived and/or modified CDS sequence (opt5) from hemagglutinin__InfluenzaA__AEX35054
augaaggugaaacugcucguccugcuuugcaccuucacagccacguacgcugacaccaucuguauuggcuaucacgccaacaauagcacagauaccguugacacagugcuggagaagaacgugaccgucacacauuccgugaaucuccuggaaaacucucacaaugggaaacuuugccugcucaagggaaucgcgccccugcagcugggcaacuguagcguugcuggguggauucucggaaauccugagugcgaacugcuuaucuccaaagagucuuggagcuacauuguggaaaagccgaaccccgagaauggcaccuguuauccugggcauuuugccgauuacgaggaacugagagagcaacucuccucugucagcuccuucgaacgguuugagaucuuccccaaggagagcucuuggccuaaccacacggugaccggaguuuccgccagcugcucucauaauggcgaauccagcuuuuaucgcaaccugcuuuggcugacaggcaaaaaugggcucuaccccaaccugucuaaguccuaugcuaauaacaaagagaaggaagugcugguccucuggggagugcaccacccuccgaacaucggcgaccagaaagcccuguaccauaccgagaaugcuuacgugagcgucguuuccucucacuauagcagaaaguucacacccgaaauugccaagcggccuaaagugcgcgaucaggaggggagaaucaacuacuauuggacccuucuggagcccggagacacgauuauguuugaagcgaauggcaaccucaucgccccucgguacgcuuucgcccugaaucgcggguuuggauccggcauuaucaacagcaaugcucccauggauaagugugacgccaaaugccagacaccgcaaggcgcgauuaacucuucccuuccuuuccagaaugugcaucccgucaccaucggggaguguccuaaguaugugagaagcgccaaacugcggaugguuacaggacuccgcaacauccccucuauucagagcagaggccuguuuggggcuaucgccggauucauugaaggcggguggaccggaaugguggauggcugguacggcuaucaccaccagaaugagcaaggguccggauacgcugccgaccagaagucuacccagaacgccaucaauggcauuacaaacaaagucaauagcgugaucgaaaagaugaacacgcaguuuaccgcuguugggaaggaguucaacaaacuggagcggcgcauggaaaaucucaacaagaaaguggaugacggauucaucgauauuuggacauacaaugcggagcugcuuguccugcucgaaaacgagagaacccuggacuuucaugacuccaaugugaagaaccuuuaugaaaaagucaagagccaacugaagaauaacgccaaagagaucggcaaugggugcuucgaguuuuaccacaaguguaacgaugaaugcauggagucugugaaaaauggcacauaugacuaccccaaguauuccgaagagagcaaacucaaccgggagaagauugauggaguuaagcuggaaucuaugggcguguaccagauccuggcuauuuauuccaccgucgccagcucccucgugcugcuuguuucucugggggccaucagcuucuggaugugcuccaauggaucucuccagugucgcaucugcauuuga

SEQ ID NO: 200116 - RNA, 1698 nt, Artificial Sequence; identical to SEQ ID NO: 200108
  derived and/or modified CDS sequence (opt5) from hemagglutinin__InfluenzaA__AEX35065

SEQ ID NO: 200117 - RNA, 1698 nt, Artificial Sequence; identical to SEQ ID NO: 194560
  derived and/or modified CDS sequence (opt5) from hemagglutinin__InfluenzaA__AEX35076

SEQ ID NO: 200118 - RNA, 1698 nt, Artificial Sequence
  derived and/or modified CDS sequence (opt5) from hemagglutinin__InfluenzaA__AEX35087
augaaggugaaacugcucguccugcuuugcaccuucacagccacguacgcugacaccaucuguauuggcuaucacgccaacaauagcacagauaccguugacacagugcuggagaagaacgugaccgucacacauuccgugaaucuccuggaagauaaccacaaugggaaacuuugccugcucaagggaaucgcgccccugcagcugggcaacuguucuguugcuggguggauucucggaaauccugagugcgaacugcuuaucagcaaagaguccuggucuuacauuguggaaaagccgaaccccgagaauggcaccuguuauccugggcauuuugccgacuacgaggaacugagagagcaacucagcuccgucucuagcuucaagcgguuugaaaucuuccccaaagaguccagcuggccuaaccacacggugaccggaguuucugccuccugcagccauaauggcgagucuuccuuuuauaagaaccugcuuuggcugacaggcaaaaaugggcucuaccccaaccugagcaagucuuaugcuaauaacaaagaaaaggaggugcugguccucuggggagugcaccacccuccgaacaucggcgaucagaugacccuguaccauaaggaaaaugccuacguguccgucguuagcucccacuauucucgcaaauucacacccgagauugcuaagagaccuaaagugcgggaccaggaagggcgcaucaacuacuauuggacccuucuggagcccggagauacgauuaucuuugaggccagcggcaaucucauugcgccuagauacgccuucgcucugucccggggguuuggaagcggcaucauuaacucuaaugcccccauggacgaaugugaugcuaagugccagacaccgcaaggcgccaucaacuccagccuuccuuuccagaaugugcaucccgucaccaucggggaguguccuaaauaugugcgcucugcgaagcugagaaugguuacaggacuccggaacauucccagcauccagucccgcggccuguuuggggccauugcuggauucaucgaaggcggguggaccggaaugguggacggcugguacggcuaucaccaccagaaugagcaagggucuggauacgccgcugaucagaaaagcacccagaacgccauuaauggcaucacaaacaaggucaauuccgugaucgaaaagaugaacacgcaguuuaccgccguugggaaagaguucaauaagcuggagagacggauggaaaaccucaacaaaaagguggacgauggauucauugacgucuggacauacaaugcugagcugcuugugcugcucgaaaacgagcgcacccuggacuuucaugauagcaaugucaaaaaccuuuaugaaaaggugaagaaucaacugaaaaacaaugcgaaggagaucggcaacgggugcuucgaguuuuaccacaaauguaaugacgaaugcauggagucuguuaagaacggcacauaugauuaccccaaauauuccgaagagagcaagcucucuagagagaagauugacggagugaaacuggaauccaugggcgucuaccagauccuggccauuuauagcaccguggcuuccucucucguucugcuugugagccugggggccaucuccuucuggaugugcucuaauggaagccuccagugucggaucugcauuuga

SEQ ID NO: 200119 - RNA, 1698 nt, Artificial Sequence
  derived and/or modified CDS sequence (opt5) from hemagglutinin__InfluenzaA__AEX35098
augaaggugaaacugcucguccugcuuugcaccuucacagccacguacgcugacaccaucuguauuggcuaucacgccaacaauagcacagauaccguugacacagugcuggagaagaacgugaccgucacacauuccgugaaucuccuggaaaacucucacaaugggaaacuuugccugcucaagggaaucgcgccccugcagcugggcaacuguagcguugcuggguggauucucggaaauccugagugcgaacugcuuaucuccaaagagucuuggagcuacauuguggaaaagccgaaccccgagaauggcaccuguuauccugggcauuuugccgauuacgaggaacugagagagcaacucuccucugucagcuccuucgaacgguuugagaucuuccccaaggagagcucuuggccuaaccacacggugaccggaguuuccgccagcugcucucauaauggcgaauccagcuuuuaucgcaaccugcuuuggcugacaggcaaaaaugggcucuaccccaaccugucuaaguccuaugcuaauaacaaagagaaggaagugcugguccucuggggagugcaccacccuccgaacaucggcgaccagaaagcccuguaccauaccgagaaugcuuacgugagcgucauguccucucacuauagcagaaaguucacacccgaaauugccaagcggccuaaaguucgcgaucaggaggggagaaucaacuacuauuggacccuucuggagcccggagacacgauuaucuuugaagcgaauggcaaccucauugccccucgguacgcuuucgcccugucccgcggguuuggaagcggcaucauuaauucuaacgcucccauggauaagugugacgccaaaugccagacaccgcaaggcgcgaucaauuccagccuuccuuuccagaacgugcaucccgugaccaucggggaguguccuaaguaugucagaucugccaaacugcggauggugacaggacuccgcaauauucccagcauccaguccagaggccuguuuggggcuauugccggauucaucgaaggcggguggaccggaaugguugauggcugguacggcuaucaccaccagaacgagcaagggucuggauacgcugccgaccaaaagagcacccagaaugccauuaacggcaucacaaauaaagugaacuccgucaucgaaaagaugaauacgcaguuuaccgcuguggggaaggaguucaacaaacuggagcggcgcauggaaaaccucaauaagaaaguugaugacggauucauugauaucuggacauacaacgcggagcugcuugugcugcucgaaaaugagagaacccuggacuuucaugacagcaacgucaagaaucuuuaugaaaaagugaagucucagcugaagaacaaugccaaagagauuggcaacgggugcuucgaguuuuaccacaaguguaaugaugaaugcauggaguccgucaaaaacggcacauaugacuaccccaaguauagcgaagagucuaaacucaaucgggagaagaucgauggagugaagcuggaauccaugggcguuuaccagauucuggcuaucuauagcaccguggccuccucucucguccugcuugugagccugggggccaucuccuucuggaugugcucuaacggaagccuccagugucgcauuugcaucuga

SEQ ID NO: 200120 - RNA, 1698 nt, Artificial Sequence
  derived and/or modified CDS sequence (opt5) from hemagglutinin__InfluenzaA__AEX35109
augaaggugaaacugcucguccugcuuugcaccuucacagccacguacgcugacaccaucuguauuggcuaucacgccaacaauagcacagauaccguugacacagugcuggagaagaacgugaccgucacacauuccgugaaucuccuggaaaacucucacaaugggaaacuuugccugcucaagggaaucgcgccccugcagcugggcaacuguagcguugcuggguggauucucggaaauccugagugcgaacugcuuaucuccaaagagucuuggagcuacauuguggaaaagccgaaccccgagaauggcaccuguuauccugggcauuuugccgauuacgaggaacugagagagcaacucuccucugucagcuccuucgaacgguuugagaucuuccccaaggagagcucuuggccuaaccacacggugaccggaguuuccgccagcugcucucauaauggcgaauccagcuuuuaucgcaaccugcuuuggcugacaggcaaaaaugggcucuaccccaaccugucuaaguccuaugcuaauaacaaagagaaggaagugcugguccucuggggagugcaccagccuccgaacaucggcgaccagaaagcccuguaccacaccgagaaugcuuacgugagcgucguuuccucucauuauagcagaaaguucacacccgaaauugccaagcggccuaaagugcgcgaucaggaggggagaaucaacuacuauuggacccuucuggagcccggagacacgauuaucuuugaagcgaauggcaaccucauugccccucgguacgcuuucgcccugucccgcggguuuggaagcggcaucauuaauucuaacgcucccauggauaagugugacgccaaaugccaaacaccgcagggcgcgaucaauuccagccuuccuuuccagaacgugcaccccgucaccaucggggaguguccuaaguaugugagaucugccaaacugcggaugguuacaggacuccgcaauauucccagcauccaguccagaggccuguuuggggcuauugccggauucaucgaaggcggguggaccggaaugguggauggcugguacggcuaucaucaccaaaacgagcaggggucuggauacgcugccgaccaaaagagcacccagaaugccauuaacggcaucacaaauaaagucaacuccgugaucgaaaagaugaauacgcaguuuaccgcuguugggaaggaguucaacaaacuggagcggcgcauggaaaaccucaauaagaaaguggaugacggauucauugauaucuggacauacaacgcggagcugcuuguccugcucgaaaaugagagaacccuggacuuucacgacagcaacgugaagaaucuuuaugaaaaagucaagucucagcugaagaacaaugccaaagagauuggcaacgggugcuucgaguuuuaccauaaguguaaugaugaaugcauggaguccgugaaaaacggcacauaugacuaccccaaguauagcgaagagucuaaacucaaucgggagaagaucgauggaguuaagcuggaauccaugggcguguaccagauucuggcuaucuauagcaccgucgccuccucucucgugcugcuuguuagccugggggccaucuccuucuggaugugcucuaacggaagccuccaaugucgcauuugcaucuga

SEQ ID NO: 200121 - RNA, 1698 nt, Artificial Sequence
  derived and/or modified CDS sequence (opt5) from hemagglutinin__InfluenzaA__AEX35120
augaaggugaaacugcucguccugcuuugcaccuucacagccacguacgcugacaccaucuguauuggcuaucacgccaacaauagcacagauaccguugacacagugcuggagaagaacgugaccgucacacauuccgugaaucuccuggaaaacucucacaaugggaaacuuugccugcucaagggaaucgcgccccugcagcugggcaacuguagcguugcuggguggauucucggaaauccugagugcgaacugcuuaucuccaaagagucuuggagcuacauuguggaaaagccgaaccccgagaauggcaccuguuauccugggcauuuugccgauuacgaggaacugagagagcaacucuccucugucagcuccuucgaacgguuugagaucuuccccaaggagagcucuuggccuaaccacacggugaccggaguuuccgccagcugcucucauaauggcgaauccagcuuuuaucgcaaccugcuuuggcugacaggcaaaaaugggcucuaccccaaccugucuaaguccuaugcuaauaacaaagagaaggaagugcugguccucuggggagugcaccacccuccgaacaucggcgaccagaaagcccuguaccauaccgagaaugcuuacgugagcgucguuuccucucacuauagcagaaaguucacacccgaaauugccaagcggccuaaagugcgcgauagagaggggcggaucaacuacuauuggacccuucuggagcccggagacacgauuaucuuugaagcgaauggcaaccucauugccccucgcuacgcuuucgcccuguccagaggguuuggaagcggcaucauuaauucuaacgcucccauggauaagugugacgccaaaugccagacaccgcagggcgcgaucaauuccagccuuccuuuccaaaacgugcaucccgucaccaucggggaguguccuaaguaugugcggucugccaaacugcgcaugguuacaggacucagaaauauucccagcauccagucccggggccuguuuggggcuauugccggauucaucgaaggcggguggaccggaaugguggauggcugguacggcuaucaccaccagaacgagcaggggucuggauacgcugccgaccaaaagagcacccagaaugccauuaacggcaucacaaauaaagucaacuccgugaucgaaaagaugaauacgcaguuuaccgcuguugggaaggaguucaacaaacuggagcgcagaauggaaaaccucaauaagaaaguggaugacggauucauugauaucuggacauacaacgcggagcugcuuguccugcucgaaaaugagcggacccuggacuuucaugacagcaacgugaagaaucuuuaugaaaaagucaagucucagcugaagaacaaugccaaagagauuggcaacgggugcuucgaguuuuaccacaaguguaaugaugaaugcauggaguccgugaaaaacggcacauaugacuaccccaaguauagcgaagagucuaaacucaaucgcgagaagaucgauggaguuaagcuggaauccaugggcguguaccaaauucuggcuaucuauagcaccgucgccuccucucucgugcugcuuguuagccugggggccaucuccuucuggaugugcucuaacggaagccuccaguguagaauuugcaucuga

SEQ ID NO: 200122 - RNA, 1698 nt, Artificial Sequence; identical to SEQ ID NO: 199865
  derived and/or modified CDS sequence (opt5) from hemagglutinin__InfluenzaA__AEX35131

SEQ ID NO: 200123 - RNA, 1698 nt, Artificial Sequence; identical to SEQ ID NO: 199865
  derived and/or modified CDS sequence (opt5) from hemagglutinin__InfluenzaA__AEX35142

SEQ ID NO: 200124 - RNA, 1698 nt, Artificial Sequence
  derived and/or modified CDS sequence (opt5) from hemagglutinin__InfluenzaA__AEX35153
augaaggugaaacugcucguccugcuuugcaccuucacagccacguacgcugacaccaucuguauuggcuaucacgccaacaauagcacagauaccguugacacagugcuggagaagaacgugaccgucacacauuccgugaaucuccuggaagauaaccacaaugggaaacuuugccugcucaagggaaucgcgccccugcagcugggcaacuguucuguugcuggguggauucucggaaauccugagugcgaacugcuuaucagcaaagaguccuggucuuacauuguggaaaagccgaaccccgagaauggcaccuguuauccugggcauuuugccgacuacgaggaacugagagagcaacucagcuccgucucuagcuucgaacgguuugagaucuuccccaaggaguccagcuggccuaaccacacggugaccggaguuucugccuccugcagccauaauggcgaaucuuccuuuuauaaaaaccugcuuuggcugacaggcaagaaugggcucuaccccaaccugagcaaaucuuaugcuaauaacaaggagaaagaagugcugguccucuggggagugcaccacccuccgaacaucggcaaucagaugacccuguaccauaaggagaacgccuacguguccgucguuagcucccacuauucucgcaaguucacacccgaaauugcuaaaagaccuaaggugcgggaucaggaggggcgcaucaauuacuauuggacccuucuggagcccggagacacgauuaucuuugaagccagcggcaaccucauugcgccuagauacgccuucgcucugucccggggguuuggaagcggcaucauuaauucuaacgcccccauggaugagugugacgcuaaaugccagacaccgcaaggcgccaucaauuccaaccuuccuuuccagaaugugcaucccgucaccaucggggaauguccuaaguaugugcgcagcgcgaaacugagaaugguuacaggacuccggaacauucccucuauccagagccgcggccuguuuggggccauugcuggauucaucgagggcggguggaccggaaugguggauggcugguacggcuaucaccaccagaaugaacaaggguccggauacgccgcugaccagaagucuacccagaacgccauuaauggcaucacaaacaaagucaauagcgugaucgagaagaugaacacgcaguuuaccgccguugggaaggaguucaacaaacuggaaagacggauggagaaucucaacaagaaaguggaugacggauucauugaugucuggacauacaaugcugaacugcuugugcugcucgagaacgaacgcacccuggacuuucaugacuccaaugucaagagccuuuaugagaaagugaagaaccaacugaagaauaacgcgaaagagaucggcaaugggugcuucgaauuuuaccacaaguguaacgaugagugcauggaaucuguuaaaaauggcacauaugacuaccccaaguauuccgaggagagcaaacucucuagagaaaagauugauggagugaagcuggaguccaugggcgucuaccagauccuggccauuuauagcaccguggcuuccucucucguucugcuugugagccugggggccaucuccuucuggaugugcucuaacggaagccuccagugucggaucugcauuuga

SEQ ID NO: 200125 - RNA, 1698 nt, Artificial Sequence
  derived and/or modified CDS sequence (opt5) from hemagglutinin__InfluenzaA__AEX35164
augaaggugaaacugcucguccugcuuugcgccuucaccgcuacauacgccgacacgaucuguauuggcuaucacgcgaacaauagcaccgauacaguugacaccgugcuggagaagaacgugacagucacccauuccgugaaucuccuggaaaacucucacaaugggaaacuuugccugcucaagggaaucgcuccccugcagcugggcaacuguagcguugccggguggauucucggaaauccugagugcgaacugcuuaucuccaaagagucuuggagcuacauuguggaaaagccgaaccccgagaauggcacauguuauccugggcauuuugccgauuacgaggaacugagagagcaacucuccucugucagcuccuucgaacgguuugagaucuuccccaaggagagcucuuggccuaaccacaccgugacgggaguuuccgcuagcugcucucauaauggcgaauccagcuuuuaucgcaaccugcuuuggcugaccggcaaaaaugggcucuaccccaaccugucuaaguccuaugccaauaacaaagagaaggaagugcugguccucuggggagugcaccacccuccgaacaucggcgugcagaaagcucuguaccauacagagaaugccuacgucagcguuguguccucucacuauagcagaaaguucacccccgaaauugcgaagcggccuaaagugcgcgaccaggaggggagaaucaacuacuauuggacacuucuggagcccggagauaccauuaucuuugaagccaauggcaaccucauugcuccucgguacgccuucgcucugucccgcggguuuggaagcggcaucauuaauucuaacgcccccauggacaagugugaugcgaaaugccagacgccgcaaggcgccaucaauuccagccuuccuuuccagaacguccaucccgugacaaucggggaguguccuaaguauguuagaucugcuaaacugcggauggugaccggacuccgcaauauucccagcauccaguccagaggccuguuuggggccauugcuggauucaucgaaggcggguggacaggaauggucgacggcugguacggcuaucaccaccagaacgagcaagggucuggauacgccgccgaucaaaagagcacccagaaugcuauuaacggcaucaccaauaaagugaacuccguuaucgaaaagaugaauacacaguuuacggcgguggggaaggaguucaacaaacuggagcggcgcauggaaaaccucaauaagaaagucgacgauggauucauugacaucuggaccuacaacgccgagcugcuugugcugcucgaaaaugagagaacacuggauuuucaugacagcaacgucaagaaucuuuaugaaaaagugaagucucagcugaagaacaaugcuaaagagauuggcaacgggugcuucgaguuuuaccacaaguguaaugacgaaugcauggaguccguuaaaaacggcaccuaugauuaccccaaguauagcgaagagucuaaacucaaucgggagaagaucgacggagugaagcuggaauccaugggcgucuaccagauucuggccaucuauagcacaguggccuccucucucguucugcuugugagccugggggcuaucuccuucuggaugugcucuaacggaagccuccagugucgcauuugcaucuga

SEQ ID NO: 200126 - RNA, 1698 nt, Artificial Sequence
  derived and/or modified CDS sequence (opt5) from hemagglutinin__InfluenzaA__AEX35175
augaaggugaaacugcucguccugcuuugcaccuucacagccacguacgcugacaccaucuguauuggcuaucacgccaacaauagcacagauaccguugacacagugcuggagaagaacgugaccgucacacauuccguggaucuccuggaagacucucacaaugggaaacuuugccugcucaagggaaucgcgccccugcagcugggcaacuguagcguugcuggguggauucucggaaauccugagugcgaacugcuuaucuccaaagagucuuggagcuacauuguggaaaccccgaaccccgagaauggcacguguuauccuggguacuuugccgauuaugaggaacugagagagcaacucuccucugucagcuccuucgaacgguuugagaucuuccccaaggagagcucuuggccuaaccauaccgugacaggaguuaccgccuccugcagccacaauggcaagucuuccuuuuaccgcaaccugcuuuggcugacaggcaaaaaugggcucuaucccaaccugagcaagucuuacgcuaauaacaaagaaaaggaggugcugguccucuggggagugcaucacccuccgaauaucggcgaccagagagcccuguaccacaccgaaaacgcuuauguguccgucguuagcucccauuacucucggcgcuucacgcccgagauugccaaaagaccuaaggugcgggaucaggaagggcgcaucaacuauuacuggacacuucuggagcccggagacaccauuaucuuugaggcgaauggcaaccucauugccccuagauucgcuuuugcccugaaucggggguucggaagcggcaucauuacauccaacgcucccauggauggcugugacgccaagugccagaccccgcaaggggcgaucaauagcucucuuccuuuucagaacgugcaccccgucaccaucggagaauguccuaaauaugugcgcuccgccaagcugagaauggcuacaggccuccggaauauucccagcauccagucucgcgggcuguucggagccauugcuggcuuuaucgaagggggauggacgggcaugguugauggcugguacggguaucaucaccagaacgaacaaggaagcggcuacgccgccgaccagaaauccacccagaaugcuauuaacgggaucacaaauaaggugaacucugucaucgagaaaaugaauacccaguucacagcggugggaaaggaguucagcaaacuggagagacggauggagaaccucaauaagaagguugaugacggcuuucuggacauuuggaccuacaacgccgaacuucuggugcuccuggagaacgaacgcacgcuugauuuccacgacuccaaugucaaaaaccuguaugagaaggugaaaagccaacucaagaauaacgcuaaagaaaucgggaauggcugcuuugaguucuaccauaaguguaacgaugagugcauggaaucugucaagaauggaacauaugacuaccccaaauauuccgaggaaagcaagcugaacagagagaaaauugauggcgugaagcuggagucuauggggguuuaccagauccucgccauuuauuccaccguggccagcucccugguccuucuggugucucucggagcuaucagcuuuuggaugugcuccaauggcucucugcagugucggaucugcauuuga

SEQ ID NO: 200127 - RNA, 1698 nt, Artificial Sequence
  derived and/or modified CDS sequence (opt5) from hemagglutinin__InfluenzaA__AEX35186
augaaggugaaacugcucguccugcuuugcaccuucacagccacguacgcugacaccaucuguauuggcuaucacgccaacaauagcacagauaccguugacacagugcuggagaagaacgugaccgucacacauuccgugaaucuccuggaagauucucacaacgggaaacuuugccugcucaagggaaucgcgccccugcagcugggcaauuguagcguugcuggguggauucucggaaacccugagugcgaacugcuuaucuccagagagucuuggagcuacauuguggaaaaaccgaaucccgagaacggcaccuguuauccugggcauuuugccgacuacgaggaacugcgggagcaacucuccucugucagcuccuucgaacgcuuugagaucuuccccaaggagagcucuuggccuaaucacacgaccacaggaguguccgccagcugcucucauaacggcgaauccagcuuuuauaagaaucugcuuuggcugaccggcaaaaacgggcucuaccccaaucugucuaaguccuaugcuaacaauaaagagaaggaaguucuggugcucuggggaguccaccacccuccgaacaucggcaaccagagagcccuguaccauacagagaaugcuuacgugagcguggucuccucucacuauagccggaaauucacccccgaaauugccaagcgcccuaagguuagagaucaggaggggcggaucaacuacuauuggacgcuucuggagcccggagacacaauuaucuuugaagcgaauggcaaccucauugccccucgcuacgcuuucgcccuguccagaggguuuggaagcggcaucauuaauucuaacgcucccauggaugagugugacgccaaaugccagaccccgcaaggcgcgaucaauuccagccuuccuuuccagaacgugcaucccgugacaaucggggaauguccuaaguauguccggucugccaaacugcgcauggugaccggacucagaaauauucccagcauccagucccggggccuguuuggggcuauugccggauucaucgagggcggguggaccggaaugguugauggcugguacggcuaucaccaccagaacgaacaagggucuggauacgcugccgaccaaaagagcacacagaaugccauuaacggcaucacgaauaaagugaacuccgucaucgagaagaugaauacccaguuuacagcuguggggaaagaguucaacaagcuggaacgcagaauggagaaccucaauaagaaaguugaugacggauucauugauaucuggaccuacaacgcggaacugcuugugcugcucgagaaugaacggacacuggacuuucaugacagcaacgucaagaaucuuuaugagaaagugaagucucagcugaaaaacaaugccaaggagauuggcaacgggugcuucgaauuuuaccacaaguguaaugaugagugcauggaauccgucaaaaacggcaccuaugacuaccccaaguauagcgaggagucuaaacucaaucgcgaaaagaucgauggagugaaacuggaguccaugggcguuuaccagauucuggcuaucuauagcacgguggccuccucucucguccugcuugugagccugggggccaucuccuucuggaugugcucuaacggaagccuccaguguagaauuugcaucuga

SEQ ID NO: 200128 - RNA, 1698 nt, Artificial Sequence; identical to SEQ ID NO: 200127
  derived and/or modified CDS sequence (opt5) from hemagglutinin__InfluenzaA__AEX35197

SEQ ID NO: 200129 - RNA, 1698 nt, Artificial Sequence; identical to SEQ ID NO: 194560
  derived and/or modified CDS sequence (opt5) from hemagglutinin__InfluenzaA__AEX35208

SEQ ID NO: 200130 - RNA, 1701 nt, Artificial Sequence
  derived and/or modified CDS sequence (opt5) from hemagglutinin__InfluenzaA__AEX35219
augaagaccaucauugcccugagcuacauccucugccugguguucgcucagaaacuucccggcaacgacaauuccacagccacgcugugucucgggcaccaugcggucccuaacggaacccugguuaagacaauuaccaaugaucaaaucgaggugacaaacgcuaccgaacuugugcagucuagcuccacaggcgggauuugcgacucuccgcaccagauccuggauggagagaauuguacccucaucgacgcccugcugggcgauccccauugcgacggguuucagaacaaagaaugggaucucuucgucgagagaagcaaggccuauuccaauuguuacccuuaugacgugcccgauuacgcuucucugcggagccuuguugccuccagcggaacgcuggaauuuaacaaugagucuuucaacuggaccggcguggcucaaaauggcacauccagcgccugcaaacgcagaucuaacaaguccuuuuucagccggcucaauuggcugcaccagcuuaaguauaaauacccugcgcugaacgucaccaugcccaauaacgagaaguuugacaaacucuauauuuggggagugcaucacccuucuacagauuccgaccagaucagccuguacgcccaggcuuccgggcgcguuaccgugucuacgaagagaagccaacagacagucauuccgaacaucggcucccggcccugggugcgcgaugugagcucuagaauuuccaucuacuggaccauugucaaaccuggggacauccugcucaucaauagcacaggaaaccugauugcuccccggggcuauuucaagauccgcucuggaaagagcuccauuaugagaucugacgccccuaucgggaaauguaauagcgaaugcauuacccccaacggcuccaucccgaaugauaagccuuuucagaacguuaaucggaucaccuacggcgccuguccccgcuaugugaaacagaacacacuuaagcuggcgacggggaugagaaaugugccugagaaacaaacccggggaauuuucggcgccaucgcuggguuuauugaaaacggaugggagggcauggucgacgggugguacggauuccgccaccagaauagcgagggcacaggccaggccgcugaucucaagucuacccaagccgccaucaaccagauuaaugggaaacugaacagacuuaucggaaagacaaaugaaaaguuucaucagaucgagaaagaguucuccgaaguggaaggccggauucaggaccuggagaaguauguugaggauaccaaaaucgaccucuggagcuacaacgcugaacugcugguggcgcucgagaaccaacacacgauugaucugacagacucugaaaugaauaaacuuuucgagagaaccaagaagcagcugcgcgaaaacgccgaggauauggggaauggaugcuuuaagaucuaucauaaaugugacaacgcuugcauuggcuccauccggaaugggaccuacgaucacgacgucuacagagacgaggcccucaacaaucgcuuccagauuaagggcguggaacugaaaagcggauauaaggauuggauccuuuggaucuccuuugccaugucuugcuuccugcucuguguugugcugcugggcuuuauuaugugggcuugccagaaagggaacauccgguguaauauuugcaucuga

SEQ ID NO: 200131 - RNA, 1698 nt, Artificial Sequence; identical to SEQ ID NO: 200072
  derived and/or modified CDS sequence (opt5) from hemagglutinin__InfluenzaA__AEX35230

SEQ ID NO: 200132 - RNA, 1701 nt, Artificial Sequence; identical to SEQ ID NO: 193969
  derived and/or modified CDS sequence (opt5) from hemagglutinin__InfluenzaA__AEX35241

SEQ ID NO: 200133 - RNA, 1698 nt, Artificial Sequence; identical to SEQ ID NO: 200072
  derived and/or modified CDS sequence (opt5) from hemagglutinin__InfluenzaA__AEX35263

SEQ ID NO: 200134 - RNA, 1698 nt, Artificial Sequence; identical to SEQ ID NO: 200072
  derived and/or modified CDS sequence (opt5) from hemagglutinin__InfluenzaA__AEX35274

SEQ ID NO: 200135 - RNA, 1701 nt, Artificial Sequence; identical to SEQ ID NO: 193867
  derived and/or modified CDS sequence (opt5) from hemagglutinin__InfluenzaA__AEX35285

SEQ ID NO: 200136 - RNA, 1701 nt, Artificial Sequence; identical to SEQ ID NO: 200033
  derived and/or modified CDS sequence (opt5) from hemagglutinin__InfluenzaA__AEX35296

SEQ ID NO: 200137 - RNA, 1701 nt, Artificial Sequence
  derived and/or modified CDS sequence (opt5) from hemagglutinin__InfluenzaA__AEX35307
augaagaccaucauugcccugagcuacauccucugccugguguucgcucagaaaauucccggcaacgacaauuccacagccacgcuuugucuggggcaccaugcggucccuaacggaaccaucguuaagacaauuaccaaugaucaaaucgaggugacaaacgcuaccgaacucgugcagucuagcuccacaggcgggaucugcgacucuccgcaccagauucuggauggagagaauuguacccuuaucgacgcccugcucggcgauccccagugcgacggguuucaaaacaaaaagugggaucuguucgucgaaagaagcaaagccuauuccaauuguuacccuuaugacgugcccgauuacgcuucucugcggagccucguugccuccagcggaacgcuggaguuuaacaaugaaucuuucaacuggaccggcgugacacagaauggcaccuccagcgcuugcaagcgcagaucuaacaaguccuuuuucagccggcuuaauuggcugacacaucucaaauauaaguacccugcccugaacgucaccaugcccaauaacgagaaauuugacaaacuuuauauuuggggagugcaccauccugggacggauucugaccagaucucccuguacgcgcaggccagcggccgcauuacaguuuccaccaagagaucucaacagacagugaucccgaacauugggagccggccccgcgucagagauguguccagccggaucucuaucuacuggaccauugugaagccuggagacauccuccugauuaauuccaccggcaaccugaucgcuccccgcggguauuucaagauuagaagcggaaaaucuagcaucaugcgguccgacgccccuaucggcaaguguaauucugagugcauuacacccaacggcagcaucccgaaugauaaaccuuuucagaacgucaaucgcauuacguacggggcuugucccagauauguuaagcagaacacccucaaacuggccacaggaaugcggaaugugccugaaaagcaaacccgcggcaucuucggggcgauugccggauuuaucgagaacggcugggaagggaugguggacggaugguacggcuucagacaccaaaauuccgagggcacagggcaggcugccgaucuuaaaagcacccaggcugccaucaaccagauuaauggaaagcugaaccggcucaucggcaagacgaaugagaaauuucaccagauugaaaaggaguucucugaagucgaggggagaauccaggaccuggaaaaauauguggaggauacaaagauugaccuuugguccuacaacgccgagcugcucguugcucuggaaaaccaacauaccaucgaucugaccgacagcgagaugaauaaacucuucgaacgcacaaagaagcagcugcgggagaacgcggaagauaugggaaauggcugcuuuaaaauuuaucacaagugugacaacgccugcaucgggucuaucagaaauggcaccuacgaucaugacguguaccgcgacgaggcucuuaacaaucgguuccagauuaaaggagucgagcugaaguccggcuauaaagauuggauccucuggauuagcuuugccaucuccugcuuccugcuuugugugguucugcucggguuuauuaugugggccugccagaagggaaacaucagauguaauaucugcauuuga

SEQ ID NO: 200138 - RNA, 1701 nt, Artificial Sequence; identical to SEQ ID NO: 200033
  derived and/or modified CDS sequence (opt5) from hemagglutinin__InfluenzaA__AEX35318

SEQ ID NO: 200139 - RNA, 1701 nt, Artificial Sequence
  derived and/or modified CDS sequence (opt5) from hemagglutinin__InfluenzaA__AEX35329
augaagaccaucauugcccugagcuacuuccucugccugguguuugcucagaaacuucccggcaacgacaauuccacagccacgcugugucucgggcaccaugcggucccuaacggaaccaucguuaagacaauuaccaaugaucaaaucgaggugacaaacgcuaccgaacuggugcagaauagcagcacaggcgggauuugcgacuccccgcaccagauccuugauggagagaacuguacccugaucgacgcccuccugggcgauccccagugcgacggguuccaaaauaaaaagugggaucuguuugucgaaagaucuaaagccuauagcaacuguuacccuuaugacgugcccgauuacgcuucccuccggucucugguugccagcuccggaacgcuugaguucaauaacgaaucuuuuaauuggaccggcgugacacagaacggcaccucuuccgcuugcaagcgcagaagcaauaagucuuucuuuucccggcugaacuggcucacacaucugaaauauaaguacccugcccuuaaugucaccaugcccaacaacgagaaauucgacaagcuguauauuuggggagugcaccauccugggacggauagcgaccagaucucucucuacgcgcaggccuccggccgcauuacaguuagcaccaaaagaucccaacagacagugaucccgaauauugggucucggccccgcgucagagaugugagcucccggaucagcauuuacuggaccaucgugaagccuggagacauccugcugauuaacucuaccggcaaucucaucgcuccccgcggguauuuuaagauuagauccggaaaaagcucuaucaugcggagcgacgccccuauuggcaaguguaacuccgagugcaucacacccaauggcucuaucccgaacgauaaaccuuuccagaaugucaaccgcauuacguacggggcuugucccagauauguuaagcagaauacccugaaacuugccacaggaaugcggaacgugccugaaaagcaaacccgcggcaucuuuggggcgauugccggauucaucgagaauggcugggaagggaugguggacggaugguacggcuuuagacaccagaacagcgagggcacagggcaggcugccgaucugaaauccacccaagcugccauuaaucagaucaacggaaagcucaaucggcugaucggcaagacgaacgagaaauuccaccagauugaaaaggaguucagcgaagucgaggggagaauccaggaccuugaaaaauauguggaggauacaaagauugaccuguggucuuacaacgccgagcuccugguugcucuggaaaaucaacauaccaucgaucucaccgacuccgagaugaacaaacuguuugaacgcacaaagaagcagcuucgggagaaugcggaagauaugggaaacggcugcuucaaaauuuaucacaagugugacaaugccugcaucgggagcauuagaaacggcaccuacgaucaugacguguaccgcgacgaggcucugaauaaccgguuucagaucaaaggagucgagcucaagucuggcuauaaagauuggauccuguggauuuccuucgccaucagcugcuuucuucuguguguggcccuccugggguucauuaugugggcuugccagaagggaaauaucagauguaacauuugcaucuga

SEQ ID NO: 200140 - RNA, 1701 nt, Artificial Sequence
  derived and/or modified CDS sequence (opt5) from hemagglutinin__InfluenzaA__AEX35340
augaagaccaucauugcccugagcuacauccucugccugguguucgcucagaaacuucccggcaacgacaauuccacagccacgcugugucucgggcaccaugcggucccuaacggaaccauuguuaagacaaucaccaaugaucaaauugaggugacaaacgcuaccgaacuggugcaaaauucuagcacaggcgggaucugcgacuccccgcaccagauccuugauggagagaacuguacccugauugacgcccuccugggcgauccccagugcgacggguuucagaauaaaaagugggaucuguucgucgaaagaucuaaagccuauagcaacuguuacccuuaugacgugcccgauuacgcuucccuccggucucugguugccagcuccggaacgcuugaguuuaauaacgaaucuuucaauuggaccggcgugacacagaacggcaccucuuccgcuugcaagcgcagaagcaauaagagcuuuuucucccggcugaacuggcucacacaucugaaauauaaguacccugcccuuaaugucaccaugcccaacaacgagaaauuugacaagcuguauaucuggggagugcaccauccugggacggauagcgaccagauuucucucuacgcgcaggccuccggccgcaucacaguuagcaccaaaagaucccaacagacagugauuccgaauaucgggucucggccccgcgucagagaugugagcucccggauuagcaucuacuggaccaucgugaagccuggagacauucugcugaucaacucuaccggcaaucucauugcuccccgcggguauuucaagaucagauccggaaaaagcucuauuaugcggagcgacgccccuaucggcaaguguaacuccgagugcaucacacccaauggcucuauuccgaacgauaaaccuuuucagaaugucaaccgcaucacguacggggcuugucccagauauguuaagcagaauacccugaaacuugccacaggaaugcggaacgugccugaaaagcaaacccgcggcauuuucggggcgaucgccggauuuauugagaauggcugggaagggaugguggacggaugguacggcuucagacaccagaacagcgagggcacagggcaggcugccgaucugaaauccacccaagcugccaucaaucagaucaacggaaagcucaaucggcugauuggcaagacgaacgagaaauuucaccagaucgaaaaggaguucagcgaagucgaggggcgcauucaggaccuugaaaaauauguggaggauacaaagaucgaccuguggucuuacaacgccgagcuccugguugcucuggaaaaucaacauaccauugaucucaccgacuccgagaugaacaaacuguucgaaagaacaaagaagcagcuucgggagaaugcggaagauaugggaaacggcugcuuuaaaaucuaucacaagugugacaaugccugcauugggagcaucagaaacggcaccuacgaucaugacguguaccgcgacgaggcucugaauaaccgguuccagaucaaaggagucgagcucaagucuggcuauaaagauuggauucuguggaucuccuuugccauuagcugcuuccuucuguguguggcccuccugggguuuaucaugugggcuugccagaagggaaauauuagauguaacaucugcaucuga

SEQ ID NO: 200141 - RNA, 1701 nt, Artificial Sequence; identical to SEQ ID NO: 200033
  derived and/or modified CDS sequence (opt5) from hemagglutinin__InfluenzaA__AEX35351

SEQ ID NO: 200142 - RNA, 1701 nt, Artificial Sequence; identical to SEQ ID NO: 200033
  derived and/or modified CDS sequence (opt5) from hemagglutinin__InfluenzaA__AEX35362

SEQ ID NO: 200143 - RNA, 1701 nt, Artificial Sequence; identical to SEQ ID NO: 193867
  derived and/or modified CDS sequence (opt5) from hemagglutinin__InfluenzaA__AEX35373

SEQ ID NO: 200144 - RNA, 1701 nt, Artificial Sequence
  derived and/or modified CDS sequence (opt5) from hemagglutinin__InfluenzaA__AEX35384
augaagaccaucauugcccugagcuacauccucugccugguguucgcucagaaacuucccggcaacgacaauuccacagccacgcugugucucgggcaccaugcggucccuaacggaaccauuguuaagacaaucaccaaugaucaaauugaggugacaaacgcuaccgaacuggugcagucuagcuccacaggcgggaucugcgacucuccgcaccagauccuugauggagagaauuguacccugauugacgcccuccugggcgauccccagugcgacggguuucaaaacaaaaagugggaucuguucgucgaaagaagcaaagccuauuccaauuguuacccuuaugacgugcccgauuacgcuucucuccggagccugguugccuccagcggaacgcuugaguuuaacaaugaaucuuucaacuggaccggcgugacacagaauggcaccuccagcgcuugcaagcgcagaucuaacaaguccuuuuucagccggcugaauuggcucacacaucugaaauuuaaguauccugcccuuucugucaccaugcccaacaaugagaaauucgacaagcuguacaucuggggagugcaccauccugggacggauaacgaccagauuucccucuaugcgcaggccagcggccgcaucacaguuuccaccaaaagaucucaacagacagugauuccgaacaucgggagccggacccgcgucagagaugugcccucccggauuagcaucuacuggaccaucgugaagccuggagacauucugcugaucaauucuacaggcaaccucauugcuccccgcggguacuuuaagaucagauccggaaaaagcucuauuaugcggagcgacgccccuaucggcaaguguaauuccgagugcaucacgcccaacggcucuauuccgaaugauaaaccuuuccagaacgucaaucgcaucaccuauggggcuugucccagauacguuaagcagaacacacugaaacuugccaccggaaugcggaaugugccugaaaagcaaacacgcggcauuuuuggggcgaucgccggauucauugagaacggcugggaagggaugguggacggaugguauggcuuuagacaccagaauagcgagggcaccgggcaggcugccgaucugaaauccacgcaagcugccaucaaccagaucaauggaaagcucaaccggcugauuggcaagacaaaugagaaauuccaccagaucgaaaaggaguucagcgaagucgaggggcgcauucaggaccuugaaaaauacguggaggauaccaagaucgaccuguggucuuauaacgccgagcuccugguugcucuggaaaaccaacauaccauugaucucacagacuccgagaugaauaaacuguuugaaagaaccaagaagcagcuucgggagaacgcggaagauaugggaaauggcugcuucaaaaucuaccacaagugugacaacgccugcauugggagcaucagaaauggcacauaugaucaugacguguaccgcgacgaggcucugaacaaucgguuucagaucaaaggagucgagcucaagucuggcuacaaagauuggauucuguggaucuccuucgccauuagcugcuuucuucuguguguggcccuccugggguucaucaugugggcuugccagaagggaaacauuagauguaauaucugcaucuga

SEQ ID NO: 200145 - RNA, 1701 nt, Artificial Sequence
  derived and/or modified CDS sequence (opt5) from hemagglutinin__InfluenzaA__AEX35395
augaagaccaucauugcccugagcuacauccucugccugguguucgcucagaaacuucccggcaacgacaauuccacagccacgcugugucucgggcaccaugcggucccuaacggaaccauuguuaagacaaucaccaaugaucaaauugaggugacaaacgcuaccgaacuggugcagucuagcuccacaggcgagaucugcgacucuccgcaccagauccuugauggggaaaauuguacccugauugacgcccuccugggagauccccagugcgacggcuuucaaaacaaaaaguggaaucuguucgucgagagaagcaaagccuauuccaacuguuacccuuaugaugugcccgacuacgcuucucuccggagccugguugccuccagcgggacgcuugaauuuaauaacgagucuuucaauuggaccggagugacacagaacggcaccuccagcgcuugcaagcgcagaucuaauaaguccuuuuucagccggcugaacuggcucacacaucugaaauuuaaguauccugcccuuaaugucaccaugcccaacaacgagaaauucgauaagcuguacaucuggggcgugcaccauccugggacggacaaugaucagauuucucucuaugcgcaggccuccggacgcaucacaguuagcaccaaaagaucccaacagacagugauuccgaacaucggcucucggccccgcgucagagacgugccuagccggauuuccaucuacuggaccaucgugaagcccggggauauucugcugaucaauagcaccggaaaccucauugcuccucgcggcuacuuuaagaucagaucugggaaauccagcauuaugcggucugacgcccccaucggaaaguguaauagcgaaugcaucacaccgaacggcuccauuccuaaugacaaacccuuccagaacgucaaucgcaucacguauggcgcuuguccuagauacguuaagcagaacacccugaaacuugccacagggaugcggaaugugcccgagaagcaaacccgcggaauuuuuggcgcgaucgccggguucauugaaaacggaugggagggcaugguggaugggugguauggauuuagacaccaaaauucugagggcacaggccaggcugccgaccugaaaagcacccaggcugccaucaaccagaucaaugggaagcucaaccggcugauuggaaagacgaacgaaaaauuccaccagaucgagaaggaguucuccgaagucgaaggccgcauucaggaucuugagaaauacguggaggacacaaagaucgaucuguggagcuauaaugccgaacuccugguugcucuggagaaccaacauaccauugaccucaccgauucugaaaugaauaaacuguuugagagaacaaagaagcagcuucgggaaaacgcggaggacauggggaauggaugcuucaaaaucuaccacaagugugauaacgccugcauuggcuccaucagaaaugggaccuaugaccaugauguguaccgcgacgaggcucugaacaaucgguuucagaucaaaggcgucgaacucaagagcggauacaaagacuggauucuguggaucucuuucgccauuuccugcuuucuucuguguguggcccuccugggcuucaucaugugggcuugccagaaggggaacauuagauguaauaucugcaucuga

SEQ ID NO: 200146 - RNA, 1701 nt, Artificial Sequence; identical to SEQ ID NO: 193867
  derived and/or modified CDS sequence (opt5) from hemagglutinin__InfluenzaA__AEX35406

SEQ ID NO: 200147 - RNA, 1701 nt, Artificial Sequence; identical to SEQ ID NO: 193867
  derived and/or modified CDS sequence (opt5) from hemagglutinin__InfluenzaA__AEX35417

SEQ ID NO: 200148 - RNA, 1701 nt, Artificial Sequence
  derived and/or modified CDS sequence (opt5) from hemagglutinin__InfluenzaA__AEX35428
augaagaccaucauugcccugagcuacauccucugccugguguucgcucagaaacuucccggcaacgacaauuccacagccacgcugugucucgggcaccaugcggucccuaacggaacccugguuaagacaauuaccaaugaucaaaucgaggugacaaacgcuaccgaacuugugcagucuagcuccacaggcgggauuugcgacucuccgcaccagauccuggauggagagaauuguacccucaucgacgcccugcugggcgauccccauugcgacggguuucagaacaaaaagugggaucucuucgucgaaagaagcaaagccuauuccaauuguuacccuuaugacgugcccgauuacgcuucucugcggagccuuguugccuccagcggaacgcuggaguuuaacaaugaaucuuucaacuggaccggcguggcucaaaauggcacauccagcgccugcaagcgcagaucugacaaguccuuuuucagccggcucaacuggcugcaccagcuuaaauauaaguacccugcgcugaaugucaccaugcccaacaaugagaaauuugauaagcucuauauuuggggagugcaucacccugggacagacucugaucagaucucccuguacgcccaggcuagcggccgcauuaccguuuccacgaaaagaucucaacagacagugaucccgaacauugggagccggccccgcgucagagacguguccagccggaucucuauuuacuggaccaucgugaagccuggagacauccuguucauuaacuccacaggcaaucucaucgcuccccgcggguauuuuaagauuagaagcggaaaaucuagcaucaugcgguccgaugccccuauugacaaguguaacucugagugcaucacccccaauggcagcaucccgaacgauaaaccuuuccagaaugucaaccgcauuaccuacggcgccugucccagauauguuaagcagaauacacugaaacuugcgacggggaugcggaacgugccugaaaagcaaacccgcggaaucuuuggcgccauugcuggguucaucgagaauggaugggaaggcaugguggacgggugguacggauuuagacaccagaacuccgagggcacaggccaggccgcugaucugaaaagcacccaagccgccauuaaucagaucaacgggaagcucaaucggcugaucggaaagacaaacgagaaauuccaucagauugaaaaggaguucucugaagucgagggcagaauccaggaccuugaaaaauauguggaggauaccaagauugaccugugguccuacaaugcugagcuccugguugcgcuggaaaaccaacacacgaucgaucucacagacagcgagaugaacaaacuguuugaacgcaccaagaagcagcuucgggagaaugccgaagauauggggaacggaugcuucaaaauuuaucauaagugugacaaugcuugcaucggcucuauuagaaacgggaccuacgaccacgauguguaccgcgacgaggcccugaauaaccgguuucagaucaaaggcgucgagcucaaguccggauauaaagauuggauccuguggauuagcuucgccaucuccugcuuucuucuguguguggcucuccugggcuucauuaugugggccugccagaaggggaauaucagauguaacauuugcaucuga

SEQ ID NO: 200149 - RNA, 1698 nt, Artificial Sequence
  derived and/or modified CDS sequence (opt5) from hemagglutinin__InfluenzaA__AEX35439
augaaggugaaacugcucguccugcuuugcaccuucacagccacguacgcugacaccaucuguauuggcuaucacgccaacaauagcacagauaccguugacacagugcuggagaagaacgugaccgucacacauuccgugaaucuccuggaagauucucacaacgggaaacuuugccugcucaagggaaucgcgccccugcagcugggcaauuguagcguugcuggguggauucucggaaacccugagugcgaacugcuuaucuccaaagagucuuggagcuacauuguggaaaccccgaaucccgagaacggcacguguuauccuggguacuuugccgacuaugaggaacugagagagcaacucuccucugucagcuccuucgaacgguuugagaucuuccccaaggagagcucuuggccuaaucauaccgugacaggaguuuccgccagcugcucucacaacggcaaguccagcuuuuaccgcaaucugcuuuggcugaccggcaaaaacgggcucuaucccaaucugucuaaguccuacgcuaacaauaaagaaaaggaggugcugguccucuggggagugcaucacccuccgaacaucggcgaucagagagcccuguaccacacagaaaacgcuuaugugagcgucguuuccucucauuacagccggcgcuucacccccgagauugccaaaagaccuaaggugcgggaccaggaagggcgcaucaauuauuacuggacgcuucuggagcccggagauacaauuaucuuugaggcgaacggcaaucucauugccccuagauucgcuuuugcccugucccggggguucggaagcggcaucauuaccucuaacgcucccauggacgaaugugaugccaagugccagacaccgcaaggcgcgaucaauuccagccuuccuuuucagaacgugcaccccgucaccaucggggaguguccuaaauaugugcgcucugccaagcugagaaugguuaccggacuccggaauauucccagcauccagucccgcggccuguucggggcuauugccggauuuaucgaaggcggguggacaggaaugguggacggcugguacggcuaucaucaccagaacgagcaagggucuggauacgcugccgaucagaaaagcacgcagaaugccauuaacggcaucaccaauaaggucaacuccgugaucgaaaagaugaauacacaguucaccgcuguugggaaagaguucaacaaacuggagagacggauggaaaaucucaacaagaagguggacgauggauuucuggacauuuggacauacaacgcggagcuucugguccuccuggaaaaugagcgcacccuugacuuccacgauagcaacgugaaaaaucuguaugaaaaggucaaaucucaacucaagaacaaugccaaagagaucggcaacgggugcuuugaguucuaccauaaguguaaugacgaaugcauggaguccgugaagaacggcacguaugauuaccccaaauauagcgaagagucuaagcugaauagagagaaaauugacggaguuaagcuggaauccaugggcguguaccagauccucgcuauuuauagcacagucgccuccucucuggugcuucugguuagccucggggccaucuccuuuuggaugugcucuaacggaagccugcagugucggaucugcauuuga

SEQ ID NO: 200150 - RNA, 1701 nt, Artificial Sequence
  derived and/or modified CDS sequence (opt5) from hemagglutinin__InfluenzaA__AEX35450
augaagaccaucauugcccugagcuacauccucugccugguguucgcucagaaacuucccggcaacgacaauuccacagccacgcugugucucgggcaccaugcggucccuaacggaaccauuguuaagacaaucaccaaugaucaaauugaggugacaaacgcuaccgaacuggugcagucuagcuccacaggcgggaucugcgacucuccgcaccagauccuugauggagagaauuguacccugauugacgcccuccugggcgauccccagugcgacggguuucaaaacaaaaagugggaucuguucgucgaaagaagcaaagccuauuccaauuguuacccuuaugacgugcccgauuacgcuucucuccggagccugguugccuccagcggaacgcuugaguuuaacaaugaaaacuucaauuggaccggcgugacacagaacggcaccucuuccgcuugcaagcgcagaagcaauaacuccuuuuucucucggcugaauuggcucacacaucugaaguuuaaauauccugcccuuaacgucaccaugcccaacaaugagaaguucgacaaacuguacaucuggggagugcaccauccugggacggauaacgaccagauuuuucucuaugcgcaggccagcggccgcaucacaguuucuaccaagagaucccaacagacagugauuccgaauaucgggagccggccccgcgucagaaacauuccuucccggaucucuaucuacuggaccauugugaaacccggagauauccugcugauuaauagcaccggcaaccucaucgcuccucgcggguacuucaagauucaguccggaaagagcucuaucaugagauccgacgcccccaucggcaaauguaauagcgagugcauuacaccgaacggcucuaucccuaaugacaagcccuuucagaacgugaaucggauuacguauggggcuuguccucgcuacgucaaacaaaacacccugaaacuugccacaggaaugagaaauguucccgaaaagcagacccggggcaucuucggggcgauugccggauuuaucgagaacggcugggaagggaugguggauggaugguauggcuuccgccaccagaauagcgagggcaucgggcaagcugccgaccugaaguccacacaggcugccauuaaccagaucaacggaaaacucaauagacugauuggcaagaccaacgagaaguuccaccagaucgaaaaagaguuuucugaaguggaggggcggauucaagaucuugaaaaguacgucgaggacacgaaaaucgaucuguggagcuauaaugccgagcuccugguggcucuggaaaaccagcauacaauugaccucaccgauuccgagaugaauaagcuguucgaaagaaccaaaaagcagcuucgcgagaacgcggaagacaugggaaauggcugcuuuaagaucuaccacaaaugugauaacgccugcaucgggagcauucggaauggcacauaugaccaugauguuuacagagacgaggcucugaacaaucgcuuccagaucaagggaguggagcucaaaucuggcuacaaggacuggauucuguggaucuccuuugccauuagcugcuuccuucugugugucgcccuccugggguuuaucaugugggcuugccaaaaaggaaacauccgguguaauauuugcaucuga

SEQ ID NO: 200151 - RNA, 1701 nt, Artificial Sequence; identical to SEQ ID NO: 192702
  derived and/or modified CDS sequence (opt5) from hemagglutinin__InfluenzaA__AEX35461

SEQ ID NO: 200152 - RNA, 1701 nt, Artificial Sequence
  derived and/or modified CDS sequence (opt5) from hemagglutinin__InfluenzaA__AEX35472
augaagaccaucauugcccugagcuacauccucugccugguguucgcucagaaacuucccggcaacgacaauuccacagccacgcugugucucgggcaccaugcggucccuaacggaaccauuguuaagacaaucaccaaugaucaaauugaggugacaaacgcuaccgaacuggugcagucuagcuccacaggcgggaucugcgacucuccgcaccagauccuugauggagagaauuguacccugauugacgcccuccugggcgauccccagugcgacgauuuucaaaacaaaaagugggaccuguucgucgaaagaagcaaagccuauuccaauuguuacccuuaugaugugcccgacuacgcuucucuccggagccugguugccuccagcgggacgcuugaguuuaacaaugaaucuuucaacuggaccggagugacacagaauggcaccuccagcgcuugcaagcgcagaucuaacaauuccuuuuucagccggcugaacuggcucacacaucugaaguuuaaauauccugcccuuaaugucaccaugcccaacaacgagaaguucgauaaacuguacaucuggggcgugcaccauccugggacggacaaugaucagauuuuucucuaugcgcaggccucuggacgcaucacaguuuccaccaagagaagccaacagacagugauuccgaacaucggcucccggccccgcgucagaaauauuccuucucggaucagcaucuacuggaccauugugaaacccggggacauccugcugauuaacuccaccggaaaucucaucgcuccucgcggcuacuucaagauuagaagcgggaagucuuccaucaugcggagcgacgcccccaucggaaaauguaacucugagugcauuacaccgaauggcagcaucccuaacgauaagcccuuucagaaugugaaccgcauuacguauggcgcuuguccuagauacgucaaacagaauacccugaaacuugccacagggaugcggaacguucccgaaaagcaaacccgcggaaucuucggcgcgauugccggguuuaucgagaauggaugggaaggcaugguggacgggugguauggauucagacaccagaacuccgagggcaucggccaggcugccgaucugaagucuacacaagcugccauuaaucagaucaacgggaaacucaaccggcugauuggaaagaccaaugagaaguuccaccagaucgaaaaagaguuuagcgaaguggagggccgcauucaggaccuugaaaaguacgucgaggauacgaaaaucgaccugugguccuauaacgccgagcuccugguggcucuggaaaaucaacauacaauugaucucaccgacagcgagaugaacaagcuguucgaaagaaccaaaaagcagcuucgggagaaugcggaagauauggggaacggaugcuuuaagaucuaccacaaaugugacaaugccugcaucggcucuauuagaaacgggacauaugaucaugacguuuaccgcgacgaggcucugaauaaccgguuccagaucaagggcguggagcucaaauccggauacaaggauuggauucuguggaucagcuuugccauuucuugcuuccuucugugugucgugcuccugggcuuuaucaugugggccugccagaaagggaauaucagauguaacauuugcaucuga

SEQ ID NO: 200153 - RNA, 1701 nt, Artificial Sequence; identical to SEQ ID NO: 192702
  derived and/or modified CDS sequence (opt5) from hemagglutinin__InfluenzaA__AEX35483

SEQ ID NO: 200154 - RNA, 1701 nt, Artificial Sequence
  derived and/or modified CDS sequence (opt5) from hemagglutinin__InfluenzaA__AEX35494
augaagaccaucauugcccugagcuacauccucugccugguguucgcucagaaacuucccggcaacgacaauuccacagccacgcugugucucgggcaccaugcggucccuaacggaaccauuguuaagacaaucaccaaugaucaaauugaggugacaaacgcuaccgaacuggugcagucuagcuccacaggcgggaucugcgacucuccgcaccagauccuugauggagagaauuguacccugauugacgcccuccugggcgauccccagugcgacgggcugcaaaacaaaaagugggaucucuuugucgaaagaagcaaagccuauuccaauuguuacccuuaugacgugcccgauuacgcuucucugcggagccuuguugccuccagcggaacgcuggaguucaacaaugaaucuuuuaacuggaccggcgugacacagaauggcaccuccagcgcuugcaagcgcagaucuaacaauuccuucuuuagccggcucaacuggcugacacaucuuaaguucaaauauccugcccugaaugucaccaugcccaacaacgagaaguuugacaaacucuacaucuggggagugcaccauccugggacggauaaugaccagauuuuccuguaugcgcaggccucuggccgcaucacaguuuccaccaagagaagccaacagacagugauuccgaacaucgggucccggccccgcgucagaaauauuccuucucggaucagcaucuacuggaccauugugaaacccggagauauccugcucauuaacuccaccggcaaucugaucgcuccucgcggguacuuuaagauuagaagcggaaagucuuccaucaugcggagcgacgcccccaucggcaaauguaacucugagugcauuacaccgaauggcagcaucccuaacgacaagcccuuccagaaugugaaccgcauuacguauggggcuuguccuagauacgucaaacagaauacccuuaagcuggccacaggaaugcggaacguucccgaaaaacaaacccgcggcaucuuuggggcgauugccggauucaucgagaauggcugggaagggaugauggauggaugguauggcuuuagacaccagaacuccgagggcaucgggcaggcugccgaccucaagucuacacaagcugccauuaaucagaucaacggaaaacugaaccggcuuauuggcaagaccaaugagaaguuccaccagaucgaaaaagaguucagcgaaguggaggggcgcauucaggaucuggaaaaguacguggaggacacgaaaaucgaucucugguccuauaacgccgagcugcuggucgcucucgaaaaucaacauacaauugaccugaccgauagcgagaugaacaaacuuuuugaaagaaccaagaagcagcugcgggagaaugcggaagacaugggaaacggcugcuucaagaucuaccacaaaugugauaaugccugcaucgggucuauuagaaacggcacauaugaccaugauguguaccgcgacgaggcucucaauaaccgguuucagaucaagggaguugagcugaaauccggcuacaaggacuggauucuuuggaucagcuucgccauuucuugcuuucugcucuguguggcccugcugggguucaucaugugggcuugccagaaaggaaauaucagauguaacauuugcaucuga

SEQ ID NO: 200155 - RNA, 1701 nt, Artificial Sequence
  derived and/or modified CDS sequence (opt5) from hemagglutinin__InfluenzaA__AEX35505
augaagaccaucauugcccugagcuacauccucugccugguguucgcucagaaacuucccggcaacgacaauuccacagccacgcugugucucgggcaccaugcggucccuaacggaaccauuguuaagacaaucaccaaugaucaaauugaggugacaaacgcuaccgaacuggugcagucuagcuccacaggcgggaucugcgacucuccgcaccagauccuugauggagagaauuguacccugauugacgcccuccugggcgauccccagugcgacgauuuucaaaacaaaaagugggaccuguucgucgaaagaagcaaagccuauuccaauuguuacccuuaugaugugcccgacuacgcuucucuccggagccugguugccuccagcgggacgcuugaguuuaacaaugaaucuuucaacuggaccggagugacacagaauggcaccuccagcgcuugcaagcgcagaucuaacaauuccuuuuucagccggcugaacuggcucacacaucugaaguuuaaauauccugcccuuaaugucaccaugcccaacaacgagaaguucgauaaacuguacaucuggggcgugcaccauccugggacggacaaugaucagauuuuucucuaugcgcaggccucuggacgcaucacaguuuccaccaagagaagccaacagacagugauuccgaacaucggcucccggccccgcgucagaaauauuccuucucggaucagcaucuacuggaccauugugaaacccggggacauccugcugauuaacuccaccggaaaucucaucgcuccucgcggcuacuucaagauucugagcgggaagucuuccaucaugagaagcgacgcccccaucggaaaauguaacucugagugcauuacaccgaauggcagcaucccuaacgauaagcccuuucagaaugugaaccggauuacguauggcgcuuguccucgcuacgucaaacagaauacccuuaagcuggccacagggaugagaaacguucccgaaaaacaaacccggggaaucuucggcgcgauugccggguuuaucgagaauggaugggaaggcaugguggacgggugguauggauuccgccaccagaacuccgagggcaucggccaggcugccgaucucaagucuacacaagcugccauuaaucagaucaacgggaaacugaacagacuuauuggaaagaccaaugagaaguuccaccagaucgaaaaagaguuuagcgaaguggagggccggauucaggaccuggaaaaguacgucgaggauacgaaaaucgaccucugguccuauaacgccgagcugcugguggcucucgaaaaucaacauacaauugaucugaccgacagcgagaugaacaaacuuuucgaaagaaccaagaagcagcugcgcgagaaugcggaagauauggggaacggaugcuuuaagaucuaccacaaaugugacaaugccugcaucggcucuauucggaacgggacauaugaucaugacguuuacagagacgaggcucucaauaaccgcuuccagaucaagggcguggagcugaaauccggauacaaggauuggauucuuuggaucagcuuugccauuucuugcuuccugcucugugucgcccugcugggcuuuaucaugugggcuugccagaaagggaauauccgguguaacauuugcaucuga

SEQ ID NO: 200156 - RNA, 1701 nt, Artificial Sequence
  derived and/or modified CDS sequence (opt5) from hemagglutinin__InfluenzaA__AEX35516
augaagaccaucauugcccugagcuacauccucugccugguguucgcucagaaacuucccggcaacgacaauuccacagccacgcugugucucgggcaccaugcggucccuaacggaaccauuguuaagacaaucaccaaugaucaaauugaggugacaaacgcuaccgaacuggugcagucuagcuccacaggcgggaucugcgacucuccgcaccagauccuugauggagagaauuguacccugauugacgcccuccugggcgauccccagugcgacgggcugcaaaacaaaaagugggaucucuuugucgaaagaagcaaagccuauuccaauuguuacccuuaugacgugcccgauuacgcuucucugcggagccuuguugccuccagcggaacgcuggaguucaacaaugaaucuuuuaacuggaccggcgugacacagaauggcaccuccagcgcuugcaagcgcagaucuaacaauuccuucuuuagccggcucaacuggcugacacaucuuaaguucaaauauccugcccugaaugucaccaugcccaacaacgagaaguuugacaaacucuacaucuggggagugcaccauccugggacggauaaugaccagauuuuccuguaugcgcaggccucuggccgcaucacaguuuccaccaagagaagccaacagacagugauuccgaacaucgggucccggccccgcgucagaaauauuccuucucggaucagcaucuacuggaccauugugaaacccggagauauccugcucauuaacuccaccggcaaucugaucgcuccucgcggguacuuuaagauuagaagcggaaagucuuccaucaugcggagcgacgcccccaucggcaaauguaacucugagugcauuacaccgaauggcagcaucccuaacgacaagcccuuccagaaugugaaccgcauuacguauggggcuuguccuagauacgucaaacagaauacccuuaagcuggccacaggaaugcggaacguucccgaaaaacaaacccgcggcaucuuuggggcgauugccggauucaucgagaauggcugggaagggaugguggauggaugguauggcuuuagacaccagaacuccgagggcaucgggcaggcugccgaccucaagucuacacaagcugccauuaaucagaucaacggaaaacugaaccggcuuauuggcaagaccaaugagaaguuccaccagaucgaaaaagaguucagcgaaguggaggggcgcauucaggaucuggaaaaguacgucgaggacacgaaaaucgaucucugguccuauaacgccgagcugcugguggcucucgaaaaucaacauacaauugaccugaccgauagcgagaugaacaaacuuuuugaaagaaccaagaagcagcugcgggagaaugcggaagacaugggaaacggcugcuucaagaucuaccacaaaugugauaaugccugcaucgggucuauuagaaacggcacauaugaccaugauguuuaccgcgacgaggcucucaauaaccgguuucagaucaagggaguggagcugaaauccggcuacaaggacuggauucuuuggaucagcuucgccauuucuugcuuucugcucugugucgcccugcugggguucaucaugugggcuugccagaaaggaaauaucagauguaacauuugcaucuga

SEQ ID NO: 200157 - RNA, 1701 nt, Artificial Sequence
  derived and/or modified CDS sequence (opt5) from hemagglutinin__InfluenzaA__AEX35527
augaagaccaucauugcccugagcuacauccucugccugguguucgcucagaaacuucccggcaacgacaauuccacagccacgcugugucucgggcaccaugcggucccuaacggaaccauuguuaagacaaucaccaaugaucaaauugaggugacaaacgcuaccgaacuggugcagucuagcuccacaggcgggaucugcgacucuccgcaccagauccuugauggagagaauuguacccugauugacgcccuccugggcgauccccagugcgacggguuucaaaacaaaaagugggaucuguucgucgaaagaagcaaagccuauuccaauuguuacccuuaugacgugcccgauuacguuucucuccggagccugguggcuuccagcggaacgcuugaguuuaacaaugaaucuuucaacuggaccggcgucacacagaauggcaccuccagcgccugcaagcgcagaucuaacaauuccuuuuucagccggcugaacuggcucacacaucugaaguuuaaauauccugcucuuaaugugaccaugcccaacaacgagcaguucgacaagcuguacaucuggggaguucaccauccugggacggauaaugaccagauuucucucuaugcccaagcguccggccgcaucacagugagcaccaaaagaucccagcagacagucauuccgaacaucgggucucggccccgcgugagagauauuccuagccggaucuccaucuacuggaccauugugaagcccggagacauccugcugauuaauagcaccggcaaccucaucgccccucgcggguacuuuaaaauuagaucuggaaaguccagcaucaugcggucugacgcucccaucggcaaguguaauagcgagugcauuacaccgaacggcuccaucccuaaugauaaacccuuccagaacgucaaucgcauuacguauggggccuguccuagauacguuaagcaaaacacccugaaacuugcuacaggaaugcggaaugugcccgaaaagcagacccgcggcaucuuuggggccauugcgggauucaucgagaacggcugggaagggaugguggacggaugguauggcuuuagacaccaaaauucugagggcaucgggcaggccgcugaucugaaaagcacacaggccgcuauuaaccagaucaauggaaagcucaaccggcugauuggcaaaaccaacgagaaguuccaccagaucgaaaaggaguucuccgaagucgaggggcgcauucaagaccuugaaaaauacguggaggauacgaagaucgaccuguggagcuauaaugccgagcuccugguugcccuggaaaaccagcauacaauugaucucaccgacucugagaugaauaaacuguuugaaagaaccaagaaacagcuucgggagaacgcugaagauaugggaaauggcugcuucaagaucuaccacaagugugacaacgcgugcaucggguccauuagaaauggcacauaugaucaugacguguaccgcgacgaggcccugaacaaucgguuucagaucaaaggagucgagcucaagagcggcuacaaagauuggauucuguggaucucuuucgcuauuuccugcuuucuucuguguguggcccuccugggguucaucaugugggccugccaaaagggaaacaucagauguaauauuugcaucuga

SEQ ID NO: 200158 - RNA, 1701 nt, Artificial Sequence
  derived and/or modified CDS sequence (opt5) from hemagglutinin__InfluenzaA__AEX35549
augaagaccaucauugcccugagcuacauccucugccugguguucgcucagaaacuucccggcaacgacaauuccacagccacgcugugucucgggcaccaugcggucccuaacggaaccauuguuaagacaaucaccaaugaucaaauugaggugacaaacgcuaccgaacuggugcagucuagcuccacaggcgggaucugcgacucuccgcaccagauccuugauggagagaauuguacccugauugacgcccuccugggcgauccccagugcgacggguuucaaaacaaaaagugggaucuguucgucgaaagaagcaaagccuauuccaauuguuacccuuaugacgugcccgauuacgcuucucuccggagccugaucgccuccagcggaacgcuugaguuuaacaaugaaucuuucaacuggaccggcguuacacagaauggcaccuccagcgcuugcaagcgcgggucuaacaauuccuuuuucagcagacugaacuggcucacacaucugaaguuuaaauauccugcccuuaaugugaccaugcccaacaacgaggaguucgacaagcuguacauuuggggaguccaccauccuggcacggauaaugaccagaucucucucuaugcgcaggccuccgggaaaauuacagugagcaccaagcggucccaacagacaguuaucccgaacauuggaucucgccccagagugcgggauaucccuagccgcaucuccauuuacuggaccaucgucaaacccggcgacauucugcugaucaauagcaccgggaaccucauugcuccuagaggauacuuuaagauccggucuggcaaguccagcaucaugcgcucugacgcccccauugauaaauguaauagcgaaugcaucacaccgaacggcuccauuccuaaugacaagcccuuccagaacgugaauaaaaucacguauggggcuuguccuagauacgugaagcagaacacccugaaacuugccacaggaaugcggaauguccccgagaagcaaacccgcggcauuuuuggggcgaucgccggauucaucgaaaacggcugggaggggaugguugauggaugguauggcuuuagacaccaaaauucugagggcauugggcaggcugccgaccugaaaagcacacaggcugccaucgaucagauuaacggaaagcucaaucggcugaucggcaagaccaacgaaaaauuccaccagauugagaaggaguucuccgaaguggaagggcgcauccaggaccuugagaaauacguggaggauacgaagauugaccuguggagcuauaacgccgaacuccuggucgcucuggagaaucaacauacaaucgaucucaccgacucugaaaugaacaaacuguuugagagaaccaagaagcagcuucgggaaaaugcggaggauaugggaaacggcugcuucaaaaucuaccacaagugugacaaugccugcauuggguccaucagaaacggcacauaugaccaugauguguaccgcgacgaggcucugaauaaccgguuucagauuaaaggaguugaacucaagagcggcuacaaagauuggauccuguggauuucuuucgccaucuccugcuuucuucuguguguggcccuccugggguucaucaugugggcuugccagaagggaaauauuagauguaacaucugcauuuga

SEQ ID NO: 200159 - RNA, 1701 nt, Artificial Sequence
  derived and/or modified CDS sequence (opt5) from hemagglutinin__InfluenzaA__AEX35560
augaagaccaucauugcccugagcuacauccucugccugguguucgcucagaaacuucccggcaacgacaauuccacagccacgcugugucucgggcaccaugcggucccuaacggaaccauuguuaagacaaucaccaaugaucaaauugaggugacaaacgcuaccgaacuggugcagucuagcuccacaggcgggaucugcgacucuccgcaccagauccuugauggagagaauuguacccugauugacgcccuccugggcgauccccagugcgacggguuucaaaacaaaaagugggaucuguucgucgaaagaagcaaagccuauuccaauuguuacccuuaugacgugcccgauuacguuucucuccggagccugguggcuuccagcggaacgcuugaguuuaacaaugaaucuuucaacuggaccggcgucacacagaauggcaccuccagcgccugcaagcgcagaucuaacaauuccuuuuucagccggcugaacuggcucacacaucugaaguuuaaauauccugcucuuaaugugaccaugcccaacaacgagcaguucgacaagcuguacaucuggggaguucaccauccugggacggauaaugaccagauuucucucuaugcccaagcguccggccgcaucacagugagcaccaaaagaucccagcagacagucauuccgaacaucgggucucggccccgcgugagagauauuccuagccggaucuccaucuacuggaccauugugaagcccggagacauccugcugauuaauagcaccggcaaccucaucgccccucgcggguacuuuaaaauuagaucuggaaaguccagcaucaugcggucugacgcucccaucggcaaguguaauagcgagugcauuacaccgaacggcuccaucccuaaugauaaacccuuccagaacgucaaucgcauuacguauggggccuguccuagauacguuaagcaaaacacccugaaacuugcuacaggaaugcggaaugugcccgaaaagcagacccgcggcaucuuuggggccauugcgggauucaucgagaacggcugggaagggaugguggacggaugguauggcuuuagacaccaaaauucugucggcaucgggcaggccgcugaucugaaaagcacacaggccgcuauuaaccagaucaauggaaagcucaaccggcugauuggcaaaaccaacgagaaguuccaccagaucgagaaggaguucuccgaaguggaagggcgcauucaagaccuugagaaauacguugaagauacgaagaucgaccuguggagcuauaaugccgagcuccugguggcccuggagaaccagcauacaauugaucucaccgacucugaaaugaauaaacuguuugagagaaccaagaaacagcuucgggaaaacgcugaggauaugggaaauggcugcuucaagaucuaccacaagugugacaacgcgugcaucggguccauuagaaauggcacauaugaucaugacgucuaccgcgacgaagcccugaacaaucgguuucagaucaaaggaguggagcucaagagcggcuacaaagauuggauucuguggaucucuuucgcuauuuccugcuuucuucuguguguugcccuccugggguucaucaugugggccugccaaaagggaaacaucagauguaauauuugcaucuga

SEQ ID NO: 200160 - RNA, 1701 nt, Artificial Sequence
  derived and/or modified CDS sequence (opt5) from hemagglutinin__InfluenzaA__AEX35571
augaagaccaucauugcccugagcuacauccucugccugguguucgcucagaaacuucccggcaacgacaauuccacagccacgcugugucucgggcaccaugcggucccuaacggaaccauuguuaagacaaucaccaaugaucaaauugaggugacaaacgcuaccgaacuggugcagucuagcuccacaggcgggaucugcgacucuccgcaccagauccuugauggagagaauuguacccugauugacgcccuccugggcgauccccagugcgacggguuucaaaacaaaaagugggaucuguucgucgaaagaagccgggccuauuccaauuguuacccuuaugacgugcccgauuacgcuucucuccgcagccugguugccuccagcggaacgcuugaguuuaacaaugaaucuuucaacuggaccggcgugacacagaauggcaccuccagcgcuugcaaaagacggucuaacaauuccuuuuucagccgccugaacuggcucacacaucugaaguuuaaguauccugcccuuaaugucaccaugcccaacaacgagaaauucgacaagcuguacaucuggggagugcaccauccugggacggauaaugaccagauuuuucucuaugcgcaggccucuggcagaaucacaguuuccaccaaacggagccaacagacagugauuccgaacaucgggucccgccccagaguccggaauauuccuucucgcaucagcaucuacuggaccauugugaagcccggagauauccugcugauuaacuccaccggcaaucucaucgcuccuagaggguacuucaaaauucggagcggaaagucuuccaucaugcgcagcgacgcccccaucggcaaguguaacucugagugcauuacaccgaauggcagcaucccuaacgacaaacccuuucagaaugugaacagaauuacguauggggcuuguccucgguacgucaagcagaauacccugaaacuugccacaggaaugcgcaacguucccgaaaagcaaaccagaggcaucuucggggcgauugccggauuuaucgagaauggcugggaagggaugguggauggaugguauggcuuccggcaccagaacuccgagggcaucgggcaggcugccgaccugaaaucuacacaagcugccauuaaucagaucaacggaaagcucaacagacugauuggcaaaaccaaugagaaguuccaccagaucgaaaaggaguuuagcgaaguggaggggcgcauucaggaucuugaaaaauacgucgaggacacgaagaucgaucugugguccuauaacgccgagcuccugguggcucuggaaaaucaacauacaauugaccucaccgauagcgagaugaacaaacuguucgaacggaccaagaaacagcuuagagagaaugcggaagacaugggaaacggcugcuuuaagaucuaccacaagugugauaaugccugcaucgggucuauucgcaacggcacauaugaccaugauguuuaccgggacgaggcucugaauaacagauuccagaucaaaggaguggagcucaaguccggcuacaaagacuggauucuguggaucagcuuugccauuucuugcuuccuucugugugucgcccuccugggguuuaucaugugggcuugccagaagggaaauauccgcuguaacauuugcaucuga

SEQ ID NO: 200161 - RNA, 1701 nt, Artificial Sequence; identical to SEQ ID NO: 192702
  derived and/or modified CDS sequence (opt5) from hemagglutinin__InfluenzaA__AEX35582

SEQ ID NO: 200162 - RNA, 1701 nt, Artificial Sequence
  derived and/or modified CDS sequence (opt5) from hemagglutinin__InfluenzaA__AEX35593
augaagaccaucauugcccugagcuacauccucugccugguguucgcucagaaacuucccggcaacgacaauuccacagccacgcugugucucgggcaccaugcggucccuaacggaaccauuguuaagacaaucaccaaugaucaaauugaggugacaaacgcuaccgaacuggugcagucuagcuccacaggcgggaucugcgacucuccgcaccagauccuugauggagagaauuguacccugauugacgcccuccugggcgauccccagugcgacggguuucaaaacaaaaagugggaucuguucgucgaaagaagcaaagccuauuccaauuguuacccuuaugacgugcccgauuacgcuucucuccggagccugguugccuccagcggaacgcuugaguuuaacaaugaaucuuucaacuggaccggcgugacacagaauggcaccuccagcgcuugcaagcgcagaucuaacaauuccuuuuucagccggcugaacuggcucacacaucugaaguuuaaauauccugcccuuaaugucaccaugcccaacaacgagaaguucgacaaacuguacaucuggggagugcaccauccugggacggauaaugaccagauuuuucucuaugcgcaggccucuggccgcaucacaguuuccaccaagagaagccaacagacagugauuccgaacaucgggucccggccccgcgucagaaauauuccuucucggaucagcaucuacuggaccauugugaaacccggagauauccugcugauuaacuccaccggcaaucucaucgcuccucgcggguacuucaagauuagaagcggaaagucuuccaucaugcggagcgacgcuccccugggcaaauguaacucugagugcaucacaccgaauggcagcauuccuaacgacaagcccuuucagaaugugaaccgcaucacguauggggccuguccuagauacgucaaacagaauacccuuaagcuggccacaggaaugcggaacguucccgaaaaacaaacccgcggcauuuucggggcgaucgccggauuuauugagaauggcugggaagggaugguggauggaugguauggcuucagacaccagaacuccgagggcaucgggcaggcugccgaccucaagucuacacaagcugccaucaaucagauuaacggaaaacugaaccggcuuaucggcaagaccaaugagaaguuccaccagauugaaaaagaguuuagcgaaguggaggggagaauccaggaucuggaaaaguacgucgaggacacgaaaauugaucucugguccuauaacgccgagcugcugguggcucucgaaaaucaacauacaaucgaccugaccgauagcgagaugaacaaacuuuucgaacgcaccaagaagcagcugcgggagaaugcggaagacaugggaaacggcugcuuuaagauuuaccacaaaugugauaaugccugcaucgggucuaucagaaacggcacauaugaccaugauguuuaccgcgacgaggcucucaauaaccgguuccagauuaagggaguggagcugaaauccggcuacaaggacuggauccuuuggauuagcuuugccaucucuugcuuccugcucugugucgcccugcugggguuuauuaugugggcuugccagaaaggaaauaucagauguaacaucugcauuuga

SEQ ID NO: 200163 - RNA, 1701 nt, Artificial Sequence; identical to SEQ ID NO: 194444
  derived and/or modified CDS sequence (opt5) from hemagglutinin__InfluenzaA__AEX35604

SEQ ID NO: 200164 - RNA, 1701 nt, Artificial Sequence
  derived and/or modified CDS sequence (opt5) from hemagglutinin__InfluenzaA__AEX35615
augaagaccaucauugcccugagcuacauccucugccugguguucgcucagaaacuucccggcaacgacaauuccacagccacgcugugucucgggcaccaugcggucccuaacggaaccauuguuaagacaaucaccaaugaucaaauugaggugacaaacgcuaccgaacuggugcagucuagcuccacaggcgagaucugcgacucuccgcaccagauccuugauggggaaaauuguacccugauugacgcccuccugggagauccccagugcgacggcuuucaaaacaaaaagugggaucuguucgucgagagaagcaaagccuauuccaauuguuacccuuaugacgugcccgauuacgcuucucuccggagccugguugccuccagcgggacgcuugaauuuaacaaugagucuuucaacuggaccggagugacacagaauggcaccuccagcgcuugcauccgcagaucuaacaauuccuuuuucagccggcugaacuggcucacacaucugaaguuuaaguauccugcccuuaaugucaccaugcccaacaacgagaaauucgacaagcuguacauuuggggcgugcaccauccugggacggauaaugaccagaucuuucucuaugcgcaggccucuggacgcauuacaguuuccaccaaaagaagccaacagacagugaucccgaacauuggcucccggccccgcgucagaaauaucccuucucggaucagcauuuacuggaccaucgugaagcccggggauauucugcugaucaacuccaccggaaaucucauugcuccucgcggcuacuucaaaaucagaagcgggaagucuuccaucaugcggagcgacgcccccauuggaaaguguaacucugaaugcaucacaccgaauggcagcauuccuaacgacaaacccuuucagaaugugaaccgcaucacguauggcgcuuguccuagauacgucaagcagaauacccugaaacuugccacagggaugcggaacguucccgagaagcaaacccgcggaauuuucggcgcgaucgccggguuuaucgaaaauggaugggagggcaugguggaugggugguauggauucagacaccagaacuccgagggcauuggccaggcugccgaccugaaaucuacacaagcugccaucgaucagauuaaugggaagcucaaccggcugaucggaaaaaccaacgaaaaguuccaccagauugagaaggaauuuagcgagguggaaggcagaauccaggaccuugagaaauacauugaggauacgaagaucgaccugugguccuauaaugccgaacuccuggucgcucuggagaaccaacauacaaucgaucucaccgacagcgaaaugaauaaacuguucgagaagaccaaaaagcagcuucgcgaaaacgcggaggauauggggaauggaugcuuuaagauuuaccacaaaugugacaacgccugcaucggcucuauucggaaugggacauaugaucaugacguguacagagacgaggcucugaacaaucgcuuccagaucaagggcguugaacucaaauccggauacaaggauuggauucuguggaucagcuuugccaucucuugcuuccuucuguguguggcccuccugggcuuuauuaugugggcuugccagaaagggaacauccgguguaauauuugcaucuga

SEQ ID NO: 200165 - RNA, 1701 nt, Artificial Sequence; identical to SEQ ID NO: 194506
  derived and/or modified CDS sequence (opt5) from hemagglutinin__InfluenzaA__AEX35626

SEQ ID NO: 200166 - RNA, 1701 nt, Artificial Sequence
  derived and/or modified CDS sequence (opt5) from hemagglutinin__InfluenzaA__AEX35637
augaagaccaucauugcccugagcuacauccucugccugguguucgcucagaaacuucccggcaacgacaauuccacagccacgcugugucucgggcaccaugcggucccuaacggaaccauuguuaagacaaucaccaaugaucaaauugaggugacaaacgcuaccgaacuggugcagucuagcuccacaggcgggaucugcgacucuccgcaccagauccuugauggagagaauuguacccugauugacgcccuccugggcgauccccagugcgacggguuucaaaacaaaaagugggaucuguucgucgaaagaagcaaagccuauuccaauuguuacccuuaugacgugcccgauuacgcuucucuccggagccugguugccuccagcggaacgcuugaguuuaacaaugaaucuuucaacuggaccggcgugacacagaauggcaccuccagcgcuugcaagcgcgggucugacaacuccuuuuucagcaagcugaauuggcucacacaucugaaauuuaaguauccugcccuuaacgucaccaugcccaauaacgagaaauucgauaagcuguacaucuggggagugcaccauccuggcacggacaacgaucagauuuuuccguaugcgcaggccucugggagaaucacaguuuccaccaaacggagccaacagacagugauucccaauaucggaucccgcccuagaguccggaacauucccucucgcaucagcaucuacuggaccauugugaagccuggcgacauccuccugauuaauuccaccgggaaccugaucgcucccagaggauacuucaagauucggagcggcaaaucuuccaucaugcgcagcgacgccccgaucggcaaguguaauucugagugcauuacaccuaacgggagcauccccaaugauaaaccuuuucagaacgugaauagaauuacguauggagcuuguccccgguacgucaagcagaacacccucaaacuggccacaggcaugcgcaauguucccgaaaagcaaaccagagggaucuucggagcgauugccggcuuuaucgagaacgggugggaaggaaugguggacggcugguauggcuuccggcaccaaaauuccgaggggaucggacaggcugccgaucuuaaaucuacacaggcugccauuaaccagaucaauggcaagcugaaccgccucauugggaagaccaacgagaaauuccaccagaucgaaaaggaguuuagcgaaguggagggacggauucaggaccuggaaaaauacgucgaggauacgaagaucgaccuuugguccuauaaugccgagcugcucguggcucuggaaaaccaacauacaauugaucugaccgacagcgagaugaauaaacucuucgaaagaaccaagaagcagcugagagagaacgcggaagauaugggcaaugggugcuuuaaaaucuaccacaagugugacaacgccugcaucggcucuauucgcaauggaacauaugaucaugacguuuaccgggacgaggcucuuaacaauagauuccagaucaaaggcguggagcugaaguccggguacaaagauuggauucucuggaucagcuuugccauuucuugcuuccugcuuugugucgcccugcucggauuuaucaugugggcuugccagaagggcaacauccgcuguaauauuugcaucuga

SEQ ID NO: 200167 - RNA, 1701 nt, Artificial Sequence; identical to SEQ ID NO: 194506
  derived and/or modified CDS sequence (opt5) from hemagglutinin__InfluenzaA__AEX35648

SEQ ID NO: 200168 - RNA, 1701 nt, Artificial Sequence
  derived and/or modified CDS sequence (opt5) from hemagglutinin__InfluenzaA__AEX36102
augaagaccaucauugcccugagcuacauccucugccugguguucgcucagaaacuucccggcaacaauaacuccacagccacgcugugucucgggcaccaugcggucccuaauggaaccauuguuaagacaaucaccaacgaccaaauugaggugacaaaugcuaccgaacuggugcagucuagcuccacaggcgagaucugcgauucuccgcaccagauccuugacggggaaaacuguacccugauugaugcccuccugggagacccccagugcgauggcuuucaaaauaaaaagugggaccuguucgucgagagaagcaaagccuauuccaacuguuacccuuaugaugugcccgacuacgcuucucuccggagccugguugccuccagcgggacgcuugaauuuaauaacgagucuuucaauuggaccggagugacacagaacggcaccuccagcgcuugcauccgcagaucuaauaacuccuuuuucagccggcugaauuggcucacacaucugaaguuuaaguauccugcccuuaacgucaccaugcccaacaaugagaaauucgauaagcuguacauuuggggcgugcaccauccugggacggacaacgaucagaucuuucucuaugcgcaggccucuggacgcauuacaguuuccaccaaaagaagccaacagacagugaucccgaauauuggcucccggccccgcgucagaaacaucccuucucggaucagcauuuacuggaccaucgugaagcccggggacauucugcugaucaauuccaccggaaaccucauugcuccucgcggcuacuucaaaaucagaagcgggaagucuuccaucaugcggagcgaugcccccauuggaaaguguaauucugaaugcaucacaccgaacggcagcauuccuaaugacaaacccuuucagaacgugaaucgcaucacguauggcgcuuguccuagauacgucaagcagaacacccugaaacuugccacagggaugcggaauguucccgagaagcaaacccgcggaauuuucggcgcgaucgccggguuuaucgaaaacggaugggagggcaugguggacgggugguauggauucagacaccaaaauuccgagggcauuggccaggcugccgaucugaaaucuacacaggcugccaucgaccagauuaacgggaagcucaaccggcugaucggaaaaaccaaugaaaaguuccaccagauugagaaggaauuuagcgagguggaaggcagaauccaggaucuugagaaauacgucgaggacacgaagauugaucugugguccuauaacgccgaacuccugguggcucuggagaaucaacauacaaucgaccucaccgauagcgaaaugaacaaacuguucgagaagaccaaaaagcagcuucgcgaaaaugcggaggacauggggaacggaugcuuuaagaucuaccacaaaugugauaaugccugcauuggcucuauccggaacgggacauaugaccaugauguuuacagagacgaggcucugaauaaccgcuuccagauuaagggcguggaacucaaauccggauacaaggacuggauccuguggauuagcuuugccaucucuugcuuccuucugugugucgcccuccugggcuuuaucaugugggcuugccagaaagggaauauucgguguaacaucugcauuuga

SEQ ID NO: 200169 - RNA, 1701 nt, Artificial Sequence; identical to SEQ ID NO: 193987
  derived and/or modified CDS sequence (opt5) from hemagglutinin__InfluenzaA__AEX36113
